United States Patent Application Publication US 2018/0305689 A1 - sequence listing, part 8

SEQ ID NO: 33099 - RNA, 19 nt, Artificial Sequence
  Description of Artificial Sequence: Synthetic oligonucleotide
  Antisense strand to SEQ ID NO: 33098
uagaaggcaauccucauaa

SEQ ID NO: 33100 - RNA, 19 nt, Artificial Sequence
  Description of Artificial Sequence: Synthetic oligonucleotide
  Sense strand starting at position 3558 of SEQ ID NO: 385
aguccaauuuaugaggauu

SEQ ID NO: 33101 - RNA, 19 nt, Artificial Sequence
  Description of Artificial Sequence: Synthetic oligonucleotide
  Antisense strand to SEQ ID NO: 33100
aauccucauaaauuggacu

SEQ ID NO: 33102 - RNA, 19 nt, Artificial Sequence
  Description of Artificial Sequence: Synthetic oligonucleotide
  Sense strand starting at position 3557 of SEQ ID NO: 385
uaguccaauuuaugaggau

SEQ ID NO: 33103 - RNA, 19 nt, Artificial Sequence
  Description of Artificial Sequence: Synthetic oligonucleotide
  Antisense strand to SEQ ID NO: 33102
auccucauaaauuggacua

SEQ ID NO: 33104 - RNA, 19 nt, Artificial Sequence
  Description of Artificial Sequence: Synthetic oligonucleotide
  Sense strand starting at position 3525 of SEQ ID NO: 385
agcacuguuggcugauaaa

SEQ ID NO: 33105 - RNA, 19 nt, Artificial Sequence
  Description of Artificial Sequence: Synthetic oligonucleotide
  Antisense strand to SEQ ID NO: 33104
uuuaucagccaacagugcu

SEQ ID NO: 33106 - RNA, 19 nt, Artificial Sequence
  Description of Artificial Sequence: Synthetic oligonucleotide
  Sense strand starting at position 3524 of SEQ ID NO: 385
uagcacuguuggcugauaa

SEQ ID NO: 33107 - RNA, 19 nt, Artificial Sequence
  Description of Artificial Sequence: Synthetic oligonucleotide
  Antisense strand to SEQ ID NO: 33106
uuaucagccaacagugcua

SEQ ID NO: 33108 - RNA, 19 nt, Artificial Sequence
  Description of Artificial Sequence: Synthetic oligonucleotide
  Sense strand starting at position 3523 of SEQ ID NO: 385
uuagcacuguuggcugaua

SEQ ID NO: 33109 - RNA, 19 nt, Artificial Sequence
  Description of Artificial Sequence: Synthetic oligonucleotide
  Antisense strand to SEQ ID NO: 33108
uaucagccaacagugcuaa

SEQ ID NO: 33110 - RNA, 19 nt, Artificial Sequence
  Description of Artificial Sequence: Synthetic oligonucleotide
  Sense strand starting at position 3475 of SEQ ID NO: 385
cugggaacuguguaaucuu

SEQ ID NO: 33111 - RNA, 19 nt, Artificial Sequence
  Description of Artificial Sequence: Synthetic oligonucleotide
  Antisense strand to SEQ ID NO: 33110
aagauuacacaguucccag

SEQ ID NO: 33112 - RNA, 19 nt, Artificial Sequence
  Description of Artificial Sequence: Synthetic oligonucleotide
  Sense strand starting at position 3466 of SEQ ID NO: 385
uugauuauucugggaacug

SEQ ID NO: 33113 - RNA, 19 nt, Artificial Sequence
  Description of Artificial Sequence: Synthetic oligonucleotide
  Antisense strand to SEQ ID NO: 33112
caguucccagaauaaucaa

SEQ ID NO: 33114 - RNA, 19 nt, Artificial Sequence
  Description of Artificial Sequence: Synthetic oligonucleotide
  Sense strand starting at position 3325 of SEQ ID NO: 385
guaacuaaacuugaauugu

SEQ ID NO: 33115 - RNA, 19 nt, Artificial Sequence
  Description of Artificial Sequence: Synthetic oligonucleotide
  Antisense strand to SEQ ID NO: 33114
acaauucaaguuuaguuac

SEQ ID NO: 33116 - RNA, 19 nt, Artificial Sequence
  Description of Artificial Sequence: Synthetic oligonucleotide
  Sense strand starting at position 3257 of SEQ ID NO: 385
cugggaagaaucuggcagu

SEQ ID NO: 33117 - RNA, 19 nt, Artificial Sequence
  Description of Artificial Sequence: Synthetic oligonucleotide
  Antisense strand to SEQ ID NO: 33116
acugccagauucuucccag

SEQ ID NO: 33118 - RNA, 19 nt, Artificial Sequence
  Description of Artificial Sequence: Synthetic oligonucleotide
  Sense strand starting at position 3249 of SEQ ID NO: 385
aguugaaacugggaagaau

SEQ ID NO: 33119 - RNA, 19 nt, Artificial Sequence
  Description of Artificial Sequence: Synthetic oligonucleotide
  Antisense strand to SEQ ID NO: 33118
auucuucccaguuucaacu

SEQ ID NO: 33120 - RNA, 19 nt, Artificial Sequence
  Description of Artificial Sequence: Synthetic oligonucleotide
  Sense strand starting at position 3210 of SEQ ID NO: 385
uggguaaucauccagcaag

SEQ ID NO: 33121 - RNA, 19 nt, Artificial Sequence
  Description of Artificial Sequence: Synthetic oligonucleotide
  Antisense strand to SEQ ID NO: 33120
cuugcuggaugauuaccca

SEQ ID NO: 33122 - RNA, 19 nt, Artificial Sequence
  Description of Artificial Sequence: Synthetic oligonucleotide
  Sense strand starting at position 3200 of SEQ ID NO: 385
cagaaauaucuggguaauc

SEQ ID NO: 33123 - RNA, 19 nt, Artificial Sequence
  Description of Artificial Sequence: Synthetic oligonucleotide
  Antisense strand to SEQ ID NO: 33122
gauuacccagauauuucug

SEQ ID NO: 33124 - RNA, 19 nt, Artificial Sequence
  Description of Artificial Sequence: Synthetic oligonucleotide
  Sense strand starting at position 3174 of SEQ ID NO: 385
cugggaguauuagcaacaa

SEQ ID NO: 33125 - RNA, 19 nt, Artificial Sequence
  Description of Artificial Sequence: Synthetic oligonucleotide
  Antisense strand to SEQ ID NO: 33124
uuguugcuaauacucccag

SEQ ID NO: 33126 - RNA, 19 nt, Artificial Sequence
  Description of Artificial Sequence: Synthetic oligonucleotide
  Sense strand starting at position 3166 of SEQ ID NO: 385
gaaguacacugggaguauu

SEQ ID NO: 33127 - RNA, 19 nt, Artificial Sequence
  Description of Artificial Sequence: Synthetic oligonucleotide
  Antisense strand to SEQ ID NO: 33126
aauacucccaguguacuuc

SEQ ID NO: 33128 - RNA, 19 nt, Artificial Sequence
  Description of Artificial Sequence: Synthetic oligonucleotide
  Sense strand starting at position 3165 of SEQ ID NO: 385
ugaaguacacugggaguau

SEQ ID NO: 33129 - RNA, 19 nt, Artificial Sequence
  Description of Artificial Sequence: Synthetic oligonucleotide
  Antisense strand to SEQ ID NO: 33128
auacucccaguguacuuca

SEQ ID NO: 33130 - RNA, 19 nt, Artificial Sequence
  Description of Artificial Sequence: Synthetic oligonucleotide
  Sense strand starting at position 3152 of SEQ ID NO: 385
ucuguacccuucuugaagu

SEQ ID NO: 33131 - RNA, 19 nt, Artificial Sequence
  Description of Artificial Sequence: Synthetic oligonucleotide
  Antisense strand to SEQ ID NO: 33130
acuucaagaaggguacaga

SEQ ID NO: 33132 - RNA, 19 nt, Artificial Sequence
  Description of Artificial Sequence: Synthetic oligonucleotide
  Sense strand starting at position 2911 of SEQ ID NO: 385
ggagggugucuagaauggu

SEQ ID NO: 33133 - RNA, 19 nt, Artificial Sequence
  Description of Artificial Sequence: Synthetic oligonucleotide
  Antisense strand to SEQ ID NO: 33132
accauucuagacacccucc

SEQ ID NO: 33134 - RNA, 19 nt, Artificial Sequence
  Description of Artificial Sequence: Synthetic oligonucleotide
  Sense strand starting at position 2855 of SEQ ID NO: 385
ugccgaaguucucucacua

SEQ ID NO: 33135 - RNA, 19 nt, Artificial Sequence
  Description of Artificial Sequence: Synthetic oligonucleotide
  Antisense strand to SEQ ID NO: 33134
uagugagagaacuucggca

SEQ ID NO: 33136 - RNA, 19 nt, Artificial Sequence
  Description of Artificial Sequence: Synthetic oligonucleotide
  Sense strand starting at position 2843 of SEQ ID NO: 385
ccauuucuugguugccgaa

SEQ ID NO: 33137 - RNA, 19 nt, Artificial Sequence
  Description of Artificial Sequence: Synthetic oligonucleotide
  Antisense strand to SEQ ID NO: 33136
uucggcaaccaagaaaugg

SEQ ID NO: 33138 - RNA, 19 nt, Artificial Sequence
  Description of Artificial Sequence: Synthetic oligonucleotide
  Sense strand starting at position 2842 of SEQ ID NO: 385
gccauuucuugguugccga

SEQ ID NO: 33139 - RNA, 19 nt, Artificial Sequence
  Description of Artificial Sequence: Synthetic oligonucleotide
  Antisense strand to SEQ ID NO: 33138
ucggcaaccaagaaauggc

SEQ ID NO: 33140 - RNA, 19 nt, Artificial Sequence
  Description of Artificial Sequence: Synthetic oligonucleotide
  Sense strand starting at position 2811 of SEQ ID NO: 385
aaauaagucgugugaagug

SEQ ID NO: 33141 - RNA, 19 nt, Artificial Sequence
  Description of Artificial Sequence: Synthetic oligonucleotide
  Antisense strand to SEQ ID NO: 33140
cacuucacacgacuuauuu

SEQ ID NO: 33142 - RNA, 19 nt, Artificial Sequence
  Description of Artificial Sequence: Synthetic oligonucleotide
  Sense strand starting at position 2755 of SEQ ID NO: 385
auaguccuauuauuagaga

SEQ ID NO: 33143 - RNA, 19 nt, Artificial Sequence
  Description of Artificial Sequence: Synthetic oligonucleotide
  Antisense strand to SEQ ID NO: 33142
ucucuaauaauaggacuau

SEQ ID NO: 33144 - RNA, 19 nt, Artificial Sequence
  Description of Artificial Sequence: Synthetic oligonucleotide
  Sense strand starting at position 2722 of SEQ ID NO: 385
agccuuaauuaaucaagga

SEQ ID NO: 33145 - RNA, 19 nt, Artificial Sequence
  Description of Artificial Sequence: Synthetic oligonucleotide
  Antisense strand to SEQ ID NO: 33144
uccuugauuaauuaaggcu

SEQ ID NO: 33146 - RNA, 19 nt, Artificial Sequence
  Description of Artificial Sequence: Synthetic oligonucleotide
  Sense strand starting at position 2692 of SEQ ID NO: 385
agacauggcauauguaaga

SEQ ID NO: 33147 - RNA, 19 nt, Artificial Sequence
  Description of Artificial Sequence: Synthetic oligonucleotide
  Antisense strand to SEQ ID NO: 33146
ucuuacauaugccaugucu

SEQ ID NO: 33148 - RNA, 19 nt, Artificial Sequence
  Description of Artificial Sequence: Synthetic oligonucleotide
  Sense strand starting at position 2658 of SEQ ID NO: 385
aagucuuguguagacugaa

SEQ ID NO: 33149 - RNA, 19 nt, Artificial Sequence
  Description of Artificial Sequence: Synthetic oligonucleotide
  Antisense strand to SEQ ID NO: 33148
uucagucuacacaagacuu

SEQ ID NO: 33150 - RNA, 19 nt, Artificial Sequence
  Description of Artificial Sequence: Synthetic oligonucleotide
  Sense strand starting at position 2306 of SEQ ID NO: 385
uuuguuauuuaagacgguu

SEQ ID NO: 33151 - RNA, 19 nt, Artificial Sequence
  Description of Artificial Sequence: Synthetic oligonucleotide
  Antisense strand to SEQ ID NO: 33150
aaccgucuuaaauaacaaa

SEQ ID NO: 33152 - RNA, 19 nt, Artificial Sequence
  Description of Artificial Sequence: Synthetic oligonucleotide
  Sense strand starting at position 148 of SEQ ID NO: 385
ucacguaggcaacauuauu

SEQ ID NO: 33153 - RNA, 19 nt, Artificial Sequence
  Description of Artificial Sequence: Synthetic oligonucleotide
  Antisense strand to SEQ ID NO: 33152
aauaauguugccuacguga

SEQ ID NO: 33154 - RNA, 19 nt, Artificial Sequence
  Description of Artificial Sequence: Synthetic oligonucleotide
  Sense strand starting at position 73 of SEQ ID NO: 385
gcaaccaacuagguuuaaa

SEQ ID NO: 33155 - RNA, 19 nt, Artificial Sequence
  Description of Artificial Sequence: Synthetic oligonucleotide
  Antisense strand to SEQ ID NO: 33154
uuuaaaccuaguugguugc

SEQ ID NO: 33156 - RNA, 19 nt, Artificial Sequence
  Description of Artificial Sequence: Synthetic oligonucleotide
  Sense strand starting at position 10 of SEQ ID NO: 385
ugaggaguuuguucaaagu

SEQ ID NO: 33157 - RNA, 19 nt, Artificial Sequence
  Description of Artificial Sequence: Synthetic oligonucleotide
  Antisense strand to SEQ ID NO: 33156
acuuugaacaaacuccuca

SEQ ID NO: 33158 - RNA, 19 nt, Artificial Sequence
  Description of Artificial Sequence: Synthetic oligonucleotide
  Sense strand starting at position 3967 of SEQ ID NO: 386
agacauggcauauguaaga

SEQ ID NO: 33159 - RNA, 19 nt, Artificial Sequence
  Description of Artificial Sequence: Synthetic oligonucleotide
  Antisense strand to SEQ ID NO: 33158
ucuuacauaugccaugucu

SEQ ID NO: 33160 - RNA, 19 nt, Artificial Sequence
  Description of Artificial Sequence: Synthetic oligonucleotide
  Sense strand starting at position 3933 of SEQ ID NO: 386
aagucuuguguagacugaa

SEQ ID NO: 33161 - RNA, 19 nt, Artificial Sequence
  Description of Artificial Sequence: Synthetic oligonucleotide
  Antisense strand to SEQ ID NO: 33160
uucagucuacacaagacuu

SEQ ID NO: 33162 - RNA, 19 nt, Artificial Sequence
  Description of Artificial Sequence: Synthetic oligonucleotide
  Sense strand starting at position 3581 of SEQ ID NO: 386
uuuguuauuuaagacgguu

SEQ ID NO: 33163 - RNA, 19 nt, Artificial Sequence
  Description of Artificial Sequence: Synthetic oligonucleotide
  Antisense strand to SEQ ID NO: 33162
aaccgucuuaaauaacaaa

SEQ ID NO: 33164 - RNA, 19 nt, Artificial Sequence
  Description of Artificial Sequence: Synthetic oligonucleotide
  Sense strand starting at position 1423 of SEQ ID NO: 386
ucacguaggcaacauuauu

SEQ ID NO: 33165 - RNA, 19 nt, Artificial Sequence
  Description of Artificial Sequence: Synthetic oligonucleotide
  Antisense strand to SEQ ID NO: 33164
aauaauguugccuacguga

SEQ ID NO: 33166 - RNA, 19 nt, Artificial Sequence
  Description of Artificial Sequence: Synthetic oligonucleotide
  Sense strand starting at position 1348 of SEQ ID NO: 386
gcaaccaacuagguuuaaa

SEQ ID NO: 33167 - RNA, 19 nt, Artificial Sequence
  Description of Artificial Sequence: Synthetic oligonucleotide
  Antisense strand to SEQ ID NO: 33166
uuuaaaccuaguugguugc

SEQ ID NO: 33168 - RNA, 19 nt, Artificial Sequence
  Description of Artificial Sequence: Synthetic oligonucleotide
  Sense strand starting at position 1285 of SEQ ID NO: 386
ugaggaguuuguucaaagu

SEQ ID NO: 33169 - RNA, 19 nt, Artificial Sequence
  Description of Artificial Sequence: Synthetic oligonucleotide
  Antisense strand to SEQ ID NO: 33168
acuuugaacaaacuccuca

SEQ ID NO: 33170 - RNA, 19 nt, Artificial Sequence
  Description of Artificial Sequence: Synthetic oligonucleotide
  Sense strand starting at position 1274 of SEQ ID NO: 386
guuauuggauuugaggagu

SEQ ID NO: 33171 - RNA, 19 nt, Artificial Sequence
  Description of Artificial Sequence: Synthetic oligonucleotide
  Antisense strand to SEQ ID NO: 33170
acuccucaaauccaauaac

SEQ ID NO: 33172 - RNA, 19 nt, Artificial Sequence
  Description of Artificial Sequence: Synthetic oligonucleotide
  Sense strand starting at position 1267 of SEQ ID NO: 386
caaggauguuauuggauuu

SEQ ID NO: 33173 - RNA, 19 nt, Artificial Sequence
  Description of Artificial Sequence: Synthetic oligonucleotide
  Antisense strand to SEQ ID NO: 33172
aaauccaauaacauccuug

SEQ ID NO: 33174 - RNA, 19 nt, Artificial Sequence
  Description of Artificial Sequence: Synthetic oligonucleotide
  Sense strand starting at position 1261 of SEQ ID NO: 386
ugauaucaaggauguuauu

SEQ ID NO: 33175 - RNA, 19 nt, Artificial Sequence
  Description of Artificial Sequence: Synthetic oligonucleotide
  Antisense strand to SEQ ID NO: 33174
aauaacauccuugauauca

SEQ ID NO: 33176 - RNA, 19 nt, Artificial Sequence
  Description of Artificial Sequence: Synthetic oligonucleotide
  Sense strand starting at position 1258 of SEQ ID NO: 386
acuugauaucaaggauguu

SEQ ID NO: 33177 - RNA, 19 nt, Artificial Sequence
  Description of Artificial Sequence: Synthetic oligonucleotide
  Antisense strand to SEQ ID NO: 33176
aacauccuugauaucaagu

SEQ ID NO: 33178 - RNA, 19 nt, Artificial Sequence
  Description of Artificial Sequence: Synthetic oligonucleotide
  Sense strand starting at position 1255 of SEQ ID NO: 386
cccacuugauaucaaggau

SEQ ID NO: 33179 - RNA, 19 nt, Artificial Sequence
  Description of Artificial Sequence: Synthetic oligonucleotide
  Antisense strand to SEQ ID NO: 33178
auccuugauaucaaguggg

SEQ ID NO: 33180 - RNA, 19 nt, Artificial Sequence
  Description of Artificial Sequence: Synthetic oligonucleotide
  Sense strand starting at position 1032 of SEQ ID NO: 386
ccucaucaguagucaagaa

SEQ ID NO: 33181 - RNA, 19 nt, Artificial Sequence
  Description of Artificial Sequence: Synthetic oligonucleotide
  Antisense strand to SEQ ID NO: 33180
uucuugacuacugaugagg

SEQ ID NO: 33182 - RNA, 19 nt, Artificial Sequence
  Description of Artificial Sequence: Synthetic oligonucleotide
  Sense strand starting at position 1007 of SEQ ID NO: 386
cuugaagcauuugaaggaa

SEQ ID NO: 33183 - RNA, 19 nt, Artificial Sequence
  Description of Artificial Sequence: Synthetic oligonucleotide
  Antisense strand to SEQ ID NO: 33182
uuccuucaaaugcuucaag

SEQ ID NO: 33184 - RNA, 19 nt, Artificial Sequence
  Description of Artificial Sequence: Synthetic oligonucleotide
  Sense strand starting at position 985 of SEQ ID NO: 386
gaggaaaggucguuuguca

SEQ ID NO: 33185 - RNA, 19 nt, Artificial Sequence
  Description of Artificial Sequence: Synthetic oligonucleotide
  Antisense strand to SEQ ID NO: 33184
ugacaaacgaccuuuccuc

SEQ ID NO: 33186 - RNA, 19 nt, Artificial Sequence
  Description of Artificial Sequence: Synthetic oligonucleotide
  Sense strand starting at position 912 of SEQ ID NO: 386
gaaugaguggaugguauua

SEQ ID NO: 33187 - RNA, 19 nt, Artificial Sequence
  Description of Artificial Sequence: Synthetic oligonucleotide
  Antisense strand to SEQ ID NO: 33186
uaauaccauccacucauuc

SEQ ID NO: 33188 - RNA, 19 nt, Artificial Sequence
  Description of Artificial Sequence: Synthetic oligonucleotide
  Sense strand starting at position 862 of SEQ ID NO: 386
gcagcugagcucugauuag

SEQ ID NO: 33189 - RNA, 19 nt, Artificial Sequence
  Description of Artificial Sequence: Synthetic oligonucleotide
  Antisense strand to SEQ ID NO: 33188
cuaaucagagcucagcugc

SEQ ID NO: 33190 - RNA, 19 nt, Artificial Sequence
  Description of Artificial Sequence: Synthetic oligonucleotide
  Sense strand starting at position 789 of SEQ ID NO: 386
ucaauuguugccuguaaau

SEQ ID NO: 33191 - RNA, 19 nt, Artificial Sequence
  Description of Artificial Sequence: Synthetic oligonucleotide
  Antisense strand to SEQ ID NO: 33190
auuuacaggcaacaauuga

SEQ ID NO: 33192 - RNA, 19 nt, Artificial Sequence
  Description of Artificial Sequence: Synthetic oligonucleotide
  Sense strand starting at position 788 of SEQ ID NO: 386
gucaauuguugccuguaaa

SEQ ID NO: 33193 - RNA, 19 nt, Artificial Sequence
  Description of Artificial Sequence: Synthetic oligonucleotide
  Antisense strand to SEQ ID NO: 33192
uuuacaggcaacaauugac

SEQ ID NO: 33194 - RNA, 19 nt, Artificial Sequence
  Description of Artificial Sequence: Synthetic oligonucleotide
  Sense strand starting at position 786 of SEQ ID NO: 386
gugucaauuguugccugua

SEQ ID NO: 33195 - RNA, 19 nt, Artificial Sequence
  Description of Artificial Sequence: Synthetic oligonucleotide
  Antisense strand to SEQ ID NO: 33194
uacaggcaacaauugacac

SEQ ID NO: 33196 - RNA, 19 nt, Artificial Sequence
  Description of Artificial Sequence: Synthetic oligonucleotide
  Sense strand starting at position 654 of SEQ ID NO: 386
ucagaacucugauaaagca

SEQ ID NO: 33197 - RNA, 19 nt, Artificial Sequence
  Description of Artificial Sequence: Synthetic oligonucleotide
  Antisense strand to SEQ ID NO: 33196
ugcuuuaucagaguucuga

SEQ ID NO: 33198 - RNA, 19 nt, Artificial Sequence
  Description of Artificial Sequence: Synthetic oligonucleotide
  Sense strand starting at position 520 of SEQ ID NO: 386
guauaucucuuggcacuua

SEQ ID NO: 33199 - RNA, 19 nt, Artificial Sequence
  Description of Artificial Sequence: Synthetic oligonucleotide
  Antisense strand to SEQ ID NO: 33198
uaagugccaagagauauac

SEQ ID NO: 33200 - RNA, 19 nt, Artificial Sequence
  Description of Artificial Sequence: Synthetic oligonucleotide
  Sense strand starting at position 519 of SEQ ID NO: 386
aguauaucucuuggcacuu

SEQ ID NO: 33201 - RNA, 19 nt, Artificial Sequence
  Description of Artificial Sequence: Synthetic oligonucleotide
  Antisense strand to SEQ ID NO: 33200
aagugccaagagauauacu

SEQ ID NO: 33202 - RNA, 19 nt, Artificial Sequence
  Description of Artificial Sequence: Synthetic oligonucleotide
  Sense strand starting at position 502 of SEQ ID NO: 386
ggacuuuguuuguuaauag

SEQ ID NO: 33203 - RNA, 19 nt, Artificial Sequence
  Description of Artificial Sequence: Synthetic oligonucleotide
  Antisense strand to SEQ ID NO: 33202
cuauuaacaaacaaagucc

SEQ ID NO: 33204 - RNA, 19 nt, Artificial Sequence
  Description of Artificial Sequence: Synthetic oligonucleotide
  Sense strand starting at position 501 of SEQ ID NO: 386
uggacuuuguuuguuaaua

SEQ ID NO: 33205 - RNA, 19 nt, Artificial Sequence
  Description of Artificial Sequence: Synthetic oligonucleotide
  Antisense strand to SEQ ID NO: 33204
uauuaacaaacaaagucca

SEQ ID NO: 33206 - RNA, 19 nt, Artificial Sequence
  Description of Artificial Sequence: Synthetic oligonucleotide
  Sense strand starting at position 500 of SEQ ID NO: 386
auggacuuuguuuguuaau

SEQ ID NO: 33207 - RNA, 19 nt, Artificial Sequence
  Description of Artificial Sequence: Synthetic oligonucleotide
  Antisense strand to SEQ ID NO: 33206
auuaacaaacaaaguccau

SEQ ID NO: 33208 - RNA, 19 nt, Artificial Sequence
  Description of Artificial Sequence: Synthetic oligonucleotide
  Sense strand starting at position 499 of SEQ ID NO: 386
uauggacuuuguuuguuaa

SEQ ID NO: 33209 - RNA, 19 nt, Artificial Sequence
  Description of Artificial Sequence: Synthetic oligonucleotide
  Antisense strand to SEQ ID NO: 33208
uuaacaaacaaaguccaua

SEQ ID NO: 33210 - RNA, 19 nt, Artificial Sequence
  Description of Artificial Sequence: Synthetic oligonucleotide
  Sense strand starting at position 423 of SEQ ID NO: 386
aguaucugugcauaaacuu

SEQ ID NO: 33211 - RNA, 19 nt, Artificial Sequence
  Description of Artificial Sequence: Synthetic oligonucleotide
  Antisense strand to SEQ ID NO: 33210
aaguuuaugcacagauacu

SEQ ID NO: 33212 - RNA, 19 nt, Artificial Sequence
  Description of Artificial Sequence: Synthetic oligonucleotide
  Sense strand starting at position 421 of SEQ ID NO: 386
uuaguaucugugcauaaac

SEQ ID NO: 33213 - RNA, 19 nt, Artificial Sequence
  Description of Artificial Sequence: Synthetic oligonucleotide
  Antisense strand to SEQ ID NO: 33212
guuuaugcacagauacuaa

SEQ ID NO: 33214 - RNA, 19 nt, Artificial Sequence
  Description of Artificial Sequence: Synthetic oligonucleotide
  Sense strand starting at position 420 of SEQ ID NO: 386
uuuaguaucugugcauaaa

SEQ ID NO: 33215 - RNA, 19 nt, Artificial Sequence
  Description of Artificial Sequence: Synthetic oligonucleotide
  Antisense strand to SEQ ID NO: 33214
uuuaugcacagauacuaaa

SEQ ID NO: 33216 - RNA, 19 nt, Artificial Sequence
  Description of Artificial Sequence: Synthetic oligonucleotide
  Sense strand starting at position 320 of SEQ ID NO: 386
uuuguuacuuugcuaucau

SEQ ID NO: 33217 - RNA, 19 nt, Artificial Sequence
  Description of Artificial Sequence: Synthetic oligonucleotide
  Antisense strand to SEQ ID NO: 33216
augauagcaaaguaacaaa

SEQ ID NO: 33218 - RNA, 19 nt, Artificial Sequence
  Description of Artificial Sequence: Synthetic oligonucleotide
  Sense strand starting at position 319 of SEQ ID NO: 386
auuuguuacuuugcuauca

SEQ ID NO: 33219 - RNA, 19 nt, Artificial Sequence
  Description of Artificial Sequence: Synthetic oligonucleotide
  Antisense strand to SEQ ID NO: 33218
ugauagcaaaguaacaaau

SEQ ID NO: 33220 - RNA, 19 nt, Artificial Sequence
  Description of Artificial Sequence: Synthetic oligonucleotide
  Sense strand starting at position 234 of SEQ ID NO: 386
ucaugaacauggguuaagu

SEQ ID NO: 33221 - RNA, 19 nt, Artificial Sequence
  Description of Artificial Sequence: Synthetic oligonucleotide
  Antisense strand to SEQ ID NO: 33220
acuuaacccauguucauga

SEQ ID NO: 33222 - RNA, 19 nt, Artificial Sequence
  Description of Artificial Sequence: Synthetic oligonucleotide
  Sense strand starting at position 232 of SEQ ID NO: 386
uaucaugaacauggguuaa

SEQ ID NO: 33223 - RNA, 19 nt, Artificial Sequence
  Description of Artificial Sequence: Synthetic oligonucleotide
  Antisense strand to SEQ ID NO: 33222
uuaacccauguucaugaua

SEQ ID NO: 33224 - RNA, 19 nt, Artificial Sequence
  Description of Artificial Sequence: Synthetic oligonucleotide
  Sense strand starting at position 196 of SEQ ID NO: 386
ccagucuuccuguucguca

SEQ ID NO: 33225 - RNA, 19 nt, Artificial Sequence
  Description of Artificial Sequence: Synthetic oligonucleotide
  Antisense strand to SEQ ID NO: 33224
ugacgaacaggaagacugg

SEQ ID NO: 33226 - RNA, 19 nt, Artificial Sequence
  Description of Artificial Sequence: Synthetic oligonucleotide
  Sense strand starting at position 105 of SEQ ID NO: 386
guaucuugauaaguauguu

SEQ ID NO: 33227 - RNA, 19 nt, Artificial Sequence
  Description of Artificial Sequence: Synthetic oligonucleotide
  Antisense strand to SEQ ID NO: 33226
aacauacuuaucaagauac

SEQ ID NO: 33228 - RNA, 19 nt, Artificial Sequence
  Description of Artificial Sequence: Synthetic oligonucleotide
  Sense strand starting at position 97 of SEQ ID NO: 386
ggguguuaguaucuugaua

SEQ ID NO: 33229 - RNA, 19 nt, Artificial Sequence
  Description of Artificial Sequence: Synthetic oligonucleotide
  Antisense strand to SEQ ID NO: 33228
uaucaagauacuaacaccc

SEQ ID NO: 33230 - RNA, 19 nt, Artificial Sequence
  Description of Artificial Sequence: Synthetic oligonucleotide
  Sense strand starting at position 88 of SEQ ID NO: 386
acaauaaguggguguuagu

SEQ ID NO: 33231 - RNA, 19 nt, Artificial Sequence
  Description of Artificial Sequence: Synthetic oligonucleotide
  Antisense strand to SEQ ID NO: 33230
acuaacacccacuuauugu

SEQ ID NO: 33232 - RNA, 19 nt, Artificial Sequence
  Description of Artificial Sequence: Synthetic oligonucleotide
  Sense strand starting at position 86 of SEQ ID NO: 386
ccacaauaaguggguguua

SEQ ID NO: 33233 - RNA, 19 nt, Artificial Sequence
  Description of Artificial Sequence: Synthetic oligonucleotide
  Antisense strand to SEQ ID NO: 33232
uaacacccacuuauugugg

SEQ ID NO: 33234 - RNA, 19 nt, Artificial Sequence
  Description of Artificial Sequence: Synthetic oligonucleotide
  Sense strand starting at position 59 of SEQ ID NO: 386
uguuucguuauauguacaa

SEQ ID NO: 33235 - RNA, 19 nt, Artificial Sequence
  Description of Artificial Sequence: Synthetic oligonucleotide
  Antisense strand to SEQ ID NO: 33234
uuguacauauaacgaaaca

SEQ ID NO: 33236 - RNA, 19 nt, Artificial Sequence
  Description of Artificial Sequence: Synthetic oligonucleotide
  Sense strand starting at position 4 of SEQ ID NO: 386
gagucaggauuauacauau

SEQ ID NO: 33237 - RNA, 19 nt, Artificial Sequence
  Description of Artificial Sequence: Synthetic oligonucleotide
  Antisense strand to SEQ ID NO: 33236
auauguauaauccugacuc

SEQ ID NO: 33238 - RNA, 19 nt, Artificial Sequence
  Description of Artificial Sequence: Synthetic oligonucleotide
  Sense strand starting at position 3939 of SEQ ID NO: 387
ggccuuacuuuccuagaua

SEQ ID NO: 33239 - RNA, 19 nt, Artificial Sequence
  Description of Artificial Sequence: Synthetic oligonucleotide
  Antisense strand to SEQ ID NO: 33238
uaucuaggaaaguaaggcc

SEQ ID NO: 33240 - RNA, 19 nt, Artificial Sequence
  Description of Artificial Sequence: Synthetic oligonucleotide
  Sense strand starting at position 3938 of SEQ ID NO: 387
gggccuuacuuuccuagau

SEQ ID NO: 33241 - RNA, 19 nt, Artificial Sequence
  Description of Artificial Sequence: Synthetic oligonucleotide
  Antisense strand to SEQ ID NO: 33240
aucuaggaaaguaaggccc

SEQ ID NO: 33242 - RNA, 19 nt, Artificial Sequence
  Description of Artificial Sequence: Synthetic oligonucleotide
  Sense strand starting at position 3190 of SEQ ID NO: 387
gcuucaucugguggaugaa

SEQ ID NO: 33243 - RNA, 19 nt, Artificial Sequence
  Description of Artificial Sequence: Synthetic oligonucleotide
  Antisense strand to SEQ ID NO: 33242
uucauccaccagaugaagc

SEQ ID NO: 33244 - RNA, 19 nt, Artificial Sequence
  Description of Artificial Sequence: Synthetic oligonucleotide
  Sense strand starting at position 2744 of SEQ ID NO: 387
ccaggagacguuugacaac

SEQ ID NO: 33245 - RNA, 19 nt, Artificial Sequence
  Description of Artificial Sequence: Synthetic oligonucleotide
  Antisense strand to SEQ ID NO: 33244
guugucaaacgucuccugg

SEQ ID NO: 33246 - RNA, 19 nt, Artificial Sequence
  Description of Artificial Sequence: Synthetic oligonucleotide
  Sense strand starting at position 2224 of SEQ ID NO: 387
uuguguguuagggaaggaa

SEQ ID NO: 33247 - RNA, 19 nt, Artificial Sequence
  Description of Artificial Sequence: Synthetic oligonucleotide
  Antisense strand to SEQ ID NO: 33246
uuccuucccuaacacacaa

SEQ ID NO: 33248 - RNA, 19 nt, Artificial Sequence
  Description of Artificial Sequence: Synthetic oligonucleotide
  Sense strand starting at position 2211 of SEQ ID NO: 387
ugaagagauuauguugugu

SEQ ID NO: 33249 - RNA, 19 nt, Artificial Sequence
  Description of Artificial Sequence: Synthetic oligonucleotide
  Antisense strand to SEQ ID NO: 33248
acacaacauaaucucuuca

SEQ ID NO: 33250 - RNA, 19 nt, Artificial Sequence
  Description of Artificial Sequence: Synthetic oligonucleotide
  Sense strand starting at position 2186 of SEQ ID NO: 387
auuggaauauggguuccau

SEQ ID NO: 33251 - RNA, 19 nt, Artificial Sequence
  Description of Artificial Sequence: Synthetic oligonucleotide
  Antisense strand to SEQ ID NO: 33250
auggaacccauauuccaau

SEQ ID NO: 33252 - RNA, 19 nt, Artificial Sequence
  Description of Artificial Sequence: Synthetic oligonucleotide
  Sense strand starting at position 2100 of SEQ ID NO: 387
aagagcuguguccaaauau

SEQ ID NO: 33253 - RNA, 19 nt, Artificial Sequence
  Description of Artificial Sequence: Synthetic oligonucleotide
  Antisense strand to SEQ ID NO: 33252
auauuuggacacagcucuu

SEQ ID NO: 33254 - RNA, 19 nt, Artificial Sequence
  Description of Artificial Sequence: Synthetic oligonucleotide
  Sense strand starting at position 2033 of SEQ ID NO: 387
cggacuuaucagugagaga

SEQ ID NO: 33255 - RNA, 19 nt, Artificial Sequence
  Description of Artificial Sequence: Synthetic oligonucleotide
  Antisense strand to SEQ ID NO: 33254
ucucucacugauaaguccg

SEQ ID NO: 33256 - RNA, 19 nt, Artificial Sequence
  Description of Artificial Sequence: Synthetic oligonucleotide
  Sense strand starting at position 2032 of SEQ ID NO: 387
gcggacuuaucagugagag

SEQ ID NO: 33257 - RNA, 19 nt, Artificial Sequence
  Description of Artificial Sequence: Synthetic oligonucleotide
  Antisense strand to SEQ ID NO: 33256
cucucacugauaaguccgc

SEQ ID NO: 33258 - RNA, 19 nt, Artificial Sequence
  Description of Artificial Sequence: Synthetic oligonucleotide
  Sense strand starting at position 1810 of SEQ ID NO: 387
uguucuuaugauuauaggu

SEQ ID NO: 33259 - RNA, 19 nt, Artificial Sequence
  Description of Artificial Sequence: Synthetic oligonucleotide
  Antisense strand to SEQ ID NO: 33258
accuauaaucauaagaaca

SEQ ID NO: 33260 - RNA, 19 nt, Artificial Sequence
  Description of Artificial Sequence: Synthetic oligonucleotide
  Sense strand starting at position 1398 of SEQ ID NO: 387
ccggaaauauaucuuauug

SEQ ID NO: 33261 - RNA, 19 nt, Artificial Sequence
  Description of Artificial Sequence: Synthetic oligonucleotide
  Antisense strand to SEQ ID NO: 33260
caauaagauauauuuccgg

SEQ ID NO: 33262 - RNA, 19 nt, Artificial Sequence
  Description of Artificial Sequence: Synthetic oligonucleotide
  Sense strand starting at position 971 of SEQ ID NO: 387
gccucugauugguuaauag

SEQ ID NO: 33263 - RNA, 19 nt, Artificial Sequence
  Description of Artificial Sequence: Synthetic oligonucleotide
  Antisense strand to SEQ ID NO: 33262
cuauuaaccaaucagaggc

SEQ ID NO: 33264 - RNA, 19 nt, Artificial Sequence
  Description of Artificial Sequence: Synthetic oligonucleotide
  Sense strand starting at position 970 of SEQ ID NO: 387
agccucugauugguuaaua

SEQ ID NO: 33265 - RNA, 19 nt, Artificial Sequence
  Description of Artificial Sequence: Synthetic oligonucleotide
  Antisense strand to SEQ ID NO: 33264
uauuaaccaaucagaggcu

SEQ ID NO: 33266 - RNA, 19 nt, Artificial Sequence
  Description of Artificial Sequence: Synthetic oligonucleotide
  Sense strand starting at position 968 of SEQ ID NO: 387
caagccucugauugguuaa

SEQ ID NO: 33267 - RNA, 19 nt, Artificial Sequence
  Description of Artificial Sequence: Synthetic oligonucleotide
  Antisense strand to SEQ ID NO: 33266
uuaaccaaucagaggcuug

SEQ ID NO: 33268 - RNA, 19 nt, Artificial Sequence
  Description of Artificial Sequence: Synthetic oligonucleotide
  Sense strand starting at position 967 of SEQ ID NO: 387
acaagccucugauugguua

SEQ ID NO: 33269 - RNA, 19 nt, Artificial Sequence
  Description of Artificial Sequence: Synthetic oligonucleotide
  Antisense strand to SEQ ID NO: 33268
uaaccaaucagaggcuugu

SEQ ID NO: 33270 - RNA, 19 nt, Artificial Sequence
  Description of Artificial Sequence: Synthetic oligonucleotide
  Sense strand starting at position 952 of SEQ ID NO: 387
augguacauuuguaaacaa

SEQ ID NO: 33271 - RNA, 19 nt, Artificial Sequence
  Description of Artificial Sequence: Synthetic oligonucleotide
  Antisense strand to SEQ ID NO: 33270
uuguuuacaaauguaccau

SEQ ID NO: 33272 - RNA, 19 nt, Artificial Sequence
  Description of Artificial Sequence: Synthetic oligonucleotide
  Sense strand starting at position 939 of SEQ ID NO: 387
gguuccuagacugauggua

SEQ ID NO: 33273 - RNA, 19 nt, Artificial Sequence
  Description of Artificial Sequence: Synthetic oligonucleotide
  Antisense strand to SEQ ID NO: 33272
uaccaucagucuaggaacc

SEQ ID NO: 33274 - RNA, 19 nt, Artificial Sequence
  Description of Artificial Sequence: Synthetic oligonucleotide
  Sense strand starting at position 932 of SEQ ID NO: 387
cuugaaugguuccuagacu

SEQ ID NO: 33275 - RNA, 19 nt, Artificial Sequence
  Description of Artificial Sequence: Synthetic oligonucleotide
  Antisense strand to SEQ ID NO: 33274
agucuaggaaccauucaag

SEQ ID NO: 33276 - RNA, 19 nt, Artificial Sequence
  Description of Artificial Sequence: Synthetic oligonucleotide
  Sense strand starting at position 881 of SEQ ID NO: 387
gcaaauagcacugauuggu

SEQ ID NO: 33277 - RNA, 19 nt, Artificial Sequence
  Description of Artificial Sequence: Synthetic oligonucleotide
  Antisense strand to SEQ ID NO: 33276
accaaucagugcuauuugc

SEQ ID NO: 33278 - RNA, 19 nt, Artificial Sequence
  Description of Artificial Sequence: Synthetic oligonucleotide
  Sense strand starting at position 870 of SEQ ID NO: 387
gauuaaucugcgcaaauag

SEQ ID NO: 33279 - RNA, 19 nt, Artificial Sequence
  Description of Artificial Sequence: Synthetic oligonucleotide
  Antisense strand to SEQ ID NO: 33278
cuauuugcgcagauuaauc

SEQ ID NO: 33280 - RNA, 19 nt, Artificial Sequence
  Description of Artificial Sequence: Synthetic oligonucleotide
  Sense strand starting at position 869 of SEQ ID NO: 387
agauuaaucugcgcaaaua

SEQ ID NO: 33281 - RNA, 19 nt, Artificial Sequence
  Description of Artificial Sequence: Synthetic oligonucleotide
  Antisense strand to SEQ ID NO: 33280
uauuugcgcagauuaaucu

SEQ ID NO: 33282 - RNA, 19 nt, Artificial Sequence
  Description of Artificial Sequence: Synthetic oligonucleotide
  Sense strand starting at position 854 of SEQ ID NO: 387
uuugccugugguuaaagau

SEQ ID NO: 33283 - RNA, 19 nt, Artificial Sequence
  Description of Artificial Sequence: Synthetic oligonucleotide
  Antisense strand to SEQ ID NO: 33282
aucuuuaaccacaggcaaa

SEQ ID NO: 33284 - RNA, 19 nt, Artificial Sequence
  Description of Artificial Sequence: Synthetic oligonucleotide
  Sense strand starting at position 850 of SEQ ID NO: 387
uugauuugccugugguuaa

SEQ ID NO: 33285 - RNA, 19 nt, Artificial Sequence
  Description of Artificial Sequence: Synthetic oligonucleotide
  Antisense strand to SEQ ID NO: 33284
uuaaccacaggcaaaucaa

SEQ ID NO: 33286 - RNA, 19 nt, Artificial Sequence
  Description of Artificial Sequence: Synthetic oligonucleotide
  Sense strand starting at position 848 of SEQ ID NO: 387
cauugauuugccugugguu

SEQ ID NO: 33287 - RNA, 19 nt, Artificial Sequence
  Description of Artificial Sequence: Synthetic oligonucleotide
  Antisense strand to SEQ ID NO: 33286
aaccacaggcaaaucaaug

SEQ ID NO: 33288 - RNA, 19 nt, Artificial Sequence
  Description of Artificial Sequence: Synthetic oligonucleotide
  Sense strand starting at position 745 of SEQ ID NO: 387
cauuaacacgucugaguaa

SEQ ID NO: 33289 - RNA, 19 nt, Artificial Sequence
  Description of Artificial Sequence: Synthetic oligonucleotide
  Antisense strand to SEQ ID NO: 33288
uuacucagacguguuaaug

SEQ ID NO: 33290 - RNA, 19 nt, Artificial Sequence
  Description of Artificial Sequence: Synthetic oligonucleotide
  Sense strand starting at position 579 of SEQ ID NO: 387
guuuacauagucuaagaua

SEQ ID NO: 33291 - RNA, 19 nt, Artificial Sequence
  Description of Artificial Sequence: Synthetic oligonucleotide
  Antisense strand to SEQ ID NO: 33290
uaucuuagacuauguaaac

SEQ ID NO: 33292 - RNA, 19 nt, Artificial Sequence
  Description of Artificial Sequence: Synthetic oligonucleotide
  Sense strand starting at position 577 of SEQ ID NO: 387
uuguuuacauagucuaaga

SEQ ID NO: 33293 - RNA, 19 nt, Artificial Sequence
  Description of Artificial Sequence: Synthetic oligonucleotide
  Antisense strand to SEQ ID NO: 33292
ucuuagacuauguaaacaa

SEQ ID NO: 33294 - RNA, 19 nt, Artificial Sequence
  Description of Artificial Sequence: Synthetic oligonucleotide
  Sense strand starting at position 514 of SEQ ID NO: 387
cggguuuguagauaagaua

SEQ ID NO: 33295 - RNA, 19 nt, Artificial Sequence
  Description of Artificial Sequence: Synthetic oligonucleotide
  Antisense strand to SEQ ID NO: 33294
uaucuuaucuacaaacccg

SEQ ID NO: 33296 - RNA, 19 nt, Artificial Sequence
  Description of Artificial Sequence: Synthetic oligonucleotide
  Sense strand starting at position 509 of SEQ ID NO: 387
agaaacggguuuguagaua

SEQ ID NO: 33297 - RNA, 19 nt, Artificial Sequence
  Description of Artificial Sequence: Synthetic oligonucleotide
  Antisense strand to SEQ ID NO: 33296
uaucuacaaacccguuucu

SEQ ID NO: 33298 - RNA, 19 nt, Artificial Sequence
  Description of Artificial Sequence: Synthetic oligonucleotide
  Sense strand starting at position 508 of SEQ ID NO: 387
aagaaacggguuuguagau

SEQ ID NO: 33299 - RNA, 19 nt, Artificial Sequence
  Description of Artificial Sequence: Synthetic oligonucleotide
  Antisense strand to SEQ ID NO: 33298
aucuacaaacccguuucuu

SEQ ID NO: 33300 - RNA, 19 nt, Artificial Sequence
  Description of Artificial Sequence: Synthetic oligonucleotide
  Sense strand starting at position 502 of SEQ ID NO: 387
gcuuuaaagaaacggguuu

SEQ ID NO: 33301 - RNA, 19 nt, Artificial Sequence
  Description of Artificial Sequence: Synthetic oligonucleotide
  Antisense strand to SEQ ID NO: 33300
aaacccguuucuuuaaagc

SEQ ID NO: 33302 - RNA, 19 nt, Artificial Sequence
  Description of Artificial Sequence: Synthetic oligonucleotide
  Sense strand starting at position 494 of SEQ ID NO: 387
acugcucugcuuuaaagaa

SEQ ID NO: 33303 - RNA, 19 nt, Artificial Sequence
  Description of Artificial Sequence: Synthetic oligonucleotide
  Antisense strand to SEQ ID NO: 33302
uucuuuaaagcagagcagu

SEQ ID NO: 33304 - RNA, 19 nt, Artificial Sequence
  Description of Artificial Sequence: Synthetic oligonucleotide
  Sense strand starting at position 462 of SEQ ID NO: 387
aacucagauugcuuuguga

SEQ ID NO: 33305 - RNA, 19 nt, Artificial Sequence
  Description of Artificial Sequence: Synthetic oligonucleotide
  Antisense strand to SEQ ID NO: 33304
ucacaaagcaaucugaguu

SEQ ID NO: 33306 - RNA, 19 nt, Artificial Sequence
  Description of Artificial Sequence: Synthetic oligonucleotide
  Sense strand starting at position 444 of SEQ ID NO: 387
aagauuggaugggcucaua

SEQ ID NO: 33307 - RNA, 19 nt, Artificial Sequence
  Description of Artificial Sequence: Synthetic oligonucleotide
  Antisense strand to SEQ ID NO: 33306
uaugagcccauccaaucuu

SEQ ID NO: 33308 - RNA, 19 nt, Artificial Sequence
  Description of Artificial Sequence: Synthetic oligonucleotide
  Sense strand starting at position 442 of SEQ ID NO: 387
gaaagauuggaugggcuca

SEQ ID NO: 33309 - RNA, 19 nt, Artificial Sequence
  Description of Artificial Sequence: Synthetic oligonucleotide
  Antisense strand to SEQ ID NO: 33308
ugagcccauccaaucuuuc

SEQ ID NO: 33310 - RNA, 19 nt, Artificial Sequence
  Description of Artificial Sequence: Synthetic oligonucleotide
  Sense strand starting at position 419 of SEQ ID NO: 387
gaaguagugucugugagaa

SEQ ID NO: 33311 - RNA, 19 nt, Artificial Sequence
  Description of Artificial Sequence: Synthetic oligonucleotide
  Antisense strand to SEQ ID NO: 33310
uucucacagacacuacuuc

SEQ ID NO: 33312 - RNA, 19 nt, Artificial Sequence
  Description of Artificial Sequence: Synthetic oligonucleotide
  Sense strand starting at position 334 of SEQ ID NO: 387
cagaaagagagucguuauu

SEQ ID NO: 33313 - RNA, 19 nt, Artificial Sequence
  Description of Artificial Sequence: Synthetic oligonucleotide
  Antisense strand to SEQ ID NO: 33312
aauaacgacucucuuucug

SEQ ID NO: 33314 - RNA, 19 nt, Artificial Sequence
  Description of Artificial Sequence: Synthetic oligonucleotide
  Sense strand starting at position 226 of SEQ ID NO: 387
gguagaaacucauccugau

SEQ ID NO: 33315 - RNA, 19 nt, Artificial Sequence
  Description of Artificial Sequence: Synthetic oligonucleotide
  Antisense strand to SEQ ID NO: 33314
aucaggaugaguuucuacc

SEQ ID NO: 33316 - RNA, 19 nt, Artificial Sequence
  Description of Artificial Sequence: Synthetic oligonucleotide
  Sense strand starting at position 107 of SEQ ID NO: 387
acagucucuuaaucaagga

SEQ ID NO: 33317 - RNA, 19 nt, Artificial Sequence
  Description of Artificial Sequence: Synthetic oligonucleotide
  Antisense strand to SEQ ID NO: 33316
uccuugauuaagagacugu

SEQ ID NO: 33318 - RNA, 19 nt, Artificial Sequence
  Description of Artificial Sequence: Synthetic oligonucleotide
  Sense strand starting at position 3957 of SEQ ID NO: 388
auuguuguauggguaagaa

SEQ ID NO: 33319 - RNA, 19 nt, Artificial Sequence
  Description of Artificial Sequence: Synthetic oligonucleotide
  Antisense strand to SEQ ID NO: 33318
uucuuacccauacaacaau

SEQ ID NO: 33320 - RNA, 19 nt, Artificial Sequence
  Description of Artificial Sequence: Synthetic oligonucleotide
  Sense strand starting at position 3956 of SEQ ID NO: 388
gauuguuguauggguaaga

SEQ ID NO: 33321 - RNA, 19 nt, Artificial Sequence
  Description of Artificial Sequence: Synthetic oligonucleotide
  Antisense strand to SEQ ID NO: 33320
ucuuacccauacaacaauc

SEQ ID NO: 33322 - RNA, 19 nt, Artificial Sequence
  Description of Artificial Sequence: Synthetic oligonucleotide
  Sense strand starting at position 3954 of SEQ ID NO: 388
aggauuguuguauggguaa

SEQ ID NO: 33323 - RNA, 19 nt, Artificial Sequence
  Description of Artificial Sequence: Synthetic oligonucleotide
  Antisense strand to SEQ ID NO: 33322
uuacccauacaacaauccu

SEQ ID NO: 33324 - RNA, 19 nt, Artificial Sequence
  Description of Artificial Sequence: Synthetic oligonucleotide
  Sense strand starting at position 3631 of SEQ ID NO: 388
guggcaaugguugcgguaa

SEQ ID NO: 33325 - RNA, 19 nt, Artificial Sequence
  Description of Artificial Sequence: Synthetic oligonucleotide
  Antisense strand to SEQ ID NO: 33324
uuaccgcaaccauugccac

SEQ ID NO: 33326 - RNA, 19 nt, Artificial Sequence
  Description of Artificial Sequence: Synthetic oligonucleotide
  Sense strand starting at position 3153 of SEQ ID NO: 388
cuucaucuggugggugaaa

SEQ ID NO: 33327 - RNA, 19 nt, Artificial Sequence
  Description of Artificial Sequence: Synthetic oligonucleotide
  Antisense strand to SEQ ID NO: 33326
uuucacccaccagaugaag

SEQ ID NO: 33328 - RNA, 19 nt, Artificial Sequence
  Description of Artificial Sequence: Synthetic oligonucleotide
  Sense strand starting at position 2215 of SEQ ID NO: 388
agauuauguuguguauuag

SEQ ID NO: 33329 - RNA, 19 nt, Artificial Sequence
  Description of Artificial Sequence: Synthetic oligonucleotide
  Antisense strand to SEQ ID NO: 33328
cuaauacacaacauaaucu

SEQ ID NO: 33330 - RNA, 19 nt, Artificial Sequence
  Description of Artificial Sequence: Synthetic oligonucleotide
  Sense strand starting at position 2210 of SEQ ID NO: 388
uaaagagauuauguugugu

SEQ ID NO: 33331 - RNA, 19 nt, Artificial Sequence
  Description of Artificial Sequence: Synthetic oligonucleotide
  Antisense strand to SEQ ID NO: 33330
acacaacauaaucucuuua

SEQ ID NO: 33332 - RNA, 19 nt, Artificial Sequence
  Description of Artificial Sequence: Synthetic oligonucleotide
  Sense strand starting at position 2185 of SEQ ID NO: 388
acuggaauaugaguuccau

SEQ ID NO: 33333 - RNA, 19 nt, Artificial Sequence
  Description of Artificial Sequence: Synthetic oligonucleotide
  Antisense strand to SEQ ID NO: 33332
auggaacucauauuccagu

SEQ ID NO: 33334 - RNA, 19 nt, Artificial Sequence
  Description of Artificial Sequence: Synthetic oligonucleotide
  Sense strand starting at position 2166 of SEQ ID NO: 388
gaagaugccaaggguagau

SEQ ID NO: 33335 - RNA, 19 nt, Artificial Sequence
  Description of Artificial Sequence: Synthetic oligonucleotide
  Antisense strand to SEQ ID NO: 33334
aucuacccuuggcaucuuc

SEQ ID NO: 33336 - RNA, 19 nt, Artificial Sequence
  Description of Artificial Sequence: Synthetic oligonucleotide
  Sense strand starting at position 2154 of SEQ ID NO: 388
gaaauacuuugagaagaug

SEQ ID NO: 33337 - RNA, 19 nt, Artificial Sequence
  Description of Artificial Sequence: Synthetic oligonucleotide
  Antisense strand to SEQ ID NO: 33336
caucuucucaaaguauuuc

SEQ ID NO: 33338 - RNA, 19 nt, Artificial Sequence
  Description of Artificial Sequence: Synthetic oligonucleotide
  Sense strand starting at position 2102 of SEQ ID NO: 388
aagagcuuguguccaaauu

SEQ ID NO: 33339 - RNA, 19 nt, Artificial Sequence
  Description of Artificial Sequence: Synthetic oligonucleotide
  Antisense strand to SEQ ID NO: 33338
aauuuggacacaagcucuu

SEQ ID NO: 33340 - RNA, 19 nt, Artificial Sequence
  Description of Artificial Sequence: Synthetic oligonucleotide
  Sense strand starting at position 2033 of SEQ ID NO: 388
gcaaacuuaucagugagag

SEQ ID NO: 33341 - RNA, 19 nt, Artificial Sequence
  Description of Artificial Sequence: Synthetic oligonucleotide
  Antisense strand to SEQ ID NO: 33340
cucucacugauaaguuugc

SEQ ID NO: 33342 - RNA, 19 nt, Artificial Sequence
  Description of Artificial Sequence: Synthetic oligonucleotide
  Sense strand starting at position 2030 of SEQ ID NO: 388
ugagcaaacuuaucaguga

SEQ ID NO: 33343 - RNA, 19 nt, Artificial Sequence
  Description of Artificial Sequence: Synthetic oligonucleotide
  Antisense strand to SEQ ID NO: 33342
ucacugauaaguuugcuca

SEQ ID NO: 33344 - RNA, 19 nt, Artificial Sequence
  Description of Artificial Sequence: Synthetic oligonucleotide
  Sense strand starting at position 1409 of SEQ ID NO: 388
uaucuuguuggugaaguuu

SEQ ID NO: 33345 - RNA, 19 nt, Artificial Sequence
  Description of Artificial Sequence: Synthetic oligonucleotide
  Antisense strand to SEQ ID NO: 33344
aaacuucaccaacaagaua

SEQ ID NO: 33346 - RNA, 19 nt, Artificial Sequence
  Description of Artificial Sequence: Synthetic oligonucleotide
  Sense strand starting at position 1404 of SEQ ID NO: 388
aaauguaucuuguugguga

SEQ ID NO: 33347 - RNA, 19 nt, Artificial Sequence
  Description of Artificial Sequence: Synthetic oligonucleotide
  Antisense strand to SEQ ID NO: 33346
ucaccaacaagauacauuu

SEQ ID NO: 33348 - RNA, 19 nt, Artificial Sequence
  Description of Artificial Sequence: Synthetic oligonucleotide
  Sense strand starting at position 1029 of SEQ ID NO: 388
gggacagcucuuuacugca

SEQ ID NO: 33349 - RNA, 19 nt, Artificial Sequence
  Description of Artificial Sequence: Synthetic oligonucleotide
  Antisense strand to SEQ ID NO: 33348
ugcaguaaagagcuguccc

SEQ ID NO: 33350 - RNA, 19 nt, Artificial Sequence
  Description of Artificial Sequence: Synthetic oligonucleotide
  Sense strand starting at position 988 of SEQ ID NO: 388
guaagacuauaguuguaaa

SEQ ID NO: 33351 - RNA, 19 nt, Artificial Sequence
  Description of Artificial Sequence: Synthetic oligonucleotide
  Antisense strand to SEQ ID NO: 33350
uuuacaacuauagucuuac

SEQ ID NO: 33352 - RNA, 19 nt, Artificial Sequence
  Description of Artificial Sequence: Synthetic oligonucleotide
  Sense strand starting at position 985 of SEQ ID NO: 388
agaguaagacuauaguugu

SEQ ID NO: 33353 - RNA, 19 nt, Artificial Sequence
  Description of Artificial Sequence: Synthetic oligonucleotide
  Antisense strand to SEQ ID NO: 33352
acaacuauagucuuacucu

SEQ ID NO: 33354 - RNA, 19 nt, Artificial Sequence
  Description of Artificial Sequence: Synthetic oligonucleotide
  Sense strand starting at position 968 of SEQ ID NO: 388
gccucugauugguuaacag

SEQ ID NO: 33355 - RNA, 19 nt, Artificial Sequence
  Description of Artificial Sequence: Synthetic oligonucleotide
  Antisense strand to SEQ ID NO: 33354
cuguuaaccaaucagaggc

SEQ ID NO: 33356 - RNA, 19 nt, Artificial Sequence
  Description of Artificial Sequence: Synthetic oligonucleotide
  Sense strand starting at position 967 of SEQ ID NO: 388
agccucugauugguuaaca

SEQ ID NO: 33357 - RNA, 19 nt, Artificial Sequence
  Description of Artificial Sequence: Synthetic oligonucleotide
  Antisense strand to SEQ ID NO: 33356
uguuaaccaaucagaggcu

SEQ ID NO: 33358 - RNA, 19 nt, Artificial Sequence
  Description of Artificial Sequence: Synthetic oligonucleotide
  Sense strand starting at position 965 of SEQ ID NO: 388
aaagccucugauugguuaa

SEQ ID NO: 33359 - RNA, 19 nt, Artificial Sequence
  Description of Artificial Sequence: Synthetic oligonucleotide
  Antisense strand to SEQ ID NO: 33358
uuaaccaaucagaggcuuu

SEQ ID NO: 33360 - RNA, 19 nt, Artificial Sequence
  Description of Artificial Sequence: Synthetic oligonucleotide
  Sense strand starting at position 964 of SEQ ID NO: 388
gaaagccucugauugguua

SEQ ID NO: 33361 - RNA, 19 nt, Artificial Sequence
  Description of Artificial Sequence: Synthetic oligonucleotide
  Antisense strand to SEQ ID NO: 33360
uaaccaaucagaggcuuuc

SEQ ID NO: 33362 - RNA, 19 nt, Artificial Sequence
  Description of Artificial Sequence: Synthetic oligonucleotide
  Sense strand starting at position 941 of SEQ ID NO: 388
auaggauaaugguacauuu

SEQ ID NO: 33363 - RNA, 19 nt, Artificial Sequence
  Description of Artificial Sequence: Synthetic oligonucleotide
  Antisense strand to SEQ ID NO: 33362
aaauguaccauuauccuau

SEQ ID NO: 33364 - RNA, 19 nt, Artificial Sequence
  Description of Artificial Sequence: Synthetic oligonucleotide
  Sense strand starting at position 907 of SEQ ID NO: 388
aaggaauauuugcauaggu

SEQ ID NO: 33365 - RNA, 19 nt, Artificial Sequence
  Description of Artificial Sequence: Synthetic oligonucleotide
  Antisense strand to SEQ ID NO: 33364
accuaugcaaauauuccuu

SEQ ID NO: 33366 - RNA, 19 nt, Artificial Sequence
  Description of Artificial Sequence: Synthetic oligonucleotide
  Sense strand starting at position 897 of SEQ ID NO: 388
uccuuaaagcaaggaauau

SEQ ID NO: 33367 - RNA, 19 nt, Artificial Sequence
  Description of Artificial Sequence: Synthetic oligonucleotide
  Antisense strand to SEQ ID NO: 33366
auauuccuugcuuuaagga

SEQ ID NO: 33368 - RNA, 19 nt, Artificial Sequence
  Description of Artificial Sequence: Synthetic oligonucleotide
  Sense strand starting at position 867 of SEQ ID NO: 388
gaugaaucugcaugaauag

SEQ ID NO: 33369 - RNA, 19 nt, Artificial Sequence
  Description of Artificial Sequence: Synthetic oligonucleotide
  Antisense strand to SEQ ID NO: 33368
cuauucaugcagauucauc

SEQ ID NO: 33370 - RNA, 19 nt, Artificial Sequence
  Description of Artificial Sequence: Synthetic oligonucleotide
  Sense strand starting at position 845 of SEQ ID NO: 388
cauugauuugccuguaguu

SEQ ID NO: 33371 - RNA, 19 nt, Artificial Sequence
  Description of Artificial Sequence: Synthetic oligonucleotide
  Antisense strand to SEQ ID NO: 33370
aacuacaggcaaaucaaug

SEQ ID NO: 33372 - RNA, 19 nt, Artificial Sequence
  Description of Artificial Sequence: Synthetic oligonucleotide
  Sense strand starting at position 733 of SEQ ID NO: 388
ugaaauucccaccguuaac

SEQ ID NO: 33373 - RNA, 19 nt, Artificial Sequence
  Description of Artificial Sequence: Synthetic oligonucleotide
  Antisense strand to SEQ ID NO: 33372
guuaacggugggaauuuca

SEQ ID NO: 33374 - RNA, 19 nt, Artificial Sequence
  Description of Artificial Sequence: Synthetic oligonucleotide
  Sense strand starting at position 696 of SEQ ID NO: 388
auuuguuugcgucaaugua

SEQ ID NO: 33375 - RNA, 19 nt, Artificial Sequence
  Description of Artificial Sequence: Synthetic oligonucleotide
  Antisense strand to SEQ ID NO: 33374
uacauugacgcaaacaaau

SEQ ID NO: 33376 - RNA, 19 nt, Artificial Sequence
  Description of Artificial Sequence: Synthetic oligonucleotide
  Sense strand starting at position 694 of SEQ ID NO: 388
auauuuguuugcgucaaug

SEQ ID NO: 33377 - RNA, 19 nt, Artificial Sequence
  Description of Artificial Sequence: Synthetic oligonucleotide
  Antisense strand to SEQ ID NO: 33376
cauugacgcaaacaaauau

SEQ ID NO: 33378 - RNA, 19 nt, Artificial Sequence
  Description of Artificial Sequence: Synthetic oligonucleotide
  Sense strand starting at position 692 of SEQ ID NO: 388
cuauauuuguuugcgucaa

SEQ ID NO: 33379 - RNA, 19 nt, Artificial Sequence
  Description of Artificial Sequence: Synthetic oligonucleotide
  Antisense strand to SEQ ID NO: 33378
uugacgcaaacaaauauag

SEQ ID NO: 33380 - RNA, 19 nt, Artificial Sequence
  Description of Artificial Sequence: Synthetic oligonucleotide
  Sense strand starting at position 691 of SEQ ID NO: 388
acuauauuuguuugcguca

SEQ ID NO: 33381 - RNA, 19 nt, Artificial Sequence
  Description of Artificial Sequence: Synthetic oligonucleotide
  Antisense strand to SEQ ID NO: 33380
ugacgcaaacaaauauagu

SEQ ID NO: 33382 - RNA, 19 nt, Artificial Sequence
  Description of Artificial Sequence: Synthetic oligonucleotide
  Sense strand starting at position 602 of SEQ ID NO: 388
auguuuacagcauauauga

SEQ ID NO: 33383 - RNA, 19 nt, Artificial Sequence
  Description of Artificial Sequence: Synthetic oligonucleotide
  Antisense strand to SEQ ID NO: 33382
ucauauaugcuguaaacau

SEQ ID NO: 33384 - RNA, 19 nt, Artificial Sequence
  Description of Artificial Sequence: Synthetic oligonucleotide
  Sense strand starting at position 493 of SEQ ID NO: 388
auugcucugcuuuaaagaa

SEQ ID NO: 33385 - RNA, 19 nt, Artificial Sequence
  Description of Artificial Sequence: Synthetic oligonucleotide
  Antisense strand to SEQ ID NO: 33384
uucuuuaaagcagagcaau

SEQ ID NO: 33386 - RNA, 19 nt, Artificial Sequence
  Description of Artificial Sequence: Synthetic oligonucleotide
  Sense strand starting at position 463 of SEQ ID NO: 388
cucagauugcuuuaugaau

SEQ ID NO: 33387 - RNA, 19 nt, Artificial Sequence
  Description of Artificial Sequence: Synthetic oligonucleotide
  Antisense strand to SEQ ID NO: 33386
auucauaaagcaaucugag

SEQ ID NO: 33388 - RNA, 19 nt, Artificial Sequence
  Description of Artificial Sequence: Synthetic oligonucleotide
  Sense strand starting at position 395 of SEQ ID NO: 388
gaauuagugucuuugagga

SEQ ID NO: 33389 - RNA, 19 nt, Artificial Sequence
  Description of Artificial Sequence: Synthetic oligonucleotide
  Antisense strand to SEQ ID NO: 33388
uccucaaagacacuaauuc

SEQ ID NO: 33390 - RNA, 19 nt, Artificial Sequence
  Description of Artificial Sequence: Synthetic oligonucleotide
  Sense strand starting at position 393 of SEQ ID NO: 388
uugaauuagugucuuugag

SEQ ID NO: 33391 - RNA, 19 nt, Artificial Sequence
  Description of Artificial Sequence: Synthetic oligonucleotide
  Antisense strand to SEQ ID NO: 33390
cucaaagacacuaauucaa

SEQ ID NO: 33392 - RNA, 19 nt, Artificial Sequence
  Description of Artificial Sequence: Synthetic oligonucleotide
  Sense strand starting at position 267 of SEQ ID NO: 388
uuauguuugcaauagugaa

SEQ ID NO: 33393 - RNA, 19 nt, Artificial Sequence
  Description of Artificial Sequence: Synthetic oligonucleotide
  Antisense strand to SEQ ID NO: 33392
uucacuauugcaaacauaa

SEQ ID NO: 33394 - RNA, 19 nt, Artificial Sequence
  Description of Artificial Sequence: Synthetic oligonucleotide
  Sense strand starting at position 213 of SEQ ID NO: 388
auuagaaacucauccuggu

SEQ ID NO: 33395 - RNA, 19 nt, Artificial Sequence
  Description of Artificial Sequence: Synthetic oligonucleotide
  Antisense strand to SEQ ID NO: 33394
accaggaugaguuucuaau

SEQ ID NO: 33396 - RNA, 19 nt, Artificial Sequence
  Description of Artificial Sequence: Synthetic oligonucleotide
  Sense strand starting at position 153 of SEQ ID NO: 388
cugcauaggucacucugaa

SEQ ID NO: 33397 - RNA, 19 nt, Artificial Sequence
  Description of Artificial Sequence: Synthetic oligonucleotide
  Antisense strand to SEQ ID NO: 33396
uucagagugaccuaugcag

SEQ ID NO: 33398 - RNA, 19 nt, Artificial Sequence
  Description of Artificial Sequence: Synthetic oligonucleotide
  Sense strand starting at position 3830 of SEQ ID NO: 389
cauguuugcucagcuugaa

SEQ ID NO: 33399 - RNA, 19 nt, Artificial Sequence
  Description of Artificial Sequence: Synthetic oligonucleotide
  Antisense strand to SEQ ID NO: 33398
uucaagcugagcaaacaug

SEQ ID NO: 33400 - RNA, 19 nt, Artificial Sequence
  Description of Artificial Sequence: Synthetic oligonucleotide
  Sense strand starting at position 3827 of SEQ ID NO: 389
ggacauguuugcucagcuu

SEQ ID NO: 33401 - RNA, 19 nt, Artificial Sequence
  Description of Artificial Sequence: Synthetic oligonucleotide
  Antisense strand to SEQ ID NO: 33400
aagcugagcaaacaugucc

SEQ ID NO: 33402 - RNA, 19 nt, Artificial Sequence
  Description of Artificial Sequence: Synthetic oligonucleotide
  Sense strand starting at position 3747 of SEQ ID NO: 389
aagggaagcagcugugaaa

SEQ ID NO: 33403 - RNA, 19 nt, Artificial Sequence
  Description of Artificial Sequence: Synthetic oligonucleotide
  Antisense strand to SEQ ID NO: 33402
uuucacagcugcuucccuu

SEQ ID NO: 33404 - RNA, 19 nt, Artificial Sequence
  Description of Artificial Sequence: Synthetic oligonucleotide
  Sense strand starting at position 3188 of SEQ ID NO: 389
aggucuauaccgugagaaa

SEQ ID NO: 33405 - RNA, 19 nt, Artificial Sequence
  Description of Artificial Sequence: Synthetic oligonucleotide
  Antisense strand to SEQ ID NO: 33404
uuucucacgguauagaccu

SEQ ID NO: 33406 - RNA, 19 nt, Artificial Sequence
  Description of Artificial Sequence: Synthetic oligonucleotide
  Sense strand starting at position 3186 of SEQ ID NO: 389
cuaggucuauaccgugaga

SEQ ID NO: 33407 - RNA, 19 nt, Artificial Sequence
  Description of Artificial Sequence: Synthetic oligonucleotide
  Antisense strand to SEQ ID NO: 33406
ucucacgguauagaccuag

SEQ ID NO: 33408 - RNA, 19 nt, Artificial Sequence
  Description of Artificial Sequence: Synthetic oligonucleotide
  Sense strand starting at position 1865 of SEQ ID NO: 389
cagagcgagugguagauuu

SEQ ID NO: 33409 - RNA, 19 nt, Artificial Sequence
  Description of Artificial Sequence: Synthetic oligonucleotide
  Antisense strand to SEQ ID NO: 33408
aaaucuaccacucgcucug

SEQ ID NO: 33410 - RNA, 19 nt, Artificial Sequence
  Description of Artificial Sequence: Synthetic oligonucleotide
  Sense strand starting at position 1863 of SEQ ID NO: 389
cucagagcgagugguagau

SEQ ID NO: 33411 - RNA, 19 nt, Artificial Sequence
  Description of Artificial Sequence: Synthetic oligonucleotide
  Antisense strand to SEQ ID NO: 33410
aucuaccacucgcucugag

SEQ ID NO: 33412 - RNA, 19 nt, Artificial Sequence
  Description of Artificial Sequence: Synthetic oligonucleotide
  Sense strand starting at position 1622 of SEQ ID NO: 389
uaaguagaacuguggaaau

SEQ ID NO: 33413 - RNA, 19 nt, Artificial Sequence
  Description of Artificial Sequence: Synthetic oligonucleotide
  Antisense strand to SEQ ID NO: 33412
auuuccacaguucuacuua

SEQ ID NO: 33414 - RNA, 19 nt, Artificial Sequence
  Description of Artificial Sequence: Synthetic oligonucleotide
  Sense strand starting at position 1614 of SEQ ID NO: 389
uggagugguaaguagaacu

SEQ ID NO: 33415 - RNA, 19 nt, Artificial Sequence
  Description of Artificial Sequence: Synthetic oligonucleotide
  Antisense strand to SEQ ID NO: 33414
aguucuacuuaccacucca

SEQ ID NO: 33416 - RNA, 19 nt, Artificial Sequence
  Description of Artificial Sequence: Synthetic oligonucleotide
  Sense strand starting at position 1608 of SEQ ID NO: 389
gagaguuggagugguaagu

SEQ ID NO: 33417 - RNA, 19 nt, Artificial Sequence
  Description of Artificial Sequence: Synthetic oligonucleotide
  Antisense strand to SEQ ID NO: 33416
acuuaccacuccaacucuc

SEQ ID NO: 33418 - RNA, 19 nt, Artificial Sequence
  Description of Artificial Sequence: Synthetic oligonucleotide
  Sense strand starting at position 1371 of SEQ ID NO: 389
ggauaaugauaguacugau

SEQ ID NO: 33419 - RNA, 19 nt, Artificial Sequence
  Description of Artificial Sequence: Synthetic oligonucleotide
  Antisense strand to SEQ ID NO: 33418
aucaguacuaucauuaucc

SEQ ID NO: 33420 - RNA, 19 nt, Artificial Sequence
  Description of Artificial Sequence: Synthetic oligonucleotide
  Sense strand starting at position 1347 of SEQ ID NO: 389
uuccuugagggucaguaaa

SEQ ID NO: 33421 - RNA, 19 nt, Artificial Sequence
  Description of Artificial Sequence: Synthetic oligonucleotide
  Antisense strand to SEQ ID NO: 33420
uuuacugacccucaaggaa

SEQ ID NO: 33422 - RNA, 19 nt, Artificial Sequence
  Description of Artificial Sequence: Synthetic oligonucleotide
  Sense strand starting at position 380 of SEQ ID NO: 389
cccagugaggguuacagau

SEQ ID NO: 33423 - RNA, 19 nt, Artificial Sequence
  Description of Artificial Sequence: Synthetic oligonucleotide
  Antisense strand to SEQ ID NO: 33422
aucuguaacccucacuggg

SEQ ID NO: 33424 - RNA, 19 nt, Artificial Sequence
  Description of Artificial Sequence: Synthetic oligonucleotide
  Sense strand starting at position 239 of SEQ ID NO: 389
aguaucauccuaggaaucu

SEQ ID NO: 33425 - RNA, 19 nt, Artificial Sequence
  Description of Artificial Sequence: Synthetic oligonucleotide
  Antisense strand to SEQ ID NO: 33424
agauuccuaggaugauacu

SEQ ID NO: 33426 - RNA, 19 nt, Artificial Sequence
  Description of Artificial Sequence: Synthetic oligonucleotide
  Sense strand starting at position 237 of SEQ ID NO: 389
guaguaucauccuaggaau

SEQ ID NO: 33427 - RNA, 19 nt, Artificial Sequence
  Description of Artificial Sequence: Synthetic oligonucleotide
  Antisense strand to SEQ ID NO: 33426
auuccuaggaugauacuac

SEQ ID NO: 33428 - RNA, 19 nt, Artificial Sequence
  Description of Artificial Sequence: Synthetic oligonucleotide
  Sense strand starting at position 224 of SEQ ID NO: 389
accucaaagcccuguagua

SEQ ID NO: 33429 - RNA, 19 nt, Artificial Sequence
  Description of Artificial Sequence: Synthetic oligonucleotide
  Antisense strand to SEQ ID NO: 33428
uacuacagggcuuugaggu

SEQ ID NO: 33430 - RNA, 19 nt, Artificial Sequence
  Description of Artificial Sequence: Synthetic oligonucleotide
  Sense strand starting at position 3382 of SEQ ID NO: 390
aggucuacaccgugagaaa

SEQ ID NO: 33431 - RNA, 19 nt, Artificial Sequence
  Description of Artificial Sequence: Synthetic oligonucleotide
  Antisense strand to SEQ ID NO: 33430
uuucucacgguguagaccu

SEQ ID NO: 33432 - RNA, 19 nt, Artificial Sequence
  Description of Artificial Sequence: Synthetic oligonucleotide
  Sense strand starting at position 3380 of SEQ ID NO: 390
cuaggucuacaccgugaga

SEQ ID NO: 33433 - RNA, 19 nt, Artificial Sequence
  Description of Artificial Sequence: Synthetic oligonucleotide
  Antisense strand to SEQ ID NO: 33432
ucucacgguguagaccuag

SEQ ID NO: 33434 - RNA, 19 nt, Artificial Sequence
  Description of Artificial Sequence: Synthetic oligonucleotide
  Sense strand starting at position 2586 of SEQ ID NO: 390
cgguaauccuagcuacugu

SEQ ID NO: 33435 - RNA, 19 nt, Artificial Sequence
  Description of Artificial Sequence: Synthetic oligonucleotide
  Antisense strand to SEQ ID NO: 33434
acaguagcuaggauuaccg

SEQ ID NO: 33436 - RNA, 19 nt, Artificial Sequence
  Description of Artificial Sequence: Synthetic oligonucleotide
  Sense strand starting at position 1769 of SEQ ID NO: 390
uagagcaagugguagauuu

SEQ ID NO: 33437 - RNA, 19 nt, Artificial Sequence
  Description of Artificial Sequence: Synthetic oligonucleotide
  Antisense strand to SEQ ID NO: 33436
aaaucuaccacuugcucua

SEQ ID NO: 33438 - RNA, 19 nt, Artificial Sequence
  Description of Artificial Sequence: Synthetic oligonucleotide
  Sense strand starting at position 1767 of SEQ ID NO: 390
cuuagagcaagugguagau

SEQ ID NO: 33439 - RNA, 19 nt, Artificial Sequence
  Description of Artificial Sequence: Synthetic oligonucleotide
  Antisense strand to SEQ ID NO: 33438
aucuaccacuugcucuaag

SEQ ID NO: 33440 - RNA, 19 nt, Artificial Sequence
  Description of Artificial Sequence: Synthetic oligonucleotide
  Sense strand starting at position 1757 of SEQ ID NO: 390
ugucaugggacuuagagca

SEQ ID NO: 33441 - RNA, 19 nt, Artificial Sequence
  Description of Artificial Sequence: Synthetic oligonucleotide
  Antisense strand to SEQ ID NO: 33440
ugcucuaagucccaugaca

SEQ ID NO: 33442 - RNA, 19 nt, Artificial Sequence
  Description of Artificial Sequence: Synthetic oligonucleotide
  Sense strand starting at position 1752 of SEQ ID NO: 390
uagggugucaugggacuua

SEQ ID NO: 33443 - RNA, 19 nt, Artificial Sequence
  Description of Artificial Sequence: Synthetic oligonucleotide
  Antisense strand to SEQ ID NO: 33442
uaagucccaugacacccua

SEQ ID NO: 33444 - RNA, 19 nt, Artificial Sequence
  Description of Artificial Sequence: Synthetic oligonucleotide
  Sense strand starting at position 1527 of SEQ ID NO: 390
uaagcagaacaguggaaau

SEQ ID NO: 33445 - RNA, 19 nt, Artificial Sequence
  Description of Artificial Sequence: Synthetic oligonucleotide
  Antisense strand to SEQ ID NO: 33444
auuuccacuguucugcuua

SEQ ID NO: 33446 - RNA, 19 nt, Artificial Sequence
  Description of Artificial Sequence: Synthetic oligonucleotide
  Sense strand starting at position 1251 of SEQ ID NO: 390
uuccuugagggucgguaaa

SEQ ID NO: 33447 - RNA, 19 nt, Artificial Sequence
  Description of Artificial Sequence: Synthetic oligonucleotide
  Antisense strand to SEQ ID NO: 33446
uuuaccgacccucaaggaa

SEQ ID NO: 33448 - RNA, 19 nt, Artificial Sequence
  Description of Artificial Sequence: Synthetic oligonucleotide
  Sense strand starting at position 698 of SEQ ID NO: 390
acauaugaauagugaacau

SEQ ID NO: 33449 - RNA, 19 nt, Artificial Sequence
  Description of Artificial Sequence: Synthetic oligonucleotide
  Antisense strand to SEQ ID NO: 33448
auguucacuauucauaugu

SEQ ID NO: 33450 - RNA, 19 nt, Artificial Sequence
  Description of Artificial Sequence: Synthetic oligonucleotide
  Sense strand starting at position 142 of SEQ ID NO: 390
uguaucauccuaggaaucu

SEQ ID NO: 33451 - RNA, 19 nt, Artificial Sequence
  Description of Artificial Sequence: Synthetic oligonucleotide
  Antisense strand to SEQ ID NO: 33450
agauuccuaggaugauaca

SEQ ID NO: 33452 - RNA, 19 nt, Artificial Sequence
  Description of Artificial Sequence: Synthetic oligonucleotide
  Sense strand starting at position 64 of SEQ ID NO: 392
ucauguuuacgccacuaau

SEQ ID NO: 33453 - RNA, 19 nt, Artificial Sequence
  Description of Artificial Sequence: Synthetic oligonucleotide
  Antisense strand to SEQ ID NO: 33452
auuaguggcguaaacauga

SEQ ID NO: 33454 - RNA, 19 nt, Artificial Sequence
  Description of Artificial Sequence: Synthetic oligonucleotide
  Sense strand starting at position 107 of SEQ ID NO: 392
acaagaaaugcaugcaucu

SEQ ID NO: 33455 - RNA, 19 nt, Artificial Sequence
  Description of Artificial Sequence: Synthetic oligonucleotide
  Antisense strand to SEQ ID NO: 33454
agaugcaugcauuucuugu

SEQ ID NO: 33456 - RNA, 19 nt, Artificial Sequence
  Description of Artificial Sequence: Synthetic oligonucleotide
  Sense strand starting at position 183 of SEQ ID NO: 392
gguggaaauuaugcucagu

SEQ ID NO: 33457 - RNA, 19 nt, Artificial Sequence
  Description of Artificial Sequence: Synthetic oligonucleotide
  Antisense strand to SEQ ID NO: 33456
acugagcauaauuuccacc

SEQ ID NO: 33458 - RNA, 19 nt, Artificial Sequence
  Description of Artificial Sequence: Synthetic oligonucleotide
  Sense strand starting at position 185 of SEQ ID NO: 392
uggaaauuaugcucagugu

SEQ ID NO: 33459 - RNA, 19 nt, Artificial Sequence
  Description of Artificial Sequence: Synthetic oligonucleotide
  Antisense strand to SEQ ID NO: 33458
acacugagcauaauuucca

SEQ ID NO: 33460 - RNA, 19 nt, Artificial Sequence
  Description of Artificial Sequence: Synthetic oligonucleotide
  Sense strand starting at position 186 of SEQ ID NO: 392
ggaaauuaugcucaguguc

SEQ ID NO: 33461 - RNA, 19 nt, Artificial Sequence
  Description of Artificial Sequence: Synthetic oligonucleotide
  Antisense strand to SEQ ID NO: 33460
gacacugagcauaauuucc

SEQ ID NO: 33462 - RNA, 19 nt, Artificial Sequence
  Description of Artificial Sequence: Synthetic oligonucleotide
  Sense strand starting at position 338 of SEQ ID NO: 392
acaguaugucaggaaggca

SEQ ID NO: 33463 - RNA, 19 nt, Artificial Sequence
  Description of Artificial Sequence: Synthetic oligonucleotide
  Antisense strand to SEQ ID NO: 33462
ugccuuccugacauacugu

SEQ ID NO: 33464 - RNA, 19 nt, Artificial Sequence
  Description of Artificial Sequence: Synthetic oligonucleotide
  Sense strand starting at position 419 of SEQ ID NO: 392
cugaaaggcucccuuccaa

SEQ ID NO: 33465 - RNA, 19 nt, Artificial Sequence
  Description of Artificial Sequence: Synthetic oligonucleotide
  Antisense strand to SEQ ID NO: 33464
uuggaagggagccuuucag

SEQ ID NO: 33466 - RNA, 19 nt, Artificial Sequence
  Description of Artificial Sequence: Synthetic oligonucleotide
  Sense strand starting at position 625 of SEQ ID NO: 392
ccaugugaccgccagacaa

SEQ ID NO: 33467 - RNA, 19 nt, Artificial Sequence
  Description of Artificial Sequence: Synthetic oligonucleotide
  Antisense strand to SEQ ID NO: 33466
uugucuggcggucacaugg

SEQ ID NO: 33468 - RNA, 19 nt, Artificial Sequence
  Description of Artificial Sequence: Synthetic oligonucleotide
  Sense strand starting at position 633 of SEQ ID NO: 392
ccgccagacaaguaagagu

SEQ ID NO: 33469 - RNA, 19 nt, Artificial Sequence
  Description of Artificial Sequence: Synthetic oligonucleotide
  Antisense strand to SEQ ID NO: 33468
acucuuacuugucuggcgg

SEQ ID NO: 33470 - RNA, 19 nt, Artificial Sequence
  Description of Artificial Sequence: Synthetic oligonucleotide
  Sense strand starting at position 1114 of SEQ ID NO: 392
ccacgcuuuccacauugaa

SEQ ID NO: 33471 - RNA, 19 nt, Artificial Sequence
  Description of Artificial Sequence: Synthetic oligonucleotide
  Antisense strand to SEQ ID NO: 33470
uucaauguggaaagcgugg

SEQ ID NO: 33472 - RNA, 19 nt, Artificial Sequence
  Description of Artificial Sequence: Synthetic oligonucleotide
  Sense strand starting at position 1169 of SEQ ID NO: 392
aucugaggcugcucagauu

SEQ ID NO: 33473 - RNA, 19 nt, Artificial Sequence
  Description of Artificial Sequence: Synthetic oligonucleotide
  Antisense strand to SEQ ID NO: 33472
aaucugagcagccucagau

SEQ ID NO: 33474 - RNA, 19 nt, Artificial Sequence
  Description of Artificial Sequence: Synthetic oligonucleotide
  Sense strand starting at position 1262 of SEQ ID NO: 392
ccuccauucuuucuugagu

SEQ ID NO: 33475 - RNA, 19 nt, Artificial Sequence
  Description of Artificial Sequence: Synthetic oligonucleotide
  Antisense strand to SEQ ID NO: 33474
acucaagaaagaauggagg

SEQ ID NO: 33476 - RNA, 19 nt, Artificial Sequence
  Description of Artificial Sequence: Synthetic oligonucleotide
  Sense strand starting at position 1263 of SEQ ID NO: 392
cuccauucuuucuugaguu

SEQ ID NO: 33477 - RNA, 19 nt, Artificial Sequence
  Description of Artificial Sequence: Synthetic oligonucleotide
  Antisense strand to SEQ ID NO: 33476
aacucaagaaagaauggag

SEQ ID NO: 33478 - RNA, 19 nt, Artificial Sequence
  Description of Artificial Sequence: Synthetic oligonucleotide
  Sense strand starting at position 1300 of SEQ ID NO: 392
cacccauaugucugggauc

SEQ ID NO: 33479 - RNA, 19 nt, Artificial Sequence
  Description of Artificial Sequence: Synthetic oligonucleotide
  Antisense strand to SEQ ID NO: 33478
gaucccagacauaugggug

SEQ ID NO: 33480 - RNA, 19 nt, Artificial Sequence
  Description of Artificial Sequence: Synthetic oligonucleotide
  Sense strand starting at position 1302 of SEQ ID NO: 392
cccauaugucugggaucca

SEQ ID NO: 33481 - RNA, 19 nt, Artificial Sequence
  Description of Artificial Sequence: Synthetic oligonucleotide
  Antisense strand to SEQ ID NO: 33480
uggaucccagacauauggg

SEQ ID NO: 33482 - RNA, 19 nt, Artificial Sequence
  Description of Artificial Sequence: Synthetic oligonucleotide
  Sense strand starting at position 1382 of SEQ ID NO: 392
ggguuuccugaucacucua

SEQ ID NO: 33483 - RNA, 19 nt, Artificial Sequence
  Description of Artificial Sequence: Synthetic oligonucleotide
  Antisense strand to SEQ ID NO: 33482
uagagugaucaggaaaccc

SEQ ID NO: 33484 - RNA, 19 nt, Artificial Sequence
  Description of Artificial Sequence: Synthetic oligonucleotide
  Sense strand starting at position 1390 of SEQ ID NO: 392
ugaucacucuagcugaguu

SEQ ID NO: 33485 - RNA, 19 nt, Artificial Sequence
  Description of Artificial Sequence: Synthetic oligonucleotide
  Antisense strand to SEQ ID NO: 33484
aacucagcuagagugauca

SEQ ID NO: 33486 - RNA, 19 nt, Artificial Sequence
  Description of Artificial Sequence: Synthetic oligonucleotide
  Sense strand starting at position 1574 of SEQ ID NO: 392
guguacuuguccuugauga

SEQ ID NO: 33487 - RNA, 19 nt, Artificial Sequence
  Description of Artificial Sequence: Synthetic oligonucleotide
  Antisense strand to SEQ ID NO: 33486
ucaucaaggacaaguacac

SEQ ID NO: 33488 - RNA, 19 nt, Artificial Sequence
  Description of Artificial Sequence: Synthetic oligonucleotide
  Sense strand starting at position 1575 of SEQ ID NO: 392
uguacuuguccuugaugac

SEQ ID NO: 33489 - RNA, 19 nt, Artificial Sequence
  Description of Artificial Sequence: Synthetic oligonucleotide
  Antisense strand to SEQ ID NO: 33488
gucaucaaggacaaguaca

SEQ ID NO: 33490 - RNA, 19 nt, Artificial Sequence
  Description of Artificial Sequence: Synthetic oligonucleotide
  Sense strand starting at position 1576 of SEQ ID NO: 392
guacuuguccuugaugaca

SEQ ID NO: 33491 - RNA, 19 nt, Artificial Sequence
  Description of Artificial Sequence: Synthetic oligonucleotide
  Antisense strand to SEQ ID NO: 33490
ugucaucaaggacaaguac

SEQ ID NO: 33492 - RNA, 19 nt, Artificial Sequence
  Description of Artificial Sequence: Synthetic oligonucleotide
  Sense strand starting at position 1587 of SEQ ID NO: 392
ugaugacagucagcucaaa

SEQ ID NO: 33493 - RNA, 19 nt, Artificial Sequence
  Description of Artificial Sequence: Synthetic oligonucleotide
  Antisense strand to SEQ ID NO: 33492
uuugagcugacugucauca

SEQ ID NO: 33494 - RNA, 19 nt, Artificial Sequence
  Description of Artificial Sequence: Synthetic oligonucleotide
  Sense strand starting at position 1610 of SEQ ID NO: 392
cgaccaaacuguucgaaga

SEQ ID NO: 33495 - RNA, 19 nt, Artificial Sequence
  Description of Artificial Sequence: Synthetic oligonucleotide
  Antisense strand to SEQ ID NO: 33494
ucuucgaacaguuuggucg

SEQ ID NO: 33496 - RNA, 19 nt, Artificial Sequence
  Description of Artificial Sequence: Synthetic oligonucleotide
  Sense strand starting at position 1611 of SEQ ID NO: 392
gaccaaacuguucgaagau

SEQ ID NO: 33497 - RNA, 19 nt, Artificial Sequence
  Description of Artificial Sequence: Synthetic oligonucleotide
  Antisense strand to SEQ ID NO: 33496
aucuucgaacaguuugguc

SEQ ID NO: 33498 - RNA, 19 nt, Artificial Sequence
  Description of Artificial Sequence: Synthetic oligonucleotide
  Sense strand starting at position 1637 of SEQ ID NO: 392
agguccuucuccuccagau

SEQ ID NO: 33499 - RNA, 19 nt, Artificial Sequence
  Description of Artificial Sequence: Synthetic oligonucleotide
  Antisense strand to SEQ ID NO: 33498
aucuggaggagaaggaccu

SEQ ID NO: 33500 - RNA, 19 nt, Artificial Sequence
  Description of Artificial Sequence: Synthetic oligonucleotide
  Sense strand starting at position 2274 of SEQ ID NO: 392
ccagaugcuugaucucuga

SEQ ID NO: 33501 - RNA, 19 nt, Artificial Sequence
  Description of Artificial Sequence: Synthetic oligonucleotide
  Antisense strand to SEQ ID NO: 33500
ucagagaucaagcaucugg

SEQ ID NO: 33502 - RNA, 19 nt, Artificial Sequence
  Description of Artificial Sequence: Synthetic oligonucleotide
  Sense strand starting at position 2528 of SEQ ID NO: 392
cccugacaucagugauguc

SEQ ID NO: 33503 - RNA, 19 nt, Artificial Sequence
  Description of Artificial Sequence: Synthetic oligonucleotide
  Antisense strand to SEQ ID NO: 33502
gacaucacugaugucaggg

SEQ ID NO: 33504 - RNA, 19 nt, Artificial Sequence
  Description of Artificial Sequence: Synthetic oligonucleotide
  Sense strand starting at position 2665 of SEQ ID NO: 392
gcugguccuguugauaaua

SEQ ID NO: 33505 - RNA, 19 nt, Artificial Sequence
  Description of Artificial Sequence: Synthetic oligonucleotide
  Antisense strand to SEQ ID NO: 33504
uauuaucaacaggaccagc

SEQ ID NO: 33506 - RNA, 19 nt, Artificial Sequence
  Description of Artificial Sequence: Synthetic oligonucleotide
  Sense strand starting at position 2800 of SEQ ID NO: 392
cuggaagacucagcagaug

SEQ ID NO: 33507 - RNA, 19 nt, Artificial Sequence
  Description of Artificial Sequence: Synthetic oligonucleotide
  Antisense strand to SEQ ID NO: 33506
caucugcugagucuuccag

SEQ ID NO: 33508 - RNA, 19 nt, Artificial Sequence
  Description of Artificial Sequence: Synthetic oligonucleotide
  Sense strand starting at position 3091 of SEQ ID NO: 392
aacgauagcuuucuggcau

SEQ ID NO: 33509 - RNA, 19 nt, Artificial Sequence
  Description of Artificial Sequence: Synthetic oligonucleotide
  Antisense strand to SEQ ID NO: 33508
augccagaaagcuaucguu

SEQ ID NO: 33510 - RNA, 19 nt, Artificial Sequence
  Description of Artificial Sequence: Synthetic oligonucleotide
  Sense strand starting at position 3139 of SEQ ID NO: 392
ggguuuguguguauaagug

SEQ ID NO: 33511 - RNA, 19 nt, Artificial Sequence
  Description of Artificial Sequence: Synthetic oligonucleotide
  Antisense strand to SEQ ID NO: 33510
cacuuauacacacaaaccc

SEQ ID NO: 33512 - RNA, 19 nt, Artificial Sequence
  Description of Artificial Sequence: Synthetic oligonucleotide
  Sense strand starting at position 3284 of SEQ ID NO: 392
guagcaggagcuuaacaaa

SEQ ID NO: 33513 - RNA, 19 nt, Artificial Sequence
  Description of Artificial Sequence: Synthetic oligonucleotide
  Antisense strand to SEQ ID NO: 33512
uuuguuaagcuccugcuac

SEQ ID NO: 33514 - RNA, 19 nt, Artificial Sequence
  Description of Artificial Sequence: Synthetic oligonucleotide
  Sense strand starting at position 3340 of SEQ ID NO: 392
ugauuccuucagugggaag

SEQ ID NO: 33515 - RNA, 19 nt, Artificial Sequence
  Description of Artificial Sequence: Synthetic oligonucleotide
  Antisense strand to SEQ ID NO: 33514
cuucccacugaaggaauca

SEQ ID NO: 33516 - RNA, 19 nt, Artificial Sequence
  Description of Artificial Sequence: Synthetic oligonucleotide
  Sense strand starting at position 3432 of SEQ ID NO: 392
gguucuuugaguuggacuc

SEQ ID NO: 33517 - RNA, 19 nt, Artificial Sequence
  Description of Artificial Sequence: Synthetic oligonucleotide
  Antisense strand to SEQ ID NO: 33516
gaguccaacucaaagaacc

SEQ ID NO: 33518 - RNA, 19 nt, Artificial Sequence
  Description of Artificial Sequence: Synthetic oligonucleotide
  Sense strand starting at position 3433 of SEQ ID NO: 392
guucuuugaguuggacuca

SEQ ID NO: 33519 - RNA, 19 nt, Artificial Sequence
  Description of Artificial Sequence: Synthetic oligonucleotide
  Antisense strand to SEQ ID NO: 33518
ugaguccaacucaaagaac

SEQ ID NO: 33520 - RNA, 19 nt, Artificial Sequence
  Description of Artificial Sequence: Synthetic oligonucleotide
  Sense strand starting at position 3598 of SEQ ID NO: 392
gcccucagugcagggauua

SEQ ID NO: 33521 - RNA, 19 nt, Artificial Sequence
  Description of Artificial Sequence: Synthetic oligonucleotide
  Antisense strand to SEQ ID NO: 33520
uaaucccugcacugagggc

SEQ ID NO: 33522 - RNA, 19 nt, Artificial Sequence
  Description of Artificial Sequence: Synthetic oligonucleotide
  Sense strand starting at position 3599 of SEQ ID NO: 392
cccucagugcagggauuau

SEQ ID NO: 33523 - RNA, 19 nt, Artificial Sequence
  Description of Artificial Sequence: Synthetic oligonucleotide
  Antisense strand to SEQ ID NO: 33522
auaaucccugcacugaggg

SEQ ID NO: 33524 - RNA, 19 nt, Artificial Sequence
  Description of Artificial Sequence: Synthetic oligonucleotide
  Sense strand starting at position 3608 of SEQ ID NO: 392
cagggauuaucuguggaca

SEQ ID NO: 33525 - RNA, 19 nt, Artificial Sequence
  Description of Artificial Sequence: Synthetic oligonucleotide
  Antisense strand to SEQ ID NO: 33524
uguccacagauaaucccug

SEQ ID NO: 33526 - RNA, 19 nt, Artificial Sequence
  Description of Artificial Sequence: Synthetic oligonucleotide
  Sense strand starting at position 3609 of SEQ ID NO: 392
agggauuaucuguggacau

SEQ ID NO: 33527 - RNA, 19 nt, Artificial Sequence
  Description of Artificial Sequence: Synthetic oligonucleotide
  Antisense strand to SEQ ID NO: 33526
auguccacagauaaucccu

SEQ ID NO: 33528 - RNA, 19 nt, Artificial Sequence
  Description of Artificial Sequence: Synthetic oligonucleotide
  Sense strand starting at position 3814 of SEQ ID NO: 392
gccuccauuccugagcuau

SEQ ID NO: 33529 - RNA, 19 nt, Artificial Sequence
  Description of Artificial Sequence: Synthetic oligonucleotide
  Antisense strand to SEQ ID NO: 33528
auagcucaggaauggaggc

SEQ ID NO: 33530 - RNA, 19 nt, Artificial Sequence
  Description of Artificial Sequence: Synthetic oligonucleotide
  Sense strand starting at position 3845 of SEQ ID NO: 392
gcuucucuucuggaaggga

SEQ ID NO: 33531 - RNA, 19 nt, Artificial Sequence
  Description of Artificial Sequence: Synthetic oligonucleotide
  Antisense strand to SEQ ID NO: 33530
ucccuuccagaagagaagc

SEQ ID NO: 33532 - RNA, 19 nt, Artificial Sequence
  Description of Artificial Sequence: Synthetic oligonucleotide
  Sense strand starting at position 121 of SEQ ID NO: 391
ccaugugaccgccagacaa

SEQ ID NO: 33533 - RNA, 19 nt, Artificial Sequence
  Description of Artificial Sequence: Synthetic oligonucleotide
  Antisense strand to SEQ ID NO: 33532
uugucuggcggucacaugg

SEQ ID NO: 33534 - RNA, 19 nt, Artificial Sequence
  Description of Artificial Sequence: Synthetic oligonucleotide
  Sense strand starting at position 129 of SEQ ID NO: 391
ccgccagacaaguaagagu

SEQ ID NO: 33535 - RNA, 19 nt, Artificial Sequence
  Description of Artificial Sequence: Synthetic oligonucleotide
  Antisense strand to SEQ ID NO: 33534
acucuuacuugucuggcgg

SEQ ID NO: 33536 - RNA, 19 nt, Artificial Sequence
  Description of Artificial Sequence: Synthetic oligonucleotide
  Sense strand starting at position 610 of SEQ ID NO: 391
ccacgcuuuccacauugaa

SEQ ID NO: 33537 - RNA, 19 nt, Artificial Sequence
  Description of Artificial Sequence: Synthetic oligonucleotide
  Antisense strand to SEQ ID NO: 33536
uucaauguggaaagcgugg

SEQ ID NO: 33538 - RNA, 19 nt, Artificial Sequence
  Description of Artificial Sequence: Synthetic oligonucleotide
  Sense strand starting at position 665 of SEQ ID NO: 391
aucugaggcugcucagauu

SEQ ID NO: 33539 - RNA, 19 nt, Artificial Sequence
  Description of Artificial Sequence: Synthetic oligonucleotide
  Antisense strand to SEQ ID NO: 33538
aaucugagcagccucagau

SEQ ID NO: 33540 - RNA, 19 nt, Artificial Sequence
  Description of Artificial Sequence: Synthetic oligonucleotide
  Sense strand starting at position 758 of SEQ ID NO: 391
ccuccauucuuucuugagu

SEQ ID NO: 33541 - RNA, 19 nt, Artificial Sequence
  Description of Artificial Sequence: Synthetic oligonucleotide
  Antisense strand to SEQ ID NO: 33540
acucaagaaagaauggagg

SEQ ID NO: 33542 - RNA, 19 nt, Artificial Sequence
  Description of Artificial Sequence: Synthetic oligonucleotide
  Sense strand starting at position 759 of SEQ ID NO: 391
cuccauucuuucuugaguu

SEQ ID NO: 33543 - RNA, 19 nt, Artificial Sequence
  Description of Artificial Sequence: Synthetic oligonucleotide
  Antisense strand to SEQ ID NO: 33542
aacucaagaaagaauggag

SEQ ID NO: 33544 - RNA, 19 nt, Artificial Sequence
  Description of Artificial Sequence: Synthetic oligonucleotide
  Sense strand starting at position 796 of SEQ ID NO: 391
cacccauaugucugggauc

SEQ ID NO: 33545 - RNA, 19 nt, Artificial Sequence
  Description of Artificial Sequence: Synthetic oligonucleotide
  Antisense strand to SEQ ID NO: 33544
gaucccagacauaugggug

SEQ ID NO: 33546 - RNA, 19 nt, Artificial Sequence
  Description of Artificial Sequence: Synthetic oligonucleotide
  Sense strand starting at position 798 of SEQ ID NO: 391
cccauaugucugggaucca

SEQ ID NO: 33547 - RNA, 19 nt, Artificial Sequence
  Description of Artificial Sequence: Synthetic oligonucleotide
  Antisense strand to SEQ ID NO: 33546
uggaucccagacauauggg

SEQ ID NO: 33548 - RNA, 19 nt, Artificial Sequence
  Description of Artificial Sequence: Synthetic oligonucleotide
  Sense strand starting at position 878 of SEQ ID NO: 391
ggguuuccugaucacucua

SEQ ID NO: 33549 - RNA, 19 nt, Artificial Sequence
  Description of Artificial Sequence: Synthetic oligonucleotide
  Antisense strand to SEQ ID NO: 33548
uagagugaucaggaaaccc

SEQ ID NO: 33550 - RNA, 19 nt, Artificial Sequence
  Description of Artificial Sequence: Synthetic oligonucleotide
  Sense strand starting at position 886 of SEQ ID NO: 391
ugaucacucuagcugaguu

SEQ ID NO: 33551 - RNA, 19 nt, Artificial Sequence
  Description of Artificial Sequence: Synthetic oligonucleotide
  Antisense strand to SEQ ID NO: 33550
aacucagcuagagugauca

SEQ ID NO: 33552 - RNA, 19 nt, Artificial Sequence
  Description of Artificial Sequence: Synthetic oligonucleotide
  Sense strand starting at position 1070 of SEQ ID NO: 391
guguacuuguccuugauga

SEQ ID NO: 33553 - RNA, 19 nt, Artificial Sequence
  Description of Artificial Sequence: Synthetic oligonucleotide
  Antisense strand to SEQ ID NO: 33552
ucaucaaggacaaguacac

SEQ ID NO: 33554 - RNA, 19 nt, Artificial Sequence
  Description of Artificial Sequence: Synthetic oligonucleotide
  Sense strand starting at position 1071 of SEQ ID NO: 391
uguacuuguccuugaugac

SEQ ID NO: 33555 - RNA, 19 nt, Artificial Sequence
  Description of Artificial Sequence: Synthetic oligonucleotide
  Antisense strand to SEQ ID NO: 33554
gucaucaaggacaaguaca

SEQ ID NO: 33556 - RNA, 19 nt, Artificial Sequence
  Description of Artificial Sequence: Synthetic oligonucleotide
  Sense strand starting at position 1072 of SEQ ID NO: 391
guacuuguccuugaugaca

SEQ ID NO: 33557 - RNA, 19 nt, Artificial Sequence
  Description of Artificial Sequence: Synthetic oligonucleotide
  Antisense strand to SEQ ID NO: 33556
ugucaucaaggacaaguac

SEQ ID NO: 33558 - RNA, 19 nt, Artificial Sequence
  Description of Artificial Sequence: Synthetic oligonucleotide
  Sense strand starting at position 1083 of SEQ ID NO: 391
ugaugacagucagcucaaa

SEQ ID NO: 33559 - RNA, 19 nt, Artificial Sequence
  Description of Artificial Sequence: Synthetic oligonucleotide
  Antisense strand to SEQ ID NO: 33558
uuugagcugacugucauca

SEQ ID NO: 33560 - RNA, 19 nt, Artificial Sequence
  Description of Artificial Sequence: Synthetic oligonucleotide
  Sense strand starting at position 1106 of SEQ ID NO: 391
cgaccaaacuguucgaaga

SEQ ID NO: 33561 - RNA, 19 nt, Artificial Sequence
  Description of Artificial Sequence: Synthetic oligonucleotide
  Antisense strand to SEQ ID NO: 33560
ucuucgaacaguuuggucg

SEQ ID NO: 33562 - RNA, 19 nt, Artificial Sequence
  Description of Artificial Sequence: Synthetic oligonucleotide
  Sense strand starting at position 1107 of SEQ ID NO: 391
gaccaaacuguucgaagau

SEQ ID NO: 33563 - RNA, 19 nt, Artificial Sequence
  Description of Artificial Sequence: Synthetic oligonucleotide
  Antisense strand to SEQ ID NO: 33562
aucuucgaacaguuugguc

SEQ ID NO: 33564 - RNA, 19 nt, Artificial Sequence
  Description of Artificial Sequence: Synthetic oligonucleotide
  Sense strand starting at position 1133 of SEQ ID NO: 391
agguccuucuccuccagau

SEQ ID NO: 33565 - RNA, 19 nt, Artificial Sequence
  Description of Artificial Sequence: Synthetic oligonucleotide
  Antisense strand to SEQ ID NO: 33564
aucuggaggagaaggaccu

SEQ ID NO: 33566 - RNA, 19 nt, Artificial Sequence
  Description of Artificial Sequence: Synthetic oligonucleotide
  Sense strand starting at position 1770 of SEQ ID NO: 391
ccagaugcuugaucucuga

SEQ ID NO: 33567 - RNA, 19 nt, Artificial Sequence
  Description of Artificial Sequence: Synthetic oligonucleotide
  Antisense strand to SEQ ID NO: 33566
ucagagaucaagcaucugg

SEQ ID NO: 33568 - RNA, 19 nt, Artificial Sequence
  Description of Artificial Sequence: Synthetic oligonucleotide
  Sense strand starting at position 2024 of SEQ ID NO: 391
cccugacaucagugauguc

SEQ ID NO: 33569 - RNA, 19 nt, Artificial Sequence
  Description of Artificial Sequence: Synthetic oligonucleotide
  Antisense strand to SEQ ID NO: 33568
gacaucacugaugucaggg

SEQ ID NO: 33570 - RNA, 19 nt, Artificial Sequence
  Description of Artificial Sequence: Synthetic oligonucleotide
  Sense strand starting at position 2161 of SEQ ID NO: 391
gcugguccuguugauaaua

SEQ ID NO: 33571 - RNA, 19 nt, Artificial Sequence
  Description of Artificial Sequence: Synthetic oligonucleotide
  Antisense strand to SEQ ID NO: 33570
uauuaucaacaggaccagc

SEQ ID NO: 33572 - RNA, 19 nt, Artificial Sequence
  Description of Artificial Sequence: Synthetic oligonucleotide
  Sense strand starting at position 2296 of SEQ ID NO: 391
cuggaagacucagcagaug

SEQ ID NO: 33573 - RNA, 19 nt, Artificial Sequence
  Description of Artificial Sequence: Synthetic oligonucleotide
  Antisense strand to SEQ ID NO: 33572
caucugcugagucuuccag

SEQ ID NO: 33574 - RNA, 19 nt, Artificial Sequence
  Description of Artificial Sequence: Synthetic oligonucleotide
  Sense strand starting at position 2587 of SEQ ID NO: 391
aacgauagcuuucuggcau

SEQ ID NO: 33575 - RNA, 19 nt, Artificial Sequence
  Description of Artificial Sequence: Synthetic oligonucleotide
  Antisense strand to SEQ ID NO: 33574
augccagaaagcuaucguu

SEQ ID NO: 33576 - RNA, 19 nt, Artificial Sequence
  Description of Artificial Sequence: Synthetic oligonucleotide
  Sense strand starting at position 2635 of SEQ ID NO: 391
ggguuuguguguauaagug

SEQ ID NO: 33577 - RNA, 19 nt, Artificial Sequence
  Description of Artificial Sequence: Synthetic oligonucleotide
  Antisense strand to SEQ ID NO: 33576
cacuuauacacacaaaccc

SEQ ID NO: 33578 - RNA, 19 nt, Artificial Sequence
  Description of Artificial Sequence: Synthetic oligonucleotide
  Sense strand starting at position 2780 of SEQ ID NO: 391
guagcaggagcuuaacaaa

SEQ ID NO: 33579 - RNA, 19 nt, Artificial Sequence
  Description of Artificial Sequence: Synthetic oligonucleotide
  Antisense strand to SEQ ID NO: 33578
uuuguuaagcuccugcuac

SEQ ID NO: 33580 - RNA, 19 nt, Artificial Sequence
  Description of Artificial Sequence: Synthetic oligonucleotide
  Sense strand starting at position 2836 of SEQ ID NO: 391
ugauuccuucagugggaag

SEQ ID NO: 33581 - RNA, 19 nt, Artificial Sequence
  Description of Artificial Sequence: Synthetic oligonucleotide
  Antisense strand to SEQ ID NO: 33580
cuucccacugaaggaauca

SEQ ID NO: 33582 - RNA, 19 nt, Artificial Sequence
  Description of Artificial Sequence: Synthetic oligonucleotide
  Sense strand starting at position 2921 of SEQ ID NO: 391
ucaguuggguucuuugagu

SEQ ID NO: 33583 - RNA, 19 nt, Artificial Sequence
  Description of Artificial Sequence: Synthetic oligonucleotide
  Antisense strand to SEQ ID NO: 33582
acucaaagaacccaacuga

SEQ ID NO: 33584 - RNA, 19 nt, Artificial Sequence
  Description of Artificial Sequence: Synthetic oligonucleotide
  Sense strand starting at position 2928 of SEQ ID NO: 391
gguucuuugaguuggacuc

SEQ ID NO: 33585 - RNA, 19 nt, Artificial Sequence
  Description of Artificial Sequence: Synthetic oligonucleotide
  Antisense strand to SEQ ID NO: 33584
gaguccaacucaaagaacc

SEQ ID NO: 33586 - RNA, 19 nt, Artificial Sequence
  Description of Artificial Sequence: Synthetic oligonucleotide
  Sense strand starting at position 2929 of SEQ ID NO: 391
guucuuugaguuggacuca

SEQ ID NO: 33587 - RNA, 19 nt, Artificial Sequence
  Description of Artificial Sequence: Synthetic oligonucleotide
  Antisense strand to SEQ ID NO: 33586
ugaguccaacucaaagaac

SEQ ID NO: 33588 - RNA, 19 nt, Artificial Sequence
  Description of Artificial Sequence: Synthetic oligonucleotide
  Sense strand starting at position 3094 of SEQ ID NO: 391
gcccucagugcagggauua

SEQ ID NO: 33589 - RNA, 19 nt, Artificial Sequence
  Description of Artificial Sequence: Synthetic oligonucleotide
  Antisense strand to SEQ ID NO: 33588
uaaucccugcacugagggc

SEQ ID NO: 33590 - RNA, 19 nt, Artificial Sequence
  Description of Artificial Sequence: Synthetic oligonucleotide
  Sense strand starting at position 3095 of SEQ ID NO: 391
cccucagugcagggauuau

SEQ ID NO: 33591 - RNA, 19 nt, Artificial Sequence
  Description of Artificial Sequence: Synthetic oligonucleotide
  Antisense strand to SEQ ID NO: 33590
auaaucccugcacugaggg

SEQ ID NO: 33592 - RNA, 19 nt, Artificial Sequence
  Description of Artificial Sequence: Synthetic oligonucleotide
  Sense strand starting at position 3104 of SEQ ID NO: 391
cagggauuaucuguggaca

SEQ ID NO: 33593 - RNA, 19 nt, Artificial Sequence
  Description of Artificial Sequence: Synthetic oligonucleotide
  Antisense strand to SEQ ID NO: 33592
uguccacagauaaucccug

SEQ ID NO: 33594 - RNA, 19 nt, Artificial Sequence
  Description of Artificial Sequence: Synthetic oligonucleotide
  Sense strand starting at position 3105 of SEQ ID NO: 391
agggauuaucuguggacau

SEQ ID NO: 33595 - RNA, 19 nt, Artificial Sequence
  Description of Artificial Sequence: Synthetic oligonucleotide
  Antisense strand to SEQ ID NO: 33594
auguccacagauaaucccu

SEQ ID NO: 33596 - RNA, 19 nt, Artificial Sequence
  Description of Artificial Sequence: Synthetic oligonucleotide
  Sense strand starting at position 3126 of SEQ ID NO: 391
aaccuugucagugguggua

SEQ ID NO: 33597 - RNA, 19 nt, Artificial Sequence
  Description of Artificial Sequence: Synthetic oligonucleotide
  Antisense strand to SEQ ID NO: 33596
uaccaccacugacaagguu

SEQ ID NO: 33598 - RNA, 19 nt, Artificial Sequence
  Description of Artificial Sequence: Synthetic oligonucleotide
  Sense strand starting at position 3310 of SEQ ID NO: 391
gccuccauuccugagcuau

SEQ ID NO: 33599 - RNA, 19 nt, Artificial Sequence
  Description of Artificial Sequence: Synthetic oligonucleotide
  Antisense strand to SEQ ID NO: 33598
auagcucaggaauggaggc

SEQ ID NO: 33600 - RNA, 19 nt, Artificial Sequence
  Description of Artificial Sequence: Synthetic oligonucleotide
  Sense strand starting at position 3341 of SEQ ID NO: 391
gcuucucuucuggaaggga

SEQ ID NO: 33601 - RNA, 19 nt, Artificial Sequence
  Description of Artificial Sequence: Synthetic oligonucleotide
  Antisense strand to SEQ ID NO: 33600
ucccuuccagaagagaagc

SEQ ID NO: 33602 - RNA, 19 nt, Artificial Sequence
  Description of Artificial Sequence: Synthetic oligonucleotide
  Sense strand starting at position 3788 of SEQ ID NO: 391
ggugcuugcauuugaguga

SEQ ID NO: 33603 - RNA, 19 nt, Artificial Sequence
  Description of Artificial Sequence: Synthetic oligonucleotide
  Antisense strand to SEQ ID NO: 33602
ucacucaaaugcaagcacc

SEQ ID NO: 33604 - RNA, 19 nt, Artificial Sequence
  Description of Artificial Sequence: Synthetic oligonucleotide
  Sense strand starting at position 3791 of SEQ ID NO: 391
gcuugcauuugagugaaug

SEQ ID NO: 33605 - RNA, 19 nt, Artificial Sequence
  Description of Artificial Sequence: Synthetic oligonucleotide
  Antisense strand to SEQ ID NO: 33604
cauucacucaaaugcaagc

SEQ ID NO: 33606 - RNA, 19 nt, Artificial Sequence
  Description of Artificial Sequence: Synthetic oligonucleotide
  Sense strand starting at position 3792 of SEQ ID NO: 391
cuugcauuugagugaaugu

SEQ ID NO: 33607 - RNA, 19 nt, Artificial Sequence
  Description of Artificial Sequence: Synthetic oligonucleotide
  Antisense strand to SEQ ID NO: 33606
acauucacucaaaugcaag

SEQ ID NO: 33608 - RNA, 19 nt, Artificial Sequence
  Description of Artificial Sequence: Synthetic oligonucleotide
  Sense strand starting at position 3815 of SEQ ID NO: 391
guguguagacuugauuaca

SEQ ID NO: 33609 - RNA, 19 nt, Artificial Sequence
  Description of Artificial Sequence: Synthetic oligonucleotide
  Antisense strand to SEQ ID NO: 33608
uguaaucaagucuacacac

SEQ ID NO: 33610 - RNA, 19 nt, Artificial Sequence
  Description of Artificial Sequence: Synthetic oligonucleotide
  Sense strand starting at position 3818 of SEQ ID NO: 391
uguagacuugauuacacuu

SEQ ID NO: 33611 - RNA, 19 nt, Artificial Sequence
  Description of Artificial Sequence: Synthetic oligonucleotide
  Antisense strand to SEQ ID NO: 33610
aaguguaaucaagucuaca

SEQ ID NO: 33612 - RNA, 19 nt, Artificial Sequence
  Description of Artificial Sequence: Synthetic oligonucleotide
  Sense strand starting at position 3681 of SEQ ID NO: 393
ugaguagugcugcuggguu

SEQ ID NO: 33613 - RNA, 19 nt, Artificial Sequence
  Description of Artificial Sequence: Synthetic oligonucleotide
  Antisense strand to SEQ ID NO: 33612
aacccagcagcacuacuca

SEQ ID NO: 33614 - RNA, 19 nt, Artificial Sequence
  Description of Artificial Sequence: Synthetic oligonucleotide
  Sense strand starting at position 3595 of SEQ ID NO: 393
ggugaaugguucucaaaug

SEQ ID NO: 33615 - RNA, 19 nt, Artificial Sequence
  Description of Artificial Sequence: Synthetic oligonucleotide
  Antisense strand to SEQ ID NO: 33614
cauuugagaaccauucacc

SEQ ID NO: 33616 - RNA, 19 nt, Artificial Sequence
  Description of Artificial Sequence: Synthetic oligonucleotide
  Sense strand starting at position 3592 of SEQ ID NO: 393
uaaggugaaugguucucaa

SEQ ID NO: 33617 - RNA, 19 nt, Artificial Sequence
  Description of Artificial Sequence: Synthetic oligonucleotide
  Antisense strand to SEQ ID NO: 33616
uugagaaccauucaccuua

SEQ ID NO: 33618 - RNA, 19 nt, Artificial Sequence
  Description of Artificial Sequence: Synthetic oligonucleotide
  Sense strand starting at position 3583 of SEQ ID NO: 393
gggauugaauaaggugaau

SEQ ID NO: 33619 - RNA, 19 nt, Artificial Sequence
  Description of Artificial Sequence: Synthetic oligonucleotide
  Antisense strand to SEQ ID NO: 33618
auucaccuuauucaauccc

SEQ ID NO: 33620 - RNA, 19 nt, Artificial Sequence
  Description of Artificial Sequence: Synthetic oligonucleotide
  Sense strand starting at position 3532 of SEQ ID NO: 393
augugaccuugcucaaauu

SEQ ID NO: 33621 - RNA, 19 nt, Artificial Sequence
  Description of Artificial Sequence: Synthetic oligonucleotide
  Antisense strand to SEQ ID NO: 33620
aauuugagcaaggucacau

SEQ ID NO: 33622 - RNA, 19 nt, Artificial Sequence
  Description of Artificial Sequence: Synthetic oligonucleotide
  Sense strand starting at position 3135 of SEQ ID NO: 393
cuuccuggauucuagacaa

SEQ ID NO: 33623 - RNA, 19 nt, Artificial Sequence
  Description of Artificial Sequence: Synthetic oligonucleotide
  Antisense strand to SEQ ID NO: 33622
uugucuagaauccaggaag

SEQ ID NO: 33624 - RNA, 19 nt, Artificial Sequence
  Description of Artificial Sequence: Synthetic oligonucleotide
  Sense strand starting at position 3130 of SEQ ID NO: 393
acaggcuuccuggauucua

SEQ ID NO: 33625 - RNA, 19 nt, Artificial Sequence
  Description of Artificial Sequence: Synthetic oligonucleotide
  Antisense strand to SEQ ID NO: 33624
uagaauccaggaagccugu

SEQ ID NO: 33626 - RNA, 19 nt, Artificial Sequence
  Description of Artificial Sequence: Synthetic oligonucleotide
  Sense strand starting at position 3114 of SEQ ID NO: 393
ggagccuagcuuuaacaca

SEQ ID NO: 33627 - RNA, 19 nt, Artificial Sequence
  Description of Artificial Sequence: Synthetic oligonucleotide
  Antisense strand to SEQ ID NO: 33626
uguguuaaagcuaggcucc

SEQ ID NO: 33628 - RNA, 19 nt, Artificial Sequence
  Description of Artificial Sequence: Synthetic oligonucleotide
  Sense strand starting at position 2944 of SEQ ID NO: 393
gcuguugucugaccagcau

SEQ ID NO: 33629 - RNA, 19 nt, Artificial Sequence
  Description of Artificial Sequence: Synthetic oligonucleotide
  Antisense strand to SEQ ID NO: 33628
augcuggucagacaacagc

SEQ ID NO: 33630 - RNA, 19 nt, Artificial Sequence
  Description of Artificial Sequence: Synthetic oligonucleotide
  Sense strand starting at position 2721 of SEQ ID NO: 393
uaaguaugccuagagguuu

SEQ ID NO: 33631 - RNA, 19 nt, Artificial Sequence
  Description of Artificial Sequence: Synthetic oligonucleotide
  Antisense strand to SEQ ID NO: 33630
aaaccucuaggcauacuua

SEQ ID NO: 33632 - RNA, 19 nt, Artificial Sequence
  Description of Artificial Sequence: Synthetic oligonucleotide
  Sense strand starting at position 2709 of SEQ ID NO: 393
guggaaguacccuaaguau

SEQ ID NO: 33633 - RNA, 19 nt, Artificial Sequence
  Description of Artificial Sequence: Synthetic oligonucleotide
  Antisense strand to SEQ ID NO: 33632
auacuuaggguacuuccac

SEQ ID NO: 33634 - RNA, 19 nt, Artificial Sequence
  Description of Artificial Sequence: Synthetic oligonucleotide
  Sense strand starting at position 2699 of SEQ ID NO: 393
gauaaucaugguggaagua

SEQ ID NO: 33635 - RNA, 19 nt, Artificial Sequence
  Description of Artificial Sequence: Synthetic oligonucleotide
  Antisense strand to SEQ ID NO: 33634
uacuuccaccaugauuauc

SEQ ID NO: 33636 - RNA, 19 nt, Artificial Sequence
  Description of Artificial Sequence: Synthetic oligonucleotide
  Sense strand starting at position 2698 of SEQ ID NO: 393
ugauaaucaugguggaagu

SEQ ID NO: 33637 - RNA, 19 nt, Artificial Sequence
  Description of Artificial Sequence: Synthetic oligonucleotide
  Antisense strand to SEQ ID NO: 33636
acuuccaccaugauuauca

SEQ ID NO: 33638 - RNA, 19 nt, Artificial Sequence
  Description of Artificial Sequence: Synthetic oligonucleotide
  Sense strand starting at position 2695 of SEQ ID NO: 393
cgaugauaaucauggugga

SEQ ID NO: 33639 - RNA, 19 nt, Artificial Sequence
  Description of Artificial Sequence: Synthetic oligonucleotide
  Antisense strand to SEQ ID NO: 33638
uccaccaugauuaucaucg

SEQ ID NO: 33640 - RNA, 19 nt, Artificial Sequence
  Description of Artificial Sequence: Synthetic oligonucleotide
  Sense strand starting at position 2686 of SEQ ID NO: 393
ccacacagccgaugauaau

SEQ ID NO: 33641 - RNA, 19 nt, Artificial Sequence
  Description of Artificial Sequence: Synthetic oligonucleotide
  Antisense strand to SEQ ID NO: 33640
auuaucaucggcugugugg

SEQ ID NO: 33642 - RNA, 19 nt, Artificial Sequence
  Description of Artificial Sequence: Synthetic oligonucleotide
  Sense strand starting at position 2665 of SEQ ID NO: 393
gugcgaauuagcgaucgga

SEQ ID NO: 33643 - RNA, 19 nt, Artificial Sequence
  Description of Artificial Sequence: Synthetic oligonucleotide
  Antisense strand to SEQ ID NO: 33642
uccgaucgcuaauucgcac

SEQ ID NO: 33644 - RNA, 19 nt, Artificial Sequence
  Description of Artificial Sequence: Synthetic oligonucleotide
  Sense strand starting at position 2654 of SEQ ID NO: 393
ccagaugcccggugcgaau

SEQ ID NO: 33645 - RNA, 19 nt, Artificial Sequence
  Description of Artificial Sequence: Synthetic oligonucleotide
  Antisense strand to SEQ ID NO: 33644
auucgcaccgggcaucugg

SEQ ID NO: 33646 - RNA, 19 nt, Artificial Sequence
  Description of Artificial Sequence: Synthetic oligonucleotide
  Sense strand starting at position 2496 of SEQ ID NO: 393
ggcucauuaccauagaccu

SEQ ID NO: 33647 - RNA, 19 nt, Artificial Sequence
  Description of Artificial Sequence: Synthetic oligonucleotide
  Antisense strand to SEQ ID NO: 33646
aggucuaugguaaugagcc

SEQ ID NO: 33648 - RNA, 19 nt, Artificial Sequence
  Description of Artificial Sequence: Synthetic oligonucleotide
  Sense strand starting at position 3982 of SEQ ID NO: 394
gugcaaauacuuuaaaugu

SEQ ID NO: 33649 - RNA, 19 nt, Artificial Sequence
  Description of Artificial Sequence: Synthetic oligonucleotide
  Antisense strand to SEQ ID NO: 33648
acauuuaaaguauuugcac

SEQ ID NO: 33650 - RNA, 19 nt, Artificial Sequence
  Description of Artificial Sequence: Synthetic oligonucleotide
  Sense strand starting at position 3939 of SEQ ID NO: 394
gcacuauugcugcagaaug

SEQ ID NO: 33651 - RNA, 19 nt, Artificial Sequence
  Description of Artificial Sequence: Synthetic oligonucleotide
  Antisense strand to SEQ ID NO: 33650
cauucugcagcaauagugc

SEQ ID NO: 33652 - RNA, 19 nt, Artificial Sequence
  Description of Artificial Sequence: Synthetic oligonucleotide
  Sense strand starting at position 3911 of SEQ ID NO: 394
ugugcaaauguccauauca

SEQ ID NO: 33653 - RNA, 19 nt, Artificial Sequence
  Description of Artificial Sequence: Synthetic oligonucleotide
  Antisense strand to SEQ ID NO: 33652
ugauauggacauuugcaca

SEQ ID NO: 33654 - RNA, 19 nt, Artificial Sequence
  Description of Artificial Sequence: Synthetic oligonucleotide
  Sense strand starting at position 3667 of SEQ ID NO: 394
acagauguucucuaagggu

SEQ ID NO: 33655 - RNA, 19 nt, Artificial Sequence
  Description of Artificial Sequence: Synthetic oligonucleotide
  Antisense strand to SEQ ID NO: 33654
acccuuagagaacaucugu

SEQ ID NO: 33656 - RNA, 19 nt, Artificial Sequence
  Description of Artificial Sequence: Synthetic oligonucleotide
  Sense strand starting at position 3666 of SEQ ID NO: 394
gacagauguucucuaaggg

SEQ ID NO: 33657 - RNA, 19 nt, Artificial Sequence
  Description of Artificial Sequence: Synthetic oligonucleotide
  Antisense strand to SEQ ID NO: 33656
cccuuagagaacaucuguc

SEQ ID NO: 33658 - RNA, 19 nt, Artificial Sequence
  Description of Artificial Sequence: Synthetic oligonucleotide
  Sense strand starting at position 3327 of SEQ ID NO: 394
uguauaggcuguuuaagga

SEQ ID NO: 33659 - RNA, 19 nt, Artificial Sequence
  Description of Artificial Sequence: Synthetic oligonucleotide
  Antisense strand to SEQ ID NO: 33658
uccuuaaacagccuauaca

SEQ ID NO: 33660 - RNA, 19 nt, Artificial Sequence
  Description of Artificial Sequence: Synthetic oligonucleotide
  Sense strand starting at position 3301 of SEQ ID NO: 394
ugcuucccagaguaauuau

SEQ ID NO: 33661 - RNA, 19 nt, Artificial Sequence
  Description of Artificial Sequence: Synthetic oligonucleotide
  Antisense strand to SEQ ID NO: 33660
auaauuacucugggaagca

SEQ ID NO: 33662 - RNA, 19 nt, Artificial Sequence
  Description of Artificial Sequence: Synthetic oligonucleotide
  Sense strand starting at position 3215 of SEQ ID NO: 394
agacauugccaugaucagu

SEQ ID NO: 33663 - RNA, 19 nt, Artificial Sequence
  Description of Artificial Sequence: Synthetic oligonucleotide
  Antisense strand to SEQ ID NO: 33662
acugaucauggcaaugucu

SEQ ID NO: 33664 - RNA, 19 nt, Artificial Sequence
  Description of Artificial Sequence: Synthetic oligonucleotide
  Sense strand starting at position 3214 of SEQ ID NO: 394
cagacauugccaugaucag

SEQ ID NO: 33665 - RNA, 19 nt, Artificial Sequence
  Description of Artificial Sequence: Synthetic oligonucleotide
  Antisense strand to SEQ ID NO: 33664
cugaucauggcaaugucug

SEQ ID NO: 33666 - RNA, 19 nt, Artificial Sequence
  Description of Artificial Sequence: Synthetic oligonucleotide
  Sense strand starting at position 2987 of SEQ ID NO: 394
uauuuaugucuacgucuga

SEQ ID NO: 33667 - RNA, 19 nt, Artificial Sequence
  Description of Artificial Sequence: Synthetic oligonucleotide
  Antisense strand to SEQ ID NO: 33666
ucagacguagacauaaaua

SEQ ID NO: 33668 - RNA, 19 nt, Artificial Sequence
  Description of Artificial Sequence: Synthetic oligonucleotide
  Sense strand starting at position 2972 of SEQ ID NO: 394
ccgugucuugucuuguauu

SEQ ID NO: 33669 - RNA, 19 nt, Artificial Sequence
  Description of Artificial Sequence: Synthetic oligonucleotide
  Antisense strand to SEQ ID NO: 33668
aauacaagacaagacacgg

SEQ ID NO: 33670 - RNA, 19 nt, Artificial Sequence
  Description of Artificial Sequence: Synthetic oligonucleotide
  Sense strand starting at position 2782 of SEQ ID NO: 394
ugcuguugucugccucaau

SEQ ID NO: 33671 - RNA, 19 nt, Artificial Sequence
  Description of Artificial Sequence: Synthetic oligonucleotide
  Antisense strand to SEQ ID NO: 33670
auugaggcagacaacagca

SEQ ID NO: 33672 - RNA, 19 nt, Artificial Sequence
  Description of Artificial Sequence: Synthetic oligonucleotide
  Sense strand starting at position 2767 of SEQ ID NO: 394
guaauagaucucuaaugcu

SEQ ID NO: 33673 - RNA, 19 nt, Artificial Sequence
  Description of Artificial Sequence: Synthetic oligonucleotide
  Antisense strand to SEQ ID NO: 33672
agcauuagagaucuauuac

SEQ ID NO: 33674 - RNA, 19 nt, Artificial Sequence
  Description of Artificial Sequence: Synthetic oligonucleotide
  Sense strand starting at position 2560 of SEQ ID NO: 394
cgugauucugaacacuuau

SEQ ID NO: 33675 - RNA, 19 nt, Artificial Sequence
  Description of Artificial Sequence: Synthetic oligonucleotide
  Antisense strand to SEQ ID NO: 33674
auaaguguucagaaucacg

SEQ ID NO: 33676 - RNA, 19 nt, Artificial Sequence
  Description of Artificial Sequence: Synthetic oligonucleotide
  Sense strand starting at position 2427 of SEQ ID NO: 394
aggaaaguauuauccucau

SEQ ID NO: 33677 - RNA, 19 nt, Artificial Sequence
  Description of Artificial Sequence: Synthetic oligonucleotide
  Antisense strand to SEQ ID NO: 33676
augaggauaauacuuuccu

SEQ ID NO: 33678 - RNA, 19 nt, Artificial Sequence
  Description of Artificial Sequence: Synthetic oligonucleotide
  Sense strand starting at position 2400 of SEQ ID NO: 394
uccggugucguucuuaaca

SEQ ID NO: 33679 - RNA, 19 nt, Artificial Sequence
  Description of Artificial Sequence: Synthetic oligonucleotide
  Antisense strand to SEQ ID NO: 33678
uguuaagaacgacaccgga

SEQ ID NO: 33680 - RNA, 19 nt, Artificial Sequence
  Description of Artificial Sequence: Synthetic oligonucleotide
  Sense strand starting at position 2378 of SEQ ID NO: 394
uguguuugucaugcauucu

SEQ ID NO: 33681 - RNA, 19 nt, Artificial Sequence
  Description of Artificial Sequence: Synthetic oligonucleotide
  Antisense strand to SEQ ID NO: 33680
agaaugcaugacaaacaca

SEQ ID NO: 33682 - RNA, 19 nt, Artificial Sequence
  Description of Artificial Sequence: Synthetic oligonucleotide
  Sense strand starting at position 2347 of SEQ ID NO: 394
aacguaaauuuaggacaua

SEQ ID NO: 33683 - RNA, 19 nt, Artificial Sequence
  Description of Artificial Sequence: Synthetic oligonucleotide
  Antisense strand to SEQ ID NO: 33682
uauguccuaaauuuacguu

SEQ ID NO: 33684 - RNA, 19 nt, Artificial Sequence
  Description of Artificial Sequence: Synthetic oligonucleotide
  Sense strand starting at position 2239 of SEQ ID NO: 394
gggaaugcgcccgcugauu

SEQ ID NO: 33685 - RNA, 19 nt, Artificial Sequence
  Description of Artificial Sequence: Synthetic oligonucleotide
  Antisense strand to SEQ ID NO: 33684
aaucagcgggcgcauuccc

SEQ ID NO: 33686 - RNA, 19 nt, Artificial Sequence
  Description of Artificial Sequence: Synthetic oligonucleotide
  Sense strand starting at position 2088 of SEQ ID NO: 394
ggcccuuucggauggauuu

SEQ ID NO: 33687 - RNA, 19 nt, Artificial Sequence
  Description of Artificial Sequence: Synthetic oligonucleotide
  Antisense strand to SEQ ID NO: 33686
aaauccauccgaaagggcc

SEQ ID NO: 33688 - RNA, 19 nt, Artificial Sequence
  Description of Artificial Sequence: Synthetic oligonucleotide
  Sense strand starting at position 2069 of SEQ ID NO: 394
cagacugccgcgucugauu

SEQ ID NO: 33689 - RNA, 19 nt, Artificial Sequence
  Description of Artificial Sequence: Synthetic oligonucleotide
  Antisense strand to SEQ ID NO: 33688
aaucagacgcggcagucug

SEQ ID NO: 33690 - RNA, 19 nt, Artificial Sequence
  Description of Artificial Sequence: Synthetic oligonucleotide
  Sense strand starting at position 2020 of SEQ ID NO: 394
gccuauuggucacucuaag

SEQ ID NO: 33691 - RNA, 19 nt, Artificial Sequence
  Description of Artificial Sequence: Synthetic oligonucleotide
  Antisense strand to SEQ ID NO: 33690
cuuagagugaccaauaggc

SEQ ID NO: 33692 - RNA, 19 nt, Artificial Sequence
  Description of Artificial Sequence: Synthetic oligonucleotide
  Sense strand starting at position 2018 of SEQ ID NO: 394
acgccuauuggucacucua

SEQ ID NO: 33693 - RNA, 19 nt, Artificial Sequence
  Description of Artificial Sequence: Synthetic oligonucleotide
  Antisense strand to SEQ ID NO: 33692
uagagugaccaauaggcgu

SEQ ID NO: 33694 - RNA, 19 nt, Artificial Sequence
  Description of Artificial Sequence: Synthetic oligonucleotide
  Sense strand starting at position 1741 of SEQ ID NO: 394
ccgggagagugaucccaga

SEQ ID NO: 33695 - RNA, 19 nt, Artificial Sequence
  Description of Artificial Sequence: Synthetic oligonucleotide
  Antisense strand to SEQ ID NO: 33694
ucugggaucacucucccgg

SEQ ID NO: 33696 - RNA, 19 nt, Artificial Sequence
  Description of Artificial Sequence: Synthetic oligonucleotide
  Sense strand starting at position 1634 of SEQ ID NO: 394
caguuugaacccgagcaga

SEQ ID NO: 33697 - RNA, 19 nt, Artificial Sequence
  Description of Artificial Sequence: Synthetic oligonucleotide
  Antisense strand to SEQ ID NO: 33696
ucugcucggguucaaacug

SEQ ID NO: 33698 - RNA, 19 nt, Artificial Sequence
  Description of Artificial Sequence: Synthetic oligonucleotide
  Sense strand starting at position 1619 of SEQ ID NO: 394
acacuaauccgagaccagu

SEQ ID NO: 33699 - RNA, 19 nt, Artificial Sequence
  Description of Artificial Sequence: Synthetic oligonucleotide
  Antisense strand to SEQ ID NO: 33698
acuggucucggauuagugu

SEQ ID NO: 33700 - RNA, 19 nt, Artificial Sequence
  Description of Artificial Sequence: Synthetic oligonucleotide
  Sense strand starting at position 1534 of SEQ ID NO: 394
ggaaauaccuagucaucuc

SEQ ID NO: 33701 - RNA, 19 nt, Artificial Sequence
  Description of Artificial Sequence: Synthetic oligonucleotide
  Antisense strand to SEQ ID NO: 33700
gagaugacuagguauuucc

SEQ ID NO: 33702 - RNA, 19 nt, Artificial Sequence
  Description of Artificial Sequence: Synthetic oligonucleotide
  Sense strand starting at position 1321 of SEQ ID NO: 394
gcaauauagggaggccuau

SEQ ID NO: 33703 - RNA, 19 nt, Artificial Sequence
  Description of Artificial Sequence: Synthetic oligonucleotide
  Antisense strand to SEQ ID NO: 33702
auaggccucccuauauugc

SEQ ID NO: 33704 - RNA, 19 nt, Artificial Sequence
  Description of Artificial Sequence: Synthetic oligonucleotide
  Sense strand starting at position 1088 of SEQ ID NO: 394
caaggcugggucugagaau

SEQ ID NO: 33705 - RNA, 19 nt, Artificial Sequence
  Description of Artificial Sequence: Synthetic oligonucleotide
  Antisense strand to SEQ ID NO: 33704
auucucagacccagccuug

SEQ ID NO: 33706 - RNA, 19 nt, Artificial Sequence
  Description of Artificial Sequence: Synthetic oligonucleotide
  Sense strand starting at position 1023 of SEQ ID NO: 394
cacugcuuucccguuguca

SEQ ID NO: 33707 - RNA, 19 nt, Artificial Sequence
  Description of Artificial Sequence: Synthetic oligonucleotide
  Antisense strand to SEQ ID NO: 33706
ugacaacgggaaagcagug

SEQ ID NO: 33708 - RNA, 19 nt, Artificial Sequence
  Description of Artificial Sequence: Synthetic oligonucleotide
  Sense strand starting at position 889 of SEQ ID NO: 394
ggacuauuguccuuuccag

SEQ ID NO: 33709 - RNA, 19 nt, Artificial Sequence
  Description of Artificial Sequence: Synthetic oligonucleotide
  Antisense strand to SEQ ID NO: 33708
cuggaaaggacaauagucc

SEQ ID NO: 33710 - RNA, 19 nt, Artificial Sequence
  Description of Artificial Sequence: Synthetic oligonucleotide
  Sense strand starting at position 877 of SEQ ID NO: 394
ggaggacuugcaggacuau

SEQ ID NO: 33711 - RNA, 19 nt, Artificial Sequence
  Description of Artificial Sequence: Synthetic oligonucleotide
  Antisense strand to SEQ ID NO: 33710
auaguccugcaaguccucc

SEQ ID NO: 33712 - RNA, 19 nt, Artificial Sequence
  Description of Artificial Sequence: Synthetic oligonucleotide
  Sense strand starting at position 709 of SEQ ID NO: 394
gcuaacugugauuagagca

SEQ ID NO: 33713 - RNA, 19 nt, Artificial Sequence
  Description of Artificial Sequence: Synthetic oligonucleotide
  Antisense strand to SEQ ID NO: 33712
ugcucuaaucacaguuagc

SEQ ID NO: 33714 - RNA, 19 nt, Artificial Sequence
  Description of Artificial Sequence: Synthetic oligonucleotide
  Sense strand starting at position 592 of SEQ ID NO: 394
aggagcaauuuagaaagau

SEQ ID NO: 33715 - RNA, 19 nt, Artificial Sequence
  Description of Artificial Sequence: Synthetic oligonucleotide
  Antisense strand to SEQ ID NO: 33714
aucuuucuaaauugcuccu

SEQ ID NO: 33716 - RNA, 19 nt, Artificial Sequence
  Description of Artificial Sequence: Synthetic oligonucleotide
  Sense strand starting at position 568 of SEQ ID NO: 394
ugcuauagccaacagaaua

SEQ ID NO: 33717 - RNA, 19 nt, Artificial Sequence
  Description of Artificial Sequence: Synthetic oligonucleotide
  Antisense strand to SEQ ID NO: 33716
uauucuguuggcuauagca

SEQ ID NO: 33718 - RNA, 19 nt, Artificial Sequence
  Description of Artificial Sequence: Synthetic oligonucleotide
  Sense strand starting at position 474 of SEQ ID NO: 394
cuaguuugucaggagucaa

SEQ ID NO: 33719 - RNA, 19 nt, Artificial Sequence
  Description of Artificial Sequence: Synthetic oligonucleotide
  Antisense strand to SEQ ID NO: 33718
uugacuccugacaaacuag

SEQ ID NO: 33720 - RNA, 19 nt, Artificial Sequence
  Description of Artificial Sequence: Synthetic oligonucleotide
  Sense strand starting at position 466 of SEQ ID NO: 394
auuccaaucuaguuuguca

SEQ ID NO: 33721 - RNA, 19 nt, Artificial Sequence
  Description of Artificial Sequence: Synthetic oligonucleotide
  Antisense strand to SEQ ID NO: 33720
ugacaaacuagauuggaau

SEQ ID NO: 33722 - RNA, 19 nt, Artificial Sequence
  Description of Artificial Sequence: Synthetic oligonucleotide
  Sense strand starting at position 258 of SEQ ID NO: 394
gggagaagcaaaggucuua

SEQ ID NO: 33723 - RNA, 19 nt, Artificial Sequence
  Description of Artificial Sequence: Synthetic oligonucleotide
  Antisense strand to SEQ ID NO: 33722
uaagaccuuugcuucuccc

SEQ ID NO: 33724 - RNA, 19 nt, Artificial Sequence
  Description of Artificial Sequence: Synthetic oligonucleotide
  Sense strand starting at position 114 of SEQ ID NO: 394
gcaagaguuugagaauuug

SEQ ID NO: 33725 - RNA, 19 nt, Artificial Sequence
  Description of Artificial Sequence: Synthetic oligonucleotide
  Antisense strand to SEQ ID NO: 33724
caaauucucaaacucuugc

SEQ ID NO: 33726 - RNA, 19 nt, Artificial Sequence
  Description of Artificial Sequence: Synthetic oligonucleotide
  Sense strand starting at position 111 of SEQ ID NO: 394
uaggcaagaguuugagaau

SEQ ID NO: 33727 - RNA, 19 nt, Artificial Sequence
  Description of Artificial Sequence: Synthetic oligonucleotide
  Antisense strand to SEQ ID NO: 33726
auucucaaacucuugccua

SEQ ID NO: 33728 - RNA, 19 nt, Artificial Sequence
  Description of Artificial Sequence: Synthetic oligonucleotide
  Sense strand starting at position 389 of SEQ ID NO: 396
acaccuggccucugacaua

SEQ ID NO: 33729 - RNA, 19 nt, Artificial Sequence
  Description of Artificial Sequence: Synthetic oligonucleotide
  Antisense strand to SEQ ID NO: 33728
uaugucagaggccaggugu

SEQ ID NO: 33730 - RNA, 19 nt, Artificial Sequence
  Description of Artificial Sequence: Synthetic oligonucleotide
  Sense strand starting at position 392 of SEQ ID NO: 396
ccuggccucugacauauuu

SEQ ID NO: 33731 - RNA, 19 nt, Artificial Sequence
  Description of Artificial Sequence: Synthetic oligonucleotide
  Antisense strand to SEQ ID NO: 33730
aaauaugucagaggccagg

SEQ ID NO: 33732 - RNA, 19 nt, Artificial Sequence
  Description of Artificial Sequence: Synthetic oligonucleotide
  Sense strand starting at position 422 of SEQ ID NO: 396
auacacuuguccucuuaga

SEQ ID NO: 33733 - RNA, 19 nt, Artificial Sequence
  Description of Artificial Sequence: Synthetic oligonucleotide
  Antisense strand to SEQ ID NO: 33732
ucuaagaggacaaguguau

SEQ ID NO: 33734 - RNA, 19 nt, Artificial Sequence
  Description of Artificial Sequence: Synthetic oligonucleotide
  Sense strand starting at position 541 of SEQ ID NO: 396
aucauuaccuugcuugaga

SEQ ID NO: 33735 - RNA, 19 nt, Artificial Sequence
  Description of Artificial Sequence: Synthetic oligonucleotide
  Antisense strand to SEQ ID NO: 33734
ucucaagcaagguaaugau

SEQ ID NO: 33736 - RNA, 19 nt, Artificial Sequence
  Description of Artificial Sequence: Synthetic oligonucleotide
  Sense strand starting at position 542 of SEQ ID NO: 396
ucauuaccuugcuugagau

SEQ ID NO: 33737 - RNA, 19 nt, Artificial Sequence
  Description of Artificial Sequence: Synthetic oligonucleotide
  Antisense strand to SEQ ID NO: 33736
aucucaagcaagguaauga

SEQ ID NO: 33738 - RNA, 19 nt, Artificial Sequence
  Description of Artificial Sequence: Synthetic oligonucleotide
  Sense strand starting at position 598 of SEQ ID NO: 396
cagaauuccugucuggcuu

SEQ ID NO: 33739 - RNA, 19 nt, Artificial Sequence
  Description of Artificial Sequence: Synthetic oligonucleotide
  Antisense strand to SEQ ID NO: 33738
aagccagacaggaauucug

SEQ ID NO: 33740 - RNA, 19 nt, Artificial Sequence
  Description of Artificial Sequence: Synthetic oligonucleotide
  Sense strand starting at position 622 of SEQ ID NO: 396
gcacuacuguauuugaucu

SEQ ID NO: 33741 - RNA, 19 nt, Artificial Sequence
  Description of Artificial Sequence: Synthetic oligonucleotide
  Antisense strand to SEQ ID NO: 33740
agaucaaauacaguagugc

SEQ ID NO: 33742 - RNA, 19 nt, Artificial Sequence
  Description of Artificial Sequence: Synthetic oligonucleotide
  Sense strand starting at position 624 of SEQ ID NO: 396
acuacuguauuugaucuua

SEQ ID NO: 33743 - RNA, 19 nt, Artificial Sequence
  Description of Artificial Sequence: Synthetic oligonucleotide
  Antisense strand to SEQ ID NO: 33742
uaagaucaaauacaguagu

SEQ ID NO: 33744 - RNA, 19 nt, Artificial Sequence
  Description of Artificial Sequence: Synthetic oligonucleotide
  Sense strand starting at position 645 of SEQ ID NO: 396
aucugauccuauccagguu

SEQ ID NO: 33745 - RNA, 19 nt, Artificial Sequence
  Description of Artificial Sequence: Synthetic oligonucleotide
  Antisense strand to SEQ ID NO: 33744
aaccuggauaggaucagau

SEQ ID NO: 33746 - RNA, 19 nt, Artificial Sequence
  Description of Artificial Sequence: Synthetic oligonucleotide
  Sense strand starting at position 800 of SEQ ID NO: 396
guagacaauucuuuaagag

SEQ ID NO: 33747 - RNA, 19 nt, Artificial Sequence
  Description of Artificial Sequence: Synthetic oligonucleotide
  Antisense strand to SEQ ID NO: 33746
cucuuaaagaauugucuac

SEQ ID NO: 33748 - RNA, 19 nt, Artificial Sequence
  Description of Artificial Sequence: Synthetic oligonucleotide
  Sense strand starting at position 865 of SEQ ID NO: 396
agaugaucacucuacuguu

SEQ ID NO: 33749 - RNA, 19 nt, Artificial Sequence
  Description of Artificial Sequence: Synthetic oligonucleotide
  Antisense strand to SEQ ID NO: 33748
aacaguagagugaucaucu

SEQ ID NO: 33750 - RNA, 19 nt, Artificial Sequence
  Description of Artificial Sequence: Synthetic oligonucleotide
  Sense strand starting at position 969 of SEQ ID NO: 396
gugccaucuccucagaagu

SEQ ID NO: 33751 - RNA, 19 nt, Artificial Sequence
  Description of Artificial Sequence: Synthetic oligonucleotide
  Antisense strand to SEQ ID NO: 33750
acuucugaggagauggcac

SEQ ID NO: 33752 - RNA, 19 nt, Artificial Sequence
  Description of Artificial Sequence: Synthetic oligonucleotide
  Sense strand starting at position 1003 of SEQ ID NO: 396
agggcuaguucucuugaca

SEQ ID NO: 33753 - RNA, 19 nt, Artificial Sequence
  Description of Artificial Sequence: Synthetic oligonucleotide
  Antisense strand to SEQ ID NO: 33752
ugucaagagaacuagcccu

SEQ ID NO: 33754 - RNA, 19 nt, Artificial Sequence
  Description of Artificial Sequence: Synthetic oligonucleotide
  Sense strand starting at position 1006 of SEQ ID NO: 396
gcuaguucucuugacaauu

SEQ ID NO: 33755 - RNA, 19 nt, Artificial Sequence
  Description of Artificial Sequence: Synthetic oligonucleotide
  Antisense strand to SEQ ID NO: 33754
aauugucaagagaacuagc

SEQ ID NO: 33756 - RNA, 19 nt, Artificial Sequence
  Description of Artificial Sequence: Synthetic oligonucleotide
  Sense strand starting at position 1075 of SEQ ID NO: 396
uugugauuaguccgugaag

SEQ ID NO: 33757 - RNA, 19 nt, Artificial Sequence
  Description of Artificial Sequence: Synthetic oligonucleotide
  Antisense strand to SEQ ID NO: 33756
cuucacggacuaaucacaa

SEQ ID NO: 33758 - RNA, 19 nt, Artificial Sequence
  Description of Artificial Sequence: Synthetic oligonucleotide
  Sense strand starting at position 1076 of SEQ ID NO: 396
ugugauuaguccgugaagg

SEQ ID NO: 33759 - RNA, 19 nt, Artificial Sequence
  Description of Artificial Sequence: Synthetic oligonucleotide
  Antisense strand to SEQ ID NO: 33758
ccuucacggacuaaucaca

SEQ ID NO: 33760 - RNA, 19 nt, Artificial Sequence
  Description of Artificial Sequence: Synthetic oligonucleotide
  Sense strand starting at position 1077 of SEQ ID NO: 396
gugauuaguccgugaaggg

SEQ ID NO: 33761 - RNA, 19 nt, Artificial Sequence
  Description of Artificial Sequence: Synthetic oligonucleotide
  Antisense strand to SEQ ID NO: 33760
cccuucacggacuaaucac

SEQ ID NO: 33762 - RNA, 19 nt, Artificial Sequence
  Description of Artificial Sequence: Synthetic oligonucleotide
  Sense strand starting at position 1094 of SEQ ID NO: 396
gggcucugacuugaucacu

SEQ ID NO: 33763 - RNA, 19 nt, Artificial Sequence
  Description of Artificial Sequence: Synthetic oligonucleotide
  Antisense strand to SEQ ID NO: 33762
agugaucaagucagagccc

SEQ ID NO: 33764 - RNA, 19 nt, Artificial Sequence
  Description of Artificial Sequence: Synthetic oligonucleotide
  Sense strand starting at position 1158 of SEQ ID NO: 396
auacuuagccaguguuaag

SEQ ID NO: 33765 - RNA, 19 nt, Artificial Sequence
  Description of Artificial Sequence: Synthetic oligonucleotide
  Antisense strand to SEQ ID NO: 33764
cuuaacacuggcuaaguau

SEQ ID NO: 33766 - RNA, 19 nt, Artificial Sequence
  Description of Artificial Sequence: Synthetic oligonucleotide
  Sense strand starting at position 1176 of SEQ ID NO: 396
gcacguaguguuuaaacac

SEQ ID NO: 33767 - RNA, 19 nt, Artificial Sequence
  Description of Artificial Sequence: Synthetic oligonucleotide
  Antisense strand to SEQ ID NO: 33766
guguuuaaacacuacgugc

SEQ ID NO: 33768 - RNA, 19 nt, Artificial Sequence
  Description of Artificial Sequence: Synthetic oligonucleotide
  Sense strand starting at position 1360 of SEQ ID NO: 396
cuauguggagacugaaauc

SEQ ID NO: 33769 - RNA, 19 nt, Artificial Sequence
  Description of Artificial Sequence: Synthetic oligonucleotide
  Antisense strand to SEQ ID NO: 33768
gauuucagucuccacauag

SEQ ID NO: 33770 - RNA, 19 nt, Artificial Sequence
  Description of Artificial Sequence: Synthetic oligonucleotide
  Sense strand starting at position 1696 of SEQ ID NO: 396
aaaucaagccguugagaaa

SEQ ID NO: 33771 - RNA, 19 nt, Artificial Sequence
  Description of Artificial Sequence: Synthetic oligonucleotide
  Antisense strand to SEQ ID NO: 33770
uuucucaacggcuugauuu

SEQ ID NO: 33772 - RNA, 19 nt, Artificial Sequence
  Description of Artificial Sequence: Synthetic oligonucleotide
  Sense strand starting at position 1809 of SEQ ID NO: 396
uuccguaucagugaagcaa

SEQ ID NO: 33773 - RNA, 19 nt, Artificial Sequence
  Description of Artificial Sequence: Synthetic oligonucleotide
  Antisense strand to SEQ ID NO: 33772
uugcuucacugauacggaa

SEQ ID NO: 33774 - RNA, 19 nt, Artificial Sequence
  Description of Artificial Sequence: Synthetic oligonucleotide
  Sense strand starting at position 1938 of SEQ ID NO: 396
ucucaaauuuccgcccgua

SEQ ID NO: 33775 - RNA, 19 nt, Artificial Sequence
  Description of Artificial Sequence: Synthetic oligonucleotide
  Antisense strand to SEQ ID NO: 33774
uacgggcggaaauuugaga

SEQ ID NO: 33776 - RNA, 19 nt, Artificial Sequence
  Description of Artificial Sequence: Synthetic oligonucleotide
  Sense strand starting at position 1941 of SEQ ID NO: 396
caaauuuccgcccguagua

SEQ ID NO: 33777 - RNA, 19 nt, Artificial Sequence
  Description of Artificial Sequence: Synthetic oligonucleotide
  Antisense strand to SEQ ID NO: 33776
uacuacgggcggaaauuug

SEQ ID NO: 33778 - RNA, 19 nt, Artificial Sequence
  Description of Artificial Sequence: Synthetic oligonucleotide
  Sense strand starting at position 1978 of SEQ ID NO: 396
caccacugauucguugaau

SEQ ID NO: 33779 - RNA, 19 nt, Artificial Sequence
  Description of Artificial Sequence: Synthetic oligonucleotide
  Antisense strand to SEQ ID NO: 33778
auucaacgaaucaguggug

SEQ ID NO: 33780 - RNA, 19 nt, Artificial Sequence
  Description of Artificial Sequence: Synthetic oligonucleotide
  Sense strand starting at position 1979 of SEQ ID NO: 396
accacugauucguugaauu

SEQ ID NO: 33781 - RNA, 19 nt, Artificial Sequence
  Description of Artificial Sequence: Synthetic oligonucleotide
  Antisense strand to SEQ ID NO: 33780
aauucaacgaaucaguggu

SEQ ID NO: 33782 - RNA, 19 nt, Artificial Sequence
  Description of Artificial Sequence: Synthetic oligonucleotide
  Sense strand starting at position 1991 of SEQ ID NO: 396
uugaauuccuucccgguaa

SEQ ID NO: 33783 - RNA, 19 nt, Artificial Sequence
  Description of Artificial Sequence: Synthetic oligonucleotide
  Antisense strand to SEQ ID NO: 33782
uuaccgggaaggaauucaa

SEQ ID NO: 33784 - RNA, 19 nt, Artificial Sequence
  Description of Artificial Sequence: Synthetic oligonucleotide
  Sense strand starting at position 1993 of SEQ ID NO: 396
gaauuccuucccgguaauc

SEQ ID NO: 33785 - RNA, 19 nt, Artificial Sequence
  Description of Artificial Sequence: Synthetic oligonucleotide
  Antisense strand to SEQ ID NO: 33784
gauuaccgggaaggaauuc

SEQ ID NO: 33786 - RNA, 19 nt, Artificial Sequence
  Description of Artificial Sequence: Synthetic oligonucleotide
  Sense strand starting at position 1995 of SEQ ID NO: 396
auuccuucccgguaaucuu

SEQ ID NO: 33787 - RNA, 19 nt, Artificial Sequence
  Description of Artificial Sequence: Synthetic oligonucleotide
  Antisense strand to SEQ ID NO: 33786
aagauuaccgggaaggaau

SEQ ID NO: 33788 - RNA, 19 nt, Artificial Sequence
  Description of Artificial Sequence: Synthetic oligonucleotide
  Sense strand starting at position 2703 of SEQ ID NO: 396
agaggagaauuccagguga

SEQ ID NO: 33789 - RNA, 19 nt, Artificial Sequence
  Description of Artificial Sequence: Synthetic oligonucleotide
  Antisense strand to SEQ ID NO: 33788
ucaccuggaauucuccucu

SEQ ID NO: 33790 - RNA, 19 nt, Artificial Sequence
  Description of Artificial Sequence: Synthetic oligonucleotide
  Sense strand starting at position 2726 of SEQ ID NO: 396
agcgaagagaucuauccua

SEQ ID NO: 33791 - RNA, 19 nt, Artificial Sequence
  Description of Artificial Sequence: Synthetic oligonucleotide
  Antisense strand to SEQ ID NO: 33790
uaggauagaucucuucgcu

SEQ ID NO: 33792 - RNA, 19 nt, Artificial Sequence
  Description of Artificial Sequence: Synthetic oligonucleotide
  Sense strand starting at position 2731 of SEQ ID NO: 396
agagaucuauccuaugaac

SEQ ID NO: 33793 - RNA, 19 nt, Artificial Sequence
  Description of Artificial Sequence: Synthetic oligonucleotide
  Antisense strand to SEQ ID NO: 33792
guucauaggauagaucucu

SEQ ID NO: 33794 - RNA, 19 nt, Artificial Sequence
  Description of Artificial Sequence: Synthetic oligonucleotide
  Sense strand starting at position 3134 of SEQ ID NO: 396
cccuguucuuaacuggaua

SEQ ID NO: 33795 - RNA, 19 nt, Artificial Sequence
  Description of Artificial Sequence: Synthetic oligonucleotide
  Antisense strand to SEQ ID NO: 33794
uauccaguuaagaacaggg

SEQ ID NO: 33796 - RNA, 19 nt, Artificial Sequence
  Description of Artificial Sequence: Synthetic oligonucleotide
  Sense strand starting at position 3145 of SEQ ID NO: 396
acuggauagccuuaugugu

SEQ ID NO: 33797 - RNA, 19 nt, Artificial Sequence
  Description of Artificial Sequence: Synthetic oligonucleotide
  Antisense strand to SEQ ID NO: 33796
acacauaaggcuauccagu

SEQ ID NO: 33798 - RNA, 19 nt, Artificial Sequence
  Description of Artificial Sequence: Synthetic oligonucleotide
  Sense strand starting at position 3153 of SEQ ID NO: 396
gccuuauguguagaagcga

SEQ ID NO: 33799 - RNA, 19 nt, Artificial Sequence
  Description of Artificial Sequence: Synthetic oligonucleotide
  Antisense strand to SEQ ID NO: 33798
ucgcuucuacacauaaggc

SEQ ID NO: 33800 - RNA, 19 nt, Artificial Sequence
  Description of Artificial Sequence: Synthetic oligonucleotide
  Sense strand starting at position 3634 of SEQ ID NO: 396
uguacaaguggcuguuaaa

SEQ ID NO: 33801 - RNA, 19 nt, Artificial Sequence
  Description of Artificial Sequence: Synthetic oligonucleotide
  Antisense strand to SEQ ID NO: 33800
uuuaacagccacuuguaca

SEQ ID NO: 33802 - RNA, 19 nt, Artificial Sequence
  Description of Artificial Sequence: Synthetic oligonucleotide
  Sense strand starting at position 3644 of SEQ ID NO: 396
gcuguuaaacacuagauuc

SEQ ID NO: 33803 - RNA, 19 nt, Artificial Sequence
  Description of Artificial Sequence: Synthetic oligonucleotide
  Antisense strand to SEQ ID NO: 33802
gaaucuaguguuuaacagc

SEQ ID NO: 33804 - RNA, 19 nt, Artificial Sequence
  Description of Artificial Sequence: Synthetic oligonucleotide
  Sense strand starting at position 3771 of SEQ ID NO: 396
ggucaaugcaaaugcuaga

SEQ ID NO: 33805 - RNA, 19 nt, Artificial Sequence
  Description of Artificial Sequence: Synthetic oligonucleotide
  Antisense strand to SEQ ID NO: 33804
ucuagcauuugcauugacc

SEQ ID NO: 33806 - RNA, 19 nt, Artificial Sequence
  Description of Artificial Sequence: Synthetic oligonucleotide
  Sense strand starting at position 3776 of SEQ ID NO: 396
augcaaaugcuagaagauc

SEQ ID NO: 33807 - RNA, 19 nt, Artificial Sequence
  Description of Artificial Sequence: Synthetic oligonucleotide
  Antisense strand to SEQ ID NO: 33806
gaucuucuagcauuugcau

SEQ ID NO: 33808 - RNA, 19 nt, Artificial Sequence
  Description of Artificial Sequence: Synthetic oligonucleotide
  Sense strand starting at position 76 of SEQ ID NO: 395
uguacuuucgaagaucauu

SEQ ID NO: 33809 - RNA, 19 nt, Artificial Sequence
  Description of Artificial Sequence: Synthetic oligonucleotide
  Antisense strand to SEQ ID NO: 33808
aaugaucuucgaaaguaca

SEQ ID NO: 33810 - RNA, 19 nt, Artificial Sequence
  Description of Artificial Sequence: Synthetic oligonucleotide
  Sense strand starting at position 154 of SEQ ID NO: 395
cuaaacuuucugggaccuu

SEQ ID NO: 33811 - RNA, 19 nt, Artificial Sequence
  Description of Artificial Sequence: Synthetic oligonucleotide
  Antisense strand to SEQ ID NO: 33810
aaggucccagaaaguuuag

SEQ ID NO: 33812 - RNA, 19 nt, Artificial Sequence
  Description of Artificial Sequence: Synthetic oligonucleotide
  Sense strand starting at position 393 of SEQ ID NO: 395
ccgucaaacucauuaaguu

SEQ ID NO: 33813 - RNA, 19 nt, Artificial Sequence
  Description of Artificial Sequence: Synthetic oligonucleotide
  Antisense strand to SEQ ID NO: 33812
aacuuaaugaguuugacgg

SEQ ID NO: 33814 - RNA, 19 nt, Artificial Sequence
  Description of Artificial Sequence: Synthetic oligonucleotide
  Sense strand starting at position 394 of SEQ ID NO: 395
cgucaaacucauuaaguuc

SEQ ID NO: 33815 - RNA, 19 nt, Artificial Sequence
  Description of Artificial Sequence: Synthetic oligonucleotide
  Antisense strand to SEQ ID NO: 33814
gaacuuaaugaguuugacg

SEQ ID NO: 33816 - RNA, 19 nt, Artificial Sequence
  Description of Artificial Sequence: Synthetic oligonucleotide
  Sense strand starting at position 896 of SEQ ID NO: 395
acaccuggccucugacaua

SEQ ID NO: 33817 - RNA, 19 nt, Artificial Sequence
  Description of Artificial Sequence: Synthetic oligonucleotide
  Antisense strand to SEQ ID NO: 33816
uaugucagaggccaggugu

SEQ ID NO: 33818 - RNA, 19 nt, Artificial Sequence
  Description of Artificial Sequence: Synthetic oligonucleotide
  Sense strand starting at position 899 of SEQ ID NO: 395
ccuggccucugacauauuu

SEQ ID NO: 33819 - RNA, 19 nt, Artificial Sequence
  Description of Artificial Sequence: Synthetic oligonucleotide
  Antisense strand to SEQ ID NO: 33818
aaauaugucagaggccagg

SEQ ID NO: 33820 - RNA, 19 nt, Artificial Sequence
  Description of Artificial Sequence: Synthetic oligonucleotide
  Sense strand starting at position 929 of SEQ ID NO: 395
auacacuuguccucuuaga

SEQ ID NO: 33821 - RNA, 19 nt, Artificial Sequence
  Description of Artificial Sequence: Synthetic oligonucleotide
  Antisense strand to SEQ ID NO: 33820
ucuaagaggacaaguguau

SEQ ID NO: 33822 - RNA, 19 nt, Artificial Sequence
  Description of Artificial Sequence: Synthetic oligonucleotide
  Sense strand starting at position 1048 of SEQ ID NO: 395
aucauuaccuugcuugaga

SEQ ID NO: 33823 - RNA, 19 nt, Artificial Sequence
  Description of Artificial Sequence: Synthetic oligonucleotide
  Antisense strand to SEQ ID NO: 33822
ucucaagcaagguaaugau

SEQ ID NO: 33824 - RNA, 19 nt, Artificial Sequence
  Description of Artificial Sequence: Synthetic oligonucleotide
  Sense strand starting at position 1049 of SEQ ID NO: 395
ucauuaccuugcuugagau

SEQ ID NO: 33825 - RNA, 19 nt, Artificial Sequence
  Description of Artificial Sequence: Synthetic oligonucleotide
  Antisense strand to SEQ ID NO: 33824
aucucaagcaagguaauga

SEQ ID NO: 33826 - RNA, 19 nt, Artificial Sequence
  Description of Artificial Sequence: Synthetic oligonucleotide
  Sense strand starting at position 1105 of SEQ ID NO: 395
cagaauuccugucuggcuu

SEQ ID NO: 33827 - RNA, 19 nt, Artificial Sequence
  Description of Artificial Sequence: Synthetic oligonucleotide
  Antisense strand to SEQ ID NO: 33826
aagccagacaggaauucug

SEQ ID NO: 33828 - RNA, 19 nt, Artificial Sequence
  Description of Artificial Sequence: Synthetic oligonucleotide
  Sense strand starting at position 1129 of SEQ ID NO: 395
gcacuacuguauuugaucu

SEQ ID NO: 33829 - RNA, 19 nt, Artificial Sequence
  Description of Artificial Sequence: Synthetic oligonucleotide
  Antisense strand to SEQ ID NO: 33828
agaucaaauacaguagugc

SEQ ID NO: 33830 - RNA, 19 nt, Artificial Sequence
  Description of Artificial Sequence: Synthetic oligonucleotide
  Sense strand starting at position 1131 of SEQ ID NO: 395
acuacuguauuugaucuua

SEQ ID NO: 33831 - RNA, 19 nt, Artificial Sequence
  Description of Artificial Sequence: Synthetic oligonucleotide
  Antisense strand to SEQ ID NO: 33830
uaagaucaaauacaguagu

SEQ ID NO: 33832 - RNA, 19 nt, Artificial Sequence
  Description of Artificial Sequence: Synthetic oligonucleotide
  Sense strand starting at position 1152 of SEQ ID NO: 395
aucugauccuauccagguu

SEQ ID NO: 33833 - RNA, 19 nt, Artificial Sequence
  Description of Artificial Sequence: Synthetic oligonucleotide
  Antisense strand to SEQ ID NO: 33832
aaccuggauaggaucagau

SEQ ID NO: 33834 - RNA, 19 nt, Artificial Sequence
  Description of Artificial Sequence: Synthetic oligonucleotide
  Sense strand starting at position 1307 of SEQ ID NO: 395
guagacaauucuuuaagag

SEQ ID NO: 33835 - RNA, 19 nt, Artificial Sequence
  Description of Artificial Sequence: Synthetic oligonucleotide
  Antisense strand to SEQ ID NO: 33834
cucuuaaagaauugucuac

SEQ ID NO: 33836 - RNA, 19 nt, Artificial Sequence
  Description of Artificial Sequence: Synthetic oligonucleotide
  Sense strand starting at position 1372 of SEQ ID NO: 395
agaugaucacucuacuguu

SEQ ID NO: 33837 - RNA, 19 nt, Artificial Sequence
  Description of Artificial Sequence: Synthetic oligonucleotide
  Antisense strand to SEQ ID NO: 33836
aacaguagagugaucaucu

SEQ ID NO: 33838 - RNA, 19 nt, Artificial Sequence
  Description of Artificial Sequence: Synthetic oligonucleotide
  Sense strand starting at position 1476 of SEQ ID NO: 395
gugccaucuccucagaagu

SEQ ID NO: 33839 - RNA, 19 nt, Artificial Sequence
  Description of Artificial Sequence: Synthetic oligonucleotide
  Antisense strand to SEQ ID NO: 33838
acuucugaggagauggcac

SEQ ID NO: 33840 - RNA, 19 nt, Artificial Sequence
  Description of Artificial Sequence: Synthetic oligonucleotide
  Sense strand starting at position 1510 of SEQ ID NO: 395
agggcuaguucucuugaca

SEQ ID NO: 33841 - RNA, 19 nt, Artificial Sequence
  Description of Artificial Sequence: Synthetic oligonucleotide
  Antisense strand to SEQ ID NO: 33840
ugucaagagaacuagcccu

SEQ ID NO: 33842 - RNA, 19 nt, Artificial Sequence
  Description of Artificial Sequence: Synthetic oligonucleotide
  Sense strand starting at position 1513 of SEQ ID NO: 395
gcuaguucucuugacaauu

SEQ ID NO: 33843 - RNA, 19 nt, Artificial Sequence
  Description of Artificial Sequence: Synthetic oligonucleotide
  Antisense strand to SEQ ID NO: 33842
aauugucaagagaacuagc

SEQ ID NO: 33844 - RNA, 19 nt, Artificial Sequence
  Description of Artificial Sequence: Synthetic oligonucleotide
  Sense strand starting at position 1582 of SEQ ID NO: 395
uugugauuaguccgugaag

SEQ ID NO: 33845 - RNA, 19 nt, Artificial Sequence
  Description of Artificial Sequence: Synthetic oligonucleotide
  Antisense strand to SEQ ID NO: 33844
cuucacggacuaaucacaa

SEQ ID NO: 33846 - RNA, 19 nt, Artificial Sequence
  Description of Artificial Sequence: Synthetic oligonucleotide
  Sense strand starting at position 1583 of SEQ ID NO: 395
ugugauuaguccgugaagg

SEQ ID NO: 33847 - RNA, 19 nt, Artificial Sequence
  Description of Artificial Sequence: Synthetic oligonucleotide
  Antisense strand to SEQ ID NO: 33846
ccuucacggacuaaucaca

SEQ ID NO: 33848 - RNA, 19 nt, Artificial Sequence
  Description of Artificial Sequence: Synthetic oligonucleotide
  Sense strand starting at position 1584 of SEQ ID NO: 395
gugauuaguccgugaaggg

SEQ ID NO: 33849 - RNA, 19 nt, Artificial Sequence
  Description of Artificial Sequence: Synthetic oligonucleotide
  Antisense strand to SEQ ID NO: 33848
cccuucacggacuaaucac

SEQ ID NO: 33850 - RNA, 19 nt, Artificial Sequence
  Description of Artificial Sequence: Synthetic oligonucleotide
  Sense strand starting at position 1601 of SEQ ID NO: 395
gggcucugacuugaucacu

SEQ ID NO: 33851 - RNA, 19 nt, Artificial Sequence
  Description of Artificial Sequence: Synthetic oligonucleotide
  Antisense strand to SEQ ID NO: 33850
agugaucaagucagagccc

SEQ ID NO: 33852 - RNA, 19 nt, Artificial Sequence
  Description of Artificial Sequence: Synthetic oligonucleotide
  Sense strand starting at position 1665 of SEQ ID NO: 395
auacuuagccaguguuaag

SEQ ID NO: 33853 - RNA, 19 nt, Artificial Sequence
  Description of Artificial Sequence: Synthetic oligonucleotide
  Antisense strand to SEQ ID NO: 33852
cuuaacacuggcuaaguau

SEQ ID NO: 33854 - RNA, 19 nt, Artificial Sequence
  Description of Artificial Sequence: Synthetic oligonucleotide
  Sense strand starting at position 1683 of SEQ ID NO: 395
gcacguaguguuuaaacac

SEQ ID NO: 33855 - RNA, 19 nt, Artificial Sequence
  Description of Artificial Sequence: Synthetic oligonucleotide
  Antisense strand to SEQ ID NO: 33854
guguuuaaacacuacgugc

SEQ ID NO: 33856 - RNA, 19 nt, Artificial Sequence
  Description of Artificial Sequence: Synthetic oligonucleotide
  Sense strand starting at position 1867 of SEQ ID NO: 395
cuauguggagacugaaauc

SEQ ID NO: 33857 - RNA, 19 nt, Artificial Sequence
  Description of Artificial Sequence: Synthetic oligonucleotide
  Antisense strand to SEQ ID NO: 33856
gauuucagucuccacauag

SEQ ID NO: 33858 - RNA, 19 nt, Artificial Sequence
  Description of Artificial Sequence: Synthetic oligonucleotide
  Sense strand starting at position 2203 of SEQ ID NO: 395
aaaucaagccguugagaaa

SEQ ID NO: 33859 - RNA, 19 nt, Artificial Sequence
  Description of Artificial Sequence: Synthetic oligonucleotide
  Antisense strand to SEQ ID NO: 33858
uuucucaacggcuugauuu

SEQ ID NO: 33860 - RNA, 19 nt, Artificial Sequence
  Description of Artificial Sequence: Synthetic oligonucleotide
  Sense strand starting at position 2316 of SEQ ID NO: 395
uuccguaucagugaagcaa

SEQ ID NO: 33861 - RNA, 19 nt, Artificial Sequence
  Description of Artificial Sequence: Synthetic oligonucleotide
  Antisense strand to SEQ ID NO: 33860
uugcuucacugauacggaa

SEQ ID NO: 33862 - RNA, 19 nt, Artificial Sequence
  Description of Artificial Sequence: Synthetic oligonucleotide
  Sense strand starting at position 2445 of SEQ ID NO: 395
ucucaaauuuccgcccgua

SEQ ID NO: 33863 - RNA, 19 nt, Artificial Sequence
  Description of Artificial Sequence: Synthetic oligonucleotide
  Antisense strand to SEQ ID NO: 33862
uacgggcggaaauuugaga

SEQ ID NO: 33864 - RNA, 19 nt, Artificial Sequence
  Description of Artificial Sequence: Synthetic oligonucleotide
  Sense strand starting at position 2448 of SEQ ID NO: 395
caaauuuccgcccguagua

SEQ ID NO: 33865 - RNA, 19 nt, Artificial Sequence
  Description of Artificial Sequence: Synthetic oligonucleotide
  Antisense strand to SEQ ID NO: 33864
uacuacgggcggaaauuug

SEQ ID NO: 33866 - RNA, 19 nt, Artificial Sequence
  Description of Artificial Sequence: Synthetic oligonucleotide
  Sense strand starting at position 2485 of SEQ ID NO: 395
caccacugauucguugaau

SEQ ID NO: 33867 - RNA, 19 nt, Artificial Sequence
  Description of Artificial Sequence: Synthetic oligonucleotide
  Antisense strand to SEQ ID NO: 33866
auucaacgaaucaguggug

SEQ ID NO: 33868 - RNA, 19 nt, Artificial Sequence
  Description of Artificial Sequence: Synthetic oligonucleotide
  Sense strand starting at position 2486 of SEQ ID NO: 395
accacugauucguugaauu

SEQ ID NO: 33869 - RNA, 19 nt, Artificial Sequence
  Description of Artificial Sequence: Synthetic oligonucleotide
  Antisense strand to SEQ ID NO: 33868
aauucaacgaaucaguggu

SEQ ID NO: 33870 - RNA, 19 nt, Artificial Sequence
  Description of Artificial Sequence: Synthetic oligonucleotide
  Sense strand starting at position 2498 of SEQ ID NO: 395
uugaauuccuucccgguaa

SEQ ID NO: 33871 - RNA, 19 nt, Artificial Sequence
  Description of Artificial Sequence: Synthetic oligonucleotide
  Antisense strand to SEQ ID NO: 33870
uuaccgggaaggaauucaa

SEQ ID NO: 33872 - RNA, 19 nt, Artificial Sequence
  Description of Artificial Sequence: Synthetic oligonucleotide
  Sense strand starting at position 2500 of SEQ ID NO: 395
gaauuccuucccgguaauc

SEQ ID NO: 33873 - RNA, 19 nt, Artificial Sequence
  Description of Artificial Sequence: Synthetic oligonucleotide
  Antisense strand to SEQ ID NO: 33872
gauuaccgggaaggaauuc

SEQ ID NO: 33874 - RNA, 19 nt, Artificial Sequence
  Description of Artificial Sequence: Synthetic oligonucleotide
  Sense strand starting at position 2502 of SEQ ID NO: 395
auuccuucccgguaaucuu

SEQ ID NO: 33875 - RNA, 19 nt, Artificial Sequence
  Description of Artificial Sequence: Synthetic oligonucleotide
  Antisense strand to SEQ ID NO: 33874
aagauuaccgggaaggaau

SEQ ID NO: 33876 - RNA, 19 nt, Artificial Sequence
  Description of Artificial Sequence: Synthetic oligonucleotide
  Sense strand starting at position 3210 of SEQ ID NO: 395
agaggagaauuccagguga

SEQ ID NO: 33877 - RNA, 19 nt, Artificial Sequence
  Description of Artificial Sequence: Synthetic oligonucleotide
  Antisense strand to SEQ ID NO: 33876
ucaccuggaauucuccucu

SEQ ID NO: 33878 - RNA, 19 nt, Artificial Sequence
  Description of Artificial Sequence: Synthetic oligonucleotide
  Sense strand starting at position 3233 of SEQ ID NO: 395
agcgaagagaucuauccua

SEQ ID NO: 33879 - RNA, 19 nt, Artificial Sequence
  Description of Artificial Sequence: Synthetic oligonucleotide
  Antisense strand to SEQ ID NO: 33878
uaggauagaucucuucgcu

SEQ ID NO: 33880 - RNA, 19 nt, Artificial Sequence
  Description of Artificial Sequence: Synthetic oligonucleotide
  Sense strand starting at position 3238 of SEQ ID NO: 395
agagaucuauccuaugaac

SEQ ID NO: 33881 - RNA, 19 nt, Artificial Sequence
  Description of Artificial Sequence: Synthetic oligonucleotide
  Antisense strand to SEQ ID NO: 33880
guucauaggauagaucucu

SEQ ID NO: 33882 - RNA, 19 nt, Artificial Sequence
  Description of Artificial Sequence: Synthetic oligonucleotide
  Sense strand starting at position 3641 of SEQ ID NO: 395
cccuguucuuaacuggaua

SEQ ID NO: 33883 - RNA, 19 nt, Artificial Sequence
  Description of Artificial Sequence: Synthetic oligonucleotide
  Antisense strand to SEQ ID NO: 33882
uauccaguuaagaacaggg

SEQ ID NO: 33884 - RNA, 19 nt, Artificial Sequence
  Description of Artificial Sequence: Synthetic oligonucleotide
  Sense strand starting at position 3652 of SEQ ID NO: 395
acuggauagccuuaugugu

SEQ ID NO: 33885 - RNA, 19 nt, Artificial Sequence
  Description of Artificial Sequence: Synthetic oligonucleotide
  Antisense strand to SEQ ID NO: 33884
acacauaaggcuauccagu

SEQ ID NO: 33886 - RNA, 19 nt, Artificial Sequence
  Description of Artificial Sequence: Synthetic oligonucleotide
  Sense strand starting at position 3660 of SEQ ID NO: 395
gccuuauguguagaagcga

SEQ ID NO: 33887 - RNA, 19 nt, Artificial Sequence
  Description of Artificial Sequence: Synthetic oligonucleotide
  Antisense strand to SEQ ID NO: 33886
ucgcuucuacacauaaggc

SEQ ID NO: 33888 - RNA, 19 nt, Artificial Sequence
  Description of Artificial Sequence: Synthetic oligonucleotide
  Sense strand starting at position 31 of SEQ ID NO: 397
caugaacucucgggcucaa

SEQ ID NO: 33889 - RNA, 19 nt, Artificial Sequence
  Description of Artificial Sequence: Synthetic oligonucleotide
  Antisense strand to SEQ ID NO: 33888
uugagcccgagaguucaug

SEQ ID NO: 33890 - RNA, 19 nt, Artificial Sequence
  Description of Artificial Sequence: Synthetic oligonucleotide
  Sense strand starting at position 183 of SEQ ID NO: 397
accuuagugucccaaagug

SEQ ID NO: 33891 - RNA, 19 nt, Artificial Sequence
  Description of Artificial Sequence: Synthetic oligonucleotide
  Antisense strand to SEQ ID NO: 33890
cacuuugggacacuaaggu

SEQ ID NO: 33892 - RNA, 19 nt, Artificial Sequence
  Description of Artificial Sequence: Synthetic oligonucleotide
  Sense strand starting at position 231 of SEQ ID NO: 397
uggcuagucucugaaccua

SEQ ID NO: 33893 - RNA, 19 nt, Artificial Sequence
  Description of Artificial Sequence: Synthetic oligonucleotide
  Antisense strand to SEQ ID NO: 33892
uagguucagagacuagcca

SEQ ID NO: 33894 - RNA, 19 nt, Artificial Sequence
  Description of Artificial Sequence: Synthetic oligonucleotide
  Sense strand starting at position 260 of SEQ ID NO: 397
ucuguuacggcucgaagac

SEQ ID NO: 33895 - RNA, 19 nt, Artificial Sequence
  Description of Artificial Sequence: Synthetic oligonucleotide
  Antisense strand to SEQ ID NO: 33894
gucuucgagccguaacaga

SEQ ID NO: 33896 - RNA, 19 nt, Artificial Sequence
  Description of Artificial Sequence: Synthetic oligonucleotide
  Sense strand starting at position 261 of SEQ ID NO: 397
cuguuacggcucgaagaca

SEQ ID NO: 33897 - RNA, 19 nt, Artificial Sequence
  Description of Artificial Sequence: Synthetic oligonucleotide
  Antisense strand to SEQ ID NO: 33896
ugucuucgagccguaacag

SEQ ID NO: 33898 - RNA, 19 nt, Artificial Sequence
  Description of Artificial Sequence: Synthetic oligonucleotide
  Sense strand starting at position 266 of SEQ ID NO: 397
acggcucgaagacauaaau

SEQ ID NO: 33899 - RNA, 19 nt, Artificial Sequence
  Description of Artificial Sequence: Synthetic oligonucleotide
  Antisense strand to SEQ ID NO: 33898
auuuaugucuucgagccgu

SEQ ID NO: 33900 - RNA, 19 nt, Artificial Sequence
  Description of Artificial Sequence: Synthetic oligonucleotide
  Sense strand starting at position 304 of SEQ ID NO: 397
acagaaggguguuuccagu

SEQ ID NO: 33901 - RNA, 19 nt, Artificial Sequence
  Description of Artificial Sequence: Synthetic oligonucleotide
  Antisense strand to SEQ ID NO: 33900
acuggaaacacccuucugu

SEQ ID NO: 33902 - RNA, 19 nt, Artificial Sequence
  Description of Artificial Sequence: Synthetic oligonucleotide
  Sense strand starting at position 310 of SEQ ID NO: 397
ggguguuuccaguaugcua

SEQ ID NO: 33903 - RNA, 19 nt, Artificial Sequence
  Description of Artificial Sequence: Synthetic oligonucleotide
  Antisense strand to SEQ ID NO: 33902
uagcauacuggaaacaccc

SEQ ID NO: 33904 - RNA, 19 nt, Artificial Sequence
  Description of Artificial Sequence: Synthetic oligonucleotide
  Sense strand starting at position 312 of SEQ ID NO: 397
guguuuccaguaugcuaua

SEQ ID NO: 33905 - RNA, 19 nt, Artificial Sequence
  Description of Artificial Sequence: Synthetic oligonucleotide
  Antisense strand to SEQ ID NO: 33904
uauagcauacuggaaacac

SEQ ID NO: 33906 - RNA, 19 nt, Artificial Sequence
  Description of Artificial Sequence: Synthetic oligonucleotide
  Sense strand starting at position 414 of SEQ ID NO: 397
uuaccucagucugguauuu

SEQ ID NO: 33907 - RNA, 19 nt, Artificial Sequence
  Description of Artificial Sequence: Synthetic oligonucleotide
  Antisense strand to SEQ ID NO: 33906
aaauaccagacugagguaa

SEQ ID NO: 33908 - RNA, 19 nt, Artificial Sequence
  Description of Artificial Sequence: Synthetic oligonucleotide
  Sense strand starting at position 416 of SEQ ID NO: 397
accucagucugguauuuga

SEQ ID NO: 33909 - RNA, 19 nt, Artificial Sequence
  Description of Artificial Sequence: Synthetic oligonucleotide
  Antisense strand to SEQ ID NO: 33908
ucaaauaccagacugaggu

SEQ ID NO: 33910 - RNA, 19 nt, Artificial Sequence
  Description of Artificial Sequence: Synthetic oligonucleotide
  Sense strand starting at position 513 of SEQ ID NO: 397
aguguuacauaagauacuu

SEQ ID NO: 33911 - RNA, 19 nt, Artificial Sequence
  Description of Artificial Sequence: Synthetic oligonucleotide
  Antisense strand to SEQ ID NO: 33910
aaguaucuuauguaacacu

SEQ ID NO: 33912 - RNA, 19 nt, Artificial Sequence
  Description of Artificial Sequence: Synthetic oligonucleotide
  Sense strand starting at position 521 of SEQ ID NO: 397
auaagauacuuggaauguc

SEQ ID NO: 33913 - RNA, 19 nt, Artificial Sequence
  Description of Artificial Sequence: Synthetic oligonucleotide
  Antisense strand to SEQ ID NO: 33912
gacauuccaaguaucuuau

SEQ ID NO: 33914 - RNA, 19 nt, Artificial Sequence
  Description of Artificial Sequence: Synthetic oligonucleotide
  Sense strand starting at position 524 of SEQ ID NO: 397
agauacuuggaaugucacu

SEQ ID NO: 33915 - RNA, 19 nt, Artificial Sequence
  Description of Artificial Sequence: Synthetic oligonucleotide
  Antisense strand to SEQ ID NO: 33914
agugacauuccaaguaucu

SEQ ID NO: 33916 - RNA, 19 nt, Artificial Sequence
  Description of Artificial Sequence: Synthetic oligonucleotide
  Sense strand starting at position 578 of SEQ ID NO: 397
auuaacaauuugggaagaa

SEQ ID NO: 33917 - RNA, 19 nt, Artificial Sequence
  Description of Artificial Sequence: Synthetic oligonucleotide
  Antisense strand to SEQ ID NO: 33916
uucuucccaaauuguuaau

SEQ ID NO: 33918 - RNA, 19 nt, Artificial Sequence
  Description of Artificial Sequence: Synthetic oligonucleotide
  Sense strand starting at position 594 of SEQ ID NO: 397
gaagcaaagcucuguugaa

SEQ ID NO: 33919 - RNA, 19 nt, Artificial Sequence
  Description of Artificial Sequence: Synthetic oligonucleotide
  Antisense strand to SEQ ID NO: 33918
uucaacagagcuuugcuuc

SEQ ID NO: 33920 - RNA, 19 nt, Artificial Sequence
  Description of Artificial Sequence: Synthetic oligonucleotide
  Sense strand starting at position 616 of SEQ ID NO: 397
ccaguuauuggcuggucuu

SEQ ID NO: 33921 - RNA, 19 nt, Artificial Sequence
  Description of Artificial Sequence: Synthetic oligonucleotide
  Antisense strand to SEQ ID NO: 33920
aagaccagccaauaacugg

SEQ ID NO: 33922 - RNA, 19 nt, Artificial Sequence
  Description of Artificial Sequence: Synthetic oligonucleotide
  Sense strand starting at position 626 of SEQ ID NO: 397
gcuggucuuccucaccaga

SEQ ID NO: 33923 - RNA, 19 nt, Artificial Sequence
  Description of Artificial Sequence: Synthetic oligonucleotide
  Antisense strand to SEQ ID NO: 33922
ucuggugaggaagaccagc

SEQ ID NO: 33924 - RNA, 19 nt, Artificial Sequence
  Description of Artificial Sequence: Synthetic oligonucleotide
  Sense strand starting at position 689 of SEQ ID NO: 397
cgacaaaugccagaguaca

SEQ ID NO: 33925 - RNA, 19 nt, Artificial Sequence
  Description of Artificial Sequence: Synthetic oligonucleotide
  Antisense strand to SEQ ID NO: 33924
uguacucuggcauuugucg

SEQ ID NO: 33926 - RNA, 19 nt, Artificial Sequence
  Description of Artificial Sequence: Synthetic oligonucleotide
  Sense strand starting at position 736 of SEQ ID NO: 397
gcggucucaucccucacua

SEQ ID NO: 33927 - RNA, 19 nt, Artificial Sequence
  Description of Artificial Sequence: Synthetic oligonucleotide
  Antisense strand to SEQ ID NO: 33926
uagugagggaugagaccgc

SEQ ID NO: 33928 - RNA, 19 nt, Artificial Sequence
  Description of Artificial Sequence: Synthetic oligonucleotide
  Sense strand starting at position 738 of SEQ ID NO: 397
ggucucaucccucacuaca

SEQ ID NO: 33929 - RNA, 19 nt, Artificial Sequence
  Description of Artificial Sequence: Synthetic oligonucleotide
  Antisense strand to SEQ ID NO: 33928
uguagugagggaugagacc

SEQ ID NO: 33930 - RNA, 19 nt, Artificial Sequence
  Description of Artificial Sequence: Synthetic oligonucleotide
  Sense strand starting at position 803 of SEQ ID NO: 397
acggaaacucaguguagca

SEQ ID NO: 33931 - RNA, 19 nt, Artificial Sequence
  Description of Artificial Sequence: Synthetic oligonucleotide
  Antisense strand to SEQ ID NO: 33930
ugcuacacugaguuuccgu

SEQ ID NO: 33932 - RNA, 19 nt, Artificial Sequence
  Description of Artificial Sequence: Synthetic oligonucleotide
  Sense strand starting at position 1151 of SEQ ID NO: 397
gcuuauggguuucugauca

SEQ ID NO: 33933 - RNA, 19 nt, Artificial Sequence
  Description of Artificial Sequence: Synthetic oligonucleotide
  Antisense strand to SEQ ID NO: 33932
ugaucagaaacccauaagc

SEQ ID NO: 33934 - RNA, 19 nt, Artificial Sequence
  Description of Artificial Sequence: Synthetic oligonucleotide
  Sense strand starting at position 1155 of SEQ ID NO: 397
auggguuucugaucaaguc

SEQ ID NO: 33935 - RNA, 19 nt, Artificial Sequence
  Description of Artificial Sequence: Synthetic oligonucleotide
  Antisense strand to SEQ ID NO: 33934
gacuugaucagaaacccau

SEQ ID NO: 33936 - RNA, 19 nt, Artificial Sequence
  Description of Artificial Sequence: Synthetic oligonucleotide
  Sense strand starting at position 1156 of SEQ ID NO: 397
uggguuucugaucaaguca

SEQ ID NO: 33937 - RNA, 19 nt, Artificial Sequence
  Description of Artificial Sequence: Synthetic oligonucleotide
  Antisense strand to SEQ ID NO: 33936
ugacuugaucagaaaccca

SEQ ID NO: 33938 - RNA, 19 nt, Artificial Sequence
  Description of Artificial Sequence: Synthetic oligonucleotide
  Sense strand starting at position 1169 of SEQ ID NO: 397
aagucaucuuagcgacuga

SEQ ID NO: 33939 - RNA, 19 nt, Artificial Sequence
  Description of Artificial Sequence: Synthetic oligonucleotide
  Antisense strand to SEQ ID NO: 33938
ucagucgcuaagaugacuu

SEQ ID NO: 33940 - RNA, 19 nt, Artificial Sequence
  Description of Artificial Sequence: Synthetic oligonucleotide
  Sense strand starting at position 1170 of SEQ ID NO: 397
agucaucuuagcgacugaa

SEQ ID NO: 33941 - RNA, 19 nt, Artificial Sequence
  Description of Artificial Sequence: Synthetic oligonucleotide
  Antisense strand to SEQ ID NO: 33940
uucagucgcuaagaugacu

SEQ ID NO: 33942 - RNA, 19 nt, Artificial Sequence
  Description of Artificial Sequence: Synthetic oligonucleotide
  Sense strand starting at position 1342 of SEQ ID NO: 397
gugcuacgcauccagaaga

SEQ ID NO: 33943 - RNA, 19 nt, Artificial Sequence
  Description of Artificial Sequence: Synthetic oligonucleotide
  Antisense strand to SEQ ID NO: 33942
ucuucuggaugcguagcac

SEQ ID NO: 33944 - RNA, 19 nt, Artificial Sequence
  Description of Artificial Sequence: Synthetic oligonucleotide
  Sense strand starting at position 1818 of SEQ ID NO: 397
gccgcuuccucagacggaa

SEQ ID NO: 33945 - RNA, 19 nt, Artificial Sequence
  Description of Artificial Sequence: Synthetic oligonucleotide
  Antisense strand to SEQ ID NO: 33944
uuccgucugaggaagcggc

SEQ ID NO: 33946 - RNA, 19 nt, Artificial Sequence
  Description of Artificial Sequence: Synthetic oligonucleotide
  Sense strand starting at position 2885 of SEQ ID NO: 397
gauugcaaucgucaccuua

SEQ ID NO: 33947 - RNA, 19 nt, Artificial Sequence
  Description of Artificial Sequence: Synthetic oligonucleotide
  Antisense strand to SEQ ID NO: 33946
uaaggugacgauugcaauc

SEQ ID NO: 33948 - RNA, 19 nt, Artificial Sequence
  Description of Artificial Sequence: Synthetic oligonucleotide
  Sense strand starting at position 2887 of SEQ ID NO: 397
uugcaaucgucaccuuauu

SEQ ID NO: 33949 - RNA, 19 nt, Artificial Sequence
  Description of Artificial Sequence: Synthetic oligonucleotide
  Antisense strand to SEQ ID NO: 33948
aauaaggugacgauugcaa

SEQ ID NO: 33950 - RNA, 19 nt, Artificial Sequence
  Description of Artificial Sequence: Synthetic oligonucleotide
  Sense strand starting at position 2898 of SEQ ID NO: 397
accuuauucuagguugguu

SEQ ID NO: 33951 - RNA, 19 nt, Artificial Sequence
  Description of Artificial Sequence: Synthetic oligonucleotide
  Antisense strand to SEQ ID NO: 33950
aaccaaccuagaauaaggu

SEQ ID NO: 33952 - RNA, 19 nt, Artificial Sequence
  Description of Artificial Sequence: Synthetic oligonucleotide
  Sense strand starting at position 2936 of SEQ ID NO: 397
aggguuaccaggugugcau

SEQ ID NO: 33953 - RNA, 19 nt, Artificial Sequence
  Description of Artificial Sequence: Synthetic oligonucleotide
  Antisense strand to SEQ ID NO: 33952
augcacaccugguaacccu

SEQ ID NO: 33954 - RNA, 19 nt, Artificial Sequence
  Description of Artificial Sequence: Synthetic oligonucleotide
  Sense strand starting at position 3268 of SEQ ID NO: 397
uuuccugacucuucguauu

SEQ ID NO: 33955 - RNA, 19 nt, Artificial Sequence
  Description of Artificial Sequence: Synthetic oligonucleotide
  Antisense strand to SEQ ID NO: 33954
aauacgaagagucaggaaa

SEQ ID NO: 33956 - RNA, 19 nt, Artificial Sequence
  Description of Artificial Sequence: Synthetic oligonucleotide
  Sense strand starting at position 3410 of SEQ ID NO: 397
guuugugaggccugcagau

SEQ ID NO: 33957 - RNA, 19 nt, Artificial Sequence
  Description of Artificial Sequence: Synthetic oligonucleotide
  Antisense strand to SEQ ID NO: 33956
aucugcaggccucacaaac

SEQ ID NO: 33958 - RNA, 19 nt, Artificial Sequence
  Description of Artificial Sequence: Synthetic oligonucleotide
  Sense strand starting at position 3715 of SEQ ID NO: 397
ugugaacucucgggucuca

SEQ ID NO: 33959 - RNA, 19 nt, Artificial Sequence
  Description of Artificial Sequence: Synthetic oligonucleotide
  Antisense strand to SEQ ID NO: 33958
ugagacccgagaguucaca

SEQ ID NO: 33960 - RNA, 19 nt, Artificial Sequence
  Description of Artificial Sequence: Synthetic oligonucleotide
  Sense strand starting at position 3882 of SEQ ID NO: 397
agcaauucccaagagcaga

SEQ ID NO: 33961 - RNA, 19 nt, Artificial Sequence
  Description of Artificial Sequence: Synthetic oligonucleotide
  Antisense strand to SEQ ID NO: 33960
ucugcucuugggaauugcu

SEQ ID NO: 33962 - RNA, 19 nt, Artificial Sequence
  Description of Artificial Sequence: Synthetic oligonucleotide
  Sense strand starting at position 3955 of SEQ ID NO: 397
aagagaugcuguucuguuc

SEQ ID NO: 33963 - RNA, 19 nt, Artificial Sequence
  Description of Artificial Sequence: Synthetic oligonucleotide
  Antisense strand to SEQ ID NO: 33962
gaacagaacagcaucucuu

SEQ ID NO: 33964 - RNA, 19 nt, Artificial Sequence
  Description of Artificial Sequence: Synthetic oligonucleotide
  Sense strand starting at position 35 of SEQ ID NO: 398
gcagacaagucaguuaacu

SEQ ID NO: 33965 - RNA, 19 nt, Artificial Sequence
  Description of Artificial Sequence: Synthetic oligonucleotide
  Antisense strand to SEQ ID NO: 33964
aguuaacugacuugucugc

SEQ ID NO: 33966 - RNA, 19 nt, Artificial Sequence
  Description of Artificial Sequence: Synthetic oligonucleotide
  Sense strand starting at position 44 of SEQ ID NO: 398
ucaguuaacuuucugaguu

SEQ ID NO: 33967 - RNA, 19 nt, Artificial Sequence
  Description of Artificial Sequence: Synthetic oligonucleotide
  Antisense strand to SEQ ID NO: 33966
aacucagaaaguuaacuga

SEQ ID NO: 33968 - RNA, 19 nt, Artificial Sequence
  Description of Artificial Sequence: Synthetic oligonucleotide
  Sense strand starting at position 91 of SEQ ID NO: 398
gggcucuuccguguuaucu

SEQ ID NO: 33969 - RNA, 19 nt, Artificial Sequence
  Description of Artificial Sequence: Synthetic oligonucleotide
  Antisense strand to SEQ ID NO: 33968
agauaacacggaagagccc

SEQ ID NO: 33970 - RNA, 19 nt, Artificial Sequence
  Description of Artificial Sequence: Synthetic oligonucleotide
  Sense strand starting at position 92 of SEQ ID NO: 398
ggcucuuccguguuaucua

SEQ ID NO: 33971 - RNA, 19 nt, Artificial Sequence
  Description of Artificial Sequence: Synthetic oligonucleotide
  Antisense strand to SEQ ID NO: 33970
uagauaacacggaagagcc

SEQ ID NO: 33972 - RNA, 19 nt, Artificial Sequence
  Description of Artificial Sequence: Synthetic oligonucleotide
  Sense strand starting at position 216 of SEQ ID NO: 398
uuccuaagucucugaagca

SEQ ID NO: 33973 - RNA, 19 nt, Artificial Sequence
  Description of Artificial Sequence: Synthetic oligonucleotide
  Antisense strand to SEQ ID NO: 33972
ugcuucagagacuuaggaa

SEQ ID NO: 33974 - RNA, 19 nt, Artificial Sequence
  Description of Artificial Sequence: Synthetic oligonucleotide
  Sense strand starting at position 237 of SEQ ID NO: 398
cccaguuaggguuauacca

SEQ ID NO: 33975 - RNA, 19 nt, Artificial Sequence
  Description of Artificial Sequence: Synthetic oligonucleotide
  Antisense strand to SEQ ID NO: 33974
ugguauaacccuaacuggg

SEQ ID NO: 33976 - RNA, 19 nt, Artificial Sequence
  Description of Artificial Sequence: Synthetic oligonucleotide
  Sense strand starting at position 245 of SEQ ID NO: 398
ggguuauaccagugaagau

SEQ ID NO: 33977 - RNA, 19 nt, Artificial Sequence
  Description of Artificial Sequence: Synthetic oligonucleotide
  Antisense strand to SEQ ID NO: 33976
aucuucacugguauaaccc

SEQ ID NO: 33978 - RNA, 19 nt, Artificial Sequence
  Description of Artificial Sequence: Synthetic oligonucleotide
  Sense strand starting at position 608 of SEQ ID NO: 398
gcauuaccugcccaaugaa

SEQ ID NO: 33979 - RNA, 19 nt, Artificial Sequence
  Description of Artificial Sequence: Synthetic oligonucleotide
  Antisense strand to SEQ ID NO: 33978
uucauugggcagguaaugc

SEQ ID NO: 33980 - RNA, 19 nt, Artificial Sequence
  Description of Artificial Sequence: Synthetic oligonucleotide
  Sense strand starting at position 717 of SEQ ID NO: 398
uauugaucaccuuggcagu

SEQ ID NO: 33981 - RNA, 19 nt, Artificial Sequence
  Description of Artificial Sequence: Synthetic oligonucleotide
  Antisense strand to SEQ ID NO: 33980
acugccaaggugaucaaua

SEQ ID NO: 33982 - RNA, 19 nt, Artificial Sequence
  Description of Artificial Sequence: Synthetic oligonucleotide
  Sense strand starting at position 836 of SEQ ID NO: 398
aacagagauucugugacuu

SEQ ID NO: 33983 - RNA, 19 nt, Artificial Sequence
  Description of Artificial Sequence: Synthetic oligonucleotide
  Antisense strand to SEQ ID NO: 33982
aagucacagaaucucuguu

SEQ ID NO: 33984 - RNA, 19 nt, Artificial Sequence
  Description of Artificial Sequence: Synthetic oligonucleotide
  Sense strand starting at position 840 of SEQ ID NO: 398
gagauucugugacuuagua

SEQ ID NO: 33985 - RNA, 19 nt, Artificial Sequence
  Description of Artificial Sequence: Synthetic oligonucleotide
  Antisense strand to SEQ ID NO: 33984
uacuaagucacagaaucuc

SEQ ID NO: 33986 - RNA, 19 nt, Artificial Sequence
  Description of Artificial Sequence: Synthetic oligonucleotide
  Sense strand starting at position 844 of SEQ ID NO: 398
uucugugacuuaguauaca

SEQ ID NO: 33987 - RNA, 19 nt, Artificial Sequence
  Description of Artificial Sequence: Synthetic oligonucleotide
  Antisense strand to SEQ ID NO: 33986
uguauacuaagucacagaa

SEQ ID NO: 33988 - RNA, 19 nt, Artificial Sequence
  Description of Artificial Sequence: Synthetic oligonucleotide
  Sense strand starting at position 847 of SEQ ID NO: 398
ugugacuuaguauacaaau

SEQ ID NO: 33989 - RNA, 19 nt, Artificial Sequence
  Description of Artificial Sequence: Synthetic oligonucleotide
  Antisense strand to SEQ ID NO: 33988
auuuguauacuaagucaca

SEQ ID NO: 33990 - RNA, 19 nt, Artificial Sequence
  Description of Artificial Sequence: Synthetic oligonucleotide
  Sense strand starting at position 882 of SEQ ID NO: 398
cuguguuaggcagcugcaa

SEQ ID NO: 33991 - RNA, 19 nt, Artificial Sequence
  Description of Artificial Sequence: Synthetic oligonucleotide
  Antisense strand to SEQ ID NO: 33990
uugcagcugccuaacacag

SEQ ID NO: 33992 - RNA, 19 nt, Artificial Sequence
  Description of Artificial Sequence: Synthetic oligonucleotide
  Sense strand starting at position 1791 of SEQ ID NO: 398
gggcaauaacguuauucca

SEQ ID NO: 33993 - RNA, 19 nt, Artificial Sequence
  Description of Artificial Sequence: Synthetic oligonucleotide
  Antisense strand to SEQ ID NO: 33992
uggaauaacguuauugccc

SEQ ID NO: 33994 - RNA, 19 nt, Artificial Sequence
  Description of Artificial Sequence: Synthetic oligonucleotide
  Sense strand starting at position 2347 of SEQ ID NO: 398
cugucauuuggguggucca

SEQ ID NO: 33995 - RNA, 19 nt, Artificial Sequence
  Description of Artificial Sequence: Synthetic oligonucleotide
  Antisense strand to SEQ ID NO: 33994
uggaccacccaaaugacag

SEQ ID NO: 33996 - RNA, 19 nt, Artificial Sequence
  Description of Artificial Sequence: Synthetic oligonucleotide
  Sense strand starting at position 3015 of SEQ ID NO: 398
caacgauguuuccucagau

SEQ ID NO: 33997 - RNA, 19 nt, Artificial Sequence
  Description of Artificial Sequence: Synthetic oligonucleotide
  Antisense strand to SEQ ID NO: 33996
aucugaggaaacaucguug

SEQ ID NO: 33998 - RNA, 19 nt, Artificial Sequence
  Description of Artificial Sequence: Synthetic oligonucleotide
  Sense strand starting at position 3016 of SEQ ID NO: 398
aacgauguuuccucagauu

SEQ ID NO: 33999 - RNA, 19 nt, Artificial Sequence
  Description of Artificial Sequence: Synthetic oligonucleotide
  Antisense strand to SEQ ID NO: 33998
aaucugaggaaacaucguu

SEQ ID NO: 34000 - RNA, 19 nt, Artificial Sequence
  Description of Artificial Sequence: Synthetic oligonucleotide
  Sense strand starting at position 3027 of SEQ ID NO: 398
cucagauucccguaguuac

SEQ ID NO: 34001 - RNA, 19 nt, Artificial Sequence
  Description of Artificial Sequence: Synthetic oligonucleotide
  Antisense strand to SEQ ID NO: 34000
guaacuacgggaaucugag

SEQ ID NO: 34002 - RNA, 19 nt, Artificial Sequence
  Description of Artificial Sequence: Synthetic oligonucleotide
  Sense strand starting at position 3104 of SEQ ID NO: 398
cuuggauagcucuaugcca

SEQ ID NO: 34003 - RNA, 19 nt, Artificial Sequence
  Description of Artificial Sequence: Synthetic oligonucleotide
  Antisense strand to SEQ ID NO: 34002
uggcauagagcuauccaag

SEQ ID NO: 34004 - RNA, 19 nt, Artificial Sequence
  Description of Artificial Sequence: Synthetic oligonucleotide
  Sense strand starting at position 3135 of SEQ ID NO: 398
ucccauacguugcuauuua

SEQ ID NO: 34005 - RNA, 19 nt, Artificial Sequence
  Description of Artificial Sequence: Synthetic oligonucleotide
  Antisense strand to SEQ ID NO: 34004
uaaauagcaacguauggga

SEQ ID NO: 34006 - RNA, 19 nt, Artificial Sequence
  Description of Artificial Sequence: Synthetic oligonucleotide
  Sense strand starting at position 3205 of SEQ ID NO: 398
uggauugaaugugauuuau

SEQ ID NO: 34007 - RNA, 19 nt, Artificial Sequence
  Description of Artificial Sequence: Synthetic oligonucleotide
  Antisense strand to SEQ ID NO: 34006
auaaaucacauucaaucca

SEQ ID NO: 34008 - RNA, 19 nt, Artificial Sequence
  Description of Artificial Sequence: Synthetic oligonucleotide
  Sense strand starting at position 3211 of SEQ ID NO: 398
gaaugugauuuaugggauc

SEQ ID NO: 34009 - RNA, 19 nt, Artificial Sequence
  Description of Artificial Sequence: Synthetic oligonucleotide
  Antisense strand to SEQ ID NO: 34008
gaucccauaaaucacauuc

SEQ ID NO: 34010 - RNA, 19 nt, Artificial Sequence
  Description of Artificial Sequence: Synthetic oligonucleotide
  Sense strand starting at position 3236 of SEQ ID NO: 398
gggaaacacuaauaauuau

SEQ ID NO: 34011 - RNA, 19 nt, Artificial Sequence
  Description of Artificial Sequence: Synthetic oligonucleotide
  Antisense strand to SEQ ID NO: 34010
auaauuauuaguguuuccc

SEQ ID NO: 34012 - RNA, 19 nt, Artificial Sequence
  Description of Artificial Sequence: Synthetic oligonucleotide
  Sense strand starting at position 3303 of SEQ ID NO: 398
guaaaucaucugcagcuua

SEQ ID NO: 34013 - RNA, 19 nt, Artificial Sequence
  Description of Artificial Sequence: Synthetic oligonucleotide
  Antisense strand to SEQ ID NO: 34012
uaagcugcagaugauuuac

SEQ ID NO: 34014 - RNA, 19 nt, Artificial Sequence
  Description of Artificial Sequence: Synthetic oligonucleotide
  Sense strand starting at position 3321 of SEQ ID NO: 398
acaccaaucgugugaauau

SEQ ID NO: 34015 - RNA, 19 nt, Artificial Sequence
  Description of Artificial Sequence: Synthetic oligonucleotide
  Antisense strand to SEQ ID NO: 34014
auauucacacgauuggugu

SEQ ID NO: 34016 - RNA, 19 nt, Artificial Sequence
  Description of Artificial Sequence: Synthetic oligonucleotide
  Sense strand starting at position 3370 of SEQ ID NO: 398
gguugaauuacaggccaga

SEQ ID NO: 34017 - RNA, 19 nt, Artificial Sequence
  Description of Artificial Sequence: Synthetic oligonucleotide
  Antisense strand to SEQ ID NO: 34016
ucuggccuguaauucaacc

SEQ ID NO: 34018 - RNA, 19 nt, Artificial Sequence
  Description of Artificial Sequence: Synthetic oligonucleotide
  Sense strand starting at position 3408 of SEQ ID NO: 398
ugcagagccagguauuauc

SEQ ID NO: 34019 - RNA, 19 nt, Artificial Sequence
  Description of Artificial Sequence: Synthetic oligonucleotide
  Antisense strand to SEQ ID NO: 34018
gauaauaccuggcucugca

SEQ ID NO: 34020 - RNA, 19 nt, Artificial Sequence
  Description of Artificial Sequence: Synthetic oligonucleotide
  Sense strand starting at position 3517 of SEQ ID NO: 398
uuaccauaugagcaaguau

SEQ ID NO: 34021 - RNA, 19 nt, Artificial Sequence
  Description of Artificial Sequence: Synthetic oligonucleotide
  Antisense strand to SEQ ID NO: 34020
auacuugcucauaugguaa

SEQ ID NO: 34022 - RNA, 19 nt, Artificial Sequence
  Description of Artificial Sequence: Synthetic oligonucleotide
  Sense strand starting at position 3526 of SEQ ID NO: 398
gagcaaguaucuguacaaa

SEQ ID NO: 34023 - RNA, 19 nt, Artificial Sequence
  Description of Artificial Sequence: Synthetic oligonucleotide
  Antisense strand to SEQ ID NO: 34022
uuuguacagauacuugcuc

SEQ ID NO: 34024 - RNA, 19 nt, Artificial Sequence
  Description of Artificial Sequence: Synthetic oligonucleotide
  Sense strand starting at position 3579 of SEQ ID NO: 398
ggacuuaaugucuguacuu

SEQ ID NO: 34025 - RNA, 19 nt, Artificial Sequence
  Description of Artificial Sequence: Synthetic oligonucleotide
  Antisense strand to SEQ ID NO: 34024
aaguacagacauuaagucc

SEQ ID NO: 34026 - RNA, 19 nt, Artificial Sequence
  Description of Artificial Sequence: Synthetic oligonucleotide
  Sense strand starting at position 3635 of SEQ ID NO: 398
ucuagaaauuucgauucug

SEQ ID NO: 34027 - RNA, 19 nt, Artificial Sequence
  Description of Artificial Sequence: Synthetic oligonucleotide
  Antisense strand to SEQ ID NO: 34026
cagaaucgaaauuucuaga

SEQ ID NO: 34028 - RNA, 19 nt, Artificial Sequence
  Description of Artificial Sequence: Synthetic oligonucleotide
  Sense strand starting at position 3669 of SEQ ID NO: 398
uggaauuguccauaggguu

SEQ ID NO: 34029 - RNA, 19 nt, Artificial Sequence
  Description of Artificial Sequence: Synthetic oligonucleotide
  Antisense strand to SEQ ID NO: 34028
aacccuauggacaauucca

SEQ ID NO: 34030 - RNA, 19 nt, Artificial Sequence
  Description of Artificial Sequence: Synthetic oligonucleotide
  Sense strand starting at position 3776 of SEQ ID NO: 398
augggacauauguguacau

SEQ ID NO: 34031 - RNA, 19 nt, Artificial Sequence
  Description of Artificial Sequence: Synthetic oligonucleotide
  Antisense strand to SEQ ID NO: 34030
auguacacauaugucccau

SEQ ID NO: 34032 - RNA, 19 nt, Artificial Sequence
  Description of Artificial Sequence: Synthetic oligonucleotide
  Sense strand starting at position 3777 of SEQ ID NO: 398
ugggacauauguguacaua

SEQ ID NO: 34033 - RNA, 19 nt, Artificial Sequence
  Description of Artificial Sequence: Synthetic oligonucleotide
  Antisense strand to SEQ ID NO: 34032
uauguacacauauguccca

SEQ ID NO: 34034 - RNA, 19 nt, Artificial Sequence
  Description of Artificial Sequence: Synthetic oligonucleotide
  Sense strand starting at position 3889 of SEQ ID NO: 398
gacuguuugcgacauugag

SEQ ID NO: 34035 - RNA, 19 nt, Artificial Sequence
  Description of Artificial Sequence: Synthetic oligonucleotide
  Antisense strand to SEQ ID NO: 34034
cucaaugucgcaaacaguc

SEQ ID NO: 34036 - RNA, 19 nt, Artificial Sequence
  Description of Artificial Sequence: Synthetic oligonucleotide
  Sense strand starting at position 3893 of SEQ ID NO: 398
guuugcgacauugagaaua

SEQ ID NO: 34037 - RNA, 19 nt, Artificial Sequence
  Description of Artificial Sequence: Synthetic oligonucleotide
  Antisense strand to SEQ ID NO: 34036
uauucucaaugucgcaaac

SEQ ID NO: 34038 - RNA, 19 nt, Artificial Sequence
  Description of Artificial Sequence: Synthetic oligonucleotide
  Sense strand starting at position 3924 of SEQ ID NO: 398
gcauguguuguucugcaua

SEQ ID NO: 34039 - RNA, 19 nt, Artificial Sequence
  Description of Artificial Sequence: Synthetic oligonucleotide
  Antisense strand to SEQ ID NO: 34038
uaugcagaacaacacaugc

SEQ ID NO: 34040 - RNA, 19 nt, Artificial Sequence
  Description of Artificial Sequence: Synthetic oligonucleotide
  Sense strand starting at position 3929 of SEQ ID NO: 398
uguuguucugcauaauaug

SEQ ID NO: 34041 - RNA, 19 nt, Artificial Sequence
  Description of Artificial Sequence: Synthetic oligonucleotide
  Antisense strand to SEQ ID NO: 34040
cauauuaugcagaacaaca

SEQ ID NO: 34042 - RNA, 19 nt, Artificial Sequence
  Description of Artificial Sequence: Synthetic oligonucleotide
  Sense strand starting at position 3938 of SEQ ID NO: 398
gcauaauaugccuacuaug

SEQ ID NO: 34043 - RNA, 19 nt, Artificial Sequence
  Description of Artificial Sequence: Synthetic oligonucleotide
  Antisense strand to SEQ ID NO: 34042
cauaguaggcauauuaugc

SEQ ID NO: 34044 - RNA, 19 nt, Artificial Sequence
  Description of Artificial Sequence: Synthetic oligonucleotide
  Sense strand starting at position 3952 of SEQ ID NO: 399
cgcaguguuaggccgguaa

SEQ ID NO: 34045 - RNA, 19 nt, Artificial Sequence
  Description of Artificial Sequence: Synthetic oligonucleotide
  Antisense strand to SEQ ID NO: 34044
uuaccggccuaacacugcg

SEQ ID NO: 34046 - RNA, 19 nt, Artificial Sequence
  Description of Artificial Sequence: Synthetic oligonucleotide
  Sense strand starting at position 3910 of SEQ ID NO: 399
agguuuacuguggaaaggu

SEQ ID NO: 34047 - RNA, 19 nt, Artificial Sequence
  Description of Artificial Sequence: Synthetic oligonucleotide
  Antisense strand to SEQ ID NO: 34046
accuuuccacaguaaaccu

SEQ ID NO: 34048 - RNA, 19 nt, Artificial Sequence
  Description of Artificial Sequence: Synthetic oligonucleotide
  Sense strand starting at position 3908 of SEQ ID NO: 399
ggagguuuacuguggaaag

SEQ ID NO: 34049 - RNA, 19 nt, Artificial Sequence
  Description of Artificial Sequence: Synthetic oligonucleotide
  Antisense strand to SEQ ID NO: 34048
cuuuccacaguaaaccucc

SEQ ID NO: 34050 - RNA, 19 nt, Artificial Sequence
  Description of Artificial Sequence: Synthetic oligonucleotide
  Sense strand starting at position 3884 of SEQ ID NO: 399
guaauuaaucucuggaaca

SEQ ID NO: 34051 - RNA, 19 nt, Artificial Sequence
  Description of Artificial Sequence: Synthetic oligonucleotide
  Antisense strand to SEQ ID NO: 34050
uguuccagagauuaauuac

SEQ ID NO: 34052 - RNA, 19 nt, Artificial Sequence
  Description of Artificial Sequence: Synthetic oligonucleotide
  Sense strand starting at position 3883 of SEQ ID NO: 399
aguaauuaaucucuggaac

SEQ ID NO: 34053 - RNA, 19 nt, Artificial Sequence
  Description of Artificial Sequence: Synthetic oligonucleotide
  Antisense strand to SEQ ID NO: 34052
guuccagagauuaauuacu

SEQ ID NO: 34054 - RNA, 19 nt, Artificial Sequence
  Description of Artificial Sequence: Synthetic oligonucleotide
  Sense strand starting at position 3876 of SEQ ID NO: 399
ucaugagaguaauuaaucu

SEQ ID NO: 34055 - RNA, 19 nt, Artificial Sequence
  Description of Artificial Sequence: Synthetic oligonucleotide
  Antisense strand to SEQ ID NO: 34054
agauuaauuacucucauga

SEQ ID NO: 34056 - RNA, 19 nt, Artificial Sequence
  Description of Artificial Sequence: Synthetic oligonucleotide
  Sense strand starting at position 3828 of SEQ ID NO: 399
acagauuggcccugaaucu

SEQ ID NO: 34057 - RNA, 19 nt, Artificial Sequence
  Description of Artificial Sequence: Synthetic oligonucleotide
  Antisense strand to SEQ ID NO: 34056
agauucagggccaaucugu

SEQ ID NO: 34058 - RNA, 19 nt, Artificial Sequence
  Description of Artificial Sequence: Synthetic oligonucleotide
  Sense strand starting at position 3817 of SEQ ID NO: 399
guguuuacccuacagauug

SEQ ID NO: 34059 - RNA, 19 nt, Artificial Sequence
  Description of Artificial Sequence: Synthetic oligonucleotide
  Antisense strand to SEQ ID NO: 34058
caaucuguaggguaaacac

SEQ ID NO: 34060 - RNA, 19 nt, Artificial Sequence
  Description of Artificial Sequence: Synthetic oligonucleotide
  Sense strand starting at position 3815 of SEQ ID NO: 399
uuguguuuacccuacagau

SEQ ID NO: 34061 - RNA, 19 nt, Artificial Sequence
  Description of Artificial Sequence: Synthetic oligonucleotide
  Antisense strand to SEQ ID NO: 34060
aucuguaggguaaacacaa

SEQ ID NO: 34062 - RNA, 19 nt, Artificial Sequence
  Description of Artificial Sequence: Synthetic oligonucleotide
  Sense strand starting at position 3805 of SEQ ID NO: 399
cccguuacucuuguguuua

SEQ ID NO: 34063 - RNA, 19 nt, Artificial Sequence
  Description of Artificial Sequence: Synthetic oligonucleotide
  Antisense strand to SEQ ID NO: 34062
uaaacacaagaguaacggg

SEQ ID NO: 34064 - RNA, 19 nt, Artificial Sequence
  Description of Artificial Sequence: Synthetic oligonucleotide
  Sense strand starting at position 3029 of SEQ ID NO: 399
ucguauggugcaaguggua

SEQ ID NO: 34065 - RNA, 19 nt, Artificial Sequence
  Description of Artificial Sequence: Synthetic oligonucleotide
  Antisense strand to SEQ ID NO: 34064
uaccacuugcaccauacga

SEQ ID NO: 34066 - RNA, 19 nt, Artificial Sequence
  Description of Artificial Sequence: Synthetic oligonucleotide
  Sense strand starting at position 3014 of SEQ ID NO: 399
aggaaauguggguaaucgu

SEQ ID NO: 34067 - RNA, 19 nt, Artificial Sequence
  Description of Artificial Sequence: Synthetic oligonucleotide
  Antisense strand to SEQ ID NO: 34066
acgauuacccacauuuccu

SEQ ID NO: 34068 - RNA, 19 nt, Artificial Sequence
  Description of Artificial Sequence: Synthetic oligonucleotide
  Sense strand starting at position 3012 of SEQ ID NO: 399
acaggaaauguggguaauc

SEQ ID NO: 34069 - RNA, 19 nt, Artificial Sequence
  Description of Artificial Sequence: Synthetic oligonucleotide
  Antisense strand to SEQ ID NO: 34068
gauuacccacauuuccugu

SEQ ID NO: 34070 - RNA, 19 nt, Artificial Sequence
  Description of Artificial Sequence: Synthetic oligonucleotide
  Sense strand starting at position 2878 of SEQ ID NO: 399
auguuugucgaauaucaau

SEQ ID NO: 34071 - RNA, 19 nt, Artificial Sequence
  Description of Artificial Sequence: Synthetic oligonucleotide
  Antisense strand to SEQ ID NO: 34070
auugauauucgacaaacau

SEQ ID NO: 34072 - RNA, 19 nt, Artificial Sequence
  Description of Artificial Sequence: Synthetic oligonucleotide
  Sense strand starting at position 2793 of SEQ ID NO: 399
ucgugaagacuuuaagauc

SEQ ID NO: 34073 - RNA, 19 nt, Artificial Sequence
  Description of Artificial Sequence: Synthetic oligonucleotide
  Antisense strand to SEQ ID NO: 34072
gaucuuaaagucuucacga

SEQ ID NO: 34074 - RNA, 19 nt, Artificial Sequence
  Description of Artificial Sequence: Synthetic oligonucleotide
  Sense strand starting at position 2788 of SEQ ID NO: 399
aagugucgugaagacuuua

SEQ ID NO: 34075 - RNA, 19 nt, Artificial Sequence
  Description of Artificial Sequence: Synthetic oligonucleotide
  Antisense strand to SEQ ID NO: 34074
uaaagucuucacgacacuu

SEQ ID NO: 34076 - RNA, 19 nt, Artificial Sequence
  Description of Artificial Sequence: Synthetic oligonucleotide
  Sense strand starting at position 2768 of SEQ ID NO: 399
agagacuguuucucaucuu

SEQ ID NO: 34077 - RNA, 19 nt, Artificial Sequence
  Description of Artificial Sequence: Synthetic oligonucleotide
  Antisense strand to SEQ ID NO: 34076
aagaugagaaacagucucu

SEQ ID NO: 34078 - RNA, 19 nt, Artificial Sequence
  Description of Artificial Sequence: Synthetic oligonucleotide
  Sense strand starting at position 2765 of SEQ ID NO: 399
cccagagacuguuucucau

SEQ ID NO: 34079 - RNA, 19 nt, Artificial Sequence
  Description of Artificial Sequence: Synthetic oligonucleotide
  Antisense strand to SEQ ID NO: 34078
augagaaacagucucuggg

SEQ ID NO: 34080 - RNA, 19 nt, Artificial Sequence
  Description of Artificial Sequence: Synthetic oligonucleotide
  Sense strand starting at position 2743 of SEQ ID NO: 399
ucugaacuccgauaguuau

SEQ ID NO: 34081 - RNA, 19 nt, Artificial Sequence
  Description of Artificial Sequence: Synthetic oligonucleotide
  Antisense strand to SEQ ID NO: 34080
auaacuaucggaguucaga

SEQ ID NO: 34082 - RNA, 19 nt, Artificial Sequence
  Description of Artificial Sequence: Synthetic oligonucleotide
  Sense strand starting at position 2641 of SEQ ID NO: 399
cuaucaagacuuggcuuaa

SEQ ID NO: 34083 - RNA, 19 nt, Artificial Sequence
  Description of Artificial Sequence: Synthetic oligonucleotide
  Antisense strand to SEQ ID NO: 34082
uuaagccaagucuugauag

SEQ ID NO: 34084 - RNA, 19 nt, Artificial Sequence
  Description of Artificial Sequence: Synthetic oligonucleotide
  Sense strand starting at position 2525 of SEQ ID NO: 399
guuuccucccauuaaguau

SEQ ID NO: 34085 - RNA, 19 nt, Artificial Sequence
  Description of Artificial Sequence: Synthetic oligonucleotide
  Antisense strand to SEQ ID NO: 34084
auacuuaaugggaggaaac

SEQ ID NO: 34086 - RNA, 19 nt, Artificial Sequence
  Description of Artificial Sequence: Synthetic oligonucleotide
  Sense strand starting at position 2486 of SEQ ID NO: 399
ugcaucuaaugacuuaaga

SEQ ID NO: 34087 - RNA, 19 nt, Artificial Sequence
  Description of Artificial Sequence: Synthetic oligonucleotide
  Antisense strand to SEQ ID NO: 34086
ucuuaagucauuagaugca

SEQ ID NO: 34088 - RNA, 19 nt, Artificial Sequence
  Description of Artificial Sequence: Synthetic oligonucleotide
  Sense strand starting at position 2373 of SEQ ID NO: 399
ccaacugucguccaaauaa

SEQ ID NO: 34089 - RNA, 19 nt, Artificial Sequence
  Description of Artificial Sequence: Synthetic oligonucleotide
  Antisense strand to SEQ ID NO: 34088
uuauuuggacgacaguugg

SEQ ID NO: 34090 - RNA, 19 nt, Artificial Sequence
  Description of Artificial Sequence: Synthetic oligonucleotide
  Sense strand starting at position 2213 of SEQ ID NO: 399
gguauauccgcagaagaga

SEQ ID NO: 34091 - RNA, 19 nt, Artificial Sequence
  Description of Artificial Sequence: Synthetic oligonucleotide
  Antisense strand to SEQ ID NO: 34090
ucucuucugcggauauacc

SEQ ID NO: 34092 - RNA, 19 nt, Artificial Sequence
  Description of Artificial Sequence: Synthetic oligonucleotide
  Sense strand starting at position 2211 of SEQ ID NO: 399
aagguauauccgcagaaga

SEQ ID NO: 34093 - RNA, 19 nt, Artificial Sequence
  Description of Artificial Sequence: Synthetic oligonucleotide
  Antisense strand to SEQ ID NO: 34092
ucuucugcggauauaccuu

SEQ ID NO: 34094 - RNA, 19 nt, Artificial Sequence
  Description of Artificial Sequence: Synthetic oligonucleotide
  Sense strand starting at position 2210 of SEQ ID NO: 399
caagguauauccgcagaag

SEQ ID NO: 34095 - RNA, 19 nt, Artificial Sequence
  Description of Artificial Sequence: Synthetic oligonucleotide
  Antisense strand to SEQ ID NO: 34094
cuucugcggauauaccuug

SEQ ID NO: 34096 - RNA, 19 nt, Artificial Sequence
  Description of Artificial Sequence: Synthetic oligonucleotide
  Sense strand starting at position 2172 of SEQ ID NO: 399
gugcgucgaaguuuaaacu

SEQ ID NO: 34097 - RNA, 19 nt, Artificial Sequence
  Description of Artificial Sequence: Synthetic oligonucleotide
  Antisense strand to SEQ ID NO: 34096
aguuuaaacuucgacgcac

SEQ ID NO: 34098 - RNA, 19 nt, Artificial Sequence
  Description of Artificial Sequence: Synthetic oligonucleotide
  Sense strand starting at position 2165 of SEQ ID NO: 399
auguuuggugcgucgaagu

SEQ ID NO: 34099 - RNA, 19 nt, Artificial Sequence
  Description of Artificial Sequence: Synthetic oligonucleotide
  Antisense strand to SEQ ID NO: 34098
acuucgacgcaccaaacau

SEQ ID NO: 34100 - RNA, 19 nt, Artificial Sequence
  Description of Artificial Sequence: Synthetic oligonucleotide
  Sense strand starting at position 1399 of SEQ ID NO: 399
gcacguaaggaaggaaauu

SEQ ID NO: 34101 - RNA, 19 nt, Artificial Sequence
  Description of Artificial Sequence: Synthetic oligonucleotide
  Antisense strand to SEQ ID NO: 34100
aauuuccuuccuuacgugc

SEQ ID NO: 34102 - RNA, 19 nt, Artificial Sequence
  Description of Artificial Sequence: Synthetic oligonucleotide
  Sense strand starting at position 1297 of SEQ ID NO: 399
cugaucgccagaugaagaa

SEQ ID NO: 34103 - RNA, 19 nt, Artificial Sequence
  Description of Artificial Sequence: Synthetic oligonucleotide
  Antisense strand to SEQ ID NO: 34102
uucuucaucuggcgaucag

SEQ ID NO: 34104 - RNA, 19 nt, Artificial Sequence
  Description of Artificial Sequence: Synthetic oligonucleotide
  Sense strand starting at position 1295 of SEQ ID NO: 399
gccugaucgccagaugaag

SEQ ID NO: 34105 - RNA, 19 nt, Artificial Sequence
  Description of Artificial Sequence: Synthetic oligonucleotide
  Antisense strand to SEQ ID NO: 34104
cuucaucuggcgaucaggc

SEQ ID NO: 34106 - RNA, 19 nt, Artificial Sequence
  Description of Artificial Sequence: Synthetic oligonucleotide
  Sense strand starting at position 1207 of SEQ ID NO: 399
uauacuugagaaugugauc

SEQ ID NO: 34107 - RNA, 19 nt, Artificial Sequence
  Description of Artificial Sequence: Synthetic oligonucleotide
  Antisense strand to SEQ ID NO: 34106
gaucacauucucaaguaua

SEQ ID NO: 34108 - RNA, 19 nt, Artificial Sequence
  Description of Artificial Sequence: Synthetic oligonucleotide
  Sense strand starting at position 1042 of SEQ ID NO: 399
uugugacauuagcuaaaua

SEQ ID NO: 34109 - RNA, 19 nt, Artificial Sequence
  Description of Artificial Sequence: Synthetic oligonucleotide
  Antisense strand to SEQ ID NO: 34108
uauuuagcuaaugucacaa

SEQ ID NO: 34110 - RNA, 19 nt, Artificial Sequence
  Description of Artificial Sequence: Synthetic oligonucleotide
  Sense strand starting at position 893 of SEQ ID NO: 399
gguggaguacauggauauu

SEQ ID NO: 34111 - RNA, 19 nt, Artificial Sequence
  Description of Artificial Sequence: Synthetic oligonucleotide
  Antisense strand to SEQ ID NO: 34110
aauauccauguacuccacc

SEQ ID NO: 34112 - RNA, 19 nt, Artificial Sequence
  Description of Artificial Sequence: Synthetic oligonucleotide
  Sense strand starting at position 730 of SEQ ID NO: 399
uuaucauuguuucuacaga

SEQ ID NO: 34113 - RNA, 19 nt, Artificial Sequence
  Description of Artificial Sequence: Synthetic oligonucleotide
  Antisense strand to SEQ ID NO: 34112
ucuguagaaacaaugauaa

SEQ ID NO: 34114 - RNA, 19 nt, Artificial Sequence
  Description of Artificial Sequence: Synthetic oligonucleotide
  Sense strand starting at position 658 of SEQ ID NO: 399
agugcauuuccuuguuuaa

SEQ ID NO: 34115 - RNA, 19 nt, Artificial Sequence
  Description of Artificial Sequence: Synthetic oligonucleotide
  Antisense strand to SEQ ID NO: 34114
uuaaacaaggaaaugcacu

SEQ ID NO: 34116 - RNA, 19 nt, Artificial Sequence
  Description of Artificial Sequence: Synthetic oligonucleotide
  Sense strand starting at position 648 of SEQ ID NO: 399
ugucauuagcagugcauuu

SEQ ID NO: 34117 - RNA, 19 nt, Artificial Sequence
  Description of Artificial Sequence: Synthetic oligonucleotide
  Antisense strand to SEQ ID NO: 34116
aaaugcacugcuaaugaca

SEQ ID NO: 34118 - RNA, 19 nt, Artificial Sequence
  Description of Artificial Sequence: Synthetic oligonucleotide
  Sense strand starting at position 609 of SEQ ID NO: 399
ccagcaugggucuaacaau

SEQ ID NO: 34119 - RNA, 19 nt, Artificial Sequence
  Description of Artificial Sequence: Synthetic oligonucleotide
  Antisense strand to SEQ ID NO: 34118
auuguuagacccaugcugg

SEQ ID NO: 34120 - RNA, 19 nt, Artificial Sequence
  Description of Artificial Sequence: Synthetic oligonucleotide
  Sense strand starting at position 450 of SEQ ID NO: 399
aauguauucuagcuugaag

SEQ ID NO: 34121 - RNA, 19 nt, Artificial Sequence
  Description of Artificial Sequence: Synthetic oligonucleotide
  Antisense strand to SEQ ID NO: 34120
cuucaagcuagaauacauu

SEQ ID NO: 34122 - RNA, 19 nt, Artificial Sequence
  Description of Artificial Sequence: Synthetic oligonucleotide
  Sense strand starting at position 159 of SEQ ID NO: 399
ucauauaugguagaagugu

SEQ ID NO: 34123 - RNA, 19 nt, Artificial Sequence
  Description of Artificial Sequence: Synthetic oligonucleotide
  Antisense strand to SEQ ID NO: 34122
acacuucuaccauauauga

SEQ ID NO: 34124 - RNA, 19 nt, Artificial Sequence
  Description of Artificial Sequence: Synthetic oligonucleotide
  Sense strand starting at position 3731 of SEQ ID NO: 401
augugaauugcugauacag

SEQ ID NO: 34125 - RNA, 19 nt, Artificial Sequence
  Description of Artificial Sequence: Synthetic oligonucleotide
  Antisense strand to SEQ ID NO: 34124
cuguaucagcaauucacau

SEQ ID NO: 34126 - RNA, 19 nt, Artificial Sequence
  Description of Artificial Sequence: Synthetic oligonucleotide
  Sense strand starting at position 3714 of SEQ ID NO: 401
ugagaagaauuaggaagau

SEQ ID NO: 34127 - RNA, 19 nt, Artificial Sequence
  Description of Artificial Sequence: Synthetic oligonucleotide
  Antisense strand to SEQ ID NO: 34126
aucuuccuaauucuucuca

SEQ ID NO: 34128 - RNA, 19 nt, Artificial Sequence
  Description of Artificial Sequence: Synthetic oligonucleotide
  Sense strand starting at position 3665 of SEQ ID NO: 401
uugugaaaggcauauguga

SEQ ID NO: 34129 - RNA, 19 nt, Artificial Sequence
  Description of Artificial Sequence: Synthetic oligonucleotide
  Antisense strand to SEQ ID NO: 34128
ucacauaugccuuucacaa

SEQ ID NO: 34130 - RNA, 19 nt, Artificial Sequence
  Description of Artificial Sequence: Synthetic oligonucleotide
  Sense strand starting at position 3378 of SEQ ID NO: 401
gccuguggccaacaugaua

SEQ ID NO: 34131 - RNA, 19 nt, Artificial Sequence
  Description of Artificial Sequence: Synthetic oligonucleotide
  Antisense strand to SEQ ID NO: 34130
uaucauguuggccacaggc

SEQ ID NO: 34132 - RNA, 19 nt, Artificial Sequence
  Description of Artificial Sequence: Synthetic oligonucleotide
  Sense strand starting at position 3182 of SEQ ID NO: 401
accagaagccucuguuaac

SEQ ID NO: 34133 - RNA, 19 nt, Artificial Sequence
  Description of Artificial Sequence: Synthetic oligonucleotide
  Antisense strand to SEQ ID NO: 34132
guuaacagaggcuucuggu

SEQ ID NO: 34134 - RNA, 19 nt, Artificial Sequence
  Description of Artificial Sequence: Synthetic oligonucleotide
  Sense strand starting at position 3169 of SEQ ID NO: 401
auaugaaauuaggaccaga

SEQ ID NO: 34135 - RNA, 19 nt, Artificial Sequence
  Description of Artificial Sequence: Synthetic oligonucleotide
  Antisense strand to SEQ ID NO: 34134
ucugguccuaauuucauau

SEQ ID NO: 34136 - RNA, 19 nt, Artificial Sequence
  Description of Artificial Sequence: Synthetic oligonucleotide
  Sense strand starting at position 3160 of SEQ ID NO: 401
cuggguaugauaugaaauu

SEQ ID NO: 34137 - RNA, 19 nt, Artificial Sequence
  Description of Artificial Sequence: Synthetic oligonucleotide
  Antisense strand to SEQ ID NO: 34136
aauuucauaucauacccag

SEQ ID NO: 34138 - RNA, 19 nt, Artificial Sequence
  Description of Artificial Sequence: Synthetic oligonucleotide
  Sense strand starting at position 2977 of SEQ ID NO: 401
guuguauaauuucuuagcu

SEQ ID NO: 34139 - RNA, 19 nt, Artificial Sequence
  Description of Artificial Sequence: Synthetic oligonucleotide
  Antisense strand to SEQ ID NO: 34138
agcuaagaaauuauacaac

SEQ ID NO: 34140 - RNA, 19 nt, Artificial Sequence
  Description of Artificial Sequence: Synthetic oligonucleotide
  Sense strand starting at position 2887 of SEQ ID NO: 401
agcagaaucgccugaacca

SEQ ID NO: 34141 - RNA, 19 nt, Artificial Sequence
  Description of Artificial Sequence: Synthetic oligonucleotide
  Antisense strand to SEQ ID NO: 34140
ugguucaggcgauucugcu

SEQ ID NO: 34142 - RNA, 19 nt, Artificial Sequence
  Description of Artificial Sequence: Synthetic oligonucleotide
  Sense strand starting at position 2638 of SEQ ID NO: 401
gugaaauucuggguaucua

SEQ ID NO: 34143 - RNA, 19 nt, Artificial Sequence
  Description of Artificial Sequence: Synthetic oligonucleotide
  Antisense strand to SEQ ID NO: 34142
uagauacccagaauuucac

SEQ ID NO: 34144 - RNA, 19 nt, Artificial Sequence
  Description of Artificial Sequence: Synthetic oligonucleotide
  Sense strand starting at position 2637 of SEQ ID NO: 401
agugaaauucuggguaucu

SEQ ID NO: 34145 - RNA, 19 nt, Artificial Sequence
  Description of Artificial Sequence: Synthetic oligonucleotide
  Antisense strand to SEQ ID NO: 34144
agauacccagaauuucacu

SEQ ID NO: 34146 - RNA, 19 nt, Artificial Sequence
  Description of Artificial Sequence: Synthetic oligonucleotide
  Sense strand starting at position 2620 of SEQ ID NO: 401
aggaaugaaucucagauag

SEQ ID NO: 34147 - RNA, 19 nt, Artificial Sequence
  Description of Artificial Sequence: Synthetic oligonucleotide
  Antisense strand to SEQ ID NO: 34146
cuaucugagauucauuccu

SEQ ID NO: 34148 - RNA, 19 nt, Artificial Sequence
  Description of Artificial Sequence: Synthetic oligonucleotide
  Sense strand starting at position 2557 of SEQ ID NO: 401
uaauaugcgcuugaagagu

SEQ ID NO: 34149 - RNA, 19 nt, Artificial Sequence
  Description of Artificial Sequence: Synthetic oligonucleotide
  Antisense strand to SEQ ID NO: 34148
acucuucaagcgcauauua

SEQ ID NO: 34150 - RNA, 19 nt, Artificial Sequence
  Description of Artificial Sequence: Synthetic oligonucleotide
  Sense strand starting at position 2556 of SEQ ID NO: 401
uuaauaugcgcuugaagag

SEQ ID NO: 34151 - RNA, 19 nt, Artificial Sequence
  Description of Artificial Sequence: Synthetic oligonucleotide
  Antisense strand to SEQ ID NO: 34150
cucuucaagcgcauauuaa

SEQ ID NO: 34152 - RNA, 19 nt, Artificial Sequence
  Description of Artificial Sequence: Synthetic oligonucleotide
  Sense strand starting at position 2377 of SEQ ID NO: 401
gguugugaccaggaguuag

SEQ ID NO: 34153 - RNA, 19 nt, Artificial Sequence
  Description of Artificial Sequence: Synthetic oligonucleotide
  Antisense strand to SEQ ID NO: 34152
cuaacuccuggucacaacc

SEQ ID NO: 34154 - RNA, 19 nt, Artificial Sequence
  Description of Artificial Sequence: Synthetic oligonucleotide
  Sense strand starting at position 2374 of SEQ ID NO: 401
ucagguugugaccaggagu

SEQ ID NO: 34155 - RNA, 19 nt, Artificial Sequence
  Description of Artificial Sequence: Synthetic oligonucleotide
  Antisense strand to SEQ ID NO: 34154
acuccuggucacaaccuga

SEQ ID NO: 34156 - RNA, 19 nt, Artificial Sequence
  Description of Artificial Sequence: Synthetic oligonucleotide
  Sense strand starting at position 1378 of SEQ ID NO: 401
ccaaucucggcucaaacuu

SEQ ID NO: 34157 - RNA, 19 nt, Artificial Sequence
  Description of Artificial Sequence: Synthetic oligonucleotide
  Antisense strand to SEQ ID NO: 34156
aaguuugagccgagauugg

SEQ ID NO: 34158 - RNA, 19 nt, Artificial Sequence
  Description of Artificial Sequence: Synthetic oligonucleotide
  Sense strand starting at position 1258 of SEQ ID NO: 401
aguguuuccagacaucgac

SEQ ID NO: 34159 - RNA, 19 nt, Artificial Sequence
  Description of Artificial Sequence: Synthetic oligonucleotide
  Antisense strand to SEQ ID NO: 34158
gucgaugucuggaaacacu

SEQ ID NO: 34160 - RNA, 19 nt, Artificial Sequence
  Description of Artificial Sequence: Synthetic oligonucleotide
  Sense strand starting at position 1239 of SEQ ID NO: 401
uggagcugugacuaucaaa

SEQ ID NO: 34161 - RNA, 19 nt, Artificial Sequence
  Description of Artificial Sequence: Synthetic oligonucleotide
  Antisense strand to SEQ ID NO: 34160
uuugauagucacagcucca

SEQ ID NO: 34162 - RNA, 19 nt, Artificial Sequence
  Description of Artificial Sequence: Synthetic oligonucleotide
  Sense strand starting at position 1094 of SEQ ID NO: 401
cuccuucucgcugaaggaa

SEQ ID NO: 34163 - RNA, 19 nt, Artificial Sequence
  Description of Artificial Sequence: Synthetic oligonucleotide
  Antisense strand to SEQ ID NO: 34162
uuccuucagcgagaaggag

SEQ ID NO: 34164 - RNA, 19 nt, Artificial Sequence
  Description of Artificial Sequence: Synthetic oligonucleotide
  Sense strand starting at position 1021 of SEQ ID NO: 401
gaaguaagcguugaauaua

SEQ ID NO: 34165 - RNA, 19 nt, Artificial Sequence
  Description of Artificial Sequence: Synthetic oligonucleotide
  Antisense strand to SEQ ID NO: 34164
uauauucaacgcuuacuuc

SEQ ID NO: 34166 - RNA, 19 nt, Artificial Sequence
  Description of Artificial Sequence: Synthetic oligonucleotide
  Sense strand starting at position 1020 of SEQ ID NO: 401
ugaaguaagcguugaauau

SEQ ID NO: 34167 - RNA, 19 nt, Artificial Sequence
  Description of Artificial Sequence: Synthetic oligonucleotide
  Antisense strand to SEQ ID NO: 34166
auauucaacgcuuacuuca

SEQ ID NO: 34168 - RNA, 19 nt, Artificial Sequence
  Description of Artificial Sequence: Synthetic oligonucleotide
  Sense strand starting at position 982 of SEQ ID NO: 401
aauguacugguguaaagga

SEQ ID NO: 34169 - RNA, 19 nt, Artificial Sequence
  Description of Artificial Sequence: Synthetic oligonucleotide
  Antisense strand to SEQ ID NO: 34168
uccuuuacaccaguacauu

SEQ ID NO: 34170 - RNA, 19 nt, Artificial Sequence
  Description of Artificial Sequence: Synthetic oligonucleotide
  Sense strand starting at position 978 of SEQ ID NO: 401
ugggaauguacugguguaa

SEQ ID NO: 34171 - RNA, 19 nt, Artificial Sequence
  Description of Artificial Sequence: Synthetic oligonucleotide
  Antisense strand to SEQ ID NO: 34170
uuacaccaguacauuccca

SEQ ID NO: 34172 - RNA, 19 nt, Artificial Sequence
  Description of Artificial Sequence: Synthetic oligonucleotide
  Sense strand starting at position 932 of SEQ ID NO: 401
gaaauuuacugcgugccua

SEQ ID NO: 34173 - RNA, 19 nt, Artificial Sequence
  Description of Artificial Sequence: Synthetic oligonucleotide
  Antisense strand to SEQ ID NO: 34172
uaggcacgcaguaaauuuc

SEQ ID NO: 34174 - RNA, 19 nt, Artificial Sequence
  Description of Artificial Sequence: Synthetic oligonucleotide
  Sense strand starting at position 774 of SEQ ID NO: 401
agaaguugccuuuacaaag

SEQ ID NO: 34175 - RNA, 19 nt, Artificial Sequence
  Description of Artificial Sequence: Synthetic oligonucleotide
  Antisense strand to SEQ ID NO: 34174
cuuuguaaaggcaacuucu

SEQ ID NO: 34176 - RNA, 19 nt, Artificial Sequence
  Description of Artificial Sequence: Synthetic oligonucleotide
  Sense strand starting at position 771 of SEQ ID NO: 401
acaagaaguugccuuuaca

SEQ ID NO: 34177 - RNA, 19 nt, Artificial Sequence
  Description of Artificial Sequence: Synthetic oligonucleotide
  Antisense strand to SEQ ID NO: 34176
uguaaaggcaacuucuugu

SEQ ID NO: 34178 - RNA, 19 nt, Artificial Sequence
  Description of Artificial Sequence: Synthetic oligonucleotide
  Sense strand starting at position 760 of SEQ ID NO: 401
ccaaauccuugacaagaag

SEQ ID NO: 34179 - RNA, 19 nt, Artificial Sequence
  Description of Artificial Sequence: Synthetic oligonucleotide
  Antisense strand to SEQ ID NO: 34178
cuucuugucaaggauuugg

SEQ ID NO: 34180 - RNA, 19 nt, Artificial Sequence
  Description of Artificial Sequence: Synthetic oligonucleotide
  Sense strand starting at position 592 of SEQ ID NO: 401
acaaucuaaguguggaaca

SEQ ID NO: 34181 - RNA, 19 nt, Artificial Sequence
  Description of Artificial Sequence: Synthetic oligonucleotide
  Antisense strand to SEQ ID NO: 34180
uguuccacacuuagauugu

SEQ ID NO: 34182 - RNA, 19 nt, Artificial Sequence
  Description of Artificial Sequence: Synthetic oligonucleotide
  Sense strand starting at position 209 of SEQ ID NO: 401
ucaaguugcuacccaagaa

SEQ ID NO: 34183 - RNA, 19 nt, Artificial Sequence
  Description of Artificial Sequence: Synthetic oligonucleotide
  Antisense strand to SEQ ID NO: 34182
uucuuggguagcaacuuga

SEQ ID NO: 34184 - RNA, 19 nt, Artificial Sequence
  Description of Artificial Sequence: Synthetic oligonucleotide
  Sense strand starting at position 197 of SEQ ID NO: 401
aggcuuuauuucucaaguu

SEQ ID NO: 34185 - RNA, 19 nt, Artificial Sequence
  Description of Artificial Sequence: Synthetic oligonucleotide
  Antisense strand to SEQ ID NO: 34184
aacuugagaaauaaagccu

SEQ ID NO: 34186 - RNA, 19 nt, Artificial Sequence
  Description of Artificial Sequence: Synthetic oligonucleotide
  Sense strand starting at position 187 of SEQ ID NO: 401
gucaucaccuaggcuuuau

SEQ ID NO: 34187 - RNA, 19 nt, Artificial Sequence
  Description of Artificial Sequence: Synthetic oligonucleotide
  Antisense strand to SEQ ID NO: 34186
auaaagccuaggugaugac

SEQ ID NO: 34188 - RNA, 19 nt, Artificial Sequence
  Description of Artificial Sequence: Synthetic oligonucleotide
  Sense strand starting at position 186 of SEQ ID NO: 401
ggucaucaccuaggcuuua

SEQ ID NO: 34189 - RNA, 19 nt, Artificial Sequence
  Description of Artificial Sequence: Synthetic oligonucleotide
  Antisense strand to SEQ ID NO: 34188
uaaagccuaggugaugacc

SEQ ID NO: 34190 - RNA, 19 nt, Artificial Sequence
  Description of Artificial Sequence: Synthetic oligonucleotide
  Sense strand starting at position 179 of SEQ ID NO: 401
uguccuuggucaucaccua

SEQ ID NO: 34191 - RNA, 19 nt, Artificial Sequence
  Description of Artificial Sequence: Synthetic oligonucleotide
  Antisense strand to SEQ ID NO: 34190
uaggugaugaccaaggaca

SEQ ID NO: 34192 - RNA, 19 nt, Artificial Sequence
  Description of Artificial Sequence: Synthetic oligonucleotide
  Sense strand starting at position 137 of SEQ ID NO: 401
ucaauuauaugagcaguaa

SEQ ID NO: 34193 - RNA, 19 nt, Artificial Sequence
  Description of Artificial Sequence: Synthetic oligonucleotide
  Antisense strand to SEQ ID NO: 34192
uuacugcucauauaauuga

SEQ ID NO: 34194 - RNA, 19 nt, Artificial Sequence
  Description of Artificial Sequence: Synthetic oligonucleotide
  Sense strand starting at position 126 of SEQ ID NO: 401
agcugcaagccucaauuau

SEQ ID NO: 34195 - RNA, 19 nt, Artificial Sequence
  Description of Artificial Sequence: Synthetic oligonucleotide
  Antisense strand to SEQ ID NO: 34194
auaauugaggcuugcagcu

SEQ ID NO: 34196 - RNA, 19 nt, Artificial Sequence
  Description of Artificial Sequence: Synthetic oligonucleotide
  Sense strand starting at position 103 of SEQ ID NO: 401
gaguuucugccucagacag

SEQ ID NO: 34197 - RNA, 19 nt, Artificial Sequence
  Description of Artificial Sequence: Synthetic oligonucleotide
  Antisense strand to SEQ ID NO: 34196
cugucugaggcagaaacuc

SEQ ID NO: 34198 - RNA, 19 nt, Artificial Sequence
  Description of Artificial Sequence: Synthetic oligonucleotide
  Sense strand starting at position 101 of SEQ ID NO: 401
uggaguuucugccucagac

SEQ ID NO: 34199 - RNA, 19 nt, Artificial Sequence
  Description of Artificial Sequence: Synthetic oligonucleotide
  Antisense strand to SEQ ID NO: 34198
gucugaggcagaaacucca

SEQ ID NO: 34200 - RNA, 19 nt, Artificial Sequence
  Description of Artificial Sequence: Synthetic oligonucleotide
  Sense strand starting at position 43 of SEQ ID NO: 401
gucagcauucuacauguga

SEQ ID NO: 34201 - RNA, 19 nt, Artificial Sequence
  Description of Artificial Sequence: Synthetic oligonucleotide
  Antisense strand to SEQ ID NO: 34200
ucacauguagaaugcugac

SEQ ID NO: 34202 - RNA, 19 nt, Artificial Sequence
  Description of Artificial Sequence: Synthetic oligonucleotide
  Sense strand starting at position 19 of SEQ ID NO: 401
guacucuaacgcuacagua

SEQ ID NO: 34203 - RNA, 19 nt, Artificial Sequence
  Description of Artificial Sequence: Synthetic oligonucleotide
  Antisense strand to SEQ ID NO: 34202
uacuguagcguuagaguac

SEQ ID NO: 34204 - RNA, 19 nt, Artificial Sequence
  Description of Artificial Sequence: Synthetic oligonucleotide
  Sense strand starting at position 3613 of SEQ ID NO: 400
gcucuuauuccacaaggag

SEQ ID NO: 34205 - RNA, 19 nt, Artificial Sequence
  Description of Artificial Sequence: Synthetic oligonucleotide
  Antisense strand to SEQ ID NO: 34204
cuccuuguggaauaagagc

SEQ ID NO: 34206 - RNA, 19 nt, Artificial Sequence
  Description of Artificial Sequence: Synthetic oligonucleotide
  Sense strand starting at position 3497 of SEQ ID NO: 400
acgggugauugaguucaau

SEQ ID NO: 34207 - RNA, 19 nt, Artificial Sequence
  Description of Artificial Sequence: Synthetic oligonucleotide
  Antisense strand to SEQ ID NO: 34206
auugaacucaaucacccgu

SEQ ID NO: 34208 - RNA, 19 nt, Artificial Sequence
  Description of Artificial Sequence: Synthetic oligonucleotide
  Sense strand starting at position 3386 of SEQ ID NO: 400
gccagaucccaucaugagu

SEQ ID NO: 34209 - RNA, 19 nt, Artificial Sequence
  Description of Artificial Sequence: Synthetic oligonucleotide
  Antisense strand to SEQ ID NO: 34208
acucaugaugggaucuggc

SEQ ID NO: 34210 - RNA, 19 nt, Artificial Sequence
  Description of Artificial Sequence: Synthetic oligonucleotide
  Sense strand starting at position 3356 of SEQ ID NO: 400
cuuggaauuuccugaauug

SEQ ID NO: 34211 - RNA, 19 nt, Artificial Sequence
  Description of Artificial Sequence: Synthetic oligonucleotide
  Antisense strand to SEQ ID NO: 34210
caauucaggaaauuccaag

SEQ ID NO: 34212 - RNA, 19 nt, Artificial Sequence
  Description of Artificial Sequence: Synthetic oligonucleotide
  Sense strand starting at position 3303 of SEQ ID NO: 400
gaauuugucuggucucugu

SEQ ID NO: 34213 - RNA, 19 nt, Artificial Sequence
  Description of Artificial Sequence: Synthetic oligonucleotide
  Antisense strand to SEQ ID NO: 34212
acagagaccagacaaauuc

SEQ ID NO: 34214 - RNA, 19 nt, Artificial Sequence
  Description of Artificial Sequence: Synthetic oligonucleotide
  Sense strand starting at position 3248 of SEQ ID NO: 400
gaaagucuucuagggcagu

SEQ ID NO: 34215 - RNA, 19 nt, Artificial Sequence
  Description of Artificial Sequence: Synthetic oligonucleotide
  Antisense strand to SEQ ID NO: 34214
acugcccuagaagacuuuc

SEQ ID NO: 34216 - RNA, 19 nt, Artificial Sequence
  Description of Artificial Sequence: Synthetic oligonucleotide
  Sense strand starting at position 3148 of SEQ ID NO: 400
guuguucuacugcaaugaa

SEQ ID NO: 34217 - RNA, 19 nt, Artificial Sequence
  Description of Artificial Sequence: Synthetic oligonucleotide
  Antisense strand to SEQ ID NO: 34216
uucauugcaguagaacaac

SEQ ID NO: 34218 - RNA, 19 nt, Artificial Sequence
  Description of Artificial Sequence: Synthetic oligonucleotide
  Sense strand starting at position 3141 of SEQ ID NO: 400
ugugaauguuguucuacug

SEQ ID NO: 34219 - RNA, 19 nt, Artificial Sequence
  Description of Artificial Sequence: Synthetic oligonucleotide
  Antisense strand to SEQ ID NO: 34218
caguagaacaacauucaca

SEQ ID NO: 34220 - RNA, 19 nt, Artificial Sequence
  Description of Artificial Sequence: Synthetic oligonucleotide
  Sense strand starting at position 3129 of SEQ ID NO: 400
aacccuugaggcugugaau

SEQ ID NO: 34221 - RNA, 19 nt, Artificial Sequence
  Description of Artificial Sequence: Synthetic oligonucleotide
  Antisense strand to SEQ ID NO: 34220
auucacagccucaaggguu

SEQ ID NO: 34222 - RNA, 19 nt, Artificial Sequence
  Description of Artificial Sequence: Synthetic oligonucleotide
  Sense strand starting at position 2524 of SEQ ID NO: 400
acaugacugcuuugggauu

SEQ ID NO: 34223 - RNA, 19 nt, Artificial Sequence
  Description of Artificial Sequence: Synthetic oligonucleotide
  Antisense strand to SEQ ID NO: 34222
aaucccaaagcagucaugu

SEQ ID NO: 34224 - RNA, 19 nt, Artificial Sequence
  Description of Artificial Sequence: Synthetic oligonucleotide
  Sense strand starting at position 2522 of SEQ ID NO: 400
ggacaugacugcuuuggga

SEQ ID NO: 34225 - RNA, 19 nt, Artificial Sequence
  Description of Artificial Sequence: Synthetic oligonucleotide
  Antisense strand to SEQ ID NO: 34224
ucccaaagcagucaugucc

SEQ ID NO: 34226 - RNA, 19 nt, Artificial Sequence
  Description of Artificial Sequence: Synthetic oligonucleotide
  Sense strand starting at position 2485 of SEQ ID NO: 400
uuugcagucugguuacaaa

SEQ ID NO: 34227 - RNA, 19 nt, Artificial Sequence
  Description of Artificial Sequence: Synthetic oligonucleotide
  Antisense strand to SEQ ID NO: 34226
uuuguaaccagacugcaaa

SEQ ID NO: 34228 - RNA, 19 nt, Artificial Sequence
  Description of Artificial Sequence: Synthetic oligonucleotide
  Sense strand starting at position 2456 of SEQ ID NO: 400
ggaagacucugucugggua

SEQ ID NO: 34229 - RNA, 19 nt, Artificial Sequence
  Description of Artificial Sequence: Synthetic oligonucleotide
  Antisense strand to SEQ ID NO: 34228
uacccagacagagucuucc

SEQ ID NO: 34230 - RNA, 19 nt, Artificial Sequence
  Description of Artificial Sequence: Synthetic oligonucleotide
  Sense strand starting at position 2411 of SEQ ID NO: 400
cuuacugauucuuugaaga

SEQ ID NO: 34231 - RNA, 19 nt, Artificial Sequence
  Description of Artificial Sequence: Synthetic oligonucleotide
  Antisense strand to SEQ ID NO: 34230
ucuucaaagaaucaguaag

SEQ ID NO: 34232 - RNA, 19 nt, Artificial Sequence
  Description of Artificial Sequence: Synthetic oligonucleotide
  Sense strand starting at position 2190 of SEQ ID NO: 400
gguaauuaaaggugacuua

SEQ ID NO: 34233 - RNA, 19 nt, Artificial Sequence
  Description of Artificial Sequence: Synthetic oligonucleotide
  Antisense strand to SEQ ID NO: 34232
uaagucaccuuuaauuacc

SEQ ID NO: 34234 - RNA, 19 nt, Artificial Sequence
  Description of Artificial Sequence: Synthetic oligonucleotide
  Sense strand starting at position 2134 of SEQ ID NO: 400
guuuaugagccagaguggu

SEQ ID NO: 34235 - RNA, 19 nt, Artificial Sequence
  Description of Artificial Sequence: Synthetic oligonucleotide
  Antisense strand to SEQ ID NO: 34234
accacucuggcucauaaac

SEQ ID NO: 34236 - RNA, 19 nt, Artificial Sequence
  Description of Artificial Sequence: Synthetic oligonucleotide
  Sense strand starting at position 1984 of SEQ ID NO: 400
gaacaauggugagaacaca

SEQ ID NO: 34237 - RNA, 19 nt, Artificial Sequence
  Description of Artificial Sequence: Synthetic oligonucleotide
  Antisense strand to SEQ ID NO: 34236
uguguucucaccauuguuc

SEQ ID NO: 34238 - RNA, 19 nt, Artificial Sequence
  Description of Artificial Sequence: Synthetic oligonucleotide
  Sense strand starting at position 1840 of SEQ ID NO: 400
ccauguuuaggucaaauaa

SEQ ID NO: 34239 - RNA, 19 nt, Artificial Sequence
  Description of Artificial Sequence: Synthetic oligonucleotide
  Antisense strand to SEQ ID NO: 34238
uuauuugaccuaaacaugg

SEQ ID NO: 34240 - RNA, 19 nt, Artificial Sequence
  Description of Artificial Sequence: Synthetic oligonucleotide
  Sense strand starting at position 1838 of SEQ ID NO: 400
ucccauguuuaggucaaau

SEQ ID NO: 34241 - RNA, 19 nt, Artificial Sequence
  Description of Artificial Sequence: Synthetic oligonucleotide
  Antisense strand to SEQ ID NO: 34240
auuugaccuaaacauggga

SEQ ID NO: 34242 - RNA, 19 nt, Artificial Sequence
  Description of Artificial Sequence: Synthetic oligonucleotide
  Sense strand starting at position 1608 of SEQ ID NO: 400
gcaggauggcuaugacaaa

SEQ ID NO: 34243 - RNA, 19 nt, Artificial Sequence
  Description of Artificial Sequence: Synthetic oligonucleotide
  Antisense strand to SEQ ID NO: 34242
uuugucauagccauccugc

SEQ ID NO: 34244 - RNA, 19 nt, Artificial Sequence
  Description of Artificial Sequence: Synthetic oligonucleotide
  Sense strand starting at position 1139 of SEQ ID NO: 400
uuacaaaggcuaugaagau

SEQ ID NO: 34245 - RNA, 19 nt, Artificial Sequence
  Description of Artificial Sequence: Synthetic oligonucleotide
  Antisense strand to SEQ ID NO: 34244
aucuucauagccuuuguaa

SEQ ID NO: 34246 - RNA, 19 nt, Artificial Sequence
  Description of Artificial Sequence: Synthetic oligonucleotide
  Sense strand starting at position 1127 of SEQ ID NO: 400
uggguuagauccuuacaaa

SEQ ID NO: 34247 - RNA, 19 nt, Artificial Sequence
  Description of Artificial Sequence: Synthetic oligonucleotide
  Antisense strand to SEQ ID NO: 34246
uuuguaaggaucuaaccca

SEQ ID NO: 34248 - RNA, 19 nt, Artificial Sequence
  Description of Artificial Sequence: Synthetic oligonucleotide
  Sense strand starting at position 1004 of SEQ ID NO: 400
ggauaacucucaguucuua

SEQ ID NO: 34249 - RNA, 19 nt, Artificial Sequence
  Description of Artificial Sequence: Synthetic oligonucleotide
  Antisense strand to SEQ ID NO: 34248
uaagaacugagaguuaucc

SEQ ID NO: 34250 - RNA, 19 nt, Artificial Sequence
  Description of Artificial Sequence: Synthetic oligonucleotide
  Sense strand starting at position 993 of SEQ ID NO: 400
gcucgaacuguggauaacu

SEQ ID NO: 34251 - RNA, 19 nt, Artificial Sequence
  Description of Artificial Sequence: Synthetic oligonucleotide
  Antisense strand to SEQ ID NO: 34250
aguuauccacaguucgagc

SEQ ID NO: 34252 - RNA, 19 nt, Artificial Sequence
  Description of Artificial Sequence: Synthetic oligonucleotide
  Sense strand starting at position 991 of SEQ ID NO: 400
cagcucgaacuguggauaa

SEQ ID NO: 34253 - RNA, 19 nt, Artificial Sequence
  Description of Artificial Sequence: Synthetic oligonucleotide
  Antisense strand to SEQ ID NO: 34252
uuauccacaguucgagcug

SEQ ID NO: 34254 - RNA, 19 nt, Artificial Sequence
  Description of Artificial Sequence: Synthetic oligonucleotide
  Sense strand starting at position 940 of SEQ ID NO: 400
gaacaaucccuagggcuga

SEQ ID NO: 34255 - RNA, 19 nt, Artificial Sequence
  Description of Artificial Sequence: Synthetic oligonucleotide
  Antisense strand to SEQ ID NO: 34254
ucagcccuagggauuguuc

SEQ ID NO: 34256 - RNA, 19 nt, Artificial Sequence
  Description of Artificial Sequence: Synthetic oligonucleotide
  Sense strand starting at position 924 of SEQ ID NO: 400
cugucauggcaauggagaa

SEQ ID NO: 34257 - RNA, 19 nt, Artificial Sequence
  Description of Artificial Sequence: Synthetic oligonucleotide
  Antisense strand to SEQ ID NO: 34256
uucuccauugccaugacag

SEQ ID NO: 34258 - RNA, 19 nt, Artificial Sequence
  Description of Artificial Sequence: Synthetic oligonucleotide
  Sense strand starting at position 885 of SEQ ID NO: 400
cugagaguacauuauggca

SEQ ID NO: 34259 - RNA, 19 nt, Artificial Sequence
  Description of Artificial Sequence: Synthetic oligonucleotide
  Antisense strand to SEQ ID NO: 34258
ugccauaauguacucucag

SEQ ID NO: 34260 - RNA, 19 nt, Artificial Sequence
  Description of Artificial Sequence: Synthetic oligonucleotide
  Sense strand starting at position 761 of SEQ ID NO: 400
gguuaaauaugggaugaga

SEQ ID NO: 34261 - RNA, 19 nt, Artificial Sequence
  Description of Artificial Sequence: Synthetic oligonucleotide
  Antisense strand to SEQ ID NO: 34260
ucucaucccauauuuaacc

SEQ ID NO: 34262 - RNA, 19 nt, Artificial Sequence
  Description of Artificial Sequence: Synthetic oligonucleotide
  Sense strand starting at position 751 of SEQ ID NO: 400
gggacacugugguuaaaua

SEQ ID NO: 34263 - RNA, 19 nt, Artificial Sequence
  Description of Artificial Sequence: Synthetic oligonucleotide
  Antisense strand to SEQ ID NO: 34262
uauuuaaccacaguguccc

SEQ ID NO: 34264 - RNA, 19 nt, Artificial Sequence
  Description of Artificial Sequence: Synthetic oligonucleotide
  Sense strand starting at position 726 of SEQ ID NO: 400
agcccaucugcugagauaa

SEQ ID NO: 34265 - RNA, 19 nt, Artificial Sequence
  Description of Artificial Sequence: Synthetic oligonucleotide
  Antisense strand to SEQ ID NO: 34264
uuaucucagcagaugggcu

SEQ ID NO: 34266 - RNA, 19 nt, Artificial Sequence
  Description of Artificial Sequence: Synthetic oligonucleotide
  Sense strand starting at position 695 of SEQ ID NO: 400
uccagugggucccuacaau

SEQ ID NO: 34267 - RNA, 19 nt, Artificial Sequence
  Description of Artificial Sequence: Synthetic oligonucleotide
  Antisense strand to SEQ ID NO: 34266
auuguagggacccacugga

SEQ ID NO: 34268 - RNA, 19 nt, Artificial Sequence
  Description of Artificial Sequence: Synthetic oligonucleotide
  Sense strand starting at position 581 of SEQ ID NO: 400
auguacauuguagaaaguu

SEQ ID NO: 34269 - RNA, 19 nt, Artificial Sequence
  Description of Artificial Sequence: Synthetic oligonucleotide
  Antisense strand to SEQ ID NO: 34268
aacuuucuacaauguacau

SEQ ID NO: 34270 - RNA, 19 nt, Artificial Sequence
  Description of Artificial Sequence: Synthetic oligonucleotide
  Sense strand starting at position 577 of SEQ ID NO: 400
auacauguacauuguagaa

SEQ ID NO: 34271 - RNA, 19 nt, Artificial Sequence
  Description of Artificial Sequence: Synthetic oligonucleotide
  Antisense strand to SEQ ID NO: 34270
uucuacaauguacauguau

SEQ ID NO: 34272 - RNA, 19 nt, Artificial Sequence
  Description of Artificial Sequence: Synthetic oligonucleotide
  Sense strand starting at position 574 of SEQ ID NO: 400
gucauacauguacauugua

SEQ ID NO: 34273 - RNA, 19 nt, Artificial Sequence
  Description of Artificial Sequence: Synthetic oligonucleotide
  Antisense strand to SEQ ID NO: 34272
uacaauguacauguaugac

SEQ ID NO: 34274 - RNA, 19 nt, Artificial Sequence
  Description of Artificial Sequence: Synthetic oligonucleotide
  Sense strand starting at position 562 of SEQ ID NO: 400
uuuagauuguaagucauac

SEQ ID NO: 34275 - RNA, 19 nt, Artificial Sequence
  Description of Artificial Sequence: Synthetic oligonucleotide
  Antisense strand to SEQ ID NO: 34274
guaugacuuacaaucuaaa

SEQ ID NO: 34276 - RNA, 19 nt, Artificial Sequence
  Description of Artificial Sequence: Synthetic oligonucleotide
  Sense strand starting at position 396 of SEQ ID NO: 400
uugggucugcuguaauaua

SEQ ID NO: 34277 - RNA, 19 nt, Artificial Sequence
  Description of Artificial Sequence: Synthetic oligonucleotide
  Antisense strand to SEQ ID NO: 34276
uauauuacagcagacccaa

SEQ ID NO: 34278 - RNA, 19 nt, Artificial Sequence
  Description of Artificial Sequence: Synthetic oligonucleotide
  Sense strand starting at position 392 of SEQ ID NO: 400
auacuugggucugcuguaa

SEQ ID NO: 34279 - RNA, 19 nt, Artificial Sequence
  Description of Artificial Sequence: Synthetic oligonucleotide
  Antisense strand to SEQ ID NO: 34278
uuacagcagacccaaguau

SEQ ID NO: 34280 - RNA, 19 nt, Artificial Sequence
  Description of Artificial Sequence: Synthetic oligonucleotide
  Sense strand starting at position 260 of SEQ ID NO: 400
uaucuugcaggcugaaaga

SEQ ID NO: 34281 - RNA, 19 nt, Artificial Sequence
  Description of Artificial Sequence: Synthetic oligonucleotide
  Antisense strand to SEQ ID NO: 34280
ucuuucagccugcaagaua

SEQ ID NO: 34282 - RNA, 19 nt, Artificial Sequence
  Description of Artificial Sequence: Synthetic oligonucleotide
  Sense strand starting at position 30 of SEQ ID NO: 400
cagggugacuucuccgaaa

SEQ ID NO: 34283 - RNA, 19 nt, Artificial Sequence
  Description of Artificial Sequence: Synthetic oligonucleotide
  Antisense strand to SEQ ID NO: 34282
uuucggagaagucacccug

SEQ ID NO: 34284 - RNA, 19 nt, Artificial Sequence
  Description of Artificial Sequence: Synthetic oligonucleotide
  Sense strand starting at position 3937 of SEQ ID NO: 403
guauucugcccaugaacaa

SEQ ID NO: 34285 - RNA, 19 nt, Artificial Sequence
  Description of Artificial Sequence: Synthetic oligonucleotide
  Antisense strand to SEQ ID NO: 34284
uuguucaugggcagaauac

SEQ ID NO: 34286 - RNA, 19 nt, Artificial Sequence
  Description of Artificial Sequence: Synthetic oligonucleotide
  Sense strand starting at position 3888 of SEQ ID NO: 403
agugucaacucaucaaaga

SEQ ID NO: 34287 - RNA, 19 nt, Artificial Sequence
  Description of Artificial Sequence: Synthetic oligonucleotide
  Antisense strand to SEQ ID NO: 34286
ucuuugaugaguugacacu

SEQ ID NO: 34288 - RNA, 19 nt, Artificial Sequence
  Description of Artificial Sequence: Synthetic oligonucleotide
  Sense strand starting at position 3862 of SEQ ID NO: 403
gguacaacaucauuguaaa

SEQ ID NO: 34289 - RNA, 19 nt, Artificial Sequence
  Description of Artificial Sequence: Synthetic oligonucleotide
  Antisense strand to SEQ ID NO: 34288
uuuacaaugauguuguacc

SEQ ID NO: 34290 - RNA, 19 nt, Artificial Sequence
  Description of Artificial Sequence: Synthetic oligonucleotide
  Sense strand starting at position 3850 of SEQ ID NO: 403
uuaauuccagaugguacaa

SEQ ID NO: 34291 - RNA, 19 nt, Artificial Sequence
  Description of Artificial Sequence: Synthetic oligonucleotide
  Antisense strand to SEQ ID NO: 34290
uuguaccaucuggaauuaa

SEQ ID NO: 34292 - RNA, 19 nt, Artificial Sequence
  Description of Artificial Sequence: Synthetic oligonucleotide
  Sense strand starting at position 3792 of SEQ ID NO: 403
gaagguguuggaugugaga

SEQ ID NO: 34293 - RNA, 19 nt, Artificial Sequence
  Description of Artificial Sequence: Synthetic oligonucleotide
  Antisense strand to SEQ ID NO: 34292
ucucacauccaacaccuuc

SEQ ID NO: 34294 - RNA, 19 nt, Artificial Sequence
  Description of Artificial Sequence: Synthetic oligonucleotide
  Sense strand starting at position 3634 of SEQ ID NO: 403
aggacuuguguuuagagau

SEQ ID NO: 34295 - RNA, 19 nt, Artificial Sequence
  Description of Artificial Sequence: Synthetic oligonucleotide
  Antisense strand to SEQ ID NO: 34294
aucucuaaacacaaguccu

SEQ ID NO: 34296 - RNA, 19 nt, Artificial Sequence
  Description of Artificial Sequence: Synthetic oligonucleotide
  Sense strand starting at position 3633 of SEQ ID NO: 403
uaggacuuguguuuagaga

SEQ ID NO: 34297 - RNA, 19 nt, Artificial Sequence
  Description of Artificial Sequence: Synthetic oligonucleotide
  Antisense strand to SEQ ID NO: 34296
ucucuaaacacaaguccua

SEQ ID NO: 34298 - RNA, 19 nt, Artificial Sequence
  Description of Artificial Sequence: Synthetic oligonucleotide
  Sense strand starting at position 3609 of SEQ ID NO: 403
cauagaguuggguaguagu

SEQ ID NO: 34299 - RNA, 19 nt, Artificial Sequence
  Description of Artificial Sequence: Synthetic oligonucleotide
  Antisense strand to SEQ ID NO: 34298
acuacuacccaacucuaug

SEQ ID NO: 34300 - RNA, 19 nt, Artificial Sequence
  Description of Artificial Sequence: Synthetic oligonucleotide
  Sense strand starting at position 3605 of SEQ ID NO: 403
aaaucauagaguuggguag

SEQ ID NO: 34301 - RNA, 19 nt, Artificial Sequence
  Description of Artificial Sequence: Synthetic oligonucleotide
  Antisense strand to SEQ ID NO: 34300
cuacccaacucuaugauuu

SEQ ID NO: 34302 - RNA, 19 nt, Artificial Sequence
  Description of Artificial Sequence: Synthetic oligonucleotide
  Sense strand starting at position 3592 of SEQ ID NO: 403
aguaaauugccugaaauca

SEQ ID NO: 34303 - RNA, 19 nt, Artificial Sequence
  Description of Artificial Sequence: Synthetic oligonucleotide
  Antisense strand to SEQ ID NO: 34302
ugauuucaggcaauuuacu

SEQ ID NO: 34304 - RNA, 19 nt, Artificial Sequence
  Description of Artificial Sequence: Synthetic oligonucleotide
  Sense strand starting at position 3589 of SEQ ID NO: 403
cuaaguaaauugccugaaa

SEQ ID NO: 34305 - RNA, 19 nt, Artificial Sequence
  Description of Artificial Sequence: Synthetic oligonucleotide
  Antisense strand to SEQ ID NO: 34304
uuucaggcaauuuacuuag

SEQ ID NO: 34306 - RNA, 19 nt, Artificial Sequence
  Description of Artificial Sequence: Synthetic oligonucleotide
  Sense strand starting at position 3581 of SEQ ID NO: 403
cucagaagcuaaguaaauu

SEQ ID NO: 34307 - RNA, 19 nt, Artificial Sequence
  Description of Artificial Sequence: Synthetic oligonucleotide
  Antisense strand to SEQ ID NO: 34306
aauuuacuuagcuucugag

SEQ ID NO: 34308 - RNA, 19 nt, Artificial Sequence
  Description of Artificial Sequence: Synthetic oligonucleotide
  Sense strand starting at position 3569 of SEQ ID NO: 403
ugaguacuguaacucagaa

SEQ ID NO: 34309 - RNA, 19 nt, Artificial Sequence
  Description of Artificial Sequence: Synthetic oligonucleotide
  Antisense strand to SEQ ID NO: 34308
uucugaguuacaguacuca

SEQ ID NO: 34310 - RNA, 19 nt, Artificial Sequence
  Description of Artificial Sequence: Synthetic oligonucleotide
  Sense strand starting at position 3566 of SEQ ID NO: 403
guuugaguacuguaacuca

SEQ ID NO: 34311 - RNA, 19 nt, Artificial Sequence
  Description of Artificial Sequence: Synthetic oligonucleotide
  Antisense strand to SEQ ID NO: 34310
ugaguuacaguacucaaac

SEQ ID NO: 34312 - RNA, 19 nt, Artificial Sequence
  Description of Artificial Sequence: Synthetic oligonucleotide
  Sense strand starting at position 3557 of SEQ ID NO: 403
ggaacaacuguuugaguac

SEQ ID NO: 34313 - RNA, 19 nt, Artificial Sequence
  Description of Artificial Sequence: Synthetic oligonucleotide
  Antisense strand to SEQ ID NO: 34312
guacucaaacaguuguucc

SEQ ID NO: 34314 - RNA, 19 nt, Artificial Sequence
  Description of Artificial Sequence: Synthetic oligonucleotide
  Sense strand starting at position 3556 of SEQ ID NO: 403
aggaacaacuguuugagua

SEQ ID NO: 34315 - RNA, 19 nt, Artificial Sequence
  Description of Artificial Sequence: Synthetic oligonucleotide
  Antisense strand to SEQ ID NO: 34314
uacucaaacaguuguuccu

SEQ ID NO: 34316 - RNA, 19 nt, Artificial Sequence
  Description of Artificial Sequence: Synthetic oligonucleotide
  Sense strand starting at position 3485 of SEQ ID NO: 403
uggccuuaugacuacauaa

SEQ ID NO: 34317 - RNA, 19 nt, Artificial Sequence
  Description of Artificial Sequence: Synthetic oligonucleotide
  Antisense strand to SEQ ID NO: 34316
uuauguagucauaaggcca

SEQ ID NO: 34318 - RNA, 19 nt, Artificial Sequence
  Description of Artificial Sequence: Synthetic oligonucleotide
  Sense strand starting at position 3430 of SEQ ID NO: 403
ccaagauaauucguacaua

SEQ ID NO: 34319 - RNA, 19 nt, Artificial Sequence
  Description of Artificial Sequence: Synthetic oligonucleotide
  Antisense strand to SEQ ID NO: 34318
uauguacgaauuaucuugg

SEQ ID NO: 34320 - RNA, 19 nt, Artificial Sequence
  Description of Artificial Sequence: Synthetic oligonucleotide
  Sense strand starting at position 3305 of SEQ ID NO: 403
ucaccuaguccaugcauuu

SEQ ID NO: 34321 - RNA, 19 nt, Artificial Sequence
  Description of Artificial Sequence: Synthetic oligonucleotide
  Antisense strand to SEQ ID NO: 34320
aaaugcauggacuagguga

SEQ ID NO: 34322 - RNA, 19 nt, Artificial Sequence
  Description of Artificial Sequence: Synthetic oligonucleotide
  Sense strand starting at position 2808 of SEQ ID NO: 403
uuagguuagagaugcaaga

SEQ ID NO: 34323 - RNA, 19 nt, Artificial Sequence
  Description of Artificial Sequence: Synthetic oligonucleotide
  Antisense strand to SEQ ID NO: 34322
ucuugcaucucuaaccuaa

SEQ ID NO: 34324 - RNA, 19 nt, Artificial Sequence
  Description of Artificial Sequence: Synthetic oligonucleotide
  Sense strand starting at position 2523 of SEQ ID NO: 403
auauuauguuugucaggag

SEQ ID NO: 34325 - RNA, 19 nt, Artificial Sequence
  Description of Artificial Sequence: Synthetic oligonucleotide
  Antisense strand to SEQ ID NO: 34324
cuccugacaaacauaauau

SEQ ID NO: 34326 - RNA, 19 nt, Artificial Sequence
  Description of Artificial Sequence: Synthetic oligonucleotide
  Sense strand starting at position 2522 of SEQ ID NO: 403
aauauuauguuugucagga

SEQ ID NO: 34327 - RNA, 19 nt, Artificial Sequence
  Description of Artificial Sequence: Synthetic oligonucleotide
  Antisense strand to SEQ ID NO: 34326
uccugacaaacauaauauu

SEQ ID NO: 34328 - RNA, 19 nt, Artificial Sequence
  Description of Artificial Sequence: Synthetic oligonucleotide
  Sense strand starting at position 2520 of SEQ ID NO: 403
agaauauuauguuugucag

SEQ ID NO: 34329 - RNA, 19 nt, Artificial Sequence
  Description of Artificial Sequence: Synthetic oligonucleotide
  Antisense strand to SEQ ID NO: 34328
cugacaaacauaauauucu

SEQ ID NO: 34330 - RNA, 19 nt, Artificial Sequence
  Description of Artificial Sequence: Synthetic oligonucleotide
  Sense strand starting at position 2518 of SEQ ID NO: 403
ggagaauauuauguuuguc

SEQ ID NO: 34331 - RNA, 19 nt, Artificial Sequence
  Description of Artificial Sequence: Synthetic oligonucleotide
  Antisense strand to SEQ ID NO: 34330
gacaaacauaauauucucc

SEQ ID NO: 34332 - RNA, 19 nt, Artificial Sequence
  Description of Artificial Sequence: Synthetic oligonucleotide
  Sense strand starting at position 2506 of SEQ ID NO: 403
auuuaaccauuaggagaau

SEQ ID NO: 34333 - RNA, 19 nt, Artificial Sequence
  Description of Artificial Sequence: Synthetic oligonucleotide
  Antisense strand to SEQ ID NO: 34332
auucuccuaaugguuaaau

SEQ ID NO: 34334 - RNA, 19 nt, Artificial Sequence
  Description of Artificial Sequence: Synthetic oligonucleotide
  Sense strand starting at position 2489 of SEQ ID NO: 403
uuucuagacucuuuaggau

SEQ ID NO: 34335 - RNA, 19 nt, Artificial Sequence
  Description of Artificial Sequence: Synthetic oligonucleotide
  Antisense strand to SEQ ID NO: 34334
auccuaaagagucuagaaa

SEQ ID NO: 34336 - RNA, 19 nt, Artificial Sequence
  Description of Artificial Sequence: Synthetic oligonucleotide
  Sense strand starting at position 2429 of SEQ ID NO: 403
aucggauuguccucauuuc

SEQ ID NO: 34337 - RNA, 19 nt, Artificial Sequence
  Description of Artificial Sequence: Synthetic oligonucleotide
  Antisense strand to SEQ ID NO: 34336
gaaaugaggacaauccgau

SEQ ID NO: 34338 - RNA, 19 nt, Artificial Sequence
  Description of Artificial Sequence: Synthetic oligonucleotide
  Sense strand starting at position 2050 of SEQ ID NO: 403
agcaguuaccaagaaucuu

SEQ ID NO: 34339 - RNA, 19 nt, Artificial Sequence
  Description of Artificial Sequence: Synthetic oligonucleotide
  Antisense strand to SEQ ID NO: 34338
aagauucuugguaacugcu

SEQ ID NO: 34340 - RNA, 19 nt, Artificial Sequence
  Description of Artificial Sequence: Synthetic oligonucleotide
  Sense strand starting at position 1571 of SEQ ID NO: 403
gcgcuagucggucugguaa

SEQ ID NO: 34341 - RNA, 19 nt, Artificial Sequence
  Description of Artificial Sequence: Synthetic oligonucleotide
  Antisense strand to SEQ ID NO: 34340
uuaccagaccgacuagcgc

SEQ ID NO: 34342 - RNA, 19 nt, Artificial Sequence
  Description of Artificial Sequence: Synthetic oligonucleotide
  Sense strand starting at position 1570 of SEQ ID NO: 403
agcgcuagucggucuggua

SEQ ID NO: 34343 - RNA, 19 nt, Artificial Sequence
  Description of Artificial Sequence: Synthetic oligonucleotide
  Antisense strand to SEQ ID NO: 34342
uaccagaccgacuagcgcu

SEQ ID NO: 34344 - RNA, 19 nt, Artificial Sequence
  Description of Artificial Sequence: Synthetic oligonucleotide
  Sense strand starting at position 778 of SEQ ID NO: 403
uuaucaauauaggcugaaa

SEQ ID NO: 34345 - RNA, 19 nt, Artificial Sequence
  Description of Artificial Sequence: Synthetic oligonucleotide
  Antisense strand to SEQ ID NO: 34344
uuucagccuauauugauaa

SEQ ID NO: 34346 - RNA, 19 nt, Artificial Sequence
  Description of Artificial Sequence: Synthetic oligonucleotide
  Sense strand starting at position 721 of SEQ ID NO: 403
guuauuucuccuugcaaga

SEQ ID NO: 34347 - RNA, 19 nt, Artificial Sequence
  Description of Artificial Sequence: Synthetic oligonucleotide
  Antisense strand to SEQ ID NO: 34346
ucuugcaaggagaaauaac

SEQ ID NO: 34348 - RNA, 19 nt, Artificial Sequence
  Description of Artificial Sequence: Synthetic oligonucleotide
  Sense strand starting at position 720 of SEQ ID NO: 403
gguuauuucuccuugcaag

SEQ ID NO: 34349 - RNA, 19 nt, Artificial Sequence
  Description of Artificial Sequence: Synthetic oligonucleotide
  Antisense strand to SEQ ID NO: 34348
cuugcaaggagaaauaacc

SEQ ID NO: 34350 - RNA, 19 nt, Artificial Sequence
  Description of Artificial Sequence: Synthetic oligonucleotide
  Sense strand starting at position 718 of SEQ ID NO: 403
uugguuauuucuccuugca

SEQ ID NO: 34351 - RNA, 19 nt, Artificial Sequence
  Description of Artificial Sequence: Synthetic oligonucleotide
  Antisense strand to SEQ ID NO: 34350
ugcaaggagaaauaaccaa

SEQ ID NO: 34352 - RNA, 19 nt, Artificial Sequence
  Description of Artificial Sequence: Synthetic oligonucleotide
  Sense strand starting at position 649 of SEQ ID NO: 403
aguuaaacauggcuaaaga

SEQ ID NO: 34353 - RNA, 19 nt, Artificial Sequence
  Description of Artificial Sequence: Synthetic oligonucleotide
  Antisense strand to SEQ ID NO: 34352
ucuuuagccauguuuaacu

SEQ ID NO: 34354 - RNA, 19 nt, Artificial Sequence
  Description of Artificial Sequence: Synthetic oligonucleotide
  Sense strand starting at position 442 of SEQ ID NO: 403
auaguucgaguaggaaaua

SEQ ID NO: 34355 - RNA, 19 nt, Artificial Sequence
  Description of Artificial Sequence: Synthetic oligonucleotide
  Antisense strand to SEQ ID NO: 34354
uauuuccuacucgaacuau

SEQ ID NO: 34356 - RNA, 19 nt, Artificial Sequence
  Description of Artificial Sequence: Synthetic oligonucleotide
  Sense strand starting at position 356 of SEQ ID NO: 403
uuaguaaugcucuaaaugc

SEQ ID NO: 34357 - RNA, 19 nt, Artificial Sequence
  Description of Artificial Sequence: Synthetic oligonucleotide
  Antisense strand to SEQ ID NO: 34356
gcauuuagagcauuacuaa

SEQ ID NO: 34358 - RNA, 19 nt, Artificial Sequence
  Description of Artificial Sequence: Synthetic oligonucleotide
  Sense strand starting at position 232 of SEQ ID NO: 403
auguguuggaaagacaagu

SEQ ID NO: 34359 - RNA, 19 nt, Artificial Sequence
  Description of Artificial Sequence: Synthetic oligonucleotide
  Antisense strand to SEQ ID NO: 34358
acuugucuuuccaacacau

SEQ ID NO: 34360 - RNA, 19 nt, Artificial Sequence
  Description of Artificial Sequence: Synthetic oligonucleotide
  Sense strand starting at position 227 of SEQ ID NO: 403
cuuaaauguguuggaaaga

SEQ ID NO: 34361 - RNA, 19 nt, Artificial Sequence
  Description of Artificial Sequence: Synthetic oligonucleotide
  Antisense strand to SEQ ID NO: 34360
ucuuuccaacacauuuaag

SEQ ID NO: 34362 - RNA, 19 nt, Artificial Sequence
  Description of Artificial Sequence: Synthetic oligonucleotide
  Sense strand starting at position 224 of SEQ ID NO: 403
uuucuuaaauguguuggaa

SEQ ID NO: 34363 - RNA, 19 nt, Artificial Sequence
  Description of Artificial Sequence: Synthetic oligonucleotide
  Antisense strand to SEQ ID NO: 34362
uuccaacacauuuaagaaa

SEQ ID NO: 34364 - RNA, 19 nt, Artificial Sequence
  Description of Artificial Sequence: Synthetic oligonucleotide
  Sense strand starting at position 3906 of SEQ ID NO: 402
uuaaauuccucaguuguca

SEQ ID NO: 34365 - RNA, 19 nt, Artificial Sequence
  Description of Artificial Sequence: Synthetic oligonucleotide
  Antisense strand to SEQ ID NO: 34364
ugacaacugaggaauuuaa

SEQ ID NO: 34366 - RNA, 19 nt, Artificial Sequence
  Description of Artificial Sequence: Synthetic oligonucleotide
  Sense strand starting at position 3889 of SEQ ID NO: 402
ucaccuaguccaugcauuu

SEQ ID NO: 34367 - RNA, 19 nt, Artificial Sequence
  Description of Artificial Sequence: Synthetic oligonucleotide
  Antisense strand to SEQ ID NO: 34366
aaaugcauggacuagguga

SEQ ID NO: 34368 - RNA, 19 nt, Artificial Sequence
  Description of Artificial Sequence: Synthetic oligonucleotide
  Sense strand starting at position 3828 of SEQ ID NO: 402
gcaauuacucagcaaugcu

SEQ ID NO: 34369 - RNA, 19 nt, Artificial Sequence
  Description of Artificial Sequence: Synthetic oligonucleotide
  Antisense strand to SEQ ID NO: 34368
agcauugcugaguaauugc

SEQ ID NO: 34370 - RNA, 19 nt, Artificial Sequence
  Description of Artificial Sequence: Synthetic oligonucleotide
  Sense strand starting at position 3392 of SEQ ID NO: 402
uuagguuagagaugcaaga

SEQ ID NO: 34371 - RNA, 19 nt, Artificial Sequence
  Description of Artificial Sequence: Synthetic oligonucleotide
  Antisense strand to SEQ ID NO: 34370
ucuugcaucucuaaccuaa

SEQ ID NO: 34372 - RNA, 19 nt, Artificial Sequence
  Description of Artificial Sequence: Synthetic oligonucleotide
  Sense strand starting at position 3107 of SEQ ID NO: 402
auauuauguuugucaggag

SEQ ID NO: 34373 - RNA, 19 nt, Artificial Sequence
  Description of Artificial Sequence: Synthetic oligonucleotide
  Antisense strand to SEQ ID NO: 34372
cuccugacaaacauaauau

SEQ ID NO: 34374 - RNA, 19 nt, Artificial Sequence
  Description of Artificial Sequence: Synthetic oligonucleotide
  Sense strand starting at position 3106 of SEQ ID NO: 402
aauauuauguuugucagga

SEQ ID NO: 34375 - RNA, 19 nt, Artificial Sequence
  Description of Artificial Sequence: Synthetic oligonucleotide
  Antisense strand to SEQ ID NO: 34374
uccugacaaacauaauauu

SEQ ID NO: 34376 - RNA, 19 nt, Artificial Sequence
  Description of Artificial Sequence: Synthetic oligonucleotide
  Sense strand starting at position 3104 of SEQ ID NO: 402
agaauauuauguuugucag

SEQ ID NO: 34377 - RNA, 19 nt, Artificial Sequence
  Description of Artificial Sequence: Synthetic oligonucleotide
  Antisense strand to SEQ ID NO: 34376
cugacaaacauaauauucu

SEQ ID NO: 34378 - RNA, 19 nt, Artificial Sequence
  Description of Artificial Sequence: Synthetic oligonucleotide
  Sense strand starting at position 3102 of SEQ ID NO: 402
ggagaauauuauguuuguc

SEQ ID NO: 34379 - RNA, 19 nt, Artificial Sequence
  Description of Artificial Sequence: Synthetic oligonucleotide
  Antisense strand to SEQ ID NO: 34378
gacaaacauaauauucucc

SEQ ID NO: 34380 - RNA, 19 nt, Artificial Sequence
  Description of Artificial Sequence: Synthetic oligonucleotide
  Sense strand starting at position 3090 of SEQ ID NO: 402
auuuaaccauuaggagaau

SEQ ID NO: 34381 - RNA, 19 nt, Artificial Sequence
  Description of Artificial Sequence: Synthetic oligonucleotide
  Antisense strand to SEQ ID NO: 34380
auucuccuaaugguuaaau

SEQ ID NO: 34382 - RNA, 19 nt, Artificial Sequence
  Description of Artificial Sequence: Synthetic oligonucleotide
  Sense strand starting at position 3076 of SEQ ID NO: 402
cuagacucuuuaggauuua

SEQ ID NO: 34383 - RNA, 19 nt, Artificial Sequence
  Description of Artificial Sequence: Synthetic oligonucleotide
  Antisense strand to SEQ ID NO: 34382
uaaauccuaaagagucuag

SEQ ID NO: 34384 - RNA, 19 nt, Artificial Sequence
  Description of Artificial Sequence: Synthetic oligonucleotide
  Sense strand starting at position 3073 of SEQ ID NO: 402
uuucuagacucuuuaggau

SEQ ID NO: 34385 - RNA, 19 nt, Artificial Sequence
  Description of Artificial Sequence: Synthetic oligonucleotide
  Antisense strand to SEQ ID NO: 34384
auccuaaagagucuagaaa

SEQ ID NO: 34386 - RNA, 19 nt, Artificial Sequence
  Description of Artificial Sequence: Synthetic oligonucleotide
  Sense strand starting at position 3013 of SEQ ID NO: 402
aucggauuguccucauuuc

SEQ ID NO: 34387 - RNA, 19 nt, Artificial Sequence
  Description of Artificial Sequence: Synthetic oligonucleotide
  Antisense strand to SEQ ID NO: 34386
gaaaugaggacaauccgau

SEQ ID NO: 34388 - RNA, 19 nt, Artificial Sequence
  Description of Artificial Sequence: Synthetic oligonucleotide
  Sense strand starting at position 2634 of SEQ ID NO: 402
agcaguuaccaagaaucuu

SEQ ID NO: 34389 - RNA, 19 nt, Artificial Sequence
  Description of Artificial Sequence: Synthetic oligonucleotide
  Antisense strand to SEQ ID NO: 34388
aagauucuugguaacugcu

SEQ ID NO: 34390 - RNA, 19 nt, Artificial Sequence
  Description of Artificial Sequence: Synthetic oligonucleotide
  Sense strand starting at position 2616 of SEQ ID NO: 402
auuccucugguuuguugaa

SEQ ID NO: 34391 - RNA, 19 nt, Artificial Sequence
  Description of Artificial Sequence: Synthetic oligonucleotide
  Antisense strand to SEQ ID NO: 34390
uucaacaaaccagaggaau

SEQ ID NO: 34392 - RNA, 19 nt, Artificial Sequence
  Description of Artificial Sequence: Synthetic oligonucleotide
  Sense strand starting at position 2155 of SEQ ID NO: 402
gcgcuagucggucugguaa

SEQ ID NO: 34393 - RNA, 19 nt, Artificial Sequence
  Description of Artificial Sequence: Synthetic oligonucleotide
  Antisense strand to SEQ ID NO: 34392
uuaccagaccgacuagcgc

SEQ ID NO: 34394 - RNA, 19 nt, Artificial Sequence
  Description of Artificial Sequence: Synthetic oligonucleotide
  Sense strand starting at position 2154 of SEQ ID NO: 402
agcgcuagucggucuggua

SEQ ID NO: 34395 - RNA, 19 nt, Artificial Sequence
  Description of Artificial Sequence: Synthetic oligonucleotide
  Antisense strand to SEQ ID NO: 34394
uaccagaccgacuagcgcu

SEQ ID NO: 34396 - RNA, 19 nt, Artificial Sequence
  Description of Artificial Sequence: Synthetic oligonucleotide
  Sense strand starting at position 1362 of SEQ ID NO: 402
uuaucaauauaggcugaaa

SEQ ID NO: 34397 - RNA, 19 nt, Artificial Sequence
  Description of Artificial Sequence: Synthetic oligonucleotide
  Antisense strand to SEQ ID NO: 34396
uuucagccuauauugauaa

SEQ ID NO: 34398 - RNA, 19 nt, Artificial Sequence
  Description of Artificial Sequence: Synthetic oligonucleotide
  Sense strand starting at position 1305 of SEQ ID NO: 402
guuauuucuccuugcaaga

SEQ ID NO: 34399 - RNA, 19 nt, Artificial Sequence
  Description of Artificial Sequence: Synthetic oligonucleotide
  Antisense strand to SEQ ID NO: 34398
ucuugcaaggagaaauaac

SEQ ID NO: 34400 - RNA, 19 nt, Artificial Sequence
  Description of Artificial Sequence: Synthetic oligonucleotide
  Sense strand starting at position 1304 of SEQ ID NO: 402
gguuauuucuccuugcaag

SEQ ID NO: 34401 - RNA, 19 nt, Artificial Sequence
  Description of Artificial Sequence: Synthetic oligonucleotide
  Antisense strand to SEQ ID NO: 34400
cuugcaaggagaaauaacc

SEQ ID NO: 34402 - RNA, 19 nt, Artificial Sequence
  Description of Artificial Sequence: Synthetic oligonucleotide
  Sense strand starting at position 1302 of SEQ ID NO: 402
uugguuauuucuccuugca

SEQ ID NO: 34403 - RNA, 19 nt, Artificial Sequence
  Description of Artificial Sequence: Synthetic oligonucleotide
  Antisense strand to SEQ ID NO: 34402
ugcaaggagaaauaaccaa

SEQ ID NO: 34404 - RNA, 19 nt, Artificial Sequence
  Description of Artificial Sequence: Synthetic oligonucleotide
  Sense strand starting at position 1233 of SEQ ID NO: 402
aguuaaacauggcuaaaga

SEQ ID NO: 34405 - RNA, 19 nt, Artificial Sequence
  Description of Artificial Sequence: Synthetic oligonucleotide
  Antisense strand to SEQ ID NO: 34404
ucuuuagccauguuuaacu

SEQ ID NO: 34406 - RNA, 19 nt, Artificial Sequence
  Description of Artificial Sequence: Synthetic oligonucleotide
  Sense strand starting at position 1079 of SEQ ID NO: 402
acuaacauuuguugaaaga

SEQ ID NO: 34407 - RNA, 19 nt, Artificial Sequence
  Description of Artificial Sequence: Synthetic oligonucleotide
  Antisense strand to SEQ ID NO: 34406
ucuuucaacaaauguuagu

SEQ ID NO: 34408 - RNA, 19 nt, Artificial Sequence
  Description of Artificial Sequence: Synthetic oligonucleotide
  Sense strand starting at position 1026 of SEQ ID NO: 402
auaguucgaguaggaaaua

SEQ ID NO: 34409 - RNA, 19 nt, Artificial Sequence
  Description of Artificial Sequence: Synthetic oligonucleotide
  Antisense strand to SEQ ID NO: 34408
uauuuccuacucgaacuau

SEQ ID NO: 34410 - RNA, 19 nt, Artificial Sequence
  Description of Artificial Sequence: Synthetic oligonucleotide
  Sense strand starting at position 1020 of SEQ ID NO: 402
uuccuaauaguucgaguag

SEQ ID NO: 34411 - RNA, 19 nt, Artificial Sequence
  Description of Artificial Sequence: Synthetic oligonucleotide
  Antisense strand to SEQ ID NO: 34410
cuacucgaacuauuaggaa

SEQ ID NO: 34412 - RNA, 19 nt, Artificial Sequence
  Description of Artificial Sequence: Synthetic oligonucleotide
  Sense strand starting at position 968 of SEQ ID NO: 402
agucuaacuuguguuauaa

SEQ ID NO: 34413 - RNA, 19 nt, Artificial Sequence
  Description of Artificial Sequence: Synthetic oligonucleotide
  Antisense strand to SEQ ID NO: 34412
uuauaacacaaguuagacu

SEQ ID NO: 34414 - RNA, 19 nt, Artificial Sequence
  Description of Artificial Sequence: Synthetic oligonucleotide
  Sense strand starting at position 940 of SEQ ID NO: 402
uuaguaaugcucuaaaugc

SEQ ID NO: 34415 - RNA, 19 nt, Artificial Sequence
  Description of Artificial Sequence: Synthetic oligonucleotide
  Antisense strand to SEQ ID NO: 34414
gcauuuagagcauuacuaa

SEQ ID NO: 34416 - RNA, 19 nt, Artificial Sequence
  Description of Artificial Sequence: Synthetic oligonucleotide
  Sense strand starting at position 816 of SEQ ID NO: 402
auguguuggaaagacaagu

SEQ ID NO: 34417 - RNA, 19 nt, Artificial Sequence
  Description of Artificial Sequence: Synthetic oligonucleotide
  Antisense strand to SEQ ID NO: 34416
acuugucuuuccaacacau

SEQ ID NO: 34418 - RNA, 19 nt, Artificial Sequence
  Description of Artificial Sequence: Synthetic oligonucleotide
  Sense strand starting at position 811 of SEQ ID NO: 402
cuuaaauguguuggaaaga

SEQ ID NO: 34419 - RNA, 19 nt, Artificial Sequence
  Description of Artificial Sequence: Synthetic oligonucleotide
  Antisense strand to SEQ ID NO: 34418
ucuuuccaacacauuuaag

SEQ ID NO: 34420 - RNA, 19 nt, Artificial Sequence
  Description of Artificial Sequence: Synthetic oligonucleotide
  Sense strand starting at position 808 of SEQ ID NO: 402
uuucuuaaauguguuggaa

SEQ ID NO: 34421 - RNA, 19 nt, Artificial Sequence
  Description of Artificial Sequence: Synthetic oligonucleotide
  Antisense strand to SEQ ID NO: 34420
uuccaacacauuuaagaaa

SEQ ID NO: 34422 - RNA, 19 nt, Artificial Sequence
  Description of Artificial Sequence: Synthetic oligonucleotide
  Sense strand starting at position 544 of SEQ ID NO: 402
gcugaagugaaauauugca

SEQ ID NO: 34423 - RNA, 19 nt, Artificial Sequence
  Description of Artificial Sequence: Synthetic oligonucleotide
  Antisense strand to SEQ ID NO: 34422
ugcaauauuucacuucagc

SEQ ID NO: 34424 - RNA, 19 nt, Artificial Sequence
  Description of Artificial Sequence: Synthetic oligonucleotide
  Sense strand starting at position 434 of SEQ ID NO: 402
agcauuauuuaacaaguga

SEQ ID NO: 34425 - RNA, 19 nt, Artificial Sequence
  Description of Artificial Sequence: Synthetic oligonucleotide
  Antisense strand to SEQ ID NO: 34424
ucacuuguuaaauaaugcu

SEQ ID NO: 34426 - RNA, 19 nt, Artificial Sequence
  Description of Artificial Sequence: Synthetic oligonucleotide
  Sense strand starting at position 305 of SEQ ID NO: 402
guaauuggcuaccuaaaga

SEQ ID NO: 34427 - RNA, 19 nt, Artificial Sequence
  Description of Artificial Sequence: Synthetic oligonucleotide
  Antisense strand to SEQ ID NO: 34426
ucuuuagguagccaauuac

SEQ ID NO: 34428 - RNA, 19 nt, Artificial Sequence
  Description of Artificial Sequence: Synthetic oligonucleotide
  Sense strand starting at position 302 of SEQ ID NO: 402
cagguaauuggcuaccuaa

SEQ ID NO: 34429 - RNA, 19 nt, Artificial Sequence
  Description of Artificial Sequence: Synthetic oligonucleotide
  Antisense strand to SEQ ID NO: 34428
uuagguagccaauuaccug

SEQ ID NO: 34430 - RNA, 19 nt, Artificial Sequence
  Description of Artificial Sequence: Synthetic oligonucleotide
  Sense strand starting at position 202 of SEQ ID NO: 402
caaccuguugugugaaauu

SEQ ID NO: 34431 - RNA, 19 nt, Artificial Sequence
  Description of Artificial Sequence: Synthetic oligonucleotide
  Antisense strand to SEQ ID NO: 34430
aauuucacacaacagguug

SEQ ID NO: 34432 - RNA, 19 nt, Artificial Sequence
  Description of Artificial Sequence: Synthetic oligonucleotide
  Sense strand starting at position 201 of SEQ ID NO: 402
acaaccuguugugugaaau

SEQ ID NO: 34433 - RNA, 19 nt, Artificial Sequence
  Description of Artificial Sequence: Synthetic oligonucleotide
  Antisense strand to SEQ ID NO: 34432
auuucacacaacagguugu

SEQ ID NO: 34434 - RNA, 19 nt, Artificial Sequence
  Description of Artificial Sequence: Synthetic oligonucleotide
  Sense strand starting at position 158 of SEQ ID NO: 402
ucucuaacuccugagcagu

SEQ ID NO: 34435 - RNA, 19 nt, Artificial Sequence
  Description of Artificial Sequence: Synthetic oligonucleotide
  Antisense strand to SEQ ID NO: 34434
acugcucaggaguuagaga

SEQ ID NO: 34436 - RNA, 19 nt, Artificial Sequence
  Description of Artificial Sequence: Synthetic oligonucleotide
  Sense strand starting at position 95 of SEQ ID NO: 402
cauuauuccuguguggacu

SEQ ID NO: 34437 - RNA, 19 nt, Artificial Sequence
  Description of Artificial Sequence: Synthetic oligonucleotide
  Antisense strand to SEQ ID NO: 34436
aguccacacaggaauaaug

SEQ ID NO: 34438 - RNA, 19 nt, Artificial Sequence
  Description of Artificial Sequence: Synthetic oligonucleotide
  Sense strand starting at position 94 of SEQ ID NO: 402
acauuauuccuguguggac

SEQ ID NO: 34439 - RNA, 19 nt, Artificial Sequence
  Description of Artificial Sequence: Synthetic oligonucleotide
  Antisense strand to SEQ ID NO: 34438
guccacacaggaauaaugu

SEQ ID NO: 34440 - RNA, 19 nt, Artificial Sequence
  Description of Artificial Sequence: Synthetic oligonucleotide
  Sense strand starting at position 83 of SEQ ID NO: 402
gcauaugggcuacauuauu

SEQ ID NO: 34441 - RNA, 19 nt, Artificial Sequence
  Description of Artificial Sequence: Synthetic oligonucleotide
  Antisense strand to SEQ ID NO: 34440
aauaauguagcccauaugc

SEQ ID NO: 34442 - RNA, 19 nt, Artificial Sequence
  Description of Artificial Sequence: Synthetic oligonucleotide
  Sense strand starting at position 81 of SEQ ID NO: 402
uggcauaugggcuacauua

SEQ ID NO: 34443 - RNA, 19 nt, Artificial Sequence
  Description of Artificial Sequence: Synthetic oligonucleotide
  Antisense strand to SEQ ID NO: 34442
uaauguagcccauaugcca

SEQ ID NO: 34444 - RNA, 19 nt, Artificial Sequence
  Description of Artificial Sequence: Synthetic oligonucleotide
  Sense strand starting at position 13 of SEQ ID NO: 404
aggaguuguugacaaggga

SEQ ID NO: 34445 - RNA, 19 nt, Artificial Sequence
  Description of Artificial Sequence: Synthetic oligonucleotide
  Antisense strand to SEQ ID NO: 34444
ucccuugucaacaacuccu

SEQ ID NO: 34446 - RNA, 19 nt, Artificial Sequence
  Description of Artificial Sequence: Synthetic oligonucleotide
  Sense strand starting at position 56 of SEQ ID NO: 404
cccugcuuccacugaagaa

SEQ ID NO: 34447 - RNA, 19 nt, Artificial Sequence
  Description of Artificial Sequence: Synthetic oligonucleotide
  Antisense strand to SEQ ID NO: 34446
uucuucaguggaagcaggg

SEQ ID NO: 34448 - RNA, 19 nt, Artificial Sequence
  Description of Artificial Sequence: Synthetic oligonucleotide
  Sense strand starting at position 71 of SEQ ID NO: 404
agaaguccugaauagucuu

SEQ ID NO: 34449 - RNA, 19 nt, Artificial Sequence
  Description of Artificial Sequence: Synthetic oligonucleotide
  Antisense strand to SEQ ID NO: 34448
aagacuauucaggacuucu

SEQ ID NO: 34450 - RNA, 19 nt, Artificial Sequence
  Description of Artificial Sequence: Synthetic oligonucleotide
  Sense strand starting at position 79 of SEQ ID NO: 404
ugaauagucuuccuuguug

SEQ ID NO: 34451 - RNA, 19 nt, Artificial Sequence
  Description of Artificial Sequence: Synthetic oligonucleotide
  Antisense strand to SEQ ID NO: 34450
caacaaggaagacuauuca

SEQ ID NO: 34452 - RNA, 19 nt, Artificial Sequence
  Description of Artificial Sequence: Synthetic oligonucleotide
  Sense strand starting at position 114 of SEQ ID NO: 404
agaagcaggucauguacua

SEQ ID NO: 34453 - RNA, 19 nt, Artificial Sequence
  Description of Artificial Sequence: Synthetic oligonucleotide
  Antisense strand to SEQ ID NO: 34452
uaguacaugaccugcuucu

SEQ ID NO: 34454 - RNA, 19 nt, Artificial Sequence
  Description of Artificial Sequence: Synthetic oligonucleotide
  Sense strand starting at position 119 of SEQ ID NO: 404
caggucauguacuagaagu

SEQ ID NO: 34455 - RNA, 19 nt, Artificial Sequence
  Description of Artificial Sequence: Synthetic oligonucleotide
  Antisense strand to SEQ ID NO: 34454
acuucuaguacaugaccug

SEQ ID NO: 34456 - RNA, 19 nt, Artificial Sequence
  Description of Artificial Sequence: Synthetic oligonucleotide
  Sense strand starting at position 121 of SEQ ID NO: 404
ggucauguacuagaagucu

SEQ ID NO: 34457 - RNA, 19 nt, Artificial Sequence
  Description of Artificial Sequence: Synthetic oligonucleotide
  Antisense strand to SEQ ID NO: 34456
agacuucuaguacaugacc

SEQ ID NO: 34458 - RNA, 19 nt, Artificial Sequence
  Description of Artificial Sequence: Synthetic oligonucleotide
  Sense strand starting at position 129 of SEQ ID NO: 404
acuagaagucuacaagcca

SEQ ID NO: 34459 - RNA, 19 nt, Artificial Sequence
  Description of Artificial Sequence: Synthetic oligonucleotide
  Antisense strand to SEQ ID NO: 34458
uggcuuguagacuucuagu

SEQ ID NO: 34460 - RNA, 19 nt, Artificial Sequence
  Description of Artificial Sequence: Synthetic oligonucleotide
  Sense strand starting at position 156 of SEQ ID NO: 404
gccaaugagagguguguua

SEQ ID NO: 34461 - RNA, 19 nt, Artificial Sequence
  Description of Artificial Sequence: Synthetic oligonucleotide
  Antisense strand to SEQ ID NO: 34460
uaacacaccucucauuggc

SEQ ID NO: 34462 - RNA, 19 nt, Artificial Sequence
  Description of Artificial Sequence: Synthetic oligonucleotide
  Sense strand starting at position 158 of SEQ ID NO: 404
caaugagagguguguuauc

SEQ ID NO: 34463 - RNA, 19 nt, Artificial Sequence
  Description of Artificial Sequence: Synthetic oligonucleotide
  Antisense strand to SEQ ID NO: 34462
gauaacacaccucucauug

SEQ ID NO: 34464 - RNA, 19 nt, Artificial Sequence
  Description of Artificial Sequence: Synthetic oligonucleotide
  Sense strand starting at position 271 of SEQ ID NO: 404
ccuacagcuugucugcaaa

SEQ ID NO: 34465 - RNA, 19 nt, Artificial Sequence
  Description of Artificial Sequence: Synthetic oligonucleotide
  Antisense strand to SEQ ID NO: 34464
uuugcagacaagcuguagg

SEQ ID NO: 34466 - RNA, 19 nt, Artificial Sequence
  Description of Artificial Sequence: Synthetic oligonucleotide
  Sense strand starting at position 273 of SEQ ID NO: 404
uacagcuugucugcaaagu

SEQ ID NO: 34467 - RNA, 19 nt, Artificial Sequence
  Description of Artificial Sequence: Synthetic oligonucleotide
  Antisense strand to SEQ ID NO: 34466
acuuugcagacaagcugua

SEQ ID NO: 34468 - RNA, 19 nt, Artificial Sequence
  Description of Artificial Sequence: Synthetic oligonucleotide
  Sense strand starting at position 730 of SEQ ID NO: 404
ggacucacuucuccaggaa

SEQ ID NO: 34469 - RNA, 19 nt, Artificial Sequence
  Description of Artificial Sequence: Synthetic oligonucleotide
  Antisense strand to SEQ ID NO: 34468
uuccuggagaagugagucc

SEQ ID NO: 34470 - RNA, 19 nt, Artificial Sequence
  Description of Artificial Sequence: Synthetic oligonucleotide
  Sense strand starting at position 874 of SEQ ID NO: 404
gcuaaagaugagugcucua

SEQ ID NO: 34471 - RNA, 19 nt, Artificial Sequence
  Description of Artificial Sequence: Synthetic oligonucleotide
  Antisense strand to SEQ ID NO: 34470
uagagcacucaucuuuagc

SEQ ID NO: 34472 - RNA, 19 nt, Artificial Sequence
  Description of Artificial Sequence: Synthetic oligonucleotide
  Sense strand starting at position 877 of SEQ ID NO: 404
aaagaugagugcucuacac

SEQ ID NO: 34473 - RNA, 19 nt, Artificial Sequence
  Description of Artificial Sequence: Synthetic oligonucleotide
  Antisense strand to SEQ ID NO: 34472
guguagagcacucaucuuu

SEQ ID NO: 34474 - RNA, 19 nt, Artificial Sequence
  Description of Artificial Sequence: Synthetic oligonucleotide
  Sense strand starting at position 879 of SEQ ID NO: 404
agaugagugcucuacaccu

SEQ ID NO: 34475 - RNA, 19 nt, Artificial Sequence
  Description of Artificial Sequence: Synthetic oligonucleotide
  Antisense strand to SEQ ID NO: 34474
agguguagagcacucaucu

SEQ ID NO: 34476 - RNA, 19 nt, Artificial Sequence
  Description of Artificial Sequence: Synthetic oligonucleotide
  Sense strand starting at position 919 of SEQ ID NO: 404
ggccucuagugauuaacaa

SEQ ID NO: 34477 - RNA, 19 nt, Artificial Sequence
  Description of Artificial Sequence: Synthetic oligonucleotide
  Antisense strand to SEQ ID NO: 34476
uuguuaaucacuagaggcc

SEQ ID NO: 34478 - RNA, 19 nt, Artificial Sequence
  Description of Artificial Sequence: Synthetic oligonucleotide
  Sense strand starting at position 920 of SEQ ID NO: 404
gccucuagugauuaacaag

SEQ ID NO: 34479 - RNA, 19 nt, Artificial Sequence
  Description of Artificial Sequence: Synthetic oligonucleotide
  Antisense strand to SEQ ID NO: 34478
cuuguuaaucacuagaggc

SEQ ID NO: 34480 - RNA, 19 nt, Artificial Sequence
  Description of Artificial Sequence: Synthetic oligonucleotide
  Sense strand starting at position 923 of SEQ ID NO: 404
ucuagugauuaacaagcua

SEQ ID NO: 34481 - RNA, 19 nt, Artificial Sequence
  Description of Artificial Sequence: Synthetic oligonucleotide
  Antisense strand to SEQ ID NO: 34480
uagcuuguuaaucacuaga

SEQ ID NO: 34482 - RNA, 19 nt, Artificial Sequence
  Description of Artificial Sequence: Synthetic oligonucleotide
  Sense strand starting at position 1311 of SEQ ID NO: 404
cuaccuguugcccgggaaa

SEQ ID NO: 34483 - RNA, 19 nt, Artificial Sequence
  Description of Artificial Sequence: Synthetic oligonucleotide
  Antisense strand to SEQ ID NO: 34482
uuucccgggcaacagguag

SEQ ID NO: 34484 - RNA, 19 nt, Artificial Sequence
  Description of Artificial Sequence: Synthetic oligonucleotide
  Sense strand starting at position 1988 of SEQ ID NO: 404
gucaccuugcgcuagagaa

SEQ ID NO: 34485 - RNA, 19 nt, Artificial Sequence
  Description of Artificial Sequence: Synthetic oligonucleotide
  Antisense strand to SEQ ID NO: 34484
uucucuagcgcaaggugac

SEQ ID NO: 34486 - RNA, 19 nt, Artificial Sequence
  Description of Artificial Sequence: Synthetic oligonucleotide
  Sense strand starting at position 2535 of SEQ ID NO: 404
cacguuuauccguauucga

SEQ ID NO: 34487 - RNA, 19 nt, Artificial Sequence
  Description of Artificial Sequence: Synthetic oligonucleotide
  Antisense strand to SEQ ID NO: 34486
ucgaauacggauaaacgug

SEQ ID NO: 34488 - RNA, 19 nt, Artificial Sequence
  Description of Artificial Sequence: Synthetic oligonucleotide
  Sense strand starting at position 2537 of SEQ ID NO: 404
cguuuauccguauucgauu

SEQ ID NO: 34489 - RNA, 19 nt, Artificial Sequence
  Description of Artificial Sequence: Synthetic oligonucleotide
  Antisense strand to SEQ ID NO: 34488
aaucgaauacggauaaacg

SEQ ID NO: 34490 - RNA, 19 nt, Artificial Sequence
  Description of Artificial Sequence: Synthetic oligonucleotide
  Sense strand starting at position 2538 of SEQ ID NO: 404
guuuauccguauucgauuu

SEQ ID NO: 34491 - RNA, 19 nt, Artificial Sequence
  Description of Artificial Sequence: Synthetic oligonucleotide
  Antisense strand to SEQ ID NO: 34490
aaaucgaauacggauaaac

SEQ ID NO: 34492 - RNA, 19 nt, Artificial Sequence
  Description of Artificial Sequence: Synthetic oligonucleotide
  Sense strand starting at position 2546 of SEQ ID NO: 404
guauucgauuucguguuaa

SEQ ID NO: 34493 - RNA, 19 nt, Artificial Sequence
  Description of Artificial Sequence: Synthetic oligonucleotide
  Antisense strand to SEQ ID NO: 34492
uuaacacgaaaucgaauac

SEQ ID NO: 34494 - RNA, 19 nt, Artificial Sequence
  Description of Artificial Sequence: Synthetic oligonucleotide
  Sense strand starting at position 3036 of SEQ ID NO: 404
ccuugagucgugugguaaa

SEQ ID NO: 34495 - RNA, 19 nt, Artificial Sequence
  Description of Artificial Sequence: Synthetic oligonucleotide
  Antisense strand to SEQ ID NO: 34494
uuuaccacacgacucaagg

SEQ ID NO: 34496 - RNA, 19 nt, Artificial Sequence
  Description of Artificial Sequence: Synthetic oligonucleotide
  Sense strand starting at position 3066 of SEQ ID NO: 404
agaaguaauuacuguugga

SEQ ID NO: 34497 - RNA, 19 nt, Artificial Sequence
  Description of Artificial Sequence: Synthetic oligonucleotide
  Antisense strand to SEQ ID NO: 34496
uccaacaguaauuacuucu

SEQ ID NO: 34498 - RNA, 19 nt, Artificial Sequence
  Description of Artificial Sequence: Synthetic oligonucleotide
  Sense strand starting at position 3069 of SEQ ID NO: 404
aguaauuacuguuggaaga

SEQ ID NO: 34499 - RNA, 19 nt, Artificial Sequence
  Description of Artificial Sequence: Synthetic oligonucleotide
  Antisense strand to SEQ ID NO: 34498
ucuuccaacaguaauuacu

SEQ ID NO: 34500 - RNA, 19 nt, Artificial Sequence
  Description of Artificial Sequence: Synthetic oligonucleotide
  Sense strand starting at position 3070 of SEQ ID NO: 404
guaauuacuguuggaagau

SEQ ID NO: 34501 - RNA, 19 nt, Artificial Sequence
  Description of Artificial Sequence: Synthetic oligonucleotide
  Antisense strand to SEQ ID NO: 34500
aucuuccaacaguaauuac

SEQ ID NO: 34502 - RNA, 19 nt, Artificial Sequence
  Description of Artificial Sequence: Synthetic oligonucleotide
  Sense strand starting at position 3071 of SEQ ID NO: 404
uaauuacuguuggaagaug

SEQ ID NO: 34503 - RNA, 19 nt, Artificial Sequence
  Description of Artificial Sequence: Synthetic oligonucleotide
  Antisense strand to SEQ ID NO: 34502
caucuuccaacaguaauua

SEQ ID NO: 34504 - RNA, 19 nt, Artificial Sequence
  Description of Artificial Sequence: Synthetic oligonucleotide
  Sense strand starting at position 3103 of SEQ ID NO: 404
cuagaaagcuggucuuaac

SEQ ID NO: 34505 - RNA, 19 nt, Artificial Sequence
  Description of Artificial Sequence: Synthetic oligonucleotide
  Antisense strand to SEQ ID NO: 34504
guuaagaccagcuuucuag

SEQ ID NO: 34506 - RNA, 19 nt, Artificial Sequence
  Description of Artificial Sequence: Synthetic oligonucleotide
  Sense strand starting at position 3113 of SEQ ID NO: 404
ggucuuaacuccuaacgug

SEQ ID NO: 34507 - RNA, 19 nt, Artificial Sequence
  Description of Artificial Sequence: Synthetic oligonucleotide
  Antisense strand to SEQ ID NO: 34506
cacguuaggaguuaagacc

SEQ ID NO: 34508 - RNA, 19 nt, Artificial Sequence
  Description of Artificial Sequence: Synthetic oligonucleotide
  Sense strand starting at position 3129 of SEQ ID NO: 404
gugaacgaguggugacuaa

SEQ ID NO: 34509 - RNA, 19 nt, Artificial Sequence
  Description of Artificial Sequence: Synthetic oligonucleotide
  Antisense strand to SEQ ID NO: 34508
uuagucaccacucguucac

SEQ ID NO: 34510 - RNA, 19 nt, Artificial Sequence
  Description of Artificial Sequence: Synthetic oligonucleotide
  Sense strand starting at position 3133 of SEQ ID NO: 404
acgaguggugacuaagaug

SEQ ID NO: 34511 - RNA, 19 nt, Artificial Sequence
  Description of Artificial Sequence: Synthetic oligonucleotide
  Antisense strand to SEQ ID NO: 34510
caucuuagucaccacucgu

SEQ ID NO: 34512 - RNA, 19 nt, Artificial Sequence
  Description of Artificial Sequence: Synthetic oligonucleotide
  Sense strand starting at position 3136 of SEQ ID NO: 404
aguggugacuaagauguau

SEQ ID NO: 34513 - RNA, 19 nt, Artificial Sequence
  Description of Artificial Sequence: Synthetic oligonucleotide
  Antisense strand to SEQ ID NO: 34512
auacaucuuagucaccacu

SEQ ID NO: 34514 - RNA, 19 nt, Artificial Sequence
  Description of Artificial Sequence: Synthetic oligonucleotide
  Sense strand starting at position 3182 of SEQ ID NO: 404
cagcuuacuccauggagag

SEQ ID NO: 34515 - RNA, 19 nt, Artificial Sequence
  Description of Artificial Sequence: Synthetic oligonucleotide
  Antisense strand to SEQ ID NO: 34514
cucuccauggaguaagcug

SEQ ID NO: 34516 - RNA, 19 nt, Artificial Sequence
  Description of Artificial Sequence: Synthetic oligonucleotide
  Sense strand starting at position 3286 of SEQ ID NO: 404
ccguuuaucuggucaagua

SEQ ID NO: 34517 - RNA, 19 nt, Artificial Sequence
  Description of Artificial Sequence: Synthetic oligonucleotide
  Antisense strand to SEQ ID NO: 34516
uacuugaccagauaaacgg

SEQ ID NO: 34518 - RNA, 19 nt, Artificial Sequence
  Description of Artificial Sequence: Synthetic oligonucleotide
  Sense strand starting at position 3287 of SEQ ID NO: 404
cguuuaucuggucaaguac

SEQ ID NO: 34519 - RNA, 19 nt, Artificial Sequence
  Description of Artificial Sequence: Synthetic oligonucleotide
  Antisense strand to SEQ ID NO: 34518
guacuugaccagauaaacg

SEQ ID NO: 34520 - RNA, 19 nt, Artificial Sequence
  Description of Artificial Sequence: Synthetic oligonucleotide
  Sense strand starting at position 3295 of SEQ ID NO: 404
uggucaaguacucguagga

SEQ ID NO: 34521 - RNA, 19 nt, Artificial Sequence
  Description of Artificial Sequence: Synthetic oligonucleotide
  Antisense strand to SEQ ID NO: 34520
uccuacgaguacuugacca

SEQ ID NO: 34522 - RNA, 19 nt, Artificial Sequence
  Description of Artificial Sequence: Synthetic oligonucleotide
  Sense strand starting at position 3408 of SEQ ID NO: 404
guuuguucugccucucuuu

SEQ ID NO: 34523 - RNA, 19 nt, Artificial Sequence
  Description of Artificial Sequence: Synthetic oligonucleotide
  Antisense strand to SEQ ID NO: 34522
aaagagaggcagaacaaac

SEQ ID NO: 34524 - RNA, 19 nt, Artificial Sequence
  Description of Artificial Sequence: Synthetic oligonucleotide
  Sense strand starting at position 67 of SEQ ID NO: 405
gcacaaaugucaucaccug

SEQ ID NO: 34525 - RNA, 19 nt, Artificial Sequence
  Description of Artificial Sequence: Synthetic oligonucleotide
  Antisense strand to SEQ ID NO: 34524
caggugaugacauuugugc

SEQ ID NO: 34526 - RNA, 19 nt, Artificial Sequence
  Description of Artificial Sequence: Synthetic oligonucleotide
  Sense strand starting at position 73 of SEQ ID NO: 405
augucaucaccugaaggcu

SEQ ID NO: 34527 - RNA, 19 nt, Artificial Sequence
  Description of Artificial Sequence: Synthetic oligonucleotide
  Antisense strand to SEQ ID NO: 34526
agccuucaggugaugacau

SEQ ID NO: 34528 - RNA, 19 nt, Artificial Sequence
  Description of Artificial Sequence: Synthetic oligonucleotide
  Sense strand starting at position 124 of SEQ ID NO: 405
acuucugaagggugcuaaa

SEQ ID NO: 34529 - RNA, 19 nt, Artificial Sequence
  Description of Artificial Sequence: Synthetic oligonucleotide
  Antisense strand to SEQ ID NO: 34528
uuuagcacccuucagaagu

SEQ ID NO: 34530 - RNA, 19 nt, Artificial Sequence
  Description of Artificial Sequence: Synthetic oligonucleotide
  Sense strand starting at position 183 of SEQ ID NO: 405
gggcucucacauuacaaca

SEQ ID NO: 34531 - RNA, 19 nt, Artificial Sequence
  Description of Artificial Sequence: Synthetic oligonucleotide
  Antisense strand to SEQ ID NO: 34530
uguuguaaugugagagccc

SEQ ID NO: 34532 - RNA, 19 nt, Artificial Sequence
  Description of Artificial Sequence: Synthetic oligonucleotide
  Sense strand starting at position 228 of SEQ ID NO: 405
cgauaauggcugugagaga

SEQ ID NO: 34533 - RNA, 19 nt, Artificial Sequence
  Description of Artificial Sequence: Synthetic oligonucleotide
  Antisense strand to SEQ ID NO: 34532
ucucucacagccauuaucg

SEQ ID NO: 34534 - RNA, 19 nt, Artificial Sequence
  Description of Artificial Sequence: Synthetic oligonucleotide
  Sense strand starting at position 266 of SEQ ID NO: 405
gugccuuaauuauuugacu

SEQ ID NO: 34535 - RNA, 19 nt, Artificial Sequence
  Description of Artificial Sequence: Synthetic oligonucleotide
  Antisense strand to SEQ ID NO: 34534
agucaaauaauuaaggcac

SEQ ID NO: 34536 - RNA, 19 nt, Artificial Sequence
  Description of Artificial Sequence: Synthetic oligonucleotide
  Sense strand starting at position 282 of SEQ ID NO: 405
acuuucuugauaggaguga

SEQ ID NO: 34537 - RNA, 19 nt, Artificial Sequence
  Description of Artificial Sequence: Synthetic oligonucleotide
  Antisense strand to SEQ ID NO: 34536
ucacuccuaucaagaaagu

SEQ ID NO: 34538 - RNA, 19 nt, Artificial Sequence
  Description of Artificial Sequence: Synthetic oligonucleotide
  Sense strand starting at position 302 of SEQ ID NO: 405
gauaguaucucaccuugga

SEQ ID NO: 34539 - RNA, 19 nt, Artificial Sequence
  Description of Artificial Sequence: Synthetic oligonucleotide
  Antisense strand to SEQ ID NO: 34538
uccaaggugagauacuauc

SEQ ID NO: 34540 - RNA, 19 nt, Artificial Sequence
  Description of Artificial Sequence: Synthetic oligonucleotide
  Sense strand starting at position 338 of SEQ ID NO: 405
guagaugaccacgaucguu

SEQ ID NO: 34541 - RNA, 19 nt, Artificial Sequence
  Description of Artificial Sequence: Synthetic oligonucleotide
  Antisense strand to SEQ ID NO: 34540
aacgaucguggucaucuac

SEQ ID NO: 34542 - RNA, 19 nt, Artificial Sequence
  Description of Artificial Sequence: Synthetic oligonucleotide
  Sense strand starting at position 477 of SEQ ID NO: 405
gaguuuagagaaugcuaaa

SEQ ID NO: 34543 - RNA, 19 nt, Artificial Sequence
  Description of Artificial Sequence: Synthetic oligonucleotide
  Antisense strand to SEQ ID NO: 34542
uuuagcauucucuaaacuc

SEQ ID NO: 34544 - RNA, 19 nt, Artificial Sequence
  Description of Artificial Sequence: Synthetic oligonucleotide
  Sense strand starting at position 536 of SEQ ID NO: 405
gugcacugaacauggaaua

SEQ ID NO: 34545 - RNA, 19 nt, Artificial Sequence
  Description of Artificial Sequence: Synthetic oligonucleotide
  Antisense strand to SEQ ID NO: 34544
uauuccauguucagugcac

SEQ ID NO: 34546 - RNA, 19 nt, Artificial Sequence
  Description of Artificial Sequence: Synthetic oligonucleotide
  Sense strand starting at position 576 of SEQ ID NO: 405
gagaccaguucugcagaua

SEQ ID NO: 34547 - RNA, 19 nt, Artificial Sequence
  Description of Artificial Sequence: Synthetic oligonucleotide
  Antisense strand to SEQ ID NO: 34546
uaucugcagaacuggucuc

SEQ ID NO: 34548 - RNA, 19 nt, Artificial Sequence
  Description of Artificial Sequence: Synthetic oligonucleotide
  Sense strand starting at position 577 of SEQ ID NO: 405
agaccaguucugcagauac

SEQ ID NO: 34549 - RNA, 19 nt, Artificial Sequence
  Description of Artificial Sequence: Synthetic oligonucleotide
  Antisense strand to SEQ ID NO: 34548
guaucugcagaacuggucu

SEQ ID NO: 34550 - RNA, 19 nt, Artificial Sequence
  Description of Artificial Sequence: Synthetic oligonucleotide
  Sense strand starting at position 579 of SEQ ID NO: 405
accaguucugcagauacuu

SEQ ID NO: 34551 - RNA, 19 nt, Artificial Sequence
  Description of Artificial Sequence: Synthetic oligonucleotide
  Antisense strand to SEQ ID NO: 34550
aaguaucugcagaacuggu

SEQ ID NO: 34552 - RNA, 19 nt, Artificial Sequence
  Description of Artificial Sequence: Synthetic oligonucleotide
  Sense strand starting at position 634 of SEQ ID NO: 405
uaaguagcccuaugagacu

SEQ ID NO: 34553 - RNA, 19 nt, Artificial Sequence
  Description of Artificial Sequence: Synthetic oligonucleotide
  Antisense strand to SEQ ID NO: 34552
agucucauagggcuacuua

SEQ ID NO: 34554 - RNA, 19 nt, Artificial Sequence
  Description of Artificial Sequence: Synthetic oligonucleotide
  Sense strand starting at position 683 of SEQ ID NO: 405
aggcacaauucuuuagauu

SEQ ID NO: 34555 - RNA, 19 nt, Artificial Sequence
  Description of Artificial Sequence: Synthetic oligonucleotide
  Antisense strand to SEQ ID NO: 34554
aaucuaaagaauugugccu

SEQ ID NO: 34556 - RNA, 19 nt, Artificial Sequence
  Description of Artificial Sequence: Synthetic oligonucleotide
  Sense strand starting at position 724 of SEQ ID NO: 405
ccauguaggcuuuaaguca

SEQ ID NO: 34557 - RNA, 19 nt, Artificial Sequence
  Description of Artificial Sequence: Synthetic oligonucleotide
  Antisense strand to SEQ ID NO: 34556
ugacuuaaagccuacaugg

SEQ ID NO: 34558 - RNA, 19 nt, Artificial Sequence
  Description of Artificial Sequence: Synthetic oligonucleotide
  Sense strand starting at position 731 of SEQ ID NO: 405
ggcuuuaagucacuaugac

SEQ ID NO: 34559 - RNA, 19 nt, Artificial Sequence
  Description of Artificial Sequence: Synthetic oligonucleotide
  Antisense strand to SEQ ID NO: 34558
gucauagugacuuaaagcc

SEQ ID NO: 34560 - RNA, 19 nt, Artificial Sequence
  Description of Artificial Sequence: Synthetic oligonucleotide
  Sense strand starting at position 732 of SEQ ID NO: 405
gcuuuaagucacuaugaca

SEQ ID NO: 34561 - RNA, 19 nt, Artificial Sequence
  Description of Artificial Sequence: Synthetic oligonucleotide
  Antisense strand to SEQ ID NO: 34560
ugucauagugacuuaaagc

SEQ ID NO: 34562 - RNA, 19 nt, Artificial Sequence
  Description of Artificial Sequence: Synthetic oligonucleotide
  Sense strand starting at position 743 of SEQ ID NO: 405
cuaugacaaggguguaauu

SEQ ID NO: 34563 - RNA, 19 nt, Artificial Sequence
  Description of Artificial Sequence: Synthetic oligonucleotide
  Antisense strand to SEQ ID NO: 34562
aauuacacccuugucauag

SEQ ID NO: 34564 - RNA, 19 nt, Artificial Sequence
  Description of Artificial Sequence: Synthetic oligonucleotide
  Sense strand starting at position 752 of SEQ ID NO: 405
ggguguaauuuguuugguc

SEQ ID NO: 34565 - RNA, 19 nt, Artificial Sequence
  Description of Artificial Sequence: Synthetic oligonucleotide
  Antisense strand to SEQ ID NO: 34564
gaccaaacaaauuacaccc

SEQ ID NO: 34566 - RNA, 19 nt, Artificial Sequence
  Description of Artificial Sequence: Synthetic oligonucleotide
  Sense strand starting at position 754 of SEQ ID NO: 405
guguaauuuguuuggucua

SEQ ID NO: 34567 - RNA, 19 nt, Artificial Sequence
  Description of Artificial Sequence: Synthetic oligonucleotide
  Antisense strand to SEQ ID NO: 34566
uagaccaaacaaauuacac

SEQ ID NO: 34568 - RNA, 19 nt, Artificial Sequence
  Description of Artificial Sequence: Synthetic oligonucleotide
  Sense strand starting at position 823 of SEQ ID NO: 405
ccugaaauaugacuaguuc

SEQ ID NO: 34569 - RNA, 19 nt, Artificial Sequence
  Description of Artificial Sequence: Synthetic oligonucleotide
  Antisense strand to SEQ ID NO: 34568
gaacuagucauauuucagg

SEQ ID NO: 34570 - RNA, 19 nt, Artificial Sequence
  Description of Artificial Sequence: Synthetic oligonucleotide
  Sense strand starting at position 1384 of SEQ ID NO: 405
gcagcacuggucuagauca

SEQ ID NO: 34571 - RNA, 19 nt, Artificial Sequence
  Description of Artificial Sequence: Synthetic oligonucleotide
  Antisense strand to SEQ ID NO: 34570
ugaucuagaccagugcugc

SEQ ID NO: 34572 - RNA, 19 nt, Artificial Sequence
  Description of Artificial Sequence: Synthetic oligonucleotide
  Sense strand starting at position 1420 of SEQ ID NO: 405
gccuaugggccauauccau

SEQ ID NO: 34573 - RNA, 19 nt, Artificial Sequence
  Description of Artificial Sequence: Synthetic oligonucleotide
  Antisense strand to SEQ ID NO: 34572
auggauauggcccauaggc

SEQ ID NO: 34574 - RNA, 19 nt, Artificial Sequence
  Description of Artificial Sequence: Synthetic oligonucleotide
  Sense strand starting at position 1426 of SEQ ID NO: 405
gggccauauccauauugcu

SEQ ID NO: 34575 - RNA, 19 nt, Artificial Sequence
  Description of Artificial Sequence: Synthetic oligonucleotide
  Antisense strand to SEQ ID NO: 34574
agcaauauggauauggccc

SEQ ID NO: 34576 - RNA, 19 nt, Artificial Sequence
  Description of Artificial Sequence: Synthetic oligonucleotide
  Sense strand starting at position 2279 of SEQ ID NO: 405
ccauguaacccugagagcu

SEQ ID NO: 34577 - RNA, 19 nt, Artificial Sequence
  Description of Artificial Sequence: Synthetic oligonucleotide
  Antisense strand to SEQ ID NO: 34576
agcucucaggguuacaugg

SEQ ID NO: 34578 - RNA, 19 nt, Artificial Sequence
  Description of Artificial Sequence: Synthetic oligonucleotide
  Sense strand starting at position 2491 of SEQ ID NO: 405
ugaauaaagugucuagaca

SEQ ID NO: 34579 - RNA, 19 nt, Artificial Sequence
  Description of Artificial Sequence: Synthetic oligonucleotide
  Antisense strand to SEQ ID NO: 34578
ugucuagacacuuuauuca

SEQ ID NO: 34580 - RNA, 19 nt, Artificial Sequence
  Description of Artificial Sequence: Synthetic oligonucleotide
  Sense strand starting at position 2499 of SEQ ID NO: 405
gugucuagacaauaucaua

SEQ ID NO: 34581 - RNA, 19 nt, Artificial Sequence
  Description of Artificial Sequence: Synthetic oligonucleotide
  Antisense strand to SEQ ID NO: 34580
uaugauauugucuagacac

SEQ ID NO: 34582 - RNA, 19 nt, Artificial Sequence
  Description of Artificial Sequence: Synthetic oligonucleotide
  Sense strand starting at position 2540 of SEQ ID NO: 405
gugagauccuguuuauaag

SEQ ID NO: 34583 - RNA, 19 nt, Artificial Sequence
  Description of Artificial Sequence: Synthetic oligonucleotide
  Antisense strand to SEQ ID NO: 34582
cuuauaaacaggaucucac

SEQ ID NO: 34584 - RNA, 19 nt, Artificial Sequence
  Description of Artificial Sequence: Synthetic oligonucleotide
  Sense strand starting at position 2716 of SEQ ID NO: 405
uuuaguguugacuggaaua

SEQ ID NO: 34585 - RNA, 19 nt, Artificial Sequence
  Description of Artificial Sequence: Synthetic oligonucleotide
  Antisense strand to SEQ ID NO: 34584
uauuccagucaacacuaaa

SEQ ID NO: 34586 - RNA, 19 nt, Artificial Sequence
  Description of Artificial Sequence: Synthetic oligonucleotide
  Sense strand starting at position 2847 of SEQ ID NO: 405
cuaauaugugugggacaag

SEQ ID NO: 34587 - RNA, 19 nt, Artificial Sequence
  Description of Artificial Sequence: Synthetic oligonucleotide
  Antisense strand to SEQ ID NO: 34586
cuugucccacacauauuag

SEQ ID NO: 34588 - RNA, 19 nt, Artificial Sequence
  Description of Artificial Sequence: Synthetic oligonucleotide
  Sense strand starting at position 3501 of SEQ ID NO: 405
gaguuaauaccuggauaau

SEQ ID NO: 34589 - RNA, 19 nt, Artificial Sequence
  Description of Artificial Sequence: Synthetic oligonucleotide
  Antisense strand to SEQ ID NO: 34588
auuauccagguauuaacuc

SEQ ID NO: 34590 - RNA, 19 nt, Artificial Sequence
  Description of Artificial Sequence: Synthetic oligonucleotide
  Sense strand starting at position 3534 of SEQ ID NO: 405
gauaacucaugagcuuagu

SEQ ID NO: 34591 - RNA, 19 nt, Artificial Sequence
  Description of Artificial Sequence: Synthetic oligonucleotide
  Antisense strand to SEQ ID NO: 34590
acuaagcucaugaguuauc

SEQ ID NO: 34592 - RNA, 19 nt, Artificial Sequence
  Description of Artificial Sequence: Synthetic oligonucleotide
  Sense strand starting at position 3558 of SEQ ID NO: 405
ugguucuuaucacucucua

SEQ ID NO: 34593 - RNA, 19 nt, Artificial Sequence
  Description of Artificial Sequence: Synthetic oligonucleotide
  Antisense strand to SEQ ID NO: 34592
uagagagugauaagaacca

SEQ ID NO: 34594 - RNA, 19 nt, Artificial Sequence
  Description of Artificial Sequence: Synthetic oligonucleotide
  Sense strand starting at position 3601 of SEQ ID NO: 405
gacuaucuuugcucuagga

SEQ ID NO: 34595 - RNA, 19 nt, Artificial Sequence
  Description of Artificial Sequence: Synthetic oligonucleotide
  Antisense strand to SEQ ID NO: 34594
uccuagagcaaagauaguc

SEQ ID NO: 34596 - RNA, 19 nt, Artificial Sequence
  Description of Artificial Sequence: Synthetic oligonucleotide
  Sense strand starting at position 3603 of SEQ ID NO: 405
cuaucuuugcucuaggaua

SEQ ID NO: 34597 - RNA, 19 nt, Artificial Sequence
  Description of Artificial Sequence: Synthetic oligonucleotide
  Antisense strand to SEQ ID NO: 34596
uauccuagagcaaagauag

SEQ ID NO: 34598 - RNA, 19 nt, Artificial Sequence
  Description of Artificial Sequence: Synthetic oligonucleotide
  Sense strand starting at position 3605 of SEQ ID NO: 405
aucuuugcucuaggauauc

SEQ ID NO: 34599 - RNA, 19 nt, Artificial Sequence
  Description of Artificial Sequence: Synthetic oligonucleotide
  Antisense strand to SEQ ID NO: 34598
gauauccuagagcaaagau

SEQ ID NO: 34600 - RNA, 19 nt, Artificial Sequence
  Description of Artificial Sequence: Synthetic oligonucleotide
  Sense strand starting at position 3707 of SEQ ID NO: 405
uucugauaggaauguaaug

SEQ ID NO: 34601 - RNA, 19 nt, Artificial Sequence
  Description of Artificial Sequence: Synthetic oligonucleotide
  Antisense strand to SEQ ID NO: 34600
cauuacauuccuaucagaa

SEQ ID NO: 34602 - RNA, 19 nt, Artificial Sequence
  Description of Artificial Sequence: Synthetic oligonucleotide
  Sense strand starting at position 3938 of SEQ ID NO: 405
gagagagcuguccacauug

SEQ ID NO: 34603 - RNA, 19 nt, Artificial Sequence
  Description of Artificial Sequence: Synthetic oligonucleotide
  Antisense strand to SEQ ID NO: 34602
caauguggacagcucucuc

SEQ ID NO: 34604 - RNA, 19 nt, Artificial Sequence
  Description of Artificial Sequence: Synthetic oligonucleotide
  Sense strand starting at position 40 of SEQ ID NO: 406
uguagacuuugguuaccaa

SEQ ID NO: 34605 - RNA, 19 nt, Artificial Sequence
  Description of Artificial Sequence: Synthetic oligonucleotide
  Antisense strand to SEQ ID NO: 34604
uugguaaccaaagucuaca

SEQ ID NO: 34606 - RNA, 19 nt, Artificial Sequence
  Description of Artificial Sequence: Synthetic oligonucleotide
  Sense strand starting at position 43 of SEQ ID NO: 406
agacuuugguuaccaagaa

SEQ ID NO: 34607 - RNA, 19 nt, Artificial Sequence
  Description of Artificial Sequence: Synthetic oligonucleotide
  Antisense strand to SEQ ID NO: 34606
uucuugguaaccaaagucu

SEQ ID NO: 34608 - RNA, 19 nt, Artificial Sequence
  Description of Artificial Sequence: Synthetic oligonucleotide
  Sense strand starting at position 63 of SEQ ID NO: 406
gggagauucccaugcacga

SEQ ID NO: 34609 - RNA, 19 nt, Artificial Sequence
  Description of Artificial Sequence: Synthetic oligonucleotide
  Antisense strand to SEQ ID NO: 34608
ucgugcaugggaaucuccc

SEQ ID NO: 34610 - RNA, 19 nt, Artificial Sequence
  Description of Artificial Sequence: Synthetic oligonucleotide
  Sense strand starting at position 98 of SEQ ID NO: 406
cucugagugauccacgcaa

SEQ ID NO: 34611 - RNA, 19 nt, Artificial Sequence
  Description of Artificial Sequence: Synthetic oligonucleotide
  Antisense strand to SEQ ID NO: 34610
uugcguggaucacucagag

SEQ ID NO: 34612 - RNA, 19 nt, Artificial Sequence
  Description of Artificial Sequence: Synthetic oligonucleotide
  Sense strand starting at position 237 of SEQ ID NO: 406
guaagaguucuggaagucu

SEQ ID NO: 34613 - RNA, 19 nt, Artificial Sequence
  Description of Artificial Sequence: Synthetic oligonucleotide
  Antisense strand to SEQ ID NO: 34612
agacuuccagaacucuuac

SEQ ID NO: 34614 - RNA, 19 nt, Artificial Sequence
  Description of Artificial Sequence: Synthetic oligonucleotide
  Sense strand starting at position 246 of SEQ ID NO: 406
cuggaagucugccuaauug

SEQ ID NO: 34615 - RNA, 19 nt, Artificial Sequence
  Description of Artificial Sequence: Synthetic oligonucleotide
  Antisense strand to SEQ ID NO: 34614
caauuaggcagacuuccag

SEQ ID NO: 34616 - RNA, 19 nt, Artificial Sequence
  Description of Artificial Sequence: Synthetic oligonucleotide
  Sense strand starting at position 392 of SEQ ID NO: 406
ucucaaaggugucuauaug

SEQ ID NO: 34617 - RNA, 19 nt, Artificial Sequence
  Description of Artificial Sequence: Synthetic oligonucleotide
  Antisense strand to SEQ ID NO: 34616
cauauagacaccuuugaga

SEQ ID NO: 34618 - RNA, 19 nt, Artificial Sequence
  Description of Artificial Sequence: Synthetic oligonucleotide
  Sense strand starting at position 414 of SEQ ID NO: 406
aguccugucccaggaauua

SEQ ID NO: 34619 - RNA, 19 nt, Artificial Sequence
  Description of Artificial Sequence: Synthetic oligonucleotide
  Antisense strand to SEQ ID NO: 34618
uaauuccugggacaggacu

SEQ ID NO: 34620 - RNA, 19 nt, Artificial Sequence
  Description of Artificial Sequence: Synthetic oligonucleotide
  Sense strand starting at position 545 of SEQ ID NO: 406
cuaugagagcuuggaaaua

SEQ ID NO: 34621 - RNA, 19 nt, Artificial Sequence
  Description of Artificial Sequence: Synthetic oligonucleotide
  Antisense strand to SEQ ID NO: 34620
uauuuccaagcucucauag

SEQ ID NO: 34622 - RNA, 19 nt, Artificial Sequence
  Description of Artificial Sequence: Synthetic oligonucleotide
  Sense strand starting at position 667 of SEQ ID NO: 406
uuguaaggugcugagagaa

SEQ ID NO: 34623 - RNA, 19 nt, Artificial Sequence
  Description of Artificial Sequence: Synthetic oligonucleotide
  Antisense strand to SEQ ID NO: 34622
uucucucagcaccuuacaa

SEQ ID NO: 34624 - RNA, 19 nt, Artificial Sequence
  Description of Artificial Sequence: Synthetic oligonucleotide
  Sense strand starting at position 755 of SEQ ID NO: 406
cagggaguccucgaaaguc

SEQ ID NO: 34625 - RNA, 19 nt, Artificial Sequence
  Description of Artificial Sequence: Synthetic oligonucleotide
  Antisense strand to SEQ ID NO: 34624
gacuuucgaggacucccug

SEQ ID NO: 34626 - RNA, 19 nt, Artificial Sequence
  Description of Artificial Sequence: Synthetic oligonucleotide
  Sense strand starting at position 775 of SEQ ID NO: 406
ggaacugcucuuuguugga

SEQ ID NO: 34627 - RNA, 19 nt, Artificial Sequence
  Description of Artificial Sequence: Synthetic oligonucleotide
  Antisense strand to SEQ ID NO: 34626
uccaacaaagagcaguucc

SEQ ID NO: 34628 - RNA, 19 nt, Artificial Sequence
  Description of Artificial Sequence: Synthetic oligonucleotide
  Sense strand starting at position 782 of SEQ ID NO: 406
cucuuuguuggagacuuau

SEQ ID NO: 34629 - RNA, 19 nt, Artificial Sequence
  Description of Artificial Sequence: Synthetic oligonucleotide
  Antisense strand to SEQ ID NO: 34628
auaagucuccaacaaagag

SEQ ID NO: 34630 - RNA, 19 nt, Artificial Sequence
  Description of Artificial Sequence: Synthetic oligonucleotide
  Sense strand starting at position 864 of SEQ ID NO: 406
ccugaagucuguccacaag

SEQ ID NO: 34631 - RNA, 19 nt, Artificial Sequence
  Description of Artificial Sequence: Synthetic oligonucleotide
  Antisense strand to SEQ ID NO: 34630
cuuguggacagacuucagg

SEQ ID NO: 34632 - RNA, 19 nt, Artificial Sequence
  Description of Artificial Sequence: Synthetic oligonucleotide
  Sense strand starting at position 867 of SEQ ID NO: 406
gaagucuguccacaaguac

SEQ ID NO: 34633 - RNA, 19 nt, Artificial Sequence
  Description of Artificial Sequence: Synthetic oligonucleotide
  Antisense strand to SEQ ID NO: 34632
guacuuguggacagacuuc

SEQ ID NO: 34634 - RNA, 19 nt, Artificial Sequence
  Description of Artificial Sequence: Synthetic oligonucleotide
  Sense strand starting at position 919 of SEQ ID NO: 406
ccagacauucuaggucagu

SEQ ID NO: 34635 - RNA, 19 nt, Artificial Sequence
  Description of Artificial Sequence: Synthetic oligonucleotide
  Antisense strand to SEQ ID NO: 34634
acugaccuagaaugucugg

SEQ ID NO: 34636 - RNA, 19 nt, Artificial Sequence
  Description of Artificial Sequence: Synthetic oligonucleotide
  Sense strand starting at position 920 of SEQ ID NO: 406
cagacauucuaggucaguu

SEQ ID NO: 34637 - RNA, 19 nt, Artificial Sequence
  Description of Artificial Sequence: Synthetic oligonucleotide
  Antisense strand to SEQ ID NO: 34636
aacugaccuagaaugucug

SEQ ID NO: 34638 - RNA, 19 nt, Artificial Sequence
  Description of Artificial Sequence: Synthetic oligonucleotide
  Sense strand starting at position 1258 of SEQ ID NO: 406
gggcacauuagaugacuua

SEQ ID NO: 34639 - RNA, 19 nt, Artificial Sequence
  Description of Artificial Sequence: Synthetic oligonucleotide
  Antisense strand to SEQ ID NO: 34638
uaagucaucuaaugugccc

SEQ ID NO: 34640 - RNA, 19 nt, Artificial Sequence
  Description of Artificial Sequence: Synthetic oligonucleotide
  Sense strand starting at position 1773 of SEQ ID NO: 406
cauuuccaaucguuaucga

SEQ ID NO: 34641 - RNA, 19 nt, Artificial Sequence
  Description of Artificial Sequence: Synthetic oligonucleotide
  Antisense strand to SEQ ID NO: 34640
ucgauaacgauuggaaaug

SEQ ID NO: 34642 - RNA, 19 nt, Artificial Sequence
  Description of Artificial Sequence: Synthetic oligonucleotide
  Sense strand starting at position 1778 of SEQ ID NO: 406
ccaaucguuaucgaugcua

SEQ ID NO: 34643 - RNA, 19 nt, Artificial Sequence
  Description of Artificial Sequence: Synthetic oligonucleotide
  Antisense strand to SEQ ID NO: 34642
uagcaucgauaacgauugg

SEQ ID NO: 34644 - RNA, 19 nt, Artificial Sequence
  Description of Artificial Sequence: Synthetic oligonucleotide
  Sense strand starting at position 2044 of SEQ ID NO: 406
aguguugacgcguuaccuu

SEQ ID NO: 34645 - RNA, 19 nt, Artificial Sequence
  Description of Artificial Sequence: Synthetic oligonucleotide
  Antisense strand to SEQ ID NO: 34644
aagguaacgcgucaacacu

SEQ ID NO: 34646 - RNA, 19 nt, Artificial Sequence
  Description of Artificial Sequence: Synthetic oligonucleotide
  Sense strand starting at position 2439 of SEQ ID NO: 406
gaguguagucugcagagaa

SEQ ID NO: 34647 - RNA, 19 nt, Artificial Sequence
  Description of Artificial Sequence: Synthetic oligonucleotide
  Antisense strand to SEQ ID NO: 34646
uucucugcagacuacacuc

SEQ ID NO: 34648 - RNA, 19 nt, Artificial Sequence
  Description of Artificial Sequence: Synthetic oligonucleotide
  Sense strand starting at position 2495 of SEQ ID NO: 406
gagaaucuggucgggucaa

SEQ ID NO: 34649 - RNA, 19 nt, Artificial Sequence
  Description of Artificial Sequence: Synthetic oligonucleotide
  Antisense strand to SEQ ID NO: 34648
uugacccgaccagauucuc

SEQ ID NO: 34650 - RNA, 19 nt, Artificial Sequence
  Description of Artificial Sequence: Synthetic oligonucleotide
  Sense strand starting at position 2531 of SEQ ID NO: 406
ugaggaugucuaugcaguc

SEQ ID NO: 34651 - RNA, 19 nt, Artificial Sequence
  Description of Artificial Sequence: Synthetic oligonucleotide
  Antisense strand to SEQ ID NO: 34650
gacugcauagacauccuca

SEQ ID NO: 34652 - RNA, 19 nt, Artificial Sequence
  Description of Artificial Sequence: Synthetic oligonucleotide
  Sense strand starting at position 2575 of SEQ ID NO: 406
gccucaaaucugcagcuaa

SEQ ID NO: 34653 - RNA, 19 nt, Artificial Sequence
  Description of Artificial Sequence: Synthetic oligonucleotide
  Antisense strand to SEQ ID NO: 34652
uuagcugcagauuugaggc

SEQ ID NO: 34654 - RNA, 19 nt, Artificial Sequence
  Description of Artificial Sequence: Synthetic oligonucleotide
  Sense strand starting at position 2696 of SEQ ID NO: 406
ugguauguauuguucuaga

SEQ ID NO: 34655 - RNA, 19 nt, Artificial Sequence
  Description of Artificial Sequence: Synthetic oligonucleotide
  Antisense strand to SEQ ID NO: 34654
ucuagaacaauacauacca

SEQ ID NO: 34656 - RNA, 19 nt, Artificial Sequence
  Description of Artificial Sequence: Synthetic oligonucleotide
  Sense strand starting at position 2701 of SEQ ID NO: 406
uguauuguucuagaaagua

SEQ ID NO: 34657 - RNA, 19 nt, Artificial Sequence
  Description of Artificial Sequence: Synthetic oligonucleotide
  Antisense strand to SEQ ID NO: 34656
uacuuucuagaacaauaca

SEQ ID NO: 34658 - RNA, 19 nt, Artificial Sequence
  Description of Artificial Sequence: Synthetic oligonucleotide
  Sense strand starting at position 2849 of SEQ ID NO: 406
acauuugucuuccuccagu

SEQ ID NO: 34659 - RNA, 19 nt, Artificial Sequence
  Description of Artificial Sequence: Synthetic oligonucleotide
  Antisense strand to SEQ ID NO: 34658
acuggaggaagacaaaugu

SEQ ID NO: 34660 - RNA, 19 nt, Artificial Sequence
  Description of Artificial Sequence: Synthetic oligonucleotide
  Sense strand starting at position 2865 of SEQ ID NO: 406
agugcugauuagcugauua

SEQ ID NO: 34661 - RNA, 19 nt, Artificial Sequence
  Description of Artificial Sequence: Synthetic oligonucleotide
  Antisense strand to SEQ ID NO: 34660
uaaucagcuaaucagcacu

SEQ ID NO: 34662 - RNA, 19 nt, Artificial Sequence
  Description of Artificial Sequence: Synthetic oligonucleotide
  Sense strand starting at position 2869 of SEQ ID NO: 406
cugauuagcugauuagcua

SEQ ID NO: 34663 - RNA, 19 nt, Artificial Sequence
  Description of Artificial Sequence: Synthetic oligonucleotide
  Antisense strand to SEQ ID NO: 34662
uagcuaaucagcuaaucag

SEQ ID NO: 34664 - RNA, 19 nt, Artificial Sequence
  Description of Artificial Sequence: Synthetic oligonucleotide
  Sense strand starting at position 2870 of SEQ ID NO: 406
ugauuagcugauuagcuaa

SEQ ID NO: 34665 - RNA, 19 nt, Artificial Sequence
  Description of Artificial Sequence: Synthetic oligonucleotide
  Antisense strand to SEQ ID NO: 34664
uuagcuaaucagcuaauca

SEQ ID NO: 34666 - RNA, 19 nt, Artificial Sequence
  Description of Artificial Sequence: Synthetic oligonucleotide
  Sense strand starting at position 3102 of SEQ ID NO: 406
gccuuuaucuccuuuggga

SEQ ID NO: 34667 - RNA, 19 nt, Artificial Sequence
  Description of Artificial Sequence: Synthetic oligonucleotide
  Antisense strand to SEQ ID NO: 34666
ucccaaaggagauaaaggc

SEQ ID NO: 34668 - RNA, 19 nt, Artificial Sequence
  Description of Artificial Sequence: Synthetic oligonucleotide
  Sense strand starting at position 3104 of SEQ ID NO: 406
cuuuaucuccuuugggauc

SEQ ID NO: 34669 - RNA, 19 nt, Artificial Sequence
  Description of Artificial Sequence: Synthetic oligonucleotide
  Antisense strand to SEQ ID NO: 34668
gaucccaaaggagauaaag

SEQ ID NO: 34670 - RNA, 19 nt, Artificial Sequence
  Description of Artificial Sequence: Synthetic oligonucleotide
  Sense strand starting at position 3157 of SEQ ID NO: 406
ccaaguguugaaggcuuaa

SEQ ID NO: 34671 - RNA, 19 nt, Artificial Sequence
  Description of Artificial Sequence: Synthetic oligonucleotide
  Antisense strand to SEQ ID NO: 34670
uuaagccuucaacacuugg

SEQ ID NO: 34672 - RNA, 19 nt, Artificial Sequence
  Description of Artificial Sequence: Synthetic oligonucleotide
  Sense strand starting at position 3257 of SEQ ID NO: 406
gugggaaccuuccuuacua

SEQ ID NO: 34673 - RNA, 19 nt, Artificial Sequence
  Description of Artificial Sequence: Synthetic oligonucleotide
  Antisense strand to SEQ ID NO: 34672
uaguaaggaagguucccac

SEQ ID NO: 34674 - RNA, 19 nt, Artificial Sequence
  Description of Artificial Sequence: Synthetic oligonucleotide
  Sense strand starting at position 3258 of SEQ ID NO: 406
ugggaaccuuccuuacuaa

SEQ ID NO: 34675 - RNA, 19 nt, Artificial Sequence
  Description of Artificial Sequence: Synthetic oligonucleotide
  Antisense strand to SEQ ID NO: 34674
uuaguaaggaagguuccca

SEQ ID NO: 34676 - RNA, 19 nt, Artificial Sequence
  Description of Artificial Sequence: Synthetic oligonucleotide
  Sense strand starting at position 3270 of SEQ ID NO: 406
uuacuaagccuuggcauua

SEQ ID NO: 34677 - RNA, 19 nt, Artificial Sequence
  Description of Artificial Sequence: Synthetic oligonucleotide
  Antisense strand to SEQ ID NO: 34676
uaaugccaaggcuuaguaa

SEQ ID NO: 34678 - RNA, 19 nt, Artificial Sequence
  Description of Artificial Sequence: Synthetic oligonucleotide
  Sense strand starting at position 3380 of SEQ ID NO: 406
ggcacaucugcaugacaua

SEQ ID NO: 34679 - RNA, 19 nt, Artificial Sequence
  Description of Artificial Sequence: Synthetic oligonucleotide
  Antisense strand to SEQ ID NO: 34678
uaugucaugcagaugugcc

SEQ ID NO: 34680 - RNA, 19 nt, Artificial Sequence
  Description of Artificial Sequence: Synthetic oligonucleotide
  Sense strand starting at position 3400 of SEQ ID NO: 406
uuacuauccguguaaccaa

SEQ ID NO: 34681 - RNA, 19 nt, Artificial Sequence
  Description of Artificial Sequence: Synthetic oligonucleotide
  Antisense strand to SEQ ID NO: 34680
uugguuacacggauaguaa

SEQ ID NO: 34682 - RNA, 19 nt, Artificial Sequence
  Description of Artificial Sequence: Synthetic oligonucleotide
  Sense strand starting at position 3476 of SEQ ID NO: 406
caggguaacucucugaaga

SEQ ID NO: 34683 - RNA, 19 nt, Artificial Sequence
  Description of Artificial Sequence: Synthetic oligonucleotide
  Antisense strand to SEQ ID NO: 34682
ucuucagagaguuacccug

SEQ ID NO: 34684 - RNA, 19 nt, Artificial Sequence
  Description of Artificial Sequence: Synthetic oligonucleotide
  Sense strand starting at position 3672 of SEQ ID NO: 407
ccaguugucagaggacaau

SEQ ID NO: 34685 - RNA, 19 nt, Artificial Sequence
  Description of Artificial Sequence: Synthetic oligonucleotide
  Antisense strand to SEQ ID NO: 34684
auuguccucugacaacugg

SEQ ID NO: 34686 - RNA, 19 nt, Artificial Sequence
  Description of Artificial Sequence: Synthetic oligonucleotide
  Sense strand starting at position 3635 of SEQ ID NO: 407
ggcuuagaaagauagcuau

SEQ ID NO: 34687 - RNA, 19 nt, Artificial Sequence
  Description of Artificial Sequence: Synthetic oligonucleotide
  Antisense strand to SEQ ID NO: 34686
auagcuaucuuucuaagcc

SEQ ID NO: 34688 - RNA, 19 nt, Artificial Sequence
  Description of Artificial Sequence: Synthetic oligonucleotide
  Sense strand starting at position 3206 of SEQ ID NO: 407
guaccuuuagaguagucau

SEQ ID NO: 34689 - RNA, 19 nt, Artificial Sequence
  Description of Artificial Sequence: Synthetic oligonucleotide
  Antisense strand to SEQ ID NO: 34688
augacuacucuaaagguac

SEQ ID NO: 34690 - RNA, 19 nt, Artificial Sequence
  Description of Artificial Sequence: Synthetic oligonucleotide
  Sense strand starting at position 3198 of SEQ ID NO: 407
guuaauggguaccuuuaga

SEQ ID NO: 34691 - RNA, 19 nt, Artificial Sequence
  Description of Artificial Sequence: Synthetic oligonucleotide
  Antisense strand to SEQ ID NO: 34690
ucuaaagguacccauuaac

SEQ ID NO: 34692 - RNA, 19 nt, Artificial Sequence
  Description of Artificial Sequence: Synthetic oligonucleotide
  Sense strand starting at position 3190 of SEQ ID NO: 407
ucguuuguguuaaugggua

SEQ ID NO: 34693 - RNA, 19 nt, Artificial Sequence
  Description of Artificial Sequence: Synthetic oligonucleotide
  Antisense strand to SEQ ID NO: 34692
uacccauuaacacaaacga

SEQ ID NO: 34694 - RNA, 19 nt, Artificial Sequence
  Description of Artificial Sequence: Synthetic oligonucleotide
  Sense strand starting at position 3182 of SEQ ID NO: 407
aucgacauucguuuguguu

SEQ ID NO: 34695 - RNA, 19 nt, Artificial Sequence
  Description of Artificial Sequence: Synthetic oligonucleotide
  Antisense strand to SEQ ID NO: 34694
aacacaaacgaaugucgau

SEQ ID NO: 34696 - RNA, 19 nt, Artificial Sequence
  Description of Artificial Sequence: Synthetic oligonucleotide
  Sense strand starting at position 3147 of SEQ ID NO: 407
guggaauugcuuuaguaau

SEQ ID NO: 34697 - RNA, 19 nt, Artificial Sequence
  Description of Artificial Sequence: Synthetic oligonucleotide
  Antisense strand to SEQ ID NO: 34696
auuacuaaagcaauuccac

SEQ ID NO: 34698 - RNA, 19 nt, Artificial Sequence
  Description of Artificial Sequence: Synthetic oligonucleotide
  Sense strand starting at position 3051 of SEQ ID NO: 407
augggcuaauuugaaauau

SEQ ID NO: 34699 - RNA, 19 nt, Artificial Sequence
  Description of Artificial Sequence: Synthetic oligonucleotide
  Antisense strand to SEQ ID NO: 34698
auauuucaaauuagcccau

SEQ ID NO: 34700 - RNA, 19 nt, Artificial Sequence
  Description of Artificial Sequence: Synthetic oligonucleotide
  Sense strand starting at position 2992 of SEQ ID NO: 407
auucuuccuguuugagaga

SEQ ID NO: 34701 - RNA, 19 nt, Artificial Sequence
  Description of Artificial Sequence: Synthetic oligonucleotide
  Antisense strand to SEQ ID NO: 34700
ucucucaaacaggaagaau

SEQ ID NO: 34702 - RNA, 19 nt, Artificial Sequence
  Description of Artificial Sequence: Synthetic oligonucleotide
  Sense strand starting at position 2991 of SEQ ID NO: 407
gauucuuccuguuugagag

SEQ ID NO: 34703 - RNA, 19 nt, Artificial Sequence
  Description of Artificial Sequence: Synthetic oligonucleotide
  Antisense strand to SEQ ID NO: 34702
cucucaaacaggaagaauc

SEQ ID NO: 34704 - RNA, 19 nt, Artificial Sequence
  Description of Artificial Sequence: Synthetic oligonucleotide
  Sense strand starting at position 2987 of SEQ ID NO: 407
aggagauucuuccuguuug

SEQ ID NO: 34705 - RNA, 19 nt, Artificial Sequence
  Description of Artificial Sequence: Synthetic oligonucleotide
  Antisense strand to SEQ ID NO: 34704
caaacaggaagaaucuccu

SEQ ID NO: 34706 - RNA, 19 nt, Artificial Sequence
  Description of Artificial Sequence: Synthetic oligonucleotide
  Sense strand starting at position 2985 of SEQ ID NO: 407
cuaggagauucuuccuguu

SEQ ID NO: 34707 - RNA, 19 nt, Artificial Sequence
  Description of Artificial Sequence: Synthetic oligonucleotide
  Antisense strand to SEQ ID NO: 34706
aacaggaagaaucuccuag

SEQ ID NO: 34708 - RNA, 19 nt, Artificial Sequence
  Description of Artificial Sequence: Synthetic oligonucleotide
  Sense strand starting at position 2937 of SEQ ID NO: 407
agaauaagccuaggaguag

SEQ ID NO: 34709 - RNA, 19 nt, Artificial Sequence
  Description of Artificial Sequence: Synthetic oligonucleotide
  Antisense strand to SEQ ID NO: 34708
cuacuccuaggcuuauucu

SEQ ID NO: 34710 - RNA, 19 nt, Artificial Sequence
  Description of Artificial Sequence: Synthetic oligonucleotide
  Sense strand starting at position 2840 of SEQ ID NO: 407
gagagaugaguuuguaugu

SEQ ID NO: 34711 - RNA, 19 nt, Artificial Sequence
  Description of Artificial Sequence: Synthetic oligonucleotide
  Antisense strand to SEQ ID NO: 34710
acauacaaacucaucucuc

SEQ ID NO: 34712 - RNA, 19 nt, Artificial Sequence
  Description of Artificial Sequence: Synthetic oligonucleotide
  Sense strand starting at position 2828 of SEQ ID NO: 407
acgacuuccagcgagagau

SEQ ID NO: 34713 - RNA, 19 nt, Artificial Sequence
  Description of Artificial Sequence: Synthetic oligonucleotide
  Antisense strand to SEQ ID NO: 34712
aucucucgcuggaagucgu

SEQ ID NO: 34714 - RNA, 19 nt, Artificial Sequence
  Description of Artificial Sequence: Synthetic oligonucleotide
  Sense strand starting at position 2808 of SEQ ID NO: 407
gaaagcuguugauccagaa

SEQ ID NO: 34715 - RNA, 19 nt, Artificial Sequence
  Description of Artificial Sequence: Synthetic oligonucleotide
  Antisense strand to SEQ ID NO: 34714
uucuggaucaacagcuuuc

SEQ ID NO: 34716 - RNA, 19 nt, Artificial Sequence
  Description of Artificial Sequence: Synthetic oligonucleotide
  Sense strand starting at position 2802 of SEQ ID NO: 407
ggaccagaaagcuguugau

SEQ ID NO: 34717 - RNA, 19 nt, Artificial Sequence
  Description of Artificial Sequence: Synthetic oligonucleotide
  Antisense strand to SEQ ID NO: 34716
aucaacagcuuucuggucc

SEQ ID NO: 34718 - RNA, 19 nt, Artificial Sequence
  Description of Artificial Sequence: Synthetic oligonucleotide
  Sense strand starting at position 2762 of SEQ ID NO: 407
cggagaucgguggaucuga

SEQ ID NO: 34719 - RNA, 19 nt, Artificial Sequence
  Description of Artificial Sequence: Synthetic oligonucleotide
  Antisense strand to SEQ ID NO: 34718
ucagauccaccgaucuccg

SEQ ID NO: 34720 - RNA, 19 nt, Artificial Sequence
  Description of Artificial Sequence: Synthetic oligonucleotide
  Sense strand starting at position 2676 of SEQ ID NO: 407
cuagaauggccugaagcaa

SEQ ID NO: 34721 - RNA, 19 nt, Artificial Sequence
  Description of Artificial Sequence: Synthetic oligonucleotide
  Antisense strand to SEQ ID NO: 34720
uugcuucaggccauucuag

SEQ ID NO: 34722 - RNA, 19 nt, Artificial Sequence
  Description of Artificial Sequence: Synthetic oligonucleotide
  Sense strand starting at position 2656 of SEQ ID NO: 407
gagcucagugucuggauuu

SEQ ID NO: 34723 - RNA, 19 nt, Artificial Sequence
  Description of Artificial Sequence: Synthetic oligonucleotide
  Antisense strand to SEQ ID NO: 34722
aaauccagacacugagcuc

SEQ ID NO: 34724 - RNA, 19 nt, Artificial Sequence
  Description of Artificial Sequence: Synthetic oligonucleotide
  Sense strand starting at position 2519 of SEQ ID NO: 407
auucuugucccaggaaaga

SEQ ID NO: 34725 - RNA, 19 nt, Artificial Sequence
  Description of Artificial Sequence: Synthetic oligonucleotide
  Antisense strand to SEQ ID NO: 34724
ucuuuccugggacaagaau

SEQ ID NO: 34726 - RNA, 19 nt, Artificial Sequence
  Description of Artificial Sequence: Synthetic oligonucleotide
  Sense strand starting at position 2344 of SEQ ID NO: 407
cgugauuguguccugcagu

SEQ ID NO: 34727 - RNA, 19 nt, Artificial Sequence
  Description of Artificial Sequence: Synthetic oligonucleotide
  Antisense strand to SEQ ID NO: 34726
acugcaggacacaaucacg

SEQ ID NO: 34728 - RNA, 19 nt, Artificial Sequence
  Description of Artificial Sequence: Synthetic oligonucleotide
  Sense strand starting at position 2253 of SEQ ID NO: 407
augaaucccuugucacaga

SEQ ID NO: 34729 - RNA, 19 nt, Artificial Sequence
  Description of Artificial Sequence: Synthetic oligonucleotide
  Antisense strand to SEQ ID NO: 34728
ucugugacaagggauucau

SEQ ID NO: 34730 - RNA, 19 nt, Artificial Sequence
  Description of Artificial Sequence: Synthetic oligonucleotide
  Sense strand starting at position 2000 of SEQ ID NO: 407
guaugguuugccgccggaa

SEQ ID NO: 34731 - RNA, 19 nt, Artificial Sequence
  Description of Artificial Sequence: Synthetic oligonucleotide
  Antisense strand to SEQ ID NO: 34730
uuccggcggcaaaccauac

SEQ ID NO: 34732 - RNA, 19 nt, Artificial Sequence
  Description of Artificial Sequence: Synthetic oligonucleotide
  Sense strand starting at position 1382 of SEQ ID NO: 407
auaccauuccuguauaugu

SEQ ID NO: 34733 - RNA, 19 nt, Artificial Sequence
  Description of Artificial Sequence: Synthetic oligonucleotide
  Antisense strand to SEQ ID NO: 34732
acauauacaggaaugguau

SEQ ID NO: 34734 - RNA, 19 nt, Artificial Sequence
  Description of Artificial Sequence: Synthetic oligonucleotide
  Sense strand starting at position 1346 of SEQ ID NO: 407
aucaucaugcugggauuau

SEQ ID NO: 34735 - RNA, 19 nt, Artificial Sequence
  Description of Artificial Sequence: Synthetic oligonucleotide
  Antisense strand to SEQ ID NO: 34734
auaaucccagcaugaugau

SEQ ID NO: 34736 - RNA, 19 nt, Artificial Sequence
  Description of Artificial Sequence: Synthetic oligonucleotide
  Sense strand starting at position 1246 of SEQ ID NO: 407
gugacugauuaaucuaguu

SEQ ID NO: 34737 - RNA, 19 nt, Artificial Sequence
  Description of Artificial Sequence: Synthetic oligonucleotide
  Antisense strand to SEQ ID NO: 34736
aacuagauuaaucagucac

SEQ ID NO: 34738 - RNA, 19 nt, Artificial Sequence
  Description of Artificial Sequence: Synthetic oligonucleotide
  Sense strand starting at position 1240 of SEQ ID NO: 407
auaugcgugacugauuaau

SEQ ID NO: 34739 - RNA, 19 nt, Artificial Sequence
  Description of Artificial Sequence: Synthetic oligonucleotide
  Antisense strand to SEQ ID NO: 34738
auuaaucagucacgcauau

SEQ ID NO: 34740 - RNA, 19 nt, Artificial Sequence
  Description of Artificial Sequence: Synthetic oligonucleotide
  Sense strand starting at position 1127 of SEQ ID NO: 407
ugacaaaggcagugauauu

SEQ ID NO: 34741 - RNA, 19 nt, Artificial Sequence
  Description of Artificial Sequence: Synthetic oligonucleotide
  Antisense strand to SEQ ID NO: 34740
aauaucacugccuuuguca

SEQ ID NO: 34742 - RNA, 19 nt, Artificial Sequence
  Description of Artificial Sequence: Synthetic oligonucleotide
  Sense strand starting at position 1052 of SEQ ID NO: 407
ggauucaaacggugauaua

SEQ ID NO: 34743 - RNA, 19 nt, Artificial Sequence
  Description of Artificial Sequence: Synthetic oligonucleotide
  Antisense strand to SEQ ID NO: 34742
uauaucaccguuugaaucc

SEQ ID NO: 34744 - RNA, 19 nt, Artificial Sequence
  Description of Artificial Sequence: Synthetic oligonucleotide
  Sense strand starting at position 1012 of SEQ ID NO: 407
ugcgacuugggauaaaguu

SEQ ID NO: 34745 - RNA, 19 nt, Artificial Sequence
  Description of Artificial Sequence: Synthetic oligonucleotide
  Antisense strand to SEQ ID NO: 34744
aacuuuaucccaagucgca

SEQ ID NO: 34746 - RNA, 19 nt, Artificial Sequence
  Description of Artificial Sequence: Synthetic oligonucleotide
  Sense strand starting at position 986 of SEQ ID NO: 407
gcuguaaugcuauacaaau

SEQ ID NO: 34747 - RNA, 19 nt, Artificial Sequence
  Description of Artificial Sequence: Synthetic oligonucleotide
  Antisense strand to SEQ ID NO: 34746
auuuguauagcauuacagc

SEQ ID NO: 34748 - RNA, 19 nt, Artificial Sequence
  Description of Artificial Sequence: Synthetic oligonucleotide
  Sense strand starting at position 899 of SEQ ID NO: 407
gugucaaugcaacaaagaa

SEQ ID NO: 34749 - RNA, 19 nt, Artificial Sequence
  Description of Artificial Sequence: Synthetic oligonucleotide
  Antisense strand to SEQ ID NO: 34748
uucuuuguugcauugacac

SEQ ID NO: 34750 - RNA, 19 nt, Artificial Sequence
  Description of Artificial Sequence: Synthetic oligonucleotide
  Sense strand starting at position 850 of SEQ ID NO: 407
gacauauauguaggguaca

SEQ ID NO: 34751 - RNA, 19 nt, Artificial Sequence
  Description of Artificial Sequence: Synthetic oligonucleotide
  Antisense strand to SEQ ID NO: 34750
uguacccuacauauauguc

SEQ ID NO: 34752 - RNA, 19 nt, Artificial Sequence
  Description of Artificial Sequence: Synthetic oligonucleotide
  Sense strand starting at position 683 of SEQ ID NO: 407
ugaacuuggcuauauguau

SEQ ID NO: 34753 - RNA, 19 nt, Artificial Sequence
  Description of Artificial Sequence: Synthetic oligonucleotide
  Antisense strand to SEQ ID NO: 34752
auacauauagccaaguuca

SEQ ID NO: 34754 - RNA, 19 nt, Artificial Sequence
  Description of Artificial Sequence: Synthetic oligonucleotide
  Sense strand starting at position 681 of SEQ ID NO: 407
aaugaacuuggcuauaugu

SEQ ID NO: 34755 - RNA, 19 nt, Artificial Sequence
  Description of Artificial Sequence: Synthetic oligonucleotide
  Antisense strand to SEQ ID NO: 34754
acauauagccaaguucauu

SEQ ID NO: 34756 - RNA, 19 nt, Artificial Sequence
  Description of Artificial Sequence: Synthetic oligonucleotide
  Sense strand starting at position 543 of SEQ ID NO: 407
auaugcaugcaagaauguu

SEQ ID NO: 34757 - RNA, 19 nt, Artificial Sequence
  Description of Artificial Sequence: Synthetic oligonucleotide
  Antisense strand to SEQ ID NO: 34756
aacauucuugcaugcauau

SEQ ID NO: 34758 - RNA, 19 nt, Artificial Sequence
  Description of Artificial Sequence: Synthetic oligonucleotide
  Sense strand starting at position 513 of SEQ ID NO: 407
ccuagagaaucugcacaaa

SEQ ID NO: 34759 - RNA, 19 nt, Artificial Sequence
  Description of Artificial Sequence: Synthetic oligonucleotide
  Antisense strand to SEQ ID NO: 34758
uuugugcagauucucuagg

SEQ ID NO: 34760 - RNA, 19 nt, Artificial Sequence
  Description of Artificial Sequence: Synthetic oligonucleotide
  Sense strand starting at position 366 of SEQ ID NO: 407
caaccauuggguuagcaaa

SEQ ID NO: 34761 - RNA, 19 nt, Artificial Sequence
  Description of Artificial Sequence: Synthetic oligonucleotide
  Antisense strand to SEQ ID NO: 34760
uuugcuaacccaaugguug

SEQ ID NO: 34762 - RNA, 19 nt, Artificial Sequence
  Description of Artificial Sequence: Synthetic oligonucleotide
  Sense strand starting at position 361 of SEQ ID NO: 407
uuucucaaccauuggguua

SEQ ID NO: 34763 - RNA, 19 nt, Artificial Sequence
  Description of Artificial Sequence: Synthetic oligonucleotide
  Antisense strand to SEQ ID NO: 34762
uaacccaaugguugagaaa

SEQ ID NO: 34764 - RNA, 19 nt, Artificial Sequence
  Description of Artificial Sequence: Synthetic oligonucleotide
  Sense strand starting at position 17 of SEQ ID NO: 408
gagggacuuucuccaaagu

SEQ ID NO: 34765 - RNA, 19 nt, Artificial Sequence
  Description of Artificial Sequence: Synthetic oligonucleotide
  Antisense strand to SEQ ID NO: 34764
acuuuggagaaagucccuc

SEQ ID NO: 34766 - RNA, 19 nt, Artificial Sequence
  Description of Artificial Sequence: Synthetic oligonucleotide
  Sense strand starting at position 30 of SEQ ID NO: 408
caaaguaauuggcccauga

SEQ ID NO: 34767 - RNA, 19 nt, Artificial Sequence
  Description of Artificial Sequence: Synthetic oligonucleotide
  Antisense strand to SEQ ID NO: 34766
ucaugggccaauuacuuug

SEQ ID NO: 34768 - RNA, 19 nt, Artificial Sequence
  Description of Artificial Sequence: Synthetic oligonucleotide
  Sense strand starting at position 34 of SEQ ID NO: 408
guaauuggcccaugaccuu

SEQ ID NO: 34769 - RNA, 19 nt, Artificial Sequence
  Description of Artificial Sequence: Synthetic oligonucleotide
  Antisense strand to SEQ ID NO: 34768
aaggucaugggccaauuac

SEQ ID NO: 34770 - RNA, 19 nt, Artificial Sequence
  Description of Artificial Sequence: Synthetic oligonucleotide
  Sense strand starting at position 126 of SEQ ID NO: 408
gugagaauucagugcaaag

SEQ ID NO: 34771 - RNA, 19 nt, Artificial Sequence
  Description of Artificial Sequence: Synthetic oligonucleotide
  Antisense strand to SEQ ID NO: 34770
cuuugcacugaauucucac

SEQ ID NO: 34772 - RNA, 19 nt, Artificial Sequence
  Description of Artificial Sequence: Synthetic oligonucleotide
  Sense strand starting at position 265 of SEQ ID NO: 408
uguggcuguguuggagaau

SEQ ID NO: 34773 - RNA, 19 nt, Artificial Sequence
  Description of Artificial Sequence: Synthetic oligonucleotide
  Antisense strand to SEQ ID NO: 34772
auucuccaacacagccaca

SEQ ID NO: 34774 - RNA, 19 nt, Artificial Sequence
  Description of Artificial Sequence: Synthetic oligonucleotide
  Sense strand starting at position 274 of SEQ ID NO: 408
guuggagaauguccucguu

SEQ ID NO: 34775 - RNA, 19 nt, Artificial Sequence
  Description of Artificial Sequence: Synthetic oligonucleotide
  Antisense strand to SEQ ID NO: 34774
aacgaggacauucuccaac

SEQ ID NO: 34776 - RNA, 19 nt, Artificial Sequence
  Description of Artificial Sequence: Synthetic oligonucleotide
  Sense strand starting at position 276 of SEQ ID NO: 408
uggagaauguccucguuug

SEQ ID NO: 34777 - RNA, 19 nt, Artificial Sequence
  Description of Artificial Sequence: Synthetic oligonucleotide
  Antisense strand to SEQ ID NO: 34776
caaacgaggacauucucca

SEQ ID NO: 34778 - RNA, 19 nt, Artificial Sequence
  Description of Artificial Sequence: Synthetic oligonucleotide
  Sense strand starting at position 281 of SEQ ID NO: 408
aauguccucguuuguggaa

SEQ ID NO: 34779 - RNA, 19 nt, Artificial Sequence
  Description of Artificial Sequence: Synthetic oligonucleotide
  Antisense strand to SEQ ID NO: 34778
uuccacaaacgaggacauu

SEQ ID NO: 34780 - RNA, 19 nt, Artificial Sequence
  Description of Artificial Sequence: Synthetic oligonucleotide
  Sense strand starting at position 282 of SEQ ID NO: 408
auguccucguuuguggaaa

SEQ ID NO: 34781 - RNA, 19 nt, Artificial Sequence
  Description of Artificial Sequence: Synthetic oligonucleotide
  Antisense strand to SEQ ID NO: 34780
uuuccacaaacgaggacau

SEQ ID NO: 34782 - RNA, 19 nt, Artificial Sequence
  Description of Artificial Sequence: Synthetic oligonucleotide
  Sense strand starting at position 429 of SEQ ID NO: 408
uaaagaauguaugugguau

SEQ ID NO: 34783 - RNA, 19 nt, Artificial Sequence
  Description of Artificial Sequence: Synthetic oligonucleotide
  Antisense strand to SEQ ID NO: 34782
auaccacauacauucuuua

SEQ ID NO: 34784 - RNA, 19 nt, Artificial Sequence
  Description of Artificial Sequence: Synthetic oligonucleotide
  Sense strand starting at position 440 of SEQ ID NO: 408
ugugguauuacauaaaguu

SEQ ID NO: 34785 - RNA, 19 nt, Artificial Sequence
  Description of Artificial Sequence: Synthetic oligonucleotide
  Antisense strand to SEQ ID NO: 34784
aacuuuauguaauaccaca

SEQ ID NO: 34786 - RNA, 19 nt, Artificial Sequence
  Description of Artificial Sequence: Synthetic oligonucleotide
  Sense strand starting at position 1138 of SEQ ID NO: 408
uaacuauauuguuuaggga

SEQ ID NO: 34787 - RNA, 19 nt, Artificial Sequence
  Description of Artificial Sequence: Synthetic oligonucleotide
  Antisense strand to SEQ ID NO: 34786
ucccuaaacaauauaguua

SEQ ID NO: 34788 - RNA, 19 nt, Artificial Sequence
  Description of Artificial Sequence: Synthetic oligonucleotide
  Sense strand starting at position 1254 of SEQ ID NO: 408
gguucuauuucuuaacuug

SEQ ID NO: 34789 - RNA, 19 nt, Artificial Sequence
  Description of Artificial Sequence: Synthetic oligonucleotide
  Antisense strand to SEQ ID NO: 34788
caaguuaagaaauagaacc

SEQ ID NO: 34790 - RNA, 19 nt, Artificial Sequence
  Description of Artificial Sequence: Synthetic oligonucleotide
  Sense strand starting at position 1279 of SEQ ID NO: 408
ggcuacugauguucgauuu

SEQ ID NO: 34791 - RNA, 19 nt, Artificial Sequence
  Description of Artificial Sequence: Synthetic oligonucleotide
  Antisense strand to SEQ ID NO: 34790
aaaucgaacaucaguagcc

SEQ ID NO: 34792 - RNA, 19 nt, Artificial Sequence
  Description of Artificial Sequence: Synthetic oligonucleotide
  Sense strand starting at position 1280 of SEQ ID NO: 408
gcuacugauguucgauuua

SEQ ID NO: 34793 - RNA, 19 nt, Artificial Sequence
  Description of Artificial Sequence: Synthetic oligonucleotide
  Antisense strand to SEQ ID NO: 34792
uaaaucgaacaucaguagc

SEQ ID NO: 34794 - RNA, 19 nt, Artificial Sequence
  Description of Artificial Sequence: Synthetic oligonucleotide
  Sense strand starting at position 1287 of SEQ ID NO: 408
auguucgauuuauaaccaa

SEQ ID NO: 34795 - RNA, 19 nt, Artificial Sequence
  Description of Artificial Sequence: Synthetic oligonucleotide
  Antisense strand to SEQ ID NO: 34794
uugguuauaaaucgaacau

SEQ ID NO: 34796 - RNA, 19 nt, Artificial Sequence
  Description of Artificial Sequence: Synthetic oligonucleotide
  Sense strand starting at position 1313 of SEQ ID NO: 408
gucgcacaugcgcauuuau

SEQ ID NO: 34797 - RNA, 19 nt, Artificial Sequence
  Description of Artificial Sequence: Synthetic oligonucleotide
  Antisense strand to SEQ ID NO: 34796
auaaaugcgcaugugcgac

SEQ ID NO: 34798 - RNA, 19 nt, Artificial Sequence
  Description of Artificial Sequence: Synthetic oligonucleotide
  Sense strand starting at position 1324 of SEQ ID NO: 408
gcauuuaugcaccaucguu

SEQ ID NO: 34799 - RNA, 19 nt, Artificial Sequence
  Description of Artificial Sequence: Synthetic oligonucleotide
  Antisense strand to SEQ ID NO: 34798
aacgauggugcauaaaugc

SEQ ID NO: 34800 - RNA, 19 nt, Artificial Sequence
  Description of Artificial Sequence: Synthetic oligonucleotide
  Sense strand starting at position 1333 of SEQ ID NO: 408
caccaucguuaugcagaga

SEQ ID NO: 34801 - RNA, 19 nt, Artificial Sequence
  Description of Artificial Sequence: Synthetic oligonucleotide
  Antisense strand to SEQ ID NO: 34800
ucucugcauaacgauggug

SEQ ID NO: 34802 - RNA, 19 nt, Artificial Sequence
  Description of Artificial Sequence: Synthetic oligonucleotide
  Sense strand starting at position 1334 of SEQ ID NO: 408
accaucguuaugcagagaa

SEQ ID NO: 34803 - RNA, 19 nt, Artificial Sequence
  Description of Artificial Sequence: Synthetic oligonucleotide
  Antisense strand to SEQ ID NO: 34802
uucucugcauaacgauggu

SEQ ID NO: 34804 - RNA, 19 nt, Artificial Sequence
  Description of Artificial Sequence: Synthetic oligonucleotide
  Sense strand starting at position 1336 of SEQ ID NO: 408
caucguuaugcagagaaua

SEQ ID NO: 34805 - RNA, 19 nt, Artificial Sequence
  Description of Artificial Sequence: Synthetic oligonucleotide
  Antisense strand to SEQ ID NO: 34804
uauucucugcauaacgaug

SEQ ID NO: 34806 - RNA, 19 nt, Artificial Sequence
  Description of Artificial Sequence: Synthetic oligonucleotide
  Sense strand starting at position 1338 of SEQ ID NO: 408
ucguuaugcagagaauauc

SEQ ID NO: 34807 - RNA, 19 nt, Artificial Sequence
  Description of Artificial Sequence: Synthetic oligonucleotide
  Antisense strand to SEQ ID NO: 34806
gauauucucugcauaacga

SEQ ID NO: 34808 - RNA, 19 nt, Artificial Sequence
  Description of Artificial Sequence: Synthetic oligonucleotide
  Sense strand starting at position 1429 of SEQ ID NO: 408
aaaggaguauuccuuuaag

SEQ ID NO: 34809 - RNA, 19 nt, Artificial Sequence
  Description of Artificial Sequence: Synthetic oligonucleotide
  Antisense strand to SEQ ID NO: 34808
cuuaaaggaauacuccuuu

SEQ ID NO: 34810 - RNA, 19 nt, Artificial Sequence
  Description of Artificial Sequence: Synthetic oligonucleotide
  Sense strand starting at position 1771 of SEQ ID NO: 408
gcguuucauaugggacgga

SEQ ID NO: 34811 - RNA, 19 nt, Artificial Sequence
  Description of Artificial Sequence: Synthetic oligonucleotide
  Antisense strand to SEQ ID NO: 34810
uccgucccauaugaaacgc

SEQ ID NO: 34812 - RNA, 19 nt, Artificial Sequence
  Description of Artificial Sequence: Synthetic oligonucleotide
  Sense strand starting at position 2326 of SEQ ID NO: 408
cuaggagguuucccgugaa

SEQ ID NO: 34813 - RNA, 19 nt, Artificial Sequence
  Description of Artificial Sequence: Synthetic oligonucleotide
  Antisense strand to SEQ ID NO: 34812
uucacgggaaaccuccuag

SEQ ID NO: 34814 - RNA, 19 nt, Artificial Sequence
  Description of Artificial Sequence: Synthetic oligonucleotide
  Sense strand starting at position 2686 of SEQ ID NO: 408
aagacuucugaauguuaug

SEQ ID NO: 34815 - RNA, 19 nt, Artificial Sequence
  Description of Artificial Sequence: Synthetic oligonucleotide
  Antisense strand to SEQ ID NO: 34814
cauaacauucagaagucuu

SEQ ID NO: 34816 - RNA, 19 nt, Artificial Sequence
  Description of Artificial Sequence: Synthetic oligonucleotide
  Sense strand starting at position 2744 of SEQ ID NO: 408
uagcaaagucagugagcua

SEQ ID NO: 34817 - RNA, 19 nt, Artificial Sequence
  Description of Artificial Sequence: Synthetic oligonucleotide
  Antisense strand to SEQ ID NO: 34816
uagcucacugacuuugcua

SEQ ID NO: 34818 - RNA, 19 nt, Artificial Sequence
  Description of Artificial Sequence: Synthetic oligonucleotide
  Sense strand starting at position 2745 of SEQ ID NO: 408
agcaaagucagugagcuau

SEQ ID NO: 34819 - RNA, 19 nt, Artificial Sequence
  Description of Artificial Sequence: Synthetic oligonucleotide
  Antisense strand to SEQ ID NO: 34818
auagcucacugacuuugcu

SEQ ID NO: 34820 - RNA, 19 nt, Artificial Sequence
  Description of Artificial Sequence: Synthetic oligonucleotide
  Sense strand starting at position 2747 of SEQ ID NO: 408
caaagucagugagcuauga

SEQ ID NO: 34821 - RNA, 19 nt, Artificial Sequence
  Description of Artificial Sequence: Synthetic oligonucleotide
  Antisense strand to SEQ ID NO: 34820
ucauagcucacugacuuug

SEQ ID NO: 34822 - RNA, 19 nt, Artificial Sequence
  Description of Artificial Sequence: Synthetic oligonucleotide
  Sense strand starting at position 2749 of SEQ ID NO: 408
aagucagugagcuaugaug

SEQ ID NO: 34823 - RNA, 19 nt, Artificial Sequence
  Description of Artificial Sequence: Synthetic oligonucleotide
  Antisense strand to SEQ ID NO: 34822
caucauagcucacugacuu

SEQ ID NO: 34824 - RNA, 19 nt, Artificial Sequence
  Description of Artificial Sequence: Synthetic oligonucleotide
  Sense strand starting at position 2751 of SEQ ID NO: 408
gucagugagcuaugauggu

SEQ ID NO: 34825 - RNA, 19 nt, Artificial Sequence
  Description of Artificial Sequence: Synthetic oligonucleotide
  Antisense strand to SEQ ID NO: 34824
accaucauagcucacugac

SEQ ID NO: 34826 - RNA, 19 nt, Artificial Sequence
  Description of Artificial Sequence: Synthetic oligonucleotide
  Sense strand starting at position 3284 of SEQ ID NO: 408
gccguuugcaauggagaca

SEQ ID NO: 34827 - RNA, 19 nt, Artificial Sequence
  Description of Artificial Sequence: Synthetic oligonucleotide
  Antisense strand to SEQ ID NO: 34826
ugucuccauugcaaacggc

SEQ ID NO: 34828 - RNA, 19 nt, Artificial Sequence
  Description of Artificial Sequence: Synthetic oligonucleotide
  Sense strand starting at position 3285 of SEQ ID NO: 408
ccguuugcaauggagacau

SEQ ID NO: 34829 - RNA, 19 nt, Artificial Sequence
  Description of Artificial Sequence: Synthetic oligonucleotide
  Antisense strand to SEQ ID NO: 34828
augucuccauugcaaacgg

SEQ ID NO: 34830 - RNA, 19 nt, Artificial Sequence
  Description of Artificial Sequence: Synthetic oligonucleotide
  Sense strand starting at position 3484 of SEQ ID NO: 408
ggcccauaaccugauccau

SEQ ID NO: 34831 - RNA, 19 nt, Artificial Sequence
  Description of Artificial Sequence: Synthetic oligonucleotide
  Antisense strand to SEQ ID NO: 34830
auggaucagguuaugggcc

SEQ ID NO: 34832 - RNA, 19 nt, Artificial Sequence
  Description of Artificial Sequence: Synthetic oligonucleotide
  Sense strand starting at position 3539 of SEQ ID NO: 408
ugagaauggcuguggaaag

SEQ ID NO: 34833 - RNA, 19 nt, Artificial Sequence
  Description of Artificial Sequence: Synthetic oligonucleotide
  Antisense strand to SEQ ID NO: 34832
cuuuccacagccauucuca

SEQ ID NO: 34834 - RNA, 19 nt, Artificial Sequence
  Description of Artificial Sequence: Synthetic oligonucleotide
  Sense strand starting at position 3612 of SEQ ID NO: 408
ucgcuuuccuccucagaau

SEQ ID NO: 34835 - RNA, 19 nt, Artificial Sequence
  Description of Artificial Sequence: Synthetic oligonucleotide
  Antisense strand to SEQ ID NO: 34834
auucugaggaggaaagcga

SEQ ID NO: 34836 - RNA, 19 nt, Artificial Sequence
  Description of Artificial Sequence: Synthetic oligonucleotide
  Sense strand starting at position 3613 of SEQ ID NO: 408
cgcuuuccuccucagaauc

SEQ ID NO: 34837 - RNA, 19 nt, Artificial Sequence
  Description of Artificial Sequence: Synthetic oligonucleotide
  Antisense strand to SEQ ID NO: 34836
gauucugaggaggaaagcg

SEQ ID NO: 34838 - RNA, 19 nt, Artificial Sequence
  Description of Artificial Sequence: Synthetic oligonucleotide
  Sense strand starting at position 3621 of SEQ ID NO: 408
uccucagaaucugaggaau

SEQ ID NO: 34839 - RNA, 19 nt, Artificial Sequence
  Description of Artificial Sequence: Synthetic oligonucleotide
  Antisense strand to SEQ ID NO: 34838
auuccucagauucugagga

SEQ ID NO: 34840 - RNA, 19 nt, Artificial Sequence
  Description of Artificial Sequence: Synthetic oligonucleotide
  Sense strand starting at position 3623 of SEQ ID NO: 408
cucagaaucugaggaauag

SEQ ID NO: 34841 - RNA, 19 nt, Artificial Sequence
  Description of Artificial Sequence: Synthetic oligonucleotide
  Antisense strand to SEQ ID NO: 34840
cuauuccucagauucugag

SEQ ID NO: 34842 - RNA, 19 nt, Artificial Sequence
  Description of Artificial Sequence: Synthetic oligonucleotide
  Sense strand starting at position 3684 of SEQ ID NO: 408
agauuauacuucuucccga

SEQ ID NO: 34843 - RNA, 19 nt, Artificial Sequence
  Description of Artificial Sequence: Synthetic oligonucleotide
  Antisense strand to SEQ ID NO: 34842
ucgggaagaaguauaaucu

SEQ ID NO: 34844 - RNA, 19 nt, Artificial Sequence
  Description of Artificial Sequence: Synthetic oligonucleotide
  Sense strand starting at position 3866 of SEQ ID NO: 409
gggugugaaaccugaaaug

SEQ ID NO: 34845 - RNA, 19 nt, Artificial Sequence
  Description of Artificial Sequence: Synthetic oligonucleotide
  Antisense strand to SEQ ID NO: 34844
cauuucagguuucacaccc

SEQ ID NO: 34846 - RNA, 19 nt, Artificial Sequence
  Description of Artificial Sequence: Synthetic oligonucleotide
  Sense strand starting at position 3357 of SEQ ID NO: 409
gggugggugucugcgauuu

SEQ ID NO: 34847 - RNA, 19 nt, Artificial Sequence
  Description of Artificial Sequence: Synthetic oligonucleotide
  Antisense strand to SEQ ID NO: 34846
aaaucgcagacacccaccc

SEQ ID NO: 34848 - RNA, 19 nt, Artificial Sequence
  Description of Artificial Sequence: Synthetic oligonucleotide
  Sense strand starting at position 3192 of SEQ ID NO: 409
gugagagaucccugauucc

SEQ ID NO: 34849 - RNA, 19 nt, Artificial Sequence
  Description of Artificial Sequence: Synthetic oligonucleotide
  Antisense strand to SEQ ID NO: 34848
ggaaucagggaucucucac

SEQ ID NO: 34850 - RNA, 19 nt, Artificial Sequence
  Description of Artificial Sequence: Synthetic oligonucleotide
  Sense strand starting at position 3146 of SEQ ID NO: 409
auucuccgugguuauaaua

SEQ ID NO: 34851 - RNA, 19 nt, Artificial Sequence
  Description of Artificial Sequence: Synthetic oligonucleotide
  Antisense strand to SEQ ID NO: 34850
uauuauaaccacggagaau

SEQ ID NO: 34852 - RNA, 19 nt, Artificial Sequence
  Description of Artificial Sequence: Synthetic oligonucleotide
  Sense strand starting at position 3073 of SEQ ID NO: 409
gcuccauacccucagagau

SEQ ID NO: 34853 - RNA, 19 nt, Artificial Sequence
  Description of Artificial Sequence: Synthetic oligonucleotide
  Antisense strand to SEQ ID NO: 34852
aucucugaggguauggagc

SEQ ID NO: 34854 - RNA, 19 nt, Artificial Sequence
  Description of Artificial Sequence: Synthetic oligonucleotide
  Sense strand starting at position 2980 of SEQ ID NO: 409
uauguuuagguguaaugga

SEQ ID NO: 34855 - RNA, 19 nt, Artificial Sequence
  Description of Artificial Sequence: Synthetic oligonucleotide
  Antisense strand to SEQ ID NO: 34854
uccauuacaccuaaacaua

SEQ ID NO: 34856 - RNA, 19 nt, Artificial Sequence
  Description of Artificial Sequence: Synthetic oligonucleotide
  Sense strand starting at position 2889 of SEQ ID NO: 409
ugcuaugggccuuauauua

SEQ ID NO: 34857 - RNA, 19 nt, Artificial Sequence
  Description of Artificial Sequence: Synthetic oligonucleotide
  Antisense strand to SEQ ID NO: 34856
uaauauaaggcccauagca

SEQ ID NO: 34858 - RNA, 19 nt, Artificial Sequence
  Description of Artificial Sequence: Synthetic oligonucleotide
  Sense strand starting at position 2820 of SEQ ID NO: 409
uuuauuuaucugugugccu

SEQ ID NO: 34859 - RNA, 19 nt, Artificial Sequence
  Description of Artificial Sequence: Synthetic oligonucleotide
  Antisense strand to SEQ ID NO: 34858
aggcacacagauaaauaaa

SEQ ID NO: 34860 - RNA, 19 nt, Artificial Sequence
  Description of Artificial Sequence: Synthetic oligonucleotide
  Sense strand starting at position 2752 of SEQ ID NO: 409
guuagauguaguuacagau

SEQ ID NO: 34861 - RNA, 19 nt, Artificial Sequence
  Description of Artificial Sequence: Synthetic oligonucleotide
  Antisense strand to SEQ ID NO: 34860
aucuguaacuacaucuaac

SEQ ID NO: 34862 - RNA, 19 nt, Artificial Sequence
  Description of Artificial Sequence: Synthetic oligonucleotide
  Sense strand starting at position 2685 of SEQ ID NO: 409
agaagcaguuuauucuuau

SEQ ID NO: 34863 - RNA, 19 nt, Artificial Sequence
  Description of Artificial Sequence: Synthetic oligonucleotide
  Antisense strand to SEQ ID NO: 34862
auaagaauaaacugcuucu

SEQ ID NO: 34864 - RNA, 19 nt, Artificial Sequence
  Description of Artificial Sequence: Synthetic oligonucleotide
  Sense strand starting at position 2491 of SEQ ID NO: 409
gguaaagauaccugugaaa

SEQ ID NO: 34865 - RNA, 19 nt, Artificial Sequence
  Description of Artificial Sequence: Synthetic oligonucleotide
  Antisense strand to SEQ ID NO: 34864
uuucacagguaucuuuacc

SEQ ID NO: 34866 - RNA, 19 nt, Artificial Sequence
  Description of Artificial Sequence: Synthetic oligonucleotide
  Sense strand starting at position 2490 of SEQ ID NO: 409
agguaaagauaccugugaa

SEQ ID NO: 34867 - RNA, 19 nt, Artificial Sequence
  Description of Artificial Sequence: Synthetic oligonucleotide
  Antisense strand to SEQ ID NO: 34866
uucacagguaucuuuaccu

SEQ ID NO: 34868 - RNA, 19 nt, Artificial Sequence
  Description of Artificial Sequence: Synthetic oligonucleotide
  Sense strand starting at position 2434 of SEQ ID NO: 409
uguauuguaguguaauaug

SEQ ID NO: 34869 - RNA, 19 nt, Artificial Sequence
  Description of Artificial Sequence: Synthetic oligonucleotide
  Antisense strand to SEQ ID NO: 34868
cauauuacacuacaauaca

SEQ ID NO: 34870 - RNA, 19 nt, Artificial Sequence
  Description of Artificial Sequence: Synthetic oligonucleotide
  Sense strand starting at position 2373 of SEQ ID NO: 409
ugacguaaauagguuuaau

SEQ ID NO: 34871 - RNA, 19 nt, Artificial Sequence
  Description of Artificial Sequence: Synthetic oligonucleotide
  Antisense strand to SEQ ID NO: 34870
auuaaaccuauuuacguca

SEQ ID NO: 34872 - RNA, 19 nt, Artificial Sequence
  Description of Artificial Sequence: Synthetic oligonucleotide
  Sense strand starting at position 2335 of SEQ ID NO: 409
uuuguauauguguaugaag

SEQ ID NO: 34873 - RNA, 19 nt, Artificial Sequence
  Description of Artificial Sequence: Synthetic oligonucleotide
  Antisense strand to SEQ ID NO: 34872
cuucauacacauauacaaa

SEQ ID NO: 34874 - RNA, 19 nt, Artificial Sequence
  Description of Artificial Sequence: Synthetic oligonucleotide
  Sense strand starting at position 2266 of SEQ ID NO: 409
aaugcagugcuugaugaau

SEQ ID NO: 34875 - RNA, 19 nt, Artificial Sequence
  Description of Artificial Sequence: Synthetic oligonucleotide
  Antisense strand to SEQ ID NO: 34874
auucaucaagcacugcauu

SEQ ID NO: 34876 - RNA, 19 nt, Artificial Sequence
  Description of Artificial Sequence: Synthetic oligonucleotide
  Sense strand starting at position 2249 of SEQ ID NO: 409
guacaaacuuugccaagaa

SEQ ID NO: 34877 - RNA, 19 nt, Artificial Sequence
  Description of Artificial Sequence: Synthetic oligonucleotide
  Antisense strand to SEQ ID NO: 34876
uucuuggcaaaguuuguac

SEQ ID NO: 34878 - RNA, 19 nt, Artificial Sequence
  Description of Artificial Sequence: Synthetic oligonucleotide
  Sense strand starting at position 2237 of SEQ ID NO: 409
cccagacaauguguacaaa

SEQ ID NO: 34879 - RNA, 19 nt, Artificial Sequence
  Description of Artificial Sequence: Synthetic oligonucleotide
  Antisense strand to SEQ ID NO: 34878
uuuguacacauugucuggg

SEQ ID NO: 34880 - RNA, 19 nt, Artificial Sequence
  Description of Artificial Sequence: Synthetic oligonucleotide
  Sense strand starting at position 2139 of SEQ ID NO: 409
gggucuauuguguauaaac

SEQ ID NO: 34881 - RNA, 19 nt, Artificial Sequence
  Description of Artificial Sequence: Synthetic oligonucleotide
  Antisense strand to SEQ ID NO: 34880
guuuauacacaauagaccc

SEQ ID NO: 34882 - RNA, 19 nt, Artificial Sequence
  Description of Artificial Sequence: Synthetic oligonucleotide
  Sense strand starting at position 2034 of SEQ ID NO: 409
gggaaauucuccguuggaa

SEQ ID NO: 34883 - RNA, 19 nt, Artificial Sequence
  Description of Artificial Sequence: Synthetic oligonucleotide
  Antisense strand to SEQ ID NO: 34882
uuccaacggagaauuuccc

SEQ ID NO: 34884 - RNA, 19 nt, Artificial Sequence
  Description of Artificial Sequence: Synthetic oligonucleotide
  Sense strand starting at position 2033 of SEQ ID NO: 409
agggaaauucuccguugga

SEQ ID NO: 34885 - RNA, 19 nt, Artificial Sequence
  Description of Artificial Sequence: Synthetic oligonucleotide
  Antisense strand to SEQ ID NO: 34884
uccaacggagaauuucccu

SEQ ID NO: 34886 - RNA, 19 nt, Artificial Sequence
  Description of Artificial Sequence: Synthetic oligonucleotide
  Sense strand starting at position 2022 of SEQ ID NO: 409
cuuauuaagcuagggaaau

SEQ ID NO: 34887 - RNA, 19 nt, Artificial Sequence
  Description of Artificial Sequence: Synthetic oligonucleotide
  Antisense strand to SEQ ID NO: 34886
auuucccuagcuuaauaag

SEQ ID NO: 34888 - RNA, 19 nt, Artificial Sequence
  Description of Artificial Sequence: Synthetic oligonucleotide
  Sense strand starting at position 1589 of SEQ ID NO: 409
guuacagaauacuuaagca

SEQ ID NO: 34889 - RNA, 19 nt, Artificial Sequence
  Description of Artificial Sequence: Synthetic oligonucleotide
  Antisense strand to SEQ ID NO: 34888
ugcuuaaguauucuguaac

SEQ ID NO: 34890 - RNA, 19 nt, Artificial Sequence
  Description of Artificial Sequence: Synthetic oligonucleotide
  Sense strand starting at position 1230 of SEQ ID NO: 409
augacaauaucaguuguaa

SEQ ID NO: 34891 - RNA, 19 nt, Artificial Sequence
  Description of Artificial Sequence: Synthetic oligonucleotide
  Antisense strand to SEQ ID NO: 34890
uuacaacugauauugucau

SEQ ID NO: 34892 - RNA, 19 nt, Artificial Sequence
  Description of Artificial Sequence: Synthetic oligonucleotide
  Sense strand starting at position 1200 of SEQ ID NO: 409
guaauacuugucuacaaga

SEQ ID NO: 34893 - RNA, 19 nt, Artificial Sequence
  Description of Artificial Sequence: Synthetic oligonucleotide
  Antisense strand to SEQ ID NO: 34892
ucuuguagacaaguauuac

SEQ ID NO: 34894 - RNA, 19 nt, Artificial Sequence
  Description of Artificial Sequence: Synthetic oligonucleotide
  Sense strand starting at position 1199 of SEQ ID NO: 409
aguaauacuugucuacaag

SEQ ID NO: 34895 - RNA, 19 nt, Artificial Sequence
  Description of Artificial Sequence: Synthetic oligonucleotide
  Antisense strand to SEQ ID NO: 34894
cuuguagacaaguauuacu

SEQ ID NO: 34896 - RNA, 19 nt, Artificial Sequence
  Description of Artificial Sequence: Synthetic oligonucleotide
  Sense strand starting at position 1010 of SEQ ID NO: 409
gaaauugucuuacugaggu

SEQ ID NO: 34897 - RNA, 19 nt, Artificial Sequence
  Description of Artificial Sequence: Synthetic oligonucleotide
  Antisense strand to SEQ ID NO: 34896
accucaguaagacaauuuc

SEQ ID NO: 34898 - RNA, 19 nt, Artificial Sequence
  Description of Artificial Sequence: Synthetic oligonucleotide
  Sense strand starting at position 1006 of SEQ ID NO: 409
uccagaaauugucuuacug

SEQ ID NO: 34899 - RNA, 19 nt, Artificial Sequence
  Description of Artificial Sequence: Synthetic oligonucleotide
  Antisense strand to SEQ ID NO: 34898
caguaagacaauuucugga

SEQ ID NO: 34900 - RNA, 19 nt, Artificial Sequence
  Description of Artificial Sequence: Synthetic oligonucleotide
  Sense strand starting at position 798 of SEQ ID NO: 409
auguaauggucacucaauc

SEQ ID NO: 34901 - RNA, 19 nt, Artificial Sequence
  Description of Artificial Sequence: Synthetic oligonucleotide
  Antisense strand to SEQ ID NO: 34900
gauugagugaccauuacau

SEQ ID NO: 34902 - RNA, 19 nt, Artificial Sequence
  Description of Artificial Sequence: Synthetic oligonucleotide
  Sense strand starting at position 796 of SEQ ID NO: 409
cuauguaauggucacucaa

SEQ ID NO: 34903 - RNA, 19 nt, Artificial Sequence
  Description of Artificial Sequence: Synthetic oligonucleotide
  Antisense strand to SEQ ID NO: 34902
uugagugaccauuacauag

SEQ ID NO: 34904 - RNA, 19 nt, Artificial Sequence
  Description of Artificial Sequence: Synthetic oligonucleotide
  Sense strand starting at position 785 of SEQ ID NO: 409
guuccuagaggcuauguaa

SEQ ID NO: 34905 - RNA, 19 nt, Artificial Sequence
  Description of Artificial Sequence: Synthetic oligonucleotide
  Antisense strand to SEQ ID NO: 34904
uuacauagccucuaggaac

SEQ ID NO: 34906 - RNA, 19 nt, Artificial Sequence
  Description of Artificial Sequence: Synthetic oligonucleotide
  Sense strand starting at position 484 of SEQ ID NO: 409
cuggaacuguuuguaaaua

SEQ ID NO: 34907 - RNA, 19 nt, Artificial Sequence
  Description of Artificial Sequence: Synthetic oligonucleotide
  Antisense strand to SEQ ID NO: 34906
uauuuacaaacaguuccag

SEQ ID NO: 34908 - RNA, 19 nt, Artificial Sequence
  Description of Artificial Sequence: Synthetic oligonucleotide
  Sense strand starting at position 483 of SEQ ID NO: 409
ucuggaacuguuuguaaau

SEQ ID NO: 34909 - RNA, 19 nt, Artificial Sequence
  Description of Artificial Sequence: Synthetic oligonucleotide
  Antisense strand to SEQ ID NO: 34908
auuuacaaacaguuccaga

SEQ ID NO: 34910 - RNA, 19 nt, Artificial Sequence
  Description of Artificial Sequence: Synthetic oligonucleotide
  Sense strand starting at position 475 of SEQ ID NO: 409
gacauuguucuggaacugu

SEQ ID NO: 34911 - RNA, 19 nt, Artificial Sequence
  Description of Artificial Sequence: Synthetic oligonucleotide
  Antisense strand to SEQ ID NO: 34910
acaguuccagaacaauguc

SEQ ID NO: 34912 - RNA, 19 nt, Artificial Sequence
  Description of Artificial Sequence: Synthetic oligonucleotide
  Sense strand starting at position 471 of SEQ ID NO: 409
uauugacauuguucuggaa

SEQ ID NO: 34913 - RNA, 19 nt, Artificial Sequence
  Description of Artificial Sequence: Synthetic oligonucleotide
  Antisense strand to SEQ ID NO: 34912
uuccagaacaaugucaaua

SEQ ID NO: 34914 - RNA, 19 nt, Artificial Sequence
  Description of Artificial Sequence: Synthetic oligonucleotide
  Sense strand starting at position 372 of SEQ ID NO: 409
guagguaugaaacguuaga

SEQ ID NO: 34915 - RNA, 19 nt, Artificial Sequence
  Description of Artificial Sequence: Synthetic oligonucleotide
  Antisense strand to SEQ ID NO: 34914
ucuaacguuucauaccuac

SEQ ID NO: 34916 - RNA, 19 nt, Artificial Sequence
  Description of Artificial Sequence: Synthetic oligonucleotide
  Sense strand starting at position 364 of SEQ ID NO: 409
aacaguauguagguaugaa

SEQ ID NO: 34917 - RNA, 19 nt, Artificial Sequence
  Description of Artificial Sequence: Synthetic oligonucleotide
  Antisense strand to SEQ ID NO: 34916
uucauaccuacauacuguu

SEQ ID NO: 34918 - RNA, 19 nt, Artificial Sequence
  Description of Artificial Sequence: Synthetic oligonucleotide
  Sense strand starting at position 334 of SEQ ID NO: 409
gacaaaugguaucuaugua

SEQ ID NO: 34919 - RNA, 19 nt, Artificial Sequence
  Description of Artificial Sequence: Synthetic oligonucleotide
  Antisense strand to SEQ ID NO: 34918
uacauagauaccauuuguc

SEQ ID NO: 34920 - RNA, 19 nt, Artificial Sequence
  Description of Artificial Sequence: Synthetic oligonucleotide
  Sense strand starting at position 203 of SEQ ID NO: 409
ucacauauacuuugaugua

SEQ ID NO: 34921 - RNA, 19 nt, Artificial Sequence
  Description of Artificial Sequence: Synthetic oligonucleotide
  Antisense strand to SEQ ID NO: 34920
uacaucaaaguauauguga

SEQ ID NO: 34922 - RNA, 19 nt, Artificial Sequence
  Description of Artificial Sequence: Synthetic oligonucleotide
  Sense strand starting at position 141 of SEQ ID NO: 409
ugaaacaagucagcaauaa

SEQ ID NO: 34923 - RNA, 19 nt, Artificial Sequence
  Description of Artificial Sequence: Synthetic oligonucleotide
  Antisense strand to SEQ ID NO: 34922
uuauugcugacuuguuuca

SEQ ID NO: 34924 - RNA, 19 nt, Artificial Sequence
  Description of Artificial Sequence: Synthetic oligonucleotide
  Sense strand starting at position 3952 of SEQ ID NO: 410
ggucuuaguaaacggcaga

SEQ ID NO: 34925 - RNA, 19 nt, Artificial Sequence
  Description of Artificial Sequence: Synthetic oligonucleotide
  Antisense strand to SEQ ID NO: 34924
ucugccguuuacuaagacc

SEQ ID NO: 34926 - RNA, 19 nt, Artificial Sequence
  Description of Artificial Sequence: Synthetic oligonucleotide
  Sense strand starting at position 3727 of SEQ ID NO: 410
augggagauuucuguauuu

SEQ ID NO: 34927 - RNA, 19 nt, Artificial Sequence
  Description of Artificial Sequence: Synthetic oligonucleotide
  Antisense strand to SEQ ID NO: 34926
aaauacagaaaucucccau

SEQ ID NO: 34928 - RNA, 19 nt, Artificial Sequence
  Description of Artificial Sequence: Synthetic oligonucleotide
  Sense strand starting at position 3341 of SEQ ID NO: 410
ucuaaagugucacacucua

SEQ ID NO: 34929 - RNA, 19 nt, Artificial Sequence
  Description of Artificial Sequence: Synthetic oligonucleotide
  Antisense strand to SEQ ID NO: 34928
uagagugugacacuuuaga

SEQ ID NO: 34930 - RNA, 19 nt, Artificial Sequence
  Description of Artificial Sequence: Synthetic oligonucleotide
  Sense strand starting at position 3275 of SEQ ID NO: 410
acuagucuccacuauugau

SEQ ID NO: 34931 - RNA, 19 nt, Artificial Sequence
  Description of Artificial Sequence: Synthetic oligonucleotide
  Antisense strand to SEQ ID NO: 34930
aucaauaguggagacuagu

SEQ ID NO: 34932 - RNA, 19 nt, Artificial Sequence
  Description of Artificial Sequence: Synthetic oligonucleotide
  Sense strand starting at position 3272 of SEQ ID NO: 410
gcuacuagucuccacuauu

SEQ ID NO: 34933 - RNA, 19 nt, Artificial Sequence
  Description of Artificial Sequence: Synthetic oligonucleotide
  Antisense strand to SEQ ID NO: 34932
aauaguggagacuaguagc

SEQ ID NO: 34934 - RNA, 19 nt, Artificial Sequence
  Description of Artificial Sequence: Synthetic oligonucleotide
  Sense strand starting at position 3271 of SEQ ID NO: 410
agcuacuagucuccacuau

SEQ ID NO: 34935 - RNA, 19 nt, Artificial Sequence
  Description of Artificial Sequence: Synthetic oligonucleotide
  Antisense strand to SEQ ID NO: 34934
auaguggagacuaguagcu

SEQ ID NO: 34936 - RNA, 19 nt, Artificial Sequence
  Description of Artificial Sequence: Synthetic oligonucleotide
  Sense strand starting at position 3262 of SEQ ID NO: 410
gucucugugagcuacuagu

SEQ ID NO: 34937 - RNA, 19 nt, Artificial Sequence
  Description of Artificial Sequence: Synthetic oligonucleotide
  Antisense strand to SEQ ID NO: 34936
acuaguagcucacagagac

SEQ ID NO: 34938 - RNA, 19 nt, Artificial Sequence
  Description of Artificial Sequence: Synthetic oligonucleotide
  Sense strand starting at position 3260 of SEQ ID NO: 410
aagucucugugagcuacua

SEQ ID NO: 34939 - RNA, 19 nt, Artificial Sequence
  Description of Artificial Sequence: Synthetic oligonucleotide
  Antisense strand to SEQ ID NO: 34938
uaguagcucacagagacuu

SEQ ID NO: 34940 - RNA, 19 nt, Artificial Sequence
  Description of Artificial Sequence: Synthetic oligonucleotide
  Sense strand starting at position 3215 of SEQ ID NO: 410
agucaaugggaaugcauau

SEQ ID NO: 34941 - RNA, 19 nt, Artificial Sequence
  Description of Artificial Sequence: Synthetic oligonucleotide
  Antisense strand to SEQ ID NO: 34940
auaugcauucccauugacu

SEQ ID NO: 34942 - RNA, 19 nt, Artificial Sequence
  Description of Artificial Sequence: Synthetic oligonucleotide
  Sense strand starting at position 3201 of SEQ ID NO: 410
gauggugguucagaaguca

SEQ ID NO: 34943 - RNA, 19 nt, Artificial Sequence
  Description of Artificial Sequence: Synthetic oligonucleotide
  Antisense strand to SEQ ID NO: 34942
ugacuucugaaccaccauc

SEQ ID NO: 34944 - RNA, 19 nt, Artificial Sequence
  Description of Artificial Sequence: Synthetic oligonucleotide
  Sense strand starting at position 3084 of SEQ ID NO: 410
guauguguagaggauauua

SEQ ID NO: 34945 - RNA, 19 nt, Artificial Sequence
  Description of Artificial Sequence: Synthetic oligonucleotide
  Antisense strand to SEQ ID NO: 34944
uaauauccucuacacauac

SEQ ID NO: 34946 - RNA, 19 nt, Artificial Sequence
  Description of Artificial Sequence: Synthetic oligonucleotide
  Sense strand starting at position 3081 of SEQ ID NO: 410
uuaguauguguagaggaua

SEQ ID NO: 34947 - RNA, 19 nt, Artificial Sequence
  Description of Artificial Sequence: Synthetic oligonucleotide
  Antisense strand to SEQ ID NO: 34946
uauccucuacacauacuaa

SEQ ID NO: 34948 - RNA, 19 nt, Artificial Sequence
  Description of Artificial Sequence: Synthetic oligonucleotide
  Sense strand starting at position 3077 of SEQ ID NO: 410
aagauuaguauguguagag

SEQ ID NO: 34949 - RNA, 19 nt, Artificial Sequence
  Description of Artificial Sequence: Synthetic oligonucleotide
  Antisense strand to SEQ ID NO: 34948
cucuacacauacuaaucuu

SEQ ID NO: 34950 - RNA, 19 nt, Artificial Sequence
  Description of Artificial Sequence: Synthetic oligonucleotide
  Sense strand starting at position 3076 of SEQ ID NO: 410
gaagauuaguauguguaga

SEQ ID NO: 34951 - RNA, 19 nt, Artificial Sequence
  Description of Artificial Sequence: Synthetic oligonucleotide
  Antisense strand to SEQ ID NO: 34950
ucuacacauacuaaucuuc

SEQ ID NO: 34952 - RNA, 19 nt, Artificial Sequence
  Description of Artificial Sequence: Synthetic oligonucleotide
  Sense strand starting at position 3075 of SEQ ID NO: 410
agaagauuaguauguguag

SEQ ID NO: 34953 - RNA, 19 nt, Artificial Sequence
  Description of Artificial Sequence: Synthetic oligonucleotide
  Antisense strand to SEQ ID NO: 34952
cuacacauacuaaucuucu

SEQ ID NO: 34954 - RNA, 19 nt, Artificial Sequence
  Description of Artificial Sequence: Synthetic oligonucleotide
  Sense strand starting at position 3073 of SEQ ID NO: 410
agagaagauuaguaugugu

SEQ ID NO: 34955 - RNA, 19 nt, Artificial Sequence
  Description of Artificial Sequence: Synthetic oligonucleotide
  Antisense strand to SEQ ID NO: 34954
acacauacuaaucuucucu

SEQ ID NO: 34956 - RNA, 19 nt, Artificial Sequence
  Description of Artificial Sequence: Synthetic oligonucleotide
  Sense strand starting at position 3026 of SEQ ID NO: 410
gcccaaggauccuauugaa

SEQ ID NO: 34957 - RNA, 19 nt, Artificial Sequence
  Description of Artificial Sequence: Synthetic oligonucleotide
  Antisense strand to SEQ ID NO: 34956
uucaauaggauccuugggc

SEQ ID NO: 34958 - RNA, 19 nt, Artificial Sequence
  Description of Artificial Sequence: Synthetic oligonucleotide
  Sense strand starting at position 2916 of SEQ ID NO: 410
ucaguucuguggcucagaa

SEQ ID NO: 34959 - RNA, 19 nt, Artificial Sequence
  Description of Artificial Sequence: Synthetic oligonucleotide
  Antisense strand to SEQ ID NO: 34958
uucugagccacagaacuga

SEQ ID NO: 34960 - RNA, 19 nt, Artificial Sequence
  Description of Artificial Sequence: Synthetic oligonucleotide
  Sense strand starting at position 1223 of SEQ ID NO: 410
agcaguuuguaguauuaau

SEQ ID NO: 34961 - RNA, 19 nt, Artificial Sequence
  Description of Artificial Sequence: Synthetic oligonucleotide
  Antisense strand to SEQ ID NO: 34960
auuaauacuacaaacugcu

SEQ ID NO: 34962 - RNA, 19 nt, Artificial Sequence
  Description of Artificial Sequence: Synthetic oligonucleotide
  Sense strand starting at position 1220 of SEQ ID NO: 410
agaagcaguuuguaguauu

SEQ ID NO: 34963 - RNA, 19 nt, Artificial Sequence
  Description of Artificial Sequence: Synthetic oligonucleotide
  Antisense strand to SEQ ID NO: 34962
aauacuacaaacugcuucu

SEQ ID NO: 34964 - RNA, 19 nt, Artificial Sequence
  Description of Artificial Sequence: Synthetic oligonucleotide
  Sense strand starting at position 1218 of SEQ ID NO: 410
uaagaagcaguuuguagua

SEQ ID NO: 34965 - RNA, 19 nt, Artificial Sequence
  Description of Artificial Sequence: Synthetic oligonucleotide
  Antisense strand to SEQ ID NO: 34964
uacuacaaacugcuucuua

SEQ ID NO: 34966 - RNA, 19 nt, Artificial Sequence
  Description of Artificial Sequence: Synthetic oligonucleotide
  Sense strand starting at position 533 of SEQ ID NO: 410
ucacacuccugugauuaca

SEQ ID NO: 34967 - RNA, 19 nt, Artificial Sequence
  Description of Artificial Sequence: Synthetic oligonucleotide
  Antisense strand to SEQ ID NO: 34966
uguaaucacaggaguguga

SEQ ID NO: 34968 - RNA, 19 nt, Artificial Sequence
  Description of Artificial Sequence: Synthetic oligonucleotide
  Sense strand starting at position 532 of SEQ ID NO: 410
aucacacuccugugauuac

SEQ ID NO: 34969 - RNA, 19 nt, Artificial Sequence
  Description of Artificial Sequence: Synthetic oligonucleotide
  Antisense strand to SEQ ID NO: 34968
guaaucacaggagugugau

SEQ ID NO: 34970 - RNA, 19 nt, Artificial Sequence
  Description of Artificial Sequence: Synthetic oligonucleotide
  Sense strand starting at position 3313 of SEQ ID NO: 411
aguagucuccacuauugaa

SEQ ID NO: 34971 - RNA, 19 nt, Artificial Sequence
  Description of Artificial Sequence: Synthetic oligonucleotide
  Antisense strand to SEQ ID NO: 34970
uucaauaguggagacuacu

SEQ ID NO: 34972 - RNA, 19 nt, Artificial Sequence
  Description of Artificial Sequence: Synthetic oligonucleotide
  Sense strand starting at position 3297 of SEQ ID NO: 411
gucucugugagcuauuagu

SEQ ID NO: 34973 - RNA, 19 nt, Artificial Sequence
  Description of Artificial Sequence: Synthetic oligonucleotide
  Antisense strand to SEQ ID NO: 34972
acuaauagcucacagagac

SEQ ID NO: 34974 - RNA, 19 nt, Artificial Sequence
  Description of Artificial Sequence: Synthetic oligonucleotide
  Sense strand starting at position 3295 of SEQ ID NO: 411
aagucucugugagcuauua

SEQ ID NO: 34975 - RNA, 19 nt, Artificial Sequence
  Description of Artificial Sequence: Synthetic oligonucleotide
  Antisense strand to SEQ ID NO: 34974
uaauagcucacagagacuu

SEQ ID NO: 34976 - RNA, 19 nt, Artificial Sequence
  Description of Artificial Sequence: Synthetic oligonucleotide
  Sense strand starting at position 3293 of SEQ ID NO: 411
agaagucucugugagcuau

SEQ ID NO: 34977 - RNA, 19 nt, Artificial Sequence
  Description of Artificial Sequence: Synthetic oligonucleotide
  Antisense strand to SEQ ID NO: 34976
auagcucacagagacuucu

SEQ ID NO: 34978 - RNA, 19 nt, Artificial Sequence
  Description of Artificial Sequence: Synthetic oligonucleotide
  Sense strand starting at position 3113 of SEQ ID NO: 411
agauuaauauguguagaag

SEQ ID NO: 34979 - RNA, 19 nt, Artificial Sequence
  Description of Artificial Sequence: Synthetic oligonucleotide
  Antisense strand to SEQ ID NO: 34978
cuucuacacauauuaaucu

SEQ ID NO: 34980 - RNA, 19 nt, Artificial Sequence
  Description of Artificial Sequence: Synthetic oligonucleotide
  Sense strand starting at position 3111 of SEQ ID NO: 411
gaagauuaauauguguaga

SEQ ID NO: 34981 - RNA, 19 nt, Artificial Sequence
  Description of Artificial Sequence: Synthetic oligonucleotide
  Antisense strand to SEQ ID NO: 34980
ucuacacauauuaaucuuc

SEQ ID NO: 34982 - RNA, 19 nt, Artificial Sequence
  Description of Artificial Sequence: Synthetic oligonucleotide
  Sense strand starting at position 3110 of SEQ ID NO: 411
agaagauuaauauguguag

SEQ ID NO: 34983 - RNA, 19 nt, Artificial Sequence
  Description of Artificial Sequence: Synthetic oligonucleotide
  Antisense strand to SEQ ID NO: 34982
cuacacauauuaaucuucu

SEQ ID NO: 34984 - RNA, 19 nt, Artificial Sequence
  Description of Artificial Sequence: Synthetic oligonucleotide
  Sense strand starting at position 3108 of SEQ ID NO: 411
agagaagauuaauaugugu

SEQ ID NO: 34985 - RNA, 19 nt, Artificial Sequence
  Description of Artificial Sequence: Synthetic oligonucleotide
  Antisense strand to SEQ ID NO: 34984
acacauauuaaucuucucu

SEQ ID NO: 34986 - RNA, 19 nt, Artificial Sequence
  Description of Artificial Sequence: Synthetic oligonucleotide
  Sense strand starting at position 3064 of SEQ ID NO: 411
caaggauccuguugaauau

SEQ ID NO: 34987 - RNA, 19 nt, Artificial Sequence
  Description of Artificial Sequence: Synthetic oligonucleotide
  Antisense strand to SEQ ID NO: 34986
auauucaacaggauccuug

SEQ ID NO: 34988 - RNA, 19 nt, Artificial Sequence
  Description of Artificial Sequence: Synthetic oligonucleotide
  Sense strand starting at position 3061 of SEQ ID NO: 411
gcccaaggauccuguugaa

SEQ ID NO: 34989 - RNA, 19 nt, Artificial Sequence
  Description of Artificial Sequence: Synthetic oligonucleotide
  Antisense strand to SEQ ID NO: 34988
uucaacaggauccuugggc

SEQ ID NO: 34990 - RNA, 19 nt, Artificial Sequence
  Description of Artificial Sequence: Synthetic oligonucleotide
  Sense strand starting at position 2951 of SEQ ID NO: 411
ccaguucuguggcucagaa

SEQ ID NO: 34991 - RNA, 19 nt, Artificial Sequence
  Description of Artificial Sequence: Synthetic oligonucleotide
  Antisense strand to SEQ ID NO: 34990
uucugagccacagaacugg

SEQ ID NO: 34992 - RNA, 19 nt, Artificial Sequence
  Description of Artificial Sequence: Synthetic oligonucleotide
  Sense strand starting at position 1414 of SEQ ID NO: 411
uucgauugaaaugggaauu

SEQ ID NO: 34993 - RNA, 19 nt, Artificial Sequence
  Description of Artificial Sequence: Synthetic oligonucleotide
  Antisense strand to SEQ ID NO: 34992
aauucccauuucaaucgaa

SEQ ID NO: 34994 - RNA, 19 nt, Artificial Sequence
  Description of Artificial Sequence: Synthetic oligonucleotide
  Sense strand starting at position 1405 of SEQ ID NO: 411
gaaggauaauucgauugaa

SEQ ID NO: 34995 - RNA, 19 nt, Artificial Sequence
  Description of Artificial Sequence: Synthetic oligonucleotide
  Antisense strand to SEQ ID NO: 34994
uucaaucgaauuauccuuc

SEQ ID NO: 34996 - RNA, 19 nt, Artificial Sequence
  Description of Artificial Sequence: Synthetic oligonucleotide
  Sense strand starting at position 1402 of SEQ ID NO: 411
guugaaggauaauucgauu

SEQ ID NO: 34997 - RNA, 19 nt, Artificial Sequence
  Description of Artificial Sequence: Synthetic oligonucleotide
  Antisense strand to SEQ ID NO: 34996
aaucgaauuauccuucaac

SEQ ID NO: 34998 - RNA, 19 nt, Artificial Sequence
  Description of Artificial Sequence: Synthetic oligonucleotide
  Sense strand starting at position 1260 of SEQ ID NO: 411
agccguuuguaguauuaau

SEQ ID NO: 34999 - RNA, 19 nt, Artificial Sequence
  Description of Artificial Sequence: Synthetic oligonucleotide
  Antisense strand to SEQ ID NO: 34998
auuaauacuacaaacggcu

SEQ ID NO: 35000 - RNA, 19 nt, Artificial Sequence
  Description of Artificial Sequence: Synthetic oligonucleotide
  Sense strand starting at position 1255 of SEQ ID NO: 411
uaagaagccguuuguagua

SEQ ID NO: 35001 - RNA, 19 nt, Artificial Sequence
  Description of Artificial Sequence: Synthetic oligonucleotide
  Antisense strand to SEQ ID NO: 35000
uacuacaaacggcuucuua

SEQ ID NO: 35002 - RNA, 19 nt, Artificial Sequence
  Description of Artificial Sequence: Synthetic oligonucleotide
  Sense strand starting at position 571 of SEQ ID NO: 411
gcacuccugugauuacaac

SEQ ID NO: 35003 - RNA, 19 nt, Artificial Sequence
  Description of Artificial Sequence: Synthetic oligonucleotide
  Antisense strand to SEQ ID NO: 35002
guuguaaucacaggagugc

SEQ ID NO: 35004 - RNA, 19 nt, Artificial Sequence
  Description of Artificial Sequence: Synthetic oligonucleotide
  Sense strand starting at position 569 of SEQ ID NO: 411
ucgcacuccugugauuaca

SEQ ID NO: 35005 - RNA, 19 nt, Artificial Sequence
  Description of Artificial Sequence: Synthetic oligonucleotide
  Antisense strand to SEQ ID NO: 35004
uguaaucacaggagugcga

SEQ ID NO: 35006 - RNA, 19 nt, Artificial Sequence
  Description of Artificial Sequence: Synthetic oligonucleotide
  Sense strand starting at position 568 of SEQ ID NO: 411
aucgcacuccugugauuac

SEQ ID NO: 35007 - RNA, 19 nt, Artificial Sequence
  Description of Artificial Sequence: Synthetic oligonucleotide
  Antisense strand to SEQ ID NO: 35006
guaaucacaggagugcgau

SEQ ID NO: 35008 - RNA, 19 nt, Artificial Sequence
  Description of Artificial Sequence: Synthetic oligonucleotide
  Sense strand starting at position 3967 of SEQ ID NO: 412
ggagcagaaauauguaaau

SEQ ID NO: 35009 - RNA, 19 nt, Artificial Sequence
  Description of Artificial Sequence: Synthetic oligonucleotide
  Antisense strand to SEQ ID NO: 35008
auuuacauauuucugcucc

SEQ ID NO: 35010 - RNA, 19 nt, Artificial Sequence
  Description of Artificial Sequence: Synthetic oligonucleotide
  Sense strand starting at position 3934 of SEQ ID NO: 412
agagauauuccaugcuguu

SEQ ID NO: 35011 - RNA, 19 nt, Artificial Sequence
  Description of Artificial Sequence: Synthetic oligonucleotide
  Antisense strand to SEQ ID NO: 35010
aacagcauggaauaucucu

SEQ ID NO: 35012 - RNA, 19 nt, Artificial Sequence
  Description of Artificial Sequence: Synthetic oligonucleotide
  Sense strand starting at position 3903 of SEQ ID NO: 412
ggacucauagucugaaagu

SEQ ID NO: 35013 - RNA, 19 nt, Artificial Sequence
  Description of Artificial Sequence: Synthetic oligonucleotide
  Antisense strand to SEQ ID NO: 35012
acuuucagacuaugagucc

SEQ ID NO: 35014 - RNA, 19 nt, Artificial Sequence
  Description of Artificial Sequence: Synthetic oligonucleotide
  Sense strand starting at position 3868 of SEQ ID NO: 412
cuaugcuugcuacaagaga

SEQ ID NO: 35015 - RNA, 19 nt, Artificial Sequence
  Description of Artificial Sequence: Synthetic oligonucleotide
  Antisense strand to SEQ ID NO: 35014
ucucuuguagcaagcauag

SEQ ID NO: 35016 - RNA, 19 nt, Artificial Sequence
  Description of Artificial Sequence: Synthetic oligonucleotide
  Sense strand starting at position 3828 of SEQ ID NO: 412
cauagagucgguuagugga

SEQ ID NO: 35017 - RNA, 19 nt, Artificial Sequence
  Description of Artificial Sequence: Synthetic oligonucleotide
  Antisense strand to SEQ ID NO: 35016
uccacuaaccgacucuaug

SEQ ID NO: 35018 - RNA, 19 nt, Artificial Sequence
  Description of Artificial Sequence: Synthetic oligonucleotide
  Sense strand starting at position 3825 of SEQ ID NO: 412
agacauagagucgguuagu

SEQ ID NO: 35019 - RNA, 19 nt, Artificial Sequence
  Description of Artificial Sequence: Synthetic oligonucleotide
  Antisense strand to SEQ ID NO: 35018
acuaaccgacucuaugucu

SEQ ID NO: 35020 - RNA, 19 nt, Artificial Sequence
  Description of Artificial Sequence: Synthetic oligonucleotide
  Sense strand starting at position 3796 of SEQ ID NO: 412
augucaauggauugaauua

SEQ ID NO: 35021 - RNA, 19 nt, Artificial Sequence
  Description of Artificial Sequence: Synthetic oligonucleotide
  Antisense strand to SEQ ID NO: 35020
uaauucaauccauugacau

SEQ ID NO: 35022 - RNA, 19 nt, Artificial Sequence
  Description of Artificial Sequence: Synthetic oligonucleotide
  Sense strand starting at position 3792 of SEQ ID NO: 412
uugaaugucaauggauuga

SEQ ID NO: 35023 - RNA, 19 nt, Artificial Sequence
  Description of Artificial Sequence: Synthetic oligonucleotide
  Antisense strand to SEQ ID NO: 35022
ucaauccauugacauucaa

SEQ ID NO: 35024 - RNA, 19 nt, Artificial Sequence
  Description of Artificial Sequence: Synthetic oligonucleotide
  Sense strand starting at position 3791 of SEQ ID NO: 412
cuugaaugucaauggauug

SEQ ID NO: 35025 - RNA, 19 nt, Artificial Sequence
  Description of Artificial Sequence: Synthetic oligonucleotide
  Antisense strand to SEQ ID NO: 35024
caauccauugacauucaag

SEQ ID NO: 35026 - RNA, 19 nt, Artificial Sequence
  Description of Artificial Sequence: Synthetic oligonucleotide
  Sense strand starting at position 3758 of SEQ ID NO: 412
ggcaauaguuaaucuuuau

SEQ ID NO: 35027 - RNA, 19 nt, Artificial Sequence
  Description of Artificial Sequence: Synthetic oligonucleotide
  Antisense strand to SEQ ID NO: 35026
auaaagauuaacuauugcc

SEQ ID NO: 35028 - RNA, 19 nt, Artificial Sequence
  Description of Artificial Sequence: Synthetic oligonucleotide
  Sense strand starting at position 3548 of SEQ ID NO: 412
acaaguuguuaucugguaa

SEQ ID NO: 35029 - RNA, 19 nt, Artificial Sequence
  Description of Artificial Sequence: Synthetic oligonucleotide
  Antisense strand to SEQ ID NO: 35028
uuaccagauaacaacuugu

SEQ ID NO: 35030 - RNA, 19 nt, Artificial Sequence
  Description of Artificial Sequence: Synthetic oligonucleotide
  Sense strand starting at position 3434 of SEQ ID NO: 412
uugguuagagaguaugcaa

SEQ ID NO: 35031 - RNA, 19 nt, Artificial Sequence
  Description of Artificial Sequence: Synthetic oligonucleotide
  Antisense strand to SEQ ID NO: 35030
uugcauacucucuaaccaa

SEQ ID NO: 35032 - RNA, 19 nt, Artificial Sequence
  Description of Artificial Sequence: Synthetic oligonucleotide
  Sense strand starting at position 3296 of SEQ ID NO: 412
guaggaguucuccagcuuc

SEQ ID NO: 35033 - RNA, 19 nt, Artificial Sequence
  Description of Artificial Sequence: Synthetic oligonucleotide
  Antisense strand to SEQ ID NO: 35032
gaagcuggagaacuccuac

SEQ ID NO: 35034 - RNA, 19 nt, Artificial Sequence
  Description of Artificial Sequence: Synthetic oligonucleotide
  Sense strand starting at position 3228 of SEQ ID NO: 412
cgugguuuaagauacuguu

SEQ ID NO: 35035 - RNA, 19 nt, Artificial Sequence
  Description of Artificial Sequence: Synthetic oligonucleotide
  Antisense strand to SEQ ID NO: 35034
aacaguaucuuaaaccacg

SEQ ID NO: 35036 - RNA, 19 nt, Artificial Sequence
  Description of Artificial Sequence: Synthetic oligonucleotide
  Sense strand starting at position 2882 of SEQ ID NO: 412
auuacauaagguuguauga

SEQ ID NO: 35037 - RNA, 19 nt, Artificial Sequence
  Description of Artificial Sequence: Synthetic oligonucleotide
  Antisense strand to SEQ ID NO: 35036
ucauacaaccuuauguaau

SEQ ID NO: 35038 - RNA, 19 nt, Artificial Sequence
  Description of Artificial Sequence: Synthetic oligonucleotide
  Sense strand starting at position 2826 of SEQ ID NO: 412
caggguccaugucucuaaa

SEQ ID NO: 35039 - RNA, 19 nt, Artificial Sequence
  Description of Artificial Sequence: Synthetic oligonucleotide
  Antisense strand to SEQ ID NO: 35038
uuuagagacauggacccug

SEQ ID NO: 35040 - RNA, 19 nt, Artificial Sequence
  Description of Artificial Sequence: Synthetic oligonucleotide
  Sense strand starting at position 2780 of SEQ ID NO: 412
aggugaguuucuuccacau

SEQ ID NO: 35041 - RNA, 19 nt, Artificial Sequence
  Description of Artificial Sequence: Synthetic oligonucleotide
  Antisense strand to SEQ ID NO: 35040
auguggaagaaacucaccu

SEQ ID NO: 35042 - RNA, 19 nt, Artificial Sequence
  Description of Artificial Sequence: Synthetic oligonucleotide
  Sense strand starting at position 2576 of SEQ ID NO: 412
uucugcaaugcagaagaaa

SEQ ID NO: 35043 - RNA, 19 nt, Artificial Sequence
  Description of Artificial Sequence: Synthetic oligonucleotide
  Antisense strand to SEQ ID NO: 35042
uuucuucugcauugcagaa

SEQ ID NO: 35044 - RNA, 19 nt, Artificial Sequence
  Description of Artificial Sequence: Synthetic oligonucleotide
  Sense strand starting at position 2524 of SEQ ID NO: 412
agaagcaagcuauggagaa

SEQ ID NO: 35045 - RNA, 19 nt, Artificial Sequence
  Description of Artificial Sequence: Synthetic oligonucleotide
  Antisense strand to SEQ ID NO: 35044
uucuccauagcuugcuucu

SEQ ID NO: 35046 - RNA, 19 nt, Artificial Sequence
  Description of Artificial Sequence: Synthetic oligonucleotide
  Sense strand starting at position 2112 of SEQ ID NO: 412
ucacaaucaucuguggauu

SEQ ID NO: 35047 - RNA, 19 nt, Artificial Sequence
  Description of Artificial Sequence: Synthetic oligonucleotide
  Antisense strand to SEQ ID NO: 35046
aauccacagaugauuguga

SEQ ID NO: 35048 - RNA, 19 nt, Artificial Sequence
  Description of Artificial Sequence: Synthetic oligonucleotide
  Sense strand starting at position 1747 of SEQ ID NO: 412
gugaauaaauccucuuuga

SEQ ID NO: 35049 - RNA, 19 nt, Artificial Sequence
  Description of Artificial Sequence: Synthetic oligonucleotide
  Antisense strand to SEQ ID NO: 35048
ucaaagaggauuuauucac

SEQ ID NO: 35050 - RNA, 19 nt, Artificial Sequence
  Description of Artificial Sequence: Synthetic oligonucleotide
  Sense strand starting at position 1733 of SEQ ID NO: 412
cuucuacuagcauagugaa

SEQ ID NO: 35051 - RNA, 19 nt, Artificial Sequence
  Description of Artificial Sequence: Synthetic oligonucleotide
  Antisense strand to SEQ ID NO: 35050
uucacuaugcuaguagaag

SEQ ID NO: 35052 - RNA, 19 nt, Artificial Sequence
  Description of Artificial Sequence: Synthetic oligonucleotide
  Sense strand starting at position 1537 of SEQ ID NO: 412
cuuagaaucugucuaauga

SEQ ID NO: 35053 - RNA, 19 nt, Artificial Sequence
  Description of Artificial Sequence: Synthetic oligonucleotide
  Antisense strand to SEQ ID NO: 35052
ucauuagacagauucuaag

SEQ ID NO: 35054 - RNA, 19 nt, Artificial Sequence
  Description of Artificial Sequence: Synthetic oligonucleotide
  Sense strand starting at position 1535 of SEQ ID NO: 412
agcuuagaaucugucuaau

SEQ ID NO: 35055 - RNA, 19 nt, Artificial Sequence
  Description of Artificial Sequence: Synthetic oligonucleotide
  Antisense strand to SEQ ID NO: 35054
auuagacagauucuaagcu

SEQ ID NO: 35056 - RNA, 19 nt, Artificial Sequence
  Description of Artificial Sequence: Synthetic oligonucleotide
  Sense strand starting at position 1501 of SEQ ID NO: 412
uuguauuacguauaggaaa

SEQ ID NO: 35057 - RNA, 19 nt, Artificial Sequence
  Description of Artificial Sequence: Synthetic oligonucleotide
  Antisense strand to SEQ ID NO: 35056
uuuccuauacguaauacaa

SEQ ID NO: 35058 - RNA, 19 nt, Artificial Sequence
  Description of Artificial Sequence: Synthetic oligonucleotide
  Sense strand starting at position 1499 of SEQ ID NO: 412
ccuuguauuacguauagga

SEQ ID NO: 35059 - RNA, 19 nt, Artificial Sequence
  Description of Artificial Sequence: Synthetic oligonucleotide
  Antisense strand to SEQ ID NO: 35058
uccuauacguaauacaagg

SEQ ID NO: 35060 - RNA, 19 nt, Artificial Sequence
  Description of Artificial Sequence: Synthetic oligonucleotide
  Sense strand starting at position 1265 of SEQ ID NO: 412
cuaucuuuccaauguaagu

SEQ ID NO: 35061 - RNA, 19 nt, Artificial Sequence
  Description of Artificial Sequence: Synthetic oligonucleotide
  Antisense strand to SEQ ID NO: 35060
acuuacauuggaaagauag

SEQ ID NO: 35062 - RNA, 19 nt, Artificial Sequence
  Description of Artificial Sequence: Synthetic oligonucleotide
  Sense strand starting at position 1088 of SEQ ID NO: 412
guuaccauauaguucuuua

SEQ ID NO: 35063 - RNA, 19 nt, Artificial Sequence
  Description of Artificial Sequence: Synthetic oligonucleotide
  Antisense strand to SEQ ID NO: 35062
uaaagaacuauaugguaac

SEQ ID NO: 35064 - RNA, 19 nt, Artificial Sequence
  Description of Artificial Sequence: Synthetic oligonucleotide
  Sense strand starting at position 980 of SEQ ID NO: 412
uuggcugaaauaugaaguu

SEQ ID NO: 35065 - RNA, 19 nt, Artificial Sequence
  Description of Artificial Sequence: Synthetic oligonucleotide
  Antisense strand to SEQ ID NO: 35064
aacuucauauuucagccaa

SEQ ID NO: 35066 - RNA, 19 nt, Artificial Sequence
  Description of Artificial Sequence: Synthetic oligonucleotide
  Sense strand starting at position 972 of SEQ ID NO: 412
ccauuacauuggcugaaau

SEQ ID NO: 35067 - RNA, 19 nt, Artificial Sequence
  Description of Artificial Sequence: Synthetic oligonucleotide
  Antisense strand to SEQ ID NO: 35066
auuucagccaauguaaugg

SEQ ID NO: 35068 - RNA, 19 nt, Artificial Sequence
  Description of Artificial Sequence: Synthetic oligonucleotide
  Sense strand starting at position 971 of SEQ ID NO: 412
uccauuacauuggcugaaa

SEQ ID NO: 35069 - RNA, 19 nt, Artificial Sequence
  Description of Artificial Sequence: Synthetic oligonucleotide
  Antisense strand to SEQ ID NO: 35068
uuucagccaauguaaugga

SEQ ID NO: 35070 - RNA, 19 nt, Artificial Sequence
  Description of Artificial Sequence: Synthetic oligonucleotide
  Sense strand starting at position 724 of SEQ ID NO: 412
gaagaaauguaccuguaac

SEQ ID NO: 35071 - RNA, 19 nt, Artificial Sequence
  Description of Artificial Sequence: Synthetic oligonucleotide
  Antisense strand to SEQ ID NO: 35070
guuacagguacauuucuuc

SEQ ID NO: 35072 - RNA, 19 nt, Artificial Sequence
  Description of Artificial Sequence: Synthetic oligonucleotide
  Sense strand starting at position 561 of SEQ ID NO: 412
acuggaauaucagauaaga

SEQ ID NO: 35073 - RNA, 19 nt, Artificial Sequence
  Description of Artificial Sequence: Synthetic oligonucleotide
  Antisense strand to SEQ ID NO: 35072
ucuuaucugauauuccagu

SEQ ID NO: 35074 - RNA, 19 nt, Artificial Sequence
  Description of Artificial Sequence: Synthetic oligonucleotide
  Sense strand starting at position 473 of SEQ ID NO: 412
uugagaaauauaggugcaa

SEQ ID NO: 35075 - RNA, 19 nt, Artificial Sequence
  Description of Artificial Sequence: Synthetic oligonucleotide
  Antisense strand to SEQ ID NO: 35074
uugcaccuauauuucucaa

SEQ ID NO: 35076 - RNA, 19 nt, Artificial Sequence
  Description of Artificial Sequence: Synthetic oligonucleotide
  Sense strand starting at position 420 of SEQ ID NO: 412
agauguuucucucuaccca

SEQ ID NO: 35077 - RNA, 19 nt, Artificial Sequence
  Description of Artificial Sequence: Synthetic oligonucleotide
  Antisense strand to SEQ ID NO: 35076
uggguagagagaaacaucu

SEQ ID NO: 35078 - RNA, 19 nt, Artificial Sequence
  Description of Artificial Sequence: Synthetic oligonucleotide
  Sense strand starting at position 297 of SEQ ID NO: 412
acuuaauuacaucgcuaag

SEQ ID NO: 35079 - RNA, 19 nt, Artificial Sequence
  Description of Artificial Sequence: Synthetic oligonucleotide
  Antisense strand to SEQ ID NO: 35078
cuuagcgauguaauuaagu

SEQ ID NO: 35080 - RNA, 19 nt, Artificial Sequence
  Description of Artificial Sequence: Synthetic oligonucleotide
  Sense strand starting at position 190 of SEQ ID NO: 412
ucucuaugccuugcgugau

SEQ ID NO: 35081 - RNA, 19 nt, Artificial Sequence
  Description of Artificial Sequence: Synthetic oligonucleotide
  Antisense strand to SEQ ID NO: 35080
aucacgcaaggcauagaga

SEQ ID NO: 35082 - RNA, 19 nt, Artificial Sequence
  Description of Artificial Sequence: Synthetic oligonucleotide
  Sense strand starting at position 125 of SEQ ID NO: 412
uauagcugucaacaggauu

SEQ ID NO: 35083 - RNA, 19 nt, Artificial Sequence
  Description of Artificial Sequence: Synthetic oligonucleotide
  Antisense strand to SEQ ID NO: 35082
aauccuguugacagcuaua

SEQ ID NO: 35084 - RNA, 19 nt, Artificial Sequence
  Description of Artificial Sequence: Synthetic oligonucleotide
  Sense strand starting at position 108 of SEQ ID NO: 412
aggcuacuaguuugagaua

SEQ ID NO: 35085 - RNA, 19 nt, Artificial Sequence
  Description of Artificial Sequence: Synthetic oligonucleotide
  Antisense strand to SEQ ID NO: 35084
uaucucaaacuaguagccu

SEQ ID NO: 35086 - RNA, 19 nt, Artificial Sequence
  Description of Artificial Sequence: Synthetic oligonucleotide
  Sense strand starting at position 106 of SEQ ID NO: 412
ggaggcuacuaguuugaga

SEQ ID NO: 35087 - RNA, 19 nt, Artificial Sequence
  Description of Artificial Sequence: Synthetic oligonucleotide
  Antisense strand to SEQ ID NO: 35086
ucucaaacuaguagccucc

SEQ ID NO: 35088 - RNA, 19 nt, Artificial Sequence
  Description of Artificial Sequence: Synthetic oligonucleotide
  Sense strand starting at position 3859 of SEQ ID NO: 413
gcuaaauuguaguugagac

SEQ ID NO: 35089 - RNA, 19 nt, Artificial Sequence
  Description of Artificial Sequence: Synthetic oligonucleotide
  Antisense strand to SEQ ID NO: 35088
gucucaacuacaauuuagc

SEQ ID NO: 35090 - RNA, 19 nt, Artificial Sequence
  Description of Artificial Sequence: Synthetic oligonucleotide
  Sense strand starting at position 3794 of SEQ ID NO: 413
ucacuacagguguauauua

SEQ ID NO: 35091 - RNA, 19 nt, Artificial Sequence
  Description of Artificial Sequence: Synthetic oligonucleotide
  Antisense strand to SEQ ID NO: 35090
uaauauacaccuguaguga

SEQ ID NO: 35092 - RNA, 19 nt, Artificial Sequence
  Description of Artificial Sequence: Synthetic oligonucleotide
  Sense strand starting at position 3792 of SEQ ID NO: 413
ggucacuacagguguauau

SEQ ID NO: 35093 - RNA, 19 nt, Artificial Sequence
  Description of Artificial Sequence: Synthetic oligonucleotide
  Antisense strand to SEQ ID NO: 35092
auauacaccuguagugacc

SEQ ID NO: 35094 - RNA, 19 nt, Artificial Sequence
  Description of Artificial Sequence: Synthetic oligonucleotide
  Sense strand starting at position 3296 of SEQ ID NO: 413
ggaaaucccgcccaguaaa

SEQ ID NO: 35095 - RNA, 19 nt, Artificial Sequence
  Description of Artificial Sequence: Synthetic oligonucleotide
  Antisense strand to SEQ ID NO: 35094
uuuacugggcgggauuucc

SEQ ID NO: 35096 - RNA, 19 nt, Artificial Sequence
  Description of Artificial Sequence: Synthetic oligonucleotide
  Sense strand starting at position 3068 of SEQ ID NO: 413
gccugagagcugggaagaa

SEQ ID NO: 35097 - RNA, 19 nt, Artificial Sequence
  Description of Artificial Sequence: Synthetic oligonucleotide
  Antisense strand to SEQ ID NO: 35096
uucuucccagcucucaggc

SEQ ID NO: 35098 - RNA, 19 nt, Artificial Sequence
  Description of Artificial Sequence: Synthetic oligonucleotide
  Sense strand starting at position 2840 of SEQ ID NO: 413
auuuaaggaucguaugaaa

SEQ ID NO: 35099 - RNA, 19 nt, Artificial Sequence
  Description of Artificial Sequence: Synthetic oligonucleotide
  Antisense strand to SEQ ID NO: 35098
uuucauacgauccuuaaau

SEQ ID NO: 35100 - RNA, 19 nt, Artificial Sequence
  Description of Artificial Sequence: Synthetic oligonucleotide
  Sense strand starting at position 2784 of SEQ ID NO: 413
gguccauguuacuuuaaua

SEQ ID NO: 35101 - RNA, 19 nt, Artificial Sequence
  Description of Artificial Sequence: Synthetic oligonucleotide
  Antisense strand to SEQ ID NO: 35100
uauuaaaguaacauggacc

SEQ ID NO: 35102 - RNA, 19 nt, Artificial Sequence
  Description of Artificial Sequence: Synthetic oligonucleotide
  Sense strand starting at position 2783 of SEQ ID NO: 413
ggguccauguuacuuuaau

SEQ ID NO: 35103 - RNA, 19 nt, Artificial Sequence
  Description of Artificial Sequence: Synthetic oligonucleotide
  Antisense strand to SEQ ID NO: 35102
auuaaaguaacauggaccc

SEQ ID NO: 35104 - RNA, 19 nt, Artificial Sequence
  Description of Artificial Sequence: Synthetic oligonucleotide
  Sense strand starting at position 2735 of SEQ ID NO: 413
guuugaaguucuuccacaa

SEQ ID NO: 35105 - RNA, 19 nt, Artificial Sequence
  Description of Artificial Sequence: Synthetic oligonucleotide
  Antisense strand to SEQ ID NO: 35104
uuguggaagaacuucaaac

SEQ ID NO: 35106 - RNA, 19 nt, Artificial Sequence
  Description of Artificial Sequence: Synthetic oligonucleotide
  Sense strand starting at position 2518 of SEQ ID NO: 413
acuuaucuucugcaaugga

SEQ ID NO: 35107 - RNA, 19 nt, Artificial Sequence
  Description of Artificial Sequence: Synthetic oligonucleotide
  Antisense strand to SEQ ID NO: 35106
uccauugcagaagauaagu

SEQ ID NO: 35108 - RNA, 19 nt, Artificial Sequence
  Description of Artificial Sequence: Synthetic oligonucleotide
  Sense strand starting at position 2403 of SEQ ID NO: 413
gacagauaaugccuugucu

SEQ ID NO: 35109 - RNA, 19 nt, Artificial Sequence
  Description of Artificial Sequence: Synthetic oligonucleotide
  Antisense strand to SEQ ID NO: 35108
agacaaggcauuaucuguc

SEQ ID NO: 35110 - RNA, 19 nt, Artificial Sequence
  Description of Artificial Sequence: Synthetic oligonucleotide
  Sense strand starting at position 2326 of SEQ ID NO: 413
aguggauguuucucaggaa

SEQ ID NO: 35111 - RNA, 19 nt, Artificial Sequence
  Description of Artificial Sequence: Synthetic oligonucleotide
  Antisense strand to SEQ ID NO: 35110
uuccugagaaacauccacu

SEQ ID NO: 35112 - RNA, 19 nt, Artificial Sequence
  Description of Artificial Sequence: Synthetic oligonucleotide
  Sense strand starting at position 2305 of SEQ ID NO: 413
acuaauuauccauggugcu

SEQ ID NO: 35113 - RNA, 19 nt, Artificial Sequence
  Description of Artificial Sequence: Synthetic oligonucleotide
  Antisense strand to SEQ ID NO: 35112
agcaccauggauaauuagu

SEQ ID NO: 35114 - RNA, 19 nt, Artificial Sequence
  Description of Artificial Sequence: Synthetic oligonucleotide
  Sense strand starting at position 2077 of SEQ ID NO: 413
aauugauucccugguaugu

SEQ ID NO: 35115 - RNA, 19 nt, Artificial Sequence
  Description of Artificial Sequence: Synthetic oligonucleotide
  Antisense strand to SEQ ID NO: 35114
acauaccagggaaucaauu

SEQ ID NO: 35116 - RNA, 19 nt, Artificial Sequence
  Description of Artificial Sequence: Synthetic oligonucleotide
  Sense strand starting at position 2075 of SEQ ID NO: 413
ggaauugauucccugguau

SEQ ID NO: 35117 - RNA, 19 nt, Artificial Sequence
  Description of Artificial Sequence: Synthetic oligonucleotide
  Antisense strand to SEQ ID NO: 35116
auaccagggaaucaauucc

SEQ ID NO: 35118 - RNA, 19 nt, Artificial Sequence
  Description of Artificial Sequence: Synthetic oligonucleotide
  Sense strand starting at position 2074 of SEQ ID NO: 413
uggaauugauucccuggua

SEQ ID NO: 35119 - RNA, 19 nt, Artificial Sequence
  Description of Artificial Sequence: Synthetic oligonucleotide
  Antisense strand to SEQ ID NO: 35118
uaccagggaaucaauucca

SEQ ID NO: 35120 - RNA, 19 nt, Artificial Sequence
  Description of Artificial Sequence: Synthetic oligonucleotide
  Sense strand starting at position 2040 of SEQ ID NO: 413
caaugauucuuguuagugg

SEQ ID NO: 35121 - RNA, 19 nt, Artificial Sequence
  Description of Artificial Sequence: Synthetic oligonucleotide
  Antisense strand to SEQ ID NO: 35120
ccacuaacaagaaucauug

SEQ ID NO: 35122 - RNA, 19 nt, Artificial Sequence
  Description of Artificial Sequence: Synthetic oligonucleotide
  Sense strand starting at position 1987 of SEQ ID NO: 413
gcuuuaaggucacuuagua

SEQ ID NO: 35123 - RNA, 19 nt, Artificial Sequence
  Description of Artificial Sequence: Synthetic oligonucleotide
  Antisense strand to SEQ ID NO: 35122
uacuaagugaccuuaaagc

SEQ ID NO: 35124 - RNA, 19 nt, Artificial Sequence
  Description of Artificial Sequence: Synthetic oligonucleotide
  Sense strand starting at position 1490 of SEQ ID NO: 413
guuagaaucuaucuaauga

SEQ ID NO: 35125 - RNA, 19 nt, Artificial Sequence
  Description of Artificial Sequence: Synthetic oligonucleotide
  Antisense strand to SEQ ID NO: 35124
ucauuagauagauucuaac

SEQ ID NO: 35126 - RNA, 19 nt, Artificial Sequence
  Description of Artificial Sequence: Synthetic oligonucleotide
  Sense strand starting at position 1441 of SEQ ID NO: 413
cccaaaguuucccuuguau

SEQ ID NO: 35127 - RNA, 19 nt, Artificial Sequence
  Description of Artificial Sequence: Synthetic oligonucleotide
  Antisense strand to SEQ ID NO: 35126
auacaagggaaacuuuggg

SEQ ID NO: 35128 - RNA, 19 nt, Artificial Sequence
  Description of Artificial Sequence: Synthetic oligonucleotide
  Sense strand starting at position 1440 of SEQ ID NO: 413
ucccaaaguuucccuugua

SEQ ID NO: 35129 - RNA, 19 nt, Artificial Sequence
  Description of Artificial Sequence: Synthetic oligonucleotide
  Antisense strand to SEQ ID NO: 35128
uacaagggaaacuuuggga

SEQ ID NO: 35130 - RNA, 19 nt, Artificial Sequence
  Description of Artificial Sequence: Synthetic oligonucleotide
  Sense strand starting at position 1205 of SEQ ID NO: 413
auuccaauguaaguuaagu

SEQ ID NO: 35131 - RNA, 19 nt, Artificial Sequence
  Description of Artificial Sequence: Synthetic oligonucleotide
  Antisense strand to SEQ ID NO: 35130
acuuaacuuacauuggaau

SEQ ID NO: 35132 - RNA, 19 nt, Artificial Sequence
  Description of Artificial Sequence: Synthetic oligonucleotide
  Sense strand starting at position 970 of SEQ ID NO: 413
accuuugauuguccaugau

SEQ ID NO: 35133 - RNA, 19 nt, Artificial Sequence
  Description of Artificial Sequence: Synthetic oligonucleotide
  Antisense strand to SEQ ID NO: 35132
aucauggacaaucaaaggu

SEQ ID NO: 35134 - RNA, 19 nt, Artificial Sequence
  Description of Artificial Sequence: Synthetic oligonucleotide
  Sense strand starting at position 963 of SEQ ID NO: 413
gugacacaccuuugauugu

SEQ ID NO: 35135 - RNA, 19 nt, Artificial Sequence
  Description of Artificial Sequence: Synthetic oligonucleotide
  Antisense strand to SEQ ID NO: 35134
acaaucaaaggugugucac

SEQ ID NO: 35136 - RNA, 19 nt, Artificial Sequence
  Description of Artificial Sequence: Synthetic oligonucleotide
  Sense strand starting at position 721 of SEQ ID NO: 413
ggcacaaaucaagguugau

SEQ ID NO: 35137 - RNA, 19 nt, Artificial Sequence
  Description of Artificial Sequence: Synthetic oligonucleotide
  Antisense strand to SEQ ID NO: 35136
aucaaccuugauuugugcc

SEQ ID NO: 35138 - RNA, 19 nt, Artificial Sequence
  Description of Artificial Sequence: Synthetic oligonucleotide
  Sense strand starting at position 666 of SEQ ID NO: 413
guagcaguuuaguuaacaa

SEQ ID NO: 35139 - RNA, 19 nt, Artificial Sequence
  Description of Artificial Sequence: Synthetic oligonucleotide
  Antisense strand to SEQ ID NO: 35138
uuguuaacuaaacugcuac

SEQ ID NO: 35140 - RNA, 19 nt, Artificial Sequence
  Description of Artificial Sequence: Synthetic oligonucleotide
  Sense strand starting at position 663 of SEQ ID NO: 413
ccuguagcaguuuaguuaa

SEQ ID NO: 35141 - RNA, 19 nt, Artificial Sequence
  Description of Artificial Sequence: Synthetic oligonucleotide
  Antisense strand to SEQ ID NO: 35140
uuaacuaaacugcuacagg

SEQ ID NO: 35142 - RNA, 19 nt, Artificial Sequence
  Description of Artificial Sequence: Synthetic oligonucleotide
  Sense strand starting at position 662 of SEQ ID NO: 413
gccuguagcaguuuaguua

SEQ ID NO: 35143 - RNA, 19 nt, Artificial Sequence
  Description of Artificial Sequence: Synthetic oligonucleotide
  Antisense strand to SEQ ID NO: 35142
uaacuaaacugcuacaggc

SEQ ID NO: 35144 - RNA, 19 nt, Artificial Sequence
  Description of Artificial Sequence: Synthetic oligonucleotide
  Sense strand starting at position 551 of SEQ ID NO: 413
aguagagcuuauucuaauc

SEQ ID NO: 35145 - RNA, 19 nt, Artificial Sequence
  Description of Artificial Sequence: Synthetic oligonucleotide
  Antisense strand to SEQ ID NO: 35144
gauuagaauaagcucuacu

SEQ ID NO: 35146 - RNA, 19 nt, Artificial Sequence
  Description of Artificial Sequence: Synthetic oligonucleotide
  Sense strand starting at position 548 of SEQ ID NO: 413
gaaaguagagcuuauucua

SEQ ID NO: 35147 - RNA, 19 nt, Artificial Sequence
  Description of Artificial Sequence: Synthetic oligonucleotide
  Antisense strand to SEQ ID NO: 35146
uagaauaagcucuacuuuc

SEQ ID NO: 35148 - RNA, 19 nt, Artificial Sequence
  Description of Artificial Sequence: Synthetic oligonucleotide
  Sense strand starting at position 496 of SEQ ID NO: 413
gaaagaauuugucagcauu

SEQ ID NO: 35149 - RNA, 19 nt, Artificial Sequence
  Description of Artificial Sequence: Synthetic oligonucleotide
  Antisense strand to SEQ ID NO: 35148
aaugcugacaaauucuuuc

SEQ ID NO: 35150 - RNA, 19 nt, Artificial Sequence
  Description of Artificial Sequence: Synthetic oligonucleotide
  Sense strand starting at position 395 of SEQ ID NO: 413
gaaauauaggugugaccca

SEQ ID NO: 35151 - RNA, 19 nt, Artificial Sequence
  Description of Artificial Sequence: Synthetic oligonucleotide
  Antisense strand to SEQ ID NO: 35150
ugggucacaccuauauuuc

SEQ ID NO: 35152 - RNA, 19 nt, Artificial Sequence
  Description of Artificial Sequence: Synthetic oligonucleotide
  Sense strand starting at position 393 of SEQ ID NO: 413
gagaaauauaggugugacc

SEQ ID NO: 35153 - RNA, 19 nt, Artificial Sequence
  Description of Artificial Sequence: Synthetic oligonucleotide
  Antisense strand to SEQ ID NO: 35152
ggucacaccuauauuucuc

SEQ ID NO: 35154 - RNA, 19 nt, Artificial Sequence
  Description of Artificial Sequence: Synthetic oligonucleotide
  Sense strand starting at position 391 of SEQ ID NO: 413
uugagaaauauagguguga

SEQ ID NO: 35155 - RNA, 19 nt, Artificial Sequence
  Description of Artificial Sequence: Synthetic oligonucleotide
  Antisense strand to SEQ ID NO: 35154
ucacaccuauauuucucaa

SEQ ID NO: 35156 - RNA, 19 nt, Artificial Sequence
  Description of Artificial Sequence: Synthetic oligonucleotide
  Sense strand starting at position 338 of SEQ ID NO: 413
agauguuucucacuaccca

SEQ ID NO: 35157 - RNA, 19 nt, Artificial Sequence
  Description of Artificial Sequence: Synthetic oligonucleotide
  Antisense strand to SEQ ID NO: 35156
uggguagugagaaacaucu

SEQ ID NO: 35158 - RNA, 19 nt, Artificial Sequence
  Description of Artificial Sequence: Synthetic oligonucleotide
  Sense strand starting at position 161 of SEQ ID NO: 413
ucuuauugacaccaguuau

SEQ ID NO: 35159 - RNA, 19 nt, Artificial Sequence
  Description of Artificial Sequence: Synthetic oligonucleotide
  Antisense strand to SEQ ID NO: 35158
auaacuggugucaauaaga

SEQ ID NO: 35160 - RNA, 19 nt, Artificial Sequence
  Description of Artificial Sequence: Synthetic oligonucleotide
  Sense strand starting at position 98 of SEQ ID NO: 413
augguuguauucucucuau

SEQ ID NO: 35161 - RNA, 19 nt, Artificial Sequence
  Description of Artificial Sequence: Synthetic oligonucleotide
  Antisense strand to SEQ ID NO: 35160
auagagagaauacaaccau

SEQ ID NO: 35162 - RNA, 19 nt, Artificial Sequence
  Description of Artificial Sequence: Synthetic oligonucleotide
  Sense strand starting at position 39 of SEQ ID NO: 413
uugagauguggcugucaac

SEQ ID NO: 35163 - RNA, 19 nt, Artificial Sequence
  Description of Artificial Sequence: Synthetic oligonucleotide
  Antisense strand to SEQ ID NO: 35162
guugacagccacaucucaa

SEQ ID NO: 35164 - RNA, 19 nt, Artificial Sequence
  Description of Artificial Sequence: Synthetic oligonucleotide
  Sense strand starting at position 28 of SEQ ID NO: 413
aggcuaauacuuugagaug

SEQ ID NO: 35165 - RNA, 19 nt, Artificial Sequence
  Description of Artificial Sequence: Synthetic oligonucleotide
  Antisense strand to SEQ ID NO: 35164
caucucaaaguauuagccu

SEQ ID NO: 35166 - RNA, 19 nt, Artificial Sequence
  Description of Artificial Sequence: Synthetic oligonucleotide
  Sense strand starting at position 26 of SEQ ID NO: 413
ggaggcuaauacuuugaga

SEQ ID NO: 35167 - RNA, 19 nt, Artificial Sequence
  Description of Artificial Sequence: Synthetic oligonucleotide
  Antisense strand to SEQ ID NO: 35166
ucucaaaguauuagccucc

SEQ ID NO: 35168 - RNA, 19 nt, Artificial Sequence
  Description of Artificial Sequence: Synthetic oligonucleotide
  Sense strand starting at position 3593 of SEQ ID NO: 414
auuagauuccauggcucau

SEQ ID NO: 35169 - RNA, 19 nt, Artificial Sequence
  Description of Artificial Sequence: Synthetic oligonucleotide
  Antisense strand to SEQ ID NO: 35168
augagccauggaaucuaau

SEQ ID NO: 35170 - RNA, 19 nt, Artificial Sequence
  Description of Artificial Sequence: Synthetic oligonucleotide
  Sense strand starting at position 3379 of SEQ ID NO: 414
aguagucuccacuauugau

SEQ ID NO: 35171 - RNA, 19 nt, Artificial Sequence
  Description of Artificial Sequence: Synthetic oligonucleotide
  Antisense strand to SEQ ID NO: 35170
aucaauaguggagacuacu

SEQ ID NO: 35172 - RNA, 19 nt, Artificial Sequence
  Description of Artificial Sequence: Synthetic oligonucleotide
  Sense strand starting at position 3322 of SEQ ID NO: 414
ugggaaugcacauagcuau

SEQ ID NO: 35173 - RNA, 19 nt, Artificial Sequence
  Description of Artificial Sequence: Synthetic oligonucleotide
  Antisense strand to SEQ ID NO: 35172
auagcuaugugcauuccca

SEQ ID NO: 35174 - RNA, 19 nt, Artificial Sequence
  Description of Artificial Sequence: Synthetic oligonucleotide
  Sense strand starting at position 3289 of SEQ ID NO: 414
gaggaaacuuacuuauggu

SEQ ID NO: 35175 - RNA, 19 nt, Artificial Sequence
  Description of Artificial Sequence: Synthetic oligonucleotide
  Antisense strand to SEQ ID NO: 35174
accauaaguaaguuuccuc

SEQ ID NO: 35176 - RNA, 19 nt, Artificial Sequence
  Description of Artificial Sequence: Synthetic oligonucleotide
  Sense strand starting at position 3170 of SEQ ID NO: 414
gggaaacaaucagagaaga

SEQ ID NO: 35177 - RNA, 19 nt, Artificial Sequence
  Description of Artificial Sequence: Synthetic oligonucleotide
  Antisense strand to SEQ ID NO: 35176
ucuucucugauuguuuccc

SEQ ID NO: 35178 - RNA, 19 nt, Artificial Sequence
  Description of Artificial Sequence: Synthetic oligonucleotide
  Sense strand starting at position 3109 of SEQ ID NO: 414
gacuuuauagcuuggaaag

SEQ ID NO: 35179 - RNA, 19 nt, Artificial Sequence
  Description of Artificial Sequence: Synthetic oligonucleotide
  Antisense strand to SEQ ID NO: 35178
cuuuccaagcuauaaaguc

SEQ ID NO: 35180 - RNA, 19 nt, Artificial Sequence
  Description of Artificial Sequence: Synthetic oligonucleotide
  Sense strand starting at position 3107 of SEQ ID NO: 414
gugacuuuauagcuuggaa

SEQ ID NO: 35181 - RNA, 19 nt, Artificial Sequence
  Description of Artificial Sequence: Synthetic oligonucleotide
  Antisense strand to SEQ ID NO: 35180
uuccaagcuauaaagucac

SEQ ID NO: 35182 - RNA, 19 nt, Artificial Sequence
  Description of Artificial Sequence: Synthetic oligonucleotide
  Sense strand starting at position 2933 of SEQ ID NO: 414
cagcauaauguugggaaau

SEQ ID NO: 35183 - RNA, 19 nt, Artificial Sequence
  Description of Artificial Sequence: Synthetic oligonucleotide
  Antisense strand to SEQ ID NO: 35182
auuucccaacauuaugcug

SEQ ID NO: 35184 - RNA, 19 nt, Artificial Sequence
  Description of Artificial Sequence: Synthetic oligonucleotide
  Sense strand starting at position 2926 of SEQ ID NO: 414
ggccaaacagcauaauguu

SEQ ID NO: 35185 - RNA, 19 nt, Artificial Sequence
  Description of Artificial Sequence: Synthetic oligonucleotide
  Antisense strand to SEQ ID NO: 35184
aacauuaugcuguuuggcc

SEQ ID NO: 35186 - RNA, 19 nt, Artificial Sequence
  Description of Artificial Sequence: Synthetic oligonucleotide
  Sense strand starting at position 2916 of SEQ ID NO: 414
ucuggaaauuggccaaaca

SEQ ID NO: 35187 - RNA, 19 nt, Artificial Sequence
  Description of Artificial Sequence: Synthetic oligonucleotide
  Antisense strand to SEQ ID NO: 35186
uguuuggccaauuuccaga

SEQ ID NO: 35188 - RNA, 19 nt, Artificial Sequence
  Description of Artificial Sequence: Synthetic oligonucleotide
  Sense strand starting at position 2906 of SEQ ID NO: 414
auugguugucucuggaaau

SEQ ID NO: 35189 - RNA, 19 nt, Artificial Sequence
  Description of Artificial Sequence: Synthetic oligonucleotide
  Antisense strand to SEQ ID NO: 35188
auuuccagagacaaccaau

SEQ ID NO: 35190 - RNA, 19 nt, Artificial Sequence
  Description of Artificial Sequence: Synthetic oligonucleotide
  Sense strand starting at position 2816 of SEQ ID NO: 414
ggacuucgagaauggcuau

SEQ ID NO: 35191 - RNA, 19 nt, Artificial Sequence
  Description of Artificial Sequence: Synthetic oligonucleotide
  Antisense strand to SEQ ID NO: 35190
auagccauucucgaagucc

SEQ ID NO: 35192 - RNA, 19 nt, Artificial Sequence
  Description of Artificial Sequence: Synthetic oligonucleotide
  Sense strand starting at position 2753 of SEQ ID NO: 414
aaguaacguuuccugaaau

SEQ ID NO: 35193 - RNA, 19 nt, Artificial Sequence
  Description of Artificial Sequence: Synthetic oligonucleotide
  Antisense strand to SEQ ID NO: 35192
auuucaggaaacguuacuu

SEQ ID NO: 35194 - RNA, 19 nt, Artificial Sequence
  Description of Artificial Sequence: Synthetic oligonucleotide
  Sense strand starting at position 2752 of SEQ ID NO: 414
caaguaacguuuccugaaa

SEQ ID NO: 35195 - RNA, 19 nt, Artificial Sequence
  Description of Artificial Sequence: Synthetic oligonucleotide
  Antisense strand to SEQ ID NO: 35194
uuucaggaaacguuacuug

SEQ ID NO: 35196 - RNA, 19 nt, Artificial Sequence
  Description of Artificial Sequence: Synthetic oligonucleotide
  Sense strand starting at position 2359 of SEQ ID NO: 414
agaauuagguaccuucuua

SEQ ID NO: 35197 - RNA, 19 nt, Artificial Sequence
  Description of Artificial Sequence: Synthetic oligonucleotide
  Antisense strand to SEQ ID NO: 35196
uaagaagguaccuaauucu

SEQ ID NO: 35198 - RNA, 19 nt, Artificial Sequence
  Description of Artificial Sequence: Synthetic oligonucleotide
  Sense strand starting at position 2288 of SEQ ID NO: 414
gucaucaguccucaucuua

SEQ ID NO: 35199 - RNA, 19 nt, Artificial Sequence
  Description of Artificial Sequence: Synthetic oligonucleotide
  Antisense strand to SEQ ID NO: 35198
uaagaugaggacugaugac

SEQ ID NO: 35200 - RNA, 19 nt, Artificial Sequence
  Description of Artificial Sequence: Synthetic oligonucleotide
  Sense strand starting at position 2177 of SEQ ID NO: 414
ucagaaauggacuguuuag

SEQ ID NO: 35201 - RNA, 19 nt, Artificial Sequence
  Description of Artificial Sequence: Synthetic oligonucleotide
  Antisense strand to SEQ ID NO: 35200
cuaaacaguccauuucuga

SEQ ID NO: 35202 - RNA, 19 nt, Artificial Sequence
  Description of Artificial Sequence: Synthetic oligonucleotide
  Sense strand starting at position 2157 of SEQ ID NO: 414
agucucugaguuuggaaca

SEQ ID NO: 35203 - RNA, 19 nt, Artificial Sequence
  Description of Artificial Sequence: Synthetic oligonucleotide
  Antisense strand to SEQ ID NO: 35202
uguuccaaacucagagacu

SEQ ID NO: 35204 - RNA, 19 nt, Artificial Sequence
  Description of Artificial Sequence: Synthetic oligonucleotide
  Sense strand starting at position 2133 of SEQ ID NO: 414
ucaauuuccuuguuguagu

SEQ ID NO: 35205 - RNA, 19 nt, Artificial Sequence
  Description of Artificial Sequence: Synthetic oligonucleotide
  Antisense strand to SEQ ID NO: 35204
acuacaacaaggaaauuga

SEQ ID NO: 35206 - RNA, 19 nt, Artificial Sequence
  Description of Artificial Sequence: Synthetic oligonucleotide
  Sense strand starting at position 2037 of SEQ ID NO: 414
gguugugugaaauaagcaa

SEQ ID NO: 35207 - RNA, 19 nt, Artificial Sequence
  Description of Artificial Sequence: Synthetic oligonucleotide
  Antisense strand to SEQ ID NO: 35206
uugcuuauuucacacaacc

SEQ ID NO: 35208 - RNA, 19 nt, Artificial Sequence
  Description of Artificial Sequence: Synthetic oligonucleotide
  Sense strand starting at position 1494 of SEQ ID NO: 414
agaguuuaugcagaauuac

SEQ ID NO: 35209 - RNA, 19 nt, Artificial Sequence
  Description of Artificial Sequence: Synthetic oligonucleotide
  Antisense strand to SEQ ID NO: 35208
guaauucugcauaaacucu

SEQ ID NO: 35210 - RNA, 19 nt, Artificial Sequence
  Description of Artificial Sequence: Synthetic oligonucleotide
  Sense strand starting at position 1352 of SEQ ID NO: 414
ugauaauuaggcugaaaug

SEQ ID NO: 35211 - RNA, 19 nt, Artificial Sequence
  Description of Artificial Sequence: Synthetic oligonucleotide
  Antisense strand to SEQ ID NO: 35210
cauuucagccuaauuauca

SEQ ID NO: 35212 - RNA, 19 nt, Artificial Sequence
  Description of Artificial Sequence: Synthetic oligonucleotide
  Sense strand starting at position 1340 of SEQ ID NO: 414
uucccuguugaaugauaau

SEQ ID NO: 35213 - RNA, 19 nt, Artificial Sequence
  Description of Artificial Sequence: Synthetic oligonucleotide
  Antisense strand to SEQ ID NO: 35212
auuaucauucaacagggaa

SEQ ID NO: 35214 - RNA, 19 nt, Artificial Sequence
  Description of Artificial Sequence: Synthetic oligonucleotide
  Sense strand starting at position 1106 of SEQ ID NO: 414
uagaccuuguuagagauuu

SEQ ID NO: 35215 - RNA, 19 nt, Artificial Sequence
  Description of Artificial Sequence: Synthetic oligonucleotide
  Antisense strand to SEQ ID NO: 35214
aaaucucuaacaaggucua

SEQ ID NO: 35216 - RNA, 19 nt, Artificial Sequence
  Description of Artificial Sequence: Synthetic oligonucleotide
  Sense strand starting at position 1088 of SEQ ID NO: 414
auaguuuaaucaguauccu

SEQ ID NO: 35217 - RNA, 19 nt, Artificial Sequence
  Description of Artificial Sequence: Synthetic oligonucleotide
  Antisense strand to SEQ ID NO: 35216
aggauacugauuaaacuau

SEQ ID NO: 35218 - RNA, 19 nt, Artificial Sequence
  Description of Artificial Sequence: Synthetic oligonucleotide
  Sense strand starting at position 900 of SEQ ID NO: 414
uuuguaagggcauaucuua

SEQ ID NO: 35219 - RNA, 19 nt, Artificial Sequence
  Description of Artificial Sequence: Synthetic oligonucleotide
  Antisense strand to SEQ ID NO: 35218
uaagauaugcccuuacaaa

SEQ ID NO: 35220 - RNA, 19 nt, Artificial Sequence
  Description of Artificial Sequence: Synthetic oligonucleotide
  Sense strand starting at position 824 of SEQ ID NO: 414
gugauuauagcucaguacu

SEQ ID NO: 35221 - RNA, 19 nt, Artificial Sequence
  Description of Artificial Sequence: Synthetic oligonucleotide
  Antisense strand to SEQ ID NO: 35220
aguacugagcuauaaucac

SEQ ID NO: 35222 - RNA, 19 nt, Artificial Sequence
  Description of Artificial Sequence: Synthetic oligonucleotide
  Sense strand starting at position 742 of SEQ ID NO: 414
guaacagauguuuaagcca

SEQ ID NO: 35223 - RNA, 19 nt, Artificial Sequence
  Description of Artificial Sequence: Synthetic oligonucleotide
  Antisense strand to SEQ ID NO: 35222
uggcuuaaacaucuguuac

SEQ ID NO: 35224 - RNA, 19 nt, Artificial Sequence
  Description of Artificial Sequence: Synthetic oligonucleotide
  Sense strand starting at position 715 of SEQ ID NO: 414
uuuagaaauccuuguguaa

SEQ ID NO: 35225 - RNA, 19 nt, Artificial Sequence
  Description of Artificial Sequence: Synthetic oligonucleotide
  Antisense strand to SEQ ID NO: 35224
uuacacaaggauuucuaaa

SEQ ID NO: 35226 - RNA, 19 nt, Artificial Sequence
  Description of Artificial Sequence: Synthetic oligonucleotide
  Sense strand starting at position 618 of SEQ ID NO: 414
uggacugaagcuugaaagu

SEQ ID NO: 35227 - RNA, 19 nt, Artificial Sequence
  Description of Artificial Sequence: Synthetic oligonucleotide
  Antisense strand to SEQ ID NO: 35226
acuuucaagcuucagucca

SEQ ID NO: 35228 - RNA, 19 nt, Artificial Sequence
  Description of Artificial Sequence: Synthetic oligonucleotide
  Sense strand starting at position 601 of SEQ ID NO: 414
aaaguuuauccugggacug

SEQ ID NO: 35229 - RNA, 19 nt, Artificial Sequence
  Description of Artificial Sequence: Synthetic oligonucleotide
  Antisense strand to SEQ ID NO: 35228
cagucccaggauaaacuuu

SEQ ID NO: 35230 - RNA, 19 nt, Artificial Sequence
  Description of Artificial Sequence: Synthetic oligonucleotide
  Sense strand starting at position 505 of SEQ ID NO: 414
gcuguuuggccaguuucua

SEQ ID NO: 35231 - RNA, 19 nt, Artificial Sequence
  Description of Artificial Sequence: Synthetic oligonucleotide
  Antisense strand to SEQ ID NO: 35230
uagaaacuggccaaacagc

SEQ ID NO: 35232 - RNA, 19 nt, Artificial Sequence
  Description of Artificial Sequence: Synthetic oligonucleotide
  Sense strand starting at position 482 of SEQ ID NO: 414
uguugcuuucgucuguuau

SEQ ID NO: 35233 - RNA, 19 nt, Artificial Sequence
  Description of Artificial Sequence: Synthetic oligonucleotide
  Antisense strand to SEQ ID NO: 35232
auaacagacgaaagcaaca

SEQ ID NO: 35234 - RNA, 19 nt, Artificial Sequence
  Description of Artificial Sequence: Synthetic oligonucleotide
  Sense strand starting at position 369 of SEQ ID NO: 414
guggguggcguugucauau

SEQ ID NO: 35235 - RNA, 19 nt, Artificial Sequence
  Description of Artificial Sequence: Synthetic oligonucleotide
  Antisense strand to SEQ ID NO: 35234
auaugacaacgccacccac

SEQ ID NO: 35236 - RNA, 19 nt, Artificial Sequence
  Description of Artificial Sequence: Synthetic oligonucleotide
  Sense strand starting at position 345 of SEQ ID NO: 414
ggacacucuaaguaguagu

SEQ ID NO: 35237 - RNA, 19 nt, Artificial Sequence
  Description of Artificial Sequence: Synthetic oligonucleotide
  Antisense strand to SEQ ID NO: 35236
acuacuacuuagagugucc

SEQ ID NO: 35238 - RNA, 19 nt, Artificial Sequence
  Description of Artificial Sequence: Synthetic oligonucleotide
  Sense strand starting at position 189 of SEQ ID NO: 414
cgaaauugccuauagacac

SEQ ID NO: 35239 - RNA, 19 nt, Artificial Sequence
  Description of Artificial Sequence: Synthetic oligonucleotide
  Antisense strand to SEQ ID NO: 35238
gugucuauaggcaauuucg

SEQ ID NO: 35240 - RNA, 19 nt, Artificial Sequence
  Description of Artificial Sequence: Synthetic oligonucleotide
  Sense strand starting at position 187 of SEQ ID NO: 414
gacgaaauugccuauagac

SEQ ID NO: 35241 - RNA, 19 nt, Artificial Sequence
  Description of Artificial Sequence: Synthetic oligonucleotide
  Antisense strand to SEQ ID NO: 35240
gucuauaggcaauuucguc

SEQ ID NO: 35242 - RNA, 19 nt, Artificial Sequence
  Description of Artificial Sequence: Synthetic oligonucleotide
  Sense strand starting at position 186 of SEQ ID NO: 414
ggacgaaauugccuauaga

SEQ ID NO: 35243 - RNA, 19 nt, Artificial Sequence
  Description of Artificial Sequence: Synthetic oligonucleotide
  Antisense strand to SEQ ID NO: 35242
ucuauaggcaauuucgucc

SEQ ID NO: 35244 - RNA, 19 nt, Artificial Sequence
  Description of Artificial Sequence: Synthetic oligonucleotide
  Sense strand starting at position 130 of SEQ ID NO: 414
gguaguaggcuauacaauc

SEQ ID NO: 35245 - RNA, 19 nt, Artificial Sequence
  Description of Artificial Sequence: Synthetic oligonucleotide
  Antisense strand to SEQ ID NO: 35244
gauuguauagccuacuacc

SEQ ID NO: 35246 - RNA, 19 nt, Artificial Sequence
  Description of Artificial Sequence: Synthetic oligonucleotide
  Sense strand starting at position 128 of SEQ ID NO: 414
uagguaguaggcuauacaa

SEQ ID NO: 35247 - RNA, 19 nt, Artificial Sequence
  Description of Artificial Sequence: Synthetic oligonucleotide
  Antisense strand to SEQ ID NO: 35246
uuguauagccuacuaccua

SEQ ID NO: 35248 - RNA, 19 nt, Artificial Sequence
  Description of Artificial Sequence: Synthetic oligonucleotide
  Sense strand starting at position 3583 of SEQ ID NO: 415
ucaauugauuuccggcuaa

SEQ ID NO: 35249 - RNA, 19 nt, Artificial Sequence
  Description of Artificial Sequence: Synthetic oligonucleotide
  Antisense strand to SEQ ID NO: 35248
uuagccggaaaucaauuga

SEQ ID NO: 35250 - RNA, 19 nt, Artificial Sequence
  Description of Artificial Sequence: Synthetic oligonucleotide
  Sense strand starting at position 3325 of SEQ ID NO: 415
gaggaaauguccuuccagg

SEQ ID NO: 35251 - RNA, 19 nt, Artificial Sequence
  Description of Artificial Sequence: Synthetic oligonucleotide
  Antisense strand to SEQ ID NO: 35250
ccuggaaggacauuuccuc

SEQ ID NO: 35252 - RNA, 19 nt, Artificial Sequence
  Description of Artificial Sequence: Synthetic oligonucleotide
  Sense strand starting at position 3236 of SEQ ID NO: 415
gcaagcuguauauaaggau

SEQ ID NO: 35253 - RNA, 19 nt, Artificial Sequence
  Description of Artificial Sequence: Synthetic oligonucleotide
  Antisense strand to SEQ ID NO: 35252
auccuuauauacagcuugc

SEQ ID NO: 35254 - RNA, 19 nt, Artificial Sequence
  Description of Artificial Sequence: Synthetic oligonucleotide
  Sense strand starting at position 3232 of SEQ ID NO: 415
cagagcaagcuguauauaa

SEQ ID NO: 35255 - RNA, 19 nt, Artificial Sequence
  Description of Artificial Sequence: Synthetic oligonucleotide
  Antisense strand to SEQ ID NO: 35254
uuauauacagcuugcucug

SEQ ID NO: 35256 - RNA, 19 nt, Artificial Sequence
  Description of Artificial Sequence: Synthetic oligonucleotide
  Sense strand starting at position 3212 of SEQ ID NO: 415
gaugcaaagucucugcauu

SEQ ID NO: 35257 - RNA, 19 nt, Artificial Sequence
  Description of Artificial Sequence: Synthetic oligonucleotide
  Antisense strand to SEQ ID NO: 35256
aaugcagagacuuugcauc

SEQ ID NO: 35258 - RNA, 19 nt, Artificial Sequence
  Description of Artificial Sequence: Synthetic oligonucleotide
  Sense strand starting at position 3168 of SEQ ID NO: 415
guggguccuacagaguaaa

SEQ ID NO: 35259 - RNA, 19 nt, Artificial Sequence
  Description of Artificial Sequence: Synthetic oligonucleotide
  Antisense strand to SEQ ID NO: 35258
uuuacucuguaggacccac

SEQ ID NO: 35260 - RNA, 19 nt, Artificial Sequence
  Description of Artificial Sequence: Synthetic oligonucleotide
  Sense strand starting at position 3113 of SEQ ID NO: 415
cgguguauucucgggagcu

SEQ ID NO: 35261 - RNA, 19 nt, Artificial Sequence
  Description of Artificial Sequence: Synthetic oligonucleotide
  Antisense strand to SEQ ID NO: 35260
agcucccgagaauacaccg

SEQ ID NO: 35262 - RNA, 19 nt, Artificial Sequence
  Description of Artificial Sequence: Synthetic oligonucleotide
  Sense strand starting at position 3104 of SEQ ID NO: 415
cacagauuccgguguauuc

SEQ ID NO: 35263 - RNA, 19 nt, Artificial Sequence
  Description of Artificial Sequence: Synthetic oligonucleotide
  Antisense strand to SEQ ID NO: 35262
gaauacaccggaaucugug

SEQ ID NO: 35264 - RNA, 19 nt, Artificial Sequence
  Description of Artificial Sequence: Synthetic oligonucleotide
  Sense strand starting at position 3087 of SEQ ID NO: 415
aggaaucuucgaugcagca

SEQ ID NO: 35265 - RNA, 19 nt, Artificial Sequence
  Description of Artificial Sequence: Synthetic oligonucleotide
  Antisense strand to SEQ ID NO: 35264
ugcugcaucgaagauuccu

SEQ ID NO: 35266 - RNA, 19 nt, Artificial Sequence
  Description of Artificial Sequence: Synthetic oligonucleotide
  Sense strand starting at position 3085 of SEQ ID NO: 415
agaggaaucuucgaugcag

SEQ ID NO: 35267 - RNA, 19 nt, Artificial Sequence
  Description of Artificial Sequence: Synthetic oligonucleotide
  Antisense strand to SEQ ID NO: 35266
cugcaucgaagauuccucu

SEQ ID NO: 35268 - RNA, 19 nt, Artificial Sequence
  Description of Artificial Sequence: Synthetic oligonucleotide
  Sense strand starting at position 3066 of SEQ ID NO: 415
cuguaucuauuggaguaga

SEQ ID NO: 35269 - RNA, 19 nt, Artificial Sequence
  Description of Artificial Sequence: Synthetic oligonucleotide
  Antisense strand to SEQ ID NO: 35268
ucuacuccaauagauacag

SEQ ID NO: 35270 - RNA, 19 nt, Artificial Sequence
  Description of Artificial Sequence: Synthetic oligonucleotide
  Sense strand starting at position 3065 of SEQ ID NO: 415
ccuguaucuauuggaguag

SEQ ID NO: 35271 - RNA, 19 nt, Artificial Sequence
  Description of Artificial Sequence: Synthetic oligonucleotide
  Antisense strand to SEQ ID NO: 35270
cuacuccaauagauacagg

SEQ ID NO: 35272 - RNA, 19 nt, Artificial Sequence
  Description of Artificial Sequence: Synthetic oligonucleotide
  Sense strand starting at position 2997 of SEQ ID NO: 415
agagauugacuucguuuac

SEQ ID NO: 35273 - RNA, 19 nt, Artificial Sequence
  Description of Artificial Sequence: Synthetic oligonucleotide
  Antisense strand to SEQ ID NO: 35272
guaaacgaagucaaucucu

SEQ ID NO: 35274 - RNA, 19 nt, Artificial Sequence
  Description of Artificial Sequence: Synthetic oligonucleotide
  Sense strand starting at position 2971 of SEQ ID NO: 415
cuguuaaccguugagauau

SEQ ID NO: 35275 - RNA, 19 nt, Artificial Sequence
  Description of Artificial Sequence: Synthetic oligonucleotide
  Antisense strand to SEQ ID NO: 35274
auaucucaacgguuaacag

SEQ ID NO: 35276 - RNA, 19 nt, Artificial Sequence
  Description of Artificial Sequence: Synthetic oligonucleotide
  Sense strand starting at position 2970 of SEQ ID NO: 415
gcuguuaaccguugagaua

SEQ ID NO: 35277 - RNA, 19 nt, Artificial Sequence
  Description of Artificial Sequence: Synthetic oligonucleotide
  Antisense strand to SEQ ID NO: 35276
uaucucaacgguuaacagc

SEQ ID NO: 35278 - RNA, 19 nt, Artificial Sequence
  Description of Artificial Sequence: Synthetic oligonucleotide
  Sense strand starting at position 2959 of SEQ ID NO: 415
cuggcauccuagcuguuaa

SEQ ID NO: 35279 - RNA, 19 nt, Artificial Sequence
  Description of Artificial Sequence: Synthetic oligonucleotide
  Antisense strand to SEQ ID NO: 35278
uuaacagcuaggaugccag

SEQ ID NO: 35280 - RNA, 19 nt, Artificial Sequence
  Description of Artificial Sequence: Synthetic oligonucleotide
  Sense strand starting at position 2958 of SEQ ID NO: 415
gcuggcauccuagcuguua

SEQ ID NO: 35281 - RNA, 19 nt, Artificial Sequence
  Description of Artificial Sequence: Synthetic oligonucleotide
  Antisense strand to SEQ ID NO: 35280
uaacagcuaggaugccagc

SEQ ID NO: 35282 - RNA, 19 nt, Artificial Sequence
  Description of Artificial Sequence: Synthetic oligonucleotide
  Sense strand starting at position 2870 of SEQ ID NO: 415
ugaucccaguuccuagaaa

SEQ ID NO: 35283 - RNA, 19 nt, Artificial Sequence
  Description of Artificial Sequence: Synthetic oligonucleotide
  Antisense strand to SEQ ID NO: 35282
uuucuaggaacugggauca

SEQ ID NO: 35284 - RNA, 19 nt, Artificial Sequence
  Description of Artificial Sequence: Synthetic oligonucleotide
  Sense strand starting at position 2817 of SEQ ID NO: 415
gggacucaguuguaaauuu

SEQ ID NO: 35285 - RNA, 19 nt, Artificial Sequence
  Description of Artificial Sequence: Synthetic oligonucleotide
  Antisense strand to SEQ ID NO: 35284
aaauuuacaacugaguccc

SEQ ID NO: 35286 - RNA, 19 nt, Artificial Sequence
  Description of Artificial Sequence: Synthetic oligonucleotide
  Sense strand starting at position 2792 of SEQ ID NO: 415
gaaugaccuucguucuaaa

SEQ ID NO: 35287 - RNA, 19 nt, Artificial Sequence
  Description of Artificial Sequence: Synthetic oligonucleotide
  Antisense strand to SEQ ID NO: 35286
uuuagaacgaaggucauuc

SEQ ID NO: 35288 - RNA, 19 nt, Artificial Sequence
  Description of Artificial Sequence: Synthetic oligonucleotide
  Sense strand starting at position 2790 of SEQ ID NO: 415
aggaaugaccuucguucua

SEQ ID NO: 35289 - RNA, 19 nt, Artificial Sequence
  Description of Artificial Sequence: Synthetic oligonucleotide
  Antisense strand to SEQ ID NO: 35288
uagaacgaaggucauuccu

SEQ ID NO: 35290 - RNA, 19 nt, Artificial Sequence
  Description of Artificial Sequence: Synthetic oligonucleotide
  Sense strand starting at position 2401 of SEQ ID NO: 415
gaaugcucuuucgucacuu

SEQ ID NO: 35291 - RNA, 19 nt, Artificial Sequence
  Description of Artificial Sequence: Synthetic oligonucleotide
  Antisense strand to SEQ ID NO: 35290
aagugacgaaagagcauuc

SEQ ID NO: 35292 - RNA, 19 nt, Artificial Sequence
  Description of Artificial Sequence: Synthetic oligonucleotide
  Sense strand starting at position 2398 of SEQ ID NO: 415
ccagaaugcucuuucguca

SEQ ID NO: 35293 - RNA, 19 nt, Artificial Sequence
  Description of Artificial Sequence: Synthetic oligonucleotide
  Antisense strand to SEQ ID NO: 35292
ugacgaaagagcauucugg

SEQ ID NO: 35294 - RNA, 19 nt, Artificial Sequence
  Description of Artificial Sequence: Synthetic oligonucleotide
  Sense strand starting at position 2336 of SEQ ID NO: 415
cguuuacuccaagggaauc

SEQ ID NO: 35295 - RNA, 19 nt, Artificial Sequence
  Description of Artificial Sequence: Synthetic oligonucleotide
  Antisense strand to SEQ ID NO: 35294
gauucccuuggaguaaacg

SEQ ID NO: 35296 - RNA, 19 nt, Artificial Sequence
  Description of Artificial Sequence: Synthetic oligonucleotide
  Sense strand starting at position 2333 of SEQ ID NO: 415
ucccguuuacuccaaggga

SEQ ID NO: 35297 - RNA, 19 nt, Artificial Sequence
  Description of Artificial Sequence: Synthetic oligonucleotide
  Antisense strand to SEQ ID NO: 35296
ucccuuggaguaaacggga

SEQ ID NO: 35298 - RNA, 19 nt, Artificial Sequence
  Description of Artificial Sequence: Synthetic oligonucleotide
  Sense strand starting at position 1609 of SEQ ID NO: 415
cgcuuucaugcgcugggaa

SEQ ID NO: 35299 - RNA, 19 nt, Artificial Sequence
  Description of Artificial Sequence: Synthetic oligonucleotide
  Antisense strand to SEQ ID NO: 35298
uucccagcgcaugaaagcg

SEQ ID NO: 35300 - RNA, 19 nt, Artificial Sequence
  Description of Artificial Sequence: Synthetic oligonucleotide
  Sense strand starting at position 1541 of SEQ ID NO: 415
cgcugucuccaagagaaau

SEQ ID NO: 35301 - RNA, 19 nt, Artificial Sequence
  Description of Artificial Sequence: Synthetic oligonucleotide
  Antisense strand to SEQ ID NO: 35300
auuucucuuggagacagcg

SEQ ID NO: 35302 - RNA, 19 nt, Artificial Sequence
  Description of Artificial Sequence: Synthetic oligonucleotide
  Sense strand starting at position 1538 of SEQ ID NO: 415
caccgcugucuccaagaga

SEQ ID NO: 35303 - RNA, 19 nt, Artificial Sequence
  Description of Artificial Sequence: Synthetic oligonucleotide
  Antisense strand to SEQ ID NO: 35302
ucucuuggagacagcggug

SEQ ID NO: 35304 - RNA, 19 nt, Artificial Sequence
  Description of Artificial Sequence: Synthetic oligonucleotide
  Sense strand starting at position 1307 of SEQ ID NO: 415
cagugucucugauucgcaa

SEQ ID NO: 35305 - RNA, 19 nt, Artificial Sequence
  Description of Artificial Sequence: Synthetic oligonucleotide
  Antisense strand to SEQ ID NO: 35304
uugcgaaucagagacacug

SEQ ID NO: 35306 - RNA, 19 nt, Artificial Sequence
  Description of Artificial Sequence: Synthetic oligonucleotide
  Sense strand starting at position 1210 of SEQ ID NO: 415
gaacgauucucccuggcac

SEQ ID NO: 35307 - RNA, 19 nt, Artificial Sequence
  Description of Artificial Sequence: Synthetic oligonucleotide
  Antisense strand to SEQ ID NO: 35306
gugccagggagaaucguuc

SEQ ID NO: 35308 - RNA, 19 nt, Artificial Sequence
  Description of Artificial Sequence: Synthetic oligonucleotide
  Sense strand starting at position 833 of SEQ ID NO: 415
guuguaauuucccuagucu

SEQ ID NO: 35309 - RNA, 19 nt, Artificial Sequence
  Description of Artificial Sequence: Synthetic oligonucleotide
  Antisense strand to SEQ ID NO: 35308
agacuagggaaauuacaac

SEQ ID NO: 35310 - RNA, 19 nt, Artificial Sequence
  Description of Artificial Sequence: Synthetic oligonucleotide
  Sense strand starting at position 734 of SEQ ID NO: 415
gguugacucuaguuccuuu

SEQ ID NO: 35311 - RNA, 19 nt, Artificial Sequence
  Description of Artificial Sequence: Synthetic oligonucleotide
  Antisense strand to SEQ ID NO: 35310
aaaggaacuagagucaacc

SEQ ID NO: 35312 - RNA, 19 nt, Artificial Sequence
  Description of Artificial Sequence: Synthetic oligonucleotide
  Sense strand starting at position 660 of SEQ ID NO: 415
aaacauagcgguugcuaau

SEQ ID NO: 35313 - RNA, 19 nt, Artificial Sequence
  Description of Artificial Sequence: Synthetic oligonucleotide
  Antisense strand to SEQ ID NO: 35312
auuagcaaccgcuauguuu

SEQ ID NO: 35314 - RNA, 19 nt, Artificial Sequence
  Description of Artificial Sequence: Synthetic oligonucleotide
  Sense strand starting at position 558 of SEQ ID NO: 415
ggcaaaucucuggauuagc

SEQ ID NO: 35315 - RNA, 19 nt, Artificial Sequence
  Description of Artificial Sequence: Synthetic oligonucleotide
  Antisense strand to SEQ ID NO: 35314
gcuaauccagagauuugcc

SEQ ID NO: 35316 - RNA, 19 nt, Artificial Sequence
  Description of Artificial Sequence: Synthetic oligonucleotide
  Sense strand starting at position 556 of SEQ ID NO: 415
cgggcaaaucucuggauua

SEQ ID NO: 35317 - RNA, 19 nt, Artificial Sequence
  Description of Artificial Sequence: Synthetic oligonucleotide
  Antisense strand to SEQ ID NO: 35316
uaauccagagauuugcccg

SEQ ID NO: 35318 - RNA, 19 nt, Artificial Sequence
  Description of Artificial Sequence: Synthetic oligonucleotide
  Sense strand starting at position 555 of SEQ ID NO: 415
ucgggcaaaucucuggauu

SEQ ID NO: 35319 - RNA, 19 nt, Artificial Sequence
  Description of Artificial Sequence: Synthetic oligonucleotide
  Antisense strand to SEQ ID NO: 35318
aauccagagauuugcccga

SEQ ID NO: 35320 - RNA, 19 nt, Artificial Sequence
  Description of Artificial Sequence: Synthetic oligonucleotide
  Sense strand starting at position 548 of SEQ ID NO: 415
cuuagagucgggcaaaucu

SEQ ID NO: 35321 - RNA, 19 nt, Artificial Sequence
  Description of Artificial Sequence: Synthetic oligonucleotide
  Antisense strand to SEQ ID NO: 35320
agauuugcccgacucuaag

SEQ ID NO: 35322 - RNA, 19 nt, Artificial Sequence
  Description of Artificial Sequence: Synthetic oligonucleotide
  Sense strand starting at position 545 of SEQ ID NO: 415
ccucuuagagucgggcaaa

SEQ ID NO: 35323 - RNA, 19 nt, Artificial Sequence
  Description of Artificial Sequence: Synthetic oligonucleotide
  Antisense strand to SEQ ID NO: 35322
uuugcccgacucuaagagg

SEQ ID NO: 35324 - RNA, 19 nt, Artificial Sequence
  Description of Artificial Sequence: Synthetic oligonucleotide
  Sense strand starting at position 538 of SEQ ID NO: 415
ccagaauccucuuagaguc

SEQ ID NO: 35325 - RNA, 19 nt, Artificial Sequence
  Description of Artificial Sequence: Synthetic oligonucleotide
  Antisense strand to SEQ ID NO: 35324
gacucuaagaggauucugg

SEQ ID NO: 35326 - RNA, 19 nt, Artificial Sequence
  Description of Artificial Sequence: Synthetic oligonucleotide
  Sense strand starting at position 245 of SEQ ID NO: 415
aagccaaagcucugaagga

SEQ ID NO: 35327 - RNA, 19 nt, Artificial Sequence
  Description of Artificial Sequence: Synthetic oligonucleotide
  Antisense strand to SEQ ID NO: 35326
uccuucagagcuuuggcuu

SEQ ID NO: 35328 - RNA, 19 nt, Artificial Sequence
  Description of Artificial Sequence: Synthetic oligonucleotide
  Sense strand starting at position 3765 of SEQ ID NO: 416
gggcauuucucagagagug

SEQ ID NO: 35329 - RNA, 19 nt, Artificial Sequence
  Description of Artificial Sequence: Synthetic oligonucleotide
  Antisense strand to SEQ ID NO: 35328
cacucucugagaaaugccc

SEQ ID NO: 35330 - RNA, 19 nt, Artificial Sequence
  Description of Artificial Sequence: Synthetic oligonucleotide
  Sense strand starting at position 3607 of SEQ ID NO: 416
guauuucucgucgggugga

SEQ ID NO: 35331 - RNA, 19 nt, Artificial Sequence
  Description of Artificial Sequence: Synthetic oligonucleotide
  Antisense strand to SEQ ID NO: 35330
uccacccgacgagaaauac

SEQ ID NO: 35332 - RNA, 19 nt, Artificial Sequence
  Description of Artificial Sequence: Synthetic oligonucleotide
  Sense strand starting at position 3509 of SEQ ID NO: 416
ggccacuuaucuccuggau

SEQ ID NO: 35333 - RNA, 19 nt, Artificial Sequence
  Description of Artificial Sequence: Synthetic oligonucleotide
  Antisense strand to SEQ ID NO: 35332
auccaggagauaaguggcc

SEQ ID NO: 35334 - RNA, 19 nt, Artificial Sequence
  Description of Artificial Sequence: Synthetic oligonucleotide
  Sense strand starting at position 3479 of SEQ ID NO: 416
ugccaagcacucuauggua

SEQ ID NO: 35335 - RNA, 19 nt, Artificial Sequence
  Description of Artificial Sequence: Synthetic oligonucleotide
  Antisense strand to SEQ ID NO: 35334
uaccauagagugcuuggca

SEQ ID NO: 35336 - RNA, 19 nt, Artificial Sequence
  Description of Artificial Sequence: Synthetic oligonucleotide
  Sense strand starting at position 3451 of SEQ ID NO: 416
ccugacacugacugaauua

SEQ ID NO: 35337 - RNA, 19 nt, Artificial Sequence
  Description of Artificial Sequence: Synthetic oligonucleotide
  Antisense strand to SEQ ID NO: 35336
uaauucagucagugucagg

SEQ ID NO: 35338 - RNA, 19 nt, Artificial Sequence
  Description of Artificial Sequence: Synthetic oligonucleotide
  Sense strand starting at position 3450 of SEQ ID NO: 416
gccugacacugacugaauu

SEQ ID NO: 35339 - RNA, 19 nt, Artificial Sequence
  Description of Artificial Sequence: Synthetic oligonucleotide
  Antisense strand to SEQ ID NO: 35338
aauucagucagugucaggc

SEQ ID NO: 35340 - RNA, 19 nt, Artificial Sequence
  Description of Artificial Sequence: Synthetic oligonucleotide
  Sense strand starting at position 3309 of SEQ ID NO: 416
agguaaugucauuacuuaa

SEQ ID NO: 35341 - RNA, 19 nt, Artificial Sequence
  Description of Artificial Sequence: Synthetic oligonucleotide
  Antisense strand to SEQ ID NO: 35340
uuaaguaaugacauuaccu

SEQ ID NO: 35342 - RNA, 19 nt, Artificial Sequence
  Description of Artificial Sequence: Synthetic oligonucleotide
  Sense strand starting at position 2812 of SEQ ID NO: 416
ggcuaaugucauuagaaua

SEQ ID NO: 35343 - RNA, 19 nt, Artificial Sequence
  Description of Artificial Sequence: Synthetic oligonucleotide
  Antisense strand to SEQ ID NO: 35342
uauucuaaugacauuagcc

SEQ ID NO: 35344 - RNA, 19 nt, Artificial Sequence
  Description of Artificial Sequence: Synthetic oligonucleotide
  Sense strand starting at position 2811 of SEQ ID NO: 416
uggcuaaugucauuagaau

SEQ ID NO: 35345 - RNA, 19 nt, Artificial Sequence
  Description of Artificial Sequence: Synthetic oligonucleotide
  Antisense strand to SEQ ID NO: 35344
auucuaaugacauuagcca

SEQ ID NO: 35346 - RNA, 19 nt, Artificial Sequence
  Description of Artificial Sequence: Synthetic oligonucleotide
  Sense strand starting at position 2802 of SEQ ID NO: 416
auuauucucuggcuaaugu

SEQ ID NO: 35347 - RNA, 19 nt, Artificial Sequence
  Description of Artificial Sequence: Synthetic oligonucleotide
  Antisense strand to SEQ ID NO: 35346
acauuagccagagaauaau

SEQ ID NO: 35348 - RNA, 19 nt, Artificial Sequence
  Description of Artificial Sequence: Synthetic oligonucleotide
  Sense strand starting at position 2798 of SEQ ID NO: 416
cgauauuauucucuggcua

SEQ ID NO: 35349 - RNA, 19 nt, Artificial Sequence
  Description of Artificial Sequence: Synthetic oligonucleotide
  Antisense strand to SEQ ID NO: 35348
uagccagagaauaauaucg

SEQ ID NO: 35350 - RNA, 19 nt, Artificial Sequence
  Description of Artificial Sequence: Synthetic oligonucleotide
  Sense strand starting at position 2797 of SEQ ID NO: 416
acgauauuauucucuggcu

SEQ ID NO: 35351 - RNA, 19 nt, Artificial Sequence
  Description of Artificial Sequence: Synthetic oligonucleotide
  Antisense strand to SEQ ID NO: 35350
agccagagaauaauaucgu

SEQ ID NO: 35352 - RNA, 19 nt, Artificial Sequence
  Description of Artificial Sequence: Synthetic oligonucleotide
  Sense strand starting at position 2772 of SEQ ID NO: 416
gguaauuggcaguacugga

SEQ ID NO: 35353 - RNA, 19 nt, Artificial Sequence
  Description of Artificial Sequence: Synthetic oligonucleotide
  Antisense strand to SEQ ID NO: 35352
uccaguacugccaauuacc

SEQ ID NO: 35354 - RNA, 19 nt, Artificial Sequence
  Description of Artificial Sequence: Synthetic oligonucleotide
  Sense strand starting at position 2760 of SEQ ID NO: 416
gggacuuguaaugguaauu

SEQ ID NO: 35355 - RNA, 19 nt, Artificial Sequence
  Description of Artificial Sequence: Synthetic oligonucleotide
  Antisense strand to SEQ ID NO: 35354
aauuaccauuacaaguccc

SEQ ID NO: 35356 - RNA, 19 nt, Artificial Sequence
  Description of Artificial Sequence: Synthetic oligonucleotide
  Sense strand starting at position 2711 of SEQ ID NO: 416
accaauaauuagguguuau

SEQ ID NO: 35357 - RNA, 19 nt, Artificial Sequence
  Description of Artificial Sequence: Synthetic oligonucleotide
  Antisense strand to SEQ ID NO: 35356
auaacaccuaauuauuggu

SEQ ID NO: 35358 - RNA, 19 nt, Artificial Sequence
  Description of Artificial Sequence: Synthetic oligonucleotide
  Sense strand starting at position 2667 of SEQ ID NO: 416
uccuaagggcuuuaaguau

SEQ ID NO: 35359 - RNA, 19 nt, Artificial Sequence
  Description of Artificial Sequence: Synthetic oligonucleotide
  Antisense strand to SEQ ID NO: 35358
auacuuaaagcccuuagga

SEQ ID NO: 35360 - RNA, 19 nt, Artificial Sequence
  Description of Artificial Sequence: Synthetic oligonucleotide
  Sense strand starting at position 2660 of SEQ ID NO: 416
ggugguguccuaagggcuu

SEQ ID NO: 35361 - RNA, 19 nt, Artificial Sequence
  Description of Artificial Sequence: Synthetic oligonucleotide
  Antisense strand to SEQ ID NO: 35360
aagcccuuaggacaccacc

SEQ ID NO: 35362 - RNA, 19 nt, Artificial Sequence
  Description of Artificial Sequence: Synthetic oligonucleotide
  Sense strand starting at position 2503 of SEQ ID NO: 416
ggguaucucaagugcauua

SEQ ID NO: 35363 - RNA, 19 nt, Artificial Sequence
  Description of Artificial Sequence: Synthetic oligonucleotide
  Antisense strand to SEQ ID NO: 35362
uaaugcacuugagauaccc

SEQ ID NO: 35364 - RNA, 19 nt, Artificial Sequence
  Description of Artificial Sequence: Synthetic oligonucleotide
  Sense strand starting at position 2356 of SEQ ID NO: 416
agaucaaacuguucuuguu

SEQ ID NO: 35365 - RNA, 19 nt, Artificial Sequence
  Description of Artificial Sequence: Synthetic oligonucleotide
  Antisense strand to SEQ ID NO: 35364
aacaagaacaguuugaucu

SEQ ID NO: 35366 - RNA, 19 nt, Artificial Sequence
  Description of Artificial Sequence: Synthetic oligonucleotide
  Sense strand starting at position 2272 of SEQ ID NO: 416
cgacuaucaugugucagac

SEQ ID NO: 35367 - RNA, 19 nt, Artificial Sequence
  Description of Artificial Sequence: Synthetic oligonucleotide
  Antisense strand to SEQ ID NO: 35366
gucugacacaugauagucg

SEQ ID NO: 35368 - RNA, 19 nt, Artificial Sequence
  Description of Artificial Sequence: Synthetic oligonucleotide
  Sense strand starting at position 2271 of SEQ ID NO: 416
ucgacuaucaugugucaga

SEQ ID NO: 35369 - RNA, 19 nt, Artificial Sequence
  Description of Artificial Sequence: Synthetic oligonucleotide
  Antisense strand to SEQ ID NO: 35368
ucugacacaugauagucga

SEQ ID NO: 35370 - RNA, 19 nt, Artificial Sequence
  Description of Artificial Sequence: Synthetic oligonucleotide
  Sense strand starting at position 2068 of SEQ ID NO: 416
ccaagauauccggagcgga

SEQ ID NO: 35371 - RNA, 19 nt, Artificial Sequence
  Description of Artificial Sequence: Synthetic oligonucleotide
  Antisense strand to SEQ ID NO: 35370
uccgcuccggauaucuugg

SEQ ID NO: 35372 - RNA, 19 nt, Artificial Sequence
  Description of Artificial Sequence: Synthetic oligonucleotide
  Sense strand starting at position 1387 of SEQ ID NO: 416
gggagaugaguugaucguu

SEQ ID NO: 35373 - RNA, 19 nt, Artificial Sequence
  Description of Artificial Sequence: Synthetic oligonucleotide
  Antisense strand to SEQ ID NO: 35372
aacgaucaacucaucuccc

SEQ ID NO: 35374 - RNA, 19 nt, Artificial Sequence
  Description of Artificial Sequence: Synthetic oligonucleotide
  Sense strand starting at position 1335 of SEQ ID NO: 416
uggcgaauucuccaauaac

SEQ ID NO: 35375 - RNA, 19 nt, Artificial Sequence
  Description of Artificial Sequence: Synthetic oligonucleotide
  Antisense strand to SEQ ID NO: 35374
guuauuggagaauucgcca

SEQ ID NO: 35376 - RNA, 19 nt, Artificial Sequence
  Description of Artificial Sequence: Synthetic oligonucleotide
  Sense strand starting at position 1323 of SEQ ID NO: 416
agaauuaauccguggcgaa

SEQ ID NO: 35377 - RNA, 19 nt, Artificial Sequence
  Description of Artificial Sequence: Synthetic oligonucleotide
  Antisense strand to SEQ ID NO: 35376
uucgccacggauuaauucu

SEQ ID NO: 35378 - RNA, 19 nt, Artificial Sequence
  Description of Artificial Sequence: Synthetic oligonucleotide
  Sense strand starting at position 1322 of SEQ ID NO: 416
gagaauuaauccguggcga

SEQ ID NO: 35379 - RNA, 19 nt, Artificial Sequence
  Description of Artificial Sequence: Synthetic oligonucleotide
  Antisense strand to SEQ ID NO: 35378
ucgccacggauuaauucuc

SEQ ID NO: 35380 - RNA, 19 nt, Artificial Sequence
  Description of Artificial Sequence: Synthetic oligonucleotide
  Sense strand starting at position 1310 of SEQ ID NO: 416
uaacucgauccggagaauu

SEQ ID NO: 35381 - RNA, 19 nt, Artificial Sequence
  Description of Artificial Sequence: Synthetic oligonucleotide
  Antisense strand to SEQ ID NO: 35380
aauucuccggaucgaguua

SEQ ID NO: 35382 - RNA, 19 nt, Artificial Sequence
  Description of Artificial Sequence: Synthetic oligonucleotide
  Sense strand starting at position 1227 of SEQ ID NO: 416
gucaguauuuaugaaugac

SEQ ID NO: 35383 - RNA, 19 nt, Artificial Sequence
  Description of Artificial Sequence: Synthetic oligonucleotide
  Antisense strand to SEQ ID NO: 35382
gucauucauaaauacugac

SEQ ID NO: 35384 - RNA, 19 nt, Artificial Sequence
  Description of Artificial Sequence: Synthetic oligonucleotide
  Sense strand starting at position 1219 of SEQ ID NO: 416
gugguucagucaguauuua

SEQ ID NO: 35385 - RNA, 19 nt, Artificial Sequence
  Description of Artificial Sequence: Synthetic oligonucleotide
  Antisense strand to SEQ ID NO: 35384
uaaauacugacugaaccac

SEQ ID NO: 35386 - RNA, 19 nt, Artificial Sequence
  Description of Artificial Sequence: Synthetic oligonucleotide
  Sense strand starting at position 1196 of SEQ ID NO: 416
caagcuaaguuggcauaua

SEQ ID NO: 35387 - RNA, 19 nt, Artificial Sequence
  Description of Artificial Sequence: Synthetic oligonucleotide
  Antisense strand to SEQ ID NO: 35386
uauaugccaacuuagcuug

SEQ ID NO: 35388 - RNA, 19 nt, Artificial Sequence
  Description of Artificial Sequence: Synthetic oligonucleotide
  Sense strand starting at position 1159 of SEQ ID NO: 416
gugucaauaaaucgaguua

SEQ ID NO: 35389 - RNA, 19 nt, Artificial Sequence
  Description of Artificial Sequence: Synthetic oligonucleotide
  Antisense strand to SEQ ID NO: 35388
uaacucgauuuauugacac

SEQ ID NO: 35390 - RNA, 19 nt, Artificial Sequence
  Description of Artificial Sequence: Synthetic oligonucleotide
  Sense strand starting at position 1124 of SEQ ID NO: 416
aagguucgcgcuuugcaga

SEQ ID NO: 35391 - RNA, 19 nt, Artificial Sequence
  Description of Artificial Sequence: Synthetic oligonucleotide
  Antisense strand to SEQ ID NO: 35390
ucugcaaagcgcgaaccuu

SEQ ID NO: 35392 - RNA, 19 nt, Artificial Sequence
  Description of Artificial Sequence: Synthetic oligonucleotide
  Sense strand starting at position 951 of SEQ ID NO: 416
augcaugauucugucaaua

SEQ ID NO: 35393 - RNA, 19 nt, Artificial Sequence
  Description of Artificial Sequence: Synthetic oligonucleotide
  Antisense strand to SEQ ID NO: 35392
uauugacagaaucaugcau

SEQ ID NO: 35394 - RNA, 19 nt, Artificial Sequence
  Description of Artificial Sequence: Synthetic oligonucleotide
  Sense strand starting at position 926 of SEQ ID NO: 416
ugaauaaacgacuguauua

SEQ ID NO: 35395 - RNA, 19 nt, Artificial Sequence
  Description of Artificial Sequence: Synthetic oligonucleotide
  Antisense strand to SEQ ID NO: 35394
uaauacagucguuuauuca

SEQ ID NO: 35396 - RNA, 19 nt, Artificial Sequence
  Description of Artificial Sequence: Synthetic oligonucleotide
  Sense strand starting at position 880 of SEQ ID NO: 416
guagccaaugccuaagaau

SEQ ID NO: 35397 - RNA, 19 nt, Artificial Sequence
  Description of Artificial Sequence: Synthetic oligonucleotide
  Antisense strand to SEQ ID NO: 35396
auucuuaggcauuggcuac

SEQ ID NO: 35398 - RNA, 19 nt, Artificial Sequence
  Description of Artificial Sequence: Synthetic oligonucleotide
  Sense strand starting at position 777 of SEQ ID NO: 416
cgugguacugagcacuuaa

SEQ ID NO: 35399 - RNA, 19 nt, Artificial Sequence
  Description of Artificial Sequence: Synthetic oligonucleotide
  Antisense strand to SEQ ID NO: 35398
uuaagugcucaguaccacg

SEQ ID NO: 35400 - RNA, 19 nt, Artificial Sequence
  Description of Artificial Sequence: Synthetic oligonucleotide
  Sense strand starting at position 540 of SEQ ID NO: 416
acauaaacuuucguuaaga

SEQ ID NO: 35401 - RNA, 19 nt, Artificial Sequence
  Description of Artificial Sequence: Synthetic oligonucleotide
  Antisense strand to SEQ ID NO: 35400
ucuuaacgaaaguuuaugu

SEQ ID NO: 35402 - RNA, 19 nt, Artificial Sequence
  Description of Artificial Sequence: Synthetic oligonucleotide
  Sense strand starting at position 202 of SEQ ID NO: 416
acacuaguuuauucuggua

SEQ ID NO: 35403 - RNA, 19 nt, Artificial Sequence
  Description of Artificial Sequence: Synthetic oligonucleotide
  Antisense strand to SEQ ID NO: 35402
uaccagaauaaacuagugu

SEQ ID NO: 35404 - RNA, 19 nt, Artificial Sequence
  Description of Artificial Sequence: Synthetic oligonucleotide
  Sense strand starting at position 126 of SEQ ID NO: 416
guacuacuucuguaaccaa

SEQ ID NO: 35405 - RNA, 19 nt, Artificial Sequence
  Description of Artificial Sequence: Synthetic oligonucleotide
  Antisense strand to SEQ ID NO: 35404
uugguuacagaaguaguac

SEQ ID NO: 35406 - RNA, 19 nt, Artificial Sequence
  Description of Artificial Sequence: Synthetic oligonucleotide
  Sense strand starting at position 80 of SEQ ID NO: 416
uuucuuuaugcauaggcua

SEQ ID NO: 35407 - RNA, 19 nt, Artificial Sequence
  Description of Artificial Sequence: Synthetic oligonucleotide
  Antisense strand to SEQ ID NO: 35406
uagccuaugcauaaagaaa

SEQ ID NO: 35408 - RNA, 19 nt, Artificial Sequence
  Description of Artificial Sequence: Synthetic oligonucleotide
  Sense strand starting at position 204 of SEQ ID NO: 417
cggaguguaagaugggaaa

SEQ ID NO: 35409 - RNA, 19 nt, Artificial Sequence
  Description of Artificial Sequence: Synthetic oligonucleotide
  Antisense strand to SEQ ID NO: 35408
uuucccaucuuacacuccg

SEQ ID NO: 35410 - RNA, 19 nt, Artificial Sequence
  Description of Artificial Sequence: Synthetic oligonucleotide
  Sense strand starting at position 420 of SEQ ID NO: 417
uccggagaaugggucuaau

SEQ ID NO: 35411 - RNA, 19 nt, Artificial Sequence
  Description of Artificial Sequence: Synthetic oligonucleotide
  Antisense strand to SEQ ID NO: 35410
auuagacccauucuccgga

SEQ ID NO: 35412 - RNA, 19 nt, Artificial Sequence
  Description of Artificial Sequence: Synthetic oligonucleotide
  Sense strand starting at position 432 of SEQ ID NO: 417
gucuaauuccaaggaccca

SEQ ID NO: 35413 - RNA, 19 nt, Artificial Sequence
  Description of Artificial Sequence: Synthetic oligonucleotide
  Antisense strand to SEQ ID NO: 35412
uggguccuuggaauuagac

SEQ ID NO: 35414 - RNA, 19 nt, Artificial Sequence
  Description of Artificial Sequence: Synthetic oligonucleotide
  Sense strand starting at position 462 of SEQ ID NO: 417
ucaacuauuguccaggcaa

SEQ ID NO: 35415 - RNA, 19 nt, Artificial Sequence
  Description of Artificial Sequence: Synthetic oligonucleotide
  Antisense strand to SEQ ID NO: 35414
uugccuggacaauaguuga

SEQ ID NO: 35416 - RNA, 19 nt, Artificial Sequence
  Description of Artificial Sequence: Synthetic oligonucleotide
  Sense strand starting at position 531 of SEQ ID NO: 417
gccaacuuggccugucuaa

SEQ ID NO: 35417 - RNA, 19 nt, Artificial Sequence
  Description of Artificial Sequence: Synthetic oligonucleotide
  Antisense strand to SEQ ID NO: 35416
uuagacaggccaaguuggc

SEQ ID NO: 35418 - RNA, 19 nt, Artificial Sequence
  Description of Artificial Sequence: Synthetic oligonucleotide
  Sense strand starting at position 578 of SEQ ID NO: 417
ggagcucagugacagcauu

SEQ ID NO: 35419 - RNA, 19 nt, Artificial Sequence
  Description of Artificial Sequence: Synthetic oligonucleotide
  Antisense strand to SEQ ID NO: 35418
aaugcugucacugagcucc

SEQ ID NO: 35420 - RNA, 19 nt, Artificial Sequence
  Description of Artificial Sequence: Synthetic oligonucleotide
  Sense strand starting at position 701 of SEQ ID NO: 417
gcuggagguguccauuugu

SEQ ID NO: 35421 - RNA, 19 nt, Artificial Sequence
  Description of Artificial Sequence: Synthetic oligonucleotide
  Antisense strand to SEQ ID NO: 35420
acaaauggacaccuccagc

SEQ ID NO: 35422 - RNA, 19 nt, Artificial Sequence
  Description of Artificial Sequence: Synthetic oligonucleotide
  Sense strand starting at position 792 of SEQ ID NO: 417
ccacaagucucuccgaagu

SEQ ID NO: 35423 - RNA, 19 nt, Artificial Sequence
  Description of Artificial Sequence: Synthetic oligonucleotide
  Antisense strand to SEQ ID NO: 35422
acuucggagagacuugugg

SEQ ID NO: 35424 - RNA, 19 nt, Artificial Sequence
  Description of Artificial Sequence: Synthetic oligonucleotide
  Sense strand starting at position 847 of SEQ ID NO: 417
aaguaagagucucccagaa

SEQ ID NO: 35425 - RNA, 19 nt, Artificial Sequence
  Description of Artificial Sequence: Synthetic oligonucleotide
  Antisense strand to SEQ ID NO: 35424
uucugggagacucuuacuu

SEQ ID NO: 35426 - RNA, 19 nt, Artificial Sequence
  Description of Artificial Sequence: Synthetic oligonucleotide
  Sense strand starting at position 849 of SEQ ID NO: 417
guaagagucucccagaaag

SEQ ID NO: 35427 - RNA, 19 nt, Artificial Sequence
  Description of Artificial Sequence: Synthetic oligonucleotide
  Antisense strand to SEQ ID NO: 35426
cuuucugggagacucuuac

SEQ ID NO: 35428 - RNA, 19 nt, Artificial Sequence
  Description of Artificial Sequence: Synthetic oligonucleotide
  Sense strand starting at position 929 of SEQ ID NO: 417
aacaaauggugagcaguua

SEQ ID NO: 35429 - RNA, 19 nt, Artificial Sequence
  Description of Artificial Sequence: Synthetic oligonucleotide
  Antisense strand to SEQ ID NO: 35428
uaacugcucaccauuuguu

SEQ ID NO: 35430 - RNA, 19 nt, Artificial Sequence
  Description of Artificial Sequence: Synthetic oligonucleotide
  Sense strand starting at position 930 of SEQ ID NO: 417
acaaauggugagcaguuaa

SEQ ID NO: 35431 - RNA, 19 nt, Artificial Sequence
  Description of Artificial Sequence: Synthetic oligonucleotide
  Antisense strand to SEQ ID NO: 35430
uuaacugcucaccauuugu

SEQ ID NO: 35432 - RNA, 19 nt, Artificial Sequence
  Description of Artificial Sequence: Synthetic oligonucleotide
  Sense strand starting at position 937 of SEQ ID NO: 417
gugagcaguuaacuaaaga

SEQ ID NO: 35433 - RNA, 19 nt, Artificial Sequence
  Description of Artificial Sequence: Synthetic oligonucleotide
  Antisense strand to SEQ ID NO: 35432
ucuuuaguuaacugcucac

SEQ ID NO: 35434 - RNA, 19 nt, Artificial Sequence
  Description of Artificial Sequence: Synthetic oligonucleotide
  Sense strand starting at position 979 of SEQ ID NO: 417
gcgcacagcccuguguaua

SEQ ID NO: 35435 - RNA, 19 nt, Artificial Sequence
  Description of Artificial Sequence: Synthetic oligonucleotide
  Antisense strand to SEQ ID NO: 35434
uauacacagggcugugcgc

SEQ ID NO: 35436 - RNA, 19 nt, Artificial Sequence
  Description of Artificial Sequence: Synthetic oligonucleotide
  Sense strand starting at position 995 of SEQ ID NO: 417
auacuaaauucugagagag

SEQ ID NO: 35437 - RNA, 19 nt, Artificial Sequence
  Description of Artificial Sequence: Synthetic oligonucleotide
  Antisense strand to SEQ ID NO: 35436
cucucucagaauuuaguau

SEQ ID NO: 35438 - RNA, 19 nt, Artificial Sequence
  Description of Artificial Sequence: Synthetic oligonucleotide
  Sense strand starting at position 1810 of SEQ ID NO: 417
ccugacaucucguccucau

SEQ ID NO: 35439 - RNA, 19 nt, Artificial Sequence
  Description of Artificial Sequence: Synthetic oligonucleotide
  Antisense strand to SEQ ID NO: 35438
augaggacgagaugucagg

SEQ ID NO: 35440 - RNA, 19 nt, Artificial Sequence
  Description of Artificial Sequence: Synthetic oligonucleotide
  Sense strand starting at position 2268 of SEQ ID NO: 417
gcgacuaguuaacagcaga

SEQ ID NO: 35441 - RNA, 19 nt, Artificial Sequence
  Description of Artificial Sequence: Synthetic oligonucleotide
  Antisense strand to SEQ ID NO: 35440
ucugcuguuaacuagucgc

SEQ ID NO: 35442 - RNA, 19 nt, Artificial Sequence
  Description of Artificial Sequence: Synthetic oligonucleotide
  Sense strand starting at position 2637 of SEQ ID NO: 417
caaagaggauuagaagaaa

SEQ ID NO: 35443 - RNA, 19 nt, Artificial Sequence
  Description of Artificial Sequence: Synthetic oligonucleotide
  Antisense strand to SEQ ID NO: 35442
uuucuucuaauccucuuug

SEQ ID NO: 35444 - RNA, 19 nt, Artificial Sequence
  Description of Artificial Sequence: Synthetic oligonucleotide
  Sense strand starting at position 2691 of SEQ ID NO: 417
gacugugggucugauuuac

SEQ ID NO: 35445 - RNA, 19 nt, Artificial Sequence
  Description of Artificial Sequence: Synthetic oligonucleotide
  Antisense strand to SEQ ID NO: 35444
guaaaucagacccacaguc

SEQ ID NO: 35446 - RNA, 19 nt, Artificial Sequence
  Description of Artificial Sequence: Synthetic oligonucleotide
  Sense strand starting at position 2697 of SEQ ID NO: 417
gggucugauuuacagcaga

SEQ ID NO: 35447 - RNA, 19 nt, Artificial Sequence
  Description of Artificial Sequence: Synthetic oligonucleotide
  Antisense strand to SEQ ID NO: 35446
ucugcuguaaaucagaccc

SEQ ID NO: 35448 - RNA, 19 nt, Artificial Sequence
  Description of Artificial Sequence: Synthetic oligonucleotide
  Sense strand starting at position 2843 of SEQ ID NO: 417
cugcgaugucugugcccaa

SEQ ID NO: 35449 - RNA, 19 nt, Artificial Sequence
  Description of Artificial Sequence: Synthetic oligonucleotide
  Antisense strand to SEQ ID NO: 35448
uugggcacagacaucgcag

SEQ ID NO: 35450 - RNA, 19 nt, Artificial Sequence
  Description of Artificial Sequence: Synthetic oligonucleotide
  Sense strand starting at position 2844 of SEQ ID NO: 417
ugcgaugucugugcccaaa

SEQ ID NO: 35451 - RNA, 19 nt, Artificial Sequence
  Description of Artificial Sequence: Synthetic oligonucleotide
  Antisense strand to SEQ ID NO: 35450
uuugggcacagacaucgca

SEQ ID NO: 35452 - RNA, 19 nt, Artificial Sequence
  Description of Artificial Sequence: Synthetic oligonucleotide
  Sense strand starting at position 2914 of SEQ ID NO: 417
ccagcccucggucguuaaa

SEQ ID NO: 35453 - RNA, 19 nt, Artificial Sequence
  Description of Artificial Sequence: Synthetic oligonucleotide
  Antisense strand to SEQ ID NO: 35452
uuuaacgaccgagggcugg

SEQ ID NO: 35454 - RNA, 19 nt, Artificial Sequence
  Description of Artificial Sequence: Synthetic oligonucleotide
  Sense strand starting at position 2917 of SEQ ID NO: 417
gcccucggucguuaaaggu

SEQ ID NO: 35455 - RNA, 19 nt, Artificial Sequence
  Description of Artificial Sequence: Synthetic oligonucleotide
  Antisense strand to SEQ ID NO: 35454
accuuuaacgaccgagggc

SEQ ID NO: 35456 - RNA, 19 nt, Artificial Sequence
  Description of Artificial Sequence: Synthetic oligonucleotide
  Sense strand starting at position 2923 of SEQ ID NO: 417
ggucguuaaaggugaagau

SEQ ID NO: 35457 - RNA, 19 nt, Artificial Sequence
  Description of Artificial Sequence: Synthetic oligonucleotide
  Antisense strand to SEQ ID NO: 35456
aucuucaccuuuaacgacc

SEQ ID NO: 35458 - RNA, 19 nt, Artificial Sequence
  Description of Artificial Sequence: Synthetic oligonucleotide
  Sense strand starting at position 3001 of SEQ ID NO: 417
ggcggcaagucuuaaagcu

SEQ ID NO: 35459 - RNA, 19 nt, Artificial Sequence
  Description of Artificial Sequence: Synthetic oligonucleotide
  Antisense strand to SEQ ID NO: 35458
agcuuuaagacuugccgcc

SEQ ID NO: 35460 - RNA, 19 nt, Artificial Sequence
  Description of Artificial Sequence: Synthetic oligonucleotide
  Sense strand starting at position 3303 of SEQ ID NO: 417
cuuuaacuacgcuguagau

SEQ ID NO: 35461 - RNA, 19 nt, Artificial Sequence
  Description of Artificial Sequence: Synthetic oligonucleotide
  Antisense strand to SEQ ID NO: 35460
aucuacagcguaguuaaag

SEQ ID NO: 35462 - RNA, 19 nt, Artificial Sequence
  Description of Artificial Sequence: Synthetic oligonucleotide
  Sense strand starting at position 3516 of SEQ ID NO: 417
cuccaugaauggugaccaa

SEQ ID NO: 35463 - RNA, 19 nt, Artificial Sequence
  Description of Artificial Sequence: Synthetic oligonucleotide
  Antisense strand to SEQ ID NO: 35462
uuggucaccauucauggag

SEQ ID NO: 35464 - RNA, 19 nt, Artificial Sequence
  Description of Artificial Sequence: Synthetic oligonucleotide
  Sense strand starting at position 3744 of SEQ ID NO: 417
guucuaacugcuuaaucug

SEQ ID NO: 35465 - RNA, 19 nt, Artificial Sequence
  Description of Artificial Sequence: Synthetic oligonucleotide
  Antisense strand to SEQ ID NO: 35464
cagauuaagcaguuagaac

SEQ ID NO: 35466 - RNA, 19 nt, Artificial Sequence
  Description of Artificial Sequence: Synthetic oligonucleotide
  Sense strand starting at position 3750 of SEQ ID NO: 417
acugcuuaaucuggcaaca

SEQ ID NO: 35467 - RNA, 19 nt, Artificial Sequence
  Description of Artificial Sequence: Synthetic oligonucleotide
  Antisense strand to SEQ ID NO: 35466
uguugccagauuaagcagu

SEQ ID NO: 35468 - RNA, 19 nt, Artificial Sequence
  Description of Artificial Sequence: Synthetic oligonucleotide
  Sense strand starting at position 3752 of SEQ ID NO: 417
ugcuuaaucuggcaacaaa

SEQ ID NO: 35469 - RNA, 19 nt, Artificial Sequence
  Description of Artificial Sequence: Synthetic oligonucleotide
  Antisense strand to SEQ ID NO: 35468
uuuguugccagauuaagca

SEQ ID NO: 35470 - RNA, 19 nt, Artificial Sequence
  Description of Artificial Sequence: Synthetic oligonucleotide
  Sense strand starting at position 3766 of SEQ ID NO: 417
acaaauuagagccgagaug

SEQ ID NO: 35471 - RNA, 19 nt, Artificial Sequence
  Description of Artificial Sequence: Synthetic oligonucleotide
  Antisense strand to SEQ ID NO: 35470
caucucggcucuaauuugu

SEQ ID NO: 35472 - RNA, 19 nt, Artificial Sequence
  Description of Artificial Sequence: Synthetic oligonucleotide
  Sense strand starting at position 3775 of SEQ ID NO: 417
agccgagaugcucaucagu

SEQ ID NO: 35473 - RNA, 19 nt, Artificial Sequence
  Description of Artificial Sequence: Synthetic oligonucleotide
  Antisense strand to SEQ ID NO: 35472
acugaugagcaucucggcu

SEQ ID NO: 35474 - RNA, 19 nt, Artificial Sequence
  Description of Artificial Sequence: Synthetic oligonucleotide
  Sense strand starting at position 3777 of SEQ ID NO: 417
ccgagaugcucaucaguca

SEQ ID NO: 35475 - RNA, 19 nt, Artificial Sequence
  Description of Artificial Sequence: Synthetic oligonucleotide
  Antisense strand to SEQ ID NO: 35474
ugacugaugagcaucucgg

SEQ ID NO: 35476 - RNA, 19 nt, Artificial Sequence
  Description of Artificial Sequence: Synthetic oligonucleotide
  Sense strand starting at position 3778 of SEQ ID NO: 417
cgagaugcucaucagucau

SEQ ID NO: 35477 - RNA, 19 nt, Artificial Sequence
  Description of Artificial Sequence: Synthetic oligonucleotide
  Antisense strand to SEQ ID NO: 35476
augacugaugagcaucucg

SEQ ID NO: 35478 - RNA, 19 nt, Artificial Sequence
  Description of Artificial Sequence: Synthetic oligonucleotide
  Sense strand starting at position 3780 of SEQ ID NO: 417
agaugcucaucagucauaa

SEQ ID NO: 35479 - RNA, 19 nt, Artificial Sequence
  Description of Artificial Sequence: Synthetic oligonucleotide
  Antisense strand to SEQ ID NO: 35478
uuaugacugaugagcaucu

SEQ ID NO: 35480 - RNA, 19 nt, Artificial Sequence
  Description of Artificial Sequence: Synthetic oligonucleotide
  Sense strand starting at position 3811 of SEQ ID NO: 417
ccuguucuucccgaugacu

SEQ ID NO: 35481 - RNA, 19 nt, Artificial Sequence
  Description of Artificial Sequence: Synthetic oligonucleotide
  Antisense strand to SEQ ID NO: 35480
agucaucgggaagaacagg

SEQ ID NO: 35482 - RNA, 19 nt, Artificial Sequence
  Description of Artificial Sequence: Synthetic oligonucleotide
  Sense strand starting at position 3826 of SEQ ID NO: 417
gacugcaacuagguaauau

SEQ ID NO: 35483 - RNA, 19 nt, Artificial Sequence
  Description of Artificial Sequence: Synthetic oligonucleotide
  Antisense strand to SEQ ID NO: 35482
auauuaccuaguugcaguc

SEQ ID NO: 35484 - RNA, 19 nt, Artificial Sequence
  Description of Artificial Sequence: Synthetic oligonucleotide
  Sense strand starting at position 3830 of SEQ ID NO: 417
gcaacuagguaauauuauu

SEQ ID NO: 35485 - RNA, 19 nt, Artificial Sequence
  Description of Artificial Sequence: Synthetic oligonucleotide
  Antisense strand to SEQ ID NO: 35484
aauaauauuaccuaguugc

SEQ ID NO: 35486 - RNA, 19 nt, Artificial Sequence
  Description of Artificial Sequence: Synthetic oligonucleotide
  Sense strand starting at position 105 of SEQ ID NO: 418
aguagagucuugcucauuu

SEQ ID NO: 35487 - RNA, 19 nt, Artificial Sequence
  Description of Artificial Sequence: Synthetic oligonucleotide
  Antisense strand to SEQ ID NO: 35486
aaaugagcaagacucuacu

SEQ ID NO: 35488 - RNA, 19 nt, Artificial Sequence
  Description of Artificial Sequence: Synthetic oligonucleotide
  Sense strand starting at position 122 of SEQ ID NO: 418
uuuccaugcucccuggaga

SEQ ID NO: 35489 - RNA, 19 nt, Artificial Sequence
  Description of Artificial Sequence: Synthetic oligonucleotide
  Antisense strand to SEQ ID NO: 35488
ucuccagggagcauggaaa

SEQ ID NO: 35490 - RNA, 19 nt, Artificial Sequence
  Description of Artificial Sequence: Synthetic oligonucleotide
  Sense strand starting at position 446 of SEQ ID NO: 418
gucgaugugaucguugcuu

SEQ ID NO: 35491 - RNA, 19 nt, Artificial Sequence
  Description of Artificial Sequence: Synthetic oligonucleotide
  Antisense strand to SEQ ID NO: 35490
aagcaacgaucacaucgac

SEQ ID NO: 35492 - RNA, 19 nt, Artificial Sequence
  Description of Artificial Sequence: Synthetic oligonucleotide
  Sense strand starting at position 468 of SEQ ID NO: 418
uuggcaaagcuguagauga

SEQ ID NO: 35493 - RNA, 19 nt, Artificial Sequence
  Description of Artificial Sequence: Synthetic oligonucleotide
  Antisense strand to SEQ ID NO: 35492
ucaucuacagcuuugccaa

SEQ ID NO: 35494 - RNA, 19 nt, Artificial Sequence
  Description of Artificial Sequence: Synthetic oligonucleotide
  Sense strand starting at position 702 of SEQ ID NO: 418
ugcagauugugagcaaagu

SEQ ID NO: 35495 - RNA, 19 nt, Artificial Sequence
  Description of Artificial Sequence: Synthetic oligonucleotide
  Antisense strand to SEQ ID NO: 35494
acuuugcucacaaucugca

SEQ ID NO: 35496 - RNA, 19 nt, Artificial Sequence
  Description of Artificial Sequence: Synthetic oligonucleotide
  Sense strand starting at position 703 of SEQ ID NO: 418
gcagauugugagcaaaguc

SEQ ID NO: 35497 - RNA, 19 nt, Artificial Sequence
  Description of Artificial Sequence: Synthetic oligonucleotide
  Antisense strand to SEQ ID NO: 35496
gacuuugcucacaaucugc

SEQ ID NO: 35498 - RNA, 19 nt, Artificial Sequence
  Description of Artificial Sequence: Synthetic oligonucleotide
  Sense strand starting at position 768 of SEQ ID NO: 418
ggaguucccugacugguga

SEQ ID NO: 35499 - RNA, 19 nt, Artificial Sequence
  Description of Artificial Sequence: Synthetic oligonucleotide
  Antisense strand to SEQ ID NO: 35498
ucaccagucagggaacucc

SEQ ID NO: 35500 - RNA, 19 nt, Artificial Sequence
  Description of Artificial Sequence: Synthetic oligonucleotide
  Sense strand starting at position 769 of SEQ ID NO: 418
gaguucccugacuggugaa

SEQ ID NO: 35501 - RNA, 19 nt, Artificial Sequence
  Description of Artificial Sequence: Synthetic oligonucleotide
  Antisense strand to SEQ ID NO: 35500
uucaccagucagggaacuc

SEQ ID NO: 35502 - RNA, 19 nt, Artificial Sequence
  Description of Artificial Sequence: Synthetic oligonucleotide
  Sense strand starting at position 770 of SEQ ID NO: 418
aguucccugacuggugaaa

SEQ ID NO: 35503 - RNA, 19 nt, Artificial Sequence
  Description of Artificial Sequence: Synthetic oligonucleotide
  Antisense strand to SEQ ID NO: 35502
uuucaccagucagggaacu

SEQ ID NO: 35504 - RNA, 19 nt, Artificial Sequence
  Description of Artificial Sequence: Synthetic oligonucleotide
  Sense strand starting at position 955 of SEQ ID NO: 418
caagauagccugugucaca

SEQ ID NO: 35505 - RNA, 19 nt, Artificial Sequence
  Description of Artificial Sequence: Synthetic oligonucleotide
  Antisense strand to SEQ ID NO: 35504
ugugacacaggcuaucuug

SEQ ID NO: 35506 - RNA, 19 nt, Artificial Sequence
  Description of Artificial Sequence: Synthetic oligonucleotide
  Sense strand starting at position 1070 of SEQ ID NO: 418
gagugccucuaacuuguaa

SEQ ID NO: 35507 - RNA, 19 nt, Artificial Sequence
  Description of Artificial Sequence: Synthetic oligonucleotide
  Antisense strand to SEQ ID NO: 35506
uuacaaguuagaggcacuc

SEQ ID NO: 35508 - RNA, 19 nt, Artificial Sequence
  Description of Artificial Sequence: Synthetic oligonucleotide
  Sense strand starting at position 1377 of SEQ ID NO: 418
uuuagcaaacgugacuauu

SEQ ID NO: 35509 - RNA, 19 nt, Artificial Sequence
  Description of Artificial Sequence: Synthetic oligonucleotide
  Antisense strand to SEQ ID NO: 35508
aauagucacguuugcuaaa

SEQ ID NO: 35510 - RNA, 19 nt, Artificial Sequence
  Description of Artificial Sequence: Synthetic oligonucleotide
  Sense strand starting at position 1425 of SEQ ID NO: 418
ggcaaaguguucccuugga

SEQ ID NO: 35511 - RNA, 19 nt, Artificial Sequence
  Description of Artificial Sequence: Synthetic oligonucleotide
  Antisense strand to SEQ ID NO: 35510
uccaagggaacacuuugcc

SEQ ID NO: 35512 - RNA, 19 nt, Artificial Sequence
  Description of Artificial Sequence: Synthetic oligonucleotide
  Sense strand starting at position 1797 of SEQ ID NO: 418
ccagauaccuguuugagac

SEQ ID NO: 35513 - RNA, 19 nt, Artificial Sequence
  Description of Artificial Sequence: Synthetic oligonucleotide
  Antisense strand to SEQ ID NO: 35512
gucucaaacagguaucugg

SEQ ID NO: 35514 - RNA, 19 nt, Artificial Sequence
  Description of Artificial Sequence: Synthetic oligonucleotide
  Sense strand starting at position 1985 of SEQ ID NO: 418
ggaacugagcuauguguca

SEQ ID NO: 35515 - RNA, 19 nt, Artificial Sequence
  Description of Artificial Sequence: Synthetic oligonucleotide
  Antisense strand to SEQ ID NO: 35514
ugacacauagcucaguucc

SEQ ID NO: 35516 - RNA, 19 nt, Artificial Sequence
  Description of Artificial Sequence: Synthetic oligonucleotide
  Sense strand starting at position 2129 of SEQ ID NO: 418
gagccacuagggugaugau

SEQ ID NO: 35517 - RNA, 19 nt, Artificial Sequence
  Description of Artificial Sequence: Synthetic oligonucleotide
  Antisense strand to SEQ ID NO: 35516
aucaucacccuaguggcuc

SEQ ID NO: 35518 - RNA, 19 nt, Artificial Sequence
  Description of Artificial Sequence: Synthetic oligonucleotide
  Sense strand starting at position 2152 of SEQ ID NO: 418
ggcuucuggagaugugacu

SEQ ID NO: 35519 - RNA, 19 nt, Artificial Sequence
  Description of Artificial Sequence: Synthetic oligonucleotide
  Antisense strand to SEQ ID NO: 35518
agucacaucuccagaagcc

SEQ ID NO: 35520 - RNA, 19 nt, Artificial Sequence
  Description of Artificial Sequence: Synthetic oligonucleotide
  Sense strand starting at position 2309 of SEQ ID NO: 418
ggcacaauuuaguuacgua

SEQ ID NO: 35521 - RNA, 19 nt, Artificial Sequence
  Description of Artificial Sequence: Synthetic oligonucleotide
  Antisense strand to SEQ ID NO: 35520
uacguaacuaaauugugcc

SEQ ID NO: 35522 - RNA, 19 nt, Artificial Sequence
  Description of Artificial Sequence: Synthetic oligonucleotide
  Sense strand starting at position 2329 of SEQ ID NO: 418
gccacagugcccuaaacaa

SEQ ID NO: 35523 - RNA, 19 nt, Artificial Sequence
  Description of Artificial Sequence: Synthetic oligonucleotide
  Antisense strand to SEQ ID NO: 35522
uuguuuagggcacuguggc

SEQ ID NO: 35524 - RNA, 19 nt, Artificial Sequence
  Description of Artificial Sequence: Synthetic oligonucleotide
  Sense strand starting at position 2546 of SEQ ID NO: 418
gcugauuauuuagagggaa

SEQ ID NO: 35525 - RNA, 19 nt, Artificial Sequence
  Description of Artificial Sequence: Synthetic oligonucleotide
  Antisense strand to SEQ ID NO: 35524
uucccucuaaauaaucagc

SEQ ID NO: 35526 - RNA, 19 nt, Artificial Sequence
  Description of Artificial Sequence: Synthetic oligonucleotide
  Sense strand starting at position 2843 of SEQ ID NO: 418
gaggcucccugccugauua

SEQ ID NO: 35527 - RNA, 19 nt, Artificial Sequence
  Description of Artificial Sequence: Synthetic oligonucleotide
  Antisense strand to SEQ ID NO: 35526
uaaucaggcagggagccuc

SEQ ID NO: 35528 - RNA, 19 nt, Artificial Sequence
  Description of Artificial Sequence: Synthetic oligonucleotide
  Sense strand starting at position 2853 of SEQ ID NO: 418
gccugauuacgucccuguu

SEQ ID NO: 35529 - RNA, 19 nt, Artificial Sequence
  Description of Artificial Sequence: Synthetic oligonucleotide
  Antisense strand to SEQ ID NO: 35528
aacagggacguaaucaggc

SEQ ID NO: 35530 - RNA, 19 nt, Artificial Sequence
  Description of Artificial Sequence: Synthetic oligonucleotide
  Sense strand starting at position 2893 of SEQ ID NO: 418
gccaaauauccaggacaac

SEQ ID NO: 35531 - RNA, 19 nt, Artificial Sequence
  Description of Artificial Sequence: Synthetic oligonucleotide
  Antisense strand to SEQ ID NO: 35530
guuguccuggauauuuggc

SEQ ID NO: 35532 - RNA, 19 nt, Artificial Sequence
  Description of Artificial Sequence: Synthetic oligonucleotide
  Sense strand starting at position 2913 of SEQ ID NO: 418
ccauucuuugcaggcuuaa

SEQ ID NO: 35533 - RNA, 19 nt, Artificial Sequence
  Description of Artificial Sequence: Synthetic oligonucleotide
  Antisense strand to SEQ ID NO: 35532
uuaagccugcaaagaaugg

SEQ ID NO: 35534 - RNA, 19 nt, Artificial Sequence
  Description of Artificial Sequence: Synthetic oligonucleotide
  Sense strand starting at position 2937 of SEQ ID NO: 418
auuaauaggcagugaguga

SEQ ID NO: 35535 - RNA, 19 nt, Artificial Sequence
  Description of Artificial Sequence: Synthetic oligonucleotide
  Antisense strand to SEQ ID NO: 35534
ucacucacugccuauuaau

SEQ ID NO: 35536 - RNA, 19 nt, Artificial Sequence
  Description of Artificial Sequence: Synthetic oligonucleotide
  Sense strand starting at position 3177 of SEQ ID NO: 418
guggcuuguccagaaucac

SEQ ID NO: 35537 - RNA, 19 nt, Artificial Sequence
  Description of Artificial Sequence: Synthetic oligonucleotide
  Antisense strand to SEQ ID NO: 35536
gugauucuggacaagccac

SEQ ID NO: 35538 - RNA, 19 nt, Artificial Sequence
  Description of Artificial Sequence: Synthetic oligonucleotide
  Sense strand starting at position 3187 of SEQ ID NO: 418
cagaaucacgcucggugaa

SEQ ID NO: 35539 - RNA, 19 nt, Artificial Sequence
  Description of Artificial Sequence: Synthetic oligonucleotide
  Antisense strand to SEQ ID NO: 35538
uucaccgagcgugauucug

SEQ ID NO: 35540 - RNA, 19 nt, Artificial Sequence
  Description of Artificial Sequence: Synthetic oligonucleotide
  Sense strand starting at position 3188 of SEQ ID NO: 418
agaaucacgcucggugaau

SEQ ID NO: 35541 - RNA, 19 nt, Artificial Sequence
  Description of Artificial Sequence: Synthetic oligonucleotide
  Antisense strand to SEQ ID NO: 35540
auucaccgagcgugauucu

SEQ ID NO: 35542 - RNA, 19 nt, Artificial Sequence
  Description of Artificial Sequence: Synthetic oligonucleotide
  Sense strand starting at position 3189 of SEQ ID NO: 418
gaaucacgcucggugaaua

SEQ ID NO: 35543 - RNA, 19 nt, Artificial Sequence
  Description of Artificial Sequence: Synthetic oligonucleotide
  Antisense strand to SEQ ID NO: 35542
uauucaccgagcgugauuc

SEQ ID NO: 35544 - RNA, 19 nt, Artificial Sequence
  Description of Artificial Sequence: Synthetic oligonucleotide
  Sense strand starting at position 3194 of SEQ ID NO: 418
acgcucggugaauacuaaa

SEQ ID NO: 35545 - RNA, 19 nt, Artificial Sequence
  Description of Artificial Sequence: Synthetic oligonucleotide
  Antisense strand to SEQ ID NO: 35544
uuuaguauucaccgagcgu

SEQ ID NO: 35546 - RNA, 19 nt, Artificial Sequence
  Description of Artificial Sequence: Synthetic oligonucleotide
  Sense strand starting at position 3264 of SEQ ID NO: 418
gauugacagcaaugacagu

SEQ ID NO: 35547 - RNA, 19 nt, Artificial Sequence
  Description of Artificial Sequence: Synthetic oligonucleotide
  Antisense strand to SEQ ID NO: 35546
acugucauugcugucaauc

SEQ ID NO: 35548 - RNA, 19 nt, Artificial Sequence
  Description of Artificial Sequence: Synthetic oligonucleotide
  Sense strand starting at position 3285 of SEQ ID NO: 418
augauagcuucuucugguu

SEQ ID NO: 35549 - RNA, 19 nt, Artificial Sequence
  Description of Artificial Sequence: Synthetic oligonucleotide
  Antisense strand to SEQ ID NO: 35548
aaccagaagaagcuaucau

SEQ ID NO: 35550 - RNA, 19 nt, Artificial Sequence
  Description of Artificial Sequence: Synthetic oligonucleotide
  Sense strand starting at position 3350 of SEQ ID NO: 418
uaugaaguggcaugcagau

SEQ ID NO: 35551 - RNA, 19 nt, Artificial Sequence
  Description of Artificial Sequence: Synthetic oligonucleotide
  Antisense strand to SEQ ID NO: 35550
aucugcaugccacuucaua

SEQ ID NO: 35552 - RNA, 19 nt, Artificial Sequence
  Description of Artificial Sequence: Synthetic oligonucleotide
  Sense strand starting at position 3526 of SEQ ID NO: 418
gaaggcagcuuuguaacaa

SEQ ID NO: 35553 - RNA, 19 nt, Artificial Sequence
  Description of Artificial Sequence: Synthetic oligonucleotide
  Antisense strand to SEQ ID NO: 35552
uuguuacaaagcugccuuc

SEQ ID NO: 35554 - RNA, 19 nt, Artificial Sequence
  Description of Artificial Sequence: Synthetic oligonucleotide
  Sense strand starting at position 3829 of SEQ ID NO: 418
acgagacuccuaggucaga

SEQ ID NO: 35555 - RNA, 19 nt, Artificial Sequence
  Description of Artificial Sequence: Synthetic oligonucleotide
  Antisense strand to SEQ ID NO: 35554
ucugaccuaggagucucgu

SEQ ID NO: 35556 - RNA, 19 nt, Artificial Sequence
  Description of Artificial Sequence: Synthetic oligonucleotide
  Sense strand starting at position 3854 of SEQ ID NO: 418
ggacuuuauuauccauggu

SEQ ID NO: 35557 - RNA, 19 nt, Artificial Sequence
  Description of Artificial Sequence: Synthetic oligonucleotide
  Antisense strand to SEQ ID NO: 35556
accauggauaauaaagucc

SEQ ID NO: 35558 - RNA, 19 nt, Artificial Sequence
  Description of Artificial Sequence: Synthetic oligonucleotide
  Sense strand starting at position 3857 of SEQ ID NO: 418
cuuuauuauccaugguaca

SEQ ID NO: 35559 - RNA, 19 nt, Artificial Sequence
  Description of Artificial Sequence: Synthetic oligonucleotide
  Antisense strand to SEQ ID NO: 35558
uguaccauggauaauaaag

SEQ ID NO: 35560 - RNA, 19 nt, Artificial Sequence
  Description of Artificial Sequence: Synthetic oligonucleotide
  Sense strand starting at position 3858 of SEQ ID NO: 418
uuuauuauccaugguacag

SEQ ID NO: 35561 - RNA, 19 nt, Artificial Sequence
  Description of Artificial Sequence: Synthetic oligonucleotide
  Antisense strand to SEQ ID NO: 35560
cuguaccauggauaauaaa

SEQ ID NO: 35562 - RNA, 19 nt, Artificial Sequence
  Description of Artificial Sequence: Synthetic oligonucleotide
  Sense strand starting at position 3954 of SEQ ID NO: 418
gguagaugccaugaaugca

SEQ ID NO: 35563 - RNA, 19 nt, Artificial Sequence
  Description of Artificial Sequence: Synthetic oligonucleotide
  Antisense strand to SEQ ID NO: 35562
ugcauucauggcaucuacc

SEQ ID NO: 35564 - RNA, 19 nt, Artificial Sequence
  Description of Artificial Sequence: Synthetic oligonucleotide
  Sense strand starting at position 3962 of SEQ ID NO: 418
ccaugaaugcaaugaguua

SEQ ID NO: 35565 - RNA, 19 nt, Artificial Sequence
  Description of Artificial Sequence: Synthetic oligonucleotide
  Antisense strand to SEQ ID NO: 35564
uaacucauugcauucaugg

SEQ ID NO: 35566 - RNA, 19 nt, Artificial Sequence
  Description of Artificial Sequence: Synthetic oligonucleotide
  Sense strand starting at position 3973 of SEQ ID NO: 419
gacauuacgccuuauuaug

SEQ ID NO: 35567 - RNA, 19 nt, Artificial Sequence
  Description of Artificial Sequence: Synthetic oligonucleotide
  Antisense strand to SEQ ID NO: 35566
cauaauaaggcguaauguc

SEQ ID NO: 35568 - RNA, 19 nt, Artificial Sequence
  Description of Artificial Sequence: Synthetic oligonucleotide
  Sense strand starting at position 3914 of SEQ ID NO: 419
ccagauuggcacugagagu

SEQ ID NO: 35569 - RNA, 19 nt, Artificial Sequence
  Description of Artificial Sequence: Synthetic oligonucleotide
  Antisense strand to SEQ ID NO: 35568
acucucagugccaaucugg

SEQ ID NO: 35570 - RNA, 19 nt, Artificial Sequence
  Description of Artificial Sequence: Synthetic oligonucleotide
  Sense strand starting at position 3873 of SEQ ID NO: 419
auugcuuugcaguugucua

SEQ ID NO: 35571 - RNA, 19 nt, Artificial Sequence
  Description of Artificial Sequence: Synthetic oligonucleotide
  Antisense strand to SEQ ID NO: 35570
uagacaacugcaaagcaau

SEQ ID NO: 35572 - RNA, 19 nt, Artificial Sequence
  Description of Artificial Sequence: Synthetic oligonucleotide
  Sense strand starting at position 3766 of SEQ ID NO: 419
guuaguuugaacugagauc

SEQ ID NO: 35573 - RNA, 19 nt, Artificial Sequence
  Description of Artificial Sequence: Synthetic oligonucleotide
  Antisense strand to SEQ ID NO: 35572
gaucucaguucaaacuaac

SEQ ID NO: 35574 - RNA, 19 nt, Artificial Sequence
  Description of Artificial Sequence: Synthetic oligonucleotide
  Sense strand starting at position 3574 of SEQ ID NO: 419
uguuucuuuguugauaaca

SEQ ID NO: 35575 - RNA, 19 nt, Artificial Sequence
  Description of Artificial Sequence: Synthetic oligonucleotide
  Antisense strand to SEQ ID NO: 35574
uguuaucaacaaagaaaca

SEQ ID NO: 35576 - RNA, 19 nt, Artificial Sequence
  Description of Artificial Sequence: Synthetic oligonucleotide
  Sense strand starting at position 3412 of SEQ ID NO: 419
cugugagaaauagacguuu

SEQ ID NO: 35577 - RNA, 19 nt, Artificial Sequence
  Description of Artificial Sequence: Synthetic oligonucleotide
  Antisense strand to SEQ ID NO: 35576
aaacgucuauuucucacag

SEQ ID NO: 35578 - RNA, 19 nt, Artificial Sequence
  Description of Artificial Sequence: Synthetic oligonucleotide
  Sense strand starting at position 3403 of SEQ ID NO: 419
gccucccaacugugagaaa

SEQ ID NO: 35579 - RNA, 19 nt, Artificial Sequence
  Description of Artificial Sequence: Synthetic oligonucleotide
  Antisense strand to SEQ ID NO: 35578
uuucucacaguugggaggc

SEQ ID NO: 35580 - RNA, 19 nt, Artificial Sequence
  Description of Artificial Sequence: Synthetic oligonucleotide
  Sense strand starting at position 3297 of SEQ ID NO: 419
ucuguuuaccaugggaaua

SEQ ID NO: 35581 - RNA, 19 nt, Artificial Sequence
  Description of Artificial Sequence: Synthetic oligonucleotide
  Antisense strand to SEQ ID NO: 35580
uauucccaugguaaacaga

SEQ ID NO: 35582 - RNA, 19 nt, Artificial Sequence
  Description of Artificial Sequence: Synthetic oligonucleotide
  Sense strand starting at position 3296 of SEQ ID NO: 419
cucuguuuaccaugggaau

SEQ ID NO: 35583 - RNA, 19 nt, Artificial Sequence
  Description of Artificial Sequence: Synthetic oligonucleotide
  Antisense strand to SEQ ID NO: 35582
auucccaugguaaacagag

SEQ ID NO: 35584 - RNA, 19 nt, Artificial Sequence
  Description of Artificial Sequence: Synthetic oligonucleotide
  Sense strand starting at position 3287 of SEQ ID NO: 419
agagaugaucucuguuuac

SEQ ID NO: 35585 - RNA, 19 nt, Artificial Sequence
  Description of Artificial Sequence: Synthetic oligonucleotide
  Antisense strand to SEQ ID NO: 35584
guaaacagagaucaucucu

SEQ ID NO: 35586 - RNA, 19 nt, Artificial Sequence
  Description of Artificial Sequence: Synthetic oligonucleotide
  Sense strand starting at position 3262 of SEQ ID NO: 419
gugcccuuacaagaauaga

SEQ ID NO: 35587 - RNA, 19 nt, Artificial Sequence
  Description of Artificial Sequence: Synthetic oligonucleotide
  Antisense strand to SEQ ID NO: 35586
ucuauucuuguaagggcac

SEQ ID NO: 35588 - RNA, 19 nt, Artificial Sequence
  Description of Artificial Sequence: Synthetic oligonucleotide
  Sense strand starting at position 3190 of SEQ ID NO: 419
ugugauggucuauggagaa

SEQ ID NO: 35589 - RNA, 19 nt, Artificial Sequence
  Description of Artificial Sequence: Synthetic oligonucleotide
  Antisense strand to SEQ ID NO: 35588
uucuccauagaccaucaca

SEQ ID NO: 35590 - RNA, 19 nt, Artificial Sequence
  Description of Artificial Sequence: Synthetic oligonucleotide
  Sense strand starting at position 2788 of SEQ ID NO: 419
acaagaaguaugcgaagga

SEQ ID NO: 35591 - RNA, 19 nt, Artificial Sequence
  Description of Artificial Sequence: Synthetic oligonucleotide
  Antisense strand to SEQ ID NO: 35590
uccuucgcauacuucuugu

SEQ ID NO: 35592 - RNA, 19 nt, Artificial Sequence
  Description of Artificial Sequence: Synthetic oligonucleotide
  Sense strand starting at position 2780 of SEQ ID NO: 419
gugcaaguacaagaaguau

SEQ ID NO: 35593 - RNA, 19 nt, Artificial Sequence
  Description of Artificial Sequence: Synthetic oligonucleotide
  Antisense strand to SEQ ID NO: 35592
auacuucuuguacuugcac

SEQ ID NO: 35594 - RNA, 19 nt, Artificial Sequence
  Description of Artificial Sequence: Synthetic oligonucleotide
  Sense strand starting at position 2103 of SEQ ID NO: 419
agaaauuaguugcugugaa

SEQ ID NO: 35595 - RNA, 19 nt, Artificial Sequence
  Description of Artificial Sequence: Synthetic oligonucleotide
  Antisense strand to SEQ ID NO: 35594
uucacagcaacuaauuucu

SEQ ID NO: 35596 - RNA, 19 nt, Artificial Sequence
  Description of Artificial Sequence: Synthetic oligonucleotide
  Sense strand starting at position 2048 of SEQ ID NO: 419
gugaaacuucuuggaaaug

SEQ ID NO: 35597 - RNA, 19 nt, Artificial Sequence
  Description of Artificial Sequence: Synthetic oligonucleotide
  Antisense strand to SEQ ID NO: 35596
cauuuccaagaaguuucac

SEQ ID NO: 35598 - RNA, 19 nt, Artificial Sequence
  Description of Artificial Sequence: Synthetic oligonucleotide
  Sense strand starting at position 2046 of SEQ ID NO: 419
uugugaaacuucuuggaaa

SEQ ID NO: 35599 - RNA, 19 nt, Artificial Sequence
  Description of Artificial Sequence: Synthetic oligonucleotide
  Antisense strand to SEQ ID NO: 35598
uuuccaagaaguuucacaa

SEQ ID NO: 35600 - RNA, 19 nt, Artificial Sequence
  Description of Artificial Sequence: Synthetic oligonucleotide
  Sense strand starting at position 2015 of SEQ ID NO: 419
gcaagaaguccagggacuu

SEQ ID NO: 35601 - RNA, 19 nt, Artificial Sequence
  Description of Artificial Sequence: Synthetic oligonucleotide
  Antisense strand to SEQ ID NO: 35600
aagucccuggacuucuugc

SEQ ID NO: 35602 - RNA, 19 nt, Artificial Sequence
  Description of Artificial Sequence: Synthetic oligonucleotide
  Sense strand starting at position 1993 of SEQ ID NO: 419
cagccuguccuacacgaaa

SEQ ID NO: 35603 - RNA, 19 nt, Artificial Sequence
  Description of Artificial Sequence: Synthetic oligonucleotide
  Antisense strand to SEQ ID NO: 35602
uuucguguaggacaggcug

SEQ ID NO: 35604 - RNA, 19 nt, Artificial Sequence
  Description of Artificial Sequence: Synthetic oligonucleotide
  Sense strand starting at position 1544 of SEQ ID NO: 419
gcccaagaaagaugugacu

SEQ ID NO: 35605 - RNA, 19 nt, Artificial Sequence
  Description of Artificial Sequence: Synthetic oligonucleotide
  Antisense strand to SEQ ID NO: 35604
agucacaucuuucuugggc

SEQ ID NO: 35606 - RNA, 19 nt, Artificial Sequence
  Description of Artificial Sequence: Synthetic oligonucleotide
  Sense strand starting at position 1356 of SEQ ID NO: 419
cucauagccuuguuuauuu

SEQ ID NO: 35607 - RNA, 19 nt, Artificial Sequence
  Description of Artificial Sequence: Synthetic oligonucleotide
  Antisense strand to SEQ ID NO: 35606
aaauaaacaaggcuaugag

SEQ ID NO: 35608 - RNA, 19 nt, Artificial Sequence
  Description of Artificial Sequence: Synthetic oligonucleotide
  Sense strand starting at position 1091 of SEQ ID NO: 419
agaaauucucuguggcaca

SEQ ID NO: 35609 - RNA, 19 nt, Artificial Sequence
  Description of Artificial Sequence: Synthetic oligonucleotide
  Antisense strand to SEQ ID NO: 35608
ugugccacagagaauuucu

SEQ ID NO: 35610 - RNA, 19 nt, Artificial Sequence
  Description of Artificial Sequence: Synthetic oligonucleotide
  Sense strand starting at position 1090 of SEQ ID NO: 419
gagaaauucucuguggcac

SEQ ID NO: 35611 - RNA, 19 nt, Artificial Sequence
  Description of Artificial Sequence: Synthetic oligonucleotide
  Antisense strand to SEQ ID NO: 35610
gugccacagagaauuucuc

SEQ ID NO: 35612 - RNA, 19 nt, Artificial Sequence
  Description of Artificial Sequence: Synthetic oligonucleotide
  Sense strand starting at position 1089 of SEQ ID NO: 419
agagaaauucucuguggca

SEQ ID NO: 35613 - RNA, 19 nt, Artificial Sequence
  Description of Artificial Sequence: Synthetic oligonucleotide
  Antisense strand to SEQ ID NO: 35612
ugccacagagaauuucucu

SEQ ID NO: 35614 - RNA, 19 nt, Artificial Sequence
  Description of Artificial Sequence: Synthetic oligonucleotide
  Sense strand starting at position 1075 of SEQ ID NO: 419
cuaaguaaauggucagaga

SEQ ID NO: 35615 - RNA, 19 nt, Artificial Sequence
  Description of Artificial Sequence: Synthetic oligonucleotide
  Antisense strand to SEQ ID NO: 35614
ucucugaccauuuacuuag

SEQ ID NO: 35616 - RNA, 19 nt, Artificial Sequence
  Description of Artificial Sequence: Synthetic oligonucleotide
  Sense strand starting at position 1006 of SEQ ID NO: 419
cuguucucucuugaugacu

SEQ ID NO: 35617 - RNA, 19 nt, Artificial Sequence
  Description of Artificial Sequence: Synthetic oligonucleotide
  Antisense strand to SEQ ID NO: 35616
agucaucaagagagaacag

SEQ ID NO: 35618 - RNA, 19 nt, Artificial Sequence
  Description of Artificial Sequence: Synthetic oligonucleotide
  Sense strand starting at position 879 of SEQ ID NO: 419
cucugaaaccuuuacgggu

SEQ ID NO: 35619 - RNA, 19 nt, Artificial Sequence
  Description of Artificial Sequence: Synthetic oligonucleotide
  Antisense strand to SEQ ID NO: 35618
acccguaaagguuucagag

SEQ ID NO: 35620 - RNA, 19 nt, Artificial Sequence
  Description of Artificial Sequence: Synthetic oligonucleotide
  Sense strand starting at position 749 of SEQ ID NO: 419
uggugagauuauucuauac

SEQ ID NO: 35621 - RNA, 19 nt, Artificial Sequence
  Description of Artificial Sequence: Synthetic oligonucleotide
  Antisense strand to SEQ ID NO: 35620
guauagaauaaucucacca

SEQ ID NO: 35622 - RNA, 19 nt, Artificial Sequence
  Description of Artificial Sequence: Synthetic oligonucleotide
  Sense strand starting at position 714 of SEQ ID NO: 419
gucucuucuccauaggaca

SEQ ID NO: 35623 - RNA, 19 nt, Artificial Sequence
  Description of Artificial Sequence: Synthetic oligonucleotide
  Antisense strand to SEQ ID NO: 35622
uguccuauggagaagagac

SEQ ID NO: 35624 - RNA, 19 nt, Artificial Sequence
  Description of Artificial Sequence: Synthetic oligonucleotide
  Sense strand starting at position 615 of SEQ ID NO: 419
uggucccacuauguauaaa

SEQ ID NO: 35625 - RNA, 19 nt, Artificial Sequence
  Description of Artificial Sequence: Synthetic oligonucleotide
  Antisense strand to SEQ ID NO: 35624
uuuauacauagugggacca

SEQ ID NO: 35626 - RNA, 19 nt, Artificial Sequence
  Description of Artificial Sequence: Synthetic oligonucleotide
  Sense strand starting at position 614 of SEQ ID NO: 419
auggucccacuauguauaa

SEQ ID NO: 35627 - RNA, 19 nt, Artificial Sequence
  Description of Artificial Sequence: Synthetic oligonucleotide
  Antisense strand to SEQ ID NO: 35626
uuauacauagugggaccau

SEQ ID NO: 35628 - RNA, 19 nt, Artificial Sequence
  Description of Artificial Sequence: Synthetic oligonucleotide
  Sense strand starting at position 515 of SEQ ID NO: 419
uuuauuguccaaugagacc

SEQ ID NO: 35629 - RNA, 19 nt, Artificial Sequence
  Description of Artificial Sequence: Synthetic oligonucleotide
  Antisense strand to SEQ ID NO: 35628
ggucucauuggacaauaaa

SEQ ID NO: 35630 - RNA, 19 nt, Artificial Sequence
  Description of Artificial Sequence: Synthetic oligonucleotide
  Sense strand starting at position 512 of SEQ ID NO: 419
uaguuuauuguccaaugag

SEQ ID NO: 35631 - RNA, 19 nt, Artificial Sequence
  Description of Artificial Sequence: Synthetic oligonucleotide
  Antisense strand to SEQ ID NO: 35630
cucauuggacaauaaacua

SEQ ID NO: 35632 - RNA, 19 nt, Artificial Sequence
  Description of Artificial Sequence: Synthetic oligonucleotide
  Sense strand starting at position 511 of SEQ ID NO: 419
auaguuuauuguccaauga

SEQ ID NO: 35633 - RNA, 19 nt, Artificial Sequence
  Description of Artificial Sequence: Synthetic oligonucleotide
  Antisense strand to SEQ ID NO: 35632
ucauuggacaauaaacuau

SEQ ID NO: 35634 - RNA, 19 nt, Artificial Sequence
  Description of Artificial Sequence: Synthetic oligonucleotide
  Sense strand starting at position 477 of SEQ ID NO: 419
ccagucuggaguugaauau

SEQ ID NO: 35635 - RNA, 19 nt, Artificial Sequence
  Description of Artificial Sequence: Synthetic oligonucleotide
  Antisense strand to SEQ ID NO: 35634
auauucaacuccagacugg

SEQ ID NO: 35636 - RNA, 19 nt, Artificial Sequence
  Description of Artificial Sequence: Synthetic oligonucleotide
  Sense strand starting at position 404 of SEQ ID NO: 419
cuaagcauugcucaggaca

SEQ ID NO: 35637 - RNA, 19 nt, Artificial Sequence
  Description of Artificial Sequence: Synthetic oligonucleotide
  Antisense strand to SEQ ID NO: 35636
uguccugagcaaugcuuag

SEQ ID NO: 35638 - RNA, 19 nt, Artificial Sequence
  Description of Artificial Sequence: Synthetic oligonucleotide
  Sense strand starting at position 313 of SEQ ID NO: 419
cuacauuccuaggcagaaa

SEQ ID NO: 35639 - RNA, 19 nt, Artificial Sequence
  Description of Artificial Sequence: Synthetic oligonucleotide
  Antisense strand to SEQ ID NO: 35638
uuucugccuaggaauguag

SEQ ID NO: 35640 - RNA, 19 nt, Artificial Sequence
  Description of Artificial Sequence: Synthetic oligonucleotide
  Sense strand starting at position 312 of SEQ ID NO: 419
ucuacauuccuaggcagaa

SEQ ID NO: 35641 - RNA, 19 nt, Artificial Sequence
  Description of Artificial Sequence: Synthetic oligonucleotide
  Antisense strand to SEQ ID NO: 35640
uucugccuaggaauguaga

SEQ ID NO: 35642 - RNA, 19 nt, Artificial Sequence
  Description of Artificial Sequence: Synthetic oligonucleotide
  Sense strand starting at position 300 of SEQ ID NO: 419
gugccuugugucucuacau

SEQ ID NO: 35643 - RNA, 19 nt, Artificial Sequence
  Description of Artificial Sequence: Synthetic oligonucleotide
  Antisense strand to SEQ ID NO: 35642
auguagagacacaaggcac

SEQ ID NO: 35644 - RNA, 19 nt, Artificial Sequence
  Description of Artificial Sequence: Synthetic oligonucleotide
  Sense strand starting at position 255 of SEQ ID NO: 419
cggccugugguuucuuuau

SEQ ID NO: 35645 - RNA, 19 nt, Artificial Sequence
  Description of Artificial Sequence: Synthetic oligonucleotide
  Antisense strand to SEQ ID NO: 35644
auaaagaaaccacaggccg

SEQ ID NO: 35646 - RNA, 19 nt, Artificial Sequence
  Description of Artificial Sequence: Synthetic oligonucleotide
  Sense strand starting at position 3596 of SEQ ID NO: 420
gcccaagaaagaugugacu

SEQ ID NO: 35647 - RNA, 19 nt, Artificial Sequence
  Description of Artificial Sequence: Synthetic oligonucleotide
  Antisense strand to SEQ ID NO: 35646
agucacaucuuucuugggc

SEQ ID NO: 35648 - RNA, 19 nt, Artificial Sequence
  Description of Artificial Sequence: Synthetic oligonucleotide
  Sense strand starting at position 3408 of SEQ ID NO: 420
cucauagccuuguuuauuu

SEQ ID NO: 35649 - RNA, 19 nt, Artificial Sequence
  Description of Artificial Sequence: Synthetic oligonucleotide
  Antisense strand to SEQ ID NO: 35648
aaauaaacaaggcuaugag

SEQ ID NO: 35650 - RNA, 19 nt, Artificial Sequence
  Description of Artificial Sequence: Synthetic oligonucleotide
  Sense strand starting at position 3143 of SEQ ID NO: 420
agaaauucucuguggcaca

SEQ ID NO: 35651 - RNA, 19 nt, Artificial Sequence
  Description of Artificial Sequence: Synthetic oligonucleotide
  Antisense strand to SEQ ID NO: 35650
ugugccacagagaauuucu

SEQ ID NO: 35652 - RNA, 19 nt, Artificial Sequence
  Description of Artificial Sequence: Synthetic oligonucleotide
  Sense strand starting at position 3142 of SEQ ID NO: 420
gagaaauucucuguggcac

SEQ ID NO: 35653 - RNA, 19 nt, Artificial Sequence
  Description of Artificial Sequence: Synthetic oligonucleotide
  Antisense strand to SEQ ID NO: 35652
gugccacagagaauuucuc

SEQ ID NO: 35654 - RNA, 19 nt, Artificial Sequence
  Description of Artificial Sequence: Synthetic oligonucleotide
  Sense strand starting at position 3141 of SEQ ID NO: 420
agagaaauucucuguggca

SEQ ID NO: 35655 - RNA, 19 nt, Artificial Sequence
  Description of Artificial Sequence: Synthetic oligonucleotide
  Antisense strand to SEQ ID NO: 35654
ugccacagagaauuucucu

SEQ ID NO: 35656 - RNA, 19 nt, Artificial Sequence
  Description of Artificial Sequence: Synthetic oligonucleotide
  Sense strand starting at position 3127 of SEQ ID NO: 420
cuaaguaaauggucagaga

SEQ ID NO: 35657 - RNA, 19 nt, Artificial Sequence
  Description of Artificial Sequence: Synthetic oligonucleotide
  Antisense strand to SEQ ID NO: 35656
ucucugaccauuuacuuag

SEQ ID NO: 35658 - RNA, 19 nt, Artificial Sequence
  Description of Artificial Sequence: Synthetic oligonucleotide
  Sense strand starting at position 3058 of SEQ ID NO: 420
cuguucucucuugaugacu

SEQ ID NO: 35659 - RNA, 19 nt, Artificial Sequence
  Description of Artificial Sequence: Synthetic oligonucleotide
  Antisense strand to SEQ ID NO: 35658
agucaucaagagagaacag

SEQ ID NO: 35660 - RNA, 19 nt, Artificial Sequence
  Description of Artificial Sequence: Synthetic oligonucleotide
  Sense strand starting at position 2931 of SEQ ID NO: 420
cucugaaaccuuuacgggu

SEQ ID NO: 35661 - RNA, 19 nt, Artificial Sequence
  Description of Artificial Sequence: Synthetic oligonucleotide
  Antisense strand to SEQ ID NO: 35660
acccguaaagguuucagag

SEQ ID NO: 35662 - RNA, 19 nt, Artificial Sequence
  Description of Artificial Sequence: Synthetic oligonucleotide
  Sense strand starting at position 2801 of SEQ ID NO: 420
uggugagauuauucuauac

SEQ ID NO: 35663 - RNA, 19 nt, Artificial Sequence
  Description of Artificial Sequence: Synthetic oligonucleotide
  Antisense strand to SEQ ID NO: 35662
guauagaauaaucucacca

SEQ ID NO: 35664 - RNA, 19 nt, Artificial Sequence
  Description of Artificial Sequence: Synthetic oligonucleotide
  Sense strand starting at position 2766 of SEQ ID NO: 420
gucucuucuccauaggaca

SEQ ID NO: 35665 - RNA, 19 nt, Artificial Sequence
  Description of Artificial Sequence: Synthetic oligonucleotide
  Antisense strand to SEQ ID NO: 35664
uguccuauggagaagagac

SEQ ID NO: 35666 - RNA, 19 nt, Artificial Sequence
  Description of Artificial Sequence: Synthetic oligonucleotide
  Sense strand starting at position 2667 of SEQ ID NO: 420
uggucccacuauguauaaa

SEQ ID NO: 35667 - RNA, 19 nt, Artificial Sequence
  Description of Artificial Sequence: Synthetic oligonucleotide
  Antisense strand to SEQ ID NO: 35666
uuuauacauagugggacca

SEQ ID NO: 35668 - RNA, 19 nt, Artificial Sequence
  Description of Artificial Sequence: Synthetic oligonucleotide
  Sense strand starting at position 2666 of SEQ ID NO: 420
auggucccacuauguauaa

SEQ ID NO: 35669 - RNA, 19 nt, Artificial Sequence
  Description of Artificial Sequence: Synthetic oligonucleotide
  Antisense strand to SEQ ID NO: 35668
uuauacauagugggaccau

SEQ ID NO: 35670 - RNA, 19 nt, Artificial Sequence
  Description of Artificial Sequence: Synthetic oligonucleotide
  Sense strand starting at position 2567 of SEQ ID NO: 420
uuuauuguccaaugagacc

SEQ ID NO: 35671 - RNA, 19 nt, Artificial Sequence
  Description of Artificial Sequence: Synthetic oligonucleotide
  Antisense strand to SEQ ID NO: 35670
ggucucauuggacaauaaa

SEQ ID NO: 35672 - RNA, 19 nt, Artificial Sequence
  Description of Artificial Sequence: Synthetic oligonucleotide
  Sense strand starting at position 2564 of SEQ ID NO: 420
uaguuuauuguccaaugag

SEQ ID NO: 35673 - RNA, 19 nt, Artificial Sequence
  Description of Artificial Sequence: Synthetic oligonucleotide
  Antisense strand to SEQ ID NO: 35672
cucauuggacaauaaacua

SEQ ID NO: 35674 - RNA, 19 nt, Artificial Sequence
  Description of Artificial Sequence: Synthetic oligonucleotide
  Sense strand starting at position 2563 of SEQ ID NO: 420
auaguuuauuguccaauga

SEQ ID NO: 35675 - RNA, 19 nt, Artificial Sequence
  Description of Artificial Sequence: Synthetic oligonucleotide
  Antisense strand to SEQ ID NO: 35674
ucauuggacaauaaacuau

SEQ ID NO: 35676 - RNA, 19 nt, Artificial Sequence
  Description of Artificial Sequence: Synthetic oligonucleotide
  Sense strand starting at position 2529 of SEQ ID NO: 420
ccagucuggaguugaauau

SEQ ID NO: 35677 - RNA, 19 nt, Artificial Sequence
  Description of Artificial Sequence: Synthetic oligonucleotide
  Antisense strand to SEQ ID NO: 35676
auauucaacuccagacugg

SEQ ID NO: 35678 - RNA, 19 nt, Artificial Sequence
  Description of Artificial Sequence: Synthetic oligonucleotide
  Sense strand starting at position 2456 of SEQ ID NO: 420
cuaagcauugcucaggaca

SEQ ID NO: 35679 - RNA, 19 nt, Artificial Sequence
  Description of Artificial Sequence: Synthetic oligonucleotide
  Antisense strand to SEQ ID NO: 35678
uguccugagcaaugcuuag

SEQ ID NO: 35680 - RNA, 19 nt, Artificial Sequence
  Description of Artificial Sequence: Synthetic oligonucleotide
  Sense strand starting at position 2365 of SEQ ID NO: 420
cuacauuccuaggcagaaa

SEQ ID NO: 35681 - RNA, 19 nt, Artificial Sequence
  Description of Artificial Sequence: Synthetic oligonucleotide
  Antisense strand to SEQ ID NO: 35680
uuucugccuaggaauguag

SEQ ID NO: 35682 - RNA, 19 nt, Artificial Sequence
  Description of Artificial Sequence: Synthetic oligonucleotide
  Sense strand starting at position 2364 of SEQ ID NO: 420
ucuacauuccuaggcagaa

SEQ ID NO: 35683 - RNA, 19 nt, Artificial Sequence
  Description of Artificial Sequence: Synthetic oligonucleotide
  Antisense strand to SEQ ID NO: 35682
uucugccuaggaauguaga

SEQ ID NO: 35684 - RNA, 19 nt, Artificial Sequence
  Description of Artificial Sequence: Synthetic oligonucleotide
  Sense strand starting at position 2352 of SEQ ID NO: 420
gugccuugugucucuacau

SEQ ID NO: 35685 - RNA, 19 nt, Artificial Sequence
  Description of Artificial Sequence: Synthetic oligonucleotide
  Antisense strand to SEQ ID NO: 35684
auguagagacacaaggcac

SEQ ID NO: 35686 - RNA, 19 nt, Artificial Sequence
  Description of Artificial Sequence: Synthetic oligonucleotide
  Sense strand starting at position 2307 of SEQ ID NO: 420
cggccugugguuucuuuau

SEQ ID NO: 35687 - RNA, 19 nt, Artificial Sequence
  Description of Artificial Sequence: Synthetic oligonucleotide
  Antisense strand to SEQ ID NO: 35686
auaaagaaaccacaggccg

SEQ ID NO: 35688 - RNA, 19 nt, Artificial Sequence
  Description of Artificial Sequence: Synthetic oligonucleotide
  Sense strand starting at position 1823 of SEQ ID NO: 420
cuacuuaccucccuggaga

SEQ ID NO: 35689 - RNA, 19 nt, Artificial Sequence
  Description of Artificial Sequence: Synthetic oligonucleotide
  Antisense strand to SEQ ID NO: 35688
ucuccagggagguaaguag

SEQ ID NO: 35690 - RNA, 19 nt, Artificial Sequence
  Description of Artificial Sequence: Synthetic oligonucleotide
  Sense strand starting at position 1811 of SEQ ID NO: 420
gugacuuauugacuacuua

SEQ ID NO: 35691 - RNA, 19 nt, Artificial Sequence
  Description of Artificial Sequence: Synthetic oligonucleotide
  Antisense strand to SEQ ID NO: 35690
uaaguagucaauaagucac

SEQ ID NO: 35692 - RNA, 19 nt, Artificial Sequence
  Description of Artificial Sequence: Synthetic oligonucleotide
  Sense strand starting at position 1807 of SEQ ID NO: 420
gguagugacuuauugacua

SEQ ID NO: 35693 - RNA, 19 nt, Artificial Sequence
  Description of Artificial Sequence: Synthetic oligonucleotide
  Antisense strand to SEQ ID NO: 35692
uagucaauaagucacuacc

SEQ ID NO: 35694 - RNA, 19 nt, Artificial Sequence
  Description of Artificial Sequence: Synthetic oligonucleotide
  Sense strand starting at position 1699 of SEQ ID NO: 420
uaaauaugucaguggcaga

SEQ ID NO: 35695 - RNA, 19 nt, Artificial Sequence
  Description of Artificial Sequence: Synthetic oligonucleotide
  Antisense strand to SEQ ID NO: 35694
ucugccacugacauauuua

SEQ ID NO: 35696 - RNA, 19 nt, Artificial Sequence
  Description of Artificial Sequence: Synthetic oligonucleotide
  Sense strand starting at position 1567 of SEQ ID NO: 420
acaaacauuguguauguuu

SEQ ID NO: 35697 - RNA, 19 nt, Artificial Sequence
  Description of Artificial Sequence: Synthetic oligonucleotide
  Antisense strand to SEQ ID NO: 35696
aaacauacacaauguuugu

SEQ ID NO: 35698 - RNA, 19 nt, Artificial Sequence
  Description of Artificial Sequence: Synthetic oligonucleotide
  Sense strand starting at position 1144 of SEQ ID NO: 420
uaagaaauacgcugagacu

SEQ ID NO: 35699 - RNA, 19 nt, Artificial Sequence
  Description of Artificial Sequence: Synthetic oligonucleotide
  Antisense strand to SEQ ID NO: 35698
agucucagcguauuucuua

SEQ ID NO: 35700 - RNA, 19 nt, Artificial Sequence
  Description of Artificial Sequence: Synthetic oligonucleotide
  Sense strand starting at position 684 of SEQ ID NO: 420
gagauaguaugucuuagug

SEQ ID NO: 35701 - RNA, 19 nt, Artificial Sequence
  Description of Artificial Sequence: Synthetic oligonucleotide
  Antisense strand to SEQ ID NO: 35700
cacuaagacauacuaucuc

SEQ ID NO: 35702 - RNA, 19 nt, Artificial Sequence
  Description of Artificial Sequence: Synthetic oligonucleotide
  Sense strand starting at position 682 of SEQ ID NO: 420
augagauaguaugucuuag

SEQ ID NO: 35703 - RNA, 19 nt, Artificial Sequence
  Description of Artificial Sequence: Synthetic oligonucleotide
  Antisense strand to SEQ ID NO: 35702
cuaagacauacuaucucau

SEQ ID NO: 35704 - RNA, 19 nt, Artificial Sequence
  Description of Artificial Sequence: Synthetic oligonucleotide
  Sense strand starting at position 611 of SEQ ID NO: 420
ggaugaagcacuggugaga

SEQ ID NO: 35705 - RNA, 19 nt, Artificial Sequence
  Description of Artificial Sequence: Synthetic oligonucleotide
  Antisense strand to SEQ ID NO: 35704
ucucaccagugcuucaucc

SEQ ID NO: 35706 - RNA, 19 nt, Artificial Sequence
  Description of Artificial Sequence: Synthetic oligonucleotide
  Sense strand starting at position 579 of SEQ ID NO: 420
ggcuguuugaacuaaagug

SEQ ID NO: 35707 - RNA, 19 nt, Artificial Sequence
  Description of Artificial Sequence: Synthetic oligonucleotide
  Antisense strand to SEQ ID NO: 35706
cacuuuaguucaaacagcc

SEQ ID NO: 35708 - RNA, 19 nt, Artificial Sequence
  Description of Artificial Sequence: Synthetic oligonucleotide
  Sense strand starting at position 542 of SEQ ID NO: 420
aguucuuaaguguagagaa

SEQ ID NO: 35709 - RNA, 19 nt, Artificial Sequence
  Description of Artificial Sequence: Synthetic oligonucleotide
  Antisense strand to SEQ ID NO: 35708
uucucuacacuuaagaacu

SEQ ID NO: 35710 - RNA, 19 nt, Artificial Sequence
  Description of Artificial Sequence: Synthetic oligonucleotide
  Sense strand starting at position 540 of SEQ ID NO: 420
agaguucuuaaguguagag

SEQ ID NO: 35711 - RNA, 19 nt, Artificial Sequence
  Description of Artificial Sequence: Synthetic oligonucleotide
  Antisense strand to SEQ ID NO: 35710
cucuacacuuaagaacucu

SEQ ID NO: 35712 - RNA, 19 nt, Artificial Sequence
  Description of Artificial Sequence: Synthetic oligonucleotide
  Sense strand starting at position 539 of SEQ ID NO: 420
cagaguucuuaaguguaga

SEQ ID NO: 35713 - RNA, 19 nt, Artificial Sequence
  Description of Artificial Sequence: Synthetic oligonucleotide
  Antisense strand to SEQ ID NO: 35712
ucuacacuuaagaacucug

SEQ ID NO: 35714 - RNA, 19 nt, Artificial Sequence
  Description of Artificial Sequence: Synthetic oligonucleotide
  Sense strand starting at position 535 of SEQ ID NO: 420
agaacagaguucuuaagug

SEQ ID NO: 35715 - RNA, 19 nt, Artificial Sequence
  Description of Artificial Sequence: Synthetic oligonucleotide
  Antisense strand to SEQ ID NO: 35714
cacuuaagaacucuguucu

SEQ ID NO: 35716 - RNA, 19 nt, Artificial Sequence
  Description of Artificial Sequence: Synthetic oligonucleotide
  Sense strand starting at position 519 of SEQ ID NO: 420
ggaagccuuugucuaaaga

SEQ ID NO: 35717 - RNA, 19 nt, Artificial Sequence
  Description of Artificial Sequence: Synthetic oligonucleotide
  Antisense strand to SEQ ID NO: 35716
ucuuuagacaaaggcuucc

SEQ ID NO: 35718 - RNA, 19 nt, Artificial Sequence
  Description of Artificial Sequence: Synthetic oligonucleotide
  Sense strand starting at position 517 of SEQ ID NO: 420
agggaagccuuugucuaaa

SEQ ID NO: 35719 - RNA, 19 nt, Artificial Sequence
  Description of Artificial Sequence: Synthetic oligonucleotide
  Antisense strand to SEQ ID NO: 35718
uuuagacaaaggcuucccu

SEQ ID NO: 35720 - RNA, 19 nt, Artificial Sequence
  Description of Artificial Sequence: Synthetic oligonucleotide
  Sense strand starting at position 516 of SEQ ID NO: 420
cagggaagccuuugucuaa

SEQ ID NO: 35721 - RNA, 19 nt, Artificial Sequence
  Description of Artificial Sequence: Synthetic oligonucleotide
  Antisense strand to SEQ ID NO: 35720
uuagacaaaggcuucccug

SEQ ID NO: 35722 - RNA, 19 nt, Artificial Sequence
  Description of Artificial Sequence: Synthetic oligonucleotide
  Sense strand starting at position 260 of SEQ ID NO: 420
uguuccucugcuuaugaca

SEQ ID NO: 35723 - RNA, 19 nt, Artificial Sequence
  Description of Artificial Sequence: Synthetic oligonucleotide
  Antisense strand to SEQ ID NO: 35722
ugucauaagcagaggaaca

SEQ ID NO: 35724 - RNA, 19 nt, Artificial Sequence
  Description of Artificial Sequence: Synthetic oligonucleotide
  Sense strand starting at position 210 of SEQ ID NO: 420
uguauuaagcuccagaaga

SEQ ID NO: 35725 - RNA, 19 nt, Artificial Sequence
  Description of Artificial Sequence: Synthetic oligonucleotide
  Antisense strand to SEQ ID NO: 35724
ucuucuggagcuuaauaca

SEQ ID NO: 35726 - RNA, 19 nt, Artificial Sequence
  Description of Artificial Sequence: Synthetic oligonucleotide
  Sense strand starting at position 3937 of SEQ ID NO: 421
cugguuuccagaggcaaca

SEQ ID NO: 35727 - RNA, 19 nt, Artificial Sequence
  Description of Artificial Sequence: Synthetic oligonucleotide
  Antisense strand to SEQ ID NO: 35726
uguugccucuggaaaccag

SEQ ID NO: 35728 - RNA, 19 nt, Artificial Sequence
  Description of Artificial Sequence: Synthetic oligonucleotide
  Sense strand starting at position 3925 of SEQ ID NO: 421
uauagauuauagcugguuu

SEQ ID NO: 35729 - RNA, 19 nt, Artificial Sequence
  Description of Artificial Sequence: Synthetic oligonucleotide
  Antisense strand to SEQ ID NO: 35728
aaaccagcuauaaucuaua

SEQ ID NO: 35730 - RNA, 19 nt, Artificial Sequence
  Description of Artificial Sequence: Synthetic oligonucleotide
  Sense strand starting at position 3851 of SEQ ID NO: 421
gguguaaacuuggcugaag

SEQ ID NO: 35731 - RNA, 19 nt, Artificial Sequence
  Description of Artificial Sequence: Synthetic oligonucleotide
  Antisense strand to SEQ ID NO: 35730
cuucagccaaguuuacacc

SEQ ID NO: 35732 - RNA, 19 nt, Artificial Sequence
  Description of Artificial Sequence: Synthetic oligonucleotide
  Sense strand starting at position 3843 of SEQ ID NO: 421
aacugcuugguguaaacuu

SEQ ID NO: 35733 - RNA, 19 nt, Artificial Sequence
  Description of Artificial Sequence: Synthetic oligonucleotide
  Antisense strand to SEQ ID NO: 35732
aaguuuacaccaagcaguu

SEQ ID NO: 35734 - RNA, 19 nt, Artificial Sequence
  Description of Artificial Sequence: Synthetic oligonucleotide
  Sense strand starting at position 3807 of SEQ ID NO: 421
uuucuucugguguaaucca

SEQ ID NO: 35735 - RNA, 19 nt, Artificial Sequence
  Description of Artificial Sequence: Synthetic oligonucleotide
  Antisense strand to SEQ ID NO: 35734
uggauuacaccagaagaaa

SEQ ID NO: 35736 - RNA, 19 nt, Artificial Sequence
  Description of Artificial Sequence: Synthetic oligonucleotide
  Sense strand starting at position 3729 of SEQ ID NO: 421
agcaguaugauauagcaga

SEQ ID NO: 35737 - RNA, 19 nt, Artificial Sequence
  Description of Artificial Sequence: Synthetic oligonucleotide
  Antisense strand to SEQ ID NO: 35736
ucugcuauaucauacugcu

SEQ ID NO: 35738 - RNA, 19 nt, Artificial Sequence
  Description of Artificial Sequence: Synthetic oligonucleotide
  Sense strand starting at position 3724 of SEQ ID NO: 421
cuaauagcaguaugauaua

SEQ ID NO: 35739 - RNA, 19 nt, Artificial Sequence
  Description of Artificial Sequence: Synthetic oligonucleotide
  Antisense strand to SEQ ID NO: 35738
uauaucauacugcuauuag

SEQ ID NO: 35740 - RNA, 19 nt, Artificial Sequence
  Description of Artificial Sequence: Synthetic oligonucleotide
  Sense strand starting at position 3722 of SEQ ID NO: 421
aucuaauagcaguaugaua

SEQ ID NO: 35741 - RNA, 19 nt, Artificial Sequence
  Description of Artificial Sequence: Synthetic oligonucleotide
  Antisense strand to SEQ ID NO: 35740
uaucauacugcuauuagau

SEQ ID NO: 35742 - RNA, 19 nt, Artificial Sequence
  Description of Artificial Sequence: Synthetic oligonucleotide
  Sense strand starting at position 3514 of SEQ ID NO: 421
ggcuuucuggaauaguacu

SEQ ID NO: 35743 - RNA, 19 nt, Artificial Sequence
  Description of Artificial Sequence: Synthetic oligonucleotide
  Antisense strand to SEQ ID NO: 35742
aguacuauuccagaaagcc

SEQ ID NO: 35744 - RNA, 19 nt, Artificial Sequence
  Description of Artificial Sequence: Synthetic oligonucleotide
  Sense strand starting at position 3511 of SEQ ID NO: 421
cugggcuuucuggaauagu

SEQ ID NO: 35745 - RNA, 19 nt, Artificial Sequence
  Description of Artificial Sequence: Synthetic oligonucleotide
  Antisense strand to SEQ ID NO: 35744
acuauuccagaaagcccag

SEQ ID NO: 35746 - RNA, 19 nt, Artificial Sequence
  Description of Artificial Sequence: Synthetic oligonucleotide
  Sense strand starting at position 3476 of SEQ ID NO: 421
agugauucagggugaguag

SEQ ID NO: 35747 - RNA, 19 nt, Artificial Sequence
  Description of Artificial Sequence: Synthetic oligonucleotide
  Antisense strand to SEQ ID NO: 35746
cuacucacccugaaucacu

SEQ ID NO: 35748 - RNA, 19 nt, Artificial Sequence
  Description of Artificial Sequence: Synthetic oligonucleotide
  Sense strand starting at position 3356 of SEQ ID NO: 421
cuuugaaagcgaugggauc

SEQ ID NO: 35749 - RNA, 19 nt, Artificial Sequence
  Description of Artificial Sequence: Synthetic oligonucleotide
  Antisense strand to SEQ ID NO: 35748
gaucccaucgcuuucaaag

SEQ ID NO: 35750 - RNA, 19 nt, Artificial Sequence
  Description of Artificial Sequence: Synthetic oligonucleotide
  Sense strand starting at position 3346 of SEQ ID NO: 421
ccauacgaaucuuugaaag

SEQ ID NO: 35751 - RNA, 19 nt, Artificial Sequence
  Description of Artificial Sequence: Synthetic oligonucleotide
  Antisense strand to SEQ ID NO: 35750
cuuucaaagauucguaugg

SEQ ID NO: 35752 - RNA, 19 nt, Artificial Sequence
  Description of Artificial Sequence: Synthetic oligonucleotide
  Sense strand starting at position 3337 of SEQ ID NO: 421
ccaugacugccauacgaau

SEQ ID NO: 35753 - RNA, 19 nt, Artificial Sequence
  Description of Artificial Sequence: Synthetic oligonucleotide
  Antisense strand to SEQ ID NO: 35752
auucguauggcagucaugg

SEQ ID NO: 35754 - RNA, 19 nt, Artificial Sequence
  Description of Artificial Sequence: Synthetic oligonucleotide
  Sense strand starting at position 3110 of SEQ ID NO: 421
uuugauccugcuuggauaa

SEQ ID NO: 35755 - RNA, 19 nt, Artificial Sequence
  Description of Artificial Sequence: Synthetic oligonucleotide
  Antisense strand to SEQ ID NO: 35754
uuauccaagcaggaucaaa

SEQ ID NO: 35756 - RNA, 19 nt, Artificial Sequence
  Description of Artificial Sequence: Synthetic oligonucleotide
  Sense strand starting at position 3103 of SEQ ID NO: 421
gaauuuguuugauccugcu

SEQ ID NO: 35757 - RNA, 19 nt, Artificial Sequence
  Description of Artificial Sequence: Synthetic oligonucleotide
  Antisense strand to SEQ ID NO: 35756
agcaggaucaaacaaauuc

SEQ ID NO: 35758 - RNA, 19 nt, Artificial Sequence
  Description of Artificial Sequence: Synthetic oligonucleotide
  Sense strand starting at position 2950 of SEQ ID NO: 421
acuuguuaugagggaacua

SEQ ID NO: 35759 - RNA, 19 nt, Artificial Sequence
  Description of Artificial Sequence: Synthetic oligonucleotide
  Antisense strand to SEQ ID NO: 35758
uaguucccucauaacaagu

SEQ ID NO: 35760 - RNA, 19 nt, Artificial Sequence
  Description of Artificial Sequence: Synthetic oligonucleotide
  Sense strand starting at position 2891 of SEQ ID NO: 421
gugggagucuacccagaag

SEQ ID NO: 35761 - RNA, 19 nt, Artificial Sequence
  Description of Artificial Sequence: Synthetic oligonucleotide
  Antisense strand to SEQ ID NO: 35760
cuucuggguagacucccac

SEQ ID NO: 35762 - RNA, 19 nt, Artificial Sequence
  Description of Artificial Sequence: Synthetic oligonucleotide
  Sense strand starting at position 2871 of SEQ ID NO: 421
cuuucuaagacggagcuau

SEQ ID NO: 35763 - RNA, 19 nt, Artificial Sequence
  Description of Artificial Sequence: Synthetic oligonucleotide
  Antisense strand to SEQ ID NO: 35762
auagcuccgucuuagaaag

SEQ ID NO: 35764 - RNA, 19 nt, Artificial Sequence
  Description of Artificial Sequence: Synthetic oligonucleotide
  Sense strand starting at position 2726 of SEQ ID NO: 421
cuuuaugaagccugaaauu

SEQ ID NO: 35765 - RNA, 19 nt, Artificial Sequence
  Description of Artificial Sequence: Synthetic oligonucleotide
  Antisense strand to SEQ ID NO: 35764
aauuucaggcuucauaaag

SEQ ID NO: 35766 - RNA, 19 nt, Artificial Sequence
  Description of Artificial Sequence: Synthetic oligonucleotide
  Sense strand starting at position 2379 of SEQ ID NO: 421
gguuaaguacagcagaauu

SEQ ID NO: 35767 - RNA, 19 nt, Artificial Sequence
  Description of Artificial Sequence: Synthetic oligonucleotide
  Antisense strand to SEQ ID NO: 35766
aauucugcuguacuuaacc

SEQ ID NO: 35768 - RNA, 19 nt, Artificial Sequence
  Description of Artificial Sequence: Synthetic oligonucleotide
  Sense strand starting at position 2350 of SEQ ID NO: 421
agggauauuugauauaguu

SEQ ID NO: 35769 - RNA, 19 nt, Artificial Sequence
  Description of Artificial Sequence: Synthetic oligonucleotide
  Antisense strand to SEQ ID NO: 35768
aacuauaucaaauaucccu

SEQ ID NO: 35770 - RNA, 19 nt, Artificial Sequence
  Description of Artificial Sequence: Synthetic oligonucleotide
  Sense strand starting at position 1776 of SEQ ID NO: 421
aauggcaaugcagauguaa

SEQ ID NO: 35771 - RNA, 19 nt, Artificial Sequence
  Description of Artificial Sequence: Synthetic oligonucleotide
  Antisense strand to SEQ ID NO: 35770
uuacaucugcauugccauu

SEQ ID NO: 35772 - RNA, 19 nt, Artificial Sequence
  Description of Artificial Sequence: Synthetic oligonucleotide
  Sense strand starting at position 1690 of SEQ ID NO: 421
aaaugaucugugugagaga

SEQ ID NO: 35773 - RNA, 19 nt, Artificial Sequence
  Description of Artificial Sequence: Synthetic oligonucleotide
  Antisense strand to SEQ ID NO: 35772
ucucucacacagaucauuu

SEQ ID NO: 35774 - RNA, 19 nt, Artificial Sequence
  Description of Artificial Sequence: Synthetic oligonucleotide
  Sense strand starting at position 1673 of SEQ ID NO: 421
auaucccuuuggguauaaa

SEQ ID NO: 35775 - RNA, 19 nt, Artificial Sequence
  Description of Artificial Sequence: Synthetic oligonucleotide
  Antisense strand to SEQ ID NO: 35774
uuuauacccaaagggauau

SEQ ID NO: 35776 - RNA, 19 nt, Artificial Sequence
  Description of Artificial Sequence: Synthetic oligonucleotide
  Sense strand starting at position 1404 of SEQ ID NO: 421
ccaucuuaugagugagaac

SEQ ID NO: 35777 - RNA, 19 nt, Artificial Sequence
  Description of Artificial Sequence: Synthetic oligonucleotide
  Antisense strand to SEQ ID NO: 35776
guucucacucauaagaugg

SEQ ID NO: 35778 - RNA, 19 nt, Artificial Sequence
  Description of Artificial Sequence: Synthetic oligonucleotide
  Sense strand starting at position 1403 of SEQ ID NO: 421
uccaucuuaugagugagaa

SEQ ID NO: 35779 - RNA, 19 nt, Artificial Sequence
  Description of Artificial Sequence: Synthetic oligonucleotide
  Antisense strand to SEQ ID NO: 35778
uucucacucauaagaugga

SEQ ID NO: 35780 - RNA, 19 nt, Artificial Sequence
  Description of Artificial Sequence: Synthetic oligonucleotide
  Sense strand starting at position 715 of SEQ ID NO: 421
gaccucaaguccuuggaua

SEQ ID NO: 35781 - RNA, 19 nt, Artificial Sequence
  Description of Artificial Sequence: Synthetic oligonucleotide
  Antisense strand to SEQ ID NO: 35780
uauccaaggacuugagguc

SEQ ID NO: 35782 - RNA, 19 nt, Artificial Sequence
  Description of Artificial Sequence: Synthetic oligonucleotide
  Sense strand starting at position 519 of SEQ ID NO: 421
cuuucuagauaugugacau

SEQ ID NO: 35783 - RNA, 19 nt, Artificial Sequence
  Description of Artificial Sequence: Synthetic oligonucleotide
  Antisense strand to SEQ ID NO: 35782
augucacauaucuagaaag

SEQ ID NO: 35784 - RNA, 19 nt, Artificial Sequence
  Description of Artificial Sequence: Synthetic oligonucleotide
  Sense strand starting at position 514 of SEQ ID NO: 421
uccuucuuucuagauaugu

SEQ ID NO: 35785 - RNA, 19 nt, Artificial Sequence
  Description of Artificial Sequence: Synthetic oligonucleotide
  Antisense strand to SEQ ID NO: 35784
acauaucuagaaagaagga

SEQ ID NO: 35786 - RNA, 19 nt, Artificial Sequence
  Description of Artificial Sequence: Synthetic oligonucleotide
  Sense strand starting at position 469 of SEQ ID NO: 421
cagcauggucucuagaauc

SEQ ID NO: 35787 - RNA, 19 nt, Artificial Sequence
  Description of Artificial Sequence: Synthetic oligonucleotide
  Antisense strand to SEQ ID NO: 35786
gauucuagagaccaugcug

SEQ ID NO: 35788 - RNA, 19 nt, Artificial Sequence
  Description of Artificial Sequence: Synthetic oligonucleotide
  Sense strand starting at position 468 of SEQ ID NO: 421
ucagcauggucucuagaau

SEQ ID NO: 35789 - RNA, 19 nt, Artificial Sequence
  Description of Artificial Sequence: Synthetic oligonucleotide
  Antisense strand to SEQ ID NO: 35788
auucuagagaccaugcuga

SEQ ID NO: 35790 - RNA, 19 nt, Artificial Sequence
  Description of Artificial Sequence: Synthetic oligonucleotide
  Sense strand starting at position 401 of SEQ ID NO: 421
gucaauugcagagagcauu

SEQ ID NO: 35791 - RNA, 19 nt, Artificial Sequence
  Description of Artificial Sequence: Synthetic oligonucleotide
  Antisense strand to SEQ ID NO: 35790
aaugcucucugcaauugac

SEQ ID NO: 35792 - RNA, 19 nt, Artificial Sequence
  Description of Artificial Sequence: Synthetic oligonucleotide
  Sense strand starting at position 331 of SEQ ID NO: 421
gucaauguaagugagaaug

SEQ ID NO: 35793 - RNA, 19 nt, Artificial Sequence
  Description of Artificial Sequence: Synthetic oligonucleotide
  Antisense strand to SEQ ID NO: 35792
cauucucacuuacauugac

SEQ ID NO: 35794 - RNA, 19 nt, Artificial Sequence
  Description of Artificial Sequence: Synthetic oligonucleotide
  Sense strand starting at position 330 of SEQ ID NO: 421
agucaauguaagugagaau

SEQ ID NO: 35795 - RNA, 19 nt, Artificial Sequence
  Description of Artificial Sequence: Synthetic oligonucleotide
  Antisense strand to SEQ ID NO: 35794
auucucacuuacauugacu

SEQ ID NO: 35796 - RNA, 19 nt, Artificial Sequence
  Description of Artificial Sequence: Synthetic oligonucleotide
  Sense strand starting at position 329 of SEQ ID NO: 421
cagucaauguaagugagaa

SEQ ID NO: 35797 - RNA, 19 nt, Artificial Sequence
  Description of Artificial Sequence: Synthetic oligonucleotide
  Antisense strand to SEQ ID NO: 35796
uucucacuuacauugacug

SEQ ID NO: 35798 - RNA, 19 nt, Artificial Sequence
  Description of Artificial Sequence: Synthetic oligonucleotide
  Sense strand starting at position 128 of SEQ ID NO: 421
ugaguauagagcuggaguu

SEQ ID NO: 35799 - RNA, 19 nt, Artificial Sequence
  Description of Artificial Sequence: Synthetic oligonucleotide
  Antisense strand to SEQ ID NO: 35798
aacuccagcucuauacuca

SEQ ID NO: 35800 - RNA, 19 nt, Artificial Sequence
  Description of Artificial Sequence: Synthetic oligonucleotide
  Sense strand starting at position 122 of SEQ ID NO: 421
gguuaaugaguauagagcu

SEQ ID NO: 35801 - RNA, 19 nt, Artificial Sequence
  Description of Artificial Sequence: Synthetic oligonucleotide
  Antisense strand to SEQ ID NO: 35800
agcucuauacucauuaacc

SEQ ID NO: 35802 - RNA, 19 nt, Artificial Sequence
  Description of Artificial Sequence: Synthetic oligonucleotide
  Sense strand starting at position 119 of SEQ ID NO: 421
acagguuaaugaguauaga

SEQ ID NO: 35803 - RNA, 19 nt, Artificial Sequence
  Description of Artificial Sequence: Synthetic oligonucleotide
  Antisense strand to SEQ ID NO: 35802
ucuauacucauuaaccugu

SEQ ID NO: 35804 - RNA, 19 nt, Artificial Sequence
  Description of Artificial Sequence: Synthetic oligonucleotide
  Sense strand starting at position 27 of SEQ ID NO: 421
guuuaugugagauacuuag

SEQ ID NO: 35805 - RNA, 19 nt, Artificial Sequence
  Description of Artificial Sequence: Synthetic oligonucleotide
  Antisense strand to SEQ ID NO: 35804
cuaaguaucucacauaaac

SEQ ID NO: 35806 - RNA, 19 nt, Artificial Sequence
  Description of Artificial Sequence: Synthetic oligonucleotide
  Sense strand starting at position 11 of SEQ ID NO: 422
ccagaaguagccuggacua

SEQ ID NO: 35807 - RNA, 19 nt, Artificial Sequence
  Description of Artificial Sequence: Synthetic oligonucleotide
  Antisense strand to SEQ ID NO: 35806
uaguccaggcuacuucugg

SEQ ID NO: 35808 - RNA, 19 nt, Artificial Sequence
  Description of Artificial Sequence: Synthetic oligonucleotide
  Sense strand starting at position 115 of SEQ ID NO: 422
agggaaauguaccuccaau

SEQ ID NO: 35809 - RNA, 19 nt, Artificial Sequence
  Description of Artificial Sequence: Synthetic oligonucleotide
  Antisense strand to SEQ ID NO: 35808
auuggagguacauuucccu

SEQ ID NO: 35810 - RNA, 19 nt, Artificial Sequence
  Description of Artificial Sequence: Synthetic oligonucleotide
  Sense strand starting at position 197 of SEQ ID NO: 422
cacugaugcccagggaaug

SEQ ID NO: 35811 - RNA, 19 nt, Artificial Sequence
  Description of Artificial Sequence: Synthetic oligonucleotide
  Antisense strand to SEQ ID NO: 35810
cauucccugggcaucagug

SEQ ID NO: 35812 - RNA, 19 nt, Artificial Sequence
  Description of Artificial Sequence: Synthetic oligonucleotide
  Sense strand starting at position 385 of SEQ ID NO: 422
ugcugaaccagaugagacu

SEQ ID NO: 35813 - RNA, 19 nt, Artificial Sequence
  Description of Artificial Sequence: Synthetic oligonucleotide
  Antisense strand to SEQ ID NO: 35812
agucucaucugguucagca

SEQ ID NO: 35814 - RNA, 19 nt, Artificial Sequence
  Description of Artificial Sequence: Synthetic oligonucleotide
  Sense strand starting at position 422 of SEQ ID NO: 422
caacuuggagucugagacu

SEQ ID NO: 35815 - RNA, 19 nt, Artificial Sequence
  Description of Artificial Sequence: Synthetic oligonucleotide
  Antisense strand to SEQ ID NO: 35814
agucucagacuccaaguug

SEQ ID NO: 35816 - RNA, 19 nt, Artificial Sequence
  Description of Artificial Sequence: Synthetic oligonucleotide
  Sense strand starting at position 461 of SEQ ID NO: 422
ccaauaaugagaggcagua

SEQ ID NO: 35817 - RNA, 19 nt, Artificial Sequence
  Description of Artificial Sequence: Synthetic oligonucleotide
  Antisense strand to SEQ ID NO: 35816
uacugccucucauuauugg

SEQ ID NO: 35818 - RNA, 19 nt, Artificial Sequence
  Description of Artificial Sequence: Synthetic oligonucleotide
  Sense strand starting at position 670 of SEQ ID NO: 422
gggucugagcuuuggaaga

SEQ ID NO: 35819 - RNA, 19 nt, Artificial Sequence
  Description of Artificial Sequence: Synthetic oligonucleotide
  Antisense strand to SEQ ID NO: 35818
ucuuccaaagcucagaccc

SEQ ID NO: 35820 - RNA, 19 nt, Artificial Sequence
  Description of Artificial Sequence: Synthetic oligonucleotide
  Sense strand starting at position 845 of SEQ ID NO: 422
gagagaaggccaggguuau

SEQ ID NO: 35821 - RNA, 19 nt, Artificial Sequence
  Description of Artificial Sequence: Synthetic oligonucleotide
  Antisense strand to SEQ ID NO: 35820
auaacccuggccuucucuc

SEQ ID NO: 35822 - RNA, 19 nt, Artificial Sequence
  Description of Artificial Sequence: Synthetic oligonucleotide
  Sense strand starting at position 1133 of SEQ ID NO: 422
gcugacuugugaguuauuu

SEQ ID NO: 35823 - RNA, 19 nt, Artificial Sequence
  Description of Artificial Sequence: Synthetic oligonucleotide
  Antisense strand to SEQ ID NO: 35822
aaauaacucacaagucagc

SEQ ID NO: 35824 - RNA, 19 nt, Artificial Sequence
  Description of Artificial Sequence: Synthetic oligonucleotide
  Sense strand starting at position 1141 of SEQ ID NO: 422
gugaguuauuuagagagau

SEQ ID NO: 35825 - RNA, 19 nt, Artificial Sequence
  Description of Artificial Sequence: Synthetic oligonucleotide
  Antisense strand to SEQ ID NO: 35824
aucucucuaaauaacucac

SEQ ID NO: 35826 - RNA, 19 nt, Artificial Sequence
  Description of Artificial Sequence: Synthetic oligonucleotide
  Sense strand starting at position 1153 of SEQ ID NO: 422
gagagauaguuucucuuuc

SEQ ID NO: 35827 - RNA, 19 nt, Artificial Sequence
  Description of Artificial Sequence: Synthetic oligonucleotide
  Antisense strand to SEQ ID NO: 35826
gaaagagaaacuaucucuc

SEQ ID NO: 35828 - RNA, 19 nt, Artificial Sequence
  Description of Artificial Sequence: Synthetic oligonucleotide
  Sense strand starting at position 1157 of SEQ ID NO: 422
gauaguuucucuuucggaa

SEQ ID NO: 35829 - RNA, 19 nt, Artificial Sequence
  Description of Artificial Sequence: Synthetic oligonucleotide
  Antisense strand to SEQ ID NO: 35828
uuccgaaagagaaacuauc

SEQ ID NO: 35830 - RNA, 19 nt, Artificial Sequence
  Description of Artificial Sequence: Synthetic oligonucleotide
  Sense strand starting at position 1348 of SEQ ID NO: 422
acaggacuccuucgaagag

SEQ ID NO: 35831 - RNA, 19 nt, Artificial Sequence
  Description of Artificial Sequence: Synthetic oligonucleotide
  Antisense strand to SEQ ID NO: 35830
cucuucgaaggaguccugu

SEQ ID NO: 35832 - RNA, 19 nt, Artificial Sequence
  Description of Artificial Sequence: Synthetic oligonucleotide
  Sense strand starting at position 1386 of SEQ ID NO: 422
cuuggacuucucugucaac

SEQ ID NO: 35833 - RNA, 19 nt, Artificial Sequence
  Description of Artificial Sequence: Synthetic oligonucleotide
  Antisense strand to SEQ ID NO: 35832
guugacagagaaguccaag

SEQ ID NO: 35834 - RNA, 19 nt, Artificial Sequence
  Description of Artificial Sequence: Synthetic oligonucleotide
  Sense strand starting at position 1430 of SEQ ID NO: 422
caaggaugcccaggaucuu

SEQ ID NO: 35835 - RNA, 19 nt, Artificial Sequence
  Description of Artificial Sequence: Synthetic oligonucleotide
  Antisense strand to SEQ ID NO: 35834
aagauccugggcauccuug

SEQ ID NO: 35836 - RNA, 19 nt, Artificial Sequence
  Description of Artificial Sequence: Synthetic oligonucleotide
  Sense strand starting at position 1667 of SEQ ID NO: 422
gaagucucuugggcugaaa

SEQ ID NO: 35837 - RNA, 19 nt, Artificial Sequence
  Description of Artificial Sequence: Synthetic oligonucleotide
  Antisense strand to SEQ ID NO: 35836
uuucagcccaagagacuuc

SEQ ID NO: 35838 - RNA, 19 nt, Artificial Sequence
  Description of Artificial Sequence: Synthetic oligonucleotide
  Sense strand starting at position 1669 of SEQ ID NO: 422
agucucuugggcugaaaga

SEQ ID NO: 35839 - RNA, 19 nt, Artificial Sequence
  Description of Artificial Sequence: Synthetic oligonucleotide
  Antisense strand to SEQ ID NO: 35838
ucuuucagcccaagagacu

SEQ ID NO: 35840 - RNA, 19 nt, Artificial Sequence
  Description of Artificial Sequence: Synthetic oligonucleotide
  Sense strand starting at position 1765 of SEQ ID NO: 422
ugaaguucuccugaguccu

SEQ ID NO: 35841 - RNA, 19 nt, Artificial Sequence
  Description of Artificial Sequence: Synthetic oligonucleotide
  Antisense strand to SEQ ID NO: 35840
aggacucaggagaacuuca

SEQ ID NO: 35842 - RNA, 19 nt, Artificial Sequence
  Description of Artificial Sequence: Synthetic oligonucleotide
  Sense strand starting at position 2055 of SEQ ID NO: 422
gaugucaagcagcaugaau

SEQ ID NO: 35843 - RNA, 19 nt, Artificial Sequence
  Description of Artificial Sequence: Synthetic oligonucleotide
  Antisense strand to SEQ ID NO: 35842
auucaugcugcuugacauc

SEQ ID NO: 35844 - RNA, 19 nt, Artificial Sequence
  Description of Artificial Sequence: Synthetic oligonucleotide
  Sense strand starting at position 2063 of SEQ ID NO: 422
gcagcaugaauugggcaaa

SEQ ID NO: 35845 - RNA, 19 nt, Artificial Sequence
  Description of Artificial Sequence: Synthetic oligonucleotide
  Antisense strand to SEQ ID NO: 35844
uuugcccaauucaugcugc

SEQ ID NO: 35846 - RNA, 19 nt, Artificial Sequence
  Description of Artificial Sequence: Synthetic oligonucleotide
  Sense strand starting at position 2066 of SEQ ID NO: 422
gcaugaauugggcaaacuu

SEQ ID NO: 35847 - RNA, 19 nt, Artificial Sequence
  Description of Artificial Sequence: Synthetic oligonucleotide
  Antisense strand to SEQ ID NO: 35846
aaguuugcccaauucaugc

SEQ ID NO: 35848 - RNA, 19 nt, Artificial Sequence
  Description of Artificial Sequence: Synthetic oligonucleotide
  Sense strand starting at position 2195 of SEQ ID NO: 422
gcaugacccugacuuucuu

SEQ ID NO: 35849 - RNA, 19 nt, Artificial Sequence
  Description of Artificial Sequence: Synthetic oligonucleotide
  Antisense strand to SEQ ID NO: 35848
aagaaagucagggucaugc

SEQ ID NO: 35850 - RNA, 19 nt, Artificial Sequence
  Description of Artificial Sequence: Synthetic oligonucleotide
  Sense strand starting at position 2217 of SEQ ID NO: 422
guaguuggugaggaccaua

SEQ ID NO: 35851 - RNA, 19 nt, Artificial Sequence
  Description of Artificial Sequence: Synthetic oligonucleotide
  Antisense strand to SEQ ID NO: 35850
uaugguccucaccaacuac

SEQ ID NO: 35852 - RNA, 19 nt, Artificial Sequence
  Description of Artificial Sequence: Synthetic oligonucleotide
  Sense strand starting at position 2397 of SEQ ID NO: 422
guaauaguugcauauccau

SEQ ID NO: 35853 - RNA, 19 nt, Artificial Sequence
  Description of Artificial Sequence: Synthetic oligonucleotide
  Antisense strand to SEQ ID NO: 35852
auggauaugcaacuauuac

SEQ ID NO: 35854 - RNA, 19 nt, Artificial Sequence
  Description of Artificial Sequence: Synthetic oligonucleotide
  Sense strand starting at position 2404 of SEQ ID NO: 422
uugcauauccauugaugga

SEQ ID NO: 35855 - RNA, 19 nt, Artificial Sequence
  Description of Artificial Sequence: Synthetic oligonucleotide
  Antisense strand to SEQ ID NO: 35854
uccaucaauggauaugcaa

SEQ ID NO: 35856 - RNA, 19 nt, Artificial Sequence
  Description of Artificial Sequence: Synthetic oligonucleotide
  Sense strand starting at position 2446 of SEQ ID NO: 422
ugacuauaaguuugguaau

SEQ ID NO: 35857 - RNA, 19 nt, Artificial Sequence
  Description of Artificial Sequence: Synthetic oligonucleotide
  Antisense strand to SEQ ID NO: 35856
auuaccaaacuuauaguca

SEQ ID NO: 35858 - RNA, 19 nt, Artificial Sequence
  Description of Artificial Sequence: Synthetic oligonucleotide
  Sense strand starting at position 2457 of SEQ ID NO: 422
uugguaauggcuugaaaug

SEQ ID NO: 35859 - RNA, 19 nt, Artificial Sequence
  Description of Artificial Sequence: Synthetic oligonucleotide
  Antisense strand to SEQ ID NO: 35858
cauuucaagccauuaccaa

SEQ ID NO: 35860 - RNA, 19 nt, Artificial Sequence
  Description of Artificial Sequence: Synthetic oligonucleotide
  Sense strand starting at position 2852 of SEQ ID NO: 422
cccagagcuucuguaacaa

SEQ ID NO: 35861 - RNA, 19 nt, Artificial Sequence
  Description of Artificial Sequence: Synthetic oligonucleotide
  Antisense strand to SEQ ID NO: 35860
uuguuacagaagcucuggg

SEQ ID NO: 35862 - RNA, 19 nt, Artificial Sequence
  Description of Artificial Sequence: Synthetic oligonucleotide
  Sense strand starting at position 3027 of SEQ ID NO: 422
ggcauuccugggcaugcaa

SEQ ID NO: 35863 - RNA, 19 nt, Artificial Sequence
  Description of Artificial Sequence: Synthetic oligonucleotide
  Antisense strand to SEQ ID NO: 35862
uugcaugcccaggaaugcc

SEQ ID NO: 35864 - RNA, 19 nt, Artificial Sequence
  Description of Artificial Sequence: Synthetic oligonucleotide
  Sense strand starting at position 3116 of SEQ ID NO: 422
uccuuucugucucugagaa

SEQ ID NO: 35865 - RNA, 19 nt, Artificial Sequence
  Description of Artificial Sequence: Synthetic oligonucleotide
  Antisense strand to SEQ ID NO: 35864
uucucagagacagaaagga

SEQ ID NO: 35866 - RNA, 19 nt, Artificial Sequence
  Description of Artificial Sequence: Synthetic oligonucleotide
  Sense strand starting at position 3123 of SEQ ID NO: 422
ugucucugagaaggacauu

SEQ ID NO: 35867 - RNA, 19 nt, Artificial Sequence
  Description of Artificial Sequence: Synthetic oligonucleotide
  Antisense strand to SEQ ID NO: 35866
aauguccuucucagagaca

SEQ ID NO: 35868 - RNA, 19 nt, Artificial Sequence
  Description of Artificial Sequence: Synthetic oligonucleotide
  Sense strand starting at position 3222 of SEQ ID NO: 422
ugagauuccaggugaaguu

SEQ ID NO: 35869 - RNA, 19 nt, Artificial Sequence
  Description of Artificial Sequence: Synthetic oligonucleotide
  Antisense strand to SEQ ID NO: 35868
aacuucaccuggaaucuca

SEQ ID NO: 35870 - RNA, 19 nt, Artificial Sequence
  Description of Artificial Sequence: Synthetic oligonucleotide
  Sense strand starting at position 3296 of SEQ ID NO: 422
gggcacauauuacuguaau

SEQ ID NO: 35871 - RNA, 19 nt, Artificial Sequence
  Description of Artificial Sequence: Synthetic oligonucleotide
  Antisense strand to SEQ ID NO: 35870
auuacaguaauaugugccc

SEQ ID NO: 35872 - RNA, 19 nt, Artificial Sequence
  Description of Artificial Sequence: Synthetic oligonucleotide
  Sense strand starting at position 3308 of SEQ ID NO: 422
cuguaaugucugcagacaa

SEQ ID NO: 35873 - RNA, 19 nt, Artificial Sequence
  Description of Artificial Sequence: Synthetic oligonucleotide
  Antisense strand to SEQ ID NO: 35872
uugucugcagacauuacag

SEQ ID NO: 35874 - RNA, 19 nt, Artificial Sequence
  Description of Artificial Sequence: Synthetic oligonucleotide
  Sense strand starting at position 3463 of SEQ ID NO: 422
uuagguuccugaguuugaa

SEQ ID NO: 35875 - RNA, 19 nt, Artificial Sequence
  Description of Artificial Sequence: Synthetic oligonucleotide
  Antisense strand to SEQ ID NO: 35874
uucaaacucaggaaccuaa

SEQ ID NO: 35876 - RNA, 19 nt, Artificial Sequence
  Description of Artificial Sequence: Synthetic oligonucleotide
  Sense strand starting at position 3497 of SEQ ID NO: 422
uuacuaucuguguaaacug

SEQ ID NO: 35877 - RNA, 19 nt, Artificial Sequence
  Description of Artificial Sequence: Synthetic oligonucleotide
  Antisense strand to SEQ ID NO: 35876
caguuuacacagauaguaa

SEQ ID NO: 35878 - RNA, 19 nt, Artificial Sequence
  Description of Artificial Sequence: Synthetic oligonucleotide
  Sense strand starting at position 3514 of SEQ ID NO: 422
ugaagugaguuccuuaauu

SEQ ID NO: 35879 - RNA, 19 nt, Artificial Sequence
  Description of Artificial Sequence: Synthetic oligonucleotide
  Antisense strand to SEQ ID NO: 35878
aauuaaggaacucacuuca

SEQ ID NO: 35880 - RNA, 19 nt, Artificial Sequence
  Description of Artificial Sequence: Synthetic oligonucleotide
  Sense strand starting at position 3658 of SEQ ID NO: 422
gucagagggcucuaguaac

SEQ ID NO: 35881 - RNA, 19 nt, Artificial Sequence
  Description of Artificial Sequence: Synthetic oligonucleotide
  Antisense strand to SEQ ID NO: 35880
guuacuagagcccucugac

SEQ ID NO: 35882 - RNA, 19 nt, Artificial Sequence
  Description of Artificial Sequence: Synthetic oligonucleotide
  Sense strand starting at position 3750 of SEQ ID NO: 422
gcagucauggcuucuguuu

SEQ ID NO: 35883 - RNA, 19 nt, Artificial Sequence
  Description of Artificial Sequence: Synthetic oligonucleotide
  Antisense strand to SEQ ID NO: 35882
aaacagaagccaugacugc

SEQ ID NO: 35884 - RNA, 19 nt, Artificial Sequence
  Description of Artificial Sequence: Synthetic oligonucleotide
  Sense strand starting at position 3921 of SEQ ID NO: 422
gaggcuucucuggagaguu

SEQ ID NO: 35885 - RNA, 19 nt, Artificial Sequence
  Description of Artificial Sequence: Synthetic oligonucleotide
  Antisense strand to SEQ ID NO: 35884
aacucuccagagaagccuc

SEQ ID NO: 35886 - RNA, 19 nt, Artificial Sequence
  Description of Artificial Sequence: Synthetic oligonucleotide
  Sense strand starting at position 75 of SEQ ID NO: 423
gcucauuucccaggccaca

SEQ ID NO: 35887 - RNA, 19 nt, Artificial Sequence
  Description of Artificial Sequence: Synthetic oligonucleotide
  Antisense strand to SEQ ID NO: 35886
uguggccugggaaaugagc

SEQ ID NO: 35888 - RNA, 19 nt, Artificial Sequence
  Description of Artificial Sequence: Synthetic oligonucleotide
  Sense strand starting at position 204 of SEQ ID NO: 423
uuguaaguucuuccucguu

SEQ ID NO: 35889 - RNA, 19 nt, Artificial Sequence
  Description of Artificial Sequence: Synthetic oligonucleotide
  Antisense strand to SEQ ID NO: 35888
aacgaggaagaacuuacaa

SEQ ID NO: 35890 - RNA, 19 nt, Artificial Sequence
  Description of Artificial Sequence: Synthetic oligonucleotide
  Sense strand starting at position 234 of SEQ ID NO: 423
caguauacggagugaauaa

SEQ ID NO: 35891 - RNA, 19 nt, Artificial Sequence
  Description of Artificial Sequence: Synthetic oligonucleotide
  Antisense strand to SEQ ID NO: 35890
uuauucacuccguauacug

SEQ ID NO: 35892 - RNA, 19 nt, Artificial Sequence
  Description of Artificial Sequence: Synthetic oligonucleotide
  Sense strand starting at position 440 of SEQ ID NO: 423
aguauagacugaucuguaa

SEQ ID NO: 35893 - RNA, 19 nt, Artificial Sequence
  Description of Artificial Sequence: Synthetic oligonucleotide
  Antisense strand to SEQ ID NO: 35892
uuacagaucagucuauacu

SEQ ID NO: 35894 - RNA, 19 nt, Artificial Sequence
  Description of Artificial Sequence: Synthetic oligonucleotide
  Sense strand starting at position 443 of SEQ ID NO: 423
auagacugaucuguaauga

SEQ ID NO: 35895 - RNA, 19 nt, Artificial Sequence
  Description of Artificial Sequence: Synthetic oligonucleotide
  Antisense strand to SEQ ID NO: 35894
ucauuacagaucagucuau

SEQ ID NO: 35896 - RNA, 19 nt, Artificial Sequence
  Description of Artificial Sequence: Synthetic oligonucleotide
  Sense strand starting at position 459 of SEQ ID NO: 423
ugaguacugcccuagagau

SEQ ID NO: 35897 - RNA, 19 nt, Artificial Sequence
  Description of Artificial Sequence: Synthetic oligonucleotide
  Antisense strand to SEQ ID NO: 35896
aucucuagggcaguacuca

SEQ ID NO: 35898 - RNA, 19 nt, Artificial Sequence
  Description of Artificial Sequence: Synthetic oligonucleotide
  Sense strand starting at position 471 of SEQ ID NO: 423
uagagaucugcuuauacug

SEQ ID NO: 35899 - RNA, 19 nt, Artificial Sequence
  Description of Artificial Sequence: Synthetic oligonucleotide
  Antisense strand to SEQ ID NO: 35898
caguauaagcagaucucua

SEQ ID NO: 35900 - RNA, 19 nt, Artificial Sequence
  Description of Artificial Sequence: Synthetic oligonucleotide
  Sense strand starting at position 592 of SEQ ID NO: 423
agauucuuugucgacuaca

SEQ ID NO: 35901 - RNA, 19 nt, Artificial Sequence
  Description of Artificial Sequence: Synthetic oligonucleotide
  Antisense strand to SEQ ID NO: 35900
uguagucgacaaagaaucu

SEQ ID NO: 35902 - RNA, 19 nt, Artificial Sequence
  Description of Artificial Sequence: Synthetic oligonucleotide
  Sense strand starting at position 595 of SEQ ID NO: 423
uucuuugucgacuacaaag

SEQ ID NO: 35903 - RNA, 19 nt, Artificial Sequence
  Description of Artificial Sequence: Synthetic oligonucleotide
  Antisense strand to SEQ ID NO: 35902
cuuuguagucgacaaagaa

SEQ ID NO: 35904 - RNA, 19 nt, Artificial Sequence
  Description of Artificial Sequence: Synthetic oligonucleotide
  Sense strand starting at position 894 of SEQ ID NO: 423
gguauucaucaggauguug

SEQ ID NO: 35905 - RNA, 19 nt, Artificial Sequence
  Description of Artificial Sequence: Synthetic oligonucleotide
  Antisense strand to SEQ ID NO: 35904
caacauccugaugaauacc

SEQ ID NO: 35906 - RNA, 19 nt, Artificial Sequence
  Description of Artificial Sequence: Synthetic oligonucleotide
  Sense strand starting at position 1103 of SEQ ID NO: 423
auuagcaauccuugagaau

SEQ ID NO: 35907 - RNA, 19 nt, Artificial Sequence
  Description of Artificial Sequence: Synthetic oligonucleotide
  Antisense strand to SEQ ID NO: 35906
auucucaaggauugcuaau

SEQ ID NO: 35908 - RNA, 19 nt, Artificial Sequence
  Description of Artificial Sequence: Synthetic oligonucleotide
  Sense strand starting at position 1166 of SEQ ID NO: 423
uuaacuauuugagaguaag

SEQ ID NO: 35909 - RNA, 19 nt, Artificial Sequence
  Description of Artificial Sequence: Synthetic oligonucleotide
  Antisense strand to SEQ ID NO: 35908
cuuacucucaaauaguuaa

SEQ ID NO: 35910 - RNA, 19 nt, Artificial Sequence
  Description of Artificial Sequence: Synthetic oligonucleotide
  Sense strand starting at position 1176 of SEQ ID NO: 423
gagaguaaguaauccuauu

SEQ ID NO: 35911 - RNA, 19 nt, Artificial Sequence
  Description of Artificial Sequence: Synthetic oligonucleotide
  Antisense strand to SEQ ID NO: 35910
aauaggauuacuuacucuc

SEQ ID NO: 35912 - RNA, 19 nt, Artificial Sequence
  Description of Artificial Sequence: Synthetic oligonucleotide
  Sense strand starting at position 1261 of SEQ ID NO: 423
ugaaacugugugcauacaa

SEQ ID NO: 35913 - RNA, 19 nt, Artificial Sequence
  Description of Artificial Sequence: Synthetic oligonucleotide
  Antisense strand to SEQ ID NO: 35912
uuguaugcacacaguuuca

SEQ ID NO: 35914 - RNA, 19 nt, Artificial Sequence
  Description of Artificial Sequence: Synthetic oligonucleotide
  Sense strand starting at position 1311 of SEQ ID NO: 423
cugauuccucuacaucagu

SEQ ID NO: 35915 - RNA, 19 nt, Artificial Sequence
  Description of Artificial Sequence: Synthetic oligonucleotide
  Antisense strand to SEQ ID NO: 35914
acugauguagaggaaucag

SEQ ID NO: 35916 - RNA, 19 nt, Artificial Sequence
  Description of Artificial Sequence: Synthetic oligonucleotide
  Sense strand starting at position 1338 of SEQ ID NO: 423
gugaaaucucuguaucacu

SEQ ID NO: 35917 - RNA, 19 nt, Artificial Sequence
  Description of Artificial Sequence: Synthetic oligonucleotide
  Antisense strand to SEQ ID NO: 35916
agugauacagagauuucac

SEQ ID NO: 35918 - RNA, 19 nt, Artificial Sequence
  Description of Artificial Sequence: Synthetic oligonucleotide
  Sense strand starting at position 1771 of SEQ ID NO: 423
gauggauucgggcaaaccu

SEQ ID NO: 35919 - RNA, 19 nt, Artificial Sequence
  Description of Artificial Sequence: Synthetic oligonucleotide
  Antisense strand to SEQ ID NO: 35918
agguuugcccgaauccauc

SEQ ID NO: 35920 - RNA, 19 nt, Artificial Sequence
  Description of Artificial Sequence: Synthetic oligonucleotide
  Sense strand starting at position 1805 of SEQ ID NO: 423
acaucaaacucugugggaa

SEQ ID NO: 35921 - RNA, 19 nt, Artificial Sequence
  Description of Artificial Sequence: Synthetic oligonucleotide
  Antisense strand to SEQ ID NO: 35920
uucccacagaguuugaugu

SEQ ID NO: 35922 - RNA, 19 nt, Artificial Sequence
  Description of Artificial Sequence: Synthetic oligonucleotide
  Sense strand starting at position 1806 of SEQ ID NO: 423
caucaaacucugugggaag

SEQ ID NO: 35923 - RNA, 19 nt, Artificial Sequence
  Description of Artificial Sequence: Synthetic oligonucleotide
  Antisense strand to SEQ ID NO: 35922
cuucccacagaguuugaug

SEQ ID NO: 35924 - RNA, 19 nt, Artificial Sequence
  Description of Artificial Sequence: Synthetic oligonucleotide
  Sense strand starting at position 1808 of SEQ ID NO: 423
ucaaacucugugggaagau

SEQ ID NO: 35925 - RNA, 19 nt, Artificial Sequence
  Description of Artificial Sequence: Synthetic oligonucleotide
  Antisense strand to SEQ ID NO: 35924
aucuucccacagaguuuga

SEQ ID NO: 35926 - RNA, 19 nt, Artificial Sequence
  Description of Artificial Sequence: Synthetic oligonucleotide
  Sense strand starting at position 1820 of SEQ ID NO: 423
ggaagauuguccgccauuu

SEQ ID NO: 35927 - RNA, 19 nt, Artificial Sequence
  Description of Artificial Sequence: Synthetic oligonucleotide
  Antisense strand to SEQ ID NO: 35926
aaauggcggacaaucuucc

SEQ ID NO: 35928 - RNA, 19 nt, Artificial Sequence
  Description of Artificial Sequence: Synthetic oligonucleotide
  Sense strand starting at position 1876 of SEQ ID NO: 423
agaaaugaggugugauuau

SEQ ID NO: 35929 - RNA, 19 nt, Artificial Sequence
  Description of Artificial Sequence: Synthetic oligonucleotide
  Antisense strand to SEQ ID NO: 35928
auaaucacaccucauuucu

SEQ ID NO: 35930 - RNA, 19 nt, Artificial Sequence
  Description of Artificial Sequence: Synthetic oligonucleotide
  Sense strand starting at position 1887 of SEQ ID NO: 423
gugauuaugcuguaauaaa

SEQ ID NO: 35931 - RNA, 19 nt, Artificial Sequence
  Description of Artificial Sequence: Synthetic oligonucleotide
  Antisense strand to SEQ ID NO: 35930
uuuauuacagcauaaucac

SEQ ID NO: 35932 - RNA, 19 nt, Artificial Sequence
  Description of Artificial Sequence: Synthetic oligonucleotide
  Sense strand starting at position 1924 of SEQ ID NO: 423
ccaguuaucccagaagcac

SEQ ID NO: 35933 - RNA, 19 nt, Artificial Sequence
  Description of Artificial Sequence: Synthetic oligonucleotide
  Antisense strand to SEQ ID NO: 35932
gugcuucugggauaacugg

SEQ ID NO: 35934 - RNA, 19 nt, Artificial Sequence
  Description of Artificial Sequence: Synthetic oligonucleotide
  Sense strand starting at position 2217 of SEQ ID NO: 423
aauccauuggagugugaca

SEQ ID NO: 35935 - RNA, 19 nt, Artificial Sequence
  Description of Artificial Sequence: Synthetic oligonucleotide
  Antisense strand to SEQ ID NO: 35934
ugucacacuccaauggauu

SEQ ID NO: 35936 - RNA, 19 nt, Artificial Sequence
  Description of Artificial Sequence: Synthetic oligonucleotide
  Sense strand starting at position 2294 of SEQ ID NO: 423
cuaauuucuugagaaugga

SEQ ID NO: 35937 - RNA, 19 nt, Artificial Sequence
  Description of Artificial Sequence: Synthetic oligonucleotide
  Antisense strand to SEQ ID NO: 35936
uccauucucaagaaauuag

SEQ ID NO: 35938 - RNA, 19 nt, Artificial Sequence
  Description of Artificial Sequence: Synthetic oligonucleotide
  Sense strand starting at position 2492 of SEQ ID NO: 423
ggcuccacuguuuauagaa

SEQ ID NO: 35939 - RNA, 19 nt, Artificial Sequence
  Description of Artificial Sequence: Synthetic oligonucleotide
  Antisense strand to SEQ ID NO: 35938
uucuauaaacaguggagcc

SEQ ID NO: 35940 - RNA, 19 nt, Artificial Sequence
  Description of Artificial Sequence: Synthetic oligonucleotide
  Sense strand starting at position 2734 of SEQ ID NO: 423
ucauaauagcccugaggag

SEQ ID NO: 35941 - RNA, 19 nt, Artificial Sequence
  Description of Artificial Sequence: Synthetic oligonucleotide
  Antisense strand to SEQ ID NO: 35940
cuccucagggcuauuauga

SEQ ID NO: 35942 - RNA, 19 nt, Artificial Sequence
  Description of Artificial Sequence: Synthetic oligonucleotide
  Sense strand starting at position 2899 of SEQ ID NO: 423
uacagugauguuugcauuu

SEQ ID NO: 35943 - RNA, 19 nt, Artificial Sequence
  Description of Artificial Sequence: Synthetic oligonucleotide
  Antisense strand to SEQ ID NO: 35942
aaaugcaaacaucacugua

SEQ ID NO: 35944 - RNA, 19 nt, Artificial Sequence
  Description of Artificial Sequence: Synthetic oligonucleotide
  Sense strand starting at position 3054 of SEQ ID NO: 423
guuaacuuugagcauaaug

SEQ ID NO: 35945 - RNA, 19 nt, Artificial Sequence
  Description of Artificial Sequence: Synthetic oligonucleotide
  Antisense strand to SEQ ID NO: 35944
cauuaugcucaaaguuaac

SEQ ID NO: 35946 - RNA, 19 nt, Artificial Sequence
  Description of Artificial Sequence: Synthetic oligonucleotide
  Sense strand starting at position 3081 of SEQ ID NO: 423
auuccaugugcggaagaca

SEQ ID NO: 35947 - RNA, 19 nt, Artificial Sequence
  Description of Artificial Sequence: Synthetic oligonucleotide
  Antisense strand to SEQ ID NO: 35946
ugucuuccgcacauggaau

SEQ ID NO: 35948 - RNA, 19 nt, Artificial Sequence
  Description of Artificial Sequence: Synthetic oligonucleotide
  Sense strand starting at position 3092 of SEQ ID NO: 423
ggaagacaucugugugaug

SEQ ID NO: 35949 - RNA, 19 nt, Artificial Sequence
  Description of Artificial Sequence: Synthetic oligonucleotide
  Antisense strand to SEQ ID NO: 35948
caucacacagaugucuucc

SEQ ID NO: 35950 - RNA, 19 nt, Artificial Sequence
  Description of Artificial Sequence: Synthetic oligonucleotide
  Sense strand starting at position 3148 of SEQ ID NO: 423
agagcauacucaccugaaa

SEQ ID NO: 35951 - RNA, 19 nt, Artificial Sequence
  Description of Artificial Sequence: Synthetic oligonucleotide
  Antisense strand to SEQ ID NO: 35950
uuucaggugaguaugcucu

SEQ ID NO: 35952 - RNA, 19 nt, Artificial Sequence
  Description of Artificial Sequence: Synthetic oligonucleotide
  Sense strand starting at position 3160 of SEQ ID NO: 423
ccugaaagucuuuaggcua

SEQ ID NO: 35953 - RNA, 19 nt, Artificial Sequence
  Description of Artificial Sequence: Synthetic oligonucleotide
  Antisense strand to SEQ ID NO: 35952
uagccuaaagacuuucagg

SEQ ID NO: 35954 - RNA, 19 nt, Artificial Sequence
  Description of Artificial Sequence: Synthetic oligonucleotide
  Sense strand starting at position 3163 of SEQ ID NO: 423
gaaagucuuuaggcuaaag

SEQ ID NO: 35955 - RNA, 19 nt, Artificial Sequence
  Description of Artificial Sequence: Synthetic oligonucleotide
  Antisense strand to SEQ ID NO: 35954
cuuuagccuaaagacuuuc

SEQ ID NO: 35956 - RNA, 19 nt, Artificial Sequence
  Description of Artificial Sequence: Synthetic oligonucleotide
  Sense strand starting at position 3350 of SEQ ID NO: 423
gauuaaauugcauagggca

SEQ ID NO: 35957 - RNA, 19 nt, Artificial Sequence
  Description of Artificial Sequence: Synthetic oligonucleotide
  Antisense strand to SEQ ID NO: 35956
ugcccuaugcaauuuaauc

SEQ ID NO: 35958 - RNA, 19 nt, Artificial Sequence
  Description of Artificial Sequence: Synthetic oligonucleotide
  Sense strand starting at position 3457 of SEQ ID NO: 423
uuuggcauucccuaagaag

SEQ ID NO: 35959 - RNA, 19 nt, Artificial Sequence
  Description of Artificial Sequence: Synthetic oligonucleotide
  Antisense strand to SEQ ID NO: 35958
cuucuuagggaaugccaaa

SEQ ID NO: 35960 - RNA, 19 nt, Artificial Sequence
  Description of Artificial Sequence: Synthetic oligonucleotide
  Sense strand starting at position 3590 of SEQ ID NO: 423
cuaugaugguaucugaaga

SEQ ID NO: 35961 - RNA, 19 nt, Artificial Sequence
  Description of Artificial Sequence: Synthetic oligonucleotide
  Antisense strand to SEQ ID NO: 35960
ucuucagauaccaucauag

SEQ ID NO: 35962 - RNA, 19 nt, Artificial Sequence
  Description of Artificial Sequence: Synthetic oligonucleotide
  Sense strand starting at position 3708 of SEQ ID NO: 423
cguucuaaccuacagauau

SEQ ID NO: 35963 - RNA, 19 nt, Artificial Sequence
  Description of Artificial Sequence: Synthetic oligonucleotide
  Antisense strand to SEQ ID NO: 35962
auaucuguagguuagaacg

SEQ ID NO: 35964 - RNA, 19 nt, Artificial Sequence
  Description of Artificial Sequence: Synthetic oligonucleotide
  Sense strand starting at position 3754 of SEQ ID NO: 423
guaggauggccuuacagag

SEQ ID NO: 35965 - RNA, 19 nt, Artificial Sequence
  Description of Artificial Sequence: Synthetic oligonucleotide
  Antisense strand to SEQ ID NO: 35964
cucuguaaggccauccuac

SEQ ID NO: 35966 - RNA, 19 nt, Artificial Sequence
  Description of Artificial Sequence: Synthetic oligonucleotide
  Sense strand starting at position 1514 of SEQ ID NO: 424
ccaagaaagcaauguacau

SEQ ID NO: 35967 - RNA, 19 nt, Artificial Sequence
  Description of Artificial Sequence: Synthetic oligonucleotide
  Antisense strand to SEQ ID NO: 35966
auguacauugcuuucuugg

SEQ ID NO: 35968 - RNA, 19 nt, Artificial Sequence
  Description of Artificial Sequence: Synthetic oligonucleotide
  Sense strand starting at position 1502 of SEQ ID NO: 424
auagcaauauguccaagaa

SEQ ID NO: 35969 - RNA, 19 nt, Artificial Sequence
  Description of Artificial Sequence: Synthetic oligonucleotide
  Antisense strand to SEQ ID NO: 35968
uucuuggacauauugcuau

SEQ ID NO: 35970 - RNA, 19 nt, Artificial Sequence
  Description of Artificial Sequence: Synthetic oligonucleotide
  Sense strand starting at position 1491 of SEQ ID NO: 424
uuagaugugcaauagcaau

SEQ ID NO: 35971 - RNA, 19 nt, Artificial Sequence
  Description of Artificial Sequence: Synthetic oligonucleotide
  Antisense strand to SEQ ID NO: 35970
auugcuauugcacaucuaa

SEQ ID NO: 35972 - RNA, 19 nt, Artificial Sequence
  Description of Artificial Sequence: Synthetic oligonucleotide
  Sense strand starting at position 1373 of SEQ ID NO: 424
uggcaugccuuggaaauau

SEQ ID NO: 35973 - RNA, 19 nt, Artificial Sequence
  Description of Artificial Sequence: Synthetic oligonucleotide
  Antisense strand to SEQ ID NO: 35972
auauuuccaaggcaugcca

SEQ ID NO: 35974 - RNA, 19 nt, Artificial Sequence
  Description of Artificial Sequence: Synthetic oligonucleotide
  Sense strand starting at position 1372 of SEQ ID NO: 424
cuggcaugccuuggaaaua

SEQ ID NO: 35975 - RNA, 19 nt, Artificial Sequence
  Description of Artificial Sequence: Synthetic oligonucleotide
  Antisense strand to SEQ ID NO: 35974
uauuuccaaggcaugccag

SEQ ID NO: 35976 - RNA, 19 nt, Artificial Sequence
  Description of Artificial Sequence: Synthetic oligonucleotide
  Sense strand starting at position 1371 of SEQ ID NO: 424
acuggcaugccuuggaaau

SEQ ID NO: 35977 - RNA, 19 nt, Artificial Sequence
  Description of Artificial Sequence: Synthetic oligonucleotide
  Antisense strand to SEQ ID NO: 35976
auuuccaaggcaugccagu

SEQ ID NO: 35978 - RNA, 19 nt, Artificial Sequence
  Description of Artificial Sequence: Synthetic oligonucleotide
  Sense strand starting at position 1313 of SEQ ID NO: 424
ucugauuuaugauguccau

SEQ ID NO: 35979 - RNA, 19 nt, Artificial Sequence
  Description of Artificial Sequence: Synthetic oligonucleotide
  Antisense strand to SEQ ID NO: 35978
auggacaucauaaaucaga

SEQ ID NO: 35980 - RNA, 19 nt, Artificial Sequence
  Description of Artificial Sequence: Synthetic oligonucleotide
  Sense strand starting at position 1196 of SEQ ID NO: 424
agagaaugcuguccuaauu

SEQ ID NO: 35981 - RNA, 19 nt, Artificial Sequence
  Description of Artificial Sequence: Synthetic oligonucleotide
  Antisense strand to SEQ ID NO: 35980
aauuaggacagcauucucu

SEQ ID NO: 35982 - RNA, 19 nt, Artificial Sequence
  Description of Artificial Sequence: Synthetic oligonucleotide
  Sense strand starting at position 1193 of SEQ ID NO: 424
uccagagaaugcuguccua

SEQ ID NO: 35983 - RNA, 19 nt, Artificial Sequence
  Description of Artificial Sequence: Synthetic oligonucleotide
  Antisense strand to SEQ ID NO: 35982
uaggacagcauucucugga

SEQ ID NO: 35984 - RNA, 19 nt, Artificial Sequence
  Description of Artificial Sequence: Synthetic oligonucleotide
  Sense strand starting at position 1174 of SEQ ID NO: 424
ucaaacuaagauuggcaau

SEQ ID NO: 35985 - RNA, 19 nt, Artificial Sequence
  Description of Artificial Sequence: Synthetic oligonucleotide
  Antisense strand to SEQ ID NO: 35984
auugccaaucuuaguuuga

SEQ ID NO: 35986 - RNA, 19 nt, Artificial Sequence
  Description of Artificial Sequence: Synthetic oligonucleotide
  Sense strand starting at position 1157 of SEQ ID NO: 424
gcucaaaggucacauaauc

SEQ ID NO: 35987 - RNA, 19 nt, Artificial Sequence
  Description of Artificial Sequence: Synthetic oligonucleotide
  Antisense strand to SEQ ID NO: 35986
gauuaugugaccuuugagc

SEQ ID NO: 35988 - RNA, 19 nt, Artificial Sequence
  Description of Artificial Sequence: Synthetic oligonucleotide
  Sense strand starting at position 1148 of SEQ ID NO: 424
guaaacauggcucaaaggu

SEQ ID NO: 35989 - RNA, 19 nt, Artificial Sequence
  Description of Artificial Sequence: Synthetic oligonucleotide
  Antisense strand to SEQ ID NO: 35988
accuuugagccauguuuac

SEQ ID NO: 35990 - RNA, 19 nt, Artificial Sequence
  Description of Artificial Sequence: Synthetic oligonucleotide
  Sense strand starting at position 962 of SEQ ID NO: 424
ugaaguuucucugauuaaa

SEQ ID NO: 35991 - RNA, 19 nt, Artificial Sequence
  Description of Artificial Sequence: Synthetic oligonucleotide
  Antisense strand to SEQ ID NO: 35990
uuuaaucagagaaacuuca

SEQ ID NO: 35992 - RNA, 19 nt, Artificial Sequence
  Description of Artificial Sequence: Synthetic oligonucleotide
  Sense strand starting at position 960 of SEQ ID NO: 424
cuugaaguuucucugauua

SEQ ID NO: 35993 - RNA, 19 nt, Artificial Sequence
  Description of Artificial Sequence: Synthetic oligonucleotide
  Antisense strand to SEQ ID NO: 35992
uaaucagagaaacuucaag

SEQ ID NO: 35994 - RNA, 19 nt, Artificial Sequence
  Description of Artificial Sequence: Synthetic oligonucleotide
  Sense strand starting at position 959 of SEQ ID NO: 424
ucuugaaguuucucugauu

SEQ ID NO: 35995 - RNA, 19 nt, Artificial Sequence
  Description of Artificial Sequence: Synthetic oligonucleotide
  Antisense strand to SEQ ID NO: 35994
aaucagagaaacuucaaga

SEQ ID NO: 35996 - RNA, 19 nt, Artificial Sequence
  Description of Artificial Sequence: Synthetic oligonucleotide
  Sense strand starting at position 950 of SEQ ID NO: 424
gauugaacaucuugaaguu

SEQ ID NO: 35997 - RNA, 19 nt, Artificial Sequence
  Description of Artificial Sequence: Synthetic oligonucleotide
  Antisense strand to SEQ ID NO: 35996
aacuucaagauguucaauc

SEQ ID NO: 35998 - RNA, 19 nt, Artificial Sequence
  Description of Artificial Sequence: Synthetic oligonucleotide
  Sense strand starting at position 894 of SEQ ID NO: 424
agugucuacuaauaucaau

SEQ ID NO: 35999 - RNA, 19 nt, Artificial Sequence
  Description of Artificial Sequence: Synthetic oligonucleotide
  Antisense strand to SEQ ID NO: 35998
auugauauuaguagacacu

SEQ ID NO: 36000 - RNA, 19 nt, Artificial Sequence
  Description of Artificial Sequence: Synthetic oligonucleotide
  Sense strand starting at position 891 of SEQ ID NO: 424
ugaagugucuacuaauauc

SEQ ID NO: 36001 - RNA, 19 nt, Artificial Sequence
  Description of Artificial Sequence: Synthetic oligonucleotide
  Antisense strand to SEQ ID NO: 36000
gauauuaguagacacuuca

SEQ ID NO: 36002 - RNA, 19 nt, Artificial Sequence
  Description of Artificial Sequence: Synthetic oligonucleotide
  Sense strand starting at position 667 of SEQ ID NO: 424
cugucuugugcauaguagu

SEQ ID NO: 36003 - RNA, 19 nt, Artificial Sequence
  Description of Artificial Sequence: Synthetic oligonucleotide
  Antisense strand to SEQ ID NO: 36002
acuacuaugcacaagacag

SEQ ID NO: 36004 - RNA, 19 nt, Artificial Sequence
  Description of Artificial Sequence: Synthetic oligonucleotide
  Sense strand starting at position 665 of SEQ ID NO: 424
cacugucuugugcauagua

SEQ ID NO: 36005 - RNA, 19 nt, Artificial Sequence
  Description of Artificial Sequence: Synthetic oligonucleotide
  Antisense strand to SEQ ID NO: 36004
uacuaugcacaagacagug

SEQ ID NO: 36006 - RNA, 19 nt, Artificial Sequence
  Description of Artificial Sequence: Synthetic oligonucleotide
  Sense strand starting at position 640 of SEQ ID NO: 424
augugucaguccucucacu

SEQ ID NO: 36007 - RNA, 19 nt, Artificial Sequence
  Description of Artificial Sequence: Synthetic oligonucleotide
  Antisense strand to SEQ ID NO: 36006
agugagaggacugacacau

SEQ ID NO: 36008 - RNA, 19 nt, Artificial Sequence
  Description of Artificial Sequence: Synthetic oligonucleotide
  Sense strand starting at position 609 of SEQ ID NO: 424
agggcaaguacucaguuaa

SEQ ID NO: 36009 - RNA, 19 nt, Artificial Sequence
  Description of Artificial Sequence: Synthetic oligonucleotide
  Antisense strand to SEQ ID NO: 36008
uuaacugaguacuugcccu

SEQ ID NO: 36010 - RNA, 19 nt, Artificial Sequence
  Description of Artificial Sequence: Synthetic oligonucleotide
  Sense strand starting at position 608 of SEQ ID NO: 424
aagggcaaguacucaguua

SEQ ID NO: 36011 - RNA, 19 nt, Artificial Sequence
  Description of Artificial Sequence: Synthetic oligonucleotide
  Antisense strand to SEQ ID NO: 36010
uaacugaguacuugcccuu

SEQ ID NO: 36012 - RNA, 19 nt, Artificial Sequence
  Description of Artificial Sequence: Synthetic oligonucleotide
  Sense strand starting at position 548 of SEQ ID NO: 424
ugcugaugagcauacaauu

SEQ ID NO: 36013 - RNA, 19 nt, Artificial Sequence
  Description of Artificial Sequence: Synthetic oligonucleotide
  Antisense strand to SEQ ID NO: 36012
aauuguaugcucaucagca

SEQ ID NO: 36014 - RNA, 19 nt, Artificial Sequence
  Description of Artificial Sequence: Synthetic oligonucleotide
  Sense strand starting at position 543 of SEQ ID NO: 424
gggcaugcugaugagcaua

SEQ ID NO: 36015 - RNA, 19 nt, Artificial Sequence
  Description of Artificial Sequence: Synthetic oligonucleotide
  Antisense strand to SEQ ID NO: 36014
uaugcucaucagcaugccc

SEQ ID NO: 36016 - RNA, 19 nt, Artificial Sequence
  Description of Artificial Sequence: Synthetic oligonucleotide
  Sense strand starting at position 477 of SEQ ID NO: 424
agugcaaggauguagucau

SEQ ID NO: 36017 - RNA, 19 nt, Artificial Sequence
  Description of Artificial Sequence: Synthetic oligonucleotide
  Antisense strand to SEQ ID NO: 36016
augacuacauccuugcacu

SEQ ID NO: 36018 - RNA, 19 nt, Artificial Sequence
  Description of Artificial Sequence: Synthetic oligonucleotide
  Sense strand starting at position 451 of SEQ ID NO: 424
gaggguaagucaucaaaca

SEQ ID NO: 36019 - RNA, 19 nt, Artificial Sequence
  Description of Artificial Sequence: Synthetic oligonucleotide
  Antisense strand to SEQ ID NO: 36018
uguuugaugacuuacccuc

SEQ ID NO: 36020 - RNA, 19 nt, Artificial Sequence
  Description of Artificial Sequence: Synthetic oligonucleotide
  Sense strand starting at position 373 of SEQ ID NO: 424
aggaaauaauaucugugua

SEQ ID NO: 36021 - RNA, 19 nt, Artificial Sequence
  Description of Artificial Sequence: Synthetic oligonucleotide
  Antisense strand to SEQ ID NO: 36020
uacacagauauuauuuccu

SEQ ID NO: 36022 - RNA, 19 nt, Artificial Sequence
  Description of Artificial Sequence: Synthetic oligonucleotide
  Sense strand starting at position 362 of SEQ ID NO: 424
agcacauucucaggaaaua

SEQ ID NO: 36023 - RNA, 19 nt, Artificial Sequence
  Description of Artificial Sequence: Synthetic oligonucleotide
  Antisense strand to SEQ ID NO: 36022
uauuuccugagaaugugcu

SEQ ID NO: 36024 - RNA, 19 nt, Artificial Sequence
  Description of Artificial Sequence: Synthetic oligonucleotide
  Sense strand starting at position 232 of SEQ ID NO: 424
ccaugaaaugcaugcacuu

SEQ ID NO: 36025 - RNA, 19 nt, Artificial Sequence
  Description of Artificial Sequence: Synthetic oligonucleotide
  Antisense strand to SEQ ID NO: 36024
aagugcaugcauuucaugg

SEQ ID NO: 36026 - RNA, 19 nt, Artificial Sequence
  Description of Artificial Sequence: Synthetic oligonucleotide
  Sense strand starting at position 223 of SEQ ID NO: 424
gcuaucauuccaugaaaug

SEQ ID NO: 36027 - RNA, 19 nt, Artificial Sequence
  Description of Artificial Sequence: Synthetic oligonucleotide
  Antisense strand to SEQ ID NO: 36026
cauuucauggaaugauagc

SEQ ID NO: 36028 - RNA, 19 nt, Artificial Sequence
  Description of Artificial Sequence: Synthetic oligonucleotide
  Sense strand starting at position 194 of SEQ ID NO: 424
agaagugucuuauggaagg

SEQ ID NO: 36029 - RNA, 19 nt, Artificial Sequence
  Description of Artificial Sequence: Synthetic oligonucleotide
  Antisense strand to SEQ ID NO: 36028
ccuuccauaagacacuucu

SEQ ID NO: 36030 - RNA, 19 nt, Artificial Sequence
  Description of Artificial Sequence: Synthetic oligonucleotide
  Sense strand starting at position 192 of SEQ ID NO: 424
ugagaagugucuuauggaa

SEQ ID NO: 36031 - RNA, 19 nt, Artificial Sequence
  Description of Artificial Sequence: Synthetic oligonucleotide
  Antisense strand to SEQ ID NO: 36030
uuccauaagacacuucuca

SEQ ID NO: 36032 - RNA, 19 nt, Artificial Sequence
  Description of Artificial Sequence: Synthetic oligonucleotide
  Sense strand starting at position 183 of SEQ ID NO: 424
cucccuaucugagaagugu

SEQ ID NO: 36033 - RNA, 19 nt, Artificial Sequence
  Description of Artificial Sequence: Synthetic oligonucleotide
  Antisense strand to SEQ ID NO: 36032
acacuucucagauagggag

SEQ ID NO: 36034 - RNA, 19 nt, Artificial Sequence
  Description of Artificial Sequence: Synthetic oligonucleotide
  Sense strand starting at position 179 of SEQ ID NO: 424
ggcccucccuaucugagaa

SEQ ID NO: 36035 - RNA, 19 nt, Artificial Sequence
  Description of Artificial Sequence: Synthetic oligonucleotide
  Antisense strand to SEQ ID NO: 36034
uucucagauagggagggcc

SEQ ID NO: 36036 - RNA, 19 nt, Artificial Sequence
  Description of Artificial Sequence: Synthetic oligonucleotide
  Sense strand starting at position 46 of SEQ ID NO: 424
uauugcuugccauguugga

SEQ ID NO: 36037 - RNA, 19 nt, Artificial Sequence
  Description of Artificial Sequence: Synthetic oligonucleotide
  Antisense strand to SEQ ID NO: 36036
uccaacauggcaagcaaua

SEQ ID NO: 36038 - RNA, 19 nt, Artificial Sequence
  Description of Artificial Sequence: Synthetic oligonucleotide
  Sense strand starting at position 43 of SEQ ID NO: 424
ugcuauugcuugccauguu

SEQ ID NO: 36039 - RNA, 19 nt, Artificial Sequence
  Description of Artificial Sequence: Synthetic oligonucleotide
  Antisense strand to SEQ ID NO: 36038
aacauggcaagcaauagca

SEQ ID NO: 36040 - RNA, 19 nt, Artificial Sequence
  Description of Artificial Sequence: Synthetic oligonucleotide
  Sense strand starting at position 3930 of SEQ ID NO: 425
guggaccauauguguugaa

SEQ ID NO: 36041 - RNA, 19 nt, Artificial Sequence
  Description of Artificial Sequence: Synthetic oligonucleotide
  Antisense strand to SEQ ID NO: 36040
uucaacacauaugguccac

SEQ ID NO: 36042 - RNA, 19 nt, Artificial Sequence
  Description of Artificial Sequence: Synthetic oligonucleotide
  Sense strand starting at position 3921 of SEQ ID NO: 425
auguguguuguggaccaua

SEQ ID NO: 36043 - RNA, 19 nt, Artificial Sequence
  Description of Artificial Sequence: Synthetic oligonucleotide
  Antisense strand to SEQ ID NO: 36042
uaugguccacaacacacau

SEQ ID NO: 36044 - RNA, 19 nt, Artificial Sequence
  Description of Artificial Sequence: Synthetic oligonucleotide
  Sense strand starting at position 3901 of SEQ ID NO: 425
gugguuugccaggaaacug

SEQ ID NO: 36045 - RNA, 19 nt, Artificial Sequence
  Description of Artificial Sequence: Synthetic oligonucleotide
  Antisense strand to SEQ ID NO: 36044
caguuuccuggcaaaccac

SEQ ID NO: 36046 - RNA, 19 nt, Artificial Sequence
  Description of Artificial Sequence: Synthetic oligonucleotide
  Sense strand starting at position 3900 of SEQ ID NO: 425
ugugguuugccaggaaacu

SEQ ID NO: 36047 - RNA, 19 nt, Artificial Sequence
  Description of Artificial Sequence: Synthetic oligonucleotide
  Antisense strand to SEQ ID NO: 36046
aguuuccuggcaaaccaca

SEQ ID NO: 36048 - RNA, 19 nt, Artificial Sequence
  Description of Artificial Sequence: Synthetic oligonucleotide
  Sense strand starting at position 3893 of SEQ ID NO: 425
agguauaugugguuugcca

SEQ ID NO: 36049 - RNA, 19 nt, Artificial Sequence
  Description of Artificial Sequence: Synthetic oligonucleotide
  Antisense strand to SEQ ID NO: 36048
uggcaaaccacauauaccu

SEQ ID NO: 36050 - RNA, 19 nt, Artificial Sequence
  Description of Artificial Sequence: Synthetic oligonucleotide
  Sense strand starting at position 3880 of SEQ ID NO: 425
aucaacauuuguuagguau

SEQ ID NO: 36051 - RNA, 19 nt, Artificial Sequence
  Description of Artificial Sequence: Synthetic oligonucleotide
  Antisense strand to SEQ ID NO: 36050
auaccuaacaaauguugau

SEQ ID NO: 36052 - RNA, 19 nt, Artificial Sequence
  Description of Artificial Sequence: Synthetic oligonucleotide
  Sense strand starting at position 3823 of SEQ ID NO: 425
agucccucugcuuaaggaa

SEQ ID NO: 36053 - RNA, 19 nt, Artificial Sequence
  Description of Artificial Sequence: Synthetic oligonucleotide
  Antisense strand to SEQ ID NO: 36052
uuccuuaagcagagggacu

SEQ ID NO: 36054 - RNA, 19 nt, Artificial Sequence
  Description of Artificial Sequence: Synthetic oligonucleotide
  Sense strand starting at position 3818 of SEQ ID NO: 425
uguguagucccucugcuua

SEQ ID NO: 36055 - RNA, 19 nt, Artificial Sequence
  Description of Artificial Sequence: Synthetic oligonucleotide
  Antisense strand to SEQ ID NO: 36054
uaagcagagggacuacaca

SEQ ID NO: 36056 - RNA, 19 nt, Artificial Sequence
  Description of Artificial Sequence: Synthetic oligonucleotide
  Sense strand starting at position 3817 of SEQ ID NO: 425
guguguagucccucugcuu

SEQ ID NO: 36057 - RNA, 19 nt, Artificial Sequence
  Description of Artificial Sequence: Synthetic oligonucleotide
  Antisense strand to SEQ ID NO: 36056
aagcagagggacuacacac

SEQ ID NO: 36058 - RNA, 19 nt, Artificial Sequence
  Description of Artificial Sequence: Synthetic oligonucleotide
  Sense strand starting at position 3726 of SEQ ID NO: 425
uguguaagcgcacaauaau

SEQ ID NO: 36059 - RNA, 19 nt, Artificial Sequence
  Description of Artificial Sequence: Synthetic oligonucleotide
  Antisense strand to SEQ ID NO: 36058
auuauugugcgcuuacaca

SEQ ID NO: 36060 - RNA, 19 nt, Artificial Sequence
  Description of Artificial Sequence: Synthetic oligonucleotide
  Sense strand starting at position 3723 of SEQ ID NO: 425
gcauguguaagcgcacaau

SEQ ID NO: 36061 - RNA, 19 nt, Artificial Sequence
  Description of Artificial Sequence: Synthetic oligonucleotide
  Antisense strand to SEQ ID NO: 36060
auugugcgcuuacacaugc

SEQ ID NO: 36062 - RNA, 19 nt, Artificial Sequence
  Description of Artificial Sequence: Synthetic oligonucleotide
  Sense strand starting at position 3692 of SEQ ID NO: 425
guaaaucugcacgacuugu

SEQ ID NO: 36063 - RNA, 19 nt, Artificial Sequence
  Description of Artificial Sequence: Synthetic oligonucleotide
  Antisense strand to SEQ ID NO: 36062
acaagucgugcagauuuac

SEQ ID NO: 36064 - RNA, 19 nt, Artificial Sequence
  Description of Artificial Sequence: Synthetic oligonucleotide
  Sense strand starting at position 3689 of SEQ ID NO: 425
ggcguaaaucugcacgacu

SEQ ID NO: 36065 - RNA, 19 nt, Artificial Sequence
  Description of Artificial Sequence: Synthetic oligonucleotide
  Antisense strand to SEQ ID NO: 36064
agucgugcagauuuacgcc

SEQ ID NO: 36066 - RNA, 19 nt, Artificial Sequence
  Description of Artificial Sequence: Synthetic oligonucleotide
  Sense strand starting at position 3681 of SEQ ID NO: 425
uggaaaugggcguaaaucu

SEQ ID NO: 36067 - RNA, 19 nt, Artificial Sequence
  Description of Artificial Sequence: Synthetic oligonucleotide
  Antisense strand to SEQ ID NO: 36066
agauuuacgcccauuucca

SEQ ID NO: 36068 - RNA, 19 nt, Artificial Sequence
  Description of Artificial Sequence: Synthetic oligonucleotide
  Sense strand starting at position 3679 of SEQ ID NO: 425
cauggaaaugggcguaaau

SEQ ID NO: 36069 - RNA, 19 nt, Artificial Sequence
  Description of Artificial Sequence: Synthetic oligonucleotide
  Antisense strand to SEQ ID NO: 36068
auuuacgcccauuuccaug

SEQ ID NO: 36070 - RNA, 19 nt, Artificial Sequence
  Description of Artificial Sequence: Synthetic oligonucleotide
  Sense strand starting at position 3356 of SEQ ID NO: 425
gagaucacguguguacaaa

SEQ ID NO: 36071 - RNA, 19 nt, Artificial Sequence
  Description of Artificial Sequence: Synthetic oligonucleotide
  Antisense strand to SEQ ID NO: 36070
uuuguacacacgugaucuc

SEQ ID NO: 36072 - RNA, 19 nt, Artificial Sequence
  Description of Artificial Sequence: Synthetic oligonucleotide
  Sense strand starting at position 3355 of SEQ ID NO: 425
ugagaucacguguguacaa

SEQ ID NO: 36073 - RNA, 19 nt, Artificial Sequence
  Description of Artificial Sequence: Synthetic oligonucleotide
  Antisense strand to SEQ ID NO: 36072
uuguacacacgugaucuca

SEQ ID NO: 36074 - RNA, 19 nt, Artificial Sequence
  Description of Artificial Sequence: Synthetic oligonucleotide
  Sense strand starting at position 3266 of SEQ ID NO: 425
gacuuaagcccguaaucuc

SEQ ID NO: 36075 - RNA, 19 nt, Artificial Sequence
  Description of Artificial Sequence: Synthetic oligonucleotide
  Antisense strand to SEQ ID NO: 36074
gagauuacgggcuuaaguc

SEQ ID NO: 36076 - RNA, 19 nt, Artificial Sequence
  Description of Artificial Sequence: Synthetic oligonucleotide
  Sense strand starting at position 3120 of SEQ ID NO: 425
gccucucuagauuaugaau

SEQ ID NO: 36077 - RNA, 19 nt, Artificial Sequence
  Description of Artificial Sequence: Synthetic oligonucleotide
  Antisense strand to SEQ ID NO: 36076
auucauaaucuagagaggc

SEQ ID NO: 36078 - RNA, 19 nt, Artificial Sequence
  Description of Artificial Sequence: Synthetic oligonucleotide
  Sense strand starting at position 3060 of SEQ ID NO: 425
uuuguuauauguuuccaga

SEQ ID NO: 36079 - RNA, 19 nt, Artificial Sequence
  Description of Artificial Sequence: Synthetic oligonucleotide
  Antisense strand to SEQ ID NO: 36078
ucuggaaacauauaacaaa

SEQ ID NO: 36080 - RNA, 19 nt, Artificial Sequence
  Description of Artificial Sequence: Synthetic oligonucleotide
  Sense strand starting at position 3052 of SEQ ID NO: 425
ucagauacuuuguuauaug

SEQ ID NO: 36081 - RNA, 19 nt, Artificial Sequence
  Description of Artificial Sequence: Synthetic oligonucleotide
  Antisense strand to SEQ ID NO: 36080
cauauaacaaaguaucuga

SEQ ID NO: 36082 - RNA, 19 nt, Artificial Sequence
  Description of Artificial Sequence: Synthetic oligonucleotide
  Sense strand starting at position 3043 of SEQ ID NO: 425
agaacuagaucagauacuu

SEQ ID NO: 36083 - RNA, 19 nt, Artificial Sequence
  Description of Artificial Sequence: Synthetic oligonucleotide
  Antisense strand to SEQ ID NO: 36082
aaguaucugaucuaguucu

SEQ ID NO: 36084 - RNA, 19 nt, Artificial Sequence
  Description of Artificial Sequence: Synthetic oligonucleotide
  Sense strand starting at position 2993 of SEQ ID NO: 425
uugagcauuuggcaggaau

SEQ ID NO: 36085 - RNA, 19 nt, Artificial Sequence
  Description of Artificial Sequence: Synthetic oligonucleotide
  Antisense strand to SEQ ID NO: 36084
auuccugccaaaugcucaa

SEQ ID NO: 36086 - RNA, 19 nt, Artificial Sequence
  Description of Artificial Sequence: Synthetic oligonucleotide
  Sense strand starting at position 2925 of SEQ ID NO: 425
gacuuaaaugcaugguucu

SEQ ID NO: 36087 - RNA, 19 nt, Artificial Sequence
  Description of Artificial Sequence: Synthetic oligonucleotide
  Antisense strand to SEQ ID NO: 36086
agaaccaugcauuuaaguc

SEQ ID NO: 36088 - RNA, 19 nt, Artificial Sequence
  Description of Artificial Sequence: Synthetic oligonucleotide
  Sense strand starting at position 2641 of SEQ ID NO: 425
cucacagaggccugaucaa

SEQ ID NO: 36089 - RNA, 19 nt, Artificial Sequence
  Description of Artificial Sequence: Synthetic oligonucleotide
  Antisense strand to SEQ ID NO: 36088
uugaucaggccucugugag

SEQ ID NO: 36090 - RNA, 19 nt, Artificial Sequence
  Description of Artificial Sequence: Synthetic oligonucleotide
  Sense strand starting at position 2526 of SEQ ID NO: 425
gguagacuugaggguaaua

SEQ ID NO: 36091 - RNA, 19 nt, Artificial Sequence
  Description of Artificial Sequence: Synthetic oligonucleotide
  Antisense strand to SEQ ID NO: 36090
uauuacccucaagucuacc

SEQ ID NO: 36092 - RNA, 19 nt, Artificial Sequence
  Description of Artificial Sequence: Synthetic oligonucleotide
  Sense strand starting at position 2505 of SEQ ID NO: 425
ucuagacuugccugcaaag

SEQ ID NO: 36093 - RNA, 19 nt, Artificial Sequence
  Description of Artificial Sequence: Synthetic oligonucleotide
  Antisense strand to SEQ ID NO: 36092
cuuugcaggcaagucuaga

SEQ ID NO: 36094 - RNA, 19 nt, Artificial Sequence
  Description of Artificial Sequence: Synthetic oligonucleotide
  Sense strand starting at position 2503 of SEQ ID NO: 425
ggucuagacuugccugcaa

SEQ ID NO: 36095 - RNA, 19 nt, Artificial Sequence
  Description of Artificial Sequence: Synthetic oligonucleotide
  Antisense strand to SEQ ID NO: 36094
uugcaggcaagucuagacc

SEQ ID NO: 36096 - RNA, 19 nt, Artificial Sequence
  Description of Artificial Sequence: Synthetic oligonucleotide
  Sense strand starting at position 2058 of SEQ ID NO: 425
cugggauagucuucgauug

SEQ ID NO: 36097 - RNA, 19 nt, Artificial Sequence
  Description of Artificial Sequence: Synthetic oligonucleotide
  Antisense strand to SEQ ID NO: 36096
caaucgaagacuaucccag

SEQ ID NO: 36098 - RNA, 19 nt, Artificial Sequence
  Description of Artificial Sequence: Synthetic oligonucleotide
  Sense strand starting at position 1659 of SEQ ID NO: 425
ccgucuuucccuuaccuga

SEQ ID NO: 36099 - RNA, 19 nt, Artificial Sequence
  Description of Artificial Sequence: Synthetic oligonucleotide
  Antisense strand to SEQ ID NO: 36098
ucagguaagggaaagacgg

SEQ ID NO: 36100 - RNA, 19 nt, Artificial Sequence
  Description of Artificial Sequence: Synthetic oligonucleotide
  Sense strand starting at position 1472 of SEQ ID NO: 425
cgaguaugucucguuccca

SEQ ID NO: 36101 - RNA, 19 nt, Artificial Sequence
  Description of Artificial Sequence: Synthetic oligonucleotide
  Antisense strand to SEQ ID NO: 36100
ugggaacgagacauacucg

SEQ ID NO: 36102 - RNA, 19 nt, Artificial Sequence
  Description of Artificial Sequence: Synthetic oligonucleotide
  Sense strand starting at position 1289 of SEQ ID NO: 425
ccagguaccuuucuugaga

SEQ ID NO: 36103 - RNA, 19 nt, Artificial Sequence
  Description of Artificial Sequence: Synthetic oligonucleotide
  Antisense strand to SEQ ID NO: 36102
ucucaagaaagguaccugg

SEQ ID NO: 36104 - RNA, 19 nt, Artificial Sequence
  Description of Artificial Sequence: Synthetic oligonucleotide
  Sense strand starting at position 1100 of SEQ ID NO: 425
cucagagaguuccuuccua

SEQ ID NO: 36105 - RNA, 19 nt, Artificial Sequence
  Description of Artificial Sequence: Synthetic oligonucleotide
  Antisense strand to SEQ ID NO: 36104
uaggaaggaacucucugag

SEQ ID NO: 36106 - RNA, 19 nt, Artificial Sequence
  Description of Artificial Sequence: Synthetic oligonucleotide
  Sense strand starting at position 928 of SEQ ID NO: 425
gugggucaggcauauaugu

SEQ ID NO: 36107 - RNA, 19 nt, Artificial Sequence
  Description of Artificial Sequence: Synthetic oligonucleotide
  Antisense strand to SEQ ID NO: 36106
acauauaugccugacccac

SEQ ID NO: 36108 - RNA, 19 nt, Artificial Sequence
  Description of Artificial Sequence: Synthetic oligonucleotide
  Sense strand starting at position 848 of SEQ ID NO: 425
augugacuguggucacgau

SEQ ID NO: 36109 - RNA, 19 nt, Artificial Sequence
  Description of Artificial Sequence: Synthetic oligonucleotide
  Antisense strand to SEQ ID NO: 36108
aucgugaccacagucacau

SEQ ID NO: 36110 - RNA, 19 nt, Artificial Sequence
  Description of Artificial Sequence: Synthetic oligonucleotide
  Sense strand starting at position 839 of SEQ ID NO: 425
cguaaugacaugugacugu

SEQ ID NO: 36111 - RNA, 19 nt, Artificial Sequence
  Description of Artificial Sequence: Synthetic oligonucleotide
  Antisense strand to SEQ ID NO: 36110
acagucacaugucauuacg

SEQ ID NO: 36112 - RNA, 19 nt, Artificial Sequence
  Description of Artificial Sequence: Synthetic oligonucleotide
  Sense strand starting at position 825 of SEQ ID NO: 425
cauuaugugccucacguaa

SEQ ID NO: 36113 - RNA, 19 nt, Artificial Sequence
  Description of Artificial Sequence: Synthetic oligonucleotide
  Antisense strand to SEQ ID NO: 36112
uuacgugaggcacauaaug

SEQ ID NO: 36114 - RNA, 19 nt, Artificial Sequence
  Description of Artificial Sequence: Synthetic oligonucleotide
  Sense strand starting at position 768 of SEQ ID NO: 425
guauguguggugggacaca

SEQ ID NO: 36115 - RNA, 19 nt, Artificial Sequence
  Description of Artificial Sequence: Synthetic oligonucleotide
  Antisense strand to SEQ ID NO: 36114
ugugucccaccacacauac

SEQ ID NO: 36116 - RNA, 19 nt, Artificial Sequence
  Description of Artificial Sequence: Synthetic oligonucleotide
  Sense strand starting at position 714 of SEQ ID NO: 425
aguuauuugugucccacca

SEQ ID NO: 36117 - RNA, 19 nt, Artificial Sequence
  Description of Artificial Sequence: Synthetic oligonucleotide
  Antisense strand to SEQ ID NO: 36116
uggugggacacaaauaacu

SEQ ID NO: 36118 - RNA, 19 nt, Artificial Sequence
  Description of Artificial Sequence: Synthetic oligonucleotide
  Sense strand starting at position 660 of SEQ ID NO: 425
cuaugacucaagggagguu

SEQ ID NO: 36119 - RNA, 19 nt, Artificial Sequence
  Description of Artificial Sequence: Synthetic oligonucleotide
  Antisense strand to SEQ ID NO: 36118
aaccucccuugagucauag

SEQ ID NO: 36120 - RNA, 19 nt, Artificial Sequence
  Description of Artificial Sequence: Synthetic oligonucleotide
  Sense strand starting at position 3802 of SEQ ID NO: 426
ccuugagcauuccucaagu

SEQ ID NO: 36121 - RNA, 19 nt, Artificial Sequence
  Description of Artificial Sequence: Synthetic oligonucleotide
  Antisense strand to SEQ ID NO: 36120
acuugaggaaugcucaagg

SEQ ID NO: 36122 - RNA, 19 nt, Artificial Sequence
  Description of Artificial Sequence: Synthetic oligonucleotide
  Sense strand starting at position 3750 of SEQ ID NO: 426
gcugaugucuccucgacuu

SEQ ID NO: 36123 - RNA, 19 nt, Artificial Sequence
  Description of Artificial Sequence: Synthetic oligonucleotide
  Antisense strand to SEQ ID NO: 36122
aagucgaggagacaucagc

SEQ ID NO: 36124 - RNA, 19 nt, Artificial Sequence
  Description of Artificial Sequence: Synthetic oligonucleotide
  Sense strand starting at position 3384 of SEQ ID NO: 426
auguucguugauugaaaga

SEQ ID NO: 36125 - RNA, 19 nt, Artificial Sequence
  Description of Artificial Sequence: Synthetic oligonucleotide
  Antisense strand to SEQ ID NO: 36124
ucuuucaaucaacgaacau

SEQ ID NO: 36126 - RNA, 19 nt, Artificial Sequence
  Description of Artificial Sequence: Synthetic oligonucleotide
  Sense strand starting at position 3383 of SEQ ID NO: 426
aauguucguugauugaaag

SEQ ID NO: 36127 - RNA, 19 nt, Artificial Sequence
  Description of Artificial Sequence: Synthetic oligonucleotide
  Antisense strand to SEQ ID NO: 36126
cuuucaaucaacgaacauu

SEQ ID NO: 36128 - RNA, 19 nt, Artificial Sequence
  Description of Artificial Sequence: Synthetic oligonucleotide
  Sense strand starting at position 3380 of SEQ ID NO: 426
guaaauguucguugauuga

SEQ ID NO: 36129 - RNA, 19 nt, Artificial Sequence
  Description of Artificial Sequence: Synthetic oligonucleotide
  Antisense strand to SEQ ID NO: 36128
ucaaucaacgaacauuuac

SEQ ID NO: 36130 - RNA, 19 nt, Artificial Sequence
  Description of Artificial Sequence: Synthetic oligonucleotide
  Sense strand starting at position 3379 of SEQ ID NO: 426
aguaaauguucguugauug

SEQ ID NO: 36131 - RNA, 19 nt, Artificial Sequence
  Description of Artificial Sequence: Synthetic oligonucleotide
  Antisense strand to SEQ ID NO: 36130
caaucaacgaacauuuacu

SEQ ID NO: 36132 - RNA, 19 nt, Artificial Sequence
  Description of Artificial Sequence: Synthetic oligonucleotide
  Sense strand starting at position 3378 of SEQ ID NO: 426
aaguaaauguucguugauu

SEQ ID NO: 36133 - RNA, 19 nt, Artificial Sequence
  Description of Artificial Sequence: Synthetic oligonucleotide
  Antisense strand to SEQ ID NO: 36132
aaucaacgaacauuuacuu

SEQ ID NO: 36134 - RNA, 19 nt, Artificial Sequence
  Description of Artificial Sequence: Synthetic oligonucleotide
  Sense strand starting at position 3377 of SEQ ID NO: 426
uaaguaaauguucguugau

SEQ ID NO: 36135 - RNA, 19 nt, Artificial Sequence
  Description of Artificial Sequence: Synthetic oligonucleotide
  Antisense strand to SEQ ID NO: 36134
aucaacgaacauuuacuua

SEQ ID NO: 36136 - RNA, 19 nt, Artificial Sequence
  Description of Artificial Sequence: Synthetic oligonucleotide
  Sense strand starting at position 3376 of SEQ ID NO: 426
uuaaguaaauguucguuga

SEQ ID NO: 36137 - RNA, 19 nt, Artificial Sequence
  Description of Artificial Sequence: Synthetic oligonucleotide
  Antisense strand to SEQ ID NO: 36136
ucaacgaacauuuacuuaa

SEQ ID NO: 36138 - RNA, 19 nt, Artificial Sequence
  Description of Artificial Sequence: Synthetic oligonucleotide
  Sense strand starting at position 3348 of SEQ ID NO: 426
uuccuacaguguuuacaca

SEQ ID NO: 36139 - RNA, 19 nt, Artificial Sequence
  Description of Artificial Sequence: Synthetic oligonucleotide
  Antisense strand to SEQ ID NO: 36138
uguguaaacacuguaggaa

SEQ ID NO: 36140 - RNA, 19 nt, Artificial Sequence
  Description of Artificial Sequence: Synthetic oligonucleotide
  Sense strand starting at position 3304 of SEQ ID NO: 426
gaggguaaggaucgugguu

SEQ ID NO: 36141 - RNA, 19 nt, Artificial Sequence
  Description of Artificial Sequence: Synthetic oligonucleotide
  Antisense strand to SEQ ID NO: 36140
aaccacgauccuuacccuc

SEQ ID NO: 36142 - RNA, 19 nt, Artificial Sequence
  Description of Artificial Sequence: Synthetic oligonucleotide
  Sense strand starting at position 3116 of SEQ ID NO: 426
ugacuaugugcacaauaca

SEQ ID NO: 36143 - RNA, 19 nt, Artificial Sequence
  Description of Artificial Sequence: Synthetic oligonucleotide
  Antisense strand to SEQ ID NO: 36142
uguauugugcacauaguca

SEQ ID NO: 36144 - RNA, 19 nt, Artificial Sequence
  Description of Artificial Sequence: Synthetic oligonucleotide
  Sense strand starting at position 2773 of SEQ ID NO: 426
uuuccugcucaauaaggga

SEQ ID NO: 36145 - RNA, 19 nt, Artificial Sequence
  Description of Artificial Sequence: Synthetic oligonucleotide
  Antisense strand to SEQ ID NO: 36144
ucccuuauugagcaggaaa

SEQ ID NO: 36146 - RNA, 19 nt, Artificial Sequence
  Description of Artificial Sequence: Synthetic oligonucleotide
  Sense strand starting at position 2770 of SEQ ID NO: 426
auguuuccugcucaauaag

SEQ ID NO: 36147 - RNA, 19 nt, Artificial Sequence
  Description of Artificial Sequence: Synthetic oligonucleotide
  Antisense strand to SEQ ID NO: 36146
cuuauugagcaggaaacau

SEQ ID NO: 36148 - RNA, 19 nt, Artificial Sequence
  Description of Artificial Sequence: Synthetic oligonucleotide
  Sense strand starting at position 2760 of SEQ ID NO: 426
ggcauaagcuauguuuccu

SEQ ID NO: 36149 - RNA, 19 nt, Artificial Sequence
  Description of Artificial Sequence: Synthetic oligonucleotide
  Antisense strand to SEQ ID NO: 36148
aggaaacauagcuuaugcc

SEQ ID NO: 36150 - RNA, 19 nt, Artificial Sequence
  Description of Artificial Sequence: Synthetic oligonucleotide
  Sense strand starting at position 2740 of SEQ ID NO: 426
ucccgacuccuaggauuau

SEQ ID NO: 36151 - RNA, 19 nt, Artificial Sequence
  Description of Artificial Sequence: Synthetic oligonucleotide
  Antisense strand to SEQ ID NO: 36150
auaauccuaggagucggga

SEQ ID NO: 36152 - RNA, 19 nt, Artificial Sequence
  Description of Artificial Sequence: Synthetic oligonucleotide
  Sense strand starting at position 2673 of SEQ ID NO: 426
ggcgcaaugaaucacggau

SEQ ID NO: 36153 - RNA, 19 nt, Artificial Sequence
  Description of Artificial Sequence: Synthetic oligonucleotide
  Antisense strand to SEQ ID NO: 36152
auccgugauucauugcgcc

SEQ ID NO: 36154 - RNA, 19 nt, Artificial Sequence
  Description of Artificial Sequence: Synthetic oligonucleotide
  Sense strand starting at position 2665 of SEQ ID NO: 426
gagucaguggcgcaaugaa

SEQ ID NO: 36155 - RNA, 19 nt, Artificial Sequence
  Description of Artificial Sequence: Synthetic oligonucleotide
  Antisense strand to SEQ ID NO: 36154
uucauugcgccacugacuc

SEQ ID NO: 36156 - RNA, 19 nt, Artificial Sequence
  Description of Artificial Sequence: Synthetic oligonucleotide
  Sense strand starting at position 2612 of SEQ ID NO: 426
ucugauuuguuguuguuau

SEQ ID NO: 36157 - RNA, 19 nt, Artificial Sequence
  Description of Artificial Sequence: Synthetic oligonucleotide
  Antisense strand to SEQ ID NO: 36156
auaacaacaacaaaucaga

SEQ ID NO: 36158 - RNA, 19 nt, Artificial Sequence
  Description of Artificial Sequence: Synthetic oligonucleotide
  Sense strand starting at position 2556 of SEQ ID NO: 426
ccugccauccguguuuauu

SEQ ID NO: 36159 - RNA, 19 nt, Artificial Sequence
  Description of Artificial Sequence: Synthetic oligonucleotide
  Antisense strand to SEQ ID NO: 36158
aauaaacacggauggcagg

SEQ ID NO: 36160 - RNA, 19 nt, Artificial Sequence
  Description of Artificial Sequence: Synthetic oligonucleotide
  Sense strand starting at position 2524 of SEQ ID NO: 426
ccucgauugcguuuccaug

SEQ ID NO: 36161 - RNA, 19 nt, Artificial Sequence
  Description of Artificial Sequence: Synthetic oligonucleotide
  Antisense strand to SEQ ID NO: 36160
cauggaaacgcaaucgagg

SEQ ID NO: 36162 - RNA, 19 nt, Artificial Sequence
  Description of Artificial Sequence: Synthetic oligonucleotide
  Sense strand starting at position 2513 of SEQ ID NO: 426
caccuuugcguccucgauu

SEQ ID NO: 36163 - RNA, 19 nt, Artificial Sequence
  Description of Artificial Sequence: Synthetic oligonucleotide
  Antisense strand to SEQ ID NO: 36162
aaucgaggacgcaaaggug

SEQ ID NO: 36164 - RNA, 19 nt, Artificial Sequence
  Description of Artificial Sequence: Synthetic oligonucleotide
  Sense strand starting at position 2512 of SEQ ID NO: 426
gcaccuuugcguccucgau

SEQ ID NO: 36165 - RNA, 19 nt, Artificial Sequence
  Description of Artificial Sequence: Synthetic oligonucleotide
  Antisense strand to SEQ ID NO: 36164
aucgaggacgcaaaggugc

SEQ ID NO: 36166 - RNA, 19 nt, Artificial Sequence
  Description of Artificial Sequence: Synthetic oligonucleotide
  Sense strand starting at position 2394 of SEQ ID NO: 426
ggagcaaauuccucuccca

SEQ ID NO: 36167 - RNA, 19 nt, Artificial Sequence
  Description of Artificial Sequence: Synthetic oligonucleotide
  Antisense strand to SEQ ID NO: 36166
ugggagaggaauuugcucc

SEQ ID NO: 36168 - RNA, 19 nt, Artificial Sequence
  Description of Artificial Sequence: Synthetic oligonucleotide
  Sense strand starting at position 2355 of SEQ ID NO: 426
ccguaaaugcuccagccaa

SEQ ID NO: 36169 - RNA, 19 nt, Artificial Sequence
  Description of Artificial Sequence: Synthetic oligonucleotide
  Antisense strand to SEQ ID NO: 36168
uuggcuggagcauuuacgg

SEQ ID NO: 36170 - RNA, 19 nt, Artificial Sequence
  Description of Artificial Sequence: Synthetic oligonucleotide
  Sense strand starting at position 2341 of SEQ ID NO: 426
agaguugugaagugccgua

SEQ ID NO: 36171 - RNA, 19 nt, Artificial Sequence
  Description of Artificial Sequence: Synthetic oligonucleotide
  Antisense strand to SEQ ID NO: 36170
uacggcacuucacaacucu

SEQ ID NO: 36172 - RNA, 19 nt, Artificial Sequence
  Description of Artificial Sequence: Synthetic oligonucleotide
  Sense strand starting at position 2334 of SEQ ID NO: 426
cagucugagaguugugaag

SEQ ID NO: 36173 - RNA, 19 nt, Artificial Sequence
  Description of Artificial Sequence: Synthetic oligonucleotide
  Antisense strand to SEQ ID NO: 36172
cuucacaacucucagacug

SEQ ID NO: 36174 - RNA, 19 nt, Artificial Sequence
  Description of Artificial Sequence: Synthetic oligonucleotide
  Sense strand starting at position 2270 of SEQ ID NO: 426
cgucuucuuccggacaauu

SEQ ID NO: 36175 - RNA, 19 nt, Artificial Sequence
  Description of Artificial Sequence: Synthetic oligonucleotide
  Antisense strand to SEQ ID NO: 36174
aauuguccggaagaagacg

SEQ ID NO: 36176 - RNA, 19 nt, Artificial Sequence
  Description of Artificial Sequence: Synthetic oligonucleotide
  Sense strand starting at position 2260 of SEQ ID NO: 426
ggacuugccucgucuucuu

SEQ ID NO: 36177 - RNA, 19 nt, Artificial Sequence
  Description of Artificial Sequence: Synthetic oligonucleotide
  Antisense strand to SEQ ID NO: 36176
aagaagacgaggcaagucc

SEQ ID NO: 36178 - RNA, 19 nt, Artificial Sequence
  Description of Artificial Sequence: Synthetic oligonucleotide
  Sense strand starting at position 2190 of SEQ ID NO: 426
ggauuugggucccgaauuc

SEQ ID NO: 36179 - RNA, 19 nt, Artificial Sequence
  Description of Artificial Sequence: Synthetic oligonucleotide
  Antisense strand to SEQ ID NO: 36178
gaauucgggacccaaaucc

SEQ ID NO: 36180 - RNA, 19 nt, Artificial Sequence
  Description of Artificial Sequence: Synthetic oligonucleotide
  Sense strand starting at position 2167 of SEQ ID NO: 426
guuauuaaugugggccuua

SEQ ID NO: 36181 - RNA, 19 nt, Artificial Sequence
  Description of Artificial Sequence: Synthetic oligonucleotide
  Antisense strand to SEQ ID NO: 36180
uaaggcccacauuaauaac

SEQ ID NO: 36182 - RNA, 19 nt, Artificial Sequence
  Description of Artificial Sequence: Synthetic oligonucleotide
  Sense strand starting at position 1306 of SEQ ID NO: 426
cccuaaagccgccauuaau

SEQ ID NO: 36183 - RNA, 19 nt, Artificial Sequence
  Description of Artificial Sequence: Synthetic oligonucleotide
  Antisense strand to SEQ ID NO: 36182
auuaauggcggcuuuaggg

SEQ ID NO: 36184 - RNA, 19 nt, Artificial Sequence
  Description of Artificial Sequence: Synthetic oligonucleotide
  Sense strand starting at position 1268 of SEQ ID NO: 426
ugggaauuagcucgcaaag

SEQ ID NO: 36185 - RNA, 19 nt, Artificial Sequence
  Description of Artificial Sequence: Synthetic oligonucleotide
  Antisense strand to SEQ ID NO: 36184
cuuugcgagcuaauuccca

SEQ ID NO: 36186 - RNA, 19 nt, Artificial Sequence
  Description of Artificial Sequence: Synthetic oligonucleotide
  Sense strand starting at position 934 of SEQ ID NO: 426
ggagaaaugucucuacuaa

SEQ ID NO: 36187 - RNA, 19 nt, Artificial Sequence
  Description of Artificial Sequence: Synthetic oligonucleotide
  Antisense strand to SEQ ID NO: 36186
uuaguagagacauuucucc

SEQ ID NO: 36188 - RNA, 19 nt, Artificial Sequence
  Description of Artificial Sequence: Synthetic oligonucleotide
  Sense strand starting at position 777 of SEQ ID NO: 426
gcuucuaaugugcagcuaa

SEQ ID NO: 36189 - RNA, 19 nt, Artificial Sequence
  Description of Artificial Sequence: Synthetic oligonucleotide
  Antisense strand to SEQ ID NO: 36188
uuagcugcacauuagaagc

SEQ ID NO: 36190 - RNA, 19 nt, Artificial Sequence
  Description of Artificial Sequence: Synthetic oligonucleotide
  Sense strand starting at position 767 of SEQ ID NO: 426
cuaccuaggugcuucuaau

SEQ ID NO: 36191 - RNA, 19 nt, Artificial Sequence
  Description of Artificial Sequence: Synthetic oligonucleotide
  Antisense strand to SEQ ID NO: 36190
auuagaagcaccuagguag

SEQ ID NO: 36192 - RNA, 19 nt, Artificial Sequence
  Description of Artificial Sequence: Synthetic oligonucleotide
  Sense strand starting at position 724 of SEQ ID NO: 426
uaaugagguuuggaaauga

SEQ ID NO: 36193 - RNA, 19 nt, Artificial Sequence
  Description of Artificial Sequence: Synthetic oligonucleotide
  Antisense strand to SEQ ID NO: 36192
ucauuuccaaaccucauua

SEQ ID NO: 36194 - RNA, 19 nt, Artificial Sequence
  Description of Artificial Sequence: Synthetic oligonucleotide
  Sense strand starting at position 722 of SEQ ID NO: 426
gguaaugagguuuggaaau

SEQ ID NO: 36195 - RNA, 19 nt, Artificial Sequence
  Description of Artificial Sequence: Synthetic oligonucleotide
  Antisense strand to SEQ ID NO: 36194
auuuccaaaccucauuacc

SEQ ID NO: 36196 - RNA, 19 nt, Artificial Sequence
  Description of Artificial Sequence: Synthetic oligonucleotide
  Sense strand starting at position 712 of SEQ ID NO: 426
cacaaucucugguaaugag

SEQ ID NO: 36197 - RNA, 19 nt, Artificial Sequence
  Description of Artificial Sequence: Synthetic oligonucleotide
  Antisense strand to SEQ ID NO: 36196
cucauuaccagagauugug

SEQ ID NO: 36198 - RNA, 19 nt, Artificial Sequence
  Description of Artificial Sequence: Synthetic oligonucleotide
  Sense strand starting at position 493 of SEQ ID NO: 426
ugacuuauccaaggagcuu

SEQ ID NO: 36199 - RNA, 19 nt, Artificial Sequence
  Description of Artificial Sequence: Synthetic oligonucleotide
  Antisense strand to SEQ ID NO: 36198
aagcuccuuggauaaguca

SEQ ID NO: 36200 - RNA, 19 nt, Artificial Sequence
  Description of Artificial Sequence: Synthetic oligonucleotide
  Sense strand starting at position 3882 of SEQ ID NO: 427
cucuaugaucaaugguuau

SEQ ID NO: 36201 - RNA, 19 nt, Artificial Sequence
  Description of Artificial Sequence: Synthetic oligonucleotide
  Antisense strand to SEQ ID NO: 36200
auaaccauugaucauagag

SEQ ID NO: 36202 - RNA, 19 nt, Artificial Sequence
  Description of Artificial Sequence: Synthetic oligonucleotide
  Sense strand starting at position 3873 of SEQ ID NO: 427
gcugaaucucucuaugauc

SEQ ID NO: 36203 - RNA, 19 nt, Artificial Sequence
  Description of Artificial Sequence: Synthetic oligonucleotide
  Antisense strand to SEQ ID NO: 36202
gaucauagagagauucagc

SEQ ID NO: 36204 - RNA, 19 nt, Artificial Sequence
  Description of Artificial Sequence: Synthetic oligonucleotide
  Sense strand starting at position 3872 of SEQ ID NO: 427
ugcugaaucucucuaugau

SEQ ID NO: 36205 - RNA, 19 nt, Artificial Sequence
  Description of Artificial Sequence: Synthetic oligonucleotide
  Antisense strand to SEQ ID NO: 36204
aucauagagagauucagca

SEQ ID NO: 36206 - RNA, 19 nt, Artificial Sequence
  Description of Artificial Sequence: Synthetic oligonucleotide
  Sense strand starting at position 3813 of SEQ ID NO: 427
gugauagcuccugggaaag

SEQ ID NO: 36207 - RNA, 19 nt, Artificial Sequence
  Description of Artificial Sequence: Synthetic oligonucleotide
  Antisense strand to SEQ ID NO: 36206
cuuucccaggagcuaucac

SEQ ID NO: 36208 - RNA, 19 nt, Artificial Sequence
  Description of Artificial Sequence: Synthetic oligonucleotide
  Sense strand starting at position 3801 of SEQ ID NO: 427
ugggauugcucugugauag

SEQ ID NO: 36209 - RNA, 19 nt, Artificial Sequence
  Description of Artificial Sequence: Synthetic oligonucleotide
  Antisense strand to SEQ ID NO: 36208
cuaucacagagcaauccca

SEQ ID NO: 36210 - RNA, 19 nt, Artificial Sequence
  Description of Artificial Sequence: Synthetic oligonucleotide
  Sense strand starting at position 3800 of SEQ ID NO: 427
cugggauugcucugugaua

SEQ ID NO: 36211 - RNA, 19 nt, Artificial Sequence
  Description of Artificial Sequence: Synthetic oligonucleotide
  Antisense strand to SEQ ID NO: 36210
uaucacagagcaaucccag

SEQ ID NO: 36212 - RNA, 19 nt, Artificial Sequence
  Description of Artificial Sequence: Synthetic oligonucleotide
  Sense strand starting at position 3787 of SEQ ID NO: 427
cagauauucugagcuggga

SEQ ID NO: 36213 - RNA, 19 nt, Artificial Sequence
  Description of Artificial Sequence: Synthetic oligonucleotide
  Antisense strand to SEQ ID NO: 36212
ucccagcucagaauaucug

SEQ ID NO: 36214 - RNA, 19 nt, Artificial Sequence
  Description of Artificial Sequence: Synthetic oligonucleotide
  Sense strand starting at position 3601 of SEQ ID NO: 427
aguagaugguaaccagauu

SEQ ID NO: 36215 - RNA, 19 nt, Artificial Sequence
  Description of Artificial Sequence: Synthetic oligonucleotide
  Antisense strand to SEQ ID NO: 36214
aaucugguuaccaucuacu

SEQ ID NO: 36216 - RNA, 19 nt, Artificial Sequence
  Description of Artificial Sequence: Synthetic oligonucleotide
  Sense strand starting at position 3537 of SEQ ID NO: 427
acgcuugcugccucuaaau

SEQ ID NO: 36217 - RNA, 19 nt, Artificial Sequence
  Description of Artificial Sequence: Synthetic oligonucleotide
  Antisense strand to SEQ ID NO: 36216
auuuagaggcagcaagcgu

SEQ ID NO: 36218 - RNA, 19 nt, Artificial Sequence
  Description of Artificial Sequence: Synthetic oligonucleotide
  Sense strand starting at position 3412 of SEQ ID NO: 427
accaauauggacugugaau

SEQ ID NO: 36219 - RNA, 19 nt, Artificial Sequence
  Description of Artificial Sequence: Synthetic oligonucleotide
  Antisense strand to SEQ ID NO: 36218
auucacaguccauauuggu

SEQ ID NO: 36220 - RNA, 19 nt, Artificial Sequence
  Description of Artificial Sequence: Synthetic oligonucleotide
  Sense strand starting at position 3262 of SEQ ID NO: 427
agucuauucuaaguaguuu

SEQ ID NO: 36221 - RNA, 19 nt, Artificial Sequence
  Description of Artificial Sequence: Synthetic oligonucleotide
  Antisense strand to SEQ ID NO: 36220
aaacuacuuagaauagacu

SEQ ID NO: 36222 - RNA, 19 nt, Artificial Sequence
  Description of Artificial Sequence: Synthetic oligonucleotide
  Sense strand starting at position 3239 of SEQ ID NO: 427
gguggguaggugugaauau

SEQ ID NO: 36223 - RNA, 19 nt, Artificial Sequence
  Description of Artificial Sequence: Synthetic oligonucleotide
  Antisense strand to SEQ ID NO: 36222
auauucacaccuacccacc

SEQ ID NO: 36224 - RNA, 19 nt, Artificial Sequence
  Description of Artificial Sequence: Synthetic oligonucleotide
  Sense strand starting at position 3123 of SEQ ID NO: 427
gcccaauucuaauuagggu

SEQ ID NO: 36225 - RNA, 19 nt, Artificial Sequence
  Description of Artificial Sequence: Synthetic oligonucleotide
  Antisense strand to SEQ ID NO: 36224
acccuaauuagaauugggc

SEQ ID NO: 36226 - RNA, 19 nt, Artificial Sequence
  Description of Artificial Sequence: Synthetic oligonucleotide
  Sense strand starting at position 3076 of SEQ ID NO: 427
cugugagcugguugaagau

SEQ ID NO: 36227 - RNA, 19 nt, Artificial Sequence
  Description of Artificial Sequence: Synthetic oligonucleotide
  Antisense strand to SEQ ID NO: 36226
aucuucaaccagcucacag

SEQ ID NO: 36228 - RNA, 19 nt, Artificial Sequence
  Description of Artificial Sequence: Synthetic oligonucleotide
  Sense strand starting at position 2969 of SEQ ID NO: 427
gaggcaaguccagaguuua

SEQ ID NO: 36229 - RNA, 19 nt, Artificial Sequence
  Description of Artificial Sequence: Synthetic oligonucleotide
  Antisense strand to SEQ ID NO: 36228
uaaacucuggacuugccuc

SEQ ID NO: 36230 - RNA, 19 nt, Artificial Sequence
  Description of Artificial Sequence: Synthetic oligonucleotide
  Sense strand starting at position 2922 of SEQ ID NO: 427
ucauuuguccgcuggagaa

SEQ ID NO: 36231 - RNA, 19 nt, Artificial Sequence
  Description of Artificial Sequence: Synthetic oligonucleotide
  Antisense strand to SEQ ID NO: 36230
uucuccagcggacaaauga

SEQ ID NO: 36232 - RNA, 19 nt, Artificial Sequence
  Description of Artificial Sequence: Synthetic oligonucleotide
  Sense strand starting at position 2881 of SEQ ID NO: 427
ccugaucuccuagguuaug

SEQ ID NO: 36233 - RNA, 19 nt, Artificial Sequence
  Description of Artificial Sequence: Synthetic oligonucleotide
  Antisense strand to SEQ ID NO: 36232
cauaaccuaggagaucagg

SEQ ID NO: 36234 - RNA, 19 nt, Artificial Sequence
  Description of Artificial Sequence: Synthetic oligonucleotide
  Sense strand starting at position 2874 of SEQ ID NO: 427
guaggucccugaucuccua

SEQ ID NO: 36235 - RNA, 19 nt, Artificial Sequence
  Description of Artificial Sequence: Synthetic oligonucleotide
  Antisense strand to SEQ ID NO: 36234
uaggagaucagggaccuac

SEQ ID NO: 36236 - RNA, 19 nt, Artificial Sequence
  Description of Artificial Sequence: Synthetic oligonucleotide
  Sense strand starting at position 2832 of SEQ ID NO: 427
cguccuaaauuaucugauu

SEQ ID NO: 36237 - RNA, 19 nt, Artificial Sequence
  Description of Artificial Sequence: Synthetic oligonucleotide
  Antisense strand to SEQ ID NO: 36236
aaucagauaauuuaggacg

SEQ ID NO: 36238 - RNA, 19 nt, Artificial Sequence
  Description of Artificial Sequence: Synthetic oligonucleotide
  Sense strand starting at position 2513 of SEQ ID NO: 427
agagaauggagguguguga

SEQ ID NO: 36239 - RNA, 19 nt, Artificial Sequence
  Description of Artificial Sequence: Synthetic oligonucleotide
  Antisense strand to SEQ ID NO: 36238
ucacacaccuccauucucu

SEQ ID NO: 36240 - RNA, 19 nt, Artificial Sequence
  Description of Artificial Sequence: Synthetic oligonucleotide
  Sense strand starting at position 2489 of SEQ ID NO: 427
ugauuugugucugcaacgu

SEQ ID NO: 36241 - RNA, 19 nt, Artificial Sequence
  Description of Artificial Sequence: Synthetic oligonucleotide
  Antisense strand to SEQ ID NO: 36240
acguugcagacacaaauca

SEQ ID NO: 36242 - RNA, 19 nt, Artificial Sequence
  Description of Artificial Sequence: Synthetic oligonucleotide
  Sense strand starting at position 2488 of SEQ ID NO: 427
gugauuugugucugcaacg

SEQ ID NO: 36243 - RNA, 19 nt, Artificial Sequence
  Description of Artificial Sequence: Synthetic oligonucleotide
  Antisense strand to SEQ ID NO: 36242
cguugcagacacaaaucac

SEQ ID NO: 36244 - RNA, 19 nt, Artificial Sequence
  Description of Artificial Sequence: Synthetic oligonucleotide
  Sense strand starting at position 2487 of SEQ ID NO: 427
agugauuugugucugcaac

SEQ ID NO: 36245 - RNA, 19 nt, Artificial Sequence
  Description of Artificial Sequence: Synthetic oligonucleotide
  Antisense strand to SEQ ID NO: 36244
guugcagacacaaaucacu

SEQ ID NO: 36246 - RNA, 19 nt, Artificial Sequence
  Description of Artificial Sequence: Synthetic oligonucleotide
  Sense strand starting at position 2482 of SEQ ID NO: 427
ccgucagugauuugugucu

SEQ ID NO: 36247 - RNA, 19 nt, Artificial Sequence
  Description of Artificial Sequence: Synthetic oligonucleotide
  Antisense strand to SEQ ID NO: 36246
agacacaaaucacugacgg

SEQ ID NO: 36248 - RNA, 19 nt, Artificial Sequence
  Description of Artificial Sequence: Synthetic oligonucleotide
  Sense strand starting at position 2474 of SEQ ID NO: 427
cguggaaaccgucagugau

SEQ ID NO: 36249 - RNA, 19 nt, Artificial Sequence
  Description of Artificial Sequence: Synthetic oligonucleotide
  Antisense strand to SEQ ID NO: 36248
aucacugacgguuuccacg

SEQ ID NO: 36250 - RNA, 19 nt, Artificial Sequence
  Description of Artificial Sequence: Synthetic oligonucleotide
  Sense strand starting at position 2353 of SEQ ID NO: 427
cgguuugaguguucagaga

SEQ ID NO: 36251 - RNA, 19 nt, Artificial Sequence
  Description of Artificial Sequence: Synthetic oligonucleotide
  Antisense strand to SEQ ID NO: 36250
ucucugaacacucaaaccg

SEQ ID NO: 36252 - RNA, 19 nt, Artificial Sequence
  Description of Artificial Sequence: Synthetic oligonucleotide
  Sense strand starting at position 2351 of SEQ ID NO: 427
cgcgguuugaguguucaga

SEQ ID NO: 36253 - RNA, 19 nt, Artificial Sequence
  Description of Artificial Sequence: Synthetic oligonucleotide
  Antisense strand to SEQ ID NO: 36252
ucugaacacucaaaccgcg

SEQ ID NO: 36254 - RNA, 19 nt, Artificial Sequence
  Description of Artificial Sequence: Synthetic oligonucleotide
  Sense strand starting at position 2344 of SEQ ID NO: 427
agagaugcgcgguuugagu

SEQ ID NO: 36255 - RNA, 19 nt, Artificial Sequence
  Description of Artificial Sequence: Synthetic oligonucleotide
  Antisense strand to SEQ ID NO: 36254
acucaaaccgcgcaucucu

SEQ ID NO: 36256 - RNA, 19 nt, Artificial Sequence
  Description of Artificial Sequence: Synthetic oligonucleotide
  Sense strand starting at position 2332 of SEQ ID NO: 427
uggugaugcgccagagaug

SEQ ID NO: 36257 - RNA, 19 nt, Artificial Sequence
  Description of Artificial Sequence: Synthetic oligonucleotide
  Antisense strand to SEQ ID NO: 36256
caucucuggcgcaucacca

SEQ ID NO: 36258 - RNA, 19 nt, Artificial Sequence
  Description of Artificial Sequence: Synthetic oligonucleotide
  Sense strand starting at position 2320 of SEQ ID NO: 427
ccuuaaauaggauggugau

SEQ ID NO: 36259 - RNA, 19 nt, Artificial Sequence
  Description of Artificial Sequence: Synthetic oligonucleotide
  Antisense strand to SEQ ID NO: 36258
aucaccauccuauuuaagg

SEQ ID NO: 36260 - RNA, 19 nt, Artificial Sequence
  Description of Artificial Sequence: Synthetic oligonucleotide
  Sense strand starting at position 2180 of SEQ ID NO: 427
ggugaugauuggcuguaag

SEQ ID NO: 36261 - RNA, 19 nt, Artificial Sequence
  Description of Artificial Sequence: Synthetic oligonucleotide
  Antisense strand to SEQ ID NO: 36260
cuuacagccaaucaucacc

SEQ ID NO: 36262 - RNA, 19 nt, Artificial Sequence
  Description of Artificial Sequence: Synthetic oligonucleotide
  Sense strand starting at position 2179 of SEQ ID NO: 427
aggugaugauuggcuguaa

SEQ ID NO: 36263 - RNA, 19 nt, Artificial Sequence
  Description of Artificial Sequence: Synthetic oligonucleotide
  Antisense strand to SEQ ID NO: 36262
uuacagccaaucaucaccu

SEQ ID NO: 36264 - RNA, 19 nt, Artificial Sequence
  Description of Artificial Sequence: Synthetic oligonucleotide
  Sense strand starting at position 2106 of SEQ ID NO: 427
cgugacucuaguuacugaa

SEQ ID NO: 36265 - RNA, 19 nt, Artificial Sequence
  Description of Artificial Sequence: Synthetic oligonucleotide
  Antisense strand to SEQ ID NO: 36264
uucaguaacuagagucacg

SEQ ID NO: 36266 - RNA, 19 nt, Artificial Sequence
  Description of Artificial Sequence: Synthetic oligonucleotide
  Sense strand starting at position 2105 of SEQ ID NO: 427
acgugacucuaguuacuga

SEQ ID NO: 36267 - RNA, 19 nt, Artificial Sequence
  Description of Artificial Sequence: Synthetic oligonucleotide
  Antisense strand to SEQ ID NO: 36266
ucaguaacuagagucacgu

SEQ ID NO: 36268 - RNA, 19 nt, Artificial Sequence
  Description of Artificial Sequence: Synthetic oligonucleotide
  Sense strand starting at position 858 of SEQ ID NO: 427
uaaggcacuccaggagaau

SEQ ID NO: 36269 - RNA, 19 nt, Artificial Sequence
  Description of Artificial Sequence: Synthetic oligonucleotide
  Antisense strand to SEQ ID NO: 36268
auucuccuggagugccuua

SEQ ID NO: 36270 - RNA, 19 nt, Artificial Sequence
  Description of Artificial Sequence: Synthetic oligonucleotide
  Sense strand starting at position 827 of SEQ ID NO: 427
cucacaggguccuuaucaa

SEQ ID NO: 36271 - RNA, 19 nt, Artificial Sequence
  Description of Artificial Sequence: Synthetic oligonucleotide
  Antisense strand to SEQ ID NO: 36270
uugauaaggacccugugag

SEQ ID NO: 36272 - RNA, 19 nt, Artificial Sequence
  Description of Artificial Sequence: Synthetic oligonucleotide
  Sense strand starting at position 814 of SEQ ID NO: 427
agucaauacuguccucaca

SEQ ID NO: 36273 - RNA, 19 nt, Artificial Sequence
  Description of Artificial Sequence: Synthetic oligonucleotide
  Antisense strand to SEQ ID NO: 36272
ugugaggacaguauugacu

SEQ ID NO: 36274 - RNA, 19 nt, Artificial Sequence
  Description of Artificial Sequence: Synthetic oligonucleotide
  Sense strand starting at position 800 of SEQ ID NO: 427
ccuccaaaucugggaguca

SEQ ID NO: 36275 - RNA, 19 nt, Artificial Sequence
  Description of Artificial Sequence: Synthetic oligonucleotide
  Antisense strand to SEQ ID NO: 36274
ugacucccagauuuggagg

SEQ ID NO: 36276 - RNA, 19 nt, Artificial Sequence
  Description of Artificial Sequence: Synthetic oligonucleotide
  Sense strand starting at position 719 of SEQ ID NO: 427
aguucuuuacacuguagga

SEQ ID NO: 36277 - RNA, 19 nt, Artificial Sequence
  Description of Artificial Sequence: Synthetic oligonucleotide
  Antisense strand to SEQ ID NO: 36276
uccuacaguguaaagaacu

SEQ ID NO: 36278 - RNA, 19 nt, Artificial Sequence
  Description of Artificial Sequence: Synthetic oligonucleotide
  Sense strand starting at position 146 of SEQ ID NO: 427
ucaagcauguagucaggua

SEQ ID NO: 36279 - RNA, 19 nt, Artificial Sequence
  Description of Artificial Sequence: Synthetic oligonucleotide
  Antisense strand to SEQ ID NO: 36278
uaccugacuacaugcuuga

SEQ ID NO: 36280 - RNA, 19 nt, Artificial Sequence
  Description of Artificial Sequence: Synthetic oligonucleotide
  Sense strand starting at position 3976 of SEQ ID NO: 428
cagauauucugagcuggga

SEQ ID NO: 36281 - RNA, 19 nt, Artificial Sequence
  Description of Artificial Sequence: Synthetic oligonucleotide
  Antisense strand to SEQ ID NO: 36280
ucccagcucagaauaucug

SEQ ID NO: 36282 - RNA, 19 nt, Artificial Sequence
  Description of Artificial Sequence: Synthetic oligonucleotide
  Sense strand starting at position 3790 of SEQ ID NO: 428
aguagaugguaaccagauu

SEQ ID NO: 36283 - RNA, 19 nt, Artificial Sequence
  Description of Artificial Sequence: Synthetic oligonucleotide
  Antisense strand to SEQ ID NO: 36282
aaucugguuaccaucuacu

SEQ ID NO: 36284 - RNA, 19 nt, Artificial Sequence
  Description of Artificial Sequence: Synthetic oligonucleotide
  Sense strand starting at position 3772 of SEQ ID NO: 428
agaacagacucaugaagga

SEQ ID NO: 36285 - RNA, 19 nt, Artificial Sequence
  Description of Artificial Sequence: Synthetic oligonucleotide
  Antisense strand to SEQ ID NO: 36284
uccuucaugagucuguucu

SEQ ID NO: 36286 - RNA, 19 nt, Artificial Sequence
  Description of Artificial Sequence: Synthetic oligonucleotide
  Sense strand starting at position 3726 of SEQ ID NO: 428
acgcuugcugccucuaaau

SEQ ID NO: 36287 - RNA, 19 nt, Artificial Sequence
  Description of Artificial Sequence: Synthetic oligonucleotide
  Antisense strand to SEQ ID NO: 36286
auuuagaggcagcaagcgu

SEQ ID NO: 36288 - RNA, 19 nt, Artificial Sequence
  Description of Artificial Sequence: Synthetic oligonucleotide
  Sense strand starting at position 3601 of SEQ ID NO: 428
accaauauggacugugaau

SEQ ID NO: 36289 - RNA, 19 nt, Artificial Sequence
  Description of Artificial Sequence: Synthetic oligonucleotide
  Antisense strand to SEQ ID NO: 36288
auucacaguccauauuggu

SEQ ID NO: 36290 - RNA, 19 nt, Artificial Sequence
  Description of Artificial Sequence: Synthetic oligonucleotide
  Sense strand starting at position 3451 of SEQ ID NO: 428
agucuauucuaaguaguuu

SEQ ID NO: 36291 - RNA, 19 nt, Artificial Sequence
  Description of Artificial Sequence: Synthetic oligonucleotide
  Antisense strand to SEQ ID NO: 36290
aaacuacuuagaauagacu

SEQ ID NO: 36292 - RNA, 19 nt, Artificial Sequence
  Description of Artificial Sequence: Synthetic oligonucleotide
  Sense strand starting at position 3428 of SEQ ID NO: 428
gguggguaggugugaauau

SEQ ID NO: 36293 - RNA, 19 nt, Artificial Sequence
  Description of Artificial Sequence: Synthetic oligonucleotide
  Antisense strand to SEQ ID NO: 36292
auauucacaccuacccacc

SEQ ID NO: 36294 - RNA, 19 nt, Artificial Sequence
  Description of Artificial Sequence: Synthetic oligonucleotide
  Sense strand starting at position 3312 of SEQ ID NO: 428
gcccaauucuaauuagggu

SEQ ID NO: 36295 - RNA, 19 nt, Artificial Sequence
  Description of Artificial Sequence: Synthetic oligonucleotide
  Antisense strand to SEQ ID NO: 36294
acccuaauuagaauugggc

SEQ ID NO: 36296 - RNA, 19 nt, Artificial Sequence
  Description of Artificial Sequence: Synthetic oligonucleotide
  Sense strand starting at position 3265 of SEQ ID NO: 428
cugugagcugguugaagau

SEQ ID NO: 36297 - RNA, 19 nt, Artificial Sequence
  Description of Artificial Sequence: Synthetic oligonucleotide
  Antisense strand to SEQ ID NO: 36296
aucuucaaccagcucacag

SEQ ID NO: 36298 - RNA, 19 nt, Artificial Sequence
  Description of Artificial Sequence: Synthetic oligonucleotide
  Sense strand starting at position 3158 of SEQ ID NO: 428
gaggcaaguccagaguuua

SEQ ID NO: 36299 - RNA, 19 nt, Artificial Sequence
  Description of Artificial Sequence: Synthetic oligonucleotide
  Antisense strand to SEQ ID NO: 36298
uaaacucuggacuugccuc

SEQ ID NO: 36300 - RNA, 19 nt, Artificial Sequence
  Description of Artificial Sequence: Synthetic oligonucleotide
  Sense strand starting at position 3111 of SEQ ID NO: 428
ucauuuguccgcuggagaa

SEQ ID NO: 36301 - RNA, 19 nt, Artificial Sequence
  Description of Artificial Sequence: Synthetic oligonucleotide
  Antisense strand to SEQ ID NO: 36300
uucuccagcggacaaauga

SEQ ID NO: 36302 - RNA, 19 nt, Artificial Sequence
  Description of Artificial Sequence: Synthetic oligonucleotide
  Sense strand starting at position 3070 of SEQ ID NO: 428
ccugaucuccuagguuaug

SEQ ID NO: 36303 - RNA, 19 nt, Artificial Sequence
  Description of Artificial Sequence: Synthetic oligonucleotide
  Antisense strand to SEQ ID NO: 36302
cauaaccuaggagaucagg

SEQ ID NO: 36304 - RNA, 19 nt, Artificial Sequence
  Description of Artificial Sequence: Synthetic oligonucleotide
  Sense strand starting at position 3063 of SEQ ID NO: 428
guaggucccugaucuccua

SEQ ID NO: 36305 - RNA, 19 nt, Artificial Sequence
  Description of Artificial Sequence: Synthetic oligonucleotide
  Antisense strand to SEQ ID NO: 36304
uaggagaucagggaccuac

SEQ ID NO: 36306 - RNA, 19 nt, Artificial Sequence
  Description of Artificial Sequence: Synthetic oligonucleotide
  Sense strand starting at position 3021 of SEQ ID NO: 428
cguccuaaauuaucugauu

SEQ ID NO: 36307 - RNA, 19 nt, Artificial Sequence
  Description of Artificial Sequence: Synthetic oligonucleotide
  Antisense strand to SEQ ID NO: 36306
aaucagauaauuuaggacg

SEQ ID NO: 36308 - RNA, 19 nt, Artificial Sequence
  Description of Artificial Sequence: Synthetic oligonucleotide
  Sense strand starting at position 2711 of SEQ ID NO: 428
aggugugugacacgguaua

SEQ ID NO: 36309 - RNA, 19 nt, Artificial Sequence
  Description of Artificial Sequence: Synthetic oligonucleotide
  Antisense strand to SEQ ID NO: 36308
uauaccgugucacacaccu

SEQ ID NO: 36310 - RNA, 19 nt, Artificial Sequence
  Description of Artificial Sequence: Synthetic oligonucleotide
  Sense strand starting at position 2702 of SEQ ID NO: 428
agagaauggagguguguga

SEQ ID NO: 36311 - RNA, 19 nt, Artificial Sequence
  Description of Artificial Sequence: Synthetic oligonucleotide
  Antisense strand to SEQ ID NO: 36310
ucacacaccuccauucucu

SEQ ID NO: 36312 - RNA, 19 nt, Artificial Sequence
  Description of Artificial Sequence: Synthetic oligonucleotide
  Sense strand starting at position 2678 of SEQ ID NO: 428
ugauuugugucugcaacgu

SEQ ID NO: 36313 - RNA, 19 nt, Artificial Sequence
  Description of Artificial Sequence: Synthetic oligonucleotide
  Antisense strand to SEQ ID NO: 36312
acguugcagacacaaauca

SEQ ID NO: 36314 - RNA, 19 nt, Artificial Sequence
  Description of Artificial Sequence: Synthetic oligonucleotide
  Sense strand starting at position 2677 of SEQ ID NO: 428
gugauuugugucugcaacg

SEQ ID NO: 36315 - RNA, 19 nt, Artificial Sequence
  Description of Artificial Sequence: Synthetic oligonucleotide
  Antisense strand to SEQ ID NO: 36314
cguugcagacacaaaucac

SEQ ID NO: 36316 - RNA, 19 nt, Artificial Sequence
  Description of Artificial Sequence: Synthetic oligonucleotide
  Sense strand starting at position 2676 of SEQ ID NO: 428
agugauuugugucugcaac

SEQ ID NO: 36317 - RNA, 19 nt, Artificial Sequence
  Description of Artificial Sequence: Synthetic oligonucleotide
  Antisense strand to SEQ ID NO: 36316
guugcagacacaaaucacu

SEQ ID NO: 36318 - RNA, 19 nt, Artificial Sequence
  Description of Artificial Sequence: Synthetic oligonucleotide
  Sense strand starting at position 2671 of SEQ ID NO: 428
ccgucagugauuugugucu

SEQ ID NO: 36319 - RNA, 19 nt, Artificial Sequence
  Description of Artificial Sequence: Synthetic oligonucleotide
  Antisense strand to SEQ ID NO: 36318
agacacaaaucacugacgg

SEQ ID NO: 36320 - RNA, 19 nt, Artificial Sequence
  Description of Artificial Sequence: Synthetic oligonucleotide
  Sense strand starting at position 2663 of SEQ ID NO: 428
cguggaaaccgucagugau

SEQ ID NO: 36321 - RNA, 19 nt, Artificial Sequence
  Description of Artificial Sequence: Synthetic oligonucleotide
  Antisense strand to SEQ ID NO: 36320
aucacugacgguuuccacg

SEQ ID NO: 36322 - RNA, 19 nt, Artificial Sequence
  Description of Artificial Sequence: Synthetic oligonucleotide
  Sense strand starting at position 2542 of SEQ ID NO: 428
cgguuugaguguucagaga

SEQ ID NO: 36323 - RNA, 19 nt, Artificial Sequence
  Description of Artificial Sequence: Synthetic oligonucleotide
  Antisense strand to SEQ ID NO: 36322
ucucugaacacucaaaccg

SEQ ID NO: 36324 - RNA, 19 nt, Artificial Sequence
  Description of Artificial Sequence: Synthetic oligonucleotide
  Sense strand starting at position 2540 of SEQ ID NO: 428
cgcgguuugaguguucaga

SEQ ID NO: 36325 - RNA, 19 nt, Artificial Sequence
  Description of Artificial Sequence: Synthetic oligonucleotide
  Antisense strand to SEQ ID NO: 36324
ucugaacacucaaaccgcg

SEQ ID NO: 36326 - RNA, 19 nt, Artificial Sequence
  Description of Artificial Sequence: Synthetic oligonucleotide
  Sense strand starting at position 2533 of SEQ ID NO: 428
agagaugcgcgguuugagu

SEQ ID NO: 36327 - RNA, 19 nt, Artificial Sequence
  Description of Artificial Sequence: Synthetic oligonucleotide
  Antisense strand to SEQ ID NO: 36326
acucaaaccgcgcaucucu

SEQ ID NO: 36328 - RNA, 19 nt, Artificial Sequence
  Description of Artificial Sequence: Synthetic oligonucleotide
  Sense strand starting at position 2521 of SEQ ID NO: 428
uggugaugcgccagagaug

SEQ ID NO: 36329 - RNA, 19 nt, Artificial Sequence
  Description of Artificial Sequence: Synthetic oligonucleotide
  Antisense strand to SEQ ID NO: 36328
caucucuggcgcaucacca

SEQ ID NO: 36330 - RNA, 19 nt, Artificial Sequence
  Description of Artificial Sequence: Synthetic oligonucleotide
  Sense strand starting at position 2509 of SEQ ID NO: 428
ccuuaaauaggauggugau

SEQ ID NO: 36331 - RNA, 19 nt, Artificial Sequence
  Description of Artificial Sequence: Synthetic oligonucleotide
  Antisense strand to SEQ ID NO: 36330
aucaccauccuauuuaagg

SEQ ID NO: 36332 - RNA, 19 nt, Artificial Sequence
  Description of Artificial Sequence: Synthetic oligonucleotide
  Sense strand starting at position 2369 of SEQ ID NO: 428
ggugaugauuggcuguaag

SEQ ID NO: 36333 - RNA, 19 nt, Artificial Sequence
  Description of Artificial Sequence: Synthetic oligonucleotide
  Antisense strand to SEQ ID NO: 36332
cuuacagccaaucaucacc

SEQ ID NO: 36334 - RNA, 19 nt, Artificial Sequence
  Description of Artificial Sequence: Synthetic oligonucleotide
  Sense strand starting at position 2368 of SEQ ID NO: 428
aggugaugauuggcuguaa

SEQ ID NO: 36335 - RNA, 19 nt, Artificial Sequence
  Description of Artificial Sequence: Synthetic oligonucleotide
  Antisense strand to SEQ ID NO: 36334
uuacagccaaucaucaccu

SEQ ID NO: 36336 - RNA, 19 nt, Artificial Sequence
  Description of Artificial Sequence: Synthetic oligonucleotide
  Sense strand starting at position 2295 of SEQ ID NO: 428
cgugacucuaguuacugaa

SEQ ID NO: 36337 - RNA, 19 nt, Artificial Sequence
  Description of Artificial Sequence: Synthetic oligonucleotide
  Antisense strand to SEQ ID NO: 36336
uucaguaacuagagucacg

SEQ ID NO: 36338 - RNA, 19 nt, Artificial Sequence
  Description of Artificial Sequence: Synthetic oligonucleotide
  Sense strand starting at position 2294 of SEQ ID NO: 428
acgugacucuaguuacuga

SEQ ID NO: 36339 - RNA, 19 nt, Artificial Sequence
  Description of Artificial Sequence: Synthetic oligonucleotide
  Antisense strand to SEQ ID NO: 36338
ucaguaacuagagucacgu

SEQ ID NO: 36340 - RNA, 19 nt, Artificial Sequence
  Description of Artificial Sequence: Synthetic oligonucleotide
  Sense strand starting at position 1047 of SEQ ID NO: 428
uaaggcacuccaggagaau

SEQ ID NO: 36341 - RNA, 19 nt, Artificial Sequence
  Description of Artificial Sequence: Synthetic oligonucleotide
  Antisense strand to SEQ ID NO: 36340
auucuccuggagugccuua

SEQ ID NO: 36342 - RNA, 19 nt, Artificial Sequence
  Description of Artificial Sequence: Synthetic oligonucleotide
  Sense strand starting at position 1016 of SEQ ID NO: 428
cucacaggguccuuaucaa

SEQ ID NO: 36343 - RNA, 19 nt, Artificial Sequence
  Description of Artificial Sequence: Synthetic oligonucleotide
  Antisense strand to SEQ ID NO: 36342
uugauaaggacccugugag

SEQ ID NO: 36344 - RNA, 19 nt, Artificial Sequence
  Description of Artificial Sequence: Synthetic oligonucleotide
  Sense strand starting at position 1003 of SEQ ID NO: 428
agucaauacuguccucaca

SEQ ID NO: 36345 - RNA, 19 nt, Artificial Sequence
  Description of Artificial Sequence: Synthetic oligonucleotide
  Antisense strand to SEQ ID NO: 36344
ugugaggacaguauugacu

SEQ ID NO: 36346 - RNA, 19 nt, Artificial Sequence
  Description of Artificial Sequence: Synthetic oligonucleotide
  Sense strand starting at position 989 of SEQ ID NO: 428
ccuccaaaucugggaguca

SEQ ID NO: 36347 - RNA, 19 nt, Artificial Sequence
  Description of Artificial Sequence: Synthetic oligonucleotide
  Antisense strand to SEQ ID NO: 36346
ugacucccagauuuggagg

SEQ ID NO: 36348 - RNA, 19 nt, Artificial Sequence
  Description of Artificial Sequence: Synthetic oligonucleotide
  Sense strand starting at position 908 of SEQ ID NO: 428
aguucuuuacacuguagga

SEQ ID NO: 36349 - RNA, 19 nt, Artificial Sequence
  Description of Artificial Sequence: Synthetic oligonucleotide
  Antisense strand to SEQ ID NO: 36348
uccuacaguguaaagaacu

SEQ ID NO: 36350 - RNA, 19 nt, Artificial Sequence
  Description of Artificial Sequence: Synthetic oligonucleotide
  Sense strand starting at position 335 of SEQ ID NO: 428
ucaagcauguagucaggua

SEQ ID NO: 36351 - RNA, 19 nt, Artificial Sequence
  Description of Artificial Sequence: Synthetic oligonucleotide
  Antisense strand to SEQ ID NO: 36350
uaccugacuacaugcuuga

SEQ ID NO: 36352 - RNA, 19 nt, Artificial Sequence
  Description of Artificial Sequence: Synthetic oligonucleotide
  Sense strand starting at position 157 of SEQ ID NO: 428
gcaacaggauuggagaaau

SEQ ID NO: 36353 - RNA, 19 nt, Artificial Sequence
  Description of Artificial Sequence: Synthetic oligonucleotide
  Antisense strand to SEQ ID NO: 36352
auuucuccaauccuguugc

SEQ ID NO: 36354 - RNA, 19 nt, Artificial Sequence
  Description of Artificial Sequence: Synthetic oligonucleotide
  Sense strand starting at position 116 of SEQ ID NO: 428
gguaacguucccugugaaa

SEQ ID NO: 36355 - RNA, 19 nt, Artificial Sequence
  Description of Artificial Sequence: Synthetic oligonucleotide
  Antisense strand to SEQ ID NO: 36354
uuucacagggaacguuacc

SEQ ID NO: 36356 - RNA, 19 nt, Artificial Sequence
  Description of Artificial Sequence: Synthetic oligonucleotide
  Sense strand starting at position 115 of SEQ ID NO: 428
agguaacguucccugugaa

SEQ ID NO: 36357 - RNA, 19 nt, Artificial Sequence
  Description of Artificial Sequence: Synthetic oligonucleotide
  Antisense strand to SEQ ID NO: 36356
uucacagggaacguuaccu

SEQ ID NO: 36358 - RNA, 19 nt, Artificial Sequence
  Description of Artificial Sequence: Synthetic oligonucleotide
  Sense strand starting at position 114 of SEQ ID NO: 428
uagguaacguucccuguga

SEQ ID NO: 36359 - RNA, 19 nt, Artificial Sequence
  Description of Artificial Sequence: Synthetic oligonucleotide
  Antisense strand to SEQ ID NO: 36358
ucacagggaacguuaccua

SEQ ID NO: 36360 - RNA, 19 nt, Artificial Sequence
  Description of Artificial Sequence: Synthetic oligonucleotide
  Sense strand starting at position 110 of SEQ ID NO: 429
ucuuccuugcagcaagauu

SEQ ID NO: 36361 - RNA, 19 nt, Artificial Sequence
  Description of Artificial Sequence: Synthetic oligonucleotide
  Antisense strand to SEQ ID NO: 36360
aaucuugcugcaaggaaga

SEQ ID NO: 36362 - RNA, 19 nt, Artificial Sequence
  Description of Artificial Sequence: Synthetic oligonucleotide
  Sense strand starting at position 118 of SEQ ID NO: 429
gcagcaagauuaguuuguu

SEQ ID NO: 36363 - RNA, 19 nt, Artificial Sequence
  Description of Artificial Sequence: Synthetic oligonucleotide
  Antisense strand to SEQ ID NO: 36362
aacaaacuaaucuugcugc

SEQ ID NO: 36364 - RNA, 19 nt, Artificial Sequence
  Description of Artificial Sequence: Synthetic oligonucleotide
  Sense strand starting at position 119 of SEQ ID NO: 429
cagcaagauuaguuuguuu

SEQ ID NO: 36365 - RNA, 19 nt, Artificial Sequence
  Description of Artificial Sequence: Synthetic oligonucleotide
  Antisense strand to SEQ ID NO: 36364
aaacaaacuaaucuugcug

SEQ ID NO: 36366 - RNA, 19 nt, Artificial Sequence
  Description of Artificial Sequence: Synthetic oligonucleotide
  Sense strand starting at position 172 of SEQ ID NO: 429
gugauuccaugagaacaug

SEQ ID NO: 36367 - RNA, 19 nt, Artificial Sequence
  Description of Artificial Sequence: Synthetic oligonucleotide
  Antisense strand to SEQ ID NO: 36366
cauguucucauggaaucac

SEQ ID NO: 36368 - RNA, 19 nt, Artificial Sequence
  Description of Artificial Sequence: Synthetic oligonucleotide
  Sense strand starting at position 223 of SEQ ID NO: 429
agcaccaauuuguagaaua

SEQ ID NO: 36369 - RNA, 19 nt, Artificial Sequence
  Description of Artificial Sequence: Synthetic oligonucleotide
  Antisense strand to SEQ ID NO: 36368
uauucuacaaauuggugcu

SEQ ID NO: 36370 - RNA, 19 nt, Artificial Sequence
  Description of Artificial Sequence: Synthetic oligonucleotide
  Sense strand starting at position 247 of SEQ ID NO: 429
ugccgucacuuacugagaa

SEQ ID NO: 36371 - RNA, 19 nt, Artificial Sequence
  Description of Artificial Sequence: Synthetic oligonucleotide
  Antisense strand to SEQ ID NO: 36370
uucucaguaagugacggca

SEQ ID NO: 36372 - RNA, 19 nt, Artificial Sequence
  Description of Artificial Sequence: Synthetic oligonucleotide
  Sense strand starting at position 259 of SEQ ID NO: 429
cugagaacugcccagguau

SEQ ID NO: 36373 - RNA, 19 nt, Artificial Sequence
  Description of Artificial Sequence: Synthetic oligonucleotide
  Antisense strand to SEQ ID NO: 36372
auaccugggcaguucucag

SEQ ID NO: 36374 - RNA, 19 nt, Artificial Sequence
  Description of Artificial Sequence: Synthetic oligonucleotide
  Sense strand starting at position 273 of SEQ ID NO: 429
gguauuuggcacugugcua

SEQ ID NO: 36375 - RNA, 19 nt, Artificial Sequence
  Description of Artificial Sequence: Synthetic oligonucleotide
  Antisense strand to SEQ ID NO: 36374
uagcacagugccaaauacc

SEQ ID NO: 36376 - RNA, 19 nt, Artificial Sequence
  Description of Artificial Sequence: Synthetic oligonucleotide
  Sense strand starting at position 298 of SEQ ID NO: 429
gcguaacuaccugaggaga

SEQ ID NO: 36377 - RNA, 19 nt, Artificial Sequence
  Description of Artificial Sequence: Synthetic oligonucleotide
  Antisense strand to SEQ ID NO: 36376
ucuccucagguaguuacgc

SEQ ID NO: 36378 - RNA, 19 nt, Artificial Sequence
  Description of Artificial Sequence: Synthetic oligonucleotide
  Sense strand starting at position 322 of SEQ ID NO: 429
accaucucccucugggaaa

SEQ ID NO: 36379 - RNA, 19 nt, Artificial Sequence
  Description of Artificial Sequence: Synthetic oligonucleotide
  Antisense strand to SEQ ID NO: 36378
uuucccagagggagauggu

SEQ ID NO: 36380 - RNA, 19 nt, Artificial Sequence
  Description of Artificial Sequence: Synthetic oligonucleotide
  Sense strand starting at position 521 of SEQ ID NO: 429
ccuccagguugugacauaa

SEQ ID NO: 36381 - RNA, 19 nt, Artificial Sequence
  Description of Artificial Sequence: Synthetic oligonucleotide
  Antisense strand to SEQ ID NO: 36380
uuaugucacaaccuggagg

SEQ ID NO: 36382 - RNA, 19 nt, Artificial Sequence
  Description of Artificial Sequence: Synthetic oligonucleotide
  Sense strand starting at position 544 of SEQ ID NO: 429
ugcacaacccacgagauau

SEQ ID NO: 36383 - RNA, 19 nt, Artificial Sequence
  Description of Artificial Sequence: Synthetic oligonucleotide
  Antisense strand to SEQ ID NO: 36382
auaucucguggguugugca

SEQ ID NO: 36384 - RNA, 19 nt, Artificial Sequence
  Description of Artificial Sequence: Synthetic oligonucleotide
  Sense strand starting at position 750 of SEQ ID NO: 429
gggcauugcuccacggguu

SEQ ID NO: 36385 - RNA, 19 nt, Artificial Sequence
  Description of Artificial Sequence: Synthetic oligonucleotide
  Antisense strand to SEQ ID NO: 36384
aacccguggagcaaugccc

SEQ ID NO: 36386 - RNA, 19 nt, Artificial Sequence
  Description of Artificial Sequence: Synthetic oligonucleotide
  Sense strand starting at position 762 of SEQ ID NO: 429
acggguucgggcuguacaa

SEQ ID NO: 36387 - RNA, 19 nt, Artificial Sequence
  Description of Artificial Sequence: Synthetic oligonucleotide
  Antisense strand to SEQ ID NO: 36386
uuguacagcccgaacccgu

SEQ ID NO: 36388 - RNA, 19 nt, Artificial Sequence
  Description of Artificial Sequence: Synthetic oligonucleotide
  Sense strand starting at position 865 of SEQ ID NO: 429
acccgaucccgaggagaga

SEQ ID NO: 36389 - RNA, 19 nt, Artificial Sequence
  Description of Artificial Sequence: Synthetic oligonucleotide
  Antisense strand to SEQ ID NO: 36388
ucucuccucgggaucgggu

SEQ ID NO: 36390 - RNA, 19 nt, Artificial Sequence
  Description of Artificial Sequence: Synthetic oligonucleotide
  Sense strand starting at position 1370 of SEQ ID NO: 429
cgaugaguucggcguccau

SEQ ID NO: 36391 - RNA, 19 nt, Artificial Sequence
  Description of Artificial Sequence: Synthetic oligonucleotide
  Antisense strand to SEQ ID NO: 36390
auggacgccgaacucaucg

SEQ ID NO: 36392 - RNA, 19 nt, Artificial Sequence
  Description of Artificial Sequence: Synthetic oligonucleotide
  Sense strand starting at position 2220 of SEQ ID NO: 429
uuggcacuuucggagggau

SEQ ID NO: 36393 - RNA, 19 nt, Artificial Sequence
  Description of Artificial Sequence: Synthetic oligonucleotide
  Antisense strand to SEQ ID NO: 36392
aucccuccgaaagugccaa

SEQ ID NO: 36394 - RNA, 19 nt, Artificial Sequence
  Description of Artificial Sequence: Synthetic oligonucleotide
  Sense strand starting at position 2346 of SEQ ID NO: 429
ggaugucaggccuacgcaa

SEQ ID NO: 36395 - RNA, 19 nt, Artificial Sequence
  Description of Artificial Sequence: Synthetic oligonucleotide
  Antisense strand to SEQ ID NO: 36394
uugcguaggccugacaucc

SEQ ID NO: 36396 - RNA, 19 nt, Artificial Sequence
  Description of Artificial Sequence: Synthetic oligonucleotide
  Sense strand starting at position 2425 of SEQ ID NO: 429
acagcaaagccuugaucaa

SEQ ID NO: 36397 - RNA, 19 nt, Artificial Sequence
  Description of Artificial Sequence: Synthetic oligonucleotide
  Antisense strand to SEQ ID NO: 36396
uugaucaaggcuuugcugu

SEQ ID NO: 36398 - RNA, 19 nt, Artificial Sequence
  Description of Artificial Sequence: Synthetic oligonucleotide
  Sense strand starting at position 2582 of SEQ ID NO: 429
gcauguacuuaguuguuau

SEQ ID NO: 36399 - RNA, 19 nt, Artificial Sequence
  Description of Artificial Sequence: Synthetic oligonucleotide
  Antisense strand to SEQ ID NO: 36398
auaacaacuaaguacaugc

SEQ ID NO: 36400 - RNA, 19 nt, Artificial Sequence
  Description of Artificial Sequence: Synthetic oligonucleotide
  Sense strand starting at position 2840 of SEQ ID NO: 429
guaugugguagaugcucaa

SEQ ID NO: 36401 - RNA, 19 nt, Artificial Sequence
  Description of Artificial Sequence: Synthetic oligonucleotide
  Antisense strand to SEQ ID NO: 36400
uugagcaucuaccacauac

SEQ ID NO: 36402 - RNA, 19 nt, Artificial Sequence
  Description of Artificial Sequence: Synthetic oligonucleotide
  Sense strand starting at position 2859 of SEQ ID NO: 429
aagugucccuuagaugaaa

SEQ ID NO: 36403 - RNA, 19 nt, Artificial Sequence
  Description of Artificial Sequence: Synthetic oligonucleotide
  Antisense strand to SEQ ID NO: 36402
uuucaucuaagggacacuu

SEQ ID NO: 36404 - RNA, 19 nt, Artificial Sequence
  Description of Artificial Sequence: Synthetic oligonucleotide
  Sense strand starting at position 2861 of SEQ ID NO: 429
gugucccuuagaugaaaga

SEQ ID NO: 36405 - RNA, 19 nt, Artificial Sequence
  Description of Artificial Sequence: Synthetic oligonucleotide
  Antisense strand to SEQ ID NO: 36404
ucuuucaucuaagggacac

SEQ ID NO: 36406 - RNA, 19 nt, Artificial Sequence
  Description of Artificial Sequence: Synthetic oligonucleotide
  Sense strand starting at position 3192 of SEQ ID NO: 429
ggccaaggcuauuuaaguu

SEQ ID NO: 36407 - RNA, 19 nt, Artificial Sequence
  Description of Artificial Sequence: Synthetic oligonucleotide
  Antisense strand to SEQ ID NO: 36406
aacuuaaauagccuuggcc

SEQ ID NO: 36408 - RNA, 19 nt, Artificial Sequence
  Description of Artificial Sequence: Synthetic oligonucleotide
  Sense strand starting at position 3200 of SEQ ID NO: 429
cuauuuaaguucuguccca

SEQ ID NO: 36409 - RNA, 19 nt, Artificial Sequence
  Description of Artificial Sequence: Synthetic oligonucleotide
  Antisense strand to SEQ ID NO: 36408
ugggacagaacuuaaauag

SEQ ID NO: 36410 - RNA, 19 nt, Artificial Sequence
  Description of Artificial Sequence: Synthetic oligonucleotide
  Sense strand starting at position 3221 of SEQ ID NO: 429
gggccuucucuugauaaca

SEQ ID NO: 36411 - RNA, 19 nt, Artificial Sequence
  Description of Artificial Sequence: Synthetic oligonucleotide
  Antisense strand to SEQ ID NO: 36410
uguuaucaagagaaggccc

SEQ ID NO: 36412 - RNA, 19 nt, Artificial Sequence
  Description of Artificial Sequence: Synthetic oligonucleotide
  Sense strand starting at position 3389 of SEQ ID NO: 429
gugugaaugccauguguuu

SEQ ID NO: 36413 - RNA, 19 nt, Artificial Sequence
  Description of Artificial Sequence: Synthetic oligonucleotide
  Antisense strand to SEQ ID NO: 36412
aaacacauggcauucacac

SEQ ID NO: 36414 - RNA, 19 nt, Artificial Sequence
  Description of Artificial Sequence: Synthetic oligonucleotide
  Sense strand starting at position 3530 of SEQ ID NO: 429
uugggacuuccuggaacuu

SEQ ID NO: 36415 - RNA, 19 nt, Artificial Sequence
  Description of Artificial Sequence: Synthetic oligonucleotide
  Antisense strand to SEQ ID NO: 36414
aaguuccaggaagucccaa

SEQ ID NO: 36416 - RNA, 19 nt, Artificial Sequence
  Description of Artificial Sequence: Synthetic oligonucleotide
  Sense strand starting at position 3550 of SEQ ID NO: 429
gguuuauccaguugaugua

SEQ ID NO: 36417 - RNA, 19 nt, Artificial Sequence
  Description of Artificial Sequence: Synthetic oligonucleotide
  Antisense strand to SEQ ID NO: 36416
uacaucaacuggauaaacc

SEQ ID NO: 36418 - RNA, 19 nt, Artificial Sequence
  Description of Artificial Sequence: Synthetic oligonucleotide
  Sense strand starting at position 3688 of SEQ ID NO: 429
gccucaggcuuaucucgaa

SEQ ID NO: 36419 - RNA, 19 nt, Artificial Sequence
  Description of Artificial Sequence: Synthetic oligonucleotide
  Antisense strand to SEQ ID NO: 36418
uucgagauaagccugaggc

SEQ ID NO: 36420 - RNA, 19 nt, Artificial Sequence
  Description of Artificial Sequence: Synthetic oligonucleotide
  Sense strand starting at position 3786 of SEQ ID NO: 429
aggcccaaguucuaaucau

SEQ ID NO: 36421 - RNA, 19 nt, Artificial Sequence
  Description of Artificial Sequence: Synthetic oligonucleotide
  Antisense strand to SEQ ID NO: 36420
augauuagaacuugggccu

SEQ ID NO: 36422 - RNA, 19 nt, Artificial Sequence
  Description of Artificial Sequence: Synthetic oligonucleotide
  Sense strand starting at position 3870 of SEQ ID NO: 429
gggaguauuacuugauucc

SEQ ID NO: 36423 - RNA, 19 nt, Artificial Sequence
  Description of Artificial Sequence: Synthetic oligonucleotide
  Antisense strand to SEQ ID NO: 36422
ggaaucaaguaauacuccc

SEQ ID NO: 36424 - RNA, 19 nt, Artificial Sequence
  Description of Artificial Sequence: Synthetic oligonucleotide
  Sense strand starting at position 3897 of SEQ ID NO: 429
ucagcuuucugcucuguga

SEQ ID NO: 36425 - RNA, 19 nt, Artificial Sequence
  Description of Artificial Sequence: Synthetic oligonucleotide
  Antisense strand to SEQ ID NO: 36424
ucacagagcagaaagcuga

SEQ ID NO: 36426 - RNA, 19 nt, Artificial Sequence
  Description of Artificial Sequence: Synthetic oligonucleotide
  Sense strand starting at position 3899 of SEQ ID NO: 429
agcuuucugcucugugaaa

SEQ ID NO: 36427 - RNA, 19 nt, Artificial Sequence
  Description of Artificial Sequence: Synthetic oligonucleotide
  Antisense strand to SEQ ID NO: 36426
uuucacagagcagaaagcu

SEQ ID NO: 36428 - RNA, 19 nt, Artificial Sequence
  Description of Artificial Sequence: Synthetic oligonucleotide
  Sense strand starting at position 3900 of SEQ ID NO: 429
gcuuucugcucugugaaag

SEQ ID NO: 36429 - RNA, 19 nt, Artificial Sequence
  Description of Artificial Sequence: Synthetic oligonucleotide
  Antisense strand to SEQ ID NO: 36428
cuuucacagagcagaaagc

SEQ ID NO: 36430 - RNA, 19 nt, Artificial Sequence
  Description of Artificial Sequence: Synthetic oligonucleotide
  Sense strand starting at position 3924 of SEQ ID NO: 429
cggugaucuugccugguca

SEQ ID NO: 36431 - RNA, 19 nt, Artificial Sequence
  Description of Artificial Sequence: Synthetic oligonucleotide
  Antisense strand to SEQ ID NO: 36430
ugaccaggcaagaucaccg

SEQ ID NO: 36432 - RNA, 19 nt, Artificial Sequence
  Description of Artificial Sequence: Synthetic oligonucleotide
  Sense strand starting at position 3947 of SEQ ID NO: 429
gagagcuuguggguaguga

SEQ ID NO: 36433 - RNA, 19 nt, Artificial Sequence
  Description of Artificial Sequence: Synthetic oligonucleotide
  Antisense strand to SEQ ID NO: 36432
ucacuacccacaagcucuc

SEQ ID NO: 36434 - RNA, 19 nt, Artificial Sequence
  Description of Artificial Sequence: Synthetic oligonucleotide
  Sense strand starting at position 3948 of SEQ ID NO: 429
agagcuuguggguagugau

SEQ ID NO: 36435 - RNA, 19 nt, Artificial Sequence
  Description of Artificial Sequence: Synthetic oligonucleotide
  Antisense strand to SEQ ID NO: 36434
aucacuacccacaagcucu

SEQ ID NO: 36436 - RNA, 19 nt, Artificial Sequence
  Description of Artificial Sequence: Synthetic oligonucleotide
  Sense strand starting at position 3958 of SEQ ID NO: 429
gguagugauaaaugaccau

SEQ ID NO: 36437 - RNA, 19 nt, Artificial Sequence
  Description of Artificial Sequence: Synthetic oligonucleotide
  Antisense strand to SEQ ID NO: 36436
auggucauuuaucacuacc

SEQ ID NO: 36438 - RNA, 19 nt, Artificial Sequence
  Description of Artificial Sequence: Synthetic oligonucleotide
  Sense strand starting at position 3964 of SEQ ID NO: 429
gauaaaugaccaugggugu

SEQ ID NO: 36439 - RNA, 19 nt, Artificial Sequence
  Description of Artificial Sequence: Synthetic oligonucleotide
  Antisense strand to SEQ ID NO: 36438
acacccauggucauuuauc

SEQ ID NO: 36440 - RNA, 19 nt, Artificial Sequence
  Description of Artificial Sequence: Synthetic oligonucleotide
  Sense strand starting at position 3938 of SEQ ID NO: 430
cuggacuuccaguaggcaa

SEQ ID NO: 36441 - RNA, 19 nt, Artificial Sequence
  Description of Artificial Sequence: Synthetic oligonucleotide
  Antisense strand to SEQ ID NO: 36440
uugccuacuggaaguccag

SEQ ID NO: 36442 - RNA, 19 nt, Artificial Sequence
  Description of Artificial Sequence: Synthetic oligonucleotide
  Sense strand starting at position 3778 of SEQ ID NO: 430
agaguucuugucugggcau

SEQ ID NO: 36443 - RNA, 19 nt, Artificial Sequence
  Description of Artificial Sequence: Synthetic oligonucleotide
  Antisense strand to SEQ ID NO: 36442
augcccagacaagaacucu

SEQ ID NO: 36444 - RNA, 19 nt, Artificial Sequence
  Description of Artificial Sequence: Synthetic oligonucleotide
  Sense strand starting at position 3777 of SEQ ID NO: 430
cagaguucuugucugggca

SEQ ID NO: 36445 - RNA, 19 nt, Artificial Sequence
  Description of Artificial Sequence: Synthetic oligonucleotide
  Antisense strand to SEQ ID NO: 36444
ugcccagacaagaacucug

SEQ ID NO: 36446 - RNA, 19 nt, Artificial Sequence
  Description of Artificial Sequence: Synthetic oligonucleotide
  Sense strand starting at position 3627 of SEQ ID NO: 430
gugggugugacaugagcaa

SEQ ID NO: 36447 - RNA, 19 nt, Artificial Sequence
  Description of Artificial Sequence: Synthetic oligonucleotide
  Antisense strand to SEQ ID NO: 36446
uugcucaugucacacccac

SEQ ID NO: 36448 - RNA, 19 nt, Artificial Sequence
  Description of Artificial Sequence: Synthetic oligonucleotide
  Sense strand starting at position 3603 of SEQ ID NO: 430
cauggauuuguuggugugu

SEQ ID NO: 36449 - RNA, 19 nt, Artificial Sequence
  Description of Artificial Sequence: Synthetic oligonucleotide
  Antisense strand to SEQ ID NO: 36448
acacaccaacaaauccaug

SEQ ID NO: 36450 - RNA, 19 nt, Artificial Sequence
  Description of Artificial Sequence: Synthetic oligonucleotide
  Sense strand starting at position 3058 of SEQ ID NO: 430
gcuguaaggagugagauua

SEQ ID NO: 36451 - RNA, 19 nt, Artificial Sequence
  Description of Artificial Sequence: Synthetic oligonucleotide
  Antisense strand to SEQ ID NO: 36450
uaaucucacuccuuacagc

SEQ ID NO: 36452 - RNA, 19 nt, Artificial Sequence
  Description of Artificial Sequence: Synthetic oligonucleotide
  Sense strand starting at position 3057 of SEQ ID NO: 430
ggcuguaaggagugagauu

SEQ ID NO: 36453 - RNA, 19 nt, Artificial Sequence
  Description of Artificial Sequence: Synthetic oligonucleotide
  Antisense strand to SEQ ID NO: 36452
aaucucacuccuuacagcc

SEQ ID NO: 36454 - RNA, 19 nt, Artificial Sequence
  Description of Artificial Sequence: Synthetic oligonucleotide
  Sense strand starting at position 2936 of SEQ ID NO: 430
ucgucaaucccugaaacuc

SEQ ID NO: 36455 - RNA, 19 nt, Artificial Sequence
  Description of Artificial Sequence: Synthetic oligonucleotide
  Antisense strand to SEQ ID NO: 36454
gaguuucagggauugacga

SEQ ID NO: 36456 - RNA, 19 nt, Artificial Sequence
  Description of Artificial Sequence: Synthetic oligonucleotide
  Sense strand starting at position 2935 of SEQ ID NO: 430
gucgucaaucccugaaacu

SEQ ID NO: 36457 - RNA, 19 nt, Artificial Sequence
  Description of Artificial Sequence: Synthetic oligonucleotide
  Antisense strand to SEQ ID NO: 36456
aguuucagggauugacgac

SEQ ID NO: 36458 - RNA, 19 nt, Artificial Sequence
  Description of Artificial Sequence: Synthetic oligonucleotide
  Sense strand starting at position 2934 of SEQ ID NO: 430
ugucgucaaucccugaaac

SEQ ID NO: 36459 - RNA, 19 nt, Artificial Sequence
  Description of Artificial Sequence: Synthetic oligonucleotide
  Antisense strand to SEQ ID NO: 36458
guuucagggauugacgaca

SEQ ID NO: 36460 - RNA, 19 nt, Artificial Sequence
  Description of Artificial Sequence: Synthetic oligonucleotide
  Sense strand starting at position 2891 of SEQ ID NO: 430
gagcuuuaucuuuguggga

SEQ ID NO: 36461 - RNA, 19 nt, Artificial Sequence
  Description of Artificial Sequence: Synthetic oligonucleotide
  Antisense strand to SEQ ID NO: 36460
ucccacaaagauaaagcuc

SEQ ID NO: 36462 - RNA, 19 nt, Artificial Sequence
  Description of Artificial Sequence: Synthetic oligonucleotide
  Sense strand starting at position 2853 of SEQ ID NO: 430
ucugaaguucgcguccuua

SEQ ID NO: 36463 - RNA, 19 nt, Artificial Sequence
  Description of Artificial Sequence: Synthetic oligonucleotide
  Antisense strand to SEQ ID NO: 36462
uaaggacgcgaacuucaga

SEQ ID NO: 36464 - RNA, 19 nt, Artificial Sequence
  Description of Artificial Sequence: Synthetic oligonucleotide
  Sense strand starting at position 2817 of SEQ ID NO: 430
acgucugacuguccagaaa

SEQ ID NO: 36465 - RNA, 19 nt, Artificial Sequence
  Description of Artificial Sequence: Synthetic oligonucleotide
  Antisense strand to SEQ ID NO: 36464
uuucuggacagucagacgu

SEQ ID NO: 36466 - RNA, 19 nt, Artificial Sequence
  Description of Artificial Sequence: Synthetic oligonucleotide
  Sense strand starting at position 2692 of SEQ ID NO: 430
caacgauccucggcuaacu

SEQ ID NO: 36467 - RNA, 19 nt, Artificial Sequence
  Description of Artificial Sequence: Synthetic oligonucleotide
  Antisense strand to SEQ ID NO: 36466
aguuagccgaggaucguug

SEQ ID NO: 36468 - RNA, 19 nt, Artificial Sequence
  Description of Artificial Sequence: Synthetic oligonucleotide
  Sense strand starting at position 2644 of SEQ ID NO: 430
gagaaacccuucguuacuc

SEQ ID NO: 36469 - RNA, 19 nt, Artificial Sequence
  Description of Artificial Sequence: Synthetic oligonucleotide
  Antisense strand to SEQ ID NO: 36468
gaguaacgaaggguuucuc

SEQ ID NO: 36470 - RNA, 19 nt, Artificial Sequence
  Description of Artificial Sequence: Synthetic oligonucleotide
  Sense strand starting at position 2643 of SEQ ID NO: 430
cgagaaacccuucguuacu

SEQ ID NO: 36471 - RNA, 19 nt, Artificial Sequence
  Description of Artificial Sequence: Synthetic oligonucleotide
  Antisense strand to SEQ ID NO: 36470
aguaacgaaggguuucucg

SEQ ID NO: 36472 - RNA, 19 nt, Artificial Sequence
  Description of Artificial Sequence: Synthetic oligonucleotide
  Sense strand starting at position 2273 of SEQ ID NO: 430
aauaaaguuucuccaggga

SEQ ID NO: 36473 - RNA, 19 nt, Artificial Sequence
  Description of Artificial Sequence: Synthetic oligonucleotide
  Antisense strand to SEQ ID NO: 36472
ucccuggagaaacuuuauu

SEQ ID NO: 36474 - RNA, 19 nt, Artificial Sequence
  Description of Artificial Sequence: Synthetic oligonucleotide
  Sense strand starting at position 2258 of SEQ ID NO: 430
gccggaagugaguguaaua

SEQ ID NO: 36475 - RNA, 19 nt, Artificial Sequence
  Description of Artificial Sequence: Synthetic oligonucleotide
  Antisense strand to SEQ ID NO: 36474
uauuacacucacuuccggc

SEQ ID NO: 36476 - RNA, 19 nt, Artificial Sequence
  Description of Artificial Sequence: Synthetic oligonucleotide
  Sense strand starting at position 2257 of SEQ ID NO: 430
ggccggaagugaguguaau

SEQ ID NO: 36477 - RNA, 19 nt, Artificial Sequence
  Description of Artificial Sequence: Synthetic oligonucleotide
  Antisense strand to SEQ ID NO: 36476
auuacacucacuuccggcc

SEQ ID NO: 36478 - RNA, 19 nt, Artificial Sequence
  Description of Artificial Sequence: Synthetic oligonucleotide
  Sense strand starting at position 2104 of SEQ ID NO: 430
uucucacgcuucucaagaa

SEQ ID NO: 36479 - RNA, 19 nt, Artificial Sequence
  Description of Artificial Sequence: Synthetic oligonucleotide
  Antisense strand to SEQ ID NO: 36478
uucuugagaagcgugagaa

SEQ ID NO: 36480 - RNA, 19 nt, Artificial Sequence
  Description of Artificial Sequence: Synthetic oligonucleotide
  Sense strand starting at position 1688 of SEQ ID NO: 430
cgccuuacgccuuccacaa

SEQ ID NO: 36481 - RNA, 19 nt, Artificial Sequence
  Description of Artificial Sequence: Synthetic oligonucleotide
  Antisense strand to SEQ ID NO: 36480
uuguggaaggcguaaggcg

SEQ ID NO: 36482 - RNA, 19 nt, Artificial Sequence
  Description of Artificial Sequence: Synthetic oligonucleotide
  Sense strand starting at position 1560 of SEQ ID NO: 430
uccagaaagccucaugggu

SEQ ID NO: 36483 - RNA, 19 nt, Artificial Sequence
  Description of Artificial Sequence: Synthetic oligonucleotide
  Antisense strand to SEQ ID NO: 36482
acccaugaggcuuucugga

SEQ ID NO: 36484 - RNA, 19 nt, Artificial Sequence
  Description of Artificial Sequence: Synthetic oligonucleotide
  Sense strand starting at position 1531 of SEQ ID NO: 430
aaguuugcccgauaaaguu

SEQ ID NO: 36485 - RNA, 19 nt, Artificial Sequence
  Description of Artificial Sequence: Synthetic oligonucleotide
  Antisense strand to SEQ ID NO: 36484
aacuuuaucgggcaaacuu

SEQ ID NO: 36486 - RNA, 19 nt, Artificial Sequence
  Description of Artificial Sequence: Synthetic oligonucleotide
  Sense strand starting at position 1529 of SEQ ID NO: 430
uuaaguuugcccgauaaag

SEQ ID NO: 36487 - RNA, 19 nt, Artificial Sequence
  Description of Artificial Sequence: Synthetic oligonucleotide
  Antisense strand to SEQ ID NO: 36486
cuuuaucgggcaaacuuaa

SEQ ID NO: 36488 - RNA, 19 nt, Artificial Sequence
  Description of Artificial Sequence: Synthetic oligonucleotide
  Sense strand starting at position 1527 of SEQ ID NO: 430
aguuaaguuugcccgauaa

SEQ ID NO: 36489 - RNA, 19 nt, Artificial Sequence
  Description of Artificial Sequence: Synthetic oligonucleotide
  Antisense strand to SEQ ID NO: 36488
uuaucgggcaaacuuaacu

SEQ ID NO: 36490 - RNA, 19 nt, Artificial Sequence
  Description of Artificial Sequence: Synthetic oligonucleotide
  Sense strand starting at position 1526 of SEQ ID NO: 430
aaguuaaguuugcccgaua

SEQ ID NO: 36491 - RNA, 19 nt, Artificial Sequence
  Description of Artificial Sequence: Synthetic oligonucleotide
  Antisense strand to SEQ ID NO: 36490
uaucgggcaaacuuaacuu

SEQ ID NO: 36492 - RNA, 19 nt, Artificial Sequence
  Description of Artificial Sequence: Synthetic oligonucleotide
  Sense strand starting at position 1505 of SEQ ID NO: 430
gugaaacagucucuacaag

SEQ ID NO: 36493 - RNA, 19 nt, Artificial Sequence
  Description of Artificial Sequence: Synthetic oligonucleotide
  Antisense strand to SEQ ID NO: 36492
cuuguagagacuguuucac

SEQ ID NO: 36494 - RNA, 19 nt, Artificial Sequence
  Description of Artificial Sequence: Synthetic oligonucleotide
  Sense strand starting at position 1491 of SEQ ID NO: 430
ucgacaagauuacugugaa

SEQ ID NO: 36495 - RNA, 19 nt, Artificial Sequence
  Description of Artificial Sequence: Synthetic oligonucleotide
  Antisense strand to SEQ ID NO: 36494
uucacaguaaucuugucga

SEQ ID NO: 36496 - RNA, 19 nt, Artificial Sequence
  Description of Artificial Sequence: Synthetic oligonucleotide
  Sense strand starting at position 1392 of SEQ ID NO: 430
acgaguuaauaagcaauau

SEQ ID NO: 36497 - RNA, 19 nt, Artificial Sequence
  Description of Artificial Sequence: Synthetic oligonucleotide
  Antisense strand to SEQ ID NO: 36496
auauugcuuauuaacucgu

SEQ ID NO: 36498 - RNA, 19 nt, Artificial Sequence
  Description of Artificial Sequence: Synthetic oligonucleotide
  Sense strand starting at position 1249 of SEQ ID NO: 430
acuguucccuuugauauuu

SEQ ID NO: 36499 - RNA, 19 nt, Artificial Sequence
  Description of Artificial Sequence: Synthetic oligonucleotide
  Antisense strand to SEQ ID NO: 36498
aaauaucaaagggaacagu

SEQ ID NO: 36500 - RNA, 19 nt, Artificial Sequence
  Description of Artificial Sequence: Synthetic oligonucleotide
  Sense strand starting at position 1235 of SEQ ID NO: 430
uuaaguauuccguaacugu

SEQ ID NO: 36501 - RNA, 19 nt, Artificial Sequence
  Description of Artificial Sequence: Synthetic oligonucleotide
  Antisense strand to SEQ ID NO: 36500
acaguuacggaauacuuaa

SEQ ID NO: 36502 - RNA, 19 nt, Artificial Sequence
  Description of Artificial Sequence: Synthetic oligonucleotide
  Sense strand starting at position 973 of SEQ ID NO: 430
gcguccuggaguuagcaaa

SEQ ID NO: 36503 - RNA, 19 nt, Artificial Sequence
  Description of Artificial Sequence: Synthetic oligonucleotide
  Antisense strand to SEQ ID NO: 36502
uuugcuaacuccaggacgc

SEQ ID NO: 36504 - RNA, 19 nt, Artificial Sequence
  Description of Artificial Sequence: Synthetic oligonucleotide
  Sense strand starting at position 833 of SEQ ID NO: 430
gagacaucacgcugaauug

SEQ ID NO: 36505 - RNA, 19 nt, Artificial Sequence
  Description of Artificial Sequence: Synthetic oligonucleotide
  Antisense strand to SEQ ID NO: 36504
caauucagcgugaugucuc

SEQ ID NO: 36506 - RNA, 19 nt, Artificial Sequence
  Description of Artificial Sequence: Synthetic oligonucleotide
  Sense strand starting at position 148 of SEQ ID NO: 430
ucgaguucucuggaagacc

SEQ ID NO: 36507 - RNA, 19 nt, Artificial Sequence
  Description of Artificial Sequence: Synthetic oligonucleotide
  Antisense strand to SEQ ID NO: 36506
ggucuuccagagaacucga

SEQ ID NO: 36508 - RNA, 19 nt, Artificial Sequence
  Description of Artificial Sequence: Synthetic oligonucleotide
  Sense strand starting at position 146 of SEQ ID NO: 430
caucgaguucucuggaaga

SEQ ID NO: 36509 - RNA, 19 nt, Artificial Sequence
  Description of Artificial Sequence: Synthetic oligonucleotide
  Antisense strand to SEQ ID NO: 36508
ucuuccagagaacucgaug

SEQ ID NO: 36510 - RNA, 19 nt, Artificial Sequence
  Description of Artificial Sequence: Synthetic oligonucleotide
  Sense strand starting at position 144 of SEQ ID NO: 430
cacaucgaguucucuggaa

SEQ ID NO: 36511 - RNA, 19 nt, Artificial Sequence
  Description of Artificial Sequence: Synthetic oligonucleotide
  Antisense strand to SEQ ID NO: 36510
uuccagagaacucgaugug

SEQ ID NO: 36512 - RNA, 19 nt, Artificial Sequence
  Description of Artificial Sequence: Synthetic oligonucleotide
  Sense strand starting at position 130 of SEQ ID NO: 430
uguauuugucaaugcacau

SEQ ID NO: 36513 - RNA, 19 nt, Artificial Sequence
  Description of Artificial Sequence: Synthetic oligonucleotide
  Antisense strand to SEQ ID NO: 36512
augugcauugacaaauaca

SEQ ID NO: 36514 - RNA, 19 nt, Artificial Sequence
  Description of Artificial Sequence: Synthetic oligonucleotide
  Sense strand starting at position 115 of SEQ ID NO: 430
gcauaaagaugauuaugua

SEQ ID NO: 36515 - RNA, 19 nt, Artificial Sequence
  Description of Artificial Sequence: Synthetic oligonucleotide
  Antisense strand to SEQ ID NO: 36514
uacauaaucaucuuuaugc

SEQ ID NO: 36516 - RNA, 19 nt, Artificial Sequence
  Description of Artificial Sequence: Synthetic oligonucleotide
  Sense strand starting at position 106 of SEQ ID NO: 430
gccgucuuggcauaaagau

SEQ ID NO: 36517 - RNA, 19 nt, Artificial Sequence
  Description of Artificial Sequence: Synthetic oligonucleotide
  Antisense strand to SEQ ID NO: 36516
aucuuuaugccaagacggc

SEQ ID NO: 36518 - RNA, 19 nt, Artificial Sequence
  Description of Artificial Sequence: Synthetic oligonucleotide
  Sense strand starting at position 39 of SEQ ID NO: 430
guuaguuuaguucagaugu

SEQ ID NO: 36519 - RNA, 19 nt, Artificial Sequence
  Description of Artificial Sequence: Synthetic oligonucleotide
  Antisense strand to SEQ ID NO: 36518
acaucugaacuaaacuaac

SEQ ID NO: 36520 - RNA, 19 nt, Artificial Sequence
  Description of Artificial Sequence: Synthetic oligonucleotide
  Sense strand starting at position 3573 of SEQ ID NO: 431
aucccagagcagugagaau

SEQ ID NO: 36521 - RNA, 19 nt, Artificial Sequence
  Description of Artificial Sequence: Synthetic oligonucleotide
  Antisense strand to SEQ ID NO: 36520
auucucacugcucugggau

SEQ ID NO: 36522 - RNA, 19 nt, Artificial Sequence
  Description of Artificial Sequence: Synthetic oligonucleotide
  Sense strand starting at position 3567 of SEQ ID NO: 431
aguuuaaucccagagcagu

SEQ ID NO: 36523 - RNA, 19 nt, Artificial Sequence
  Description of Artificial Sequence: Synthetic oligonucleotide
  Antisense strand to SEQ ID NO: 36522
acugcucugggauuaaacu

SEQ ID NO: 36524 - RNA, 19 nt, Artificial Sequence
  Description of Artificial Sequence: Synthetic oligonucleotide
  Sense strand starting at position 3562 of SEQ ID NO: 431
uugagaguuuaaucccaga

SEQ ID NO: 36525 - RNA, 19 nt, Artificial Sequence
  Description of Artificial Sequence: Synthetic oligonucleotide
  Antisense strand to SEQ ID NO: 36524
ucugggauuaaacucucaa

SEQ ID NO: 36526 - RNA, 19 nt, Artificial Sequence
  Description of Artificial Sequence: Synthetic oligonucleotide
  Sense strand starting at position 3390 of SEQ ID NO: 431
ugugguuguccagaugauc

SEQ ID NO: 36527 - RNA, 19 nt, Artificial Sequence
  Description of Artificial Sequence: Synthetic oligonucleotide
  Antisense strand to SEQ ID NO: 36526
gaucaucuggacaaccaca

SEQ ID NO: 36528 - RNA, 19 nt, Artificial Sequence
  Description of Artificial Sequence: Synthetic oligonucleotide
  Sense strand starting at position 3383 of SEQ ID NO: 431
auuauaaugugguugucca

SEQ ID NO: 36529 - RNA, 19 nt, Artificial Sequence
  Description of Artificial Sequence: Synthetic oligonucleotide
  Antisense strand to SEQ ID NO: 36528
uggacaaccacauuauaau

SEQ ID NO: 36530 - RNA, 19 nt, Artificial Sequence
  Description of Artificial Sequence: Synthetic oligonucleotide
  Sense strand starting at position 3369 of SEQ ID NO: 431
aguggaaaugcucaauuau

SEQ ID NO: 36531 - RNA, 19 nt, Artificial Sequence
  Description of Artificial Sequence: Synthetic oligonucleotide
  Antisense strand to SEQ ID NO: 36530
auaauugagcauuuccacu

SEQ ID NO: 36532 - RNA, 19 nt, Artificial Sequence
  Description of Artificial Sequence: Synthetic oligonucleotide
  Sense strand starting at position 3330 of SEQ ID NO: 431
gcauaaucuuaagcaguua

SEQ ID NO: 36533 - RNA, 19 nt, Artificial Sequence
  Description of Artificial Sequence: Synthetic oligonucleotide
  Antisense strand to SEQ ID NO: 36532
uaacugcuuaagauuaugc

SEQ ID NO: 36534 - RNA, 19 nt, Artificial Sequence
  Description of Artificial Sequence: Synthetic oligonucleotide
  Sense strand starting at position 2792 of SEQ ID NO: 431
uggucuucagauggugaua

SEQ ID NO: 36535 - RNA, 19 nt, Artificial Sequence
  Description of Artificial Sequence: Synthetic oligonucleotide
  Antisense strand to SEQ ID NO: 36534
uaucaccaucugaagacca

SEQ ID NO: 36536 - RNA, 19 nt, Artificial Sequence
  Description of Artificial Sequence: Synthetic oligonucleotide
  Sense strand starting at position 2761 of SEQ ID NO: 431
cuugaaauaucucuucguu

SEQ ID NO: 36537 - RNA, 19 nt, Artificial Sequence
  Description of Artificial Sequence: Synthetic oligonucleotide
  Antisense strand to SEQ ID NO: 36536
aacgaagagauauuucaag

SEQ ID NO: 36538 - RNA, 19 nt, Artificial Sequence
  Description of Artificial Sequence: Synthetic oligonucleotide
  Sense strand starting at position 2663 of SEQ ID NO: 431
caugaauuaugggcuguca

SEQ ID NO: 36539 - RNA, 19 nt, Artificial Sequence
  Description of Artificial Sequence: Synthetic oligonucleotide
  Antisense strand to SEQ ID NO: 36538
ugacagcccauaauucaug

SEQ ID NO: 36540 - RNA, 19 nt, Artificial Sequence
  Description of Artificial Sequence: Synthetic oligonucleotide
  Sense strand starting at position 2525 of SEQ ID NO: 431
auguauaucuuacuuugca

SEQ ID NO: 36541 - RNA, 19 nt, Artificial Sequence
  Description of Artificial Sequence: Synthetic oligonucleotide
  Antisense strand to SEQ ID NO: 36540
ugcaaaguaagauauacau

SEQ ID NO: 36542 - RNA, 19 nt, Artificial Sequence
  Description of Artificial Sequence: Synthetic oligonucleotide
  Sense strand starting at position 2474 of SEQ ID NO: 431
gcaagugauguagauauua

SEQ ID NO: 36543 - RNA, 19 nt, Artificial Sequence
  Description of Artificial Sequence: Synthetic oligonucleotide
  Antisense strand to SEQ ID NO: 36542
uaauaucuacaucacuugc

SEQ ID NO: 36544 - RNA, 19 nt, Artificial Sequence
  Description of Artificial Sequence: Synthetic oligonucleotide
  Sense strand starting at position 2468 of SEQ ID NO: 431
gcauuagcaagugauguag

SEQ ID NO: 36545 - RNA, 19 nt, Artificial Sequence
  Description of Artificial Sequence: Synthetic oligonucleotide
  Antisense strand to SEQ ID NO: 36544
cuacaucacuugcuaaugc

SEQ ID NO: 36546 - RNA, 19 nt, Artificial Sequence
  Description of Artificial Sequence: Synthetic oligonucleotide
  Sense strand starting at position 2355 of SEQ ID NO: 431
uggucuuuaccacaauggu

SEQ ID NO: 36547 - RNA, 19 nt, Artificial Sequence
  Description of Artificial Sequence: Synthetic oligonucleotide
  Antisense strand to SEQ ID NO: 36546
accauugugguaaagacca

SEQ ID NO: 36548 - RNA, 19 nt, Artificial Sequence
  Description of Artificial Sequence: Synthetic oligonucleotide
  Sense strand starting at position 2350 of SEQ ID NO: 431
caugguggucuuuaccaca

SEQ ID NO: 36549 - RNA, 19 nt, Artificial Sequence
  Description of Artificial Sequence: Synthetic oligonucleotide
  Antisense strand to SEQ ID NO: 36548
ugugguaaagaccaccaug

SEQ ID NO: 36550 - RNA, 19 nt, Artificial Sequence
  Description of Artificial Sequence: Synthetic oligonucleotide
  Sense strand starting at position 2338 of SEQ ID NO: 431
ucaguuaucccucauggug

SEQ ID NO: 36551 - RNA, 19 nt, Artificial Sequence
  Description of Artificial Sequence: Synthetic oligonucleotide
  Antisense strand to SEQ ID NO: 36550
caccaugagggauaacuga

SEQ ID NO: 36552 - RNA, 19 nt, Artificial Sequence
  Description of Artificial Sequence: Synthetic oligonucleotide
  Sense strand starting at position 2213 of SEQ ID NO: 431
uguuuacuucuuggaaaug

SEQ ID NO: 36553 - RNA, 19 nt, Artificial Sequence
  Description of Artificial Sequence: Synthetic oligonucleotide
  Antisense strand to SEQ ID NO: 36552
cauuuccaagaaguaaaca

SEQ ID NO: 36554 - RNA, 19 nt, Artificial Sequence
  Description of Artificial Sequence: Synthetic oligonucleotide
  Sense strand starting at position 2211 of SEQ ID NO: 431
uuuguuuacuucuuggaaa

SEQ ID NO: 36555 - RNA, 19 nt, Artificial Sequence
  Description of Artificial Sequence: Synthetic oligonucleotide
  Antisense strand to SEQ ID NO: 36554
uuuccaagaaguaaacaaa

SEQ ID NO: 36556 - RNA, 19 nt, Artificial Sequence
  Description of Artificial Sequence: Synthetic oligonucleotide
  Sense strand starting at position 2203 of SEQ ID NO: 431
cugauagguuuguuuacuu

SEQ ID NO: 36557 - RNA, 19 nt, Artificial Sequence
  Description of Artificial Sequence: Synthetic oligonucleotide
  Antisense strand to SEQ ID NO: 36556
aaguaaacaaaccuaucag

SEQ ID NO: 36558 - RNA, 19 nt, Artificial Sequence
  Description of Artificial Sequence: Synthetic oligonucleotide
  Sense strand starting at position 2057 of SEQ ID NO: 431
ggagaaugauaacaauauc

SEQ ID NO: 36559 - RNA, 19 nt, Artificial Sequence
  Description of Artificial Sequence: Synthetic oligonucleotide
  Antisense strand to SEQ ID NO: 36558
gauauuguuaucauucucc

SEQ ID NO: 36560 - RNA, 19 nt, Artificial Sequence
  Description of Artificial Sequence: Synthetic oligonucleotide
  Sense strand starting at position 2054 of SEQ ID NO: 431
auaggagaaugauaacaau

SEQ ID NO: 36561 - RNA, 19 nt, Artificial Sequence
  Description of Artificial Sequence: Synthetic oligonucleotide
  Antisense strand to SEQ ID NO: 36560
auuguuaucauucuccuau

SEQ ID NO: 36562 - RNA, 19 nt, Artificial Sequence
  Description of Artificial Sequence: Synthetic oligonucleotide
  Sense strand starting at position 1986 of SEQ ID NO: 431
ucggaagugguuuaucaca

SEQ ID NO: 36563 - RNA, 19 nt, Artificial Sequence
  Description of Artificial Sequence: Synthetic oligonucleotide
  Antisense strand to SEQ ID NO: 36562
ugugauaaaccacuuccga

SEQ ID NO: 36564 - RNA, 19 nt, Artificial Sequence
  Description of Artificial Sequence: Synthetic oligonucleotide
  Sense strand starting at position 1546 of SEQ ID NO: 431
ccuaaugguuaacuuguua

SEQ ID NO: 36565 - RNA, 19 nt, Artificial Sequence
  Description of Artificial Sequence: Synthetic oligonucleotide
  Antisense strand to SEQ ID NO: 36564
uaacaaguuaaccauuagg

SEQ ID NO: 36566 - RNA, 19 nt, Artificial Sequence
  Description of Artificial Sequence: Synthetic oligonucleotide
  Sense strand starting at position 1493 of SEQ ID NO: 431
auaucacucugaguuaugu

SEQ ID NO: 36567 - RNA, 19 nt, Artificial Sequence
  Description of Artificial Sequence: Synthetic oligonucleotide
  Antisense strand to SEQ ID NO: 36566
acauaacucagagugauau

SEQ ID NO: 36568 - RNA, 19 nt, Artificial Sequence
  Description of Artificial Sequence: Synthetic oligonucleotide
  Sense strand starting at position 1490 of SEQ ID NO: 431
aguauaucacucugaguua

SEQ ID NO: 36569 - RNA, 19 nt, Artificial Sequence
  Description of Artificial Sequence: Synthetic oligonucleotide
  Antisense strand to SEQ ID NO: 36568
uaacucagagugauauacu

SEQ ID NO: 36570 - RNA, 19 nt, Artificial Sequence
  Description of Artificial Sequence: Synthetic oligonucleotide
  Sense strand starting at position 1477 of SEQ ID NO: 431
aucaguugccaacaguaua

SEQ ID NO: 36571 - RNA, 19 nt, Artificial Sequence
  Description of Artificial Sequence: Synthetic oligonucleotide
  Antisense strand to SEQ ID NO: 36570
uauacuguuggcaacugau

SEQ ID NO: 36572 - RNA, 19 nt, Artificial Sequence
  Description of Artificial Sequence: Synthetic oligonucleotide
  Sense strand starting at position 1439 of SEQ ID NO: 431
ugacauaauccacagcagu

SEQ ID NO: 36573 - RNA, 19 nt, Artificial Sequence
  Description of Artificial Sequence: Synthetic oligonucleotide
  Antisense strand to SEQ ID NO: 36572
acugcuguggauuauguca

SEQ ID NO: 36574 - RNA, 19 nt, Artificial Sequence
  Description of Artificial Sequence: Synthetic oligonucleotide
  Sense strand starting at position 1364 of SEQ ID NO: 431
aaaggaucugugcaucuca

SEQ ID NO: 36575 - RNA, 19 nt, Artificial Sequence
  Description of Artificial Sequence: Synthetic oligonucleotide
  Antisense strand to SEQ ID NO: 36574
ugagaugcacagauccuuu

SEQ ID NO: 36576 - RNA, 19 nt, Artificial Sequence
  Description of Artificial Sequence: Synthetic oligonucleotide
  Sense strand starting at position 1253 of SEQ ID NO: 431
guucuuauaucagagauuu

SEQ ID NO: 36577 - RNA, 19 nt, Artificial Sequence
  Description of Artificial Sequence: Synthetic oligonucleotide
  Antisense strand to SEQ ID NO: 36576
aaaucucugauauaagaac

SEQ ID NO: 36578 - RNA, 19 nt, Artificial Sequence
  Description of Artificial Sequence: Synthetic oligonucleotide
  Sense strand starting at position 1242 of SEQ ID NO: 431
aggucaggguuguucuuau

SEQ ID NO: 36579 - RNA, 19 nt, Artificial Sequence
  Description of Artificial Sequence: Synthetic oligonucleotide
  Antisense strand to SEQ ID NO: 36578
auaagaacaacccugaccu

SEQ ID NO: 36580 - RNA, 19 nt, Artificial Sequence
  Description of Artificial Sequence: Synthetic oligonucleotide
  Sense strand starting at position 1025 of SEQ ID NO: 431
guguuacagccagauucca

SEQ ID NO: 36581 - RNA, 19 nt, Artificial Sequence
  Description of Artificial Sequence: Synthetic oligonucleotide
  Antisense strand to SEQ ID NO: 36580
uggaaucuggcuguaacac

SEQ ID NO: 36582 - RNA, 19 nt, Artificial Sequence
  Description of Artificial Sequence: Synthetic oligonucleotide
  Sense strand starting at position 558 of SEQ ID NO: 431
gcuuuauggugagugacac

SEQ ID NO: 36583 - RNA, 19 nt, Artificial Sequence
  Description of Artificial Sequence: Synthetic oligonucleotide
  Antisense strand to SEQ ID NO: 36582
gugucacucaccauaaagc

SEQ ID NO: 36584 - RNA, 19 nt, Artificial Sequence
  Description of Artificial Sequence: Synthetic oligonucleotide
  Sense strand starting at position 543 of SEQ ID NO: 431
ggguuaaguagguaagcuu

SEQ ID NO: 36585 - RNA, 19 nt, Artificial Sequence
  Description of Artificial Sequence: Synthetic oligonucleotide
  Antisense strand to SEQ ID NO: 36584
aagcuuaccuacuuaaccc

SEQ ID NO: 36586 - RNA, 19 nt, Artificial Sequence
  Description of Artificial Sequence: Synthetic oligonucleotide
  Sense strand starting at position 533 of SEQ ID NO: 431
gauccucuuuggguuaagu

SEQ ID NO: 36587 - RNA, 19 nt, Artificial Sequence
  Description of Artificial Sequence: Synthetic oligonucleotide
  Antisense strand to SEQ ID NO: 36586
acuuaacccaaagaggauc

SEQ ID NO: 36588 - RNA, 19 nt, Artificial Sequence
  Description of Artificial Sequence: Synthetic oligonucleotide
  Sense strand starting at position 530 of SEQ ID NO: 431
ccugauccucuuuggguua

SEQ ID NO: 36589 - RNA, 19 nt, Artificial Sequence
  Description of Artificial Sequence: Synthetic oligonucleotide
  Antisense strand to SEQ ID NO: 36588
uaacccaaagaggaucagg

SEQ ID NO: 36590 - RNA, 19 nt, Artificial Sequence
  Description of Artificial Sequence: Synthetic oligonucleotide
  Sense strand starting at position 294 of SEQ ID NO: 431
agcucuagucacuauauac

SEQ ID NO: 36591 - RNA, 19 nt, Artificial Sequence
  Description of Artificial Sequence: Synthetic oligonucleotide
  Antisense strand to SEQ ID NO: 36590
guauauagugacuagagcu

SEQ ID NO: 36592 - RNA, 19 nt, Artificial Sequence
  Description of Artificial Sequence: Synthetic oligonucleotide
  Sense strand starting at position 287 of SEQ ID NO: 431
cuuugaaagcucuagucac

SEQ ID NO: 36593 - RNA, 19 nt, Artificial Sequence
  Description of Artificial Sequence: Synthetic oligonucleotide
  Antisense strand to SEQ ID NO: 36592
gugacuagagcuuucaaag

SEQ ID NO: 36594 - RNA, 19 nt, Artificial Sequence
  Description of Artificial Sequence: Synthetic oligonucleotide
  Sense strand starting at position 241 of SEQ ID NO: 431
uacguaucucgggaggaaa

SEQ ID NO: 36595 - RNA, 19 nt, Artificial Sequence
  Description of Artificial Sequence: Synthetic oligonucleotide
  Antisense strand to SEQ ID NO: 36594
uuuccucccgagauacgua

SEQ ID NO: 36596 - RNA, 19 nt, Artificial Sequence
  Description of Artificial Sequence: Synthetic oligonucleotide
  Sense strand starting at position 11 of SEQ ID NO: 431
gaagguuguuggaguagag

SEQ ID NO: 36597 - RNA, 19 nt, Artificial Sequence
  Description of Artificial Sequence: Synthetic oligonucleotide
  Antisense strand to SEQ ID NO: 36596
cucuacuccaacaaccuuc

SEQ ID NO: 36598 - RNA, 19 nt, Artificial Sequence
  Description of Artificial Sequence: Synthetic oligonucleotide
  Sense strand starting at position 7 of SEQ ID NO: 431
gcaagaagguuguuggagu

SEQ ID NO: 36599 - RNA, 19 nt, Artificial Sequence
  Description of Artificial Sequence: Synthetic oligonucleotide
  Antisense strand to SEQ ID NO: 36598
acuccaacaaccuucuugc

SEQ ID NO: 36600 - RNA, 19 nt, Artificial Sequence
  Description of Artificial Sequence: Synthetic oligonucleotide
  Sense strand starting at position 3850 of SEQ ID NO: 432
agggucuuacccuaaaguu

SEQ ID NO: 36601 - RNA, 19 nt, Artificial Sequence
  Description of Artificial Sequence: Synthetic oligonucleotide
  Antisense strand to SEQ ID NO: 36600
aacuuuaggguaagacccu

SEQ ID NO: 36602 - RNA, 19 nt, Artificial Sequence
  Description of Artificial Sequence: Synthetic oligonucleotide
  Sense strand starting at position 3800 of SEQ ID NO: 432
ggugcucuccuugaagaau

SEQ ID NO: 36603 - RNA, 19 nt, Artificial Sequence
  Description of Artificial Sequence: Synthetic oligonucleotide
  Antisense strand to SEQ ID NO: 36602
auucuucaaggagagcacc

SEQ ID NO: 36604 - RNA, 19 nt, Artificial Sequence
  Description of Artificial Sequence: Synthetic oligonucleotide
  Sense strand starting at position 3617 of SEQ ID NO: 432
aguaaacucucuguugaau

SEQ ID NO: 36605 - RNA, 19 nt, Artificial Sequence
  Description of Artificial Sequence: Synthetic oligonucleotide
  Antisense strand to SEQ ID NO: 36604
auucaacagagaguuuacu

SEQ ID NO: 36606 - RNA, 19 nt, Artificial Sequence
  Description of Artificial Sequence: Synthetic oligonucleotide
  Sense strand starting at position 3615 of SEQ ID NO: 432
ucaguaaacucucuguuga

SEQ ID NO: 36607 - RNA, 19 nt, Artificial Sequence
  Description of Artificial Sequence: Synthetic oligonucleotide
  Antisense strand to SEQ ID NO: 36606
ucaacagagaguuuacuga

SEQ ID NO: 36608 - RNA, 19 nt, Artificial Sequence
  Description of Artificial Sequence: Synthetic oligonucleotide
  Sense strand starting at position 3500 of SEQ ID NO: 432
caguaugaucaugguaaca

SEQ ID NO: 36609 - RNA, 19 nt, Artificial Sequence
  Description of Artificial Sequence: Synthetic oligonucleotide
  Antisense strand to SEQ ID NO: 36608
uguuaccaugaucauacug

SEQ ID NO: 36610 - RNA, 19 nt, Artificial Sequence
  Description of Artificial Sequence: Synthetic oligonucleotide
  Sense strand starting at position 3491 of SEQ ID NO: 432
ucaccuuugcaguaugauc

SEQ ID NO: 36611 - RNA, 19 nt, Artificial Sequence
  Description of Artificial Sequence: Synthetic oligonucleotide
  Antisense strand to SEQ ID NO: 36610
gaucauacugcaaagguga

SEQ ID NO: 36612 - RNA, 19 nt, Artificial Sequence
  Description of Artificial Sequence: Synthetic oligonucleotide
  Sense strand starting at position 3431 of SEQ ID NO: 432
gccugagcuccauaacuaa

SEQ ID NO: 36613 - RNA, 19 nt, Artificial Sequence
  Description of Artificial Sequence: Synthetic oligonucleotide
  Antisense strand to SEQ ID NO: 36612
uuaguuauggagcucaggc

SEQ ID NO: 36614 - RNA, 19 nt, Artificial Sequence
  Description of Artificial Sequence: Synthetic oligonucleotide
  Sense strand starting at position 3429 of SEQ ID NO: 432
uggccugagcuccauaacu

SEQ ID NO: 36615 - RNA, 19 nt, Artificial Sequence
  Description of Artificial Sequence: Synthetic oligonucleotide
  Antisense strand to SEQ ID NO: 36614
aguuauggagcucaggcca

SEQ ID NO: 36616 - RNA, 19 nt, Artificial Sequence
  Description of Artificial Sequence: Synthetic oligonucleotide
  Sense strand starting at position 3310 of SEQ ID NO: 432
cacugcaauguugacagau

SEQ ID NO: 36617 - RNA, 19 nt, Artificial Sequence
  Description of Artificial Sequence: Synthetic oligonucleotide
  Antisense strand to SEQ ID NO: 36616
aucugucaacauugcagug

SEQ ID NO: 36618 - RNA, 19 nt, Artificial Sequence
  Description of Artificial Sequence: Synthetic oligonucleotide
  Sense strand starting at position 3290 of SEQ ID NO: 432
gaacuugggcuuugauauu

SEQ ID NO: 36619 - RNA, 19 nt, Artificial Sequence
  Description of Artificial Sequence: Synthetic oligonucleotide
  Antisense strand to SEQ ID NO: 36618
aauaucaaagcccaaguuc

SEQ ID NO: 36620 - RNA, 19 nt, Artificial Sequence
  Description of Artificial Sequence: Synthetic oligonucleotide
  Sense strand starting at position 3261 of SEQ ID NO: 432
ucuucuucccagcaagguu

SEQ ID NO: 36621 - RNA, 19 nt, Artificial Sequence
  Description of Artificial Sequence: Synthetic oligonucleotide
  Antisense strand to SEQ ID NO: 36620
aaccuugcugggaagaaga

SEQ ID NO: 36622 - RNA, 19 nt, Artificial Sequence
  Description of Artificial Sequence: Synthetic oligonucleotide
  Sense strand starting at position 3020 of SEQ ID NO: 432
cuucuuuguguuuaagaau

SEQ ID NO: 36623 - RNA, 19 nt, Artificial Sequence
  Description of Artificial Sequence: Synthetic oligonucleotide
  Antisense strand to SEQ ID NO: 36622
auucuuaaacacaaagaag

SEQ ID NO: 36624 - RNA, 19 nt, Artificial Sequence
  Description of Artificial Sequence: Synthetic oligonucleotide
  Sense strand starting at position 2900 of SEQ ID NO: 432
caagguugggaguauuauc

SEQ ID NO: 36625 - RNA, 19 nt, Artificial Sequence
  Description of Artificial Sequence: Synthetic oligonucleotide
  Antisense strand to SEQ ID NO: 36624
gauaauacucccaaccuug

SEQ ID NO: 36626 - RNA, 19 nt, Artificial Sequence
  Description of Artificial Sequence: Synthetic oligonucleotide
  Sense strand starting at position 2322 of SEQ ID NO: 432
gcaagauuuccuugccugu

SEQ ID NO: 36627 - RNA, 19 nt, Artificial Sequence
  Description of Artificial Sequence: Synthetic oligonucleotide
  Antisense strand to SEQ ID NO: 36626
acaggcaaggaaaucuugc

SEQ ID NO: 36628 - RNA, 19 nt, Artificial Sequence
  Description of Artificial Sequence: Synthetic oligonucleotide
  Sense strand starting at position 2182 of SEQ ID NO: 432
ucaguauaucuggacuguu

SEQ ID NO: 36629 - RNA, 19 nt, Artificial Sequence
  Description of Artificial Sequence: Synthetic oligonucleotide
  Antisense strand to SEQ ID NO: 36628
aacaguccagauauacuga

SEQ ID NO: 36630 - RNA, 19 nt, Artificial Sequence
  Description of Artificial Sequence: Synthetic oligonucleotide
  Sense strand starting at position 2174 of SEQ ID NO: 432
gcuggaaaucaguauaucu

SEQ ID NO: 36631 - RNA, 19 nt, Artificial Sequence
  Description of Artificial Sequence: Synthetic oligonucleotide
  Antisense strand to SEQ ID NO: 36630
agauauacugauuuccagc

SEQ ID NO: 36632 - RNA, 19 nt, Artificial Sequence
  Description of Artificial Sequence: Synthetic oligonucleotide
  Sense strand starting at position 2072 of SEQ ID NO: 432
aaucaugguugggcaagaa

SEQ ID NO: 36633 - RNA, 19 nt, Artificial Sequence
  Description of Artificial Sequence: Synthetic oligonucleotide
  Antisense strand to SEQ ID NO: 36632
uucuugcccaaccaugauu

SEQ ID NO: 36634 - RNA, 19 nt, Artificial Sequence
  Description of Artificial Sequence: Synthetic oligonucleotide
  Sense strand starting at position 2069 of SEQ ID NO: 432
cugaaucaugguugggcaa

SEQ ID NO: 36635 - RNA, 19 nt, Artificial Sequence
  Description of Artificial Sequence: Synthetic oligonucleotide
  Antisense strand to SEQ ID NO: 36634
uugcccaaccaugauucag

SEQ ID NO: 36636 - RNA, 19 nt, Artificial Sequence
  Description of Artificial Sequence: Synthetic oligonucleotide
  Sense strand starting at position 1998 of SEQ ID NO: 432
gggaccugccucuacaagu

SEQ ID NO: 36637 - RNA, 19 nt, Artificial Sequence
  Description of Artificial Sequence: Synthetic oligonucleotide
  Antisense strand to SEQ ID NO: 36636
acuuguagaggcagguccc

SEQ ID NO: 36638 - RNA, 19 nt, Artificial Sequence
  Description of Artificial Sequence: Synthetic oligonucleotide
  Sense strand starting at position 1651 of SEQ ID NO: 432
caccuuaauguuugagaug

SEQ ID NO: 36639 - RNA, 19 nt, Artificial Sequence
  Description of Artificial Sequence: Synthetic oligonucleotide
  Antisense strand to SEQ ID NO: 36638
caucucaaacauuaaggug

SEQ ID NO: 36640 - RNA, 19 nt, Artificial Sequence
  Description of Artificial Sequence: Synthetic oligonucleotide
  Sense strand starting at position 1650 of SEQ ID NO: 432
ucaccuuaauguuugagau

SEQ ID NO: 36641 - RNA, 19 nt, Artificial Sequence
  Description of Artificial Sequence: Synthetic oligonucleotide
  Antisense strand to SEQ ID NO: 36640
aucucaaacauuaagguga

SEQ ID NO: 36642 - RNA, 19 nt, Artificial Sequence
  Description of Artificial Sequence: Synthetic oligonucleotide
  Sense strand starting at position 1611 of SEQ ID NO: 432
gaucaaaugggaugcuagu

SEQ ID NO: 36643 - RNA, 19 nt, Artificial Sequence
  Description of Artificial Sequence: Synthetic oligonucleotide
  Antisense strand to SEQ ID NO: 36642
acuagcaucccauuugauc

SEQ ID NO: 36644 - RNA, 19 nt, Artificial Sequence
  Description of Artificial Sequence: Synthetic oligonucleotide
  Sense strand starting at position 1598 of SEQ ID NO: 432
aggcuacaggucugaucaa

SEQ ID NO: 36645 - RNA, 19 nt, Artificial Sequence
  Description of Artificial Sequence: Synthetic oligonucleotide
  Antisense strand to SEQ ID NO: 36644
uugaucagaccuguagccu

SEQ ID NO: 36646 - RNA, 19 nt, Artificial Sequence
  Description of Artificial Sequence: Synthetic oligonucleotide
  Sense strand starting at position 1485 of SEQ ID NO: 432
ugaacaaacuggcuuaguu

SEQ ID NO: 36647 - RNA, 19 nt, Artificial Sequence
  Description of Artificial Sequence: Synthetic oligonucleotide
  Antisense strand to SEQ ID NO: 36646
aacuaagccaguuuguuca

SEQ ID NO: 36648 - RNA, 19 nt, Artificial Sequence
  Description of Artificial Sequence: Synthetic oligonucleotide
  Sense strand starting at position 1243 of SEQ ID NO: 432
ugagaauucucacccucag

SEQ ID NO: 36649 - RNA, 19 nt, Artificial Sequence
  Description of Artificial Sequence: Synthetic oligonucleotide
  Antisense strand to SEQ ID NO: 36648
cugagggugagaauucuca

SEQ ID NO: 36650 - RNA, 19 nt, Artificial Sequence
  Description of Artificial Sequence: Synthetic oligonucleotide
  Sense strand starting at position 1240 of SEQ ID NO: 432
gccugagaauucucacccu

SEQ ID NO: 36651 - RNA, 19 nt, Artificial Sequence
  Description of Artificial Sequence: Synthetic oligonucleotide
  Antisense strand to SEQ ID NO: 36650
agggugagaauucucaggc

SEQ ID NO: 36652 - RNA, 19 nt, Artificial Sequence
  Description of Artificial Sequence: Synthetic oligonucleotide
  Sense strand starting at position 1232 of SEQ ID NO: 432
cccuuucugccugagaauu

SEQ ID NO: 36653 - RNA, 19 nt, Artificial Sequence
  Description of Artificial Sequence: Synthetic oligonucleotide
  Antisense strand to SEQ ID NO: 36652
aauucucaggcagaaaggg

SEQ ID NO: 36654 - RNA, 19 nt, Artificial Sequence
  Description of Artificial Sequence: Synthetic oligonucleotide
  Sense strand starting at position 1231 of SEQ ID NO: 432
acccuuucugccugagaau

SEQ ID NO: 36655 - RNA, 19 nt, Artificial Sequence
  Description of Artificial Sequence: Synthetic oligonucleotide
  Antisense strand to SEQ ID NO: 36654
auucucaggcagaaagggu

SEQ ID NO: 36656 - RNA, 19 nt, Artificial Sequence
  Description of Artificial Sequence: Synthetic oligonucleotide
  Sense strand starting at position 1117 of SEQ ID NO: 432
aucauagagcuaugauccu

SEQ ID NO: 36657 - RNA, 19 nt, Artificial Sequence
  Description of Artificial Sequence: Synthetic oligonucleotide
  Antisense strand to SEQ ID NO: 36656
aggaucauagcucuaugau

SEQ ID NO: 36658 - RNA, 19 nt, Artificial Sequence
  Description of Artificial Sequence: Synthetic oligonucleotide
  Sense strand starting at position 876 of SEQ ID NO: 432
agcccuagacuuugggaaa

SEQ ID NO: 36659 - RNA, 19 nt, Artificial Sequence
  Description of Artificial Sequence: Synthetic oligonucleotide
  Antisense strand to SEQ ID NO: 36658
uuucccaaagucuagggcu

SEQ ID NO: 36660 - RNA, 19 nt, Artificial Sequence
  Description of Artificial Sequence: Synthetic oligonucleotide
  Sense strand starting at position 385 of SEQ ID NO: 432
cugagaaacuacuuaggcu

SEQ ID NO: 36661 - RNA, 19 nt, Artificial Sequence
  Description of Artificial Sequence: Synthetic oligonucleotide
  Antisense strand to SEQ ID NO: 36660
agccuaaguaguuucucag

SEQ ID NO: 36662 - RNA, 19 nt, Artificial Sequence
  Description of Artificial Sequence: Synthetic oligonucleotide
  Sense strand starting at position 352 of SEQ ID NO: 432
aguacuccauaaguuacaa

SEQ ID NO: 36663 - RNA, 19 nt, Artificial Sequence
  Description of Artificial Sequence: Synthetic oligonucleotide
  Antisense strand to SEQ ID NO: 36662
uuguaacuuauggaguacu

SEQ ID NO: 36664 - RNA, 19 nt, Artificial Sequence
  Description of Artificial Sequence: Synthetic oligonucleotide
  Sense strand starting at position 297 of SEQ ID NO: 432
gcucauccucaguaggaua

SEQ ID NO: 36665 - RNA, 19 nt, Artificial Sequence
  Description of Artificial Sequence: Synthetic oligonucleotide
  Antisense strand to SEQ ID NO: 36664
uauccuacugaggaugagc

SEQ ID NO: 36666 - RNA, 19 nt, Artificial Sequence
  Description of Artificial Sequence: Synthetic oligonucleotide
  Sense strand starting at position 296 of SEQ ID NO: 432
agcucauccucaguaggau

SEQ ID NO: 36667 - RNA, 19 nt, Artificial Sequence
  Description of Artificial Sequence: Synthetic oligonucleotide
  Antisense strand to SEQ ID NO: 36666
auccuacugaggaugagcu

SEQ ID NO: 36668 - RNA, 19 nt, Artificial Sequence
  Description of Artificial Sequence: Synthetic oligonucleotide
  Sense strand starting at position 256 of SEQ ID NO: 432
gguaaauggguauagucau

SEQ ID NO: 36669 - RNA, 19 nt, Artificial Sequence
  Description of Artificial Sequence: Synthetic oligonucleotide
  Antisense strand to SEQ ID NO: 36668
augacuauacccauuuacc

SEQ ID NO: 36670 - RNA, 19 nt, Artificial Sequence
  Description of Artificial Sequence: Synthetic oligonucleotide
  Sense strand starting at position 253 of SEQ ID NO: 432
gaugguaaauggguauagu

SEQ ID NO: 36671 - RNA, 19 nt, Artificial Sequence
  Description of Artificial Sequence: Synthetic oligonucleotide
  Antisense strand to SEQ ID NO: 36670
acuauacccauuuaccauc

SEQ ID NO: 36672 - RNA, 19 nt, Artificial Sequence
  Description of Artificial Sequence: Synthetic oligonucleotide
  Sense strand starting at position 244 of SEQ ID NO: 432
uccugacaggaugguaaau

SEQ ID NO: 36673 - RNA, 19 nt, Artificial Sequence
  Description of Artificial Sequence: Synthetic oligonucleotide
  Antisense strand to SEQ ID NO: 36672
auuuaccauccugucagga

SEQ ID NO: 36674 - RNA, 19 nt, Artificial Sequence
  Description of Artificial Sequence: Synthetic oligonucleotide
  Sense strand starting at position 236 of SEQ ID NO: 432
uuuauugcuccugacagga

SEQ ID NO: 36675 - RNA, 19 nt, Artificial Sequence
  Description of Artificial Sequence: Synthetic oligonucleotide
  Antisense strand to SEQ ID NO: 36674
uccugucaggagcaauaaa

SEQ ID NO: 36676 - RNA, 19 nt, Artificial Sequence
  Description of Artificial Sequence: Synthetic oligonucleotide
  Sense strand starting at position 25 of SEQ ID NO: 432
guuccucuauagguggaaa

SEQ ID NO: 36677 - RNA, 19 nt, Artificial Sequence
  Description of Artificial Sequence: Synthetic oligonucleotide
  Antisense strand to SEQ ID NO: 36676
uuuccaccuauagaggaac

SEQ ID NO: 36678 - RNA, 19 nt, Artificial Sequence
  Description of Artificial Sequence: Synthetic oligonucleotide
  Sense strand starting at position 18 of SEQ ID NO: 432
aggugaaguuccucuauag

SEQ ID NO: 36679 - RNA, 19 nt, Artificial Sequence
  Description of Artificial Sequence: Synthetic oligonucleotide
  Antisense strand to SEQ ID NO: 36678
cuauagaggaacuucaccu

SEQ ID NO: 36680 - RNA, 19 nt, Artificial Sequence
  Description of Artificial Sequence: Synthetic oligonucleotide
  Sense strand starting at position 3911 of SEQ ID NO: 433
uugguuuauuucuaaguuc

SEQ ID NO: 36681 - RNA, 19 nt, Artificial Sequence
  Description of Artificial Sequence: Synthetic oligonucleotide
  Antisense strand to SEQ ID NO: 36680
gaacuuagaaauaaaccaa

SEQ ID NO: 36682 - RNA, 19 nt, Artificial Sequence
  Description of Artificial Sequence: Synthetic oligonucleotide
  Sense strand starting at position 3806 of SEQ ID NO: 433
caccauguggcuugccaau

SEQ ID NO: 36683 - RNA, 19 nt, Artificial Sequence
  Description of Artificial Sequence: Synthetic oligonucleotide
  Antisense strand to SEQ ID NO: 36682
auuggcaagccacauggug

SEQ ID NO: 36684 - RNA, 19 nt, Artificial Sequence
  Description of Artificial Sequence: Synthetic oligonucleotide
  Sense strand starting at position 3681 of SEQ ID NO: 433
cuaggaggguucuucugaa

SEQ ID NO: 36685 - RNA, 19 nt, Artificial Sequence
  Description of Artificial Sequence: Synthetic oligonucleotide
  Antisense strand to SEQ ID NO: 36684
uucagaagaacccuccuag

SEQ ID NO: 36686 - RNA, 19 nt, Artificial Sequence
  Description of Artificial Sequence: Synthetic oligonucleotide
  Sense strand starting at position 3507 of SEQ ID NO: 433
cuguauagauugcagagau

SEQ ID NO: 36687 - RNA, 19 nt, Artificial Sequence
  Description of Artificial Sequence: Synthetic oligonucleotide
  Antisense strand to SEQ ID NO: 36686
aucucugcaaucuauacag

SEQ ID NO: 36688 - RNA, 19 nt, Artificial Sequence
  Description of Artificial Sequence: Synthetic oligonucleotide
  Sense strand starting at position 3498 of SEQ ID NO: 433
cuuugucagcuguauagau

SEQ ID NO: 36689 - RNA, 19 nt, Artificial Sequence
  Description of Artificial Sequence: Synthetic oligonucleotide
  Antisense strand to SEQ ID NO: 36688
aucuauacagcugacaaag

SEQ ID NO: 36690 - RNA, 19 nt, Artificial Sequence
  Description of Artificial Sequence: Synthetic oligonucleotide
  Sense strand starting at position 3301 of SEQ ID NO: 433
gagguaucgcauuguaguu

SEQ ID NO: 36691 - RNA, 19 nt, Artificial Sequence
  Description of Artificial Sequence: Synthetic oligonucleotide
  Antisense strand to SEQ ID NO: 36690
aacuacaaugcgauaccuc

SEQ ID NO: 36692 - RNA, 19 nt, Artificial Sequence
  Description of Artificial Sequence: Synthetic oligonucleotide
  Sense strand starting at position 2222 of SEQ ID NO: 433
uauuguugucauuguugau

SEQ ID NO: 36693 - RNA, 19 nt, Artificial Sequence
  Description of Artificial Sequence: Synthetic oligonucleotide
  Antisense strand to SEQ ID NO: 36692
aucaacaaugacaacaaua

SEQ ID NO: 36694 - RNA, 19 nt, Artificial Sequence
  Description of Artificial Sequence: Synthetic oligonucleotide
  Sense strand starting at position 2218 of SEQ ID NO: 433
ucuuuauuguugucauugu

SEQ ID NO: 36695 - RNA, 19 nt, Artificial Sequence
  Description of Artificial Sequence: Synthetic oligonucleotide
  Antisense strand to SEQ ID NO: 36694
acaaugacaacaauaaaga

SEQ ID NO: 36696 - RNA, 19 nt, Artificial Sequence
  Description of Artificial Sequence: Synthetic oligonucleotide
  Sense strand starting at position 2118 of SEQ ID NO: 433
cugauugcuuaauuauaug

SEQ ID NO: 36697 - RNA, 19 nt, Artificial Sequence
  Description of Artificial Sequence: Synthetic oligonucleotide
  Antisense strand to SEQ ID NO: 36696
cauauaauuaagcaaucag

SEQ ID NO: 36698 - RNA, 19 nt, Artificial Sequence
  Description of Artificial Sequence: Synthetic oligonucleotide
  Sense strand starting at position 2063 of SEQ ID NO: 433
ugggauguugacuguauaa

SEQ ID NO: 36699 - RNA, 19 nt, Artificial Sequence
  Description of Artificial Sequence: Synthetic oligonucleotide
  Antisense strand to SEQ ID NO: 36698
uuauacagucaacauccca

SEQ ID NO: 36700 - RNA, 19 nt, Artificial Sequence
  Description of Artificial Sequence: Synthetic oligonucleotide
  Sense strand starting at position 2062 of SEQ ID NO: 433
augggauguugacuguaua

SEQ ID NO: 36701 - RNA, 19 nt, Artificial Sequence
  Description of Artificial Sequence: Synthetic oligonucleotide
  Antisense strand to SEQ ID NO: 36700
uauacagucaacaucccau

SEQ ID NO: 36702 - RNA, 19 nt, Artificial Sequence
  Description of Artificial Sequence: Synthetic oligonucleotide
  Sense strand starting at position 2056 of SEQ ID NO: 433
cugauuaugggauguugac

SEQ ID NO: 36703 - RNA, 19 nt, Artificial Sequence
  Description of Artificial Sequence: Synthetic oligonucleotide
  Antisense strand to SEQ ID NO: 36702
gucaacaucccauaaucag

SEQ ID NO: 36704 - RNA, 19 nt, Artificial Sequence
  Description of Artificial Sequence: Synthetic oligonucleotide
  Sense strand starting at position 2046 of SEQ ID NO: 433
ccaguauuggcugauuaug

SEQ ID NO: 36705 - RNA, 19 nt, Artificial Sequence
  Description of Artificial Sequence: Synthetic oligonucleotide
  Antisense strand to SEQ ID NO: 36704
cauaaucagccaauacugg

SEQ ID NO: 36706 - RNA, 19 nt, Artificial Sequence
  Description of Artificial Sequence: Synthetic oligonucleotide
  Sense strand starting at position 2045 of SEQ ID NO: 433
accaguauuggcugauuau

SEQ ID NO: 36707 - RNA, 19 nt, Artificial Sequence
  Description of Artificial Sequence: Synthetic oligonucleotide
  Antisense strand to SEQ ID NO: 36706
auaaucagccaauacuggu

SEQ ID NO: 36708 - RNA, 19 nt, Artificial Sequence
  Description of Artificial Sequence: Synthetic oligonucleotide
  Sense strand starting at position 2043 of SEQ ID NO: 433
uuaccaguauuggcugauu

SEQ ID NO: 36709 - RNA, 19 nt, Artificial Sequence
  Description of Artificial Sequence: Synthetic oligonucleotide
  Antisense strand to SEQ ID NO: 36708
aaucagccaauacugguaa

SEQ ID NO: 36710 - RNA, 19 nt, Artificial Sequence
  Description of Artificial Sequence: Synthetic oligonucleotide
  Sense strand starting at position 2020 of SEQ ID NO: 433
cucuuuauauacguuccua

SEQ ID NO: 36711 - RNA, 19 nt, Artificial Sequence
  Description of Artificial Sequence: Synthetic oligonucleotide
  Antisense strand to SEQ ID NO: 36710
uaggaacguauauaaagag

SEQ ID NO: 36712 - RNA, 19 nt, Artificial Sequence
  Description of Artificial Sequence: Synthetic oligonucleotide
  Sense strand starting at position 1990 of SEQ ID NO: 433
ugguuuguucaagaggcuu

SEQ ID NO: 36713 - RNA, 19 nt, Artificial Sequence
  Description of Artificial Sequence: Synthetic oligonucleotide
  Antisense strand to SEQ ID NO: 36712
aagccucuugaacaaacca

SEQ ID NO: 36714 - RNA, 19 nt, Artificial Sequence
  Description of Artificial Sequence: Synthetic oligonucleotide
  Sense strand starting at position 1638 of SEQ ID NO: 433
ugaguugcugaauaugcua

SEQ ID NO: 36715 - RNA, 19 nt, Artificial Sequence
  Description of Artificial Sequence: Synthetic oligonucleotide
  Antisense strand to SEQ ID NO: 36714
uagcauauucagcaacuca

SEQ ID NO: 36716 - RNA, 19 nt, Artificial Sequence
  Description of Artificial Sequence: Synthetic oligonucleotide
  Sense strand starting at position 1635 of SEQ ID NO: 433
guuugaguugcugaauaug

SEQ ID NO: 36717 - RNA, 19 nt, Artificial Sequence
  Description of Artificial Sequence: Synthetic oligonucleotide
  Antisense strand to SEQ ID NO: 36716
cauauucagcaacucaaac

SEQ ID NO: 36718 - RNA, 19 nt, Artificial Sequence
  Description of Artificial Sequence: Synthetic oligonucleotide
  Sense strand starting at position 1633 of SEQ ID NO: 433
auguuugaguugcugaaua

SEQ ID NO: 36719 - RNA, 19 nt, Artificial Sequence
  Description of Artificial Sequence: Synthetic oligonucleotide
  Antisense strand to SEQ ID NO: 36718
uauucagcaacucaaacau

SEQ ID NO: 36720 - RNA, 19 nt, Artificial Sequence
  Description of Artificial Sequence: Synthetic oligonucleotide
  Sense strand starting at position 1605 of SEQ ID NO: 433
uaauguucccgacacaaug

SEQ ID NO: 36721 - RNA, 19 nt, Artificial Sequence
  Description of Artificial Sequence: Synthetic oligonucleotide
  Antisense strand to SEQ ID NO: 36720
cauugugucgggaacauua

SEQ ID NO: 36722 - RNA, 19 nt, Artificial Sequence
  Description of Artificial Sequence: Synthetic oligonucleotide
  Sense strand starting at position 1561 of SEQ ID NO: 433
gauaaucuguuguguauuu

SEQ ID NO: 36723 - RNA, 19 nt, Artificial Sequence
  Description of Artificial Sequence: Synthetic oligonucleotide
  Antisense strand to SEQ ID NO: 36722
aaauacacaacagauuauc

SEQ ID NO: 36724 - RNA, 19 nt, Artificial Sequence
  Description of Artificial Sequence: Synthetic oligonucleotide
  Sense strand starting at position 1557 of SEQ ID NO: 433
uacugauaaucuguugugu

SEQ ID NO: 36725 - RNA, 19 nt, Artificial Sequence
  Description of Artificial Sequence: Synthetic oligonucleotide
  Antisense strand to SEQ ID NO: 36724
acacaacagauuaucagua

SEQ ID NO: 36726 - RNA, 19 nt, Artificial Sequence
  Description of Artificial Sequence: Synthetic oligonucleotide
  Sense strand starting at position 1477 of SEQ ID NO: 433
guuugucaauguguacaaa

SEQ ID NO: 36727 - RNA, 19 nt, Artificial Sequence
  Description of Artificial Sequence: Synthetic oligonucleotide
  Antisense strand to SEQ ID NO: 36726
uuuguacacauugacaaac

SEQ ID NO: 36728 - RNA, 19 nt, Artificial Sequence
  Description of Artificial Sequence: Synthetic oligonucleotide
  Sense strand starting at position 1474 of SEQ ID NO: 433
gaaguuugucaauguguac

SEQ ID NO: 36729 - RNA, 19 nt, Artificial Sequence
  Description of Artificial Sequence: Synthetic oligonucleotide
  Antisense strand to SEQ ID NO: 36728
guacacauugacaaacuuc

SEQ ID NO: 36730 - RNA, 19 nt, Artificial Sequence
  Description of Artificial Sequence: Synthetic oligonucleotide
  Sense strand starting at position 1470 of SEQ ID NO: 433
aagagaaguuugucaaugu

SEQ ID NO: 36731 - RNA, 19 nt, Artificial Sequence
  Description of Artificial Sequence: Synthetic oligonucleotide
  Antisense strand to SEQ ID NO: 36730
acauugacaaacuucucuu

SEQ ID NO: 36732 - RNA, 19 nt, Artificial Sequence
  Description of Artificial Sequence: Synthetic oligonucleotide
  Sense strand starting at position 1468 of SEQ ID NO: 433
ugaagagaaguuugucaau

SEQ ID NO: 36733 - RNA, 19 nt, Artificial Sequence
  Description of Artificial Sequence: Synthetic oligonucleotide
  Antisense strand to SEQ ID NO: 36732
auugacaaacuucucuuca

SEQ ID NO: 36734 - RNA, 19 nt, Artificial Sequence
  Description of Artificial Sequence: Synthetic oligonucleotide
  Sense strand starting at position 1418 of SEQ ID NO: 433
guagaaugauacuuauuag

SEQ ID NO: 36735 - RNA, 19 nt, Artificial Sequence
  Description of Artificial Sequence: Synthetic oligonucleotide
  Antisense strand to SEQ ID NO: 36734
cuaauaaguaucauucuac

SEQ ID NO: 36736 - RNA, 19 nt, Artificial Sequence
  Description of Artificial Sequence: Synthetic oligonucleotide
  Sense strand starting at position 1415 of SEQ ID NO: 433
agaguagaaugauacuuau

SEQ ID NO: 36737 - RNA, 19 nt, Artificial Sequence
  Description of Artificial Sequence: Synthetic oligonucleotide
  Antisense strand to SEQ ID NO: 36736
auaaguaucauucuacucu

SEQ ID NO: 36738 - RNA, 19 nt, Artificial Sequence
  Description of Artificial Sequence: Synthetic oligonucleotide
  Sense strand starting at position 1395 of SEQ ID NO: 433
aggguaucuuauggagaua

SEQ ID NO: 36739 - RNA, 19 nt, Artificial Sequence
  Description of Artificial Sequence: Synthetic oligonucleotide
  Antisense strand to SEQ ID NO: 36738
uaucuccauaagauacccu

SEQ ID NO: 36740 - RNA, 19 nt, Artificial Sequence
  Description of Artificial Sequence: Synthetic oligonucleotide
  Sense strand starting at position 1385 of SEQ ID NO: 433
gaacuaaaccaggguaucu

SEQ ID NO: 36741 - RNA, 19 nt, Artificial Sequence
  Description of Artificial Sequence: Synthetic oligonucleotide
  Antisense strand to SEQ ID NO: 36740
agauacccugguuuaguuc

SEQ ID NO: 36742 - RNA, 19 nt, Artificial Sequence
  Description of Artificial Sequence: Synthetic oligonucleotide
  Sense strand starting at position 1226 of SEQ ID NO: 433
uaaagugugguauauaaac

SEQ ID NO: 36743 - RNA, 19 nt, Artificial Sequence
  Description of Artificial Sequence: Synthetic oligonucleotide
  Antisense strand to SEQ ID NO: 36742
guuuauauaccacacuuua

SEQ ID NO: 36744 - RNA, 19 nt, Artificial Sequence
  Description of Artificial Sequence: Synthetic oligonucleotide
  Sense strand starting at position 1224 of SEQ ID NO: 433
gauaaagugugguauauaa

SEQ ID NO: 36745 - RNA, 19 nt, Artificial Sequence
  Description of Artificial Sequence: Synthetic oligonucleotide
  Antisense strand to SEQ ID NO: 36744
uuauauaccacacuuuauc

SEQ ID NO: 36746 - RNA, 19 nt, Artificial Sequence
  Description of Artificial Sequence: Synthetic oligonucleotide
  Sense strand starting at position 1000 of SEQ ID NO: 433
auuauauaccauuggugaa

SEQ ID NO: 36747 - RNA, 19 nt, Artificial Sequence
  Description of Artificial Sequence: Synthetic oligonucleotide
  Antisense strand to SEQ ID NO: 36746
uucaccaaugguauauaau

SEQ ID NO: 36748 - RNA, 19 nt, Artificial Sequence
  Description of Artificial Sequence: Synthetic oligonucleotide
  Sense strand starting at position 939 of SEQ ID NO: 433
uggaaugguuauuaccaaa

SEQ ID NO: 36749 - RNA, 19 nt, Artificial Sequence
  Description of Artificial Sequence: Synthetic oligonucleotide
  Antisense strand to SEQ ID NO: 36748
uuugguaauaaccauucca

SEQ ID NO: 36750 - RNA, 19 nt, Artificial Sequence
  Description of Artificial Sequence: Synthetic oligonucleotide
  Sense strand starting at position 938 of SEQ ID NO: 433
uuggaaugguuauuaccaa

SEQ ID NO: 36751 - RNA, 19 nt, Artificial Sequence
  Description of Artificial Sequence: Synthetic oligonucleotide
  Antisense strand to SEQ ID NO: 36750
uugguaauaaccauuccaa

SEQ ID NO: 36752 - RNA, 19 nt, Artificial Sequence
  Description of Artificial Sequence: Synthetic oligonucleotide
  Sense strand starting at position 869 of SEQ ID NO: 433
aguggucaacaucauuaau

SEQ ID NO: 36753 - RNA, 19 nt, Artificial Sequence
  Description of Artificial Sequence: Synthetic oligonucleotide
  Antisense strand to SEQ ID NO: 36752
auuaaugauguugaccacu

SEQ ID NO: 36754 - RNA, 19 nt, Artificial Sequence
  Description of Artificial Sequence: Synthetic oligonucleotide
  Sense strand starting at position 247 of SEQ ID NO: 433
ccauauuguccucacugca

SEQ ID NO: 36755 - RNA, 19 nt, Artificial Sequence
  Description of Artificial Sequence: Synthetic oligonucleotide
  Antisense strand to SEQ ID NO: 36754
ugcagugaggacaauaugg

SEQ ID NO: 36756 - RNA, 19 nt, Artificial Sequence
  Description of Artificial Sequence: Synthetic oligonucleotide
  Sense strand starting at position 203 of SEQ ID NO: 433
aguguagaacccugucuaa

SEQ ID NO: 36757 - RNA, 19 nt, Artificial Sequence
  Description of Artificial Sequence: Synthetic oligonucleotide
  Antisense strand to SEQ ID NO: 36756
uuagacaggguucuacacu

SEQ ID NO: 36758 - RNA, 19 nt, Artificial Sequence
  Description of Artificial Sequence: Synthetic oligonucleotide
  Sense strand starting at position 72 of SEQ ID NO: 433
ugcucuuuagcaugucaua

SEQ ID NO: 36759 - RNA, 19 nt, Artificial Sequence
  Description of Artificial Sequence: Synthetic oligonucleotide
  Antisense strand to SEQ ID NO: 36758
uaugacaugcuaaagagca

SEQ ID NO: 36760 - RNA, 19 nt, Artificial Sequence
  Description of Artificial Sequence: Synthetic oligonucleotide
  Sense strand starting at position 507 of SEQ ID NO: 434
aagcuaguaagugguagaa

SEQ ID NO: 36761 - RNA, 19 nt, Artificial Sequence
  Description of Artificial Sequence: Synthetic oligonucleotide
  Antisense strand to SEQ ID NO: 36760
uucuaccacuuacuagcuu

SEQ ID NO: 36762 - RNA, 19 nt, Artificial Sequence
  Description of Artificial Sequence: Synthetic oligonucleotide
  Sense strand starting at position 655 of SEQ ID NO: 434
uagggagaguaguuuauag

SEQ ID NO: 36763 - RNA, 19 nt, Artificial Sequence
  Description of Artificial Sequence: Synthetic oligonucleotide
  Antisense strand to SEQ ID NO: 36762
cuauaaacuacucucccua

SEQ ID NO: 36764 - RNA, 19 nt, Artificial Sequence
  Description of Artificial Sequence: Synthetic oligonucleotide
  Sense strand starting at position 657 of SEQ ID NO: 434
gggagaguaguuuauagua

SEQ ID NO: 36765 - RNA, 19 nt, Artificial Sequence
  Description of Artificial Sequence: Synthetic oligonucleotide
  Antisense strand to SEQ ID NO: 36764
uacuauaaacuacucuccc

SEQ ID NO: 36766 - RNA, 19 nt, Artificial Sequence
  Description of Artificial Sequence: Synthetic oligonucleotide
  Sense strand starting at position 773 of SEQ ID NO: 434
acgaaagcacaugaguaau

SEQ ID NO: 36767 - RNA, 19 nt, Artificial Sequence
  Description of Artificial Sequence: Synthetic oligonucleotide
  Antisense strand to SEQ ID NO: 36766
auuacucaugugcuuucgu

SEQ ID NO: 36768 - RNA, 19 nt, Artificial Sequence
  Description of Artificial Sequence: Synthetic oligonucleotide
  Sense strand starting at position 841 of SEQ ID NO: 434
cuagaaguaccaggguaua

SEQ ID NO: 36769 - RNA, 19 nt, Artificial Sequence
  Description of Artificial Sequence: Synthetic oligonucleotide
  Antisense strand to SEQ ID NO: 36768
uauacccugguacuucuag

SEQ ID NO: 36770 - RNA, 19 nt, Artificial Sequence
  Description of Artificial Sequence: Synthetic oligonucleotide
  Sense strand starting at position 844 of SEQ ID NO: 434
gaaguaccaggguauaagu

SEQ ID NO: 36771 - RNA, 19 nt, Artificial Sequence
  Description of Artificial Sequence: Synthetic oligonucleotide
  Antisense strand to SEQ ID NO: 36770
acuuauacccugguacuuc

SEQ ID NO: 36772 - RNA, 19 nt, Artificial Sequence
  Description of Artificial Sequence: Synthetic oligonucleotide
  Sense strand starting at position 868 of SEQ ID NO: 434
ggcugcaacuuauuucgua

SEQ ID NO: 36773 - RNA, 19 nt, Artificial Sequence
  Description of Artificial Sequence: Synthetic oligonucleotide
  Antisense strand to SEQ ID NO: 36772
uacgaaauaaguugcagcc

SEQ ID NO: 36774 - RNA, 19 nt, Artificial Sequence
  Description of Artificial Sequence: Synthetic oligonucleotide
  Sense strand starting at position 869 of SEQ ID NO: 434
gcugcaacuuauuucguau

SEQ ID NO: 36775 - RNA, 19 nt, Artificial Sequence
  Description of Artificial Sequence: Synthetic oligonucleotide
  Antisense strand to SEQ ID NO: 36774
auacgaaauaaguugcagc

SEQ ID NO: 36776 - RNA, 19 nt, Artificial Sequence
  Description of Artificial Sequence: Synthetic oligonucleotide
  Sense strand starting at position 875 of SEQ ID NO: 434
acuuauuucguaugcuuau

SEQ ID NO: 36777 - RNA, 19 nt, Artificial Sequence
  Description of Artificial Sequence: Synthetic oligonucleotide
  Antisense strand to SEQ ID NO: 36776
auaagcauacgaaauaagu

SEQ ID NO: 36778 - RNA, 19 nt, Artificial Sequence
  Description of Artificial Sequence: Synthetic oligonucleotide
  Sense strand starting at position 958 of SEQ ID NO: 434
cgauaaagcuagucuggga

SEQ ID NO: 36779 - RNA, 19 nt, Artificial Sequence
  Description of Artificial Sequence: Synthetic oligonucleotide
  Antisense strand to SEQ ID NO: 36778
ucccagacuagcuuuaucg

SEQ ID NO: 36780 - RNA, 19 nt, Artificial Sequence
  Description of Artificial Sequence: Synthetic oligonucleotide
  Sense strand starting at position 962 of SEQ ID NO: 434
aaagcuagucugggaagaa

SEQ ID NO: 36781 - RNA, 19 nt, Artificial Sequence
  Description of Artificial Sequence: Synthetic oligonucleotide
  Antisense strand to SEQ ID NO: 36780
uucuucccagacuagcuuu

SEQ ID NO: 36782 - RNA, 19 nt, Artificial Sequence
  Description of Artificial Sequence: Synthetic oligonucleotide
  Sense strand starting at position 1044 of SEQ ID NO: 434
cagcuuauggugugucuaa

SEQ ID NO: 36783 - RNA, 19 nt, Artificial Sequence
  Description of Artificial Sequence: Synthetic oligonucleotide
  Antisense strand to SEQ ID NO: 36782
uuagacacaccauaagcug

SEQ ID NO: 36784 - RNA, 19 nt, Artificial Sequence
  Description of Artificial Sequence: Synthetic oligonucleotide
  Sense strand starting at position 1425 of SEQ ID NO: 434
uguuguuaacuguguuaau

SEQ ID NO: 36785 - RNA, 19 nt, Artificial Sequence
  Description of Artificial Sequence: Synthetic oligonucleotide
  Antisense strand to SEQ ID NO: 36784
auuaacacaguuaacaaca

SEQ ID NO: 36786 - RNA, 19 nt, Artificial Sequence
  Description of Artificial Sequence: Synthetic oligonucleotide
  Sense strand starting at position 1426 of SEQ ID NO: 434
guuguuaacuguguuaauu

SEQ ID NO: 36787 - RNA, 19 nt, Artificial Sequence
  Description of Artificial Sequence: Synthetic oligonucleotide
  Antisense strand to SEQ ID NO: 36786
aauuaacacaguuaacaac

SEQ ID NO: 36788 - RNA, 19 nt, Artificial Sequence
  Description of Artificial Sequence: Synthetic oligonucleotide
  Sense strand starting at position 1484 of SEQ ID NO: 434
ccgagcuauucugcugaca

SEQ ID NO: 36789 - RNA, 19 nt, Artificial Sequence
  Description of Artificial Sequence: Synthetic oligonucleotide
  Antisense strand to SEQ ID NO: 36788
ugucagcagaauagcucgg

SEQ ID NO: 36790 - RNA, 19 nt, Artificial Sequence
  Description of Artificial Sequence: Synthetic oligonucleotide
  Sense strand starting at position 1963 of SEQ ID NO: 434
ugggccucgucaucgaauu

SEQ ID NO: 36791 - RNA, 19 nt, Artificial Sequence
  Description of Artificial Sequence: Synthetic oligonucleotide
  Antisense strand to SEQ ID NO: 36790
aauucgaugacgaggccca

SEQ ID NO: 36792 - RNA, 19 nt, Artificial Sequence
  Description of Artificial Sequence: Synthetic oligonucleotide
  Sense strand starting at position 1973 of SEQ ID NO: 434
caucgaauuguucggcuga

SEQ ID NO: 36793 - RNA, 19 nt, Artificial Sequence
  Description of Artificial Sequence: Synthetic oligonucleotide
  Antisense strand to SEQ ID NO: 36792
ucagccgaacaauucgaug

SEQ ID NO: 36794 - RNA, 19 nt, Artificial Sequence
  Description of Artificial Sequence: Synthetic oligonucleotide
  Sense strand starting at position 2021 of SEQ ID NO: 434
cgcugauuggccucguuga

SEQ ID NO: 36795 - RNA, 19 nt, Artificial Sequence
  Description of Artificial Sequence: Synthetic oligonucleotide
  Antisense strand to SEQ ID NO: 36794
ucaacgaggccaaucagcg

SEQ ID NO: 36796 - RNA, 19 nt, Artificial Sequence
  Description of Artificial Sequence: Synthetic oligonucleotide
  Sense strand starting at position 2116 of SEQ ID NO: 434
gcggaacucuuucugcgaa

SEQ ID NO: 36797 - RNA, 19 nt, Artificial Sequence
  Description of Artificial Sequence: Synthetic oligonucleotide
  Antisense strand to SEQ ID NO: 36796
uucgcagaaagaguuccgc

SEQ ID NO: 36798 - RNA, 19 nt, Artificial Sequence
  Description of Artificial Sequence: Synthetic oligonucleotide
  Sense strand starting at position 2119 of SEQ ID NO: 434
gaacucuuucugcgaagga

SEQ ID NO: 36799 - RNA, 19 nt, Artificial Sequence
  Description of Artificial Sequence: Synthetic oligonucleotide
  Antisense strand to SEQ ID NO: 36798
uccuucgcagaaagaguuc

SEQ ID NO: 36800 - RNA, 19 nt, Artificial Sequence
  Description of Artificial Sequence: Synthetic oligonucleotide
  Sense strand starting at position 2123 of SEQ ID NO: 434
ucuuucugcgaaggaaauc

SEQ ID NO: 36801 - RNA, 19 nt, Artificial Sequence
  Description of Artificial Sequence: Synthetic oligonucleotide
  Antisense strand to SEQ ID NO: 36800
gauuuccuucgcagaaaga

SEQ ID NO: 36802 - RNA, 19 nt, Artificial Sequence
  Description of Artificial Sequence: Synthetic oligonucleotide
  Sense strand starting at position 2133 of SEQ ID NO: 434
aaggaaaucucgccuggaa

SEQ ID NO: 36803 - RNA, 19 nt, Artificial Sequence
  Description of Artificial Sequence: Synthetic oligonucleotide
  Antisense strand to SEQ ID NO: 36802
uuccaggcgagauuuccuu

SEQ ID NO: 36804 - RNA, 19 nt, Artificial Sequence
  Description of Artificial Sequence: Synthetic oligonucleotide
  Sense strand starting at position 2135 of SEQ ID NO: 434
ggaaaucucgccuggaacu

SEQ ID NO: 36805 - RNA, 19 nt, Artificial Sequence
  Description of Artificial Sequence: Synthetic oligonucleotide
  Antisense strand to SEQ ID NO: 36804
aguuccaggcgagauuucc

SEQ ID NO: 36806 - RNA, 19 nt, Artificial Sequence
  Description of Artificial Sequence: Synthetic oligonucleotide
  Sense strand starting at position 2207 of SEQ ID NO: 434
aaguuugaauguguaacau

SEQ ID NO: 36807 - RNA, 19 nt, Artificial Sequence
  Description of Artificial Sequence: Synthetic oligonucleotide
  Antisense strand to SEQ ID NO: 36806
auguuacacauucaaacuu

SEQ ID NO: 36808 - RNA, 19 nt, Artificial Sequence
  Description of Artificial Sequence: Synthetic oligonucleotide
  Sense strand starting at position 2216 of SEQ ID NO: 434
uguguaacauucgccauga

SEQ ID NO: 36809 - RNA, 19 nt, Artificial Sequence
  Description of Artificial Sequence: Synthetic oligonucleotide
  Antisense strand to SEQ ID NO: 36808
ucauggcgaauguuacaca

SEQ ID NO: 36810 - RNA, 19 nt, Artificial Sequence
  Description of Artificial Sequence: Synthetic oligonucleotide
  Sense strand starting at position 2217 of SEQ ID NO: 434
guguaacauucgccaugaa

SEQ ID NO: 36811 - RNA, 19 nt, Artificial Sequence
  Description of Artificial Sequence: Synthetic oligonucleotide
  Antisense strand to SEQ ID NO: 36810
uucauggcgaauguuacac

SEQ ID NO: 36812 - RNA, 19 nt, Artificial Sequence
  Description of Artificial Sequence: Synthetic oligonucleotide
  Sense strand starting at position 2218 of SEQ ID NO: 434
uguaacauucgccaugaaa

SEQ ID NO: 36813 - RNA, 19 nt, Artificial Sequence
  Description of Artificial Sequence: Synthetic oligonucleotide
  Antisense strand to SEQ ID NO: 36812
uuucauggcgaauguuaca

SEQ ID NO: 36814 - RNA, 19 nt, Artificial Sequence
  Description of Artificial Sequence: Synthetic oligonucleotide
  Sense strand starting at position 2220 of SEQ ID NO: 434
uaacauucgccaugaaacg

SEQ ID NO: 36815 - RNA, 19 nt, Artificial Sequence
  Description of Artificial Sequence: Synthetic oligonucleotide
  Antisense strand to SEQ ID NO: 36814
cguuucauggcgaauguua

SEQ ID NO: 36816 - RNA, 19 nt, Artificial Sequence
  Description of Artificial Sequence: Synthetic oligonucleotide
  Sense strand starting at position 2574 of SEQ ID NO: 434
acgaaugacaacuguaguu

SEQ ID NO: 36817 - RNA, 19 nt, Artificial Sequence
  Description of Artificial Sequence: Synthetic oligonucleotide
  Antisense strand to SEQ ID NO: 36816
aacuacaguugucauucgu

SEQ ID NO: 36818 - RNA, 19 nt, Artificial Sequence
  Description of Artificial Sequence: Synthetic oligonucleotide
  Sense strand starting at position 2576 of SEQ ID NO: 434
gaaugacaacuguaguucu

SEQ ID NO: 36819 - RNA, 19 nt, Artificial Sequence
  Description of Artificial Sequence: Synthetic oligonucleotide
  Antisense strand to SEQ ID NO: 36818
agaacuacaguugucauuc

SEQ ID NO: 36820 - RNA, 19 nt, Artificial Sequence
  Description of Artificial Sequence: Synthetic oligonucleotide
  Sense strand starting at position 2675 of SEQ ID NO: 434
uugcaaucucgggaaacug

SEQ ID NO: 36821 - RNA, 19 nt, Artificial Sequence
  Description of Artificial Sequence: Synthetic oligonucleotide
  Antisense strand to SEQ ID NO: 36820
caguuucccgagauugcaa

SEQ ID NO: 36822 - RNA, 19 nt, Artificial Sequence
  Description of Artificial Sequence: Synthetic oligonucleotide
  Sense strand starting at position 2835 of SEQ ID NO: 434
gugguaacgccucauucuu

SEQ ID NO: 36823 - RNA, 19 nt, Artificial Sequence
  Description of Artificial Sequence: Synthetic oligonucleotide
  Antisense strand to SEQ ID NO: 36822
aagaaugaggcguuaccac

SEQ ID NO: 36824 - RNA, 19 nt, Artificial Sequence
  Description of Artificial Sequence: Synthetic oligonucleotide
  Sense strand starting at position 2997 of SEQ ID NO: 434
gguaacgugucagaauuuc

SEQ ID NO: 36825 - RNA, 19 nt, Artificial Sequence
  Description of Artificial Sequence: Synthetic oligonucleotide
  Antisense strand to SEQ ID NO: 36824
gaaauucugacacguuacc

SEQ ID NO: 36826 - RNA, 19 nt, Artificial Sequence
  Description of Artificial Sequence: Synthetic oligonucleotide
  Sense strand starting at position 3694 of SEQ ID NO: 434
auaggugugagguaucuca

SEQ ID NO: 36827 - RNA, 19 nt, Artificial Sequence
  Description of Artificial Sequence: Synthetic oligonucleotide
  Antisense strand to SEQ ID NO: 36826
ugagauaccucacaccuau

SEQ ID NO: 36828 - RNA, 19 nt, Artificial Sequence
  Description of Artificial Sequence: Synthetic oligonucleotide
  Sense strand starting at position 3702 of SEQ ID NO: 434
gagguaucucacugugguc

SEQ ID NO: 36829 - RNA, 19 nt, Artificial Sequence
  Description of Artificial Sequence: Synthetic oligonucleotide
  Antisense strand to SEQ ID NO: 36828
gaccacagugagauaccuc

SEQ ID NO: 36830 - RNA, 19 nt, Artificial Sequence
  Description of Artificial Sequence: Synthetic oligonucleotide
  Sense strand starting at position 3768 of SEQ ID NO: 434
gugcuuauuggucaugcca

SEQ ID NO: 36831 - RNA, 19 nt, Artificial Sequence
  Description of Artificial Sequence: Synthetic oligonucleotide
  Antisense strand to SEQ ID NO: 36830
uggcaugaccaauaagcac

SEQ ID NO: 36832 - RNA, 19 nt, Artificial Sequence
  Description of Artificial Sequence: Synthetic oligonucleotide
  Sense strand starting at position 3783 of SEQ ID NO: 434
gccauuuguauauguuugu

SEQ ID NO: 36833 - RNA, 19 nt, Artificial Sequence
  Description of Artificial Sequence: Synthetic oligonucleotide
  Antisense strand to SEQ ID NO: 36832
acaaacauauacaaauggc

SEQ ID NO: 36834 - RNA, 19 nt, Artificial Sequence
  Description of Artificial Sequence: Synthetic oligonucleotide
  Sense strand starting at position 3787 of SEQ ID NO: 434
uuuguauauguuuguugga

SEQ ID NO: 36835 - RNA, 19 nt, Artificial Sequence
  Description of Artificial Sequence: Synthetic oligonucleotide
  Antisense strand to SEQ ID NO: 36834
uccaacaaacauauacaaa

SEQ ID NO: 36836 - RNA, 19 nt, Artificial Sequence
  Description of Artificial Sequence: Synthetic oligonucleotide
  Sense strand starting at position 3789 of SEQ ID NO: 434
uguauauguuuguuggaga

SEQ ID NO: 36837 - RNA, 19 nt, Artificial Sequence
  Description of Artificial Sequence: Synthetic oligonucleotide
  Antisense strand to SEQ ID NO: 36836
ucuccaacaaacauauaca

SEQ ID NO: 36838 - RNA, 19 nt, Artificial Sequence
  Description of Artificial Sequence: Synthetic oligonucleotide
  Sense strand starting at position 3794 of SEQ ID NO: 434
auguuuguuggagaaaugu

SEQ ID NO: 36839 - RNA, 19 nt, Artificial Sequence
  Description of Artificial Sequence: Synthetic oligonucleotide
  Antisense strand to SEQ ID NO: 36838
acauuucuccaacaaacau

SEQ ID NO: 36840 - RNA, 19 nt, Artificial Sequence
  Description of Artificial Sequence: Synthetic oligonucleotide
  Sense strand starting at position 27 of SEQ ID NO: 435
ugaguugagcgcugaaaug

SEQ ID NO: 36841 - RNA, 19 nt, Artificial Sequence
  Description of Artificial Sequence: Synthetic oligonucleotide
  Antisense strand to SEQ ID NO: 36840
cauuucagcgcucaacuca

SEQ ID NO: 36842 - RNA, 19 nt, Artificial Sequence
  Description of Artificial Sequence: Synthetic oligonucleotide
  Sense strand starting at position 36 of SEQ ID NO: 435
cgcugaaaugcacaucagu

SEQ ID NO: 36843 - RNA, 19 nt, Artificial Sequence
  Description of Artificial Sequence: Synthetic oligonucleotide
  Antisense strand to SEQ ID NO: 36842
acugaugugcauuucagcg

SEQ ID NO: 36844 - RNA, 19 nt, Artificial Sequence
  Description of Artificial Sequence: Synthetic oligonucleotide
  Sense strand starting at position 42 of SEQ ID NO: 435
aaugcacaucaguggauaa

SEQ ID NO: 36845 - RNA, 19 nt, Artificial Sequence
  Description of Artificial Sequence: Synthetic oligonucleotide
  Antisense strand to SEQ ID NO: 36844
uuauccacugaugugcauu

SEQ ID NO: 36846 - RNA, 19 nt, Artificial Sequence
  Description of Artificial Sequence: Synthetic oligonucleotide
  Sense strand starting at position 336 of SEQ ID NO: 435
uuguauagcucacuauaca

SEQ ID NO: 36847 - RNA, 19 nt, Artificial Sequence
  Description of Artificial Sequence: Synthetic oligonucleotide
  Antisense strand to SEQ ID NO: 36846
uguauagugagcuauacaa

SEQ ID NO: 36848 - RNA, 19 nt, Artificial Sequence
  Description of Artificial Sequence: Synthetic oligonucleotide
  Sense strand starting at position 399 of SEQ ID NO: 435
ucuuguggcuuccucaaau

SEQ ID NO: 36849 - RNA, 19 nt, Artificial Sequence
  Description of Artificial Sequence: Synthetic oligonucleotide
  Antisense strand to SEQ ID NO: 36848
auuugaggaagccacaaga

SEQ ID NO: 36850 - RNA, 19 nt, Artificial Sequence
  Description of Artificial Sequence: Synthetic oligonucleotide
  Sense strand starting at position 410 of SEQ ID NO: 435
ccucaaaucaugggaguga

SEQ ID NO: 36851 - RNA, 19 nt, Artificial Sequence
  Description of Artificial Sequence: Synthetic oligonucleotide
  Antisense strand to SEQ ID NO: 36850
ucacucccaugauuugagg

SEQ ID NO: 36852 - RNA, 19 nt, Artificial Sequence
  Description of Artificial Sequence: Synthetic oligonucleotide
  Sense strand starting at position 467 of SEQ ID NO: 435
gugagacaguauucguacu

SEQ ID NO: 36853 - RNA, 19 nt, Artificial Sequence
  Description of Artificial Sequence: Synthetic oligonucleotide
  Antisense strand to SEQ ID NO: 36852
aguacgaauacugucucac

SEQ ID NO: 36854 - RNA, 19 nt, Artificial Sequence
  Description of Artificial Sequence: Synthetic oligonucleotide
  Sense strand starting at position 468 of SEQ ID NO: 435
ugagacaguauucguacuu

SEQ ID NO: 36855 - RNA, 19 nt, Artificial Sequence
  Description of Artificial Sequence: Synthetic oligonucleotide
  Antisense strand to SEQ ID NO: 36854
aaguacgaauacugucuca

SEQ ID NO: 36856 - RNA, 19 nt, Artificial Sequence
  Description of Artificial Sequence: Synthetic oligonucleotide
  Sense strand starting at position 469 of SEQ ID NO: 435
gagacaguauucguacuua

SEQ ID NO: 36857 - RNA, 19 nt, Artificial Sequence
  Description of Artificial Sequence: Synthetic oligonucleotide
  Antisense strand to SEQ ID NO: 36856
uaaguacgaauacugucuc

SEQ ID NO: 36858 - RNA, 19 nt, Artificial Sequence
  Description of Artificial Sequence: Synthetic oligonucleotide
  Sense strand starting at position 498 of SEQ ID NO: 435
caagcagguggguauagau

SEQ ID NO: 36859 - RNA, 19 nt, Artificial Sequence
  Description of Artificial Sequence: Synthetic oligonucleotide
  Antisense strand to SEQ ID NO: 36858
aucuauacccaccugcuug

SEQ ID NO: 36860 - RNA, 19 nt, Artificial Sequence
  Description of Artificial Sequence: Synthetic oligonucleotide
  Sense strand starting at position 513 of SEQ ID NO: 435
agaucuuauugggcuauau

SEQ ID NO: 36861 - RNA, 19 nt, Artificial Sequence
  Description of Artificial Sequence: Synthetic oligonucleotide
  Antisense strand to SEQ ID NO: 36860
auauagcccaauaagaucu

SEQ ID NO: 36862 - RNA, 19 nt, Artificial Sequence
  Description of Artificial Sequence: Synthetic oligonucleotide
  Sense strand starting at position 515 of SEQ ID NO: 435
aucuuauugggcuauaucu

SEQ ID NO: 36863 - RNA, 19 nt, Artificial Sequence
  Description of Artificial Sequence: Synthetic oligonucleotide
  Antisense strand to SEQ ID NO: 36862
agauauagcccaauaagau

SEQ ID NO: 36864 - RNA, 19 nt, Artificial Sequence
  Description of Artificial Sequence: Synthetic oligonucleotide
  Sense strand starting at position 523 of SEQ ID NO: 435
gggcuauaucuggaucuca

SEQ ID NO: 36865 - RNA, 19 nt, Artificial Sequence
  Description of Artificial Sequence: Synthetic oligonucleotide
  Antisense strand to SEQ ID NO: 36864
ugagauccagauauagccc

SEQ ID NO: 36866 - RNA, 19 nt, Artificial Sequence
  Description of Artificial Sequence: Synthetic oligonucleotide
  Sense strand starting at position 531 of SEQ ID NO: 435
ucuggaucucagugaacaa

SEQ ID NO: 36867 - RNA, 19 nt, Artificial Sequence
  Description of Artificial Sequence: Synthetic oligonucleotide
  Antisense strand to SEQ ID NO: 36866
uuguucacugagauccaga

SEQ ID NO: 36868 - RNA, 19 nt, Artificial Sequence
  Description of Artificial Sequence: Synthetic oligonucleotide
  Sense strand starting at position 911 of SEQ ID NO: 435
uuaagaggauuggauaaau

SEQ ID NO: 36869 - RNA, 19 nt, Artificial Sequence
  Description of Artificial Sequence: Synthetic oligonucleotide
  Antisense strand to SEQ ID NO: 36868
auuuauccaauccucuuaa

SEQ ID NO: 36870 - RNA, 19 nt, Artificial Sequence
  Description of Artificial Sequence: Synthetic oligonucleotide
  Sense strand starting at position 978 of SEQ ID NO: 435
gaguaacucuuauucguau

SEQ ID NO: 36871 - RNA, 19 nt, Artificial Sequence
  Description of Artificial Sequence: Synthetic oligonucleotide
  Antisense strand to SEQ ID NO: 36870
auacgaauaagaguuacuc

SEQ ID NO: 36872 - RNA, 19 nt, Artificial Sequence
  Description of Artificial Sequence: Synthetic oligonucleotide
  Sense strand starting at position 979 of SEQ ID NO: 435
aguaacucuuauucguaua

SEQ ID NO: 36873 - RNA, 19 nt, Artificial Sequence
  Description of Artificial Sequence: Synthetic oligonucleotide
  Antisense strand to SEQ ID NO: 36872
uauacgaauaagaguuacu

SEQ ID NO: 36874 - RNA, 19 nt, Artificial Sequence
  Description of Artificial Sequence: Synthetic oligonucleotide
  Sense strand starting at position 984 of SEQ ID NO: 435
cucuuauucguauaagcug

SEQ ID NO: 36875 - RNA, 19 nt, Artificial Sequence
  Description of Artificial Sequence: Synthetic oligonucleotide
  Antisense strand to SEQ ID NO: 36874
cagcuuauacgaauaagag

SEQ ID NO: 36876 - RNA, 19 nt, Artificial Sequence
  Description of Artificial Sequence: Synthetic oligonucleotide
  Sense strand starting at position 1028 of SEQ ID NO: 435
uacauuuguugagaguuua

SEQ ID NO: 36877 - RNA, 19 nt, Artificial Sequence
  Description of Artificial Sequence: Synthetic oligonucleotide
  Antisense strand to SEQ ID NO: 36876
uaaacucucaacaaaugua

SEQ ID NO: 36878 - RNA, 19 nt, Artificial Sequence
  Description of Artificial Sequence: Synthetic oligonucleotide
  Sense strand starting at position 1038 of SEQ ID NO: 435
gagaguuuacuaugccuca

SEQ ID NO: 36879 - RNA, 19 nt, Artificial Sequence
  Description of Artificial Sequence: Synthetic oligonucleotide
  Antisense strand to SEQ ID NO: 36878
ugaggcauaguaaacucuc

SEQ ID NO: 36880 - RNA, 19 nt, Artificial Sequence
  Description of Artificial Sequence: Synthetic oligonucleotide
  Sense strand starting at position 1113 of SEQ ID NO: 435
aagucugcagucugguaaa

SEQ ID NO: 36881 - RNA, 19 nt, Artificial Sequence
  Description of Artificial Sequence: Synthetic oligonucleotide
  Antisense strand to SEQ ID NO: 36880
uuuaccagacugcagacuu

SEQ ID NO: 36882 - RNA, 19 nt, Artificial Sequence
  Description of Artificial Sequence: Synthetic oligonucleotide
  Sense strand starting at position 1147 of SEQ ID NO: 435
cagagaugucaauguuauu

SEQ ID NO: 36883 - RNA, 19 nt, Artificial Sequence
  Description of Artificial Sequence: Synthetic oligonucleotide
  Antisense strand to SEQ ID NO: 36882
aauaacauugacaucucug

SEQ ID NO: 36884 - RNA, 19 nt, Artificial Sequence
  Description of Artificial Sequence: Synthetic oligonucleotide
  Sense strand starting at position 1225 of SEQ ID NO: 435
agguuagaguauccaaaga

SEQ ID NO: 36885 - RNA, 19 nt, Artificial Sequence
  Description of Artificial Sequence: Synthetic oligonucleotide
  Antisense strand to SEQ ID NO: 36884
ucuuuggauacucuaaccu

SEQ ID NO: 36886 - RNA, 19 nt, Artificial Sequence
  Description of Artificial Sequence: Synthetic oligonucleotide
  Sense strand starting at position 1383 of SEQ ID NO: 435
aagaaucaaguuugugaua

SEQ ID NO: 36887 - RNA, 19 nt, Artificial Sequence
  Description of Artificial Sequence: Synthetic oligonucleotide
  Antisense strand to SEQ ID NO: 36886
uaucacaaacuugauucuu

SEQ ID NO: 36888 - RNA, 19 nt, Artificial Sequence
  Description of Artificial Sequence: Synthetic oligonucleotide
  Sense strand starting at position 1384 of SEQ ID NO: 435
agaaucaaguuugugauaa

SEQ ID NO: 36889 - RNA, 19 nt, Artificial Sequence
  Description of Artificial Sequence: Synthetic oligonucleotide
  Antisense strand to SEQ ID NO: 36888
uuaucacaaacuugauucu

SEQ ID NO: 36890 - RNA, 19 nt, Artificial Sequence
  Description of Artificial Sequence: Synthetic oligonucleotide
  Sense strand starting at position 1523 of SEQ ID NO: 435
aauagccuuugguuaauga

SEQ ID NO: 36891 - RNA, 19 nt, Artificial Sequence
  Description of Artificial Sequence: Synthetic oligonucleotide
  Antisense strand to SEQ ID NO: 36890
ucauuaaccaaaggcuauu

SEQ ID NO: 36892 - RNA, 19 nt, Artificial Sequence
  Description of Artificial Sequence: Synthetic oligonucleotide
  Sense strand starting at position 1524 of SEQ ID NO: 435
auagccuuugguuaaugaa

SEQ ID NO: 36893 - RNA, 19 nt, Artificial Sequence
  Description of Artificial Sequence: Synthetic oligonucleotide
  Antisense strand to SEQ ID NO: 36892
uucauuaaccaaaggcuau

SEQ ID NO: 36894 - RNA, 19 nt, Artificial Sequence
  Description of Artificial Sequence: Synthetic oligonucleotide
  Sense strand starting at position 1713 of SEQ ID NO: 435
uuagauuaacagugucaag

SEQ ID NO: 36895 - RNA, 19 nt, Artificial Sequence
  Description of Artificial Sequence: Synthetic oligonucleotide
  Antisense strand to SEQ ID NO: 36894
cuugacacuguuaaucuaa

SEQ ID NO: 36896 - RNA, 19 nt, Artificial Sequence
  Description of Artificial Sequence: Synthetic oligonucleotide
  Sense strand starting at position 1795 of SEQ ID NO: 435
gagcuagacuguuuccauc

SEQ ID NO: 36897 - RNA, 19 nt, Artificial Sequence
  Description of Artificial Sequence: Synthetic oligonucleotide
  Antisense strand to SEQ ID NO: 36896
gauggaaacagucuagcuc

SEQ ID NO: 36898 - RNA, 19 nt, Artificial Sequence
  Description of Artificial Sequence: Synthetic oligonucleotide
  Sense strand starting at position 1797 of SEQ ID NO: 435
gcuagacuguuuccaucau

SEQ ID NO: 36899 - RNA, 19 nt, Artificial Sequence
  Description of Artificial Sequence: Synthetic oligonucleotide
  Antisense strand to SEQ ID NO: 36898
augauggaaacagucuagc

SEQ ID NO: 36900 - RNA, 19 nt, Artificial Sequence
  Description of Artificial Sequence: Synthetic oligonucleotide
  Sense strand starting at position 1805 of SEQ ID NO: 435
guuuccaucaugggacuga

SEQ ID NO: 36901 - RNA, 19 nt, Artificial Sequence
  Description of Artificial Sequence: Synthetic oligonucleotide
  Antisense strand to SEQ ID NO: 36900
ucagucccaugauggaaac

SEQ ID NO: 36902 - RNA, 19 nt, Artificial Sequence
  Description of Artificial Sequence: Synthetic oligonucleotide
  Sense strand starting at position 1923 of SEQ ID NO: 435
agucaucaucaugagcaua

SEQ ID NO: 36903 - RNA, 19 nt, Artificial Sequence
  Description of Artificial Sequence: Synthetic oligonucleotide
  Antisense strand to SEQ ID NO: 36902
uaugcucaugaugaugacu

SEQ ID NO: 36904 - RNA, 19 nt, Artificial Sequence
  Description of Artificial Sequence: Synthetic oligonucleotide
  Sense strand starting at position 2484 of SEQ ID NO: 435
ugcauauaugcauaauaug

SEQ ID NO: 36905 - RNA, 19 nt, Artificial Sequence
  Description of Artificial Sequence: Synthetic oligonucleotide
  Antisense strand to SEQ ID NO: 36904
cauauuaugcauauaugca

SEQ ID NO: 36906 - RNA, 19 nt, Artificial Sequence
  Description of Artificial Sequence: Synthetic oligonucleotide
  Sense strand starting at position 2492 of SEQ ID NO: 435
ugcauaauaugcucacuga

SEQ ID NO: 36907 - RNA, 19 nt, Artificial Sequence
  Description of Artificial Sequence: Synthetic oligonucleotide
  Antisense strand to SEQ ID NO: 36906
ucagugagcauauuaugca

SEQ ID NO: 36908 - RNA, 19 nt, Artificial Sequence
  Description of Artificial Sequence: Synthetic oligonucleotide
  Sense strand starting at position 2493 of SEQ ID NO: 435
gcauaauaugcucacugau

SEQ ID NO: 36909 - RNA, 19 nt, Artificial Sequence
  Description of Artificial Sequence: Synthetic oligonucleotide
  Antisense strand to SEQ ID NO: 36908
aucagugagcauauuaugc

SEQ ID NO: 36910 - RNA, 19 nt, Artificial Sequence
  Description of Artificial Sequence: Synthetic oligonucleotide
  Sense strand starting at position 2983 of SEQ ID NO: 435
cugguauagccaugcaaug

SEQ ID NO: 36911 - RNA, 19 nt, Artificial Sequence
  Description of Artificial Sequence: Synthetic oligonucleotide
  Antisense strand to SEQ ID NO: 36910
cauugcauggcuauaccag

SEQ ID NO: 36912 - RNA, 19 nt, Artificial Sequence
  Description of Artificial Sequence: Synthetic oligonucleotide
  Sense strand starting at position 3169 of SEQ ID NO: 435
aguagauuaacaggugguu

SEQ ID NO: 36913 - RNA, 19 nt, Artificial Sequence
  Description of Artificial Sequence: Synthetic oligonucleotide
  Antisense strand to SEQ ID NO: 36912
aaccaccuguuaaucuacu

SEQ ID NO: 36914 - RNA, 19 nt, Artificial Sequence
  Description of Artificial Sequence: Synthetic oligonucleotide
  Sense strand starting at position 3182 of SEQ ID NO: 435
gugguuaaggcugaagguu

SEQ ID NO: 36915 - RNA, 19 nt, Artificial Sequence
  Description of Artificial Sequence: Synthetic oligonucleotide
  Antisense strand to SEQ ID NO: 36914
aaccuucagccuuaaccac

SEQ ID NO: 36916 - RNA, 19 nt, Artificial Sequence
  Description of Artificial Sequence: Synthetic oligonucleotide
  Sense strand starting at position 3195 of SEQ ID NO: 435
aagguuugggaguauagua

SEQ ID NO: 36917 - RNA, 19 nt, Artificial Sequence
  Description of Artificial Sequence: Synthetic oligonucleotide
  Antisense strand to SEQ ID NO: 36916
uacuauacucccaaaccuu

SEQ ID NO: 36918 - RNA, 19 nt, Artificial Sequence
  Description of Artificial Sequence: Synthetic oligonucleotide
  Sense strand starting at position 3390 of SEQ ID NO: 435
agcuuacuugcagacucaa

SEQ ID NO: 36919 - RNA, 19 nt, Artificial Sequence
  Description of Artificial Sequence: Synthetic oligonucleotide
  Antisense strand to SEQ ID NO: 36918
uugagucugcaaguaagcu

SEQ ID NO: 36920 - RNA, 19 nt, Artificial Sequence
  Description of Artificial Sequence: Synthetic oligonucleotide
  Sense strand starting at position 3272 of SEQ ID NO: 436
ggaaucaacuccuugucuu

SEQ ID NO: 36921 - RNA, 19 nt, Artificial Sequence
  Description of Artificial Sequence: Synthetic oligonucleotide
  Antisense strand to SEQ ID NO: 36920
aagacaaggaguugauucc

SEQ ID NO: 36922 - RNA, 19 nt, Artificial Sequence
  Description of Artificial Sequence: Synthetic oligonucleotide
  Sense strand starting at position 3261 of SEQ ID NO: 436
guucuuagucuggaaucaa

SEQ ID NO: 36923 - RNA, 19 nt, Artificial Sequence
  Description of Artificial Sequence: Synthetic oligonucleotide
  Antisense strand to SEQ ID NO: 36922
uugauuccagacuaagaac

SEQ ID NO: 36924 - RNA, 19 nt, Artificial Sequence
  Description of Artificial Sequence: Synthetic oligonucleotide
  Sense strand starting at position 3259 of SEQ ID NO: 436
ggguucuuagucuggaauc

SEQ ID NO: 36925 - RNA, 19 nt, Artificial Sequence
  Description of Artificial Sequence: Synthetic oligonucleotide
  Antisense strand to SEQ ID NO: 36924
gauuccagacuaagaaccc

SEQ ID NO: 36926 - RNA, 19 nt, Artificial Sequence
  Description of Artificial Sequence: Synthetic oligonucleotide
  Sense strand starting at position 3257 of SEQ ID NO: 436
caggguucuuagucuggaa

SEQ ID NO: 36927 - RNA, 19 nt, Artificial Sequence
  Description of Artificial Sequence: Synthetic oligonucleotide
  Antisense strand to SEQ ID NO: 36926
uuccagacuaagaacccug

SEQ ID NO: 36928 - RNA, 19 nt, Artificial Sequence
  Description of Artificial Sequence: Synthetic oligonucleotide
  Sense strand starting at position 3240 of SEQ ID NO: 436
gggagaaagcuuuggccca

SEQ ID NO: 36929 - RNA, 19 nt, Artificial Sequence
  Description of Artificial Sequence: Synthetic oligonucleotide
  Antisense strand to SEQ ID NO: 36928
ugggccaaagcuuucuccc

SEQ ID NO: 36930 - RNA, 19 nt, Artificial Sequence
  Description of Artificial Sequence: Synthetic oligonucleotide
  Sense strand starting at position 3104 of SEQ ID NO: 436
cccuuaaacgcuggaggaa

SEQ ID NO: 36931 - RNA, 19 nt, Artificial Sequence
  Description of Artificial Sequence: Synthetic oligonucleotide
  Antisense strand to SEQ ID NO: 36930
uuccuccagcguuuaaggg

SEQ ID NO: 36932 - RNA, 19 nt, Artificial Sequence
  Description of Artificial Sequence: Synthetic oligonucleotide
  Sense strand starting at position 3006 of SEQ ID NO: 436
cuaggaaugcaauaagucu

SEQ ID NO: 36933 - RNA, 19 nt, Artificial Sequence
  Description of Artificial Sequence: Synthetic oligonucleotide
  Antisense strand to SEQ ID NO: 36932
agacuuauugcauuccuag

SEQ ID NO: 36934 - RNA, 19 nt, Artificial Sequence
  Description of Artificial Sequence: Synthetic oligonucleotide
  Sense strand starting at position 2990 of SEQ ID NO: 436
acaugcguggcauauacua

SEQ ID NO: 36935 - RNA, 19 nt, Artificial Sequence
  Description of Artificial Sequence: Synthetic oligonucleotide
  Antisense strand to SEQ ID NO: 36934
uaguauaugccacgcaugu

SEQ ID NO: 36936 - RNA, 19 nt, Artificial Sequence
  Description of Artificial Sequence: Synthetic oligonucleotide
  Sense strand starting at position 2956 of SEQ ID NO: 436
ggauaaaucgugggaguug

SEQ ID NO: 36937 - RNA, 19 nt, Artificial Sequence
  Description of Artificial Sequence: Synthetic oligonucleotide
  Antisense strand to SEQ ID NO: 36936
caacucccacgauuuaucc

SEQ ID NO: 36938 - RNA, 19 nt, Artificial Sequence
  Description of Artificial Sequence: Synthetic oligonucleotide
  Sense strand starting at position 2955 of SEQ ID NO: 436
cggauaaaucgugggaguu

SEQ ID NO: 36939 - RNA, 19 nt, Artificial Sequence
  Description of Artificial Sequence: Synthetic oligonucleotide
  Antisense strand to SEQ ID NO: 36938
aacucccacgauuuauccg

SEQ ID NO: 36940 - RNA, 19 nt, Artificial Sequence
  Description of Artificial Sequence: Synthetic oligonucleotide
  Sense strand starting at position 2816 of SEQ ID NO: 436
ggcuaucaccgugugccaa

SEQ ID NO: 36941 - RNA, 19 nt, Artificial Sequence
  Description of Artificial Sequence: Synthetic oligonucleotide
  Antisense strand to SEQ ID NO: 36940
uuggcacacggugauagcc

SEQ ID NO: 36942 - RNA, 19 nt, Artificial Sequence
  Description of Artificial Sequence: Synthetic oligonucleotide
  Sense strand starting at position 2806 of SEQ ID NO: 436
agugaauguuggcuaucac

SEQ ID NO: 36943 - RNA, 19 nt, Artificial Sequence
  Description of Artificial Sequence: Synthetic oligonucleotide
  Antisense strand to SEQ ID NO: 36942
gugauagccaacauucacu

SEQ ID NO: 36944 - RNA, 19 nt, Artificial Sequence
  Description of Artificial Sequence: Synthetic oligonucleotide
  Sense strand starting at position 2792 of SEQ ID NO: 436
gcccuuuggcgcucaguga

SEQ ID NO: 36945 - RNA, 19 nt, Artificial Sequence
  Description of Artificial Sequence: Synthetic oligonucleotide
  Antisense strand to SEQ ID NO: 36944
ucacugagcgccaaagggc

SEQ ID NO: 36946 - RNA, 19 nt, Artificial Sequence
  Description of Artificial Sequence: Synthetic oligonucleotide
  Sense strand starting at position 2739 of SEQ ID NO: 436
acuaguuguucaguaagug

SEQ ID NO: 36947 - RNA, 19 nt, Artificial Sequence
  Description of Artificial Sequence: Synthetic oligonucleotide
  Antisense strand to SEQ ID NO: 36946
cacuuacugaacaacuagu

SEQ ID NO: 36948 - RNA, 19 nt, Artificial Sequence
  Description of Artificial Sequence: Synthetic oligonucleotide
  Sense strand starting at position 2366 of SEQ ID NO: 436
ggauuaguguaacucccaa

SEQ ID NO: 36949 - RNA, 19 nt, Artificial Sequence
  Description of Artificial Sequence: Synthetic oligonucleotide
  Antisense strand to SEQ ID NO: 36948
uugggaguuacacuaaucc

SEQ ID NO: 36950 - RNA, 19 nt, Artificial Sequence
  Description of Artificial Sequence: Synthetic oligonucleotide
  Sense strand starting at position 1532 of SEQ ID NO: 436
uggauucucccucagauuc

SEQ ID NO: 36951 - RNA, 19 nt, Artificial Sequence
  Description of Artificial Sequence: Synthetic oligonucleotide
  Antisense strand to SEQ ID NO: 36950
gaaucugagggagaaucca

SEQ ID NO: 36952 - RNA, 19 nt, Artificial Sequence
  Description of Artificial Sequence: Synthetic oligonucleotide
  Sense strand starting at position 1530 of SEQ ID NO: 436
ccuggauucucccucagau

SEQ ID NO: 36953 - RNA, 19 nt, Artificial Sequence
  Description of Artificial Sequence: Synthetic oligonucleotide
  Antisense strand to SEQ ID NO: 36952
aucugagggagaauccagg

SEQ ID NO: 36954 - RNA, 19 nt, Artificial Sequence
  Description of Artificial Sequence: Synthetic oligonucleotide
  Sense strand starting at position 1439 of SEQ ID NO: 436
ugaggaagcucauucugaa

SEQ ID NO: 36955 - RNA, 19 nt, Artificial Sequence
  Description of Artificial Sequence: Synthetic oligonucleotide
  Antisense strand to SEQ ID NO: 36954
uucagaaugagcuuccuca

SEQ ID NO: 36956 - RNA, 19 nt, Artificial Sequence
  Description of Artificial Sequence: Synthetic oligonucleotide
  Sense strand starting at position 1427 of SEQ ID NO: 436
cacaaaguccugugaggaa

SEQ ID NO: 36957 - RNA, 19 nt, Artificial Sequence
  Description of Artificial Sequence: Synthetic oligonucleotide
  Antisense strand to SEQ ID NO: 36956
uuccucacaggacuuugug

SEQ ID NO: 36958 - RNA, 19 nt, Artificial Sequence
  Description of Artificial Sequence: Synthetic oligonucleotide
  Sense strand starting at position 1266 of SEQ ID NO: 436
gugugacguaucugaaauc

SEQ ID NO: 36959 - RNA, 19 nt, Artificial Sequence
  Description of Artificial Sequence: Synthetic oligonucleotide
  Antisense strand to SEQ ID NO: 36958
gauuucagauacgucacac

SEQ ID NO: 36960 - RNA, 19 nt, Artificial Sequence
  Description of Artificial Sequence: Synthetic oligonucleotide
  Sense strand starting at position 1262 of SEQ ID NO: 436
gacagugugacguaucuga

SEQ ID NO: 36961 - RNA, 19 nt, Artificial Sequence
  Description of Artificial Sequence: Synthetic oligonucleotide
  Antisense strand to SEQ ID NO: 36960
ucagauacgucacacuguc

SEQ ID NO: 36962 - RNA, 19 nt, Artificial Sequence
  Description of Artificial Sequence: Synthetic oligonucleotide
  Sense strand starting at position 1249 of SEQ ID NO: 436
gcagguuccauuugacagu

SEQ ID NO: 36963 - RNA, 19 nt, Artificial Sequence
  Description of Artificial Sequence: Synthetic oligonucleotide
  Antisense strand to SEQ ID NO: 36962
acugucaaauggaaccugc

SEQ ID NO: 36964 - RNA, 19 nt, Artificial Sequence
  Description of Artificial Sequence: Synthetic oligonucleotide
  Sense strand starting at position 1119 of SEQ ID NO: 436
ggaccaugugggugaggau

SEQ ID NO: 36965 - RNA, 19 nt, Artificial Sequence
  Description of Artificial Sequence: Synthetic oligonucleotide
  Antisense strand to SEQ ID NO: 36964
auccucacccacauggucc

SEQ ID NO: 36966 - RNA, 19 nt, Artificial Sequence
  Description of Artificial Sequence: Synthetic oligonucleotide
  Sense strand starting at position 1055 of SEQ ID NO: 436
cuaaaucaucuggagccau

SEQ ID NO: 36967 - RNA, 19 nt, Artificial Sequence
  Description of Artificial Sequence: Synthetic oligonucleotide
  Antisense strand to SEQ ID NO: 36966
auggcuccagaugauuuag

SEQ ID NO: 36968 - RNA, 19 nt, Artificial Sequence
  Description of Artificial Sequence: Synthetic oligonucleotide
  Sense strand starting at position 1024 of SEQ ID NO: 436
agaaguauuuacugaaauc

SEQ ID NO: 36969 - RNA, 19 nt, Artificial Sequence
  Description of Artificial Sequence: Synthetic oligonucleotide
  Antisense strand to SEQ ID NO: 36968
gauuucaguaaauacuucu

SEQ ID NO: 36970 - RNA, 19 nt, Artificial Sequence
  Description of Artificial Sequence: Synthetic oligonucleotide
  Sense strand starting at position 954 of SEQ ID NO: 436
cuccaaggauggucuagaa

SEQ ID NO: 36971 - RNA, 19 nt, Artificial Sequence
  Description of Artificial Sequence: Synthetic oligonucleotide
  Antisense strand to SEQ ID NO: 36970
uucuagaccauccuuggag

SEQ ID NO: 36972 - RNA, 19 nt, Artificial Sequence
  Description of Artificial Sequence: Synthetic oligonucleotide
  Sense strand starting at position 879 of SEQ ID NO: 436
uugcccaagcaguaucaaa

SEQ ID NO: 36973 - RNA, 19 nt, Artificial Sequence
  Description of Artificial Sequence: Synthetic oligonucleotide
  Antisense strand to SEQ ID NO: 36972
uuugauacugcuugggcaa

SEQ ID NO: 36974 - RNA, 19 nt, Artificial Sequence
  Description of Artificial Sequence: Synthetic oligonucleotide
  Sense strand starting at position 839 of SEQ ID NO: 436
augcuucggccugaaguga

SEQ ID NO: 36975 - RNA, 19 nt, Artificial Sequence
  Description of Artificial Sequence: Synthetic oligonucleotide
  Antisense strand to SEQ ID NO: 36974
ucacuucaggccgaagcau

SEQ ID NO: 36976 - RNA, 19 nt, Artificial Sequence
  Description of Artificial Sequence: Synthetic oligonucleotide
  Sense strand starting at position 835 of SEQ ID NO: 436
cauaaugcuucggccugaa

SEQ ID NO: 36977 - RNA, 19 nt, Artificial Sequence
  Description of Artificial Sequence: Synthetic oligonucleotide
  Antisense strand to SEQ ID NO: 36976
uucaggccgaagcauuaug

SEQ ID NO: 36978 - RNA, 19 nt, Artificial Sequence
  Description of Artificial Sequence: Synthetic oligonucleotide
  Sense strand starting at position 818 of SEQ ID NO: 436
gcaucucugguuggaauca

SEQ ID NO: 36979 - RNA, 19 nt, Artificial Sequence
  Description of Artificial Sequence: Synthetic oligonucleotide
  Antisense strand to SEQ ID NO: 36978
ugauuccaaccagagaugc

SEQ ID NO: 36980 - RNA, 19 nt, Artificial Sequence
  Description of Artificial Sequence: Synthetic oligonucleotide
  Sense strand starting at position 816 of SEQ ID NO: 436
gagcaucucugguuggaau

SEQ ID NO: 36981 - RNA, 19 nt, Artificial Sequence
  Description of Artificial Sequence: Synthetic oligonucleotide
  Antisense strand to SEQ ID NO: 36980
auuccaaccagagaugcuc

SEQ ID NO: 36982 - RNA, 19 nt, Artificial Sequence
  Description of Artificial Sequence: Synthetic oligonucleotide
  Sense strand starting at position 613 of SEQ ID NO: 436
cucuaagucucucuguaag

SEQ ID NO: 36983 - RNA, 19 nt, Artificial Sequence
  Description of Artificial Sequence: Synthetic oligonucleotide
  Antisense strand to SEQ ID NO: 36982
cuuacagagagacuuagag

SEQ ID NO: 36984 - RNA, 19 nt, Artificial Sequence
  Description of Artificial Sequence: Synthetic oligonucleotide
  Sense strand starting at position 492 of SEQ ID NO: 436
gaagcugcuugagcaagaa

SEQ ID NO: 36985 - RNA, 19 nt, Artificial Sequence
  Description of Artificial Sequence: Synthetic oligonucleotide
  Antisense strand to SEQ ID NO: 36984
uucuugcucaagcagcuuc

SEQ ID NO: 36986 - RNA, 19 nt, Artificial Sequence
  Description of Artificial Sequence: Synthetic oligonucleotide
  Sense strand starting at position 489 of SEQ ID NO: 436
agagaagcugcuugagcaa

SEQ ID NO: 36987 - RNA, 19 nt, Artificial Sequence
  Description of Artificial Sequence: Synthetic oligonucleotide
  Antisense strand to SEQ ID NO: 36986
uugcucaagcagcuucucu

SEQ ID NO: 36988 - RNA, 19 nt, Artificial Sequence
  Description of Artificial Sequence: Synthetic oligonucleotide
  Sense strand starting at position 476 of SEQ ID NO: 436
aagaacaugucagagagaa

SEQ ID NO: 36989 - RNA, 19 nt, Artificial Sequence
  Description of Artificial Sequence: Synthetic oligonucleotide
  Antisense strand to SEQ ID NO: 36988
uucucucugacauguucuu

SEQ ID NO: 36990 - RNA, 19 nt, Artificial Sequence
  Description of Artificial Sequence: Synthetic oligonucleotide
  Sense strand starting at position 412 of SEQ ID NO: 436
caguguuggcuuuacuaaa

SEQ ID NO: 36991 - RNA, 19 nt, Artificial Sequence
  Description of Artificial Sequence: Synthetic oligonucleotide
  Antisense strand to SEQ ID NO: 36990
uuuaguaaagccaacacug

SEQ ID NO: 36992 - RNA, 19 nt, Artificial Sequence
  Description of Artificial Sequence: Synthetic oligonucleotide
  Sense strand starting at position 304 of SEQ ID NO: 436
gguguuaacagucaucuuu

SEQ ID NO: 36993 - RNA, 19 nt, Artificial Sequence
  Description of Artificial Sequence: Synthetic oligonucleotide
  Antisense strand to SEQ ID NO: 36992
aaagaugacuguuaacacc

SEQ ID NO: 36994 - RNA, 19 nt, Artificial Sequence
  Description of Artificial Sequence: Synthetic oligonucleotide
  Sense strand starting at position 288 of SEQ ID NO: 436
gaaagauacuuaguaaggu

SEQ ID NO: 36995 - RNA, 19 nt, Artificial Sequence
  Description of Artificial Sequence: Synthetic oligonucleotide
  Antisense strand to SEQ ID NO: 36994
accuuacuaaguaucuuuc

SEQ ID NO: 36996 - RNA, 19 nt, Artificial Sequence
  Description of Artificial Sequence: Synthetic oligonucleotide
  Sense strand starting at position 275 of SEQ ID NO: 436
ggguaaggauguagaaaga

SEQ ID NO: 36997 - RNA, 19 nt, Artificial Sequence
  Description of Artificial Sequence: Synthetic oligonucleotide
  Antisense strand to SEQ ID NO: 36996
ucuuucuacauccuuaccc

SEQ ID NO: 36998 - RNA, 19 nt, Artificial Sequence
  Description of Artificial Sequence: Synthetic oligonucleotide
  Sense strand starting at position 189 of SEQ ID NO: 436
gugagugggacagguuaaa

SEQ ID NO: 36999 - RNA, 19 nt, Artificial Sequence
  Description of Artificial Sequence: Synthetic oligonucleotide
  Antisense strand to SEQ ID NO: 36998
uuuaaccugucccacucac

SEQ ID NO: 37000 - RNA, 19 nt, Artificial Sequence
  Description of Artificial Sequence: Synthetic oligonucleotide
  Sense strand starting at position 3975 of SEQ ID NO: 437
gaauguccuugaugaccuu

SEQ ID NO: 37001 - RNA, 19 nt, Artificial Sequence
  Description of Artificial Sequence: Synthetic oligonucleotide
  Antisense strand to SEQ ID NO: 37000
aaggucaucaaggacauuc

SEQ ID NO: 37002 - RNA, 19 nt, Artificial Sequence
  Description of Artificial Sequence: Synthetic oligonucleotide
  Sense strand starting at position 3950 of SEQ ID NO: 437
cugugaucugaagguagag

SEQ ID NO: 37003 - RNA, 19 nt, Artificial Sequence
  Description of Artificial Sequence: Synthetic oligonucleotide
  Antisense strand to SEQ ID NO: 37002
cucuaccuucagaucacag

SEQ ID NO: 37004 - RNA, 19 nt, Artificial Sequence
  Description of Artificial Sequence: Synthetic oligonucleotide
  Sense strand starting at position 3946 of SEQ ID NO: 437
gucucugugaucugaaggu

SEQ ID NO: 37005 - RNA, 19 nt, Artificial Sequence
  Description of Artificial Sequence: Synthetic oligonucleotide
  Antisense strand to SEQ ID NO: 37004
accuucagaucacagagac

SEQ ID NO: 37006 - RNA, 19 nt, Artificial Sequence
  Description of Artificial Sequence: Synthetic oligonucleotide
  Sense strand starting at position 3942 of SEQ ID NO: 437
uucugucucugugaucuga

SEQ ID NO: 37007 - RNA, 19 nt, Artificial Sequence
  Description of Artificial Sequence: Synthetic oligonucleotide
  Antisense strand to SEQ ID NO: 37006
ucagaucacagagacagaa

SEQ ID NO: 37008 - RNA, 19 nt, Artificial Sequence
  Description of Artificial Sequence: Synthetic oligonucleotide
  Sense strand starting at position 3898 of SEQ ID NO: 437
cugggugacugggauucaa

SEQ ID NO: 37009 - RNA, 19 nt, Artificial Sequence
  Description of Artificial Sequence: Synthetic oligonucleotide
  Antisense strand to SEQ ID NO: 37008
uugaaucccagucacccag

SEQ ID NO: 37010 - RNA, 19 nt, Artificial Sequence
  Description of Artificial Sequence: Synthetic oligonucleotide
  Sense strand starting at position 3872 of SEQ ID NO: 437
agggucuguguuugugaaa

SEQ ID NO: 37011 - RNA, 19 nt, Artificial Sequence
  Description of Artificial Sequence: Synthetic oligonucleotide
  Antisense strand to SEQ ID NO: 37010
uuucacaaacacagacccu

SEQ ID NO: 37012 - RNA, 19 nt, Artificial Sequence
  Description of Artificial Sequence: Synthetic oligonucleotide
  Sense strand starting at position 3871 of SEQ ID NO: 437
aagggucuguguuugugaa

SEQ ID NO: 37013 - RNA, 19 nt, Artificial Sequence
  Description of Artificial Sequence: Synthetic oligonucleotide
  Antisense strand to SEQ ID NO: 37012
uucacaaacacagacccuu

SEQ ID NO: 37014 - RNA, 19 nt, Artificial Sequence
  Description of Artificial Sequence: Synthetic oligonucleotide
  Sense strand starting at position 3866 of SEQ ID NO: 437
aaggaaagggucuguguuu

SEQ ID NO: 37015 - RNA, 19 nt, Artificial Sequence
  Description of Artificial Sequence: Synthetic oligonucleotide
  Antisense strand to SEQ ID NO: 37014
aaacacagacccuuuccuu

SEQ ID NO: 37016 - RNA, 19 nt, Artificial Sequence
  Description of Artificial Sequence: Synthetic oligonucleotide
  Sense strand starting at position 3747 of SEQ ID NO: 437
augaauaccuacugaguga

SEQ ID NO: 37017 - RNA, 19 nt, Artificial Sequence
  Description of Artificial Sequence: Synthetic oligonucleotide
  Antisense strand to SEQ ID NO: 37016
ucacucaguagguauucau

SEQ ID NO: 37018 - RNA, 19 nt, Artificial Sequence
  Description of Artificial Sequence: Synthetic oligonucleotide
  Sense strand starting at position 3725 of SEQ ID NO: 437
accuauuuauagcaagguu

SEQ ID NO: 37019 - RNA, 19 nt, Artificial Sequence
  Description of Artificial Sequence: Synthetic oligonucleotide
  Antisense strand to SEQ ID NO: 37018
aaccuugcuauaaauaggu

SEQ ID NO: 37020 - RNA, 19 nt, Artificial Sequence
  Description of Artificial Sequence: Synthetic oligonucleotide
  Sense strand starting at position 3629 of SEQ ID NO: 437
guuuccucuucuguaugau

SEQ ID NO: 37021 - RNA, 19 nt, Artificial Sequence
  Description of Artificial Sequence: Synthetic oligonucleotide
  Antisense strand to SEQ ID NO: 37020
aucauacagaagaggaaac

SEQ ID NO: 37022 - RNA, 19 nt, Artificial Sequence
  Description of Artificial Sequence: Synthetic oligonucleotide
  Sense strand starting at position 3628 of SEQ ID NO: 437
aguuuccucuucuguauga

SEQ ID NO: 37023 - RNA, 19 nt, Artificial Sequence
  Description of Artificial Sequence: Synthetic oligonucleotide
  Antisense strand to SEQ ID NO: 37022
ucauacagaagaggaaacu

SEQ ID NO: 37024 - RNA, 19 nt, Artificial Sequence
  Description of Artificial Sequence: Synthetic oligonucleotide
  Sense strand starting at position 3330 of SEQ ID NO: 437
gggaguugccgcucuguau

SEQ ID NO: 37025 - RNA, 19 nt, Artificial Sequence
  Description of Artificial Sequence: Synthetic oligonucleotide
  Antisense strand to SEQ ID NO: 37024
auacagagcggcaacuccc

SEQ ID NO: 37026 - RNA, 19 nt, Artificial Sequence
  Description of Artificial Sequence: Synthetic oligonucleotide
  Sense strand starting at position 3303 of SEQ ID NO: 437
aaagauguguguuguggga

SEQ ID NO: 37027 - RNA, 19 nt, Artificial Sequence
  Description of Artificial Sequence: Synthetic oligonucleotide
  Antisense strand to SEQ ID NO: 37026
ucccacaacacacaucuuu

SEQ ID NO: 37028 - RNA, 19 nt, Artificial Sequence
  Description of Artificial Sequence: Synthetic oligonucleotide
  Sense strand starting at position 3220 of SEQ ID NO: 437
augauagcccuuggaugau

SEQ ID NO: 37029 - RNA, 19 nt, Artificial Sequence
  Description of Artificial Sequence: Synthetic oligonucleotide
  Antisense strand to SEQ ID NO: 37028
aucauccaagggcuaucau

SEQ ID NO: 37030 - RNA, 19 nt, Artificial Sequence
  Description of Artificial Sequence: Synthetic oligonucleotide
  Sense strand starting at position 3219 of SEQ ID NO: 437
uaugauagcccuuggauga

SEQ ID NO: 37031 - RNA, 19 nt, Artificial Sequence
  Description of Artificial Sequence: Synthetic oligonucleotide
  Antisense strand to SEQ ID NO: 37030
ucauccaagggcuaucaua

SEQ ID NO: 37032 - RNA, 19 nt, Artificial Sequence
  Description of Artificial Sequence: Synthetic oligonucleotide
  Sense strand starting at position 3207 of SEQ ID NO: 437
cccucugaagcuuaugaua

SEQ ID NO: 37033 - RNA, 19 nt, Artificial Sequence
  Description of Artificial Sequence: Synthetic oligonucleotide
  Antisense strand to SEQ ID NO: 37032
uaucauaagcuucagaggg

SEQ ID NO: 37034 - RNA, 19 nt, Artificial Sequence
  Description of Artificial Sequence: Synthetic oligonucleotide
  Sense strand starting at position 2764 of SEQ ID NO: 437
ggaaaugcuucucaaagca

SEQ ID NO: 37035 - RNA, 19 nt, Artificial Sequence
  Description of Artificial Sequence: Synthetic oligonucleotide
  Antisense strand to SEQ ID NO: 37034
ugcuuugagaagcauuucc

SEQ ID NO: 37036 - RNA, 19 nt, Artificial Sequence
  Description of Artificial Sequence: Synthetic oligonucleotide
  Sense strand starting at position 2763 of SEQ ID NO: 437
aggaaaugcuucucaaagc

SEQ ID NO: 37037 - RNA, 19 nt, Artificial Sequence
  Description of Artificial Sequence: Synthetic oligonucleotide
  Antisense strand to SEQ ID NO: 37036
gcuuugagaagcauuuccu

SEQ ID NO: 37038 - RNA, 19 nt, Artificial Sequence
  Description of Artificial Sequence: Synthetic oligonucleotide
  Sense strand starting at position 2452 of SEQ ID NO: 437
gagucagccuucucccaga

SEQ ID NO: 37039 - RNA, 19 nt, Artificial Sequence
  Description of Artificial Sequence: Synthetic oligonucleotide
  Antisense strand to SEQ ID NO: 37038
ucugggagaaggcugacuc

SEQ ID NO: 37040 - RNA, 19 nt, Artificial Sequence
  Description of Artificial Sequence: Synthetic oligonucleotide
  Sense strand starting at position 2008 of SEQ ID NO: 437
agguauaugcucuaccaau

SEQ ID NO: 37041 - RNA, 19 nt, Artificial Sequence
  Description of Artificial Sequence: Synthetic oligonucleotide
  Antisense strand to SEQ ID NO: 37040
auugguagagcauauaccu

SEQ ID NO: 37042 - RNA, 19 nt, Artificial Sequence
  Description of Artificial Sequence: Synthetic oligonucleotide
  Sense strand starting at position 2006 of SEQ ID NO: 437
acagguauaugcucuacca

SEQ ID NO: 37043 - RNA, 19 nt, Artificial Sequence
  Description of Artificial Sequence: Synthetic oligonucleotide
  Antisense strand to SEQ ID NO: 37042
ugguagagcauauaccugu

SEQ ID NO: 37044 - RNA, 19 nt, Artificial Sequence
  Description of Artificial Sequence: Synthetic oligonucleotide
  Sense strand starting at position 1499 of SEQ ID NO: 437
guguuaucacacuaggucu

SEQ ID NO: 37045 - RNA, 19 nt, Artificial Sequence
  Description of Artificial Sequence: Synthetic oligonucleotide
  Antisense strand to SEQ ID NO: 37044
agaccuagugugauaacac

SEQ ID NO: 37046 - RNA, 19 nt, Artificial Sequence
  Description of Artificial Sequence: Synthetic oligonucleotide
  Sense strand starting at position 1476 of SEQ ID NO: 437
ggaaggauugugcgugugu

SEQ ID NO: 37047 - RNA, 19 nt, Artificial Sequence
  Description of Artificial Sequence: Synthetic oligonucleotide
  Antisense strand to SEQ ID NO: 37046
acacacgcacaauccuucc

SEQ ID NO: 37048 - RNA, 19 nt, Artificial Sequence
  Description of Artificial Sequence: Synthetic oligonucleotide
  Sense strand starting at position 1180 of SEQ ID NO: 437
ggugguuccugggcagaga

SEQ ID NO: 37049 - RNA, 19 nt, Artificial Sequence
  Description of Artificial Sequence: Synthetic oligonucleotide
  Antisense strand to SEQ ID NO: 37048
ucucugcccaggaaccacc

SEQ ID NO: 37050 - RNA, 19 nt, Artificial Sequence
  Description of Artificial Sequence: Synthetic oligonucleotide
  Sense strand starting at position 1048 of SEQ ID NO: 437
ggcuguaucuccugaaagg

SEQ ID NO: 37051 - RNA, 19 nt, Artificial Sequence
  Description of Artificial Sequence: Synthetic oligonucleotide
  Antisense strand to SEQ ID NO: 37050
ccuuucaggagauacagcc

SEQ ID NO: 37052 - RNA, 19 nt, Artificial Sequence
  Description of Artificial Sequence: Synthetic oligonucleotide
  Sense strand starting at position 1046 of SEQ ID NO: 437
ugggcuguaucuccugaaa

SEQ ID NO: 37053 - RNA, 19 nt, Artificial Sequence
  Description of Artificial Sequence: Synthetic oligonucleotide
  Antisense strand to SEQ ID NO: 37052
uuucaggagauacagccca

SEQ ID NO: 37054 - RNA, 19 nt, Artificial Sequence
  Description of Artificial Sequence: Synthetic oligonucleotide
  Sense strand starting at position 684 of SEQ ID NO: 437
cagacuucugcguguccca

SEQ ID NO: 37055 - RNA, 19 nt, Artificial Sequence
  Description of Artificial Sequence: Synthetic oligonucleotide
  Antisense strand to SEQ ID NO: 37054
ugggacacgcagaagucug

SEQ ID NO: 37056 - RNA, 19 nt, Artificial Sequence
  Description of Artificial Sequence: Synthetic oligonucleotide
  Sense strand starting at position 481 of SEQ ID NO: 437
caggauuuguggcagguga

SEQ ID NO: 37057 - RNA, 19 nt, Artificial Sequence
  Description of Artificial Sequence: Synthetic oligonucleotide
  Antisense strand to SEQ ID NO: 37056
ucaccugccacaaauccug

SEQ ID NO: 37058 - RNA, 19 nt, Artificial Sequence
  Description of Artificial Sequence: Synthetic oligonucleotide
  Sense strand starting at position 344 of SEQ ID NO: 437
gcaaguuguccacguuccu

SEQ ID NO: 37059 - RNA, 19 nt, Artificial Sequence
  Description of Artificial Sequence: Synthetic oligonucleotide
  Antisense strand to SEQ ID NO: 37058
aggaacguggacaacuugc

SEQ ID NO: 37060 - RNA, 19 nt, Artificial Sequence
  Description of Artificial Sequence: Synthetic oligonucleotide
  Sense strand starting at position 56 of SEQ ID NO: 437
agaguuaccucggaccaca

SEQ ID NO: 37061 - RNA, 19 nt, Artificial Sequence
  Description of Artificial Sequence: Synthetic oligonucleotide
  Antisense strand to SEQ ID NO: 37060
ugugguccgagguaacucu

SEQ ID NO: 37062 - RNA, 19 nt, Artificial Sequence
  Description of Artificial Sequence: Synthetic oligonucleotide
  Sense strand starting at position 7 of SEQ ID NO: 437
cccagagcgugccuagaau

SEQ ID NO: 37063 - RNA, 19 nt, Artificial Sequence
  Description of Artificial Sequence: Synthetic oligonucleotide
  Antisense strand to SEQ ID NO: 37062
auucuaggcacgcucuggg

SEQ ID NO: 37064 - RNA, 19 nt, Artificial Sequence
  Description of Artificial Sequence: Synthetic oligonucleotide
  Sense strand starting at position 3954 of SEQ ID NO: 438
gguuauuccuggcuuccca

SEQ ID NO: 37065 - RNA, 19 nt, Artificial Sequence
  Description of Artificial Sequence: Synthetic oligonucleotide
  Antisense strand to SEQ ID NO: 37064
ugggaagccaggaauaacc

SEQ ID NO: 37066 - RNA, 19 nt, Artificial Sequence
  Description of Artificial Sequence: Synthetic oligonucleotide
  Sense strand starting at position 3942 of SEQ ID NO: 438
gagggaggcucugguuauu

SEQ ID NO: 37067 - RNA, 19 nt, Artificial Sequence
  Description of Artificial Sequence: Synthetic oligonucleotide
  Antisense strand to SEQ ID NO: 37066
aauaaccagagccucccuc

SEQ ID NO: 37068 - RNA, 19 nt, Artificial Sequence
  Description of Artificial Sequence: Synthetic oligonucleotide
  Sense strand starting at position 3677 of SEQ ID NO: 438
gucucugucucaugacagu

SEQ ID NO: 37069 - RNA, 19 nt, Artificial Sequence
  Description of Artificial Sequence: Synthetic oligonucleotide
  Antisense strand to SEQ ID NO: 37068
acugucaugagacagagac

SEQ ID NO: 37070 - RNA, 19 nt, Artificial Sequence
  Description of Artificial Sequence: Synthetic oligonucleotide
  Sense strand starting at position 3675 of SEQ ID NO: 438
gggucucugucucaugaca

SEQ ID NO: 37071 - RNA, 19 nt, Artificial Sequence
  Description of Artificial Sequence: Synthetic oligonucleotide
  Antisense strand to SEQ ID NO: 37070
ugucaugagacagagaccc

SEQ ID NO: 37072 - RNA, 19 nt, Artificial Sequence
  Description of Artificial Sequence: Synthetic oligonucleotide
  Sense strand starting at position 3532 of SEQ ID NO: 438
ccauauuagucgccuggca

SEQ ID NO: 37073 - RNA, 19 nt, Artificial Sequence
  Description of Artificial Sequence: Synthetic oligonucleotide
  Antisense strand to SEQ ID NO: 37072
ugccaggcgacuaauaugg

SEQ ID NO: 37074 - RNA, 19 nt, Artificial Sequence
  Description of Artificial Sequence: Synthetic oligonucleotide
  Sense strand starting at position 3129 of SEQ ID NO: 438
caugauggcccuuggauga

SEQ ID NO: 37075 - RNA, 19 nt, Artificial Sequence
  Description of Artificial Sequence: Synthetic oligonucleotide
  Antisense strand to SEQ ID NO: 37074
ucauccaagggccaucaug

SEQ ID NO: 37076 - RNA, 19 nt, Artificial Sequence
  Description of Artificial Sequence: Synthetic oligonucleotide
  Sense strand starting at position 2815 of SEQ ID NO: 438
gugccugcaacgugucaga

SEQ ID NO: 37077 - RNA, 19 nt, Artificial Sequence
  Description of Artificial Sequence: Synthetic oligonucleotide
  Antisense strand to SEQ ID NO: 37076
ucugacacguugcaggcac

SEQ ID NO: 37078 - RNA, 19 nt, Artificial Sequence
  Description of Artificial Sequence: Synthetic oligonucleotide
  Sense strand starting at position 2674 of SEQ ID NO: 438
ggaaaugccucucaaagca

SEQ ID NO: 37079 - RNA, 19 nt, Artificial Sequence
  Description of Artificial Sequence: Synthetic oligonucleotide
  Antisense strand to SEQ ID NO: 37078
ugcuuugagaggcauuucc

SEQ ID NO: 37080 - RNA, 19 nt, Artificial Sequence
  Description of Artificial Sequence: Synthetic oligonucleotide
  Sense strand starting at position 1453 of SEQ ID NO: 438
gugugucauugugugggau

SEQ ID NO: 37081 - RNA, 19 nt, Artificial Sequence
  Description of Artificial Sequence: Synthetic oligonucleotide
  Antisense strand to SEQ ID NO: 37080
aucccacacaaugacacac

SEQ ID NO: 37082 - RNA, 19 nt, Artificial Sequence
  Description of Artificial Sequence: Synthetic oligonucleotide
  Sense strand starting at position 1452 of SEQ ID NO: 438
ugugugucauuguguggga

SEQ ID NO: 37083 - RNA, 19 nt, Artificial Sequence
  Description of Artificial Sequence: Synthetic oligonucleotide
  Antisense strand to SEQ ID NO: 37082
ucccacacaaugacacaca

SEQ ID NO: 37084 - RNA, 19 nt, Artificial Sequence
  Description of Artificial Sequence: Synthetic oligonucleotide
  Sense strand starting at position 1421 of SEQ ID NO: 438
cugaguuuccgucacugag

SEQ ID NO: 37085 - RNA, 19 nt, Artificial Sequence
  Description of Artificial Sequence: Synthetic oligonucleotide
  Antisense strand to SEQ ID NO: 37084
cucagugacggaaacucag

SEQ ID NO: 37086 - RNA, 19 nt, Artificial Sequence
  Description of Artificial Sequence: Synthetic oligonucleotide
  Sense strand starting at position 1381 of SEQ ID NO: 438
augugaaguuaucacacua

SEQ ID NO: 37087 - RNA, 19 nt, Artificial Sequence
  Description of Artificial Sequence: Synthetic oligonucleotide
  Antisense strand to SEQ ID NO: 37086
uagugugauaacuucacau

SEQ ID NO: 37088 - RNA, 19 nt, Artificial Sequence
  Description of Artificial Sequence: Synthetic oligonucleotide
  Sense strand starting at position 1347 of SEQ ID NO: 438
gaaagauugugcgugugug

SEQ ID NO: 37089 - RNA, 19 nt, Artificial Sequence
  Description of Artificial Sequence: Synthetic oligonucleotide
  Antisense strand to SEQ ID NO: 37088
cacacacgcacaaucuuuc

SEQ ID NO: 37090 - RNA, 19 nt, Artificial Sequence
  Description of Artificial Sequence: Synthetic oligonucleotide
  Sense strand starting at position 1346 of SEQ ID NO: 438
ggaaagauugugcgugugu

SEQ ID NO: 37091 - RNA, 19 nt, Artificial Sequence
  Description of Artificial Sequence: Synthetic oligonucleotide
  Antisense strand to SEQ ID NO: 37090
acacacgcacaaucuuucc

SEQ ID NO: 37092 - RNA, 19 nt, Artificial Sequence
  Description of Artificial Sequence: Synthetic oligonucleotide
  Sense strand starting at position 1344 of SEQ ID NO: 438
gaggaaagauugugcgugu

SEQ ID NO: 37093 - RNA, 19 nt, Artificial Sequence
  Description of Artificial Sequence: Synthetic oligonucleotide
  Antisense strand to SEQ ID NO: 37092
acacgcacaaucuuuccuc

SEQ ID NO: 37094 - RNA, 19 nt, Artificial Sequence
  Description of Artificial Sequence: Synthetic oligonucleotide
  Sense strand starting at position 916 of SEQ ID NO: 438
ggcuguaucucccgaaagg

SEQ ID NO: 37095 - RNA, 19 nt, Artificial Sequence
  Description of Artificial Sequence: Synthetic oligonucleotide
  Antisense strand to SEQ ID NO: 37094
ccuuucgggagauacagcc

SEQ ID NO: 37096 - RNA, 19 nt, Artificial Sequence
  Description of Artificial Sequence: Synthetic oligonucleotide
  Sense strand starting at position 914 of SEQ ID NO: 438
ugggcuguaucucccgaaa

SEQ ID NO: 37097 - RNA, 19 nt, Artificial Sequence
  Description of Artificial Sequence: Synthetic oligonucleotide
  Antisense strand to SEQ ID NO: 37096
uuucgggagauacagccca

SEQ ID NO: 37098 - RNA, 19 nt, Artificial Sequence
  Description of Artificial Sequence: Synthetic oligonucleotide
  Sense strand starting at position 348 of SEQ ID NO: 438
caggauuugugggagguga

SEQ ID NO: 37099 - RNA, 19 nt, Artificial Sequence
  Description of Artificial Sequence: Synthetic oligonucleotide
  Antisense strand to SEQ ID NO: 37098
ucaccucccacaaauccug

SEQ ID NO: 37100 - RNA, 19 nt, Artificial Sequence
  Description of Artificial Sequence: Synthetic oligonucleotide
  Sense strand starting at position 283 of SEQ ID NO: 438
gauggagcuuggugguaua

SEQ ID NO: 37101 - RNA, 19 nt, Artificial Sequence
  Description of Artificial Sequence: Synthetic oligonucleotide
  Antisense strand to SEQ ID NO: 37100
uauaccaccaagcuccauc

SEQ ID NO: 37102 - RNA, 19 nt, Artificial Sequence
  Description of Artificial Sequence: Synthetic oligonucleotide
  Sense strand starting at position 3661 of SEQ ID NO: 439
gugaguuguucacguuccu

SEQ ID NO: 37103 - RNA, 19 nt, Artificial Sequence
  Description of Artificial Sequence: Synthetic oligonucleotide
  Antisense strand to SEQ ID NO: 37102
aggaacgugaacaacucac

SEQ ID NO: 37104 - RNA, 19 nt, Artificial Sequence
  Description of Artificial Sequence: Synthetic oligonucleotide
  Sense strand starting at position 3659 of SEQ ID NO: 439
augugaguuguucacguuc

SEQ ID NO: 37105 - RNA, 19 nt, Artificial Sequence
  Description of Artificial Sequence: Synthetic oligonucleotide
  Antisense strand to SEQ ID NO: 37104
gaacgugaacaacucacau

SEQ ID NO: 37106 - RNA, 19 nt, Artificial Sequence
  Description of Artificial Sequence: Synthetic oligonucleotide
  Sense strand starting at position 3657 of SEQ ID NO: 439
gaaugugaguuguucacgu

SEQ ID NO: 37107 - RNA, 19 nt, Artificial Sequence
  Description of Artificial Sequence: Synthetic oligonucleotide
  Antisense strand to SEQ ID NO: 37106
acgugaacaacucacauuc

SEQ ID NO: 37108 - RNA, 19 nt, Artificial Sequence
  Description of Artificial Sequence: Synthetic oligonucleotide
  Sense strand starting at position 3653 of SEQ ID NO: 439
gagggaaugugaguuguuc

SEQ ID NO: 37109 - RNA, 19 nt, Artificial Sequence
  Description of Artificial Sequence: Synthetic oligonucleotide
  Antisense strand to SEQ ID NO: 37108
gaacaacucacauucccuc

SEQ ID NO: 37110 - RNA, 19 nt, Artificial Sequence
  Description of Artificial Sequence: Synthetic oligonucleotide
  Sense strand starting at position 3604 of SEQ ID NO: 439
ggguaagguccuuaaacuc

SEQ ID NO: 37111 - RNA, 19 nt, Artificial Sequence
  Description of Artificial Sequence: Synthetic oligonucleotide
  Antisense strand to SEQ ID NO: 37110
gaguuuaaggaccuuaccc

SEQ ID NO: 37112 - RNA, 19 nt, Artificial Sequence
  Description of Artificial Sequence: Synthetic oligonucleotide
  Sense strand starting at position 3603 of SEQ ID NO: 439
aggguaagguccuuaaacu

SEQ ID NO: 37113 - RNA, 19 nt, Artificial Sequence
  Description of Artificial Sequence: Synthetic oligonucleotide
  Antisense strand to SEQ ID NO: 37112
aguuuaaggaccuuacccu

SEQ ID NO: 37114 - RNA, 19 nt, Artificial Sequence
  Description of Artificial Sequence: Synthetic oligonucleotide
  Sense strand starting at position 3370 of SEQ ID NO: 439
ugcucagugcaggaucaaa

SEQ ID NO: 37115 - RNA, 19 nt, Artificial Sequence
  Description of Artificial Sequence: Synthetic oligonucleotide
  Antisense strand to SEQ ID NO: 37114
uuugauccugcacugagca

SEQ ID NO: 37116 - RNA, 19 nt, Artificial Sequence
  Description of Artificial Sequence: Synthetic oligonucleotide
  Sense strand starting at position 3275 of SEQ ID NO: 439
aggauuccuuuguuuguuu

SEQ ID NO: 37117 - RNA, 19 nt, Artificial Sequence
  Description of Artificial Sequence: Synthetic oligonucleotide
  Antisense strand to SEQ ID NO: 37116
aaacaaacaaaggaauccu

SEQ ID NO: 37118 - RNA, 19 nt, Artificial Sequence
  Description of Artificial Sequence: Synthetic oligonucleotide
  Sense strand starting at position 3274 of SEQ ID NO: 439
uaggauuccuuuguuuguu

SEQ ID NO: 37119 - RNA, 19 nt, Artificial Sequence
  Description of Artificial Sequence: Synthetic oligonucleotide
  Antisense strand to SEQ ID NO: 37118
aacaaacaaaggaauccua

SEQ ID NO: 37120 - RNA, 19 nt, Artificial Sequence
  Description of Artificial Sequence: Synthetic oligonucleotide
  Sense strand starting at position 3270 of SEQ ID NO: 439
ggguuaggauuccuuuguu

SEQ ID NO: 37121 - RNA, 19 nt, Artificial Sequence
  Description of Artificial Sequence: Synthetic oligonucleotide
  Antisense strand to SEQ ID NO: 37120
aacaaaggaauccuaaccc

SEQ ID NO: 37122 - RNA, 19 nt, Artificial Sequence
  Description of Artificial Sequence: Synthetic oligonucleotide
  Sense strand starting at position 2968 of SEQ ID NO: 439
cucugaaguuaggauuauu

SEQ ID NO: 37123 - RNA, 19 nt, Artificial Sequence
  Description of Artificial Sequence: Synthetic oligonucleotide
  Antisense strand to SEQ ID NO: 37122
aauaauccuaacuucagag

SEQ ID NO: 37124 - RNA, 19 nt, Artificial Sequence
  Description of Artificial Sequence: Synthetic oligonucleotide
  Sense strand starting at position 2960 of SEQ ID NO: 439
gcagaacccucugaaguua

SEQ ID NO: 37125 - RNA, 19 nt, Artificial Sequence
  Description of Artificial Sequence: Synthetic oligonucleotide
  Antisense strand to SEQ ID NO: 37124
uaacuucagaggguucugc

SEQ ID NO: 37126 - RNA, 19 nt, Artificial Sequence
  Description of Artificial Sequence: Synthetic oligonucleotide
  Sense strand starting at position 2941 of SEQ ID NO: 439
uuacgaucucgccagauca

SEQ ID NO: 37127 - RNA, 19 nt, Artificial Sequence
  Description of Artificial Sequence: Synthetic oligonucleotide
  Antisense strand to SEQ ID NO: 37126
ugaucuggcgagaucguaa

SEQ ID NO: 37128 - RNA, 19 nt, Artificial Sequence
  Description of Artificial Sequence: Synthetic oligonucleotide
  Sense strand starting at position 2938 of SEQ ID NO: 439
acauuacgaucucgccaga

SEQ ID NO: 37129 - RNA, 19 nt, Artificial Sequence
  Description of Artificial Sequence: Synthetic oligonucleotide
  Antisense strand to SEQ ID NO: 37128
ucuggcgagaucguaaugu

SEQ ID NO: 37130 - RNA, 19 nt, Artificial Sequence
  Description of Artificial Sequence: Synthetic oligonucleotide
  Sense strand starting at position 2916 of SEQ ID NO: 439
acucuaccugugugauguu

SEQ ID NO: 37131 - RNA, 19 nt, Artificial Sequence
  Description of Artificial Sequence: Synthetic oligonucleotide
  Antisense strand to SEQ ID NO: 37130
aacaucacacagguagagu

SEQ ID NO: 37132 - RNA, 19 nt, Artificial Sequence
  Description of Artificial Sequence: Synthetic oligonucleotide
  Sense strand starting at position 2914 of SEQ ID NO: 439
acacucuaccugugugaug

SEQ ID NO: 37133 - RNA, 19 nt, Artificial Sequence
  Description of Artificial Sequence: Synthetic oligonucleotide
  Antisense strand to SEQ ID NO: 37132
caucacacagguagagugu

SEQ ID NO: 37134 - RNA, 19 nt, Artificial Sequence
  Description of Artificial Sequence: Synthetic oligonucleotide
  Sense strand starting at position 2888 of SEQ ID NO: 439
ggacaaucucuagguuaaa

SEQ ID NO: 37135 - RNA, 19 nt, Artificial Sequence
  Description of Artificial Sequence: Synthetic oligonucleotide
  Antisense strand to SEQ ID NO: 37134
uuuaaccuagagauugucc

SEQ ID NO: 37136 - RNA, 19 nt, Artificial Sequence
  Description of Artificial Sequence: Synthetic oligonucleotide
  Sense strand starting at position 2715 of SEQ ID NO: 439
auaccacuuucccgaggaa

SEQ ID NO: 37137 - RNA, 19 nt, Artificial Sequence
  Description of Artificial Sequence: Synthetic oligonucleotide
  Antisense strand to SEQ ID NO: 37136
uuccucgggaaagugguau

SEQ ID NO: 37138 - RNA, 19 nt, Artificial Sequence
  Description of Artificial Sequence: Synthetic oligonucleotide
  Sense strand starting at position 776 of SEQ ID NO: 439
cuacauaagguugggagua

SEQ ID NO: 37139 - RNA, 19 nt, Artificial Sequence
  Description of Artificial Sequence: Synthetic oligonucleotide
  Antisense strand to SEQ ID NO: 37138
uacucccaaccuuauguag

SEQ ID NO: 37140 - RNA, 19 nt, Artificial Sequence
  Description of Artificial Sequence: Synthetic oligonucleotide
  Sense strand starting at position 765 of SEQ ID NO: 439
gguagagcuuucuacauaa

SEQ ID NO: 37141 - RNA, 19 nt, Artificial Sequence
  Description of Artificial Sequence: Synthetic oligonucleotide
  Antisense strand to SEQ ID NO: 37140
uuauguagaaagcucuacc

SEQ ID NO: 37142 - RNA, 19 nt, Artificial Sequence
  Description of Artificial Sequence: Synthetic oligonucleotide
  Sense strand starting at position 655 of SEQ ID NO: 439
guuugaggccaguaaggua

SEQ ID NO: 37143 - RNA, 19 nt, Artificial Sequence
  Description of Artificial Sequence: Synthetic oligonucleotide
  Antisense strand to SEQ ID NO: 37142
uaccuuacuggccucaaac

SEQ ID NO: 37144 - RNA, 19 nt, Artificial Sequence
  Description of Artificial Sequence: Synthetic oligonucleotide
  Sense strand starting at position 430 of SEQ ID NO: 439
agaggcugauaggagaauu

SEQ ID NO: 37145 - RNA, 19 nt, Artificial Sequence
  Description of Artificial Sequence: Synthetic oligonucleotide
  Antisense strand to SEQ ID NO: 37144
aauucuccuaucagccucu

SEQ ID NO: 37146 - RNA, 19 nt, Artificial Sequence
  Description of Artificial Sequence: Synthetic oligonucleotide
  Sense strand starting at position 85 of SEQ ID NO: 439
gggauuaagugagauacac

SEQ ID NO: 37147 - RNA, 19 nt, Artificial Sequence
  Description of Artificial Sequence: Synthetic oligonucleotide
  Antisense strand to SEQ ID NO: 37146
guguaucucacuuaauccc

SEQ ID NO: 37148 - RNA, 19 nt, Artificial Sequence
  Description of Artificial Sequence: Synthetic oligonucleotide
  Sense strand starting at position 30 of SEQ ID NO: 439
gcuguaguaucaucuauaa

SEQ ID NO: 37149 - RNA, 19 nt, Artificial Sequence
  Description of Artificial Sequence: Synthetic oligonucleotide
  Antisense strand to SEQ ID NO: 37148
uuauagaugauacuacagc

SEQ ID NO: 37150 - RNA, 19 nt, Artificial Sequence
  Description of Artificial Sequence: Synthetic oligonucleotide
  Sense strand starting at position 125 of SEQ ID NO: 440
gccugccaugguugugauu

SEQ ID NO: 37151 - RNA, 19 nt, Artificial Sequence
  Description of Artificial Sequence: Synthetic oligonucleotide
  Antisense strand to SEQ ID NO: 37150
aaucacaaccauggcaggc

SEQ ID NO: 37152 - RNA, 19 nt, Artificial Sequence
  Description of Artificial Sequence: Synthetic oligonucleotide
  Sense strand starting at position 136 of SEQ ID NO: 440
uugugauugugcaggagug

SEQ ID NO: 37153 - RNA, 19 nt, Artificial Sequence
  Description of Artificial Sequence: Synthetic oligonucleotide
  Antisense strand to SEQ ID NO: 37152
cacuccugcacaaucacaa

SEQ ID NO: 37154 - RNA, 19 nt, Artificial Sequence
  Description of Artificial Sequence: Synthetic oligonucleotide
  Sense strand starting at position 137 of SEQ ID NO: 440
ugugauugugcaggaguga

SEQ ID NO: 37155 - RNA, 19 nt, Artificial Sequence
  Description of Artificial Sequence: Synthetic oligonucleotide
  Antisense strand to SEQ ID NO: 37154
ucacuccugcacaaucaca

SEQ ID NO: 37156 - RNA, 19 nt, Artificial Sequence
  Description of Artificial Sequence: Synthetic oligonucleotide
  Sense strand starting at position 316 of SEQ ID NO: 440
gcugauuggaugugaccua

SEQ ID NO: 37157 - RNA, 19 nt, Artificial Sequence
  Description of Artificial Sequence: Synthetic oligonucleotide
  Antisense strand to SEQ ID NO: 37156
uaggucacauccaaucagc

SEQ ID NO: 37158 - RNA, 19 nt, Artificial Sequence
  Description of Artificial Sequence: Synthetic oligonucleotide
  Sense strand starting at position 673 of SEQ ID NO: 440
ucagguuugguagguggaa

SEQ ID NO: 37159 - RNA, 19 nt, Artificial Sequence
  Description of Artificial Sequence: Synthetic oligonucleotide
  Antisense strand to SEQ ID NO: 37158
uuccaccuaccaaaccuga

SEQ ID NO: 37160 - RNA, 19 nt, Artificial Sequence
  Description of Artificial Sequence: Synthetic oligonucleotide
  Sense strand starting at position 675 of SEQ ID NO: 440
agguuugguagguggaaga

SEQ ID NO: 37161 - RNA, 19 nt, Artificial Sequence
  Description of Artificial Sequence: Synthetic oligonucleotide
  Antisense strand to SEQ ID NO: 37160
ucuuccaccuaccaaaccu

SEQ ID NO: 37162 - RNA, 19 nt, Artificial Sequence
  Description of Artificial Sequence: Synthetic oligonucleotide
  Sense strand starting at position 988 of SEQ ID NO: 440
gcagauugcagguggauca

SEQ ID NO: 37163 - RNA, 19 nt, Artificial Sequence
  Description of Artificial Sequence: Synthetic oligonucleotide
  Antisense strand to SEQ ID NO: 37162
ugauccaccugcaaucugc

SEQ ID NO: 37164 - RNA, 19 nt, Artificial Sequence
  Description of Artificial Sequence: Synthetic oligonucleotide
  Sense strand starting at position 1192 of SEQ ID NO: 440
ggagcaggugugcaucaua

SEQ ID NO: 37165 - RNA, 19 nt, Artificial Sequence
  Description of Artificial Sequence: Synthetic oligonucleotide
  Antisense strand to SEQ ID NO: 37164
uaugaugcacaccugcucc

SEQ ID NO: 37166 - RNA, 19 nt, Artificial Sequence
  Description of Artificial Sequence: Synthetic oligonucleotide
  Sense strand starting at position 1247 of SEQ ID NO: 440
gaugaagggucuuaacuga

SEQ ID NO: 37167 - RNA, 19 nt, Artificial Sequence
  Description of Artificial Sequence: Synthetic oligonucleotide
  Antisense strand to SEQ ID NO: 37166
ucaguuaagacccuucauc

SEQ ID NO: 37168 - RNA, 19 nt, Artificial Sequence
  Description of Artificial Sequence: Synthetic oligonucleotide
  Sense strand starting at position 1274 of SEQ ID NO: 440
gagugccacagguauuagu

SEQ ID NO: 37169 - RNA, 19 nt, Artificial Sequence
  Description of Artificial Sequence: Synthetic oligonucleotide
  Antisense strand to SEQ ID NO: 37168
acuaauaccuguggcacuc

SEQ ID NO: 37170 - RNA, 19 nt, Artificial Sequence
  Description of Artificial Sequence: Synthetic oligonucleotide
  Sense strand starting at position 1323 of SEQ ID NO: 440
gggaagagguuuggugacu

SEQ ID NO: 37171 - RNA, 19 nt, Artificial Sequence
  Description of Artificial Sequence: Synthetic oligonucleotide
  Antisense strand to SEQ ID NO: 37170
agucaccaaaccucuuccc

SEQ ID NO: 37172 - RNA, 19 nt, Artificial Sequence
  Description of Artificial Sequence: Synthetic oligonucleotide
  Sense strand starting at position 1324 of SEQ ID NO: 440
ggaagagguuuggugacua

SEQ ID NO: 37173 - RNA, 19 nt, Artificial Sequence
  Description of Artificial Sequence: Synthetic oligonucleotide
  Antisense strand to SEQ ID NO: 37172
uagucaccaaaccucuucc

SEQ ID NO: 37174 - RNA, 19 nt, Artificial Sequence
  Description of Artificial Sequence: Synthetic oligonucleotide
  Sense strand starting at position 1328 of SEQ ID NO: 440
gagguuuggugacuaguuc

SEQ ID NO: 37175 - RNA, 19 nt, Artificial Sequence
  Description of Artificial Sequence: Synthetic oligonucleotide
  Antisense strand to SEQ ID NO: 37174
gaacuagucaccaaaccuc

SEQ ID NO: 37176 - RNA, 19 nt, Artificial Sequence
  Description of Artificial Sequence: Synthetic oligonucleotide
  Sense strand starting at position 1329 of SEQ ID NO: 440
agguuuggugacuaguuca

SEQ ID NO: 37177 - RNA, 19 nt, Artificial Sequence
  Description of Artificial Sequence: Synthetic oligonucleotide
  Antisense strand to SEQ ID NO: 37176
ugaacuagucaccaaaccu

SEQ ID NO: 37178 - RNA, 19 nt, Artificial Sequence
  Description of Artificial Sequence: Synthetic oligonucleotide
  Sense strand starting at position 1348 of SEQ ID NO: 440
aaguuauagugacagagca

SEQ ID NO: 37179 - RNA, 19 nt, Artificial Sequence
  Description of Artificial Sequence: Synthetic oligonucleotide
  Antisense strand to SEQ ID NO: 37178
ugcucugucacuauaacuu

SEQ ID NO: 37180 - RNA, 19 nt, Artificial Sequence
  Description of Artificial Sequence: Synthetic oligonucleotide
  Sense strand starting at position 2234 of SEQ ID NO: 440
accugauucggguguccua

SEQ ID NO: 37181 - RNA, 19 nt, Artificial Sequence
  Description of Artificial Sequence: Synthetic oligonucleotide
  Antisense strand to SEQ ID NO: 37180
uaggacacccgaaucaggu

SEQ ID NO: 37182 - RNA, 19 nt, Artificial Sequence
  Description of Artificial Sequence: Synthetic oligonucleotide
  Sense strand starting at position 2305 of SEQ ID NO: 440
ucuugcaaggcugaucuaa

SEQ ID NO: 37183 - RNA, 19 nt, Artificial Sequence
  Description of Artificial Sequence: Synthetic oligonucleotide
  Antisense strand to SEQ ID NO: 37182
uuagaucagccuugcaaga

SEQ ID NO: 37184 - RNA, 19 nt, Artificial Sequence
  Description of Artificial Sequence: Synthetic oligonucleotide
  Sense strand starting at position 2339 of SEQ ID NO: 440
gcccuuugacuuuaggaca

SEQ ID NO: 37185 - RNA, 19 nt, Artificial Sequence
  Description of Artificial Sequence: Synthetic oligonucleotide
  Antisense strand to SEQ ID NO: 37184
uguccuaaagucaaagggc

SEQ ID NO: 37186 - RNA, 19 nt, Artificial Sequence
  Description of Artificial Sequence: Synthetic oligonucleotide
  Sense strand starting at position 2342 of SEQ ID NO: 440
cuuugacuuuaggacagaa

SEQ ID NO: 37187 - RNA, 19 nt, Artificial Sequence
  Description of Artificial Sequence: Synthetic oligonucleotide
  Antisense strand to SEQ ID NO: 37186
uucuguccuaaagucaaag

SEQ ID NO: 37188 - RNA, 19 nt, Artificial Sequence
  Description of Artificial Sequence: Synthetic oligonucleotide
  Sense strand starting at position 2372 of SEQ ID NO: 440
gccaguuugcagcggguaa

SEQ ID NO: 37189 - RNA, 19 nt, Artificial Sequence
  Description of Artificial Sequence: Synthetic oligonucleotide
  Antisense strand to SEQ ID NO: 37188
uuacccgcugcaaacuggc

SEQ ID NO: 37190 - RNA, 19 nt, Artificial Sequence
  Description of Artificial Sequence: Synthetic oligonucleotide
  Sense strand starting at position 2373 of SEQ ID NO: 440
ccaguuugcagcggguaaa

SEQ ID NO: 37191 - RNA, 19 nt, Artificial Sequence
  Description of Artificial Sequence: Synthetic oligonucleotide
  Antisense strand to SEQ ID NO: 37190
uuuacccgcugcaaacugg

SEQ ID NO: 37192 - RNA, 19 nt, Artificial Sequence
  Description of Artificial Sequence: Synthetic oligonucleotide
  Sense strand starting at position 2390 of SEQ ID NO: 440
aaacuagaguuagauguca

SEQ ID NO: 37193 - RNA, 19 nt, Artificial Sequence
  Description of Artificial Sequence: Synthetic oligonucleotide
  Antisense strand to SEQ ID NO: 37192
ugacaucuaacucuaguuu

SEQ ID NO: 37194 - RNA, 19 nt, Artificial Sequence
  Description of Artificial Sequence: Synthetic oligonucleotide
  Sense strand starting at position 2392 of SEQ ID NO: 440
acuagaguuagaugucaag

SEQ ID NO: 37195 - RNA, 19 nt, Artificial Sequence
  Description of Artificial Sequence: Synthetic oligonucleotide
  Antisense strand to SEQ ID NO: 37194
cuugacaucuaacucuagu

SEQ ID NO: 37196 - RNA, 19 nt, Artificial Sequence
  Description of Artificial Sequence: Synthetic oligonucleotide
  Sense strand starting at position 2395 of SEQ ID NO: 440
agaguuagaugucaaggau

SEQ ID NO: 37197 - RNA, 19 nt, Artificial Sequence
  Description of Artificial Sequence: Synthetic oligonucleotide
  Antisense strand to SEQ ID NO: 37196
auccuugacaucuaacucu

SEQ ID NO: 37198 - RNA, 19 nt, Artificial Sequence
  Description of Artificial Sequence: Synthetic oligonucleotide
  Sense strand starting at position 2398 of SEQ ID NO: 440
guuagaugucaaggauaac

SEQ ID NO: 37199 - RNA, 19 nt, Artificial Sequence
  Description of Artificial Sequence: Synthetic oligonucleotide
  Antisense strand to SEQ ID NO: 37198
guuauccuugacaucuaac

SEQ ID NO: 37200 - RNA, 19 nt, Artificial Sequence
  Description of Artificial Sequence: Synthetic oligonucleotide
  Sense strand starting at position 2666 of SEQ ID NO: 440
uggcaucagccugaaggaa

SEQ ID NO: 37201 - RNA, 19 nt, Artificial Sequence
  Description of Artificial Sequence: Synthetic oligonucleotide
  Antisense strand to SEQ ID NO: 37200
uuccuucaggcugaugcca

SEQ ID NO: 37202 - RNA, 19 nt, Artificial Sequence
  Description of Artificial Sequence: Synthetic oligonucleotide
  Sense strand starting at position 2889 of SEQ ID NO: 440
gggaauguuuaacucucuu

SEQ ID NO: 37203 - RNA, 19 nt, Artificial Sequence
  Description of Artificial Sequence: Synthetic oligonucleotide
  Antisense strand to SEQ ID NO: 37202
aagagaguuaaacauuccc

SEQ ID NO: 37204 - RNA, 19 nt, Artificial Sequence
  Description of Artificial Sequence: Synthetic oligonucleotide
  Sense strand starting at position 3224 of SEQ ID NO: 440
gggcguaggccucugguau

SEQ ID NO: 37205 - RNA, 19 nt, Artificial Sequence
  Description of Artificial Sequence: Synthetic oligonucleotide
  Antisense strand to SEQ ID NO: 37204
auaccagaggccuacgccc

SEQ ID NO: 37206 - RNA, 19 nt, Artificial Sequence
  Description of Artificial Sequence: Synthetic oligonucleotide
  Sense strand starting at position 3247 of SEQ ID NO: 440
ugcagcucuggccagagau

SEQ ID NO: 37207 - RNA, 19 nt, Artificial Sequence
  Description of Artificial Sequence: Synthetic oligonucleotide
  Antisense strand to SEQ ID NO: 37206
aucucuggccagagcugca

SEQ ID NO: 37208 - RNA, 19 nt, Artificial Sequence
  Description of Artificial Sequence: Synthetic oligonucleotide
  Sense strand starting at position 3450 of SEQ ID NO: 440
gaaguaaguccugagcuca

SEQ ID NO: 37209 - RNA, 19 nt, Artificial Sequence
  Description of Artificial Sequence: Synthetic oligonucleotide
  Antisense strand to SEQ ID NO: 37208
ugagcucaggacuuacuuc

SEQ ID NO: 37210 - RNA, 19 nt, Artificial Sequence
  Description of Artificial Sequence: Synthetic oligonucleotide
  Sense strand starting at position 3543 of SEQ ID NO: 440
cccugugaccagugcauua

SEQ ID NO: 37211 - RNA, 19 nt, Artificial Sequence
  Description of Artificial Sequence: Synthetic oligonucleotide
  Antisense strand to SEQ ID NO: 37210
uaaugcacuggucacaggg

SEQ ID NO: 37212 - RNA, 19 nt, Artificial Sequence
  Description of Artificial Sequence: Synthetic oligonucleotide
  Sense strand starting at position 3545 of SEQ ID NO: 440
cugugaccagugcauuaau

SEQ ID NO: 37213 - RNA, 19 nt, Artificial Sequence
  Description of Artificial Sequence: Synthetic oligonucleotide
  Antisense strand to SEQ ID NO: 37212
auuaaugcacuggucacag

SEQ ID NO: 37214 - RNA, 19 nt, Artificial Sequence
  Description of Artificial Sequence: Synthetic oligonucleotide
  Sense strand starting at position 3663 of SEQ ID NO: 440
gggcuuuccgcuugaaacu

SEQ ID NO: 37215 - RNA, 19 nt, Artificial Sequence
  Description of Artificial Sequence: Synthetic oligonucleotide
  Antisense strand to SEQ ID NO: 37214
aguuucaagcggaaagccc

SEQ ID NO: 37216 - RNA, 19 nt, Artificial Sequence
  Description of Artificial Sequence: Synthetic oligonucleotide
  Sense strand starting at position 3736 of SEQ ID NO: 440
gcaccagguccagauugaa

SEQ ID NO: 37217 - RNA, 19 nt, Artificial Sequence
  Description of Artificial Sequence: Synthetic oligonucleotide
  Antisense strand to SEQ ID NO: 37216
uucaaucuggaccuggugc

SEQ ID NO: 37218 - RNA, 19 nt, Artificial Sequence
  Description of Artificial Sequence: Synthetic oligonucleotide
  Sense strand starting at position 3834 of SEQ ID NO: 440
ggagguuugcuucauggag

SEQ ID NO: 37219 - RNA, 19 nt, Artificial Sequence
  Description of Artificial Sequence: Synthetic oligonucleotide
  Antisense strand to SEQ ID NO: 37218
cuccaugaagcaaaccucc

SEQ ID NO: 37220 - RNA, 19 nt, Artificial Sequence
  Description of Artificial Sequence: Synthetic oligonucleotide
  Sense strand starting at position 3851 of SEQ ID NO: 440
aguuguggugguccguuaa

SEQ ID NO: 37221 - RNA, 19 nt, Artificial Sequence
  Description of Artificial Sequence: Synthetic oligonucleotide
  Antisense strand to SEQ ID NO: 37220
uuaacggaccaccacaacu

SEQ ID NO: 37222 - RNA, 19 nt, Artificial Sequence
  Description of Artificial Sequence: Synthetic oligonucleotide
  Sense strand starting at position 3852 of SEQ ID NO: 440
guuguggugguccguuaaa

SEQ ID NO: 37223 - RNA, 19 nt, Artificial Sequence
  Description of Artificial Sequence: Synthetic oligonucleotide
  Antisense strand to SEQ ID NO: 37222
uuuaacggaccaccacaac

SEQ ID NO: 37224 - RNA, 19 nt, Artificial Sequence
  Description of Artificial Sequence: Synthetic oligonucleotide
  Sense strand starting at position 3854 of SEQ ID NO: 440
uguggugguccguuaaagu

SEQ ID NO: 37225 - RNA, 19 nt, Artificial Sequence
  Description of Artificial Sequence: Synthetic oligonucleotide
  Antisense strand to SEQ ID NO: 37224
acuuuaacggaccaccaca

SEQ ID NO: 37226 - RNA, 19 nt, Artificial Sequence
  Description of Artificial Sequence: Synthetic oligonucleotide
  Sense strand starting at position 3855 of SEQ ID NO: 440
guggugguccguuaaagua

SEQ ID NO: 37227 - RNA, 19 nt, Artificial Sequence
  Description of Artificial Sequence: Synthetic oligonucleotide
  Antisense strand to SEQ ID NO: 37226
uacuuuaacggaccaccac

SEQ ID NO: 37228 - RNA, 19 nt, Artificial Sequence
  Description of Artificial Sequence: Synthetic oligonucleotide
  Sense strand starting at position 3919 of SEQ ID NO: 440
cgcauaugcuccuccaaag

SEQ ID NO: 37229 - RNA, 19 nt, Artificial Sequence
  Description of Artificial Sequence: Synthetic oligonucleotide
  Antisense strand to SEQ ID NO: 37228
cuuuggaggagcauaugcg

SEQ ID NO: 37230 - RNA, 19 nt, Artificial Sequence
  Description of Artificial Sequence: Synthetic oligonucleotide
  Sense strand starting at position 3958 of SEQ ID NO: 441
agcaaaguuuccuuccaga

SEQ ID NO: 37231 - RNA, 19 nt, Artificial Sequence
  Description of Artificial Sequence: Synthetic oligonucleotide
  Antisense strand to SEQ ID NO: 37230
ucuggaaggaaacuuugcu

SEQ ID NO: 37232 - RNA, 19 nt, Artificial Sequence
  Description of Artificial Sequence: Synthetic oligonucleotide
  Sense strand starting at position 3917 of SEQ ID NO: 441
uggacugaaccguguuaau

SEQ ID NO: 37233 - RNA, 19 nt, Artificial Sequence
  Description of Artificial Sequence: Synthetic oligonucleotide
  Antisense strand to SEQ ID NO: 37232
auuaacacgguucagucca

SEQ ID NO: 37234 - RNA, 19 nt, Artificial Sequence
  Description of Artificial Sequence: Synthetic oligonucleotide
  Sense strand starting at position 3915 of SEQ ID NO: 441
ucuggacugaaccguguua

SEQ ID NO: 37235 - RNA, 19 nt, Artificial Sequence
  Description of Artificial Sequence: Synthetic oligonucleotide
  Antisense strand to SEQ ID NO: 37234
uaacacgguucaguccaga

SEQ ID NO: 37236 - RNA, 19 nt, Artificial Sequence
  Description of Artificial Sequence: Synthetic oligonucleotide
  Sense strand starting at position 3897 of SEQ ID NO: 441
ugaagugacugacuagacu

SEQ ID NO: 37237 - RNA, 19 nt, Artificial Sequence
  Description of Artificial Sequence: Synthetic oligonucleotide
  Antisense strand to SEQ ID NO: 37236
agucuagucagucacuuca

SEQ ID NO: 37238 - RNA, 19 nt, Artificial Sequence
  Description of Artificial Sequence: Synthetic oligonucleotide
  Sense strand starting at position 3741 of SEQ ID NO: 441
uguuaacugcauugagacu

SEQ ID NO: 37239 - RNA, 19 nt, Artificial Sequence
  Description of Artificial Sequence: Synthetic oligonucleotide
  Antisense strand to SEQ ID NO: 37238
agucucaaugcaguuaaca

SEQ ID NO: 37240 - RNA, 19 nt, Artificial Sequence
  Description of Artificial Sequence: Synthetic oligonucleotide
  Sense strand starting at position 3719 of SEQ ID NO: 441
ugugcugcuccgucaguau

SEQ ID NO: 37241 - RNA, 19 nt, Artificial Sequence
  Description of Artificial Sequence: Synthetic oligonucleotide
  Antisense strand to SEQ ID NO: 37240
auacugacggagcagcaca

SEQ ID NO: 37242 - RNA, 19 nt, Artificial Sequence
  Description of Artificial Sequence: Synthetic oligonucleotide
  Sense strand starting at position 3606 of SEQ ID NO: 441
uagucugacuguuuaaguu

SEQ ID NO: 37243 - RNA, 19 nt, Artificial Sequence
  Description of Artificial Sequence: Synthetic oligonucleotide
  Antisense strand to SEQ ID NO: 37242
aacuuaaacagucagacua

SEQ ID NO: 37244 - RNA, 19 nt, Artificial Sequence
  Description of Artificial Sequence: Synthetic oligonucleotide
  Sense strand starting at position 3602 of SEQ ID NO: 441
ucuguagucugacuguuua

SEQ ID NO: 37245 - RNA, 19 nt, Artificial Sequence
  Description of Artificial Sequence: Synthetic oligonucleotide
  Antisense strand to SEQ ID NO: 37244
uaaacagucagacuacaga

SEQ ID NO: 37246 - RNA, 19 nt, Artificial Sequence
  Description of Artificial Sequence: Synthetic oligonucleotide
  Sense strand starting at position 3573 of SEQ ID NO: 441
aguguaucccaguggucag

SEQ ID NO: 37247 - RNA, 19 nt, Artificial Sequence
  Description of Artificial Sequence: Synthetic oligonucleotide
  Antisense strand to SEQ ID NO: 37246
cugaccacugggauacacu

SEQ ID NO: 37248 - RNA, 19 nt, Artificial Sequence
  Description of Artificial Sequence: Synthetic oligonucleotide
  Sense strand starting at position 3560 of SEQ ID NO: 441
cugugaaagagccagugua

SEQ ID NO: 37249 - RNA, 19 nt, Artificial Sequence
  Description of Artificial Sequence: Synthetic oligonucleotide
  Antisense strand to SEQ ID NO: 37248
uacacuggcucuuucacag

SEQ ID NO: 37250 - RNA, 19 nt, Artificial Sequence
  Description of Artificial Sequence: Synthetic oligonucleotide
  Sense strand starting at position 3471 of SEQ ID NO: 441
auuguacguaggcaugaaa

SEQ ID NO: 37251 - RNA, 19 nt, Artificial Sequence
  Description of Artificial Sequence: Synthetic oligonucleotide
  Antisense strand to SEQ ID NO: 37250
uuucaugccuacguacaau

SEQ ID NO: 37252 - RNA, 19 nt, Artificial Sequence
  Description of Artificial Sequence: Synthetic oligonucleotide
  Sense strand starting at position 3467 of SEQ ID NO: 441
acaaauuguacguaggcau

SEQ ID NO: 37253 - RNA, 19 nt, Artificial Sequence
  Description of Artificial Sequence: Synthetic oligonucleotide
  Antisense strand to SEQ ID NO: 37252
augccuacguacaauuugu

SEQ ID NO: 37254 - RNA, 19 nt, Artificial Sequence
  Description of Artificial Sequence: Synthetic oligonucleotide
  Sense strand starting at position 3453 of SEQ ID NO: 441
accagaauguuugaacaaa

SEQ ID NO: 37255 - RNA, 19 nt, Artificial Sequence
  Description of Artificial Sequence: Synthetic oligonucleotide
  Antisense strand to SEQ ID NO: 37254
uuuguucaaacauucuggu

SEQ ID NO: 37256 - RNA, 19 nt, Artificial Sequence
  Description of Artificial Sequence: Synthetic oligonucleotide
  Sense strand starting at position 3417 of SEQ ID NO: 441
ggagguuugucuccauauc

SEQ ID NO: 37257 - RNA, 19 nt, Artificial Sequence
  Description of Artificial Sequence: Synthetic oligonucleotide
  Antisense strand to SEQ ID NO: 37256
gauauggagacaaaccucc

SEQ ID NO: 37258 - RNA, 19 nt, Artificial Sequence
  Description of Artificial Sequence: Synthetic oligonucleotide
  Sense strand starting at position 3414 of SEQ ID NO: 441
augggagguuugucuccau

SEQ ID NO: 37259 - RNA, 19 nt, Artificial Sequence
  Description of Artificial Sequence: Synthetic oligonucleotide
  Antisense strand to SEQ ID NO: 37258
auggagacaaaccucccau

SEQ ID NO: 37260 - RNA, 19 nt, Artificial Sequence
  Description of Artificial Sequence: Synthetic oligonucleotide
  Sense strand starting at position 3384 of SEQ ID NO: 441
gauaaauagugaguuccag

SEQ ID NO: 37261 - RNA, 19 nt, Artificial Sequence
  Description of Artificial Sequence: Synthetic oligonucleotide
  Antisense strand to SEQ ID NO: 37260
cuggaacucacuauuuauc

SEQ ID NO: 37262 - RNA, 19 nt, Artificial Sequence
  Description of Artificial Sequence: Synthetic oligonucleotide
  Sense strand starting at position 3260 of SEQ ID NO: 441
ccuaguuugcugcuguuga

SEQ ID NO: 37263 - RNA, 19 nt, Artificial Sequence
  Description of Artificial Sequence: Synthetic oligonucleotide
  Antisense strand to SEQ ID NO: 37262
ucaacagcagcaaacuagg

SEQ ID NO: 37264 - RNA, 19 nt, Artificial Sequence
  Description of Artificial Sequence: Synthetic oligonucleotide
  Sense strand starting at position 3229 of SEQ ID NO: 441
ugugcuugccuugagauug

SEQ ID NO: 37265 - RNA, 19 nt, Artificial Sequence
  Description of Artificial Sequence: Synthetic oligonucleotide
  Antisense strand to SEQ ID NO: 37264
caaucucaaggcaagcaca

SEQ ID NO: 37266 - RNA, 19 nt, Artificial Sequence
  Description of Artificial Sequence: Synthetic oligonucleotide
  Sense strand starting at position 3189 of SEQ ID NO: 441
guuaaacugcccugggauu

SEQ ID NO: 37267 - RNA, 19 nt, Artificial Sequence
  Description of Artificial Sequence: Synthetic oligonucleotide
  Antisense strand to SEQ ID NO: 37266
aaucccagggcaguuuaac

SEQ ID NO: 37268 - RNA, 19 nt, Artificial Sequence
  Description of Artificial Sequence: Synthetic oligonucleotide
  Sense strand starting at position 3102 of SEQ ID NO: 441
uuguguuucccagauccuc

SEQ ID NO: 37269 - RNA, 19 nt, Artificial Sequence
  Description of Artificial Sequence: Synthetic oligonucleotide
  Antisense strand to SEQ ID NO: 37268
gaggaucugggaaacacaa

SEQ ID NO: 37270 - RNA, 19 nt, Artificial Sequence
  Description of Artificial Sequence: Synthetic oligonucleotide
  Sense strand starting at position 3067 of SEQ ID NO: 441
cagaaucaccuaggugcua

SEQ ID NO: 37271 - RNA, 19 nt, Artificial Sequence
  Description of Artificial Sequence: Synthetic oligonucleotide
  Antisense strand to SEQ ID NO: 37270
uagcaccuaggugauucug

SEQ ID NO: 37272 - RNA, 19 nt, Artificial Sequence
  Description of Artificial Sequence: Synthetic oligonucleotide
  Sense strand starting at position 2905 of SEQ ID NO: 441
gagcuagcccuuggagagu

SEQ ID NO: 37273 - RNA, 19 nt, Artificial Sequence
  Description of Artificial Sequence: Synthetic oligonucleotide
  Antisense strand to SEQ ID NO: 37272
acucuccaagggcuagcuc

SEQ ID NO: 37274 - RNA, 19 nt, Artificial Sequence
  Description of Artificial Sequence: Synthetic oligonucleotide
  Sense strand starting at position 1181 of SEQ ID NO: 441
caaagaaguucguuugaaa

SEQ ID NO: 37275 - RNA, 19 nt, Artificial Sequence
  Description of Artificial Sequence: Synthetic oligonucleotide
  Antisense strand to SEQ ID NO: 37274
uuucaaacgaacuucuuug

SEQ ID NO: 37276 - RNA, 19 nt, Artificial Sequence
  Description of Artificial Sequence: Synthetic oligonucleotide
  Sense strand starting at position 1087 of SEQ ID NO: 441
accugcucuuugguaaauu

SEQ ID NO: 37277 - RNA, 19 nt, Artificial Sequence
  Description of Artificial Sequence: Synthetic oligonucleotide
  Antisense strand to SEQ ID NO: 37276
aauuuaccaaagagcaggu

SEQ ID NO: 37278 - RNA, 19 nt, Artificial Sequence
  Description of Artificial Sequence: Synthetic oligonucleotide
  Sense strand starting at position 1084 of SEQ ID NO: 441
agcaccugcucuuugguaa

SEQ ID NO: 37279 - RNA, 19 nt, Artificial Sequence
  Description of Artificial Sequence: Synthetic oligonucleotide
  Antisense strand to SEQ ID NO: 37278
uuaccaaagagcaggugcu

SEQ ID NO: 37280 - RNA, 19 nt, Artificial Sequence
  Description of Artificial Sequence: Synthetic oligonucleotide
  Sense strand starting at position 1021 of SEQ ID NO: 441
ccaguaaaugcccaagaca

SEQ ID NO: 37281 - RNA, 19 nt, Artificial Sequence
  Description of Artificial Sequence: Synthetic oligonucleotide
  Antisense strand to SEQ ID NO: 37280
ugucuugggcauuuacugg

SEQ ID NO: 37282 - RNA, 19 nt, Artificial Sequence
  Description of Artificial Sequence: Synthetic oligonucleotide
  Sense strand starting at position 1001 of SEQ ID NO: 441
gcgcuugagaaacgagaaa

SEQ ID NO: 37283 - RNA, 19 nt, Artificial Sequence
  Description of Artificial Sequence: Synthetic oligonucleotide
  Antisense strand to SEQ ID NO: 37282
uuucucguuucucaagcgc

SEQ ID NO: 37284 - RNA, 19 nt, Artificial Sequence
  Description of Artificial Sequence: Synthetic oligonucleotide
  Sense strand starting at position 994 of SEQ ID NO: 441
acacuccgcgcuugagaaa

SEQ ID NO: 37285 - RNA, 19 nt, Artificial Sequence
  Description of Artificial Sequence: Synthetic oligonucleotide
  Antisense strand to SEQ ID NO: 37284
uuucucaagcgcggagugu

SEQ ID NO: 37286 - RNA, 19 nt, Artificial Sequence
  Description of Artificial Sequence: Synthetic oligonucleotide
  Sense strand starting at position 811 of SEQ ID NO: 441
uaguauguguaagcaaaua

SEQ ID NO: 37287 - RNA, 19 nt, Artificial Sequence
  Description of Artificial Sequence: Synthetic oligonucleotide
  Antisense strand to SEQ ID NO: 37286
uauuugcuuacacauacua

SEQ ID NO: 37288 - RNA, 19 nt, Artificial Sequence
  Description of Artificial Sequence: Synthetic oligonucleotide
  Sense strand starting at position 742 of SEQ ID NO: 441
uguuuauaacuucgacucu

SEQ ID NO: 37289 - RNA, 19 nt, Artificial Sequence
  Description of Artificial Sequence: Synthetic oligonucleotide
  Antisense strand to SEQ ID NO: 37288
agagucgaaguuauaaaca

SEQ ID NO: 37290 - RNA, 19 nt, Artificial Sequence
  Description of Artificial Sequence: Synthetic oligonucleotide
  Sense strand starting at position 733 of SEQ ID NO: 441
ggauccagauguuuauaac

SEQ ID NO: 37291 - RNA, 19 nt, Artificial Sequence
  Description of Artificial Sequence: Synthetic oligonucleotide
  Antisense strand to SEQ ID NO: 37290
guuauaaacaucuggaucc

SEQ ID NO: 37292 - RNA, 19 nt, Artificial Sequence
  Description of Artificial Sequence: Synthetic oligonucleotide
  Sense strand starting at position 730 of SEQ ID NO: 441
gcuggauccagauguuuau

SEQ ID NO: 37293 - RNA, 19 nt, Artificial Sequence
  Description of Artificial Sequence: Synthetic oligonucleotide
  Antisense strand to SEQ ID NO: 37292
auaaacaucuggauccagc

SEQ ID NO: 37294 - RNA, 19 nt, Artificial Sequence
  Description of Artificial Sequence: Synthetic oligonucleotide
  Sense strand starting at position 659 of SEQ ID NO: 441
ucugaaugagccuggcuuu

SEQ ID NO: 37295 - RNA, 19 nt, Artificial Sequence
  Description of Artificial Sequence: Synthetic oligonucleotide
  Antisense strand to SEQ ID NO: 37294
aaagccaggcucauucaga

SEQ ID NO: 37296 - RNA, 19 nt, Artificial Sequence
  Description of Artificial Sequence: Synthetic oligonucleotide
  Sense strand starting at position 649 of SEQ ID NO: 441
guugccuagcucugaauga

SEQ ID NO: 37297 - RNA, 19 nt, Artificial Sequence
  Description of Artificial Sequence: Synthetic oligonucleotide
  Antisense strand to SEQ ID NO: 37296
ucauucagagcuaggcaac

SEQ ID NO: 37298 - RNA, 19 nt, Artificial Sequence
  Description of Artificial Sequence: Synthetic oligonucleotide
  Sense strand starting at position 572 of SEQ ID NO: 441
auguccuuucuuuaaagua

SEQ ID NO: 37299 - RNA, 19 nt, Artificial Sequence
  Description of Artificial Sequence: Synthetic oligonucleotide
  Antisense strand to SEQ ID NO: 37298
uacuuuaaagaaaggacau

SEQ ID NO: 37300 - RNA, 19 nt, Artificial Sequence
  Description of Artificial Sequence: Synthetic oligonucleotide
  Sense strand starting at position 215 of SEQ ID NO: 441
uguuccagucauuacugaa

SEQ ID NO: 37301 - RNA, 19 nt, Artificial Sequence
  Description of Artificial Sequence: Synthetic oligonucleotide
  Antisense strand to SEQ ID NO: 37300
uucaguaaugacuggaaca

SEQ ID NO: 37302 - RNA, 19 nt, Artificial Sequence
  Description of Artificial Sequence: Synthetic oligonucleotide
  Sense strand starting at position 214 of SEQ ID NO: 441
cuguuccagucauuacuga

SEQ ID NO: 37303 - RNA, 19 nt, Artificial Sequence
  Description of Artificial Sequence: Synthetic oligonucleotide
  Antisense strand to SEQ ID NO: 37302
ucaguaaugacuggaacag

SEQ ID NO: 37304 - RNA, 19 nt, Artificial Sequence
  Description of Artificial Sequence: Synthetic oligonucleotide
  Sense strand starting at position 92 of SEQ ID NO: 441
accgaaacgcuuugauauu

SEQ ID NO: 37305 - RNA, 19 nt, Artificial Sequence
  Description of Artificial Sequence: Synthetic oligonucleotide
  Antisense strand to SEQ ID NO: 37304
aauaucaaagcguuucggu

SEQ ID NO: 37306 - RNA, 19 nt, Artificial Sequence
  Description of Artificial Sequence: Synthetic oligonucleotide
  Sense strand starting at position 38 of SEQ ID NO: 441
gguuccuuccuacauucua

SEQ ID NO: 37307 - RNA, 19 nt, Artificial Sequence
  Description of Artificial Sequence: Synthetic oligonucleotide
  Antisense strand to SEQ ID NO: 37306
uagaauguaggaaggaacc

SEQ ID NO: 37308 - RNA, 19 nt, Artificial Sequence
  Description of Artificial Sequence: Synthetic oligonucleotide
  Sense strand starting at position 35 of SEQ ID NO: 441
ucagguuccuuccuacauu

SEQ ID NO: 37309 - RNA, 19 nt, Artificial Sequence
  Description of Artificial Sequence: Synthetic oligonucleotide
  Antisense strand to SEQ ID NO: 37308
aauguaggaaggaaccuga

SEQ ID NO: 37310 - RNA, 19 nt, Artificial Sequence
  Description of Artificial Sequence: Synthetic oligonucleotide
  Sense strand starting at position 130 of SEQ ID NO: 442
agauauagaucugugugau

SEQ ID NO: 37311 - RNA, 19 nt, Artificial Sequence
  Description of Artificial Sequence: Synthetic oligonucleotide
  Antisense strand to SEQ ID NO: 37310
aucacacagaucuauaucu

SEQ ID NO: 37312 - RNA, 19 nt, Artificial Sequence
  Description of Artificial Sequence: Synthetic oligonucleotide
  Sense strand starting at position 131 of SEQ ID NO: 442
gauauagaucugugugaug

SEQ ID NO: 37313 - RNA, 19 nt, Artificial Sequence
  Description of Artificial Sequence: Synthetic oligonucleotide
  Antisense strand to SEQ ID NO: 37312
caucacacagaucuauauc

SEQ ID NO: 37314 - RNA, 19 nt, Artificial Sequence
  Description of Artificial Sequence: Synthetic oligonucleotide
  Sense strand starting at position 146 of SEQ ID NO: 442
gaugcugaguuccucacaa

SEQ ID NO: 37315 - RNA, 19 nt, Artificial Sequence
  Description of Artificial Sequence: Synthetic oligonucleotide
  Antisense strand to SEQ ID NO: 37314
uugugaggaacucagcauc

SEQ ID NO: 37316 - RNA, 19 nt, Artificial Sequence
  Description of Artificial Sequence: Synthetic oligonucleotide
  Sense strand starting at position 148 of SEQ ID NO: 442
ugcugaguuccucacaagu

SEQ ID NO: 37317 - RNA, 19 nt, Artificial Sequence
  Description of Artificial Sequence: Synthetic oligonucleotide
  Antisense strand to SEQ ID NO: 37316
acuugugaggaacucagca

SEQ ID NO: 37318 - RNA, 19 nt, Artificial Sequence
  Description of Artificial Sequence: Synthetic oligonucleotide
  Sense strand starting at position 171 of SEQ ID NO: 442
agaguaaagcuuugguuua

SEQ ID NO: 37319 - RNA, 19 nt, Artificial Sequence
  Description of Artificial Sequence: Synthetic oligonucleotide
  Antisense strand to SEQ ID NO: 37318
uaaaccaaagcuuuacucu

SEQ ID NO: 37320 - RNA, 19 nt, Artificial Sequence
  Description of Artificial Sequence: Synthetic oligonucleotide
  Sense strand starting at position 173 of SEQ ID NO: 442
aguaaagcuuugguuuaca

SEQ ID NO: 37321 - RNA, 19 nt, Artificial Sequence
  Description of Artificial Sequence: Synthetic oligonucleotide
  Antisense strand to SEQ ID NO: 37320
uguaaaccaaagcuuuacu

SEQ ID NO: 37322 - RNA, 19 nt, Artificial Sequence
  Description of Artificial Sequence: Synthetic oligonucleotide
  Sense strand starting at position 198 of SEQ ID NO: 442
auaaauguuguacacucau

SEQ ID NO: 37323 - RNA, 19 nt, Artificial Sequence
  Description of Artificial Sequence: Synthetic oligonucleotide
  Antisense strand to SEQ ID NO: 37322
augaguguacaacauuuau

SEQ ID NO: 37324 - RNA, 19 nt, Artificial Sequence
  Description of Artificial Sequence: Synthetic oligonucleotide
  Sense strand starting at position 204 of SEQ ID NO: 442
guuguacacucauuaagag

SEQ ID NO: 37325 - RNA, 19 nt, Artificial Sequence
  Description of Artificial Sequence: Synthetic oligonucleotide
  Antisense strand to SEQ ID NO: 37324
cucuuaaugaguguacaac

SEQ ID NO: 37326 - RNA, 19 nt, Artificial Sequence
  Description of Artificial Sequence: Synthetic oligonucleotide
  Sense strand starting at position 205 of SEQ ID NO: 442
uuguacacucauuaagagu

SEQ ID NO: 37327 - RNA, 19 nt, Artificial Sequence
  Description of Artificial Sequence: Synthetic oligonucleotide
  Antisense strand to SEQ ID NO: 37326
acucuuaaugaguguacaa

SEQ ID NO: 37328 - RNA, 19 nt, Artificial Sequence
  Description of Artificial Sequence: Synthetic oligonucleotide
  Sense strand starting at position 235 of SEQ ID NO: 442
ccucaaguagacuaucagu

SEQ ID NO: 37329 - RNA, 19 nt, Artificial Sequence
  Description of Artificial Sequence: Synthetic oligonucleotide
  Antisense strand to SEQ ID NO: 37328
acugauagucuacuugagg

SEQ ID NO: 37330 - RNA, 19 nt, Artificial Sequence
  Description of Artificial Sequence: Synthetic oligonucleotide
  Sense strand starting at position 252 of SEQ ID NO: 442
guguccugaggguaggaau

SEQ ID NO: 37331 - RNA, 19 nt, Artificial Sequence
  Description of Artificial Sequence: Synthetic oligonucleotide
  Antisense strand to SEQ ID NO: 37330
auuccuacccucaggacac

SEQ ID NO: 37332 - RNA, 19 nt, Artificial Sequence
  Description of Artificial Sequence: Synthetic oligonucleotide
  Sense strand starting at position 275 of SEQ ID NO: 442
ucucccagguuucuacaua

SEQ ID NO: 37333 - RNA, 19 nt, Artificial Sequence
  Description of Artificial Sequence: Synthetic oligonucleotide
  Antisense strand to SEQ ID NO: 37332
uauguagaaaccugggaga

SEQ ID NO: 37334 - RNA, 19 nt, Artificial Sequence
  Description of Artificial Sequence: Synthetic oligonucleotide
  Sense strand starting at position 376 of SEQ ID NO: 442
ggccaacucucccuugaga

SEQ ID NO: 37335 - RNA, 19 nt, Artificial Sequence
  Description of Artificial Sequence: Synthetic oligonucleotide
  Antisense strand to SEQ ID NO: 37334
ucucaagggagaguuggcc

SEQ ID NO: 37336 - RNA, 19 nt, Artificial Sequence
  Description of Artificial Sequence: Synthetic oligonucleotide
  Sense strand starting at position 446 of SEQ ID NO: 442
ccacucuugugcuuaagac

SEQ ID NO: 37337 - RNA, 19 nt, Artificial Sequence
  Description of Artificial Sequence: Synthetic oligonucleotide
  Antisense strand to SEQ ID NO: 37336
gucuuaagcacaagagugg

SEQ ID NO: 37338 - RNA, 19 nt, Artificial Sequence
  Description of Artificial Sequence: Synthetic oligonucleotide
  Sense strand starting at position 454 of SEQ ID NO: 442
gugcuuaagacguagauaa

SEQ ID NO: 37339 - RNA, 19 nt, Artificial Sequence
  Description of Artificial Sequence: Synthetic oligonucleotide
  Antisense strand to SEQ ID NO: 37338
uuaucuacgucuuaagcac

SEQ ID NO: 37340 - RNA, 19 nt, Artificial Sequence
  Description of Artificial Sequence: Synthetic oligonucleotide
  Sense strand starting at position 456 of SEQ ID NO: 442
gcuuaagacguagauaaca

SEQ ID NO: 37341 - RNA, 19 nt, Artificial Sequence
  Description of Artificial Sequence: Synthetic oligonucleotide
  Antisense strand to SEQ ID NO: 37340
uguuaucuacgucuuaagc

SEQ ID NO: 37342 - RNA, 19 nt, Artificial Sequence
  Description of Artificial Sequence: Synthetic oligonucleotide
  Sense strand starting at position 913 of SEQ ID NO: 442
ugucacaauccaggaagau

SEQ ID NO: 37343 - RNA, 19 nt, Artificial Sequence
  Description of Artificial Sequence: Synthetic oligonucleotide
  Antisense strand to SEQ ID NO: 37342
aucuuccuggauugugaca

SEQ ID NO: 37344 - RNA, 19 nt, Artificial Sequence
  Description of Artificial Sequence: Synthetic oligonucleotide
  Sense strand starting at position 993 of SEQ ID NO: 442
augagaaucgcguaugcaa

SEQ ID NO: 37345 - RNA, 19 nt, Artificial Sequence
  Description of Artificial Sequence: Synthetic oligonucleotide
  Antisense strand to SEQ ID NO: 37344
uugcauacgcgauucucau

SEQ ID NO: 37346 - RNA, 19 nt, Artificial Sequence
  Description of Artificial Sequence: Synthetic oligonucleotide
  Sense strand starting at position 1012 of SEQ ID NO: 442
aagguuuaaugauuccgau

SEQ ID NO: 37347 - RNA, 19 nt, Artificial Sequence
  Description of Artificial Sequence: Synthetic oligonucleotide
  Antisense strand to SEQ ID NO: 37346
aucggaaucauuaaaccuu

SEQ ID NO: 37348 - RNA, 19 nt, Artificial Sequence
  Description of Artificial Sequence: Synthetic oligonucleotide
  Sense strand starting at position 1018 of SEQ ID NO: 442
uaaugauuccgaugucuga

SEQ ID NO: 37349 - RNA, 19 nt, Artificial Sequence
  Description of Artificial Sequence: Synthetic oligonucleotide
  Antisense strand to SEQ ID NO: 37348
ucagacaucggaaucauua

SEQ ID NO: 37350 - RNA, 19 nt, Artificial Sequence
  Description of Artificial Sequence: Synthetic oligonucleotide
  Sense strand starting at position 1072 of SEQ ID NO: 442
aauugaggagggugguauu

SEQ ID NO: 37351 - RNA, 19 nt, Artificial Sequence
  Description of Artificial Sequence: Synthetic oligonucleotide
  Antisense strand to SEQ ID NO: 37350
aauaccacccuccucaauu

SEQ ID NO: 37352 - RNA, 19 nt, Artificial Sequence
  Description of Artificial Sequence: Synthetic oligonucleotide
  Sense strand starting at position 1075 of SEQ ID NO: 442
ugaggagggugguauuuga

SEQ ID NO: 37353 - RNA, 19 nt, Artificial Sequence
  Description of Artificial Sequence: Synthetic oligonucleotide
  Antisense strand to SEQ ID NO: 37352
ucaaauaccacccuccuca

SEQ ID NO: 37354 - RNA, 19 nt, Artificial Sequence
  Description of Artificial Sequence: Synthetic oligonucleotide
  Sense strand starting at position 1319 of SEQ ID NO: 442
ggcaaauucuuccugcaug

SEQ ID NO: 37355 - RNA, 19 nt, Artificial Sequence
  Description of Artificial Sequence: Synthetic oligonucleotide
  Antisense strand to SEQ ID NO: 37354
caugcaggaagaauuugcc

SEQ ID NO: 37356 - RNA, 19 nt, Artificial Sequence
  Description of Artificial Sequence: Synthetic oligonucleotide
  Sense strand starting at position 1342 of SEQ ID NO: 442
aagugacacggugauguau

SEQ ID NO: 37357 - RNA, 19 nt, Artificial Sequence
  Description of Artificial Sequence: Synthetic oligonucleotide
  Antisense strand to SEQ ID NO: 37356
auacaucaccgugucacuu

SEQ ID NO: 37358 - RNA, 19 nt, Artificial Sequence
  Description of Artificial Sequence: Synthetic oligonucleotide
  Sense strand starting at position 1387 of SEQ ID NO: 442
cgaguccaacuuugauauu

SEQ ID NO: 37359 - RNA, 19 nt, Artificial Sequence
  Description of Artificial Sequence: Synthetic oligonucleotide
  Antisense strand to SEQ ID NO: 37358
aauaucaaaguuggacucg

SEQ ID NO: 37360 - RNA, 19 nt, Artificial Sequence
  Description of Artificial Sequence: Synthetic oligonucleotide
  Sense strand starting at position 1483 of SEQ ID NO: 442
acaggucuucuugguacau

SEQ ID NO: 37361 - RNA, 19 nt, Artificial Sequence
  Description of Artificial Sequence: Synthetic oligonucleotide
  Antisense strand to SEQ ID NO: 37360
auguaccaagaagaccugu

SEQ ID NO: 37362 - RNA, 19 nt, Artificial Sequence
  Description of Artificial Sequence: Synthetic oligonucleotide
  Sense strand starting at position 1487 of SEQ ID NO: 442
gucuucuugguacaucuaa

SEQ ID NO: 37363 - RNA, 19 nt, Artificial Sequence
  Description of Artificial Sequence: Synthetic oligonucleotide
  Antisense strand to SEQ ID NO: 37362
uuagauguaccaagaagac

SEQ ID NO: 37364 - RNA, 19 nt, Artificial Sequence
  Description of Artificial Sequence: Synthetic oligonucleotide
  Sense strand starting at position 2223 of SEQ ID NO: 442
uggcuuaguuagguuugga

SEQ ID NO: 37365 - RNA, 19 nt, Artificial Sequence
  Description of Artificial Sequence: Synthetic oligonucleotide
  Antisense strand to SEQ ID NO: 37364
uccaaaccuaacuaagcca

SEQ ID NO: 37366 - RNA, 19 nt, Artificial Sequence
  Description of Artificial Sequence: Synthetic oligonucleotide
  Sense strand starting at position 2248 of SEQ ID NO: 442
aagaaaggauugucauugu

SEQ ID NO: 37367 - RNA, 19 nt, Artificial Sequence
  Description of Artificial Sequence: Synthetic oligonucleotide
  Antisense strand to SEQ ID NO: 37366
acaaugacaauccuuucuu

SEQ ID NO: 37368 - RNA, 19 nt, Artificial Sequence
  Description of Artificial Sequence: Synthetic oligonucleotide
  Sense strand starting at position 2251 of SEQ ID NO: 442
aaaggauugucauugucaa

SEQ ID NO: 37369 - RNA, 19 nt, Artificial Sequence
  Description of Artificial Sequence: Synthetic oligonucleotide
  Antisense strand to SEQ ID NO: 37368
uugacaaugacaauccuuu

SEQ ID NO: 37370 - RNA, 19 nt, Artificial Sequence
  Description of Artificial Sequence: Synthetic oligonucleotide
  Sense strand starting at position 2252 of SEQ ID NO: 442
aaggauugucauugucaau

SEQ ID NO: 37371 - RNA, 19 nt, Artificial Sequence
  Description of Artificial Sequence: Synthetic oligonucleotide
  Antisense strand to SEQ ID NO: 37370
auugacaaugacaauccuu

SEQ ID NO: 37372 - RNA, 19 nt, Artificial Sequence
  Description of Artificial Sequence: Synthetic oligonucleotide
  Sense strand starting at position 2314 of SEQ ID NO: 442
ggugaagucucauucuucu

SEQ ID NO: 37373 - RNA, 19 nt, Artificial Sequence
  Description of Artificial Sequence: Synthetic oligonucleotide
  Antisense strand to SEQ ID NO: 37372
agaagaaugagacuucacc

SEQ ID NO: 37374 - RNA, 19 nt, Artificial Sequence
  Description of Artificial Sequence: Synthetic oligonucleotide
  Sense strand starting at position 2452 of SEQ ID NO: 442
ggaggaaagguuugagcaa

SEQ ID NO: 37375 - RNA, 19 nt, Artificial Sequence
  Description of Artificial Sequence: Synthetic oligonucleotide
  Antisense strand to SEQ ID NO: 37374
uugcucaaaccuuuccucc

SEQ ID NO: 37376 - RNA, 19 nt, Artificial Sequence
  Description of Artificial Sequence: Synthetic oligonucleotide
  Sense strand starting at position 2479 of SEQ ID NO: 442
uggagaaucgggugccgaa

SEQ ID NO: 37377 - RNA, 19 nt, Artificial Sequence
  Description of Artificial Sequence: Synthetic oligonucleotide
  Antisense strand to SEQ ID NO: 37376
uucggcacccgauucucca

SEQ ID NO: 37378 - RNA, 19 nt, Artificial Sequence
  Description of Artificial Sequence: Synthetic oligonucleotide
  Sense strand starting at position 2533 of SEQ ID NO: 442
gcuuacauaaugugugaga

SEQ ID NO: 37379 - RNA, 19 nt, Artificial Sequence
  Description of Artificial Sequence: Synthetic oligonucleotide
  Antisense strand to SEQ ID NO: 37378
ucucacacauuauguaagc

SEQ ID NO: 37380 - RNA, 19 nt, Artificial Sequence
  Description of Artificial Sequence: Synthetic oligonucleotide
  Sense strand starting at position 2534 of SEQ ID NO: 442
cuuacauaaugugugagaa

SEQ ID NO: 37381 - RNA, 19 nt, Artificial Sequence
  Description of Artificial Sequence: Synthetic oligonucleotide
  Antisense strand to SEQ ID NO: 37380
uucucacacauuauguaag

SEQ ID NO: 37382 - RNA, 19 nt, Artificial Sequence
  Description of Artificial Sequence: Synthetic oligonucleotide
  Sense strand starting at position 2535 of SEQ ID NO: 442
uuacauaaugugugagaaa

SEQ ID NO: 37383 - RNA, 19 nt, Artificial Sequence
  Description of Artificial Sequence: Synthetic oligonucleotide
  Antisense strand to SEQ ID NO: 37382
uuucucacacauuauguaa

SEQ ID NO: 37384 - RNA, 19 nt, Artificial Sequence
  Description of Artificial Sequence: Synthetic oligonucleotide
  Sense strand starting at position 2912 of SEQ ID NO: 442
uagagauagugccucacuu

SEQ ID NO: 37385 - RNA, 19 nt, Artificial Sequence
  Description of Artificial Sequence: Synthetic oligonucleotide
  Antisense strand to SEQ ID NO: 37384
aagugaggcacuaucucua

SEQ ID NO: 37386 - RNA, 19 nt, Artificial Sequence
  Description of Artificial Sequence: Synthetic oligonucleotide
  Sense strand starting at position 2914 of SEQ ID NO: 442
gagauagugccucacuuug

SEQ ID NO: 37387 - RNA, 19 nt, Artificial Sequence
  Description of Artificial Sequence: Synthetic oligonucleotide
  Antisense strand to SEQ ID NO: 37386
caaagugaggcacuaucuc

SEQ ID NO: 37388 - RNA, 19 nt, Artificial Sequence
  Description of Artificial Sequence: Synthetic oligonucleotide
  Sense strand starting at position 3020 of SEQ ID NO: 442
gcgcuuggccaguuuacua

SEQ ID NO: 37389 - RNA, 19 nt, Artificial Sequence
  Description of Artificial Sequence: Synthetic oligonucleotide
  Antisense strand to SEQ ID NO: 37388
uaguaaacuggccaagcgc

SEQ ID NO: 37390 - RNA, 19 nt, Artificial Sequence
  Description of Artificial Sequence: Synthetic oligonucleotide
  Sense strand starting at position 13 of SEQ ID NO: 443
agucuaccuccuuaguguu

SEQ ID NO: 37391 - RNA, 19 nt, Artificial Sequence
  Description of Artificial Sequence: Synthetic oligonucleotide
  Antisense strand to SEQ ID NO: 37390
aacacuaaggagguagacu

SEQ ID NO: 37392 - RNA, 19 nt, Artificial Sequence
  Description of Artificial Sequence: Synthetic oligonucleotide
  Sense strand starting at position 69 of SEQ ID NO: 443
auaugaacaucaguaaugu

SEQ ID NO: 37393 - RNA, 19 nt, Artificial Sequence
  Description of Artificial Sequence: Synthetic oligonucleotide
  Antisense strand to SEQ ID NO: 37392
acauuacugauguucauau

SEQ ID NO: 37394 - RNA, 19 nt, Artificial Sequence
  Description of Artificial Sequence: Synthetic oligonucleotide
  Sense strand starting at position 104 of SEQ ID NO: 443
ucagcugagugguuucuca

SEQ ID NO: 37395 - RNA, 19 nt, Artificial Sequence
  Description of Artificial Sequence: Synthetic oligonucleotide
  Antisense strand to SEQ ID NO: 37394
ugagaaaccacucagcuga

SEQ ID NO: 37396 - RNA, 19 nt, Artificial Sequence
  Description of Artificial Sequence: Synthetic oligonucleotide
  Sense strand starting at position 128 of SEQ ID NO: 443
uuauuaaauuggucaggca

SEQ ID NO: 37397 - RNA, 19 nt, Artificial Sequence
  Description of Artificial Sequence: Synthetic oligonucleotide
  Antisense strand to SEQ ID NO: 37396
ugccugaccaauuuaauaa

SEQ ID NO: 37398 - RNA, 19 nt, Artificial Sequence
  Description of Artificial Sequence: Synthetic oligonucleotide
  Sense strand starting at position 129 of SEQ ID NO: 443
uauuaaauuggucaggcau

SEQ ID NO: 37399 - RNA, 19 nt, Artificial Sequence
  Description of Artificial Sequence: Synthetic oligonucleotide
  Antisense strand to SEQ ID NO: 37398
augccugaccaauuuaaua

SEQ ID NO: 37400 - RNA, 19 nt, Artificial Sequence
  Description of Artificial Sequence: Synthetic oligonucleotide
  Sense strand starting at position 743 of SEQ ID NO: 443
gagaauuaauauguaugca

SEQ ID NO: 37401 - RNA, 19 nt, Artificial Sequence
  Description of Artificial Sequence: Synthetic oligonucleotide
  Antisense strand to SEQ ID NO: 37400
ugcauacauauuaauucuc

SEQ ID NO: 37402 - RNA, 19 nt, Artificial Sequence
  Description of Artificial Sequence: Synthetic oligonucleotide
  Sense strand starting at position 751 of SEQ ID NO: 443
auauguaugcacugaugau

SEQ ID NO: 37403 - RNA, 19 nt, Artificial Sequence
  Description of Artificial Sequence: Synthetic oligonucleotide
  Antisense strand to SEQ ID NO: 37402
aucaucagugcauacauau

SEQ ID NO: 37404 - RNA, 19 nt, Artificial Sequence
  Description of Artificial Sequence: Synthetic oligonucleotide
  Sense strand starting at position 798 of SEQ ID NO: 443
auuacuucuguuugugagu

SEQ ID NO: 37405 - RNA, 19 nt, Artificial Sequence
  Description of Artificial Sequence: Synthetic oligonucleotide
  Antisense strand to SEQ ID NO: 37404
acucacaaacagaaguaau

SEQ ID NO: 37406 - RNA, 19 nt, Artificial Sequence
  Description of Artificial Sequence: Synthetic oligonucleotide
  Sense strand starting at position 804 of SEQ ID NO: 443
ucuguuugugaguguggaa

SEQ ID NO: 37407 - RNA, 19 nt, Artificial Sequence
  Description of Artificial Sequence: Synthetic oligonucleotide
  Antisense strand to SEQ ID NO: 37406
uuccacacucacaaacaga

SEQ ID NO: 37408 - RNA, 19 nt, Artificial Sequence
  Description of Artificial Sequence: Synthetic oligonucleotide
  Sense strand starting at position 858 of SEQ ID NO: 443
ggcugcuuugaaugacgau

SEQ ID NO: 37409 - RNA, 19 nt, Artificial Sequence
  Description of Artificial Sequence: Synthetic oligonucleotide
  Antisense strand to SEQ ID NO: 37408
aucgucauucaaagcagcc

SEQ ID NO: 37410 - RNA, 19 nt, Artificial Sequence
  Description of Artificial Sequence: Synthetic oligonucleotide
  Sense strand starting at position 859 of SEQ ID NO: 443
gcugcuuugaaugacgauu

SEQ ID NO: 37411 - RNA, 19 nt, Artificial Sequence
  Description of Artificial Sequence: Synthetic oligonucleotide
  Antisense strand to SEQ ID NO: 37410
aaucgucauucaaagcagc

SEQ ID NO: 37412 - RNA, 19 nt, Artificial Sequence
  Description of Artificial Sequence: Synthetic oligonucleotide
  Sense strand starting at position 1006 of SEQ ID NO: 443
ucuacagcucaugagguaa

SEQ ID NO: 37413 - RNA, 19 nt, Artificial Sequence
  Description of Artificial Sequence: Synthetic oligonucleotide
  Antisense strand to SEQ ID NO: 37412
uuaccucaugagcuguaga

SEQ ID NO: 37414 - RNA, 19 nt, Artificial Sequence
  Description of Artificial Sequence: Synthetic oligonucleotide
  Sense strand starting at position 1101 of SEQ ID NO: 443
gugcaaaugacuggucgga

SEQ ID NO: 37415 - RNA, 19 nt, Artificial Sequence
  Description of Artificial Sequence: Synthetic oligonucleotide
  Antisense strand to SEQ ID NO: 37414
uccgaccagucauuugcac

SEQ ID NO: 37416 - RNA, 19 nt, Artificial Sequence
  Description of Artificial Sequence: Synthetic oligonucleotide
  Sense strand starting at position 1103 of SEQ ID NO: 443
gcaaaugacuggucggauc

SEQ ID NO: 37417 - RNA, 19 nt, Artificial Sequence
  Description of Artificial Sequence: Synthetic oligonucleotide
  Antisense strand to SEQ ID NO: 37416
gauccgaccagucauuugc

SEQ ID NO: 37418 - RNA, 19 nt, Artificial Sequence
  Description of Artificial Sequence: Synthetic oligonucleotide
  Sense strand starting at position 1114 of SEQ ID NO: 443
gucggaucucgucuuuguu

SEQ ID NO: 37419 - RNA, 19 nt, Artificial Sequence
  Description of Artificial Sequence: Synthetic oligonucleotide
  Antisense strand to SEQ ID NO: 37418
aacaaagacgagauccgac

SEQ ID NO: 37420 - RNA, 19 nt, Artificial Sequence
  Description of Artificial Sequence: Synthetic oligonucleotide
  Sense strand starting at position 1117 of SEQ ID NO: 443
ggaucucgucuuuguuuaa

SEQ ID NO: 37421 - RNA, 19 nt, Artificial Sequence
  Description of Artificial Sequence: Synthetic oligonucleotide
  Antisense strand to SEQ ID NO: 37420
uuaaacaaagacgagaucc

SEQ ID NO: 37422 - RNA, 19 nt, Artificial Sequence
  Description of Artificial Sequence: Synthetic oligonucleotide
  Sense strand starting at position 1118 of SEQ ID NO: 443
gaucucgucuuuguuuaaa

SEQ ID NO: 37423 - RNA, 19 nt, Artificial Sequence
  Description of Artificial Sequence: Synthetic oligonucleotide
  Antisense strand to SEQ ID NO: 37422
uuuaaacaaagacgagauc

SEQ ID NO: 37424 - RNA, 19 nt, Artificial Sequence
  Description of Artificial Sequence: Synthetic oligonucleotide
  Sense strand starting at position 1129 of SEQ ID NO: 443
uguuuaaacgucugauauu

SEQ ID NO: 37425 - RNA, 19 nt, Artificial Sequence
  Description of Artificial Sequence: Synthetic oligonucleotide
  Antisense strand to SEQ ID NO: 37424
aauaucagacguuuaaaca

SEQ ID NO: 37426 - RNA, 19 nt, Artificial Sequence
  Description of Artificial Sequence: Synthetic oligonucleotide
  Sense strand starting at position 1216 of SEQ ID NO: 443
augaguuugauugaggguu

SEQ ID NO: 37427 - RNA, 19 nt, Artificial Sequence
  Description of Artificial Sequence: Synthetic oligonucleotide
  Antisense strand to SEQ ID NO: 37426
aacccucaaucaaacucau

SEQ ID NO: 37428 - RNA, 19 nt, Artificial Sequence
  Description of Artificial Sequence: Synthetic oligonucleotide
  Sense strand starting at position 1327 of SEQ ID NO: 443
ugcccaauuucgccaggga

SEQ ID NO: 37429 - RNA, 19 nt, Artificial Sequence
  Description of Artificial Sequence: Synthetic oligonucleotide
  Antisense strand to SEQ ID NO: 37428
ucccuggcgaaauugggca

SEQ ID NO: 37430 - RNA, 19 nt, Artificial Sequence
  Description of Artificial Sequence: Synthetic oligonucleotide
  Sense strand starting at position 1567 of SEQ ID NO: 443
gagcuuccgcgacaggaaa

SEQ ID NO: 37431 - RNA, 19 nt, Artificial Sequence
  Description of Artificial Sequence: Synthetic oligonucleotide
  Antisense strand to SEQ ID NO: 37430
uuuccugucgcggaagcuc

SEQ ID NO: 37432 - RNA, 19 nt, Artificial Sequence
  Description of Artificial Sequence: Synthetic oligonucleotide
  Sense strand starting at position 2059 of SEQ ID NO: 443
gaugguuugcaccaaucca

SEQ ID NO: 37433 - RNA, 19 nt, Artificial Sequence
  Description of Artificial Sequence: Synthetic oligonucleotide
  Antisense strand to SEQ ID NO: 37432
uggauuggugcaaaccauc

SEQ ID NO: 37434 - RNA, 19 nt, Artificial Sequence
  Description of Artificial Sequence: Synthetic oligonucleotide
  Sense strand starting at position 2252 of SEQ ID NO: 443
gucuuugaccuuugacacu

SEQ ID NO: 37435 - RNA, 19 nt, Artificial Sequence
  Description of Artificial Sequence: Synthetic oligonucleotide
  Antisense strand to SEQ ID NO: 37434
agugucaaaggucaaagac

SEQ ID NO: 37436 - RNA, 19 nt, Artificial Sequence
  Description of Artificial Sequence: Synthetic oligonucleotide
  Sense strand starting at position 2347 of SEQ ID NO: 443
gggaguguccuguaccuga

SEQ ID NO: 37437 - RNA, 19 nt, Artificial Sequence
  Description of Artificial Sequence: Synthetic oligonucleotide
  Antisense strand to SEQ ID NO: 37436
ucagguacaggacacuccc

SEQ ID NO: 37438 - RNA, 19 nt, Artificial Sequence
  Description of Artificial Sequence: Synthetic oligonucleotide
  Sense strand starting at position 2351 of SEQ ID NO: 443
guguccuguaccugaacuu

SEQ ID NO: 37439 - RNA, 19 nt, Artificial Sequence
  Description of Artificial Sequence: Synthetic oligonucleotide
  Antisense strand to SEQ ID NO: 37438
aaguucagguacaggacac

SEQ ID NO: 37440 - RNA, 19 nt, Artificial Sequence
  Description of Artificial Sequence: Synthetic oligonucleotide
  Sense strand starting at position 2618 of SEQ ID NO: 443
cucuguuagccaggaugaa

SEQ ID NO: 37441 - RNA, 19 nt, Artificial Sequence
  Description of Artificial Sequence: Synthetic oligonucleotide
  Antisense strand to SEQ ID NO: 37440
uucauccuggcuaacagag

SEQ ID NO: 37442 - RNA, 19 nt, Artificial Sequence
  Description of Artificial Sequence: Synthetic oligonucleotide
  Sense strand starting at position 2619 of SEQ ID NO: 443
ucuguuagccaggaugaaa

SEQ ID NO: 37443 - RNA, 19 nt, Artificial Sequence
  Description of Artificial Sequence: Synthetic oligonucleotide
  Antisense strand to SEQ ID NO: 37442
uuucauccuggcuaacaga

SEQ ID NO: 37444 - RNA, 19 nt, Artificial Sequence
  Description of Artificial Sequence: Synthetic oligonucleotide
  Sense strand starting at position 2997 of SEQ ID NO: 443
ugagguuagagugaguuau

SEQ ID NO: 37445 - RNA, 19 nt, Artificial Sequence
  Description of Artificial Sequence: Synthetic oligonucleotide
  Antisense strand to SEQ ID NO: 37444
auaacucacucuaaccuca

SEQ ID NO: 37446 - RNA, 19 nt, Artificial Sequence
  Description of Artificial Sequence: Synthetic oligonucleotide
  Sense strand starting at position 3106 of SEQ ID NO: 443
augguuggauaaucuuuau

SEQ ID NO: 37447 - RNA, 19 nt, Artificial Sequence
  Description of Artificial Sequence: Synthetic oligonucleotide
  Antisense strand to SEQ ID NO: 37446
auaaagauuauccaaccau

SEQ ID NO: 37448 - RNA, 19 nt, Artificial Sequence
  Description of Artificial Sequence: Synthetic oligonucleotide
  Sense strand starting at position 3121 of SEQ ID NO: 443
uuauaauucucuguagagu

SEQ ID NO: 37449 - RNA, 19 nt, Artificial Sequence
  Description of Artificial Sequence: Synthetic oligonucleotide
  Antisense strand to SEQ ID NO: 37448
acucuacagagaauuauaa

SEQ ID NO: 37450 - RNA, 19 nt, Artificial Sequence
  Description of Artificial Sequence: Synthetic oligonucleotide
  Sense strand starting at position 3134 of SEQ ID NO: 443
uagaguuaauuugaggaug

SEQ ID NO: 37451 - RNA, 19 nt, Artificial Sequence
  Description of Artificial Sequence: Synthetic oligonucleotide
  Antisense strand to SEQ ID NO: 37450
cauccucaaauuaacucua

SEQ ID NO: 37452 - RNA, 19 nt, Artificial Sequence
  Description of Artificial Sequence: Synthetic oligonucleotide
  Sense strand starting at position 3136 of SEQ ID NO: 443
gaguuaauuugaggaugua

SEQ ID NO: 37453 - RNA, 19 nt, Artificial Sequence
  Description of Artificial Sequence: Synthetic oligonucleotide
  Antisense strand to SEQ ID NO: 37452
uacauccucaaauuaacuc

SEQ ID NO: 37454 - RNA, 19 nt, Artificial Sequence
  Description of Artificial Sequence: Synthetic oligonucleotide
  Sense strand starting at position 3176 of SEQ ID NO: 443
agggcauucuaccuuuaaa

SEQ ID NO: 37455 - RNA, 19 nt, Artificial Sequence
  Description of Artificial Sequence: Synthetic oligonucleotide
  Antisense strand to SEQ ID NO: 37454
uuuaaagguagaaugcccu

SEQ ID NO: 37456 - RNA, 19 nt, Artificial Sequence
  Description of Artificial Sequence: Synthetic oligonucleotide
  Sense strand starting at position 3550 of SEQ ID NO: 443
uggccuaucccagacaauu

SEQ ID NO: 37457 - RNA, 19 nt, Artificial Sequence
  Description of Artificial Sequence: Synthetic oligonucleotide
  Antisense strand to SEQ ID NO: 37456
aauugucugggauaggcca

SEQ ID NO: 37458 - RNA, 19 nt, Artificial Sequence
  Description of Artificial Sequence: Synthetic oligonucleotide
  Sense strand starting at position 3585 of SEQ ID NO: 443
cacugugcuggccauuauu

SEQ ID NO: 37459 - RNA, 19 nt, Artificial Sequence
  Description of Artificial Sequence: Synthetic oligonucleotide
  Antisense strand to SEQ ID NO: 37458
aauaauggccagcacagug

SEQ ID NO: 37460 - RNA, 19 nt, Artificial Sequence
  Description of Artificial Sequence: Synthetic oligonucleotide
  Sense strand starting at position 3616 of SEQ ID NO: 443
aggucaauucucuguccuu

SEQ ID NO: 37461 - RNA, 19 nt, Artificial Sequence
  Description of Artificial Sequence: Synthetic oligonucleotide
  Antisense strand to SEQ ID NO: 37460
aaggacagagaauugaccu

SEQ ID NO: 37462 - RNA, 19 nt, Artificial Sequence
  Description of Artificial Sequence: Synthetic oligonucleotide
  Sense strand starting at position 3617 of SEQ ID NO: 443
ggucaauucucuguccuuc

SEQ ID NO: 37463 - RNA, 19 nt, Artificial Sequence
  Description of Artificial Sequence: Synthetic oligonucleotide
  Antisense strand to SEQ ID NO: 37462
gaaggacagagaauugacc

SEQ ID NO: 37464 - RNA, 19 nt, Artificial Sequence
  Description of Artificial Sequence: Synthetic oligonucleotide
  Sense strand starting at position 3667 of SEQ ID NO: 443
accucucuagacuguauua

SEQ ID NO: 37465 - RNA, 19 nt, Artificial Sequence
  Description of Artificial Sequence: Synthetic oligonucleotide
  Antisense strand to SEQ ID NO: 37464
uaauacagucuagagaggu

SEQ ID NO: 37466 - RNA, 19 nt, Artificial Sequence
  Description of Artificial Sequence: Synthetic oligonucleotide
  Sense strand starting at position 3813 of SEQ ID NO: 443
ggucauauccacugccagu

SEQ ID NO: 37467 - RNA, 19 nt, Artificial Sequence
  Description of Artificial Sequence: Synthetic oligonucleotide
  Antisense strand to SEQ ID NO: 37466
acuggcaguggauaugacc

SEQ ID NO: 37468 - RNA, 19 nt, Artificial Sequence
  Description of Artificial Sequence: Synthetic oligonucleotide
  Sense strand starting at position 3894 of SEQ ID NO: 443
cugagaaccuccucaguca

SEQ ID NO: 37469 - RNA, 19 nt, Artificial Sequence
  Description of Artificial Sequence: Synthetic oligonucleotide
  Antisense strand to SEQ ID NO: 37468
ugacugaggagguucucag

SEQ ID NO: 37470 - RNA, 19 nt, Artificial Sequence
  Description of Artificial Sequence: Synthetic oligonucleotide
  Sense strand starting at position 74 of SEQ ID NO: 444
agauuacucugcucuaagg

SEQ ID NO: 37471 - RNA, 19 nt, Artificial Sequence
  Description of Artificial Sequence: Synthetic oligonucleotide
  Antisense strand to SEQ ID NO: 37470
ccuuagagcagaguaaucu

SEQ ID NO: 37472 - RNA, 19 nt, Artificial Sequence
  Description of Artificial Sequence: Synthetic oligonucleotide
  Sense strand starting at position 186 of SEQ ID NO: 444
agaggcaugcaagguuuaa

SEQ ID NO: 37473 - RNA, 19 nt, Artificial Sequence
  Description of Artificial Sequence: Synthetic oligonucleotide
  Antisense strand to SEQ ID NO: 37472
uuaaaccuugcaugccucu

SEQ ID NO: 37474 - RNA, 19 nt, Artificial Sequence
  Description of Artificial Sequence: Synthetic oligonucleotide
  Sense strand starting at position 207 of SEQ ID NO: 444
gguuaaguggaugaagguu

SEQ ID NO: 37475 - RNA, 19 nt, Artificial Sequence
  Description of Artificial Sequence: Synthetic oligonucleotide
  Antisense strand to SEQ ID NO: 37474
aaccuucauccacuuaacc

SEQ ID NO: 37476 - RNA, 19 nt, Artificial Sequence
  Description of Artificial Sequence: Synthetic oligonucleotide
  Sense strand starting at position 350 of SEQ ID NO: 444
ggucuaaaugaccgucaga

SEQ ID NO: 37477 - RNA, 19 nt, Artificial Sequence
  Description of Artificial Sequence: Synthetic oligonucleotide
  Antisense strand to SEQ ID NO: 37476
ucugacggucauuuagacc

SEQ ID NO: 37478 - RNA, 19 nt, Artificial Sequence
  Description of Artificial Sequence: Synthetic oligonucleotide
  Sense strand starting at position 400 of SEQ ID NO: 444
gacggagauuucuaacacu

SEQ ID NO: 37479 - RNA, 19 nt, Artificial Sequence
  Description of Artificial Sequence: Synthetic oligonucleotide
  Antisense strand to SEQ ID NO: 37478
aguguuagaaaucuccguc

SEQ ID NO: 37480 - RNA, 19 nt, Artificial Sequence
  Description of Artificial Sequence: Synthetic oligonucleotide
  Sense strand starting at position 623 of SEQ ID NO: 444
gcucuuauguaagcacaca

SEQ ID NO: 37481 - RNA, 19 nt, Artificial Sequence
  Description of Artificial Sequence: Synthetic oligonucleotide
  Antisense strand to SEQ ID NO: 37480
ugugugcuuacauaagagc

SEQ ID NO: 37482 - RNA, 19 nt, Artificial Sequence
  Description of Artificial Sequence: Synthetic oligonucleotide
  Sense strand starting at position 2109 of SEQ ID NO: 444
ggaaucuauuugugacuuu

SEQ ID NO: 37483 - RNA, 19 nt, Artificial Sequence
  Description of Artificial Sequence: Synthetic oligonucleotide
  Antisense strand to SEQ ID NO: 37482
aaagucacaaauagauucc

SEQ ID NO: 37484 - RNA, 19 nt, Artificial Sequence
  Description of Artificial Sequence: Synthetic oligonucleotide
  Sense strand starting at position 2149 of SEQ ID NO: 444
gcucuuucucagugacaug

SEQ ID NO: 37485 - RNA, 19 nt, Artificial Sequence
  Description of Artificial Sequence: Synthetic oligonucleotide
  Antisense strand to SEQ ID NO: 37484
caugucacugagaaagagc

SEQ ID NO: 37486 - RNA, 19 nt, Artificial Sequence
  Description of Artificial Sequence: Synthetic oligonucleotide
  Sense strand starting at position 2171 of SEQ ID NO: 444
cgaugcugguucuuagaaa

SEQ ID NO: 37487 - RNA, 19 nt, Artificial Sequence
  Description of Artificial Sequence: Synthetic oligonucleotide
  Antisense strand to SEQ ID NO: 37486
uuucuaagaaccagcaucg

SEQ ID NO: 37488 - RNA, 19 nt, Artificial Sequence
  Description of Artificial Sequence: Synthetic oligonucleotide
  Sense strand starting at position 2193 of SEQ ID NO: 444
ggagguccgaauggauaga

SEQ ID NO: 37489 - RNA, 19 nt, Artificial Sequence
  Description of Artificial Sequence: Synthetic oligonucleotide
  Antisense strand to SEQ ID NO: 37488
ucuauccauucggaccucc

SEQ ID NO: 37490 - RNA, 19 nt, Artificial Sequence
  Description of Artificial Sequence: Synthetic oligonucleotide
  Sense strand starting at position 2239 of SEQ ID NO: 444
cguggaucccuacagggau

SEQ ID NO: 37491 - RNA, 19 nt, Artificial Sequence
  Description of Artificial Sequence: Synthetic oligonucleotide
  Antisense strand to SEQ ID NO: 37490
aucccuguagggauccacg

SEQ ID NO: 37492 - RNA, 19 nt, Artificial Sequence
  Description of Artificial Sequence: Synthetic oligonucleotide
  Sense strand starting at position 2376 of SEQ ID NO: 444
ggcacuguacccuaugaga

SEQ ID NO: 37493 - RNA, 19 nt, Artificial Sequence
  Description of Artificial Sequence: Synthetic oligonucleotide
  Antisense strand to SEQ ID NO: 37492
ucucauaggguacagugcc

SEQ ID NO: 37494 - RNA, 19 nt, Artificial Sequence
  Description of Artificial Sequence: Synthetic oligonucleotide
  Sense strand starting at position 2422 of SEQ ID NO: 444
gaaacuaagucagaaaggu

SEQ ID NO: 37495 - RNA, 19 nt, Artificial Sequence
  Description of Artificial Sequence: Synthetic oligonucleotide
  Antisense strand to SEQ ID NO: 37494
accuuucugacuuaguuuc

SEQ ID NO: 37496 - RNA, 19 nt, Artificial Sequence
  Description of Artificial Sequence: Synthetic oligonucleotide
  Sense strand starting at position 2569 of SEQ ID NO: 444
aggagcuauccaugaaugu

SEQ ID NO: 37497 - RNA, 19 nt, Artificial Sequence
  Description of Artificial Sequence: Synthetic oligonucleotide
  Antisense strand to SEQ ID NO: 37496
acauucauggauagcuccu

SEQ ID NO: 37498 - RNA, 19 nt, Artificial Sequence
  Description of Artificial Sequence: Synthetic oligonucleotide
  Sense strand starting at position 2570 of SEQ ID NO: 444
ggagcuauccaugaauguc

SEQ ID NO: 37499 - RNA, 19 nt, Artificial Sequence
  Description of Artificial Sequence: Synthetic oligonucleotide
  Antisense strand to SEQ ID NO: 37498
gacauucauggauagcucc

SEQ ID NO: 37500 - RNA, 19 nt, Artificial Sequence
  Description of Artificial Sequence: Synthetic oligonucleotide
  Sense strand starting at position 2660 of SEQ ID NO: 444
aggacuuauuuaggagacu

SEQ ID NO: 37501 - RNA, 19 nt, Artificial Sequence
  Description of Artificial Sequence: Synthetic oligonucleotide
  Antisense strand to SEQ ID NO: 37500
agucuccuaaauaaguccu

SEQ ID NO: 37502 - RNA, 19 nt, Artificial Sequence
  Description of Artificial Sequence: Synthetic oligonucleotide
  Sense strand starting at position 2661 of SEQ ID NO: 444
ggacuuauuuaggagacua

SEQ ID NO: 37503 - RNA, 19 nt, Artificial Sequence
  Description of Artificial Sequence: Synthetic oligonucleotide
  Antisense strand to SEQ ID NO: 37502
uagucuccuaaauaagucc

SEQ ID NO: 37504 - RNA, 19 nt, Artificial Sequence
  Description of Artificial Sequence: Synthetic oligonucleotide
  Sense strand starting at position 2843 of SEQ ID NO: 444
guaagcguccugcaccaaa

SEQ ID NO: 37505 - RNA, 19 nt, Artificial Sequence
  Description of Artificial Sequence: Synthetic oligonucleotide
  Antisense strand to SEQ ID NO: 37504
uuuggugcaggacgcuuac

SEQ ID NO: 37506 - RNA, 19 nt, Artificial Sequence
  Description of Artificial Sequence: Synthetic oligonucleotide
  Sense strand starting at position 3011 of SEQ ID NO: 444
cagccaaggcuuugaguca

SEQ ID NO: 37507 - RNA, 19 nt, Artificial Sequence
  Description of Artificial Sequence: Synthetic oligonucleotide
  Antisense strand to SEQ ID NO: 37506
ugacucaaagccuuggcug

SEQ ID NO: 37508 - RNA, 19 nt, Artificial Sequence
  Description of Artificial Sequence: Synthetic oligonucleotide
  Sense strand starting at position 3018 of SEQ ID NO: 444
ggcuuugagucauccucuc

SEQ ID NO: 37509 - RNA, 19 nt, Artificial Sequence
  Description of Artificial Sequence: Synthetic oligonucleotide
  Antisense strand to SEQ ID NO: 37508
gagaggaugacucaaagcc

SEQ ID NO: 37510 - RNA, 19 nt, Artificial Sequence
  Description of Artificial Sequence: Synthetic oligonucleotide
  Sense strand starting at position 3078 of SEQ ID NO: 444
guuauaaacucagugagug

SEQ ID NO: 37511 - RNA, 19 nt, Artificial Sequence
  Description of Artificial Sequence: Synthetic oligonucleotide
  Antisense strand to SEQ ID NO: 37510
cacucacugaguuuauaac

SEQ ID NO: 37512 - RNA, 19 nt, Artificial Sequence
  Description of Artificial Sequence: Synthetic oligonucleotide
  Sense strand starting at position 3111 of SEQ ID NO: 444
ccucgucagguccagacau

SEQ ID NO: 37513 - RNA, 19 nt, Artificial Sequence
  Description of Artificial Sequence: Synthetic oligonucleotide
  Antisense strand to SEQ ID NO: 37512
augucuggaccugacgagg

SEQ ID NO: 37514 - RNA, 19 nt, Artificial Sequence
  Description of Artificial Sequence: Synthetic oligonucleotide
  Sense strand starting at position 3181 of SEQ ID NO: 444
gccacugucucuucuuauu

SEQ ID NO: 37515 - RNA, 19 nt, Artificial Sequence
  Description of Artificial Sequence: Synthetic oligonucleotide
  Antisense strand to SEQ ID NO: 37514
aauaagaagagacaguggc

SEQ ID NO: 37516 - RNA, 19 nt, Artificial Sequence
  Description of Artificial Sequence: Synthetic oligonucleotide
  Sense strand starting at position 3380 of SEQ ID NO: 444
ugacuaauccaucaguguc

SEQ ID NO: 37517 - RNA, 19 nt, Artificial Sequence
  Description of Artificial Sequence: Synthetic oligonucleotide
  Antisense strand to SEQ ID NO: 37516
gacacugauggauuaguca

SEQ ID NO: 37518 - RNA, 19 nt, Artificial Sequence
  Description of Artificial Sequence: Synthetic oligonucleotide
  Sense strand starting at position 3415 of SEQ ID NO: 444
uguauucuagugggaagga

SEQ ID NO: 37519 - RNA, 19 nt, Artificial Sequence
  Description of Artificial Sequence: Synthetic oligonucleotide
  Antisense strand to SEQ ID NO: 37518
uccuucccacuagaauaca

SEQ ID NO: 37520 - RNA, 19 nt, Artificial Sequence
  Description of Artificial Sequence: Synthetic oligonucleotide
  Sense strand starting at position 3552 of SEQ ID NO: 444
acuucuuagaguugugaga

SEQ ID NO: 37521 - RNA, 19 nt, Artificial Sequence
  Description of Artificial Sequence: Synthetic oligonucleotide
  Antisense strand to SEQ ID NO: 37520
ucucacaacucuaagaagu

SEQ ID NO: 37522 - RNA, 19 nt, Artificial Sequence
  Description of Artificial Sequence: Synthetic oligonucleotide
  Sense strand starting at position 3597 of SEQ ID NO: 444
cuagaaauaccaggcuuua

SEQ ID NO: 37523 - RNA, 19 nt, Artificial Sequence
  Description of Artificial Sequence: Synthetic oligonucleotide
  Antisense strand to SEQ ID NO: 37522
uaaagccugguauuucuag

SEQ ID NO: 37524 - RNA, 19 nt, Artificial Sequence
  Description of Artificial Sequence: Synthetic oligonucleotide
  Sense strand starting at position 3606 of SEQ ID NO: 444
ccaggcuuuauguggcaaa

SEQ ID NO: 37525 - RNA, 19 nt, Artificial Sequence
  Description of Artificial Sequence: Synthetic oligonucleotide
  Antisense strand to SEQ ID NO: 37524
uuugccacauaaagccugg

SEQ ID NO: 37526 - RNA, 19 nt, Artificial Sequence
  Description of Artificial Sequence: Synthetic oligonucleotide
  Sense strand starting at position 3638 of SEQ ID NO: 444
cacauagagccugguguuu

SEQ ID NO: 37527 - RNA, 19 nt, Artificial Sequence
  Description of Artificial Sequence: Synthetic oligonucleotide
  Antisense strand to SEQ ID NO: 37526
aaacaccaggcucuaugug

SEQ ID NO: 37528 - RNA, 19 nt, Artificial Sequence
  Description of Artificial Sequence: Synthetic oligonucleotide
  Sense strand starting at position 3650 of SEQ ID NO: 444
gguguuucuagauacauga

SEQ ID NO: 37529 - RNA, 19 nt, Artificial Sequence
  Description of Artificial Sequence: Synthetic oligonucleotide
  Antisense strand to SEQ ID NO: 37528
ucauguaucuagaaacacc

SEQ ID NO: 37530 - RNA, 19 nt, Artificial Sequence
  Description of Artificial Sequence: Synthetic oligonucleotide
  Sense strand starting at position 3657 of SEQ ID NO: 444
cuagauacaugaguuucuu

SEQ ID NO: 37531 - RNA, 19 nt, Artificial Sequence
  Description of Artificial Sequence: Synthetic oligonucleotide
  Antisense strand to SEQ ID NO: 37530
aagaaacucauguaucuag

SEQ ID NO: 37532 - RNA, 19 nt, Artificial Sequence
  Description of Artificial Sequence: Synthetic oligonucleotide
  Sense strand starting at position 3690 of SEQ ID NO: 444
gaaggcuucugugcuucua

SEQ ID NO: 37533 - RNA, 19 nt, Artificial Sequence
  Description of Artificial Sequence: Synthetic oligonucleotide
  Antisense strand to SEQ ID NO: 37532
uagaagcacagaagccuuc

SEQ ID NO: 37534 - RNA, 19 nt, Artificial Sequence
  Description of Artificial Sequence: Synthetic oligonucleotide
  Sense strand starting at position 3694 of SEQ ID NO: 444
gcuucugugcuucuaguau

SEQ ID NO: 37535 - RNA, 19 nt, Artificial Sequence
  Description of Artificial Sequence: Synthetic oligonucleotide
  Antisense strand to SEQ ID NO: 37534
auacuagaagcacagaagc

SEQ ID NO: 37536 - RNA, 19 nt, Artificial Sequence
  Description of Artificial Sequence: Synthetic oligonucleotide
  Sense strand starting at position 3706 of SEQ ID NO: 444
cuaguauaccagcgaucag

SEQ ID NO: 37537 - RNA, 19 nt, Artificial Sequence
  Description of Artificial Sequence: Synthetic oligonucleotide
  Antisense strand to SEQ ID NO: 37536
cugaucgcugguauacuag

SEQ ID NO: 37538 - RNA, 19 nt, Artificial Sequence
  Description of Artificial Sequence: Synthetic oligonucleotide
  Sense strand starting at position 3754 of SEQ ID NO: 444
caaugaauugcugaguuag

SEQ ID NO: 37539 - RNA, 19 nt, Artificial Sequence
  Description of Artificial Sequence: Synthetic oligonucleotide
  Antisense strand to SEQ ID NO: 37538
cuaacucagcaauucauug

SEQ ID NO: 37540 - RNA, 19 nt, Artificial Sequence
  Description of Artificial Sequence: Synthetic oligonucleotide
  Sense strand starting at position 3756 of SEQ ID NO: 444
augaauugcugaguuaggu

SEQ ID NO: 37541 - RNA, 19 nt, Artificial Sequence
  Description of Artificial Sequence: Synthetic oligonucleotide
  Antisense strand to SEQ ID NO: 37540
accuaacucagcaauucau

SEQ ID NO: 37542 - RNA, 19 nt, Artificial Sequence
  Description of Artificial Sequence: Synthetic oligonucleotide
  Sense strand starting at position 3791 of SEQ ID NO: 444
ucacaucucagagggugaa

SEQ ID NO: 37543 - RNA, 19 nt, Artificial Sequence
  Description of Artificial Sequence: Synthetic oligonucleotide
  Antisense strand to SEQ ID NO: 37542
uucacccucugagauguga

SEQ ID NO: 37544 - RNA, 19 nt, Artificial Sequence
  Description of Artificial Sequence: Synthetic oligonucleotide
  Sense strand starting at position 3811 of SEQ ID NO: 444
aaagauguacccuguagau

SEQ ID NO: 37545 - RNA, 19 nt, Artificial Sequence
  Description of Artificial Sequence: Synthetic oligonucleotide
  Antisense strand to SEQ ID NO: 37544
aucuacaggguacaucuuu

SEQ ID NO: 37546 - RNA, 19 nt, Artificial Sequence
  Description of Artificial Sequence: Synthetic oligonucleotide
  Sense strand starting at position 3895 of SEQ ID NO: 444
caguccauagacugaugau

SEQ ID NO: 37547 - RNA, 19 nt, Artificial Sequence
  Description of Artificial Sequence: Synthetic oligonucleotide
  Antisense strand to SEQ ID NO: 37546
aucaucagucuauggacug

SEQ ID NO: 37548 - RNA, 19 nt, Artificial Sequence
  Description of Artificial Sequence: Synthetic oligonucleotide
  Sense strand starting at position 3977 of SEQ ID NO: 444
cuggaauccugaucccuuu

SEQ ID NO: 37549 - RNA, 19 nt, Artificial Sequence
  Description of Artificial Sequence: Synthetic oligonucleotide
  Antisense strand to SEQ ID NO: 37548
aaagggaucaggauuccag

SEQ ID NO: 37550 - RNA, 19 nt, Artificial Sequence
  Description of Artificial Sequence: Synthetic oligonucleotide
  Sense strand starting at position 3576 of SEQ ID NO: 445
ugaccaggacguuaguaaa

SEQ ID NO: 37551 - RNA, 19 nt, Artificial Sequence
  Description of Artificial Sequence: Synthetic oligonucleotide
  Antisense strand to SEQ ID NO: 37550
uuuacuaacguccugguca

SEQ ID NO: 37552 - RNA, 19 nt, Artificial Sequence
  Description of Artificial Sequence: Synthetic oligonucleotide
  Sense strand starting at position 3571 of SEQ ID NO: 445
cagagugaccaggacguua

SEQ ID NO: 37553 - RNA, 19 nt, Artificial Sequence
  Description of Artificial Sequence: Synthetic oligonucleotide
  Antisense strand to SEQ ID NO: 37552
uaacguccuggucacucug

SEQ ID NO: 37554 - RNA, 19 nt, Artificial Sequence
  Description of Artificial Sequence: Synthetic oligonucleotide
  Sense strand starting at position 3560 of SEQ ID NO: 445
gcuguuuagggcagaguga

SEQ ID NO: 37555 - RNA, 19 nt, Artificial Sequence
  Description of Artificial Sequence: Synthetic oligonucleotide
  Antisense strand to SEQ ID NO: 37554
ucacucugcccuaaacagc

SEQ ID NO: 37556 - RNA, 19 nt, Artificial Sequence
  Description of Artificial Sequence: Synthetic oligonucleotide
  Sense strand starting at position 3517 of SEQ ID NO: 445
cagauagugcuggagugaa

SEQ ID NO: 37557 - RNA, 19 nt, Artificial Sequence
  Description of Artificial Sequence: Synthetic oligonucleotide
  Antisense strand to SEQ ID NO: 37556
uucacuccagcacuaucug

SEQ ID NO: 37558 - RNA, 19 nt, Artificial Sequence
  Description of Artificial Sequence: Synthetic oligonucleotide
  Sense strand starting at position 3516 of SEQ ID NO: 445
ucagauagugcuggaguga

SEQ ID NO: 37559 - RNA, 19 nt, Artificial Sequence
  Description of Artificial Sequence: Synthetic oligonucleotide
  Antisense strand to SEQ ID NO: 37558
ucacuccagcacuaucuga

SEQ ID NO: 37560 - RNA, 19 nt, Artificial Sequence
  Description of Artificial Sequence: Synthetic oligonucleotide
  Sense strand starting at position 3490 of SEQ ID NO: 445
auuugucguacagguacaa

SEQ ID NO: 37561 - RNA, 19 nt, Artificial Sequence
  Description of Artificial Sequence: Synthetic oligonucleotide
  Antisense strand to SEQ ID NO: 37560
uuguaccuguacgacaaau

SEQ ID NO: 37562 - RNA, 19 nt, Artificial Sequence
  Description of Artificial Sequence: Synthetic oligonucleotide
  Sense strand starting at position 3483 of SEQ ID NO: 445
guguuagauuugucguaca

SEQ ID NO: 37563 - RNA, 19 nt, Artificial Sequence
  Description of Artificial Sequence: Synthetic oligonucleotide
  Antisense strand to SEQ ID NO: 37562
uguacgacaaaucuaacac

SEQ ID NO: 37564 - RNA, 19 nt, Artificial Sequence
  Description of Artificial Sequence: Synthetic oligonucleotide
  Sense strand starting at position 3482 of SEQ ID NO: 445
gguguuagauuugucguac

SEQ ID NO: 37565 - RNA, 19 nt, Artificial Sequence
  Description of Artificial Sequence: Synthetic oligonucleotide
  Antisense strand to SEQ ID NO: 37564
guacgacaaaucuaacacc

SEQ ID NO: 37566 - RNA, 19 nt, Artificial Sequence
  Description of Artificial Sequence: Synthetic oligonucleotide
  Sense strand starting at position 3481 of SEQ ID NO: 445
ggguguuagauuugucgua

SEQ ID NO: 37567 - RNA, 19 nt, Artificial Sequence
  Description of Artificial Sequence: Synthetic oligonucleotide
  Antisense strand to SEQ ID NO: 37566
uacgacaaaucuaacaccc

SEQ ID NO: 37568 - RNA, 19 nt, Artificial Sequence
  Description of Artificial Sequence: Synthetic oligonucleotide
  Sense strand starting at position 3472 of SEQ ID NO: 445
aagaguccaggguguuaga

SEQ ID NO: 37569 - RNA, 19 nt, Artificial Sequence
  Description of Artificial Sequence: Synthetic oligonucleotide
  Antisense strand to SEQ ID NO: 37568
ucuaacacccuggacucuu

SEQ ID NO: 37570 - RNA, 19 nt, Artificial Sequence
  Description of Artificial Sequence: Synthetic oligonucleotide
  Sense strand starting at position 3470 of SEQ ID NO: 445
cuaagaguccaggguguua

SEQ ID NO: 37571 - RNA, 19 nt, Artificial Sequence
  Description of Artificial Sequence: Synthetic oligonucleotide
  Antisense strand to SEQ ID NO: 37570
uaacacccuggacucuuag

SEQ ID NO: 37572 - RNA, 19 nt, Artificial Sequence
  Description of Artificial Sequence: Synthetic oligonucleotide
  Sense strand starting at position 3384 of SEQ ID NO: 445
gcuucugaguuucugauga

SEQ ID NO: 37573 - RNA, 19 nt, Artificial Sequence
  Description of Artificial Sequence: Synthetic oligonucleotide
  Antisense strand to SEQ ID NO: 37572
ucaucagaaacucagaagc

SEQ ID NO: 37574 - RNA, 19 nt, Artificial Sequence
  Description of Artificial Sequence: Synthetic oligonucleotide
  Sense strand starting at position 3356 of SEQ ID NO: 445
gugggauauuuggaauuga

SEQ ID NO: 37575 - RNA, 19 nt, Artificial Sequence
  Description of Artificial Sequence: Synthetic oligonucleotide
  Antisense strand to SEQ ID NO: 37574
ucaauuccaaauaucccac

SEQ ID NO: 37576 - RNA, 19 nt, Artificial Sequence
  Description of Artificial Sequence: Synthetic oligonucleotide
  Sense strand starting at position 3347 of SEQ ID NO: 445
cuggucugagugggauauu

SEQ ID NO: 37577 - RNA, 19 nt, Artificial Sequence
  Description of Artificial Sequence: Synthetic oligonucleotide
  Antisense strand to SEQ ID NO: 37576
aauaucccacucagaccag

SEQ ID NO: 37578 - RNA, 19 nt, Artificial Sequence
  Description of Artificial Sequence: Synthetic oligonucleotide
  Sense strand starting at position 3320 of SEQ ID NO: 445
gcaagugcucuggcaguau

SEQ ID NO: 37579 - RNA, 19 nt, Artificial Sequence
  Description of Artificial Sequence: Synthetic oligonucleotide
  Antisense strand to SEQ ID NO: 37578
auacugccagagcacuugc

SEQ ID NO: 37580 - RNA, 19 nt, Artificial Sequence
  Description of Artificial Sequence: Synthetic oligonucleotide
  Sense strand starting at position 3156 of SEQ ID NO: 445
guguuuggaagagaauguu

SEQ ID NO: 37581 - RNA, 19 nt, Artificial Sequence
  Description of Artificial Sequence: Synthetic oligonucleotide
  Antisense strand to SEQ ID NO: 37580
aacauucucuuccaaacac

SEQ ID NO: 37582 - RNA, 19 nt, Artificial Sequence
  Description of Artificial Sequence: Synthetic oligonucleotide
  Sense strand starting at position 3148 of SEQ ID NO: 445
ugaugagaguguuuggaag

SEQ ID NO: 37583 - RNA, 19 nt, Artificial Sequence
  Description of Artificial Sequence: Synthetic oligonucleotide
  Antisense strand to SEQ ID NO: 37582
cuuccaaacacucucauca

SEQ ID NO: 37584 - RNA, 19 nt, Artificial Sequence
  Description of Artificial Sequence: Synthetic oligonucleotide
  Sense strand starting at position 3094 of SEQ ID NO: 445
uuuacugaggguugggauu

SEQ ID NO: 37585 - RNA, 19 nt, Artificial Sequence
  Description of Artificial Sequence: Synthetic oligonucleotide
  Antisense strand to SEQ ID NO: 37584
aaucccaacccucaguaaa

SEQ ID NO: 37586 - RNA, 19 nt, Artificial Sequence
  Description of Artificial Sequence: Synthetic oligonucleotide
  Sense strand starting at position 3043 of SEQ ID NO: 445
auugaagauguuuggccau

SEQ ID NO: 37587 - RNA, 19 nt, Artificial Sequence
  Description of Artificial Sequence: Synthetic oligonucleotide
  Antisense strand to SEQ ID NO: 37586
auggccaaacaucuucaau

SEQ ID NO: 37588 - RNA, 19 nt, Artificial Sequence
  Description of Artificial Sequence: Synthetic oligonucleotide
  Sense strand starting at position 2914 of SEQ ID NO: 445
agggaagaaucuuaaggga

SEQ ID NO: 37589 - RNA, 19 nt, Artificial Sequence
  Description of Artificial Sequence: Synthetic oligonucleotide
  Antisense strand to SEQ ID NO: 37588
ucccuuaagauucuucccu

SEQ ID NO: 37590 - RNA, 19 nt, Artificial Sequence
  Description of Artificial Sequence: Synthetic oligonucleotide
  Sense strand starting at position 2861 of SEQ ID NO: 445
guauucuaacagcaaugga

SEQ ID NO: 37591 - RNA, 19 nt, Artificial Sequence
  Description of Artificial Sequence: Synthetic oligonucleotide
  Antisense strand to SEQ ID NO: 37590
uccauugcuguuagaauac

SEQ ID NO: 37592 - RNA, 19 nt, Artificial Sequence
  Description of Artificial Sequence: Synthetic oligonucleotide
  Sense strand starting at position 2456 of SEQ ID NO: 445
uguuaaagcaauugaagga

SEQ ID NO: 37593 - RNA, 19 nt, Artificial Sequence
  Description of Artificial Sequence: Synthetic oligonucleotide
  Antisense strand to SEQ ID NO: 37592
uccuucaauugcuuuaaca

SEQ ID NO: 37594 - RNA, 19 nt, Artificial Sequence
  Description of Artificial Sequence: Synthetic oligonucleotide
  Sense strand starting at position 2239 of SEQ ID NO: 445
cagugugaaugaguaaaca

SEQ ID NO: 37595 - RNA, 19 nt, Artificial Sequence
  Description of Artificial Sequence: Synthetic oligonucleotide
  Antisense strand to SEQ ID NO: 37594
uguuuacucauucacacug

SEQ ID NO: 37596 - RNA, 19 nt, Artificial Sequence
  Description of Artificial Sequence: Synthetic oligonucleotide
  Sense strand starting at position 2237 of SEQ ID NO: 445
gccagugugaaugaguaaa

SEQ ID NO: 37597 - RNA, 19 nt, Artificial Sequence
  Description of Artificial Sequence: Synthetic oligonucleotide
  Antisense strand to SEQ ID NO: 37596
uuuacucauucacacuggc

SEQ ID NO: 37598 - RNA, 19 nt, Artificial Sequence
  Description of Artificial Sequence: Synthetic oligonucleotide
  Sense strand starting at position 2230 of SEQ ID NO: 445
ggagguagccagugugaau

SEQ ID NO: 37599 - RNA, 19 nt, Artificial Sequence
  Description of Artificial Sequence: Synthetic oligonucleotide
  Antisense strand to SEQ ID NO: 37598
auucacacuggcuaccucc

SEQ ID NO: 37600 - RNA, 19 nt, Artificial Sequence
  Description of Artificial Sequence: Synthetic oligonucleotide
  Sense strand starting at position 2184 of SEQ ID NO: 445
uugucucugcucgcaauga

SEQ ID NO: 37601 - RNA, 19 nt, Artificial Sequence
  Description of Artificial Sequence: Synthetic oligonucleotide
  Antisense strand to SEQ ID NO: 37600
ucauugcgagcagagacaa

SEQ ID NO: 37602 - RNA, 19 nt, Artificial Sequence
  Description of Artificial Sequence: Synthetic oligonucleotide
  Sense strand starting at position 2093 of SEQ ID NO: 445
gcuuucugacugcagauau

SEQ ID NO: 37603 - RNA, 19 nt, Artificial Sequence
  Description of Artificial Sequence: Synthetic oligonucleotide
  Antisense strand to SEQ ID NO: 37602
auaucugcagucagaaagc

SEQ ID NO: 37604 - RNA, 19 nt, Artificial Sequence
  Description of Artificial Sequence: Synthetic oligonucleotide
  Sense strand starting at position 1398 of SEQ ID NO: 445
gcccacucuagagacgaau

SEQ ID NO: 37605 - RNA, 19 nt, Artificial Sequence
  Description of Artificial Sequence: Synthetic oligonucleotide
  Antisense strand to SEQ ID NO: 37604
auucgucucuagagugggc

SEQ ID NO: 37606 - RNA, 19 nt, Artificial Sequence
  Description of Artificial Sequence: Synthetic oligonucleotide
  Sense strand starting at position 1170 of SEQ ID NO: 445
gccuccuuucuagaguaaa

SEQ ID NO: 37607 - RNA, 19 nt, Artificial Sequence
  Description of Artificial Sequence: Synthetic oligonucleotide
  Antisense strand to SEQ ID NO: 37606
uuuacucuagaaaggaggc

SEQ ID NO: 37608 - RNA, 19 nt, Artificial Sequence
  Description of Artificial Sequence: Synthetic oligonucleotide
  Sense strand starting at position 1015 of SEQ ID NO: 445
guugaagcuugaucucaga

SEQ ID NO: 37609 - RNA, 19 nt, Artificial Sequence
  Description of Artificial Sequence: Synthetic oligonucleotide
  Antisense strand to SEQ ID NO: 37608
ucugagaucaagcuucaac

SEQ ID NO: 37610 - RNA, 19 nt, Artificial Sequence
  Description of Artificial Sequence: Synthetic oligonucleotide
  Sense strand starting at position 936 of SEQ ID NO: 445
acuguauuacaagggcuaa

SEQ ID NO: 37611 - RNA, 19 nt, Artificial Sequence
  Description of Artificial Sequence: Synthetic oligonucleotide
  Antisense strand to SEQ ID NO: 37610
uuagcccuuguaauacagu

SEQ ID NO: 37612 - RNA, 19 nt, Artificial Sequence
  Description of Artificial Sequence: Synthetic oligonucleotide
  Sense strand starting at position 836 of SEQ ID NO: 445
cugguaaccugucucaaag

SEQ ID NO: 37613 - RNA, 19 nt, Artificial Sequence
  Description of Artificial Sequence: Synthetic oligonucleotide
  Antisense strand to SEQ ID NO: 37612
cuuugagacagguuaccag

SEQ ID NO: 37614 - RNA, 19 nt, Artificial Sequence
  Description of Artificial Sequence: Synthetic oligonucleotide
  Sense strand starting at position 699 of SEQ ID NO: 445
ccucuucuguuucuagaua

SEQ ID NO: 37615 - RNA, 19 nt, Artificial Sequence
  Description of Artificial Sequence: Synthetic oligonucleotide
  Antisense strand to SEQ ID NO: 37614
uaucuagaaacagaagagg

SEQ ID NO: 37616 - RNA, 19 nt, Artificial Sequence
  Description of Artificial Sequence: Synthetic oligonucleotide
  Sense strand starting at position 622 of SEQ ID NO: 445
uuauaaguucuaggucaaa

SEQ ID NO: 37617 - RNA, 19 nt, Artificial Sequence
  Description of Artificial Sequence: Synthetic oligonucleotide
  Antisense strand to SEQ ID NO: 37616
uuugaccuagaacuuauaa

SEQ ID NO: 37618 - RNA, 19 nt, Artificial Sequence
  Description of Artificial Sequence: Synthetic oligonucleotide
  Sense strand starting at position 586 of SEQ ID NO: 445
augcuaauauuggccauau

SEQ ID NO: 37619 - RNA, 19 nt, Artificial Sequence
  Description of Artificial Sequence: Synthetic oligonucleotide
  Antisense strand to SEQ ID NO: 37618
auauggccaauauuagcau

SEQ ID NO: 37620 - RNA, 19 nt, Artificial Sequence
  Description of Artificial Sequence: Synthetic oligonucleotide
  Sense strand starting at position 541 of SEQ ID NO: 445
aggaguugauuguuaugaa

SEQ ID NO: 37621 - RNA, 19 nt, Artificial Sequence
  Description of Artificial Sequence: Synthetic oligonucleotide
  Antisense strand to SEQ ID NO: 37620
uucauaacaaucaacuccu

SEQ ID NO: 37622 - RNA, 19 nt, Artificial Sequence
  Description of Artificial Sequence: Synthetic oligonucleotide
  Sense strand starting at position 539 of SEQ ID NO: 445
acaggaguugauuguuaug

SEQ ID NO: 37623 - RNA, 19 nt, Artificial Sequence
  Description of Artificial Sequence: Synthetic oligonucleotide
  Antisense strand to SEQ ID NO: 37622
cauaacaaucaacuccugu

SEQ ID NO: 37624 - RNA, 19 nt, Artificial Sequence
  Description of Artificial Sequence: Synthetic oligonucleotide
  Sense strand starting at position 512 of SEQ ID NO: 445
gaugcuauuuagggaauaa

SEQ ID NO: 37625 - RNA, 19 nt, Artificial Sequence
  Description of Artificial Sequence: Synthetic oligonucleotide
  Antisense strand to SEQ ID NO: 37624
uuauucccuaaauagcauc

SEQ ID NO: 37626 - RNA, 19 nt, Artificial Sequence
  Description of Artificial Sequence: Synthetic oligonucleotide
  Sense strand starting at position 511 of SEQ ID NO: 445
ggaugcuauuuagggaaua

SEQ ID NO: 37627 - RNA, 19 nt, Artificial Sequence
  Description of Artificial Sequence: Synthetic oligonucleotide
  Antisense strand to SEQ ID NO: 37626
uauucccuaaauagcaucc

SEQ ID NO: 37628 - RNA, 19 nt, Artificial Sequence
  Description of Artificial Sequence: Synthetic oligonucleotide
  Sense strand starting at position 78 of SEQ ID NO: 445
agaggauguaaauguuaug

SEQ ID NO: 37629 - RNA, 19 nt, Artificial Sequence
  Description of Artificial Sequence: Synthetic oligonucleotide
  Antisense strand to SEQ ID NO: 37628
cauaacauuuacauccucu

SEQ ID NO: 37630 - RNA, 19 nt, Artificial Sequence
  Description of Artificial Sequence: Synthetic oligonucleotide
  Sense strand starting at position 3972 of SEQ ID NO: 446
agacauaggucucaauaua

SEQ ID NO: 37631 - RNA, 19 nt, Artificial Sequence
  Description of Artificial Sequence: Synthetic oligonucleotide
  Antisense strand to SEQ ID NO: 37630
uauauugagaccuaugucu

SEQ ID NO: 37632 - RNA, 19 nt, Artificial Sequence
  Description of Artificial Sequence: Synthetic oligonucleotide
  Sense strand starting at position 3963 of SEQ ID NO: 446
uuuguuugcagacauaggu

SEQ ID NO: 37633 - RNA, 19 nt, Artificial Sequence
  Description of Artificial Sequence: Synthetic oligonucleotide
  Antisense strand to SEQ ID NO: 37632
accuaugucugcaaacaaa

SEQ ID NO: 37634 - RNA, 19 nt, Artificial Sequence
  Description of Artificial Sequence: Synthetic oligonucleotide
  Sense strand starting at position 3391 of SEQ ID NO: 446
agauacagcuuucuaguga

SEQ ID NO: 37635 - RNA, 19 nt, Artificial Sequence
  Description of Artificial Sequence: Synthetic oligonucleotide
  Antisense strand to SEQ ID NO: 37634
ucacuagaaagcuguaucu

SEQ ID NO: 37636 - RNA, 19 nt, Artificial Sequence
  Description of Artificial Sequence: Synthetic oligonucleotide
  Sense strand starting at position 3340 of SEQ ID NO: 446
augugauuccaaugccuug

SEQ ID NO: 37637 - RNA, 19 nt, Artificial Sequence
  Description of Artificial Sequence: Synthetic oligonucleotide
  Antisense strand to SEQ ID NO: 37636
caaggcauuggaaucacau

SEQ ID NO: 37638 - RNA, 19 nt, Artificial Sequence
  Description of Artificial Sequence: Synthetic oligonucleotide
  Sense strand starting at position 3299 of SEQ ID NO: 446
gcuugauucugacucuggu

SEQ ID NO: 37639 - RNA, 19 nt, Artificial Sequence
  Description of Artificial Sequence: Synthetic oligonucleotide
  Antisense strand to SEQ ID NO: 37638
accagagucagaaucaagc

SEQ ID NO: 37640 - RNA, 19 nt, Artificial Sequence
  Description of Artificial Sequence: Synthetic oligonucleotide
  Sense strand starting at position 3238 of SEQ ID NO: 446
uggagugaaucuuagagca

SEQ ID NO: 37641 - RNA, 19 nt, Artificial Sequence
  Description of Artificial Sequence: Synthetic oligonucleotide
  Antisense strand to SEQ ID NO: 37640
ugcucuaagauucacucca

SEQ ID NO: 37642 - RNA, 19 nt, Artificial Sequence
  Description of Artificial Sequence: Synthetic oligonucleotide
  Sense strand starting at position 3231 of SEQ ID NO: 446
cauggauuggagugaaucu

SEQ ID NO: 37643 - RNA, 19 nt, Artificial Sequence
  Description of Artificial Sequence: Synthetic oligonucleotide
  Antisense strand to SEQ ID NO: 37642
agauucacuccaauccaug

SEQ ID NO: 37644 - RNA, 19 nt, Artificial Sequence
  Description of Artificial Sequence: Synthetic oligonucleotide
  Sense strand starting at position 3228 of SEQ ID NO: 446
cuucauggauuggagugaa

SEQ ID NO: 37645 - RNA, 19 nt, Artificial Sequence
  Description of Artificial Sequence: Synthetic oligonucleotide
  Antisense strand to SEQ ID NO: 37644
uucacuccaauccaugaag

SEQ ID NO: 37646 - RNA, 19 nt, Artificial Sequence
  Description of Artificial Sequence: Synthetic oligonucleotide
  Sense strand starting at position 3201 of SEQ ID NO: 446
gcaaaucucggugaaagag

SEQ ID NO: 37647 - RNA, 19 nt, Artificial Sequence
  Description of Artificial Sequence: Synthetic oligonucleotide
  Antisense strand to SEQ ID NO: 37646
cucuuucaccgagauuugc

SEQ ID NO: 37648 - RNA, 19 nt, Artificial Sequence
  Description of Artificial Sequence: Synthetic oligonucleotide
  Sense strand starting at position 3200 of SEQ ID NO: 446
ggcaaaucucggugaaaga

SEQ ID NO: 37649 - RNA, 19 nt, Artificial Sequence
  Description of Artificial Sequence: Synthetic oligonucleotide
  Antisense strand to SEQ ID NO: 37648
ucuuucaccgagauuugcc

SEQ ID NO: 37650 - RNA, 19 nt, Artificial Sequence
  Description of Artificial Sequence: Synthetic oligonucleotide
  Sense strand starting at position 3199 of SEQ ID NO: 446
uggcaaaucucggugaaag

SEQ ID NO: 37651 - RNA, 19 nt, Artificial Sequence
  Description of Artificial Sequence: Synthetic oligonucleotide
  Antisense strand to SEQ ID NO: 37650
cuuucaccgagauuugcca

SEQ ID NO: 37652 - RNA, 19 nt, Artificial Sequence
  Description of Artificial Sequence: Synthetic oligonucleotide
  Sense strand starting at position 3198 of SEQ ID NO: 446
cuggcaaaucucggugaaa

SEQ ID NO: 37653 - RNA, 19 nt, Artificial Sequence
  Description of Artificial Sequence: Synthetic oligonucleotide
  Antisense strand to SEQ ID NO: 37652
uuucaccgagauuugccag

SEQ ID NO: 37654 - RNA, 19 nt, Artificial Sequence
  Description of Artificial Sequence: Synthetic oligonucleotide
  Sense strand starting at position 3115 of SEQ ID NO: 446
gagguccagucauuccaga

SEQ ID NO: 37655 - RNA, 19 nt, Artificial Sequence
  Description of Artificial Sequence: Synthetic oligonucleotide
  Antisense strand to SEQ ID NO: 37654
ucuggaaugacuggaccuc

SEQ ID NO: 37656 - RNA, 19 nt, Artificial Sequence
  Description of Artificial Sequence: Synthetic oligonucleotide
  Sense strand starting at position 3109 of SEQ ID NO: 446
gugaaagagguccagucau

SEQ ID NO: 37657 - RNA, 19 nt, Artificial Sequence
  Description of Artificial Sequence: Synthetic oligonucleotide
  Antisense strand to SEQ ID NO: 37656
augacuggaccucuuucac

SEQ ID NO: 37658 - RNA, 19 nt, Artificial Sequence
  Description of Artificial Sequence: Synthetic oligonucleotide
  Sense strand starting at position 3079 of SEQ ID NO: 446
cuugcuuugcaagagauuc

SEQ ID NO: 37659 - RNA, 19 nt, Artificial Sequence
  Description of Artificial Sequence: Synthetic oligonucleotide
  Antisense strand to SEQ ID NO: 37658
gaaucucuugcaaagcaag

SEQ ID NO: 37660 - RNA, 19 nt, Artificial Sequence
  Description of Artificial Sequence: Synthetic oligonucleotide
  Sense strand starting at position 3074 of SEQ ID NO: 446
ccaugcuugcuuugcaaga

SEQ ID NO: 37661 - RNA, 19 nt, Artificial Sequence
  Description of Artificial Sequence: Synthetic oligonucleotide
  Antisense strand to SEQ ID NO: 37660
ucuugcaaagcaagcaugg

SEQ ID NO: 37662 - RNA, 19 nt, Artificial Sequence
  Description of Artificial Sequence: Synthetic oligonucleotide
  Sense strand starting at position 3010 of SEQ ID NO: 446
caauaagugguagggauua

SEQ ID NO: 37663 - RNA, 19 nt, Artificial Sequence
  Description of Artificial Sequence: Synthetic oligonucleotide
  Antisense strand to SEQ ID NO: 37662
uaaucccuaccacuuauug

SEQ ID NO: 37664 - RNA, 19 nt, Artificial Sequence
  Description of Artificial Sequence: Synthetic oligonucleotide
  Sense strand starting at position 3008 of SEQ ID NO: 446
uucaauaagugguagggau

SEQ ID NO: 37665 - RNA, 19 nt, Artificial Sequence
  Description of Artificial Sequence: Synthetic oligonucleotide
  Antisense strand to SEQ ID NO: 37664
aucccuaccacuuauugaa

SEQ ID NO: 37666 - RNA, 19 nt, Artificial Sequence
  Description of Artificial Sequence: Synthetic oligonucleotide
  Sense strand starting at position 2819 of SEQ ID NO: 446
gguauugguguugguccua

SEQ ID NO: 37667 - RNA, 19 nt, Artificial Sequence
  Description of Artificial Sequence: Synthetic oligonucleotide
  Antisense strand to SEQ ID NO: 37666
uaggaccaacaccaauacc

SEQ ID NO: 37668 - RNA, 19 nt, Artificial Sequence
  Description of Artificial Sequence: Synthetic oligonucleotide
  Sense strand starting at position 2806 of SEQ ID NO: 446
acgagggcucggugguauu

SEQ ID NO: 37669 - RNA, 19 nt, Artificial Sequence
  Description of Artificial Sequence: Synthetic oligonucleotide
  Antisense strand to SEQ ID NO: 37668
aauaccaccgagcccucgu

SEQ ID NO: 37670 - RNA, 19 nt, Artificial Sequence
  Description of Artificial Sequence: Synthetic oligonucleotide
  Sense strand starting at position 2781 of SEQ ID NO: 446
gcuauucugcgcugaagag

SEQ ID NO: 37671 - RNA, 19 nt, Artificial Sequence
  Description of Artificial Sequence: Synthetic oligonucleotide
  Antisense strand to SEQ ID NO: 37670
cucuucagcgcagaauagc

SEQ ID NO: 37672 - RNA, 19 nt, Artificial Sequence
  Description of Artificial Sequence: Synthetic oligonucleotide
  Sense strand starting at position 2779 of SEQ ID NO: 446
gggcuauucugcgcugaag

SEQ ID NO: 37673 - RNA, 19 nt, Artificial Sequence
  Description of Artificial Sequence: Synthetic oligonucleotide
  Antisense strand to SEQ ID NO: 37672
cuucagcgcagaauagccc

SEQ ID NO: 37674 - RNA, 19 nt, Artificial Sequence
  Description of Artificial Sequence: Synthetic oligonucleotide
  Sense strand starting at position 2778 of SEQ ID NO: 446
ugggcuauucugcgcugaa

SEQ ID NO: 37675 - RNA, 19 nt, Artificial Sequence
  Description of Artificial Sequence: Synthetic oligonucleotide
  Antisense strand to SEQ ID NO: 37674
uucagcgcagaauagccca

SEQ ID NO: 37676 - RNA, 19 nt, Artificial Sequence
  Description of Artificial Sequence: Synthetic oligonucleotide
  Sense strand starting at position 2642 of SEQ ID NO: 446
guagcauacucagugcuua

SEQ ID NO: 37677 - RNA, 19 nt, Artificial Sequence
  Description of Artificial Sequence: Synthetic oligonucleotide
  Antisense strand to SEQ ID NO: 37676
uaagcacugaguaugcuac

SEQ ID NO: 37678 - RNA, 19 nt, Artificial Sequence
  Description of Artificial Sequence: Synthetic oligonucleotide
  Sense strand starting at position 2526 of SEQ ID NO: 446
ugcaguuucgccuaucgga

SEQ ID NO: 37679 - RNA, 19 nt, Artificial Sequence
  Description of Artificial Sequence: Synthetic oligonucleotide
  Antisense strand to SEQ ID NO: 37678
uccgauaggcgaaacugca

SEQ ID NO: 37680 - RNA, 19 nt, Artificial Sequence
  Description of Artificial Sequence: Synthetic oligonucleotide
  Sense strand starting at position 1212 of SEQ ID NO: 446
guguuacucacgugccaga

SEQ ID NO: 37681 - RNA, 19 nt, Artificial Sequence
  Description of Artificial Sequence: Synthetic oligonucleotide
  Antisense strand to SEQ ID NO: 37680
ucuggcacgugaguaacac

SEQ ID NO: 37682 - RNA, 19 nt, Artificial Sequence
  Description of Artificial Sequence: Synthetic oligonucleotide
  Sense strand starting at position 1201 of SEQ ID NO: 446
gagaccaaagcguguuacu

SEQ ID NO: 37683 - RNA, 19 nt, Artificial Sequence
  Description of Artificial Sequence: Synthetic oligonucleotide
  Antisense strand to SEQ ID NO: 37682
aguaacacgcuuuggucuc

SEQ ID NO: 37684 - RNA, 19 nt, Artificial Sequence
  Description of Artificial Sequence: Synthetic oligonucleotide
  Sense strand starting at position 1199 of SEQ ID NO: 446
gagagaccaaagcguguua

SEQ ID NO: 37685 - RNA, 19 nt, Artificial Sequence
  Description of Artificial Sequence: Synthetic oligonucleotide
  Antisense strand to SEQ ID NO: 37684
uaacacgcuuuggucucuc

SEQ ID NO: 37686 - RNA, 19 nt, Artificial Sequence
  Description of Artificial Sequence: Synthetic oligonucleotide
  Sense strand starting at position 856 of SEQ ID NO: 446
gacuaauugccgggaccga

SEQ ID NO: 37687 - RNA, 19 nt, Artificial Sequence
  Description of Artificial Sequence: Synthetic oligonucleotide
  Antisense strand to SEQ ID NO: 37686
ucggucccggcaauuaguc

SEQ ID NO: 37688 - RNA, 19 nt, Artificial Sequence
  Description of Artificial Sequence: Synthetic oligonucleotide
  Sense strand starting at position 608 of SEQ ID NO: 446
ccuccauggccuuaaugau

SEQ ID NO: 37689 - RNA, 19 nt, Artificial Sequence
  Description of Artificial Sequence: Synthetic oligonucleotide
  Antisense strand to SEQ ID NO: 37688
aucauuaaggccauggagg

SEQ ID NO: 37690 - RNA, 19 nt, Artificial Sequence
  Description of Artificial Sequence: Synthetic oligonucleotide
  Sense strand starting at position 377 of SEQ ID NO: 446
gaagcuugcgcuccucuau

SEQ ID NO: 37691 - RNA, 19 nt, Artificial Sequence
  Description of Artificial Sequence: Synthetic oligonucleotide
  Antisense strand to SEQ ID NO: 37690
auagaggagcgcaagcuuc

SEQ ID NO: 37692 - RNA, 19 nt, Artificial Sequence
  Description of Artificial Sequence: Synthetic oligonucleotide
  Sense strand starting at position 307 of SEQ ID NO: 446
ugcacagucuuugagagga

SEQ ID NO: 37693 - RNA, 19 nt, Artificial Sequence
  Description of Artificial Sequence: Synthetic oligonucleotide
  Antisense strand to SEQ ID NO: 37692
uccucucaaagacugugca

SEQ ID NO: 37694 - RNA, 19 nt, Artificial Sequence
  Description of Artificial Sequence: Synthetic oligonucleotide
  Sense strand starting at position 296 of SEQ ID NO: 446
ucgcuaaauguugcacagu

SEQ ID NO: 37695 - RNA, 19 nt, Artificial Sequence
  Description of Artificial Sequence: Synthetic oligonucleotide
  Antisense strand to SEQ ID NO: 37694
acugugcaacauuuagcga

SEQ ID NO: 37696 - RNA, 19 nt, Artificial Sequence
  Description of Artificial Sequence: Synthetic oligonucleotide
  Sense strand starting at position 288 of SEQ ID NO: 446
gcaugcacucgcuaaaugu

SEQ ID NO: 37697 - RNA, 19 nt, Artificial Sequence
  Description of Artificial Sequence: Synthetic oligonucleotide
  Antisense strand to SEQ ID NO: 37696
acauuuagcgagugcaugc

SEQ ID NO: 37698 - RNA, 19 nt, Artificial Sequence
  Description of Artificial Sequence: Synthetic oligonucleotide
  Sense strand starting at position 158 of SEQ ID NO: 446
uguuaaaggugggaaauua

SEQ ID NO: 37699 - RNA, 19 nt, Artificial Sequence
  Description of Artificial Sequence: Synthetic oligonucleotide
  Antisense strand to SEQ ID NO: 37698
uaauuucccaccuuuaaca

SEQ ID NO: 37700 - RNA, 19 nt, Artificial Sequence
  Description of Artificial Sequence: Synthetic oligonucleotide
  Sense strand starting at position 157 of SEQ ID NO: 446
cuguuaaaggugggaaauu

SEQ ID NO: 37701 - RNA, 19 nt, Artificial Sequence
  Description of Artificial Sequence: Synthetic oligonucleotide
  Antisense strand to SEQ ID NO: 37700
aauuucccaccuuuaacag

SEQ ID NO: 37702 - RNA, 19 nt, Artificial Sequence
  Description of Artificial Sequence: Synthetic oligonucleotide
  Sense strand starting at position 156 of SEQ ID NO: 446
gcuguuaaaggugggaaau

SEQ ID NO: 37703 - RNA, 19 nt, Artificial Sequence
  Description of Artificial Sequence: Synthetic oligonucleotide
  Antisense strand to SEQ ID NO: 37702
auuucccaccuuuaacagc

SEQ ID NO: 37704 - RNA, 19 nt, Artificial Sequence
  Description of Artificial Sequence: Synthetic oligonucleotide
  Sense strand starting at position 155 of SEQ ID NO: 446
ggcuguuaaaggugggaaa

SEQ ID NO: 37705 - RNA, 19 nt, Artificial Sequence
  Description of Artificial Sequence: Synthetic oligonucleotide
  Antisense strand to SEQ ID NO: 37704
uuucccaccuuuaacagcc

SEQ ID NO: 37706 - RNA, 19 nt, Artificial Sequence
  Description of Artificial Sequence: Synthetic oligonucleotide
  Sense strand starting at position 76 of SEQ ID NO: 446
cugugaugcucaccagaac

SEQ ID NO: 37707 - RNA, 19 nt, Artificial Sequence
  Description of Artificial Sequence: Synthetic oligonucleotide
  Antisense strand to SEQ ID NO: 37706
guucuggugagcaucacag

SEQ ID NO: 37708 - RNA, 19 nt, Artificial Sequence
  Description of Artificial Sequence: Synthetic oligonucleotide
  Sense strand starting at position 74 of SEQ ID NO: 446
gucugugaugcucaccaga

SEQ ID NO: 37709 - RNA, 19 nt, Artificial Sequence
  Description of Artificial Sequence: Synthetic oligonucleotide
  Antisense strand to SEQ ID NO: 37708
ucuggugagcaucacagac

SEQ ID NO: 37710 - RNA, 19 nt, Artificial Sequence
  Description of Artificial Sequence: Synthetic oligonucleotide
  Sense strand starting at position 3903 of SEQ ID NO: 447
ugguucuuaccauagaucu

SEQ ID NO: 37711 - RNA, 19 nt, Artificial Sequence
  Description of Artificial Sequence: Synthetic oligonucleotide
  Antisense strand to SEQ ID NO: 37710
agaucuaugguaagaacca

SEQ ID NO: 37712 - RNA, 19 nt, Artificial Sequence
  Description of Artificial Sequence: Synthetic oligonucleotide
  Sense strand starting at position 3369 of SEQ ID NO: 447
uuuguauaggcucaauacu

SEQ ID NO: 37713 - RNA, 19 nt, Artificial Sequence
  Description of Artificial Sequence: Synthetic oligonucleotide
  Antisense strand to SEQ ID NO: 37712
aguauugagccuauacaaa

SEQ ID NO: 37714 - RNA, 19 nt, Artificial Sequence
  Description of Artificial Sequence: Synthetic oligonucleotide
  Sense strand starting at position 3359 of SEQ ID NO: 447
cacugaagucuuuguauag

SEQ ID NO: 37715 - RNA, 19 nt, Artificial Sequence
  Description of Artificial Sequence: Synthetic oligonucleotide
  Antisense strand to SEQ ID NO: 37714
cuauacaaagacuucagug

SEQ ID NO: 37716 - RNA, 19 nt, Artificial Sequence
  Description of Artificial Sequence: Synthetic oligonucleotide
  Sense strand starting at position 3349 of SEQ ID NO: 447
gggaaucccucacugaagu

SEQ ID NO: 37717 - RNA, 19 nt, Artificial Sequence
  Description of Artificial Sequence: Synthetic oligonucleotide
  Antisense strand to SEQ ID NO: 37716
acuucagugagggauuccc

SEQ ID NO: 37718 - RNA, 19 nt, Artificial Sequence
  Description of Artificial Sequence: Synthetic oligonucleotide
  Sense strand starting at position 3141 of SEQ ID NO: 447
auguaaauguggucuuucu

SEQ ID NO: 37719 - RNA, 19 nt, Artificial Sequence
  Description of Artificial Sequence: Synthetic oligonucleotide
  Antisense strand to SEQ ID NO: 37718
agaaagaccacauuuacau

SEQ ID NO: 37720 - RNA, 19 nt, Artificial Sequence
  Description of Artificial Sequence: Synthetic oligonucleotide
  Sense strand starting at position 2992 of SEQ ID NO: 447
gccugacacgauggauagu

SEQ ID NO: 37721 - RNA, 19 nt, Artificial Sequence
  Description of Artificial Sequence: Synthetic oligonucleotide
  Antisense strand to SEQ ID NO: 37720
acuauccaucgugucaggc

SEQ ID NO: 37722 - RNA, 19 nt, Artificial Sequence
  Description of Artificial Sequence: Synthetic oligonucleotide
  Sense strand starting at position 2902 of SEQ ID NO: 447
aagugaauacgaugucuua

SEQ ID NO: 37723 - RNA, 19 nt, Artificial Sequence
  Description of Artificial Sequence: Synthetic oligonucleotide
  Antisense strand to SEQ ID NO: 37722
uaagacaucguauucacuu

SEQ ID NO: 37724 - RNA, 19 nt, Artificial Sequence
  Description of Artificial Sequence: Synthetic oligonucleotide
  Sense strand starting at position 2686 of SEQ ID NO: 447
uucuuuagaguuggcucua

SEQ ID NO: 37725 - RNA, 19 nt, Artificial Sequence
  Description of Artificial Sequence: Synthetic oligonucleotide
  Antisense strand to SEQ ID NO: 37724
uagagccaacucuaaagaa

SEQ ID NO: 37726 - RNA, 19 nt, Artificial Sequence
  Description of Artificial Sequence: Synthetic oligonucleotide
  Sense strand starting at position 2663 of SEQ ID NO: 447
auguauuucccauguguga

SEQ ID NO: 37727 - RNA, 19 nt, Artificial Sequence
  Description of Artificial Sequence: Synthetic oligonucleotide
  Antisense strand to SEQ ID NO: 37726
ucacacaugggaaauacau

SEQ ID NO: 37728 - RNA, 19 nt, Artificial Sequence
  Description of Artificial Sequence: Synthetic oligonucleotide
  Sense strand starting at position 2647 of SEQ ID NO: 447
ccggauauccaguaggaug

SEQ ID NO: 37729 - RNA, 19 nt, Artificial Sequence
  Description of Artificial Sequence: Synthetic oligonucleotide
  Antisense strand to SEQ ID NO: 37728
cauccuacuggauauccgg

SEQ ID NO: 37730 - RNA, 19 nt, Artificial Sequence
  Description of Artificial Sequence: Synthetic oligonucleotide
  Sense strand starting at position 2241 of SEQ ID NO: 447
ucacuaugaccucgaauuc

SEQ ID NO: 37731 - RNA, 19 nt, Artificial Sequence
  Description of Artificial Sequence: Synthetic oligonucleotide
  Antisense strand to SEQ ID NO: 37730
gaauucgaggucauaguga

SEQ ID NO: 37732 - RNA, 19 nt, Artificial Sequence
  Description of Artificial Sequence: Synthetic oligonucleotide
  Sense strand starting at position 2230 of SEQ ID NO: 447
cgugauagagcucacuaug

SEQ ID NO: 37733 - RNA, 19 nt, Artificial Sequence
  Description of Artificial Sequence: Synthetic oligonucleotide
  Antisense strand to SEQ ID NO: 37732
cauagugagcucuaucacg

SEQ ID NO: 37734 - RNA, 19 nt, Artificial Sequence
  Description of Artificial Sequence: Synthetic oligonucleotide
  Sense strand starting at position 2127 of SEQ ID NO: 447
uccgauuauuuccagaaau

SEQ ID NO: 37735 - RNA, 19 nt, Artificial Sequence
  Description of Artificial Sequence: Synthetic oligonucleotide
  Antisense strand to SEQ ID NO: 37734
auuucuggaaauaaucgga

SEQ ID NO: 37736 - RNA, 19 nt, Artificial Sequence
  Description of Artificial Sequence: Synthetic oligonucleotide
  Sense strand starting at position 2001 of SEQ ID NO: 447
uggcaugccgggaguugua

SEQ ID NO: 37737 - RNA, 19 nt, Artificial Sequence
  Description of Artificial Sequence: Synthetic oligonucleotide
  Antisense strand to SEQ ID NO: 37736
uacaacucccggcaugcca

SEQ ID NO: 37738 - RNA, 19 nt, Artificial Sequence
  Description of Artificial Sequence: Synthetic oligonucleotide
  Sense strand starting at position 1261 of SEQ ID NO: 447
ugugaaaggucccugcaag

SEQ ID NO: 37739 - RNA, 19 nt, Artificial Sequence
  Description of Artificial Sequence: Synthetic oligonucleotide
  Antisense strand to SEQ ID NO: 37738
cuugcagggaccuuucaca

SEQ ID NO: 37740 - RNA, 19 nt, Artificial Sequence
  Description of Artificial Sequence: Synthetic oligonucleotide
  Sense strand starting at position 1249 of SEQ ID NO: 447
ucaacuccuggaugugaaa

SEQ ID NO: 37741 - RNA, 19 nt, Artificial Sequence
  Description of Artificial Sequence: Synthetic oligonucleotide
  Antisense strand to SEQ ID NO: 37740
uuucacauccaggaguuga

SEQ ID NO: 37742 - RNA, 19 nt, Artificial Sequence
  Description of Artificial Sequence: Synthetic oligonucleotide
  Sense strand starting at position 1247 of SEQ ID NO: 447
agucaacuccuggauguga

SEQ ID NO: 37743 - RNA, 19 nt, Artificial Sequence
  Description of Artificial Sequence: Synthetic oligonucleotide
  Antisense strand to SEQ ID NO: 37742
ucacauccaggaguugacu

SEQ ID NO: 37744 - RNA, 19 nt, Artificial Sequence
  Description of Artificial Sequence: Synthetic oligonucleotide
  Sense strand starting at position 1246 of SEQ ID NO: 447
gagucaacuccuggaugug

SEQ ID NO: 37745 - RNA, 19 nt, Artificial Sequence
  Description of Artificial Sequence: Synthetic oligonucleotide
  Antisense strand to SEQ ID NO: 37744
cacauccaggaguugacuc

SEQ ID NO: 37746 - RNA, 19 nt, Artificial Sequence
  Description of Artificial Sequence: Synthetic oligonucleotide
  Sense strand starting at position 1233 of SEQ ID NO: 447
uccuuuggcgaaugaguca

SEQ ID NO: 37747 - RNA, 19 nt, Artificial Sequence
  Description of Artificial Sequence: Synthetic oligonucleotide
  Antisense strand to SEQ ID NO: 37746
ugacucauucgccaaagga

SEQ ID NO: 37748 - RNA, 19 nt, Artificial Sequence
  Description of Artificial Sequence: Synthetic oligonucleotide
  Sense strand starting at position 1099 of SEQ ID NO: 447
agcagauguaguuauugaa

SEQ ID NO: 37749 - RNA, 19 nt, Artificial Sequence
  Description of Artificial Sequence: Synthetic oligonucleotide
  Antisense strand to SEQ ID NO: 37748
uucaauaacuacaucugcu

SEQ ID NO: 37750 - RNA, 19 nt, Artificial Sequence
  Description of Artificial Sequence: Synthetic oligonucleotide
  Sense strand starting at position 1046 of SEQ ID NO: 447
uuuaacauggaucgauaga

SEQ ID NO: 37751 - RNA, 19 nt, Artificial Sequence
  Description of Artificial Sequence: Synthetic oligonucleotide
  Antisense strand to SEQ ID NO: 37750
ucuaucgauccauguuaaa

SEQ ID NO: 37752 - RNA, 19 nt, Artificial Sequence
  Description of Artificial Sequence: Synthetic oligonucleotide
  Sense strand starting at position 1024 of SEQ ID NO: 447
guuugaauacugcaacuua

SEQ ID NO: 37753 - RNA, 19 nt, Artificial Sequence
  Description of Artificial Sequence: Synthetic oligonucleotide
  Antisense strand to SEQ ID NO: 37752
uaaguugcaguauucaaac

SEQ ID NO: 37754 - RNA, 19 nt, Artificial Sequence
  Description of Artificial Sequence: Synthetic oligonucleotide
  Sense strand starting at position 958 of SEQ ID NO: 447
aagaguuguagccgacaug

SEQ ID NO: 37755 - RNA, 19 nt, Artificial Sequence
  Description of Artificial Sequence: Synthetic oligonucleotide
  Antisense strand to SEQ ID NO: 37754
caugucggcuacaacucuu

SEQ ID NO: 37756 - RNA, 19 nt, Artificial Sequence
  Description of Artificial Sequence: Synthetic oligonucleotide
  Sense strand starting at position 938 of SEQ ID NO: 447
augcuuugucaagagaugg

SEQ ID NO: 37757 - RNA, 19 nt, Artificial Sequence
  Description of Artificial Sequence: Synthetic oligonucleotide
  Antisense strand to SEQ ID NO: 37756
ccaucucuugacaaagcau

SEQ ID NO: 37758 - RNA, 19 nt, Artificial Sequence
  Description of Artificial Sequence: Synthetic oligonucleotide
  Sense strand starting at position 934 of SEQ ID NO: 447
cuagaugcuuugucaagag

SEQ ID NO: 37759 - RNA, 19 nt, Artificial Sequence
  Description of Artificial Sequence: Synthetic oligonucleotide
  Antisense strand to SEQ ID NO: 37758
cucuugacaaagcaucuag

SEQ ID NO: 37760 - RNA, 19 nt, Artificial Sequence
  Description of Artificial Sequence: Synthetic oligonucleotide
  Sense strand starting at position 933 of SEQ ID NO: 447
ccuagaugcuuugucaaga

SEQ ID NO: 37761 - RNA, 19 nt, Artificial Sequence
  Description of Artificial Sequence: Synthetic oligonucleotide
  Antisense strand to SEQ ID NO: 37760
ucuugacaaagcaucuagg

SEQ ID NO: 37762 - RNA, 19 nt, Artificial Sequence
  Description of Artificial Sequence: Synthetic oligonucleotide
  Sense strand starting at position 799 of SEQ ID NO: 447
guuuaauccgaucagaaac

SEQ ID NO: 37763 - RNA, 19 nt, Artificial Sequence
  Description of Artificial Sequence: Synthetic oligonucleotide
  Antisense strand to SEQ ID NO: 37762
guuucugaucggauuaaac

SEQ ID NO: 37764 - RNA, 19 nt, Artificial Sequence
  Description of Artificial Sequence: Synthetic oligonucleotide
  Sense strand starting at position 747 of SEQ ID NO: 447
acauauacucuguacgacu

SEQ ID NO: 37765 - RNA, 19 nt, Artificial Sequence
  Description of Artificial Sequence: Synthetic oligonucleotide
  Antisense strand to SEQ ID NO: 37764
agucguacagaguauaugu

SEQ ID NO: 37766 - RNA, 19 nt, Artificial Sequence
  Description of Artificial Sequence: Synthetic oligonucleotide
  Sense strand starting at position 636 of SEQ ID NO: 447
ggaaauaaugugcaagcaa

SEQ ID NO: 37767 - RNA, 19 nt, Artificial Sequence
  Description of Artificial Sequence: Synthetic oligonucleotide
  Antisense strand to SEQ ID NO: 37766
uugcuugcacauuauuucc

SEQ ID NO: 37768 - RNA, 19 nt, Artificial Sequence
  Description of Artificial Sequence: Synthetic oligonucleotide
  Sense strand starting at position 635 of SEQ ID NO: 447
gggaaauaaugugcaagca

SEQ ID NO: 37769 - RNA, 19 nt, Artificial Sequence
  Description of Artificial Sequence: Synthetic oligonucleotide
  Antisense strand to SEQ ID NO: 37768
ugcuugcacauuauuuccc

SEQ ID NO: 37770 - RNA, 19 nt, Artificial Sequence
  Description of Artificial Sequence: Synthetic oligonucleotide
  Sense strand starting at position 578 of SEQ ID NO: 447
ugugcauaucuaggaaaua

SEQ ID NO: 37771 - RNA, 19 nt, Artificial Sequence
  Description of Artificial Sequence: Synthetic oligonucleotide
  Antisense strand to SEQ ID NO: 37770
uauuuccuagauaugcaca

SEQ ID NO: 37772 - RNA, 19 nt, Artificial Sequence
  Description of Artificial Sequence: Synthetic oligonucleotide
  Sense strand starting at position 575 of SEQ ID NO: 447
cauugugcauaucuaggaa

SEQ ID NO: 37773 - RNA, 19 nt, Artificial Sequence
  Description of Artificial Sequence: Synthetic oligonucleotide
  Antisense strand to SEQ ID NO: 37772
uuccuagauaugcacaaug

SEQ ID NO: 37774 - RNA, 19 nt, Artificial Sequence
  Description of Artificial Sequence: Synthetic oligonucleotide
  Sense strand starting at position 441 of SEQ ID NO: 447
aaaucuugucguuagauau

SEQ ID NO: 37775 - RNA, 19 nt, Artificial Sequence
  Description of Artificial Sequence: Synthetic oligonucleotide
  Antisense strand to SEQ ID NO: 37774
auaucuaacgacaagauuu

SEQ ID NO: 37776 - RNA, 19 nt, Artificial Sequence
  Description of Artificial Sequence: Synthetic oligonucleotide
  Sense strand starting at position 440 of SEQ ID NO: 447
gaaaucuugucguuagaua

SEQ ID NO: 37777 - RNA, 19 nt, Artificial Sequence
  Description of Artificial Sequence: Synthetic oligonucleotide
  Antisense strand to SEQ ID NO: 37776
uaucuaacgacaagauuuc

SEQ ID NO: 37778 - RNA, 19 nt, Artificial Sequence
  Description of Artificial Sequence: Synthetic oligonucleotide
  Sense strand starting at position 437 of SEQ ID NO: 447
ucagaaaucuugucguuag

SEQ ID NO: 37779 - RNA, 19 nt, Artificial Sequence
  Description of Artificial Sequence: Synthetic oligonucleotide
  Antisense strand to SEQ ID NO: 37778
cuaacgacaagauuucuga

SEQ ID NO: 37780 - RNA, 19 nt, Artificial Sequence
  Description of Artificial Sequence: Synthetic oligonucleotide
  Sense strand starting at position 391 of SEQ ID NO: 447
gcaagugaugcugcccuuu

SEQ ID NO: 37781 - RNA, 19 nt, Artificial Sequence
  Description of Artificial Sequence: Synthetic oligonucleotide
  Antisense strand to SEQ ID NO: 37780
aaagggcagcaucacuugc

SEQ ID NO: 37782 - RNA, 19 nt, Artificial Sequence
  Description of Artificial Sequence: Synthetic oligonucleotide
  Sense strand starting at position 341 of SEQ ID NO: 447
gcucuaguuccuuauauca

SEQ ID NO: 37783 - RNA, 19 nt, Artificial Sequence
  Description of Artificial Sequence: Synthetic oligonucleotide
  Antisense strand to SEQ ID NO: 37782
ugauauaaggaacuagagc

SEQ ID NO: 37784 - RNA, 19 nt, Artificial Sequence
  Description of Artificial Sequence: Synthetic oligonucleotide
  Sense strand starting at position 26 of SEQ ID NO: 447
gguguaaaccagggcuauu

SEQ ID NO: 37785 - RNA, 19 nt, Artificial Sequence
  Description of Artificial Sequence: Synthetic oligonucleotide
  Antisense strand to SEQ ID NO: 37784
aauagcccugguuuacacc

SEQ ID NO: 37786 - RNA, 19 nt, Artificial Sequence
  Description of Artificial Sequence: Synthetic oligonucleotide
  Sense strand starting at position 25 of SEQ ID NO: 447
ugguguaaaccagggcuau

SEQ ID NO: 37787 - RNA, 19 nt, Artificial Sequence
  Description of Artificial Sequence: Synthetic oligonucleotide
  Antisense strand to SEQ ID NO: 37786
auagcccugguuuacacca

SEQ ID NO: 37788 - RNA, 19 nt, Artificial Sequence
  Description of Artificial Sequence: Synthetic oligonucleotide
  Sense strand starting at position 15 of SEQ ID NO: 447
augcauaaauugguguaaa

SEQ ID NO: 37789 - RNA, 19 nt, Artificial Sequence
  Description of Artificial Sequence: Synthetic oligonucleotide
  Antisense strand to SEQ ID NO: 37788
uuuacaccaauuuaugcau

SEQ ID NO: 37790 - RNA, 19 nt, Artificial Sequence
  Description of Artificial Sequence: Synthetic oligonucleotide
  Sense strand starting at position 3975 of SEQ ID NO: 448
acaauuuaguggugguuua

SEQ ID NO: 37791 - RNA, 19 nt, Artificial Sequence
  Description of Artificial Sequence: Synthetic oligonucleotide
  Antisense strand to SEQ ID NO: 37790
uaaaccaccacuaaauugu

SEQ ID NO: 37792 - RNA, 19 nt, Artificial Sequence
  Description of Artificial Sequence: Synthetic oligonucleotide
  Sense strand starting at position 3961 of SEQ ID NO: 448
gaaguugcucacgaacaau

SEQ ID NO: 37793 - RNA, 19 nt, Artificial Sequence
  Description of Artificial Sequence: Synthetic oligonucleotide
  Antisense strand to SEQ ID NO: 37792
auuguucgugagcaacuuc

SEQ ID NO: 37794 - RNA, 19 nt, Artificial Sequence
  Description of Artificial Sequence: Synthetic oligonucleotide
  Sense strand starting at position 3960 of SEQ ID NO: 448
agaaguugcucacgaacaa

SEQ ID NO: 37795 - RNA, 19 nt, Artificial Sequence
  Description of Artificial Sequence: Synthetic oligonucleotide
  Antisense strand to SEQ ID NO: 37794
uuguucgugagcaacuucu

SEQ ID NO: 37796 - RNA, 19 nt, Artificial Sequence
  Description of Artificial Sequence: Synthetic oligonucleotide
  Sense strand starting at position 3957 of SEQ ID NO: 448
aacagaaguugcucacgaa

SEQ ID NO: 37797 - RNA, 19 nt, Artificial Sequence
  Description of Artificial Sequence: Synthetic oligonucleotide
  Antisense strand to SEQ ID NO: 37796
uucgugagcaacuucuguu

SEQ ID NO: 37798 - RNA, 19 nt, Artificial Sequence
  Description of Artificial Sequence: Synthetic oligonucleotide
  Sense strand starting at position 3903 of SEQ ID NO: 448
cugcuaagccuggagguaa

SEQ ID NO: 37799 - RNA, 19 nt, Artificial Sequence
  Description of Artificial Sequence: Synthetic oligonucleotide
  Antisense strand to SEQ ID NO: 37798
uuaccuccaggcuuagcag

SEQ ID NO: 37800 - RNA, 19 nt, Artificial Sequence
  Description of Artificial Sequence: Synthetic oligonucleotide
  Sense strand starting at position 3454 of SEQ ID NO: 448
ugucgaccagcuugaauaa

SEQ ID NO: 37801 - RNA, 19 nt, Artificial Sequence
  Description of Artificial Sequence: Synthetic oligonucleotide
  Antisense strand to SEQ ID NO: 37800
uuauucaagcuggucgaca

SEQ ID NO: 37802 - RNA, 19 nt, Artificial Sequence
  Description of Artificial Sequence: Synthetic oligonucleotide
  Sense strand starting at position 3448 of SEQ ID NO: 448
guguguugucgaccagcuu

SEQ ID NO: 37803 - RNA, 19 nt, Artificial Sequence
  Description of Artificial Sequence: Synthetic oligonucleotide
  Antisense strand to SEQ ID NO: 37802
aagcuggucgacaacacac

SEQ ID NO: 37804 - RNA, 19 nt, Artificial Sequence
  Description of Artificial Sequence: Synthetic oligonucleotide
  Sense strand starting at position 3404 of SEQ ID NO: 448
auaagacuggccgaaaguu

SEQ ID NO: 37805 - RNA, 19 nt, Artificial Sequence
  Description of Artificial Sequence: Synthetic oligonucleotide
  Antisense strand to SEQ ID NO: 37804
aacuuucggccagucuuau

SEQ ID NO: 37806 - RNA, 19 nt, Artificial Sequence
  Description of Artificial Sequence: Synthetic oligonucleotide
  Sense strand starting at position 2871 of SEQ ID NO: 448
ggauuacaaugagaacaau

SEQ ID NO: 37807 - RNA, 19 nt, Artificial Sequence
  Description of Artificial Sequence: Synthetic oligonucleotide
  Antisense strand to SEQ ID NO: 37806
auuguucucauuguaaucc

SEQ ID NO: 37808 - RNA, 19 nt, Artificial Sequence
  Description of Artificial Sequence: Synthetic oligonucleotide
  Sense strand starting at position 2697 of SEQ ID NO: 448
cguagugggugcuuguaau

SEQ ID NO: 37809 - RNA, 19 nt, Artificial Sequence
  Description of Artificial Sequence: Synthetic oligonucleotide
  Antisense strand to SEQ ID NO: 37808
auuacaagcacccacuacg

SEQ ID NO: 37810 - RNA, 19 nt, Artificial Sequence
  Description of Artificial Sequence: Synthetic oligonucleotide
  Sense strand starting at position 2696 of SEQ ID NO: 448
gcguagugggugcuuguaa

SEQ ID NO: 37811 - RNA, 19 nt, Artificial Sequence
  Description of Artificial Sequence: Synthetic oligonucleotide
  Antisense strand to SEQ ID NO: 37810
uuacaagcacccacuacgc

SEQ ID NO: 37812 - RNA, 19 nt, Artificial Sequence
  Description of Artificial Sequence: Synthetic oligonucleotide
  Sense strand starting at position 2525 of SEQ ID NO: 448
agaauagcugcuuauaaag

SEQ ID NO: 37813 - RNA, 19 nt, Artificial Sequence
  Description of Artificial Sequence: Synthetic oligonucleotide
  Antisense strand to SEQ ID NO: 37812
cuuuauaagcagcuauucu

SEQ ID NO: 37814 - RNA, 19 nt, Artificial Sequence
  Description of Artificial Sequence: Synthetic oligonucleotide
  Sense strand starting at position 2510 of SEQ ID NO: 448
ugugaaugcuuucucagaa

SEQ ID NO: 37815 - RNA, 19 nt, Artificial Sequence
  Description of Artificial Sequence: Synthetic oligonucleotide
  Antisense strand to SEQ ID NO: 37814
uucugagaaagcauucaca

SEQ ID NO: 37816 - RNA, 19 nt, Artificial Sequence
  Description of Artificial Sequence: Synthetic oligonucleotide
  Sense strand starting at position 2507 of SEQ ID NO: 448
gccugugaaugcuuucuca

SEQ ID NO: 37817 - RNA, 19 nt, Artificial Sequence
  Description of Artificial Sequence: Synthetic oligonucleotide
  Antisense strand to SEQ ID NO: 37816
ugagaaagcauucacaggc

SEQ ID NO: 37818 - RNA, 19 nt, Artificial Sequence
  Description of Artificial Sequence: Synthetic oligonucleotide
  Sense strand starting at position 2385 of SEQ ID NO: 448
gauauaauagaccguacuu

SEQ ID NO: 37819 - RNA, 19 nt, Artificial Sequence
  Description of Artificial Sequence: Synthetic oligonucleotide
  Antisense strand to SEQ ID NO: 37818
aaguacggucuauuauauc

SEQ ID NO: 37820 - RNA, 19 nt, Artificial Sequence
  Description of Artificial Sequence: Synthetic oligonucleotide
  Sense strand starting at position 2361 of SEQ ID NO: 448
cucaguuucugggucugua

SEQ ID NO: 37821 - RNA, 19 nt, Artificial Sequence
  Description of Artificial Sequence: Synthetic oligonucleotide
  Antisense strand to SEQ ID NO: 37820
uacagacccagaaacugag

SEQ ID NO: 37822 - RNA, 19 nt, Artificial Sequence
  Description of Artificial Sequence: Synthetic oligonucleotide
  Sense strand starting at position 2316 of SEQ ID NO: 448
gcucuuguuagcuguguga

SEQ ID NO: 37823 - RNA, 19 nt, Artificial Sequence
  Description of Artificial Sequence: Synthetic oligonucleotide
  Antisense strand to SEQ ID NO: 37822
ucacacagcuaacaagagc

SEQ ID NO: 37824 - RNA, 19 nt, Artificial Sequence
  Description of Artificial Sequence: Synthetic oligonucleotide
  Sense strand starting at position 2256 of SEQ ID NO: 448
cgcugaaaucaguagcaaa

SEQ ID NO: 37825 - RNA, 19 nt, Artificial Sequence
  Description of Artificial Sequence: Synthetic oligonucleotide
  Antisense strand to SEQ ID NO: 37824
uuugcuacugauuucagcg

SEQ ID NO: 37826 - RNA, 19 nt, Artificial Sequence
  Description of Artificial Sequence: Synthetic oligonucleotide
  Sense strand starting at position 1991 of SEQ ID NO: 448
gccggaauuuccgcuccca

SEQ ID NO: 37827 - RNA, 19 nt, Artificial Sequence
  Description of Artificial Sequence: Synthetic oligonucleotide
  Antisense strand to SEQ ID NO: 37826
ugggagcggaaauuccggc

SEQ ID NO: 37828 - RNA, 19 nt, Artificial Sequence
  Description of Artificial Sequence: Synthetic oligonucleotide
  Sense strand starting at position 1445 of SEQ ID NO: 448
cauguuaggugcucuguaa

SEQ ID NO: 37829 - RNA, 19 nt, Artificial Sequence
  Description of Artificial Sequence: Synthetic oligonucleotide
  Antisense strand to SEQ ID NO: 37828
uuacagagcaccuaacaug

SEQ ID NO: 37830 - RNA, 19 nt, Artificial Sequence
  Description of Artificial Sequence: Synthetic oligonucleotide
  Sense strand starting at position 1354 of SEQ ID NO: 448
gggcuacugccaugaugag

SEQ ID NO: 37831 - RNA, 19 nt, Artificial Sequence
  Description of Artificial Sequence: Synthetic oligonucleotide
  Antisense strand to SEQ ID NO: 37830
cucaucauggcaguagccc

SEQ ID NO: 37832 - RNA, 19 nt, Artificial Sequence
  Description of Artificial Sequence: Synthetic oligonucleotide
  Sense strand starting at position 1204 of SEQ ID NO: 448
gucaguuucugacucuaag

SEQ ID NO: 37833 - RNA, 19 nt, Artificial Sequence
  Description of Artificial Sequence: Synthetic oligonucleotide
  Antisense strand to SEQ ID NO: 37832
cuuagagucagaaacugac

SEQ ID NO: 37834 - RNA, 19 nt, Artificial Sequence
  Description of Artificial Sequence: Synthetic oligonucleotide
  Sense strand starting at position 793 of SEQ ID NO: 448
gaccuauggucacagagcu

SEQ ID NO: 37835 - RNA, 19 nt, Artificial Sequence
  Description of Artificial Sequence: Synthetic oligonucleotide
  Antisense strand to SEQ ID NO: 37834
agcucugugaccauagguc

SEQ ID NO: 37836 - RNA, 19 nt, Artificial Sequence
  Description of Artificial Sequence: Synthetic oligonucleotide
  Sense strand starting at position 756 of SEQ ID NO: 448
agaguugccuuucccauuu

SEQ ID NO: 37837 - RNA, 19 nt, Artificial Sequence
  Description of Artificial Sequence: Synthetic oligonucleotide
  Antisense strand to SEQ ID NO: 37836
aaaugggaaaggcaacucu

SEQ ID NO: 37838 - RNA, 19 nt, Artificial Sequence
  Description of Artificial Sequence: Synthetic oligonucleotide
  Sense strand starting at position 721 of SEQ ID NO: 448
ucaugauugucucacuuug

SEQ ID NO: 37839 - RNA, 19 nt, Artificial Sequence
  Description of Artificial Sequence: Synthetic oligonucleotide
  Antisense strand to SEQ ID NO: 37838
caaagugagacaaucauga

SEQ ID NO: 37840 - RNA, 19 nt, Artificial Sequence
  Description of Artificial Sequence: Synthetic oligonucleotide
  Sense strand starting at position 719 of SEQ ID NO: 448
ugucaugauugucucacuu

SEQ ID NO: 37841 - RNA, 19 nt, Artificial Sequence
  Description of Artificial Sequence: Synthetic oligonucleotide
  Antisense strand to SEQ ID NO: 37840
aagugagacaaucaugaca

SEQ ID NO: 37842 - RNA, 19 nt, Artificial Sequence
  Description of Artificial Sequence: Synthetic oligonucleotide
  Sense strand starting at position 718 of SEQ ID NO: 448
augucaugauugucucacu

SEQ ID NO: 37843 - RNA, 19 nt, Artificial Sequence
  Description of Artificial Sequence: Synthetic oligonucleotide
  Antisense strand to SEQ ID NO: 37842
agugagacaaucaugacau

SEQ ID NO: 37844 - RNA, 19 nt, Artificial Sequence
  Description of Artificial Sequence: Synthetic oligonucleotide
  Sense strand starting at position 716 of SEQ ID NO: 448
cuaugucaugauugucuca

SEQ ID NO: 37845 - RNA, 19 nt, Artificial Sequence
  Description of Artificial Sequence: Synthetic oligonucleotide
  Antisense strand to SEQ ID NO: 37844
ugagacaaucaugacauag

SEQ ID NO: 37846 - RNA, 19 nt, Artificial Sequence
  Description of Artificial Sequence: Synthetic oligonucleotide
  Sense strand starting at position 713 of SEQ ID NO: 448
gaacuaugucaugauuguc

SEQ ID NO: 37847 - RNA, 19 nt, Artificial Sequence
  Description of Artificial Sequence: Synthetic oligonucleotide
  Antisense strand to SEQ ID NO: 37846
gacaaucaugacauaguuc

SEQ ID NO: 37848 - RNA, 19 nt, Artificial Sequence
  Description of Artificial Sequence: Synthetic oligonucleotide
  Sense strand starting at position 712 of SEQ ID NO: 448
ugaacuaugucaugauugu

SEQ ID NO: 37849 - RNA, 19 nt, Artificial Sequence
  Description of Artificial Sequence: Synthetic oligonucleotide
  Antisense strand to SEQ ID NO: 37848
acaaucaugacauaguuca

SEQ ID NO: 37850 - RNA, 19 nt, Artificial Sequence
  Description of Artificial Sequence: Synthetic oligonucleotide
  Sense strand starting at position 696 of SEQ ID NO: 448
ggcauugagcuacaaauga

SEQ ID NO: 37851 - RNA, 19 nt, Artificial Sequence
  Description of Artificial Sequence: Synthetic oligonucleotide
  Antisense strand to SEQ ID NO: 37850
ucauuuguagcucaaugcc

SEQ ID NO: 37852 - RNA, 19 nt, Artificial Sequence
  Description of Artificial Sequence: Synthetic oligonucleotide
  Sense strand starting at position 564 of SEQ ID NO: 448
uguguucccugugucacau

SEQ ID NO: 37853 - RNA, 19 nt, Artificial Sequence
  Description of Artificial Sequence: Synthetic oligonucleotide
  Antisense strand to SEQ ID NO: 37852
augugacacagggaacaca

SEQ ID NO: 37854 - RNA, 19 nt, Artificial Sequence
  Description of Artificial Sequence: Synthetic oligonucleotide
  Sense strand starting at position 563 of SEQ ID NO: 448
guguguucccugugucaca

SEQ ID NO: 37855 - RNA, 19 nt, Artificial Sequence
  Description of Artificial Sequence: Synthetic oligonucleotide
  Antisense strand to SEQ ID NO: 37854
ugugacacagggaacacac

SEQ ID NO: 37856 - RNA, 19 nt, Artificial Sequence
  Description of Artificial Sequence: Synthetic oligonucleotide
  Sense strand starting at position 501 of SEQ ID NO: 448
ucacucuucgaaggaauuc

SEQ ID NO: 37857 - RNA, 19 nt, Artificial Sequence
  Description of Artificial Sequence: Synthetic oligonucleotide
  Antisense strand to SEQ ID NO: 37856
gaauuccuucgaagaguga

SEQ ID NO: 37858 - RNA, 19 nt, Artificial Sequence
  Description of Artificial Sequence: Synthetic oligonucleotide
  Sense strand starting at position 498 of SEQ ID NO: 448
ugcucacucuucgaaggaa

SEQ ID NO: 37859 - RNA, 19 nt, Artificial Sequence
  Description of Artificial Sequence: Synthetic oligonucleotide
  Antisense strand to SEQ ID NO: 37858
uuccuucgaagagugagca

SEQ ID NO: 37860 - RNA, 19 nt, Artificial Sequence
  Description of Artificial Sequence: Synthetic oligonucleotide
  Sense strand starting at position 497 of SEQ ID NO: 448
uugcucacucuucgaagga

SEQ ID NO: 37861 - RNA, 19 nt, Artificial Sequence
  Description of Artificial Sequence: Synthetic oligonucleotide
  Antisense strand to SEQ ID NO: 37860
uccuucgaagagugagcaa

SEQ ID NO: 37862 - RNA, 19 nt, Artificial Sequence
  Description of Artificial Sequence: Synthetic oligonucleotide
  Sense strand starting at position 438 of SEQ ID NO: 448
gguaaagacuaucauuauc

SEQ ID NO: 37863 - RNA, 19 nt, Artificial Sequence
  Description of Artificial Sequence: Synthetic oligonucleotide
  Antisense strand to SEQ ID NO: 37862
gauaaugauagucuuuacc

SEQ ID NO: 37864 - RNA, 19 nt, Artificial Sequence
  Description of Artificial Sequence: Synthetic oligonucleotide
  Sense strand starting at position 379 of SEQ ID NO: 448
gcaaaucuauaagagcuuu

SEQ ID NO: 37865 - RNA, 19 nt, Artificial Sequence
  Description of Artificial Sequence: Synthetic oligonucleotide
  Antisense strand to SEQ ID NO: 37864
aaagcucuuauagauuugc

SEQ ID NO: 37866 - RNA, 19 nt, Artificial Sequence
  Description of Artificial Sequence: Synthetic oligonucleotide
  Sense strand starting at position 359 of SEQ ID NO: 448
gagggcuuacuaugugcua

SEQ ID NO: 37867 - RNA, 19 nt, Artificial Sequence
  Description of Artificial Sequence: Synthetic oligonucleotide
  Antisense strand to SEQ ID NO: 37866
uagcacauaguaagcccuc

SEQ ID NO: 37868 - RNA, 19 nt, Artificial Sequence
  Description of Artificial Sequence: Synthetic oligonucleotide
  Sense strand starting at position 66 of SEQ ID NO: 448
cguccuugcaagugcuauu

SEQ ID NO: 37869 - RNA, 19 nt, Artificial Sequence
  Description of Artificial Sequence: Synthetic oligonucleotide
  Antisense strand to SEQ ID NO: 37868
aauagcacuugcaaggacg

SEQ ID NO: 37870 - RNA, 19 nt, Artificial Sequence
  Description of Artificial Sequence: Synthetic oligonucleotide
  Sense strand starting at position 92 of SEQ ID NO: 449
cucugaaguuuccuaaagu

SEQ ID NO: 37871 - RNA, 19 nt, Artificial Sequence
  Description of Artificial Sequence: Synthetic oligonucleotide
  Antisense strand to SEQ ID NO: 37870
acuuuaggaaacuucagag

SEQ ID NO: 37872 - RNA, 19 nt, Artificial Sequence
  Description of Artificial Sequence: Synthetic oligonucleotide
  Sense strand starting at position 105 of SEQ ID NO: 449
uaaaguucgguuuguaaau

SEQ ID NO: 37873 - RNA, 19 nt, Artificial Sequence
  Description of Artificial Sequence: Synthetic oligonucleotide
  Antisense strand to SEQ ID NO: 37872
auuuacaaaccgaacuuua

SEQ ID NO: 37874 - RNA, 19 nt, Artificial Sequence
  Description of Artificial Sequence: Synthetic oligonucleotide
  Sense strand starting at position 106 of SEQ ID NO: 449
aaaguucgguuuguaaauc

SEQ ID NO: 37875 - RNA, 19 nt, Artificial Sequence
  Description of Artificial Sequence: Synthetic oligonucleotide
  Antisense strand to SEQ ID NO: 37874
gauuuacaaaccgaacuuu

SEQ ID NO: 37876 - RNA, 19 nt, Artificial Sequence
  Description of Artificial Sequence: Synthetic oligonucleotide
  Sense strand starting at position 115 of SEQ ID NO: 449
uuuguaaauccuggaagga

SEQ ID NO: 37877 - RNA, 19 nt, Artificial Sequence
  Description of Artificial Sequence: Synthetic oligonucleotide
  Antisense strand to SEQ ID NO: 37876
uccuuccaggauuuacaaa

SEQ ID NO: 37878 - RNA, 19 nt, Artificial Sequence
  Description of Artificial Sequence: Synthetic oligonucleotide
  Sense strand starting at position 134 of SEQ ID NO: 449
aggaaacaguaacuuguua

SEQ ID NO: 37879 - RNA, 19 nt, Artificial Sequence
  Description of Artificial Sequence: Synthetic oligonucleotide
  Antisense strand to SEQ ID NO: 37878
uaacaaguuacuguuuccu

SEQ ID NO: 37880 - RNA, 19 nt, Artificial Sequence
  Description of Artificial Sequence: Synthetic oligonucleotide
  Sense strand starting at position 229 of SEQ ID NO: 449
agcaaacuguugucuaaua

SEQ ID NO: 37881 - RNA, 19 nt, Artificial Sequence
  Description of Artificial Sequence: Synthetic oligonucleotide
  Antisense strand to SEQ ID NO: 37880
uauuagacaacaguuugcu

SEQ ID NO: 37882 - RNA, 19 nt, Artificial Sequence
  Description of Artificial Sequence: Synthetic oligonucleotide
  Sense strand starting at position 230 of SEQ ID NO: 449
gcaaacuguugucuaauac

SEQ ID NO: 37883 - RNA, 19 nt, Artificial Sequence
  Description of Artificial Sequence: Synthetic oligonucleotide
  Antisense strand to SEQ ID NO: 37882
guauuagacaacaguuugc

SEQ ID NO: 37884 - RNA, 19 nt, Artificial Sequence
  Description of Artificial Sequence: Synthetic oligonucleotide
  Sense strand starting at position 238 of SEQ ID NO: 449
uugucuaauacgggcaaca

SEQ ID NO: 37885 - RNA, 19 nt, Artificial Sequence
  Description of Artificial Sequence: Synthetic oligonucleotide
  Antisense strand to SEQ ID NO: 37884
uguugcccguauuagacaa

SEQ ID NO: 37886 - RNA, 19 nt, Artificial Sequence
  Description of Artificial Sequence: Synthetic oligonucleotide
  Sense strand starting at position 330 of SEQ ID NO: 449
acaguaugaugugcagacu

SEQ ID NO: 37887 - RNA, 19 nt, Artificial Sequence
  Description of Artificial Sequence: Synthetic oligonucleotide
  Antisense strand to SEQ ID NO: 37886
agucugcacaucauacugu

SEQ ID NO: 37888 - RNA, 19 nt, Artificial Sequence
  Description of Artificial Sequence: Synthetic oligonucleotide
  Sense strand starting at position 331 of SEQ ID NO: 449
caguaugaugugcagacua

SEQ ID NO: 37889 - RNA, 19 nt, Artificial Sequence
  Description of Artificial Sequence: Synthetic oligonucleotide
  Antisense strand to SEQ ID NO: 37888
uagucugcacaucauacug

SEQ ID NO: 37890 - RNA, 19 nt, Artificial Sequence
  Description of Artificial Sequence: Synthetic oligonucleotide
  Sense strand starting at position 333 of SEQ ID NO: 449
guaugaugugcagacuaac

SEQ ID NO: 37891 - RNA, 19 nt, Artificial Sequence
  Description of Artificial Sequence: Synthetic oligonucleotide
  Antisense strand to SEQ ID NO: 37890
guuagucugcacaucauac

SEQ ID NO: 37892 - RNA, 19 nt, Artificial Sequence
  Description of Artificial Sequence: Synthetic oligonucleotide
  Sense strand starting at position 456 of SEQ ID NO: 449
auguuccagcucugacaau

SEQ ID NO: 37893 - RNA, 19 nt, Artificial Sequence
  Description of Artificial Sequence: Synthetic oligonucleotide
  Antisense strand to SEQ ID NO: 37892
auugucagagcuggaacau

SEQ ID NO: 37894 - RNA, 19 nt, Artificial Sequence
  Description of Artificial Sequence: Synthetic oligonucleotide
  Sense strand starting at position 537 of SEQ ID NO: 449
ggagguuaaugggaauuaa

SEQ ID NO: 37895 - RNA, 19 nt, Artificial Sequence
  Description of Artificial Sequence: Synthetic oligonucleotide
  Antisense strand to SEQ ID NO: 37894
uuaauucccauuaaccucc

SEQ ID NO: 37896 - RNA, 19 nt, Artificial Sequence
  Description of Artificial Sequence: Synthetic oligonucleotide
  Sense strand starting at position 577 of SEQ ID NO: 449
uggcgcuuuggccagaaca

SEQ ID NO: 37897 - RNA, 19 nt, Artificial Sequence
  Description of Artificial Sequence: Synthetic oligonucleotide
  Antisense strand to SEQ ID NO: 37896
uguucuggccaaagcgcca

SEQ ID NO: 37898 - RNA, 19 nt, Artificial Sequence
  Description of Artificial Sequence: Synthetic oligonucleotide
  Sense strand starting at position 670 of SEQ ID NO: 449
augucaugggcuuggaaug

SEQ ID NO: 37899 - RNA, 19 nt, Artificial Sequence
  Description of Artificial Sequence: Synthetic oligonucleotide
  Antisense strand to SEQ ID NO: 37898
cauuccaagcccaugacau

SEQ ID NO: 37900 - RNA, 19 nt, Artificial Sequence
  Description of Artificial Sequence: Synthetic oligonucleotide
  Sense strand starting at position 886 of SEQ ID NO: 449
ccuuuaugucgugaaaguc

SEQ ID NO: 37901 - RNA, 19 nt, Artificial Sequence
  Description of Artificial Sequence: Synthetic oligonucleotide
  Antisense strand to SEQ ID NO: 37900
gacuuucacgacauaaagg

SEQ ID NO: 37902 - RNA, 19 nt, Artificial Sequence
  Description of Artificial Sequence: Synthetic oligonucleotide
  Sense strand starting at position 953 of SEQ ID NO: 449
gcagauaucacucgcacag

SEQ ID NO: 37903 - RNA, 19 nt, Artificial Sequence
  Description of Artificial Sequence: Synthetic oligonucleotide
  Antisense strand to SEQ ID NO: 37902
cugugcgagugauaucugc

SEQ ID NO: 37904 - RNA, 19 nt, Artificial Sequence
  Description of Artificial Sequence: Synthetic oligonucleotide
  Sense strand starting at position 1289 of SEQ ID NO: 449
cgcguucugcagucaccaa

SEQ ID NO: 37905 - RNA, 19 nt, Artificial Sequence
  Description of Artificial Sequence: Synthetic oligonucleotide
  Antisense strand to SEQ ID NO: 37904
uuggugacugcagaacgcg

SEQ ID NO: 37906 - RNA, 19 nt, Artificial Sequence
  Description of Artificial Sequence: Synthetic oligonucleotide
  Sense strand starting at position 2544 of SEQ ID NO: 449
gggaaugugccaugcaaag

SEQ ID NO: 37907 - RNA, 19 nt, Artificial Sequence
  Description of Artificial Sequence: Synthetic oligonucleotide
  Antisense strand to SEQ ID NO: 37906
cuuugcauggcacauuccc

SEQ ID NO: 37908 - RNA, 19 nt, Artificial Sequence
  Description of Artificial Sequence: Synthetic oligonucleotide
  Sense strand starting at position 2610 of SEQ ID NO: 449
caggcaucuuuauccggaa

SEQ ID NO: 37909 - RNA, 19 nt, Artificial Sequence
  Description of Artificial Sequence: Synthetic oligonucleotide
  Antisense strand to SEQ ID NO: 37908
uuccggauaaagaugccug

SEQ ID NO: 37910 - RNA, 19 nt, Artificial Sequence
  Description of Artificial Sequence: Synthetic oligonucleotide
  Sense strand starting at position 2611 of SEQ ID NO: 449
aggcaucuuuauccggaau

SEQ ID NO: 37911 - RNA, 19 nt, Artificial Sequence
  Description of Artificial Sequence: Synthetic oligonucleotide
  Antisense strand to SEQ ID NO: 37910
auuccggauaaagaugccu

SEQ ID NO: 37912 - RNA, 19 nt, Artificial Sequence
  Description of Artificial Sequence: Synthetic oligonucleotide
  Sense strand starting at position 2612 of SEQ ID NO: 449
ggcaucuuuauccggaauu

SEQ ID NO: 37913 - RNA, 19 nt, Artificial Sequence
  Description of Artificial Sequence: Synthetic oligonucleotide
  Antisense strand to SEQ ID NO: 37912
aauuccggauaaagaugcc

SEQ ID NO: 37914 - RNA, 19 nt, Artificial Sequence
  Description of Artificial Sequence: Synthetic oligonucleotide
  Sense strand starting at position 2697 of SEQ ID NO: 449
ucagaagcccuuuguauag

SEQ ID NO: 37915 - RNA, 19 nt, Artificial Sequence
  Description of Artificial Sequence: Synthetic oligonucleotide
  Antisense strand to SEQ ID NO: 37914
cuauacaaagggcuucuga

SEQ ID NO: 37916 - RNA, 19 nt, Artificial Sequence
  Description of Artificial Sequence: Synthetic oligonucleotide
  Sense strand starting at position 2701 of SEQ ID NO: 449
aagcccuuuguauagagau

SEQ ID NO: 37917 - RNA, 19 nt, Artificial Sequence
  Description of Artificial Sequence: Synthetic oligonucleotide
  Antisense strand to SEQ ID NO: 37916
aucucuauacaaagggcuu

SEQ ID NO: 37918 - RNA, 19 nt, Artificial Sequence
  Description of Artificial Sequence: Synthetic oligonucleotide
  Sense strand starting at position 2714 of SEQ ID NO: 449
agagauaaguauccuuuag

SEQ ID NO: 37919 - RNA, 19 nt, Artificial Sequence
  Description of Artificial Sequence: Synthetic oligonucleotide
  Antisense strand to SEQ ID NO: 37918
cuaaaggauacuuaucucu

SEQ ID NO: 37920 - RNA, 19 nt, Artificial Sequence
  Description of Artificial Sequence: Synthetic oligonucleotide
  Sense strand starting at position 2718 of SEQ ID NO: 449
auaaguauccuuuaggcca

SEQ ID NO: 37921 - RNA, 19 nt, Artificial Sequence
  Description of Artificial Sequence: Synthetic oligonucleotide
  Antisense strand to SEQ ID NO: 37920
uggccuaaaggauacuuau

SEQ ID NO: 37922 - RNA, 19 nt, Artificial Sequence
  Description of Artificial Sequence: Synthetic oligonucleotide
  Sense strand starting at position 2775 of SEQ ID NO: 449
ccguaauacuuucuucuga

SEQ ID NO: 37923 - RNA, 19 nt, Artificial Sequence
  Description of Artificial Sequence: Synthetic oligonucleotide
  Antisense strand to SEQ ID NO: 37922
ucagaagaaaguauuacgg

SEQ ID NO: 37924 - RNA, 19 nt, Artificial Sequence
  Description of Artificial Sequence: Synthetic oligonucleotide
  Sense strand starting at position 2776 of SEQ ID NO: 449
cguaauacuuucuucugau

SEQ ID NO: 37925 - RNA, 19 nt, Artificial Sequence
  Description of Artificial Sequence: Synthetic oligonucleotide
  Antisense strand to SEQ ID NO: 37924
aucagaagaaaguauuacg

SEQ ID NO: 37926 - RNA, 19 nt, Artificial Sequence
  Description of Artificial Sequence: Synthetic oligonucleotide
  Sense strand starting at position 3273 of SEQ ID NO: 449
ggaacauccugggcaacau

SEQ ID NO: 37927 - RNA, 19 nt, Artificial Sequence
  Description of Artificial Sequence: Synthetic oligonucleotide
  Antisense strand to SEQ ID NO: 37926
auguugcccaggauguucc

SEQ ID NO: 37928 - RNA, 19 nt, Artificial Sequence
  Description of Artificial Sequence: Synthetic oligonucleotide
  Sense strand starting at position 3355 of SEQ ID NO: 449
ggcagcuugaaccggaaau

SEQ ID NO: 37929 - RNA, 19 nt, Artificial Sequence
  Description of Artificial Sequence: Synthetic oligonucleotide
  Antisense strand to SEQ ID NO: 37928
auuuccgguucaagcugcc

SEQ ID NO: 37930 - RNA, 19 nt, Artificial Sequence
  Description of Artificial Sequence: Synthetic oligonucleotide
  Sense strand starting at position 3513 of SEQ ID NO: 449
ugauaauuagggcauucuu

SEQ ID NO: 37931 - RNA, 19 nt, Artificial Sequence
  Description of Artificial Sequence: Synthetic oligonucleotide
  Antisense strand to SEQ ID NO: 37930
aagaaugcccuaauuauca

SEQ ID NO: 37932 - RNA, 19 nt, Artificial Sequence
  Description of Artificial Sequence: Synthetic oligonucleotide
  Sense strand starting at position 3524 of SEQ ID NO: 449
gcauucuucccacacgaag

SEQ ID NO: 37933 - RNA, 19 nt, Artificial Sequence
  Description of Artificial Sequence: Synthetic oligonucleotide
  Antisense strand to SEQ ID NO: 37932
cuucgugugggaagaaugc

SEQ ID NO: 37934 - RNA, 19 nt, Artificial Sequence
  Description of Artificial Sequence: Synthetic oligonucleotide
  Sense strand starting at position 3555 of SEQ ID NO: 449
acccaauaucauugaggcu

SEQ ID NO: 37935 - RNA, 19 nt, Artificial Sequence
  Description of Artificial Sequence: Synthetic oligonucleotide
  Antisense strand to SEQ ID NO: 37934
agccucaaugauauugggu

SEQ ID NO: 37936 - RNA, 19 nt, Artificial Sequence
  Description of Artificial Sequence: Synthetic oligonucleotide
  Sense strand starting at position 3561 of SEQ ID NO: 449
uaucauugaggcuaacagu

SEQ ID NO: 37937 - RNA, 19 nt, Artificial Sequence
  Description of Artificial Sequence: Synthetic oligonucleotide
  Antisense strand to SEQ ID NO: 37936
acuguuagccucaaugaua

SEQ ID NO: 37938 - RNA, 19 nt, Artificial Sequence
  Description of Artificial Sequence: Synthetic oligonucleotide
  Sense strand starting at position 3650 of SEQ ID NO: 449
gaccuaggagugugggaaa

SEQ ID NO: 37939 - RNA, 19 nt, Artificial Sequence
  Description of Artificial Sequence: Synthetic oligonucleotide
  Antisense strand to SEQ ID NO: 37938
uuucccacacuccuagguc

SEQ ID NO: 37940 - RNA, 19 nt, Artificial Sequence
  Description of Artificial Sequence: Synthetic oligonucleotide
  Sense strand starting at position 3772 of SEQ ID NO: 449
ucuacuuuagcuuauugua

SEQ ID NO: 37941 - RNA, 19 nt, Artificial Sequence
  Description of Artificial Sequence: Synthetic oligonucleotide
  Antisense strand to SEQ ID NO: 37940
uacaauaagcuaaaguaga

SEQ ID NO: 37942 - RNA, 19 nt, Artificial Sequence
  Description of Artificial Sequence: Synthetic oligonucleotide
  Sense strand starting at position 3906 of SEQ ID NO: 449
gguagugacaguggucaca

SEQ ID NO: 37943 - RNA, 19 nt, Artificial Sequence
  Description of Artificial Sequence: Synthetic oligonucleotide
  Antisense strand to SEQ ID NO: 37942
ugugaccacugucacuacc

SEQ ID NO: 37944 - RNA, 19 nt, Artificial Sequence
  Description of Artificial Sequence: Synthetic oligonucleotide
  Sense strand starting at position 3919 of SEQ ID NO: 449
gucacacaacauuguaaau

SEQ ID NO: 37945 - RNA, 19 nt, Artificial Sequence
  Description of Artificial Sequence: Synthetic oligonucleotide
  Antisense strand to SEQ ID NO: 37944
auuuacaauguugugugac

SEQ ID NO: 37946 - RNA, 19 nt, Artificial Sequence
  Description of Artificial Sequence: Synthetic oligonucleotide
  Sense strand starting at position 3953 of SEQ ID NO: 449
guacacuuacgugacuuua

SEQ ID NO: 37947 - RNA, 19 nt, Artificial Sequence
  Description of Artificial Sequence: Synthetic oligonucleotide
  Antisense strand to SEQ ID NO: 37946
uaaagucacguaaguguac

SEQ ID NO: 37948 - RNA, 19 nt, Artificial Sequence
  Description of Artificial Sequence: Synthetic oligonucleotide
  Sense strand starting at position 3955 of SEQ ID NO: 449
acacuuacgugacuuuaaa

SEQ ID NO: 37949 - RNA, 19 nt, Artificial Sequence
  Description of Artificial Sequence: Synthetic oligonucleotide
  Antisense strand to SEQ ID NO: 37948
uuuaaagucacguaagugu

SEQ ID NO: 37950 - RNA, 19 nt, Artificial Sequence
  Description of Artificial Sequence: Synthetic oligonucleotide
  Sense strand starting at position 2 of SEQ ID NO: 450
acaauacagucacugaguu

SEQ ID NO: 37951 - RNA, 19 nt, Artificial Sequence
  Description of Artificial Sequence: Synthetic oligonucleotide
  Antisense strand to SEQ ID NO: 37950
aacucagugacuguauugu

SEQ ID NO: 37952 - RNA, 19 nt, Artificial Sequence
  Description of Artificial Sequence: Synthetic oligonucleotide
  Sense strand starting at position 9 of SEQ ID NO: 450
agucacugaguugaguaua

SEQ ID NO: 37953 - RNA, 19 nt, Artificial Sequence
  Description of Artificial Sequence: Synthetic oligonucleotide
  Antisense strand to SEQ ID NO: 37952
uauacucaacucagugacu

SEQ ID NO: 37954 - RNA, 19 nt, Artificial Sequence
  Description of Artificial Sequence: Synthetic oligonucleotide
  Sense strand starting at position 108 of SEQ ID NO: 450
agagaugucaaguagcuag

SEQ ID NO: 37955 - RNA, 19 nt, Artificial Sequence
  Description of Artificial Sequence: Synthetic oligonucleotide
  Antisense strand to SEQ ID NO: 37954
cuagcuacuugacaucucu

SEQ ID NO: 37956 - RNA, 19 nt, Artificial Sequence
  Description of Artificial Sequence: Synthetic oligonucleotide
  Sense strand starting at position 852 of SEQ ID NO: 450
acagcagaguuuguguaga

SEQ ID NO: 37957 - RNA, 19 nt, Artificial Sequence
  Description of Artificial Sequence: Synthetic oligonucleotide
  Antisense strand to SEQ ID NO: 37956
ucuacacaaacucugcugu

SEQ ID NO: 37958 - RNA, 19 nt, Artificial Sequence
  Description of Artificial Sequence: Synthetic oligonucleotide
  Sense strand starting at position 854 of SEQ ID NO: 450
agcagaguuuguguagaac

SEQ ID NO: 37959 - RNA, 19 nt, Artificial Sequence
  Description of Artificial Sequence: Synthetic oligonucleotide
  Antisense strand to SEQ ID NO: 37958
guucuacacaaacucugcu

SEQ ID NO: 37960 - RNA, 19 nt, Artificial Sequence
  Description of Artificial Sequence: Synthetic oligonucleotide
  Sense strand starting at position 857 of SEQ ID NO: 450
agaguuuguguagaacauc

SEQ ID NO: 37961 - RNA, 19 nt, Artificial Sequence
  Description of Artificial Sequence: Synthetic oligonucleotide
  Antisense strand to SEQ ID NO: 37960
gauguucuacacaaacucu

SEQ ID NO: 37962 - RNA, 19 nt, Artificial Sequence
  Description of Artificial Sequence: Synthetic oligonucleotide
  Sense strand starting at position 865 of SEQ ID NO: 450
uguagaacaucccuaagua

SEQ ID NO: 37963 - RNA, 19 nt, Artificial Sequence
  Description of Artificial Sequence: Synthetic oligonucleotide
  Antisense strand to SEQ ID NO: 37962
uacuuagggauguucuaca

SEQ ID NO: 37964 - RNA, 19 nt, Artificial Sequence
  Description of Artificial Sequence: Synthetic oligonucleotide
  Sense strand starting at position 866 of SEQ ID NO: 450
guagaacaucccuaaguac

SEQ ID NO: 37965 - RNA, 19 nt, Artificial Sequence
  Description of Artificial Sequence: Synthetic oligonucleotide
  Antisense strand to SEQ ID NO: 37964
guacuuagggauguucuac

SEQ ID NO: 37966 - RNA, 19 nt, Artificial Sequence
  Description of Artificial Sequence: Synthetic oligonucleotide
  Sense strand starting at position 931 of SEQ ID NO: 450
guccaacuucugugaccuu

SEQ ID NO: 37967 - RNA, 19 nt, Artificial Sequence
  Description of Artificial Sequence: Synthetic oligonucleotide
  Antisense strand to SEQ ID NO: 37966
aaggucacagaaguuggac

SEQ ID NO: 37968 - RNA, 19 nt, Artificial Sequence
  Description of Artificial Sequence: Synthetic oligonucleotide
  Sense strand starting at position 971 of SEQ ID NO: 450
aguguacugaucuguaaau

SEQ ID NO: 37969 - RNA, 19 nt, Artificial Sequence
  Description of Artificial Sequence: Synthetic oligonucleotide
  Antisense strand to SEQ ID NO: 37968
auuuacagaucaguacacu

SEQ ID NO: 37970 - RNA, 19 nt, Artificial Sequence
  Description of Artificial Sequence: Synthetic oligonucleotide
  Sense strand starting at position 972 of SEQ ID NO: 450
guguacugaucuguaaaug

SEQ ID NO: 37971 - RNA, 19 nt, Artificial Sequence
  Description of Artificial Sequence: Synthetic oligonucleotide
  Antisense strand to SEQ ID NO: 37970
cauuuacagaucaguacac

SEQ ID NO: 37972 - RNA, 19 nt, Artificial Sequence
  Description of Artificial Sequence: Synthetic oligonucleotide
  Sense strand starting at position 973 of SEQ ID NO: 450
uguacugaucuguaaauga

SEQ ID NO: 37973 - RNA, 19 nt, Artificial Sequence
  Description of Artificial Sequence: Synthetic oligonucleotide
  Antisense strand to SEQ ID NO: 37972
ucauuuacagaucaguaca

SEQ ID NO: 37974 - RNA, 19 nt, Artificial Sequence
  Description of Artificial Sequence: Synthetic oligonucleotide
  Sense strand starting at position 984 of SEQ ID NO: 450
guaaaugauguuggauaau

SEQ ID NO: 37975 - RNA, 19 nt, Artificial Sequence
  Description of Artificial Sequence: Synthetic oligonucleotide
  Antisense strand to SEQ ID NO: 37974
auuauccaacaucauuuac

SEQ ID NO: 37976 - RNA, 19 nt, Artificial Sequence
  Description of Artificial Sequence: Synthetic oligonucleotide
  Sense strand starting at position 996 of SEQ ID NO: 450
ggauaaucccagcaauccu

SEQ ID NO: 37977 - RNA, 19 nt, Artificial Sequence
  Description of Artificial Sequence: Synthetic oligonucleotide
  Antisense strand to SEQ ID NO: 37976
aggauugcugggauuaucc

SEQ ID NO: 37978 - RNA, 19 nt, Artificial Sequence
  Description of Artificial Sequence: Synthetic oligonucleotide
  Sense strand starting at position 1120 of SEQ ID NO: 450
uggugcuuaaagggauaaa

SEQ ID NO: 37979 - RNA, 19 nt, Artificial Sequence
  Description of Artificial Sequence: Synthetic oligonucleotide
  Antisense strand to SEQ ID NO: 37978
uuuaucccuuuaagcacca

SEQ ID NO: 37980 - RNA, 19 nt, Artificial Sequence
  Description of Artificial Sequence: Synthetic oligonucleotide
  Sense strand starting at position 1232 of SEQ ID NO: 450
guaugcauuuccuuggauc

SEQ ID NO: 37981 - RNA, 19 nt, Artificial Sequence
  Description of Artificial Sequence: Synthetic oligonucleotide
  Antisense strand to SEQ ID NO: 37980
gauccaaggaaaugcauac

SEQ ID NO: 37982 - RNA, 19 nt, Artificial Sequence
  Description of Artificial Sequence: Synthetic oligonucleotide
  Sense strand starting at position 1243 of SEQ ID NO: 450
cuuggaucugcucaguauu

SEQ ID NO: 37983 - RNA, 19 nt, Artificial Sequence
  Description of Artificial Sequence: Synthetic oligonucleotide
  Antisense strand to SEQ ID NO: 37982
aauacugagcagauccaag

SEQ ID NO: 37984 - RNA, 19 nt, Artificial Sequence
  Description of Artificial Sequence: Synthetic oligonucleotide
  Sense strand starting at position 1245 of SEQ ID NO: 450
uggaucugcucaguauuaa

SEQ ID NO: 37985 - RNA, 19 nt, Artificial Sequence
  Description of Artificial Sequence: Synthetic oligonucleotide
  Antisense strand to SEQ ID NO: 37984
uuaauacugagcagaucca

SEQ ID NO: 37986 - RNA, 19 nt, Artificial Sequence
  Description of Artificial Sequence: Synthetic oligonucleotide
  Sense strand starting at position 1246 of SEQ ID NO: 450
ggaucugcucaguauuaag

SEQ ID NO: 37987 - RNA, 19 nt, Artificial Sequence
  Description of Artificial Sequence: Synthetic oligonucleotide
  Antisense strand to SEQ ID NO: 37986
cuuaauacugagcagaucc

SEQ ID NO: 37988 - RNA, 19 nt, Artificial Sequence
  Description of Artificial Sequence: Synthetic oligonucleotide
  Sense strand starting at position 1282 of SEQ ID NO: 450
cugcuacauuagucagcaa

SEQ ID NO: 37989 - RNA, 19 nt, Artificial Sequence
  Description of Artificial Sequence: Synthetic oligonucleotide
  Antisense strand to SEQ ID NO: 37988
uugcugacuaauguagcag

SEQ ID NO: 37990 - RNA, 19 nt, Artificial Sequence
  Description of Artificial Sequence: Synthetic oligonucleotide
  Sense strand starting at position 1304 of SEQ ID NO: 450
agaaauuagcauggauauu

SEQ ID NO: 37991 - RNA, 19 nt, Artificial Sequence
  Description of Artificial Sequence: Synthetic oligonucleotide
  Antisense strand to SEQ ID NO: 37990
aauauccaugcuaauuucu

SEQ ID NO: 37992 - RNA, 19 nt, Artificial Sequence
  Description of Artificial Sequence: Synthetic oligonucleotide
  Sense strand starting at position 1364 of SEQ ID NO: 450
cguuaucaguaccucauuu

SEQ ID NO: 37993 - RNA, 19 nt, Artificial Sequence
  Description of Artificial Sequence: Synthetic oligonucleotide
  Antisense strand to SEQ ID NO: 37992
aaaugagguacugauaacg

SEQ ID NO: 37994 - RNA, 19 nt, Artificial Sequence
  Description of Artificial Sequence: Synthetic oligonucleotide
  Sense strand starting at position 1507 of SEQ ID NO: 450
cucugaaguuuccuaaagu

SEQ ID NO: 37995 - RNA, 19 nt, Artificial Sequence
  Description of Artificial Sequence: Synthetic oligonucleotide
  Antisense strand to SEQ ID NO: 37994
acuuuaggaaacuucagag

SEQ ID NO: 37996 - RNA, 19 nt, Artificial Sequence
  Description of Artificial Sequence: Synthetic oligonucleotide
  Sense strand starting at position 1520 of SEQ ID NO: 450
uaaaguucgguuuguaaau

SEQ ID NO: 37997 - RNA, 19 nt, Artificial Sequence
  Description of Artificial Sequence: Synthetic oligonucleotide
  Antisense strand to SEQ ID NO: 37996
auuuacaaaccgaacuuua

SEQ ID NO: 37998 - RNA, 19 nt, Artificial Sequence
  Description of Artificial Sequence: Synthetic oligonucleotide
  Sense strand starting at position 1521 of SEQ ID NO: 450
aaaguucgguuuguaaauc

SEQ ID NO: 37999 - RNA, 19 nt, Artificial Sequence
  Description of Artificial Sequence: Synthetic oligonucleotide
  Antisense strand to SEQ ID NO: 37998
gauuuacaaaccgaacuuu

SEQ ID NO: 38000 - RNA, 19 nt, Artificial Sequence
  Description of Artificial Sequence: Synthetic oligonucleotide
  Sense strand starting at position 1530 of SEQ ID NO: 450
uuuguaaauccuggaagga

SEQ ID NO: 38001 - RNA, 19 nt, Artificial Sequence
  Description of Artificial Sequence: Synthetic oligonucleotide
  Antisense strand to SEQ ID NO: 38000
uccuuccaggauuuacaaa

SEQ ID NO: 38002 - RNA, 19 nt, Artificial Sequence
  Description of Artificial Sequence: Synthetic oligonucleotide
  Sense strand starting at position 1549 of SEQ ID NO: 450
aggaaacaguaacuuguua

SEQ ID NO: 38003 - RNA, 19 nt, Artificial Sequence
  Description of Artificial Sequence: Synthetic oligonucleotide
  Antisense strand to SEQ ID NO: 38002
uaacaaguuacuguuuccu

SEQ ID NO: 38004 - RNA, 19 nt, Artificial Sequence
  Description of Artificial Sequence: Synthetic oligonucleotide
  Sense strand starting at position 1644 of SEQ ID NO: 450
agcaaacuguugucuaaua

SEQ ID NO: 38005 - RNA, 19 nt, Artificial Sequence
  Description of Artificial Sequence: Synthetic oligonucleotide
  Antisense strand to SEQ ID NO: 38004
uauuagacaacaguuugcu

SEQ ID NO: 38006 - RNA, 19 nt, Artificial Sequence
  Description of Artificial Sequence: Synthetic oligonucleotide
  Sense strand starting at position 1645 of SEQ ID NO: 450
gcaaacuguugucuaauac

SEQ ID NO: 38007 - RNA, 19 nt, Artificial Sequence
  Description of Artificial Sequence: Synthetic oligonucleotide
  Antisense strand to SEQ ID NO: 38006
guauuagacaacaguuugc

SEQ ID NO: 38008 - RNA, 19 nt, Artificial Sequence
  Description of Artificial Sequence: Synthetic oligonucleotide
  Sense strand starting at position 1653 of SEQ ID NO: 450
uugucuaauacgggcaaca

SEQ ID NO: 38009 - RNA, 19 nt, Artificial Sequence
  Description of Artificial Sequence: Synthetic oligonucleotide
  Antisense strand to SEQ ID NO: 38008
uguugcccguauuagacaa

SEQ ID NO: 38010 - RNA, 19 nt, Artificial Sequence
  Description of Artificial Sequence: Synthetic oligonucleotide
  Sense strand starting at position 1745 of SEQ ID NO: 450
acaguaugaugugcagacu

SEQ ID NO: 38011 - RNA, 19 nt, Artificial Sequence
  Description of Artificial Sequence: Synthetic oligonucleotide
  Antisense strand to SEQ ID NO: 38010
agucugcacaucauacugu

SEQ ID NO: 38012 - RNA, 19 nt, Artificial Sequence
  Description of Artificial Sequence: Synthetic oligonucleotide
  Sense strand starting at position 1746 of SEQ ID NO: 450
caguaugaugugcagacua

SEQ ID NO: 38013 - RNA, 19 nt, Artificial Sequence
  Description of Artificial Sequence: Synthetic oligonucleotide
  Antisense strand to SEQ ID NO: 38012
uagucugcacaucauacug

SEQ ID NO: 38014 - RNA, 19 nt, Artificial Sequence
  Description of Artificial Sequence: Synthetic oligonucleotide
  Sense strand starting at position 1748 of SEQ ID NO: 450
guaugaugugcagacuaac

SEQ ID NO: 38015 - RNA, 19 nt, Artificial Sequence
  Description of Artificial Sequence: Synthetic oligonucleotide
  Antisense strand to SEQ ID NO: 38014
guuagucugcacaucauac

SEQ ID NO: 38016 - RNA, 19 nt, Artificial Sequence
  Description of Artificial Sequence: Synthetic oligonucleotide
  Sense strand starting at position 1871 of SEQ ID NO: 450
auguuccagcucugacaau

SEQ ID NO: 38017 - RNA, 19 nt, Artificial Sequence
  Description of Artificial Sequence: Synthetic oligonucleotide
  Antisense strand to SEQ ID NO: 38016
auugucagagcuggaacau

SEQ ID NO: 38018 - RNA, 19 nt, Artificial Sequence
  Description of Artificial Sequence: Synthetic oligonucleotide
  Sense strand starting at position 1952 of SEQ ID NO: 450
ggagguuaaugggaauuaa

SEQ ID NO: 38019 - RNA, 19 nt, Artificial Sequence
  Description of Artificial Sequence: Synthetic oligonucleotide
  Antisense strand to SEQ ID NO: 38018
uuaauucccauuaaccucc

SEQ ID NO: 38020 - RNA, 19 nt, Artificial Sequence
  Description of Artificial Sequence: Synthetic oligonucleotide
  Sense strand starting at position 2085 of SEQ ID NO: 450
augucaugggcuuggaaug

SEQ ID NO: 38021 - RNA, 19 nt, Artificial Sequence
  Description of Artificial Sequence: Synthetic oligonucleotide
  Antisense strand to SEQ ID NO: 38020
cauuccaagcccaugacau

SEQ ID NO: 38022 - RNA, 19 nt, Artificial Sequence
  Description of Artificial Sequence: Synthetic oligonucleotide
  Sense strand starting at position 2301 of SEQ ID NO: 450
ccuuuaugucgugaaaguc

SEQ ID NO: 38023 - RNA, 19 nt, Artificial Sequence
  Description of Artificial Sequence: Synthetic oligonucleotide
  Antisense strand to SEQ ID NO: 38022
gacuuucacgacauaaagg

SEQ ID NO: 38024 - RNA, 19 nt, Artificial Sequence
  Description of Artificial Sequence: Synthetic oligonucleotide
  Sense strand starting at position 2368 of SEQ ID NO: 450
gcagauaucacucgcacag

SEQ ID NO: 38025 - RNA, 19 nt, Artificial Sequence
  Description of Artificial Sequence: Synthetic oligonucleotide
  Antisense strand to SEQ ID NO: 38024
cugugcgagugauaucugc

SEQ ID NO: 38026 - RNA, 19 nt, Artificial Sequence
  Description of Artificial Sequence: Synthetic oligonucleotide
  Sense strand starting at position 2704 of SEQ ID NO: 450
cgcguucugcagucaccaa

SEQ ID NO: 38027 - RNA, 19 nt, Artificial Sequence
  Description of Artificial Sequence: Synthetic oligonucleotide
  Antisense strand to SEQ ID NO: 38026
uuggugacugcagaacgcg

SEQ ID NO: 38028 - RNA, 19 nt, Artificial Sequence
  Description of Artificial Sequence: Synthetic oligonucleotide
  Sense strand starting at position 3959 of SEQ ID NO: 450
gggaaugugccaugcaaag

SEQ ID NO: 38029 - RNA, 19 nt, Artificial Sequence
  Description of Artificial Sequence: Synthetic oligonucleotide
  Antisense strand to SEQ ID NO: 38028
cuuugcauggcacauuccc

SEQ ID NO: 38030 - RNA, 19 nt, Artificial Sequence
  Description of Artificial Sequence: Synthetic oligonucleotide
  Sense strand starting at position 201 of SEQ ID NO: 451
cucagugcacuuggagauu

SEQ ID NO: 38031 - RNA, 19 nt, Artificial Sequence
  Description of Artificial Sequence: Synthetic oligonucleotide
  Antisense strand to SEQ ID NO: 38030
aaucuccaagugcacugag

SEQ ID NO: 38032 - RNA, 19 nt, Artificial Sequence
  Description of Artificial Sequence: Synthetic oligonucleotide
  Sense strand starting at position 254 of SEQ ID NO: 451
gguccuauugaaugugacu

SEQ ID NO: 38033 - RNA, 19 nt, Artificial Sequence
  Description of Artificial Sequence: Synthetic oligonucleotide
  Antisense strand to SEQ ID NO: 38032
agucacauucaauaggacc

SEQ ID NO: 38034 - RNA, 19 nt, Artificial Sequence
  Description of Artificial Sequence: Synthetic oligonucleotide
  Sense strand starting at position 310 of SEQ ID NO: 451
gagggugugcaguaagagu

SEQ ID NO: 38035 - RNA, 19 nt, Artificial Sequence
  Description of Artificial Sequence: Synthetic oligonucleotide
  Antisense strand to SEQ ID NO: 38034
acucuuacugcacacccuc

SEQ ID NO: 38036 - RNA, 19 nt, Artificial Sequence
  Description of Artificial Sequence: Synthetic oligonucleotide
  Sense strand starting at position 552 of SEQ ID NO: 451
cugagcucucccugaacuu

SEQ ID NO: 38037 - RNA, 19 nt, Artificial Sequence
  Description of Artificial Sequence: Synthetic oligonucleotide
  Antisense strand to SEQ ID NO: 38036
aaguucagggagagcucag

SEQ ID NO: 38038 - RNA, 19 nt, Artificial Sequence
  Description of Artificial Sequence: Synthetic oligonucleotide
  Sense strand starting at position 771 of SEQ ID NO: 451
gcaacaagccugugaguga

SEQ ID NO: 38039 - RNA, 19 nt, Artificial Sequence
  Description of Artificial Sequence: Synthetic oligonucleotide
  Antisense strand to SEQ ID NO: 38038
ucacucacaggcuuguugc

SEQ ID NO: 38040 - RNA, 19 nt, Artificial Sequence
  Description of Artificial Sequence: Synthetic oligonucleotide
  Sense strand starting at position 797 of SEQ ID NO: 451
aggcccauguuucucagaa

SEQ ID NO: 38041 - RNA, 19 nt, Artificial Sequence
  Description of Artificial Sequence: Synthetic oligonucleotide
  Antisense strand to SEQ ID NO: 38040
uucugagaaacaugggccu

SEQ ID NO: 38042 - RNA, 19 nt, Artificial Sequence
  Description of Artificial Sequence: Synthetic oligonucleotide
  Sense strand starting at position 798 of SEQ ID NO: 451
ggcccauguuucucagaag

SEQ ID NO: 38043 - RNA, 19 nt, Artificial Sequence
  Description of Artificial Sequence: Synthetic oligonucleotide
  Antisense strand to SEQ ID NO: 38042
cuucugagaaacaugggcc

SEQ ID NO: 38044 - RNA, 19 nt, Artificial Sequence
  Description of Artificial Sequence: Synthetic oligonucleotide
  Sense strand starting at position 1037 of SEQ ID NO: 451
gcaggacucaccuggucau

SEQ ID NO: 38045 - RNA, 19 nt, Artificial Sequence
  Description of Artificial Sequence: Synthetic oligonucleotide
  Antisense strand to SEQ ID NO: 38044
augaccaggugaguccugc

SEQ ID NO: 38046 - RNA, 19 nt, Artificial Sequence
  Description of Artificial Sequence: Synthetic oligonucleotide
  Sense strand starting at position 1356 of SEQ ID NO: 451
ugugauucuugucucugua

SEQ ID NO: 38047 - RNA, 19 nt, Artificial Sequence
  Description of Artificial Sequence: Synthetic oligonucleotide
  Antisense strand to SEQ ID NO: 38046
uacagagacaagaaucaca

SEQ ID NO: 38048 - RNA, 19 nt, Artificial Sequence
  Description of Artificial Sequence: Synthetic oligonucleotide
  Sense strand starting at position 1358 of SEQ ID NO: 451
ugauucuugucucuguaau

SEQ ID NO: 38049 - RNA, 19 nt, Artificial Sequence
  Description of Artificial Sequence: Synthetic oligonucleotide
  Antisense strand to SEQ ID NO: 38048
auuacagagacaagaauca

SEQ ID NO: 38050 - RNA, 19 nt, Artificial Sequence
  Description of Artificial Sequence: Synthetic oligonucleotide
  Sense strand starting at position 1359 of SEQ ID NO: 451
gauucuugucucuguaaug

SEQ ID NO: 38051 - RNA, 19 nt, Artificial Sequence
  Description of Artificial Sequence: Synthetic oligonucleotide
  Antisense strand to SEQ ID NO: 38050
cauuacagagacaagaauc

SEQ ID NO: 38052 - RNA, 19 nt, Artificial Sequence
  Description of Artificial Sequence: Synthetic oligonucleotide
  Sense strand starting at position 1360 of SEQ ID NO: 451
auucuugucucuguaauga

SEQ ID NO: 38053 - RNA, 19 nt, Artificial Sequence
  Description of Artificial Sequence: Synthetic oligonucleotide
  Antisense strand to SEQ ID NO: 38052
ucauuacagagacaagaau

SEQ ID NO: 38054 - RNA, 19 nt, Artificial Sequence
  Description of Artificial Sequence: Synthetic oligonucleotide
  Sense strand starting at position 1385 of SEQ ID NO: 451
agccaaaguccugauucuu

SEQ ID NO: 38055 - RNA, 19 nt, Artificial Sequence
  Description of Artificial Sequence: Synthetic oligonucleotide
  Antisense strand to SEQ ID NO: 38054
aagaaucaggacuuuggcu

SEQ ID NO: 38056 - RNA, 19 nt, Artificial Sequence
  Description of Artificial Sequence: Synthetic oligonucleotide
  Sense strand starting at position 1439 of SEQ ID NO: 451
ugcgacugguccuccacaa

SEQ ID NO: 38057 - RNA, 19 nt, Artificial Sequence
  Description of Artificial Sequence: Synthetic oligonucleotide
  Antisense strand to SEQ ID NO: 38056
uuguggaggaccagucgca

SEQ ID NO: 38058 - RNA, 19 nt, Artificial Sequence
  Description of Artificial Sequence: Synthetic oligonucleotide
  Sense strand starting at position 1513 of SEQ ID NO: 451
ucuugugucccuggaggga

SEQ ID NO: 38059 - RNA, 19 nt, Artificial Sequence
  Description of Artificial Sequence: Synthetic oligonucleotide
  Antisense strand to SEQ ID NO: 38058
ucccuccagggacacaaga

SEQ ID NO: 38060 - RNA, 19 nt, Artificial Sequence
  Description of Artificial Sequence: Synthetic oligonucleotide
  Sense strand starting at position 1533 of SEQ ID NO: 451
gggauaagguaagaauaca

SEQ ID NO: 38061 - RNA, 19 nt, Artificial Sequence
  Description of Artificial Sequence: Synthetic oligonucleotide
  Antisense strand to SEQ ID NO: 38060
uguauucuuaccuuauccc

SEQ ID NO: 38062 - RNA, 19 nt, Artificial Sequence
  Description of Artificial Sequence: Synthetic oligonucleotide
  Sense strand starting at position 1796 of SEQ ID NO: 451
uguacuuuagccuggucaa

SEQ ID NO: 38063 - RNA, 19 nt, Artificial Sequence
  Description of Artificial Sequence: Synthetic oligonucleotide
  Antisense strand to SEQ ID NO: 38062
uugaccaggcuaaaguaca

SEQ ID NO: 38064 - RNA, 19 nt, Artificial Sequence
  Description of Artificial Sequence: Synthetic oligonucleotide
  Sense strand starting at position 1797 of SEQ ID NO: 451
guacuuuagccuggucaac

SEQ ID NO: 38065 - RNA, 19 nt, Artificial Sequence
  Description of Artificial Sequence: Synthetic oligonucleotide
  Antisense strand to SEQ ID NO: 38064
guugaccaggcuaaaguac

SEQ ID NO: 38066 - RNA, 19 nt, Artificial Sequence
  Description of Artificial Sequence: Synthetic oligonucleotide
  Sense strand starting at position 2043 of SEQ ID NO: 451
gccagcuuucucuugcuuu

SEQ ID NO: 38067 - RNA, 19 nt, Artificial Sequence
  Description of Artificial Sequence: Synthetic oligonucleotide
  Antisense strand to SEQ ID NO: 38066
aaagcaagagaaagcuggc

SEQ ID NO: 38068 - RNA, 19 nt, Artificial Sequence
  Description of Artificial Sequence: Synthetic oligonucleotide
  Sense strand starting at position 2240 of SEQ ID NO: 451
cuaauacagccucguuaaa

SEQ ID NO: 38069 - RNA, 19 nt, Artificial Sequence
  Description of Artificial Sequence: Synthetic oligonucleotide
  Antisense strand to SEQ ID NO: 38068
uuuaacgaggcuguauuag

SEQ ID NO: 38070 - RNA, 19 nt, Artificial Sequence
  Description of Artificial Sequence: Synthetic oligonucleotide
  Sense strand starting at position 2284 of SEQ ID NO: 451
aggcaaguuucuuuaucug

SEQ ID NO: 38071 - RNA, 19 nt, Artificial Sequence
  Description of Artificial Sequence: Synthetic oligonucleotide
  Antisense strand to SEQ ID NO: 38070
cagauaaagaaacuugccu

SEQ ID NO: 38072 - RNA, 19 nt, Artificial Sequence
  Description of Artificial Sequence: Synthetic oligonucleotide
  Sense strand starting at position 2378 of SEQ ID NO: 451
aggccagagcuuugaaaug

SEQ ID NO: 38073 - RNA, 19 nt, Artificial Sequence
  Description of Artificial Sequence: Synthetic oligonucleotide
  Antisense strand to SEQ ID NO: 38072
cauuucaaagcucuggccu

SEQ ID NO: 38074 - RNA, 19 nt, Artificial Sequence
  Description of Artificial Sequence: Synthetic oligonucleotide
  Sense strand starting at position 2639 of SEQ ID NO: 451
uugggaguauaggcaaauu

SEQ ID NO: 38075 - RNA, 19 nt, Artificial Sequence
  Description of Artificial Sequence: Synthetic oligonucleotide
  Antisense strand to SEQ ID NO: 38074
aauuugccuauacucccaa

SEQ ID NO: 38076 - RNA, 19 nt, Artificial Sequence
  Description of Artificial Sequence: Synthetic oligonucleotide
  Sense strand starting at position 2647 of SEQ ID NO: 451
auaggcaaauugucagaua

SEQ ID NO: 38077 - RNA, 19 nt, Artificial Sequence
  Description of Artificial Sequence: Synthetic oligonucleotide
  Antisense strand to SEQ ID NO: 38076
uaucugacaauuugccuau

SEQ ID NO: 38078 - RNA, 19 nt, Artificial Sequence
  Description of Artificial Sequence: Synthetic oligonucleotide
  Sense strand starting at position 3452 of SEQ ID NO: 451
aaugcuaugugagucaaac

SEQ ID NO: 38079 - RNA, 19 nt, Artificial Sequence
  Description of Artificial Sequence: Synthetic oligonucleotide
  Antisense strand to SEQ ID NO: 38078
guuugacucacauagcauu

SEQ ID NO: 38080 - RNA, 19 nt, Artificial Sequence
  Description of Artificial Sequence: Synthetic oligonucleotide
  Sense strand starting at position 3486 of SEQ ID NO: 451
guuuauauuuauuagggag

SEQ ID NO: 38081 - RNA, 19 nt, Artificial Sequence
  Description of Artificial Sequence: Synthetic oligonucleotide
  Antisense strand to SEQ ID NO: 38080
cucccuaauaaauauaaac

SEQ ID NO: 38082 - RNA, 19 nt, Artificial Sequence
  Description of Artificial Sequence: Synthetic oligonucleotide
  Sense strand starting at position 3498 of SEQ ID NO: 451
uagggaguaugucccuaau

SEQ ID NO: 38083 - RNA, 19 nt, Artificial Sequence
  Description of Artificial Sequence: Synthetic oligonucleotide
  Antisense strand to SEQ ID NO: 38082
auuagggacauacucccua

SEQ ID NO: 38084 - RNA, 19 nt, Artificial Sequence
  Description of Artificial Sequence: Synthetic oligonucleotide
  Sense strand starting at position 3500 of SEQ ID NO: 451
gggaguaugucccuaaugu

SEQ ID NO: 38085 - RNA, 19 nt, Artificial Sequence
  Description of Artificial Sequence: Synthetic oligonucleotide
  Antisense strand to SEQ ID NO: 38084
acauuagggacauacuccc

SEQ ID NO: 38086 - RNA, 19 nt, Artificial Sequence
  Description of Artificial Sequence: Synthetic oligonucleotide
  Sense strand starting at position 3501 of SEQ ID NO: 451
ggaguaugucccuaauguc

SEQ ID NO: 38087 - RNA, 19 nt, Artificial Sequence
  Description of Artificial Sequence: Synthetic oligonucleotide
  Antisense strand to SEQ ID NO: 38086
gacauuagggacauacucc

SEQ ID NO: 38088 - RNA, 19 nt, Artificial Sequence
  Description of Artificial Sequence: Synthetic oligonucleotide
  Sense strand starting at position 3529 of SEQ ID NO: 451
gcuggauguacucagguau

SEQ ID NO: 38089 - RNA, 19 nt, Artificial Sequence
  Description of Artificial Sequence: Synthetic oligonucleotide
  Antisense strand to SEQ ID NO: 38088
auaccugaguacauccagc

SEQ ID NO: 38090 - RNA, 19 nt, Artificial Sequence
  Description of Artificial Sequence: Synthetic oligonucleotide
  Sense strand starting at position 3533 of SEQ ID NO: 451
gauguacucagguauggua

SEQ ID NO: 38091 - RNA, 19 nt, Artificial Sequence
  Description of Artificial Sequence: Synthetic oligonucleotide
  Antisense strand to SEQ ID NO: 38090
uaccauaccugaguacauc

SEQ ID NO: 38092 - RNA, 19 nt, Artificial Sequence
  Description of Artificial Sequence: Synthetic oligonucleotide
  Sense strand starting at position 3541 of SEQ ID NO: 451
cagguaugguaucugauau

SEQ ID NO: 38093 - RNA, 19 nt, Artificial Sequence
  Description of Artificial Sequence: Synthetic oligonucleotide
  Antisense strand to SEQ ID NO: 38092
auaucagauaccauaccug

SEQ ID NO: 38094 - RNA, 19 nt, Artificial Sequence
  Description of Artificial Sequence: Synthetic oligonucleotide
  Sense strand starting at position 3542 of SEQ ID NO: 451
agguaugguaucugauaua

SEQ ID NO: 38095 - RNA, 19 nt, Artificial Sequence
  Description of Artificial Sequence: Synthetic oligonucleotide
  Antisense strand to SEQ ID NO: 38094
uauaucagauaccauaccu

SEQ ID NO: 38096 - RNA, 19 nt, Artificial Sequence
  Description of Artificial Sequence: Synthetic oligonucleotide
  Sense strand starting at position 3602 of SEQ ID NO: 451
augagacgccauuauauuc

SEQ ID NO: 38097 - RNA, 19 nt, Artificial Sequence
  Description of Artificial Sequence: Synthetic oligonucleotide
  Antisense strand to SEQ ID NO: 38096
gaauauaauggcgucucau

SEQ ID NO: 38098 - RNA, 19 nt, Artificial Sequence
  Description of Artificial Sequence: Synthetic oligonucleotide
  Sense strand starting at position 3658 of SEQ ID NO: 451
uuguaaacucauggccuau

SEQ ID NO: 38099 - RNA, 19 nt, Artificial Sequence
  Description of Artificial Sequence: Synthetic oligonucleotide
  Antisense strand to SEQ ID NO: 38098
auaggccaugaguuuacaa

SEQ ID NO: 38100 - RNA, 19 nt, Artificial Sequence
  Description of Artificial Sequence: Synthetic oligonucleotide
  Sense strand starting at position 3660 of SEQ ID NO: 451
guaaacucauggccuauga

SEQ ID NO: 38101 - RNA, 19 nt, Artificial Sequence
  Description of Artificial Sequence: Synthetic oligonucleotide
  Antisense strand to SEQ ID NO: 38100
ucauaggccaugaguuuac

SEQ ID NO: 38102 - RNA, 19 nt, Artificial Sequence
  Description of Artificial Sequence: Synthetic oligonucleotide
  Sense strand starting at position 3664 of SEQ ID NO: 451
acucauggccuaugauuau

SEQ ID NO: 38103 - RNA, 19 nt, Artificial Sequence
  Description of Artificial Sequence: Synthetic oligonucleotide
  Antisense strand to SEQ ID NO: 38102
auaaucauaggccaugagu

SEQ ID NO: 38104 - RNA, 19 nt, Artificial Sequence
  Description of Artificial Sequence: Synthetic oligonucleotide
  Sense strand starting at position 3670 of SEQ ID NO: 451
ggccuaugauuaucucauc

SEQ ID NO: 38105 - RNA, 19 nt, Artificial Sequence
  Description of Artificial Sequence: Synthetic oligonucleotide
  Antisense strand to SEQ ID NO: 38104
gaugagauaaucauaggcc

SEQ ID NO: 38106 - RNA, 19 nt, Artificial Sequence
  Description of Artificial Sequence: Synthetic oligonucleotide
  Sense strand starting at position 3721 of SEQ ID NO: 451
gacccugaucugggccaau

SEQ ID NO: 38107 - RNA, 19 nt, Artificial Sequence
  Description of Artificial Sequence: Synthetic oligonucleotide
  Antisense strand to SEQ ID NO: 38106
auuggcccagaucaggguc

SEQ ID NO: 38108 - RNA, 19 nt, Artificial Sequence
  Description of Artificial Sequence: Synthetic oligonucleotide
  Sense strand starting at position 3891 of SEQ ID NO: 451
gagguaaugcaacaauagu

SEQ ID NO: 38109 - RNA, 19 nt, Artificial Sequence
  Description of Artificial Sequence: Synthetic oligonucleotide
  Antisense strand to SEQ ID NO: 38108
acuauuguugcauuaccuc

SEQ ID NO: 38110 - RNA, 19 nt, Artificial Sequence
  Description of Artificial Sequence: Synthetic oligonucleotide
  Sense strand starting at position 3855 of SEQ ID NO: 452
agauuauguuucuuguaca

SEQ ID NO: 38111 - RNA, 19 nt, Artificial Sequence
  Description of Artificial Sequence: Synthetic oligonucleotide
  Antisense strand to SEQ ID NO: 38110
uguacaagaaacauaaucu

SEQ ID NO: 38112 - RNA, 19 nt, Artificial Sequence
  Description of Artificial Sequence: Synthetic oligonucleotide
  Sense strand starting at position 3854 of SEQ ID NO: 452
gagauuauguuucuuguac

SEQ ID NO: 38113 - RNA, 19 nt, Artificial Sequence
  Description of Artificial Sequence: Synthetic oligonucleotide
  Antisense strand to SEQ ID NO: 38112
guacaagaaacauaaucuc

SEQ ID NO: 38114 - RNA, 19 nt, Artificial Sequence
  Description of Artificial Sequence: Synthetic oligonucleotide
  Sense strand starting at position 3850 of SEQ ID NO: 452
gaaagagauuauguuucuu

SEQ ID NO: 38115 - RNA, 19 nt, Artificial Sequence
  Description of Artificial Sequence: Synthetic oligonucleotide
  Antisense strand to SEQ ID NO: 38114
aagaaacauaaucucuuuc

SEQ ID NO: 38116 - RNA, 19 nt, Artificial Sequence
  Description of Artificial Sequence: Synthetic oligonucleotide
  Sense strand starting at position 3833 of SEQ ID NO: 452
aaugaaaguuugguauuga

SEQ ID NO: 38117 - RNA, 19 nt, Artificial Sequence
  Description of Artificial Sequence: Synthetic oligonucleotide
  Antisense strand to SEQ ID NO: 38116
ucaauaccaaacuuucauu

SEQ ID NO: 38118 - RNA, 19 nt, Artificial Sequence
  Description of Artificial Sequence: Synthetic oligonucleotide
  Sense strand starting at position 3811 of SEQ ID NO: 452
gguaauaacgugugaaaca

SEQ ID NO: 38119 - RNA, 19 nt, Artificial Sequence
  Description of Artificial Sequence: Synthetic oligonucleotide
  Antisense strand to SEQ ID NO: 38118
uguuucacacguuauuacc

SEQ ID NO: 38120 - RNA, 19 nt, Artificial Sequence
  Description of Artificial Sequence: Synthetic oligonucleotide
  Sense strand starting at position 3809 of SEQ ID NO: 452
cagguaauaacgugugaaa

SEQ ID NO: 38121 - RNA, 19 nt, Artificial Sequence
  Description of Artificial Sequence: Synthetic oligonucleotide
  Antisense strand to SEQ ID NO: 38120
uuucacacguuauuaccug

SEQ ID NO: 38122 - RNA, 19 nt, Artificial Sequence
  Description of Artificial Sequence: Synthetic oligonucleotide
  Sense strand starting at position 3772 of SEQ ID NO: 452
ugacaucuacuuugcggau

SEQ ID NO: 38123 - RNA, 19 nt, Artificial Sequence
  Description of Artificial Sequence: Synthetic oligonucleotide
  Antisense strand to SEQ ID NO: 38122
auccgcaaaguagauguca

SEQ ID NO: 38124 - RNA, 19 nt, Artificial Sequence
  Description of Artificial Sequence: Synthetic oligonucleotide
  Sense strand starting at position 3716 of SEQ ID NO: 452
gcuggagucaaauaaguau

SEQ ID NO: 38125 - RNA, 19 nt, Artificial Sequence
  Description of Artificial Sequence: Synthetic oligonucleotide
  Antisense strand to SEQ ID NO: 38124
auacuuauuugacuccagc

SEQ ID NO: 38126 - RNA, 19 nt, Artificial Sequence
  Description of Artificial Sequence: Synthetic oligonucleotide
  Sense strand starting at position 3712 of SEQ ID NO: 452
ugacgcuggagucaaauaa

SEQ ID NO: 38127 - RNA, 19 nt, Artificial Sequence
  Description of Artificial Sequence: Synthetic oligonucleotide
  Antisense strand to SEQ ID NO: 38126
uuauuugacuccagcguca

SEQ ID NO: 38128 - RNA, 19 nt, Artificial Sequence
  Description of Artificial Sequence: Synthetic oligonucleotide
  Sense strand starting at position 3413 of SEQ ID NO: 452
agugguucccuugagguca

SEQ ID NO: 38129 - RNA, 19 nt, Artificial Sequence
  Description of Artificial Sequence: Synthetic oligonucleotide
  Antisense strand to SEQ ID NO: 38128
ugaccucaagggaaccacu

SEQ ID NO: 38130 - RNA, 19 nt, Artificial Sequence
  Description of Artificial Sequence: Synthetic oligonucleotide
  Sense strand starting at position 3340 of SEQ ID NO: 452
ugaugaagagugcaaguuu

SEQ ID NO: 38131 - RNA, 19 nt, Artificial Sequence
  Description of Artificial Sequence: Synthetic oligonucleotide
  Antisense strand to SEQ ID NO: 38130
aaacuugcacucuucauca

SEQ ID NO: 38132 - RNA, 19 nt, Artificial Sequence
  Description of Artificial Sequence: Synthetic oligonucleotide
  Sense strand starting at position 3338 of SEQ ID NO: 452
ggugaugaagagugcaagu

SEQ ID NO: 38133 - RNA, 19 nt, Artificial Sequence
  Description of Artificial Sequence: Synthetic oligonucleotide
  Antisense strand to SEQ ID NO: 38132
acuugcacucuucaucacc

SEQ ID NO: 38134 - RNA, 19 nt, Artificial Sequence
  Description of Artificial Sequence: Synthetic oligonucleotide
  Sense strand starting at position 3237 of SEQ ID NO: 452
cucuuugaugguuaaagca

SEQ ID NO: 38135 - RNA, 19 nt, Artificial Sequence
  Description of Artificial Sequence: Synthetic oligonucleotide
  Antisense strand to SEQ ID NO: 38134
ugcuuuaaccaucaaagag

SEQ ID NO: 38136 - RNA, 19 nt, Artificial Sequence
  Description of Artificial Sequence: Synthetic oligonucleotide
  Sense strand starting at position 3230 of SEQ ID NO: 452
ugacaaucucuuugauggu

SEQ ID NO: 38137 - RNA, 19 nt, Artificial Sequence
  Description of Artificial Sequence: Synthetic oligonucleotide
  Antisense strand to SEQ ID NO: 38136
accaucaaagagauuguca

SEQ ID NO: 38138 - RNA, 19 nt, Artificial Sequence
  Description of Artificial Sequence: Synthetic oligonucleotide
  Sense strand starting at position 3227 of SEQ ID NO: 452
gcuugacaaucucuuugau

SEQ ID NO: 38139 - RNA, 19 nt, Artificial Sequence
  Description of Artificial Sequence: Synthetic oligonucleotide
  Antisense strand to SEQ ID NO: 38138
aucaaagagauugucaagc

SEQ ID NO: 38140 - RNA, 19 nt, Artificial Sequence
  Description of Artificial Sequence: Synthetic oligonucleotide
  Sense strand starting at position 3219 of SEQ ID NO: 452
cuguuuaggcuugacaauc

SEQ ID NO: 38141 - RNA, 19 nt, Artificial Sequence
  Description of Artificial Sequence: Synthetic oligonucleotide
  Antisense strand to SEQ ID NO: 38140
gauugucaagccuaaacag

SEQ ID NO: 38142 - RNA, 19 nt, Artificial Sequence
  Description of Artificial Sequence: Synthetic oligonucleotide
  Sense strand starting at position 3218 of SEQ ID NO: 452
ucuguuuaggcuugacaau

SEQ ID NO: 38143 - RNA, 19 nt, Artificial Sequence
  Description of Artificial Sequence: Synthetic oligonucleotide
  Antisense strand to SEQ ID NO: 38142
auugucaagccuaaacaga

SEQ ID NO: 38144 - RNA, 19 nt, Artificial Sequence
  Description of Artificial Sequence: Synthetic oligonucleotide
  Sense strand starting at position 3150 of SEQ ID NO: 452
acacaagauuuauaggcuu

SEQ ID NO: 38145 - RNA, 19 nt, Artificial Sequence
  Description of Artificial Sequence: Synthetic oligonucleotide
  Antisense strand to SEQ ID NO: 38144
aagccuauaaaucuugugu

SEQ ID NO: 38146 - RNA, 19 nt, Artificial Sequence
  Description of Artificial Sequence: Synthetic oligonucleotide
  Sense strand starting at position 3115 of SEQ ID NO: 452
gugcauucccuauagacca

SEQ ID NO: 38147 - RNA, 19 nt, Artificial Sequence
  Description of Artificial Sequence: Synthetic oligonucleotide
  Antisense strand to SEQ ID NO: 38146
uggucuauagggaaugcac

SEQ ID NO: 38148 - RNA, 19 nt, Artificial Sequence
  Description of Artificial Sequence: Synthetic oligonucleotide
  Sense strand starting at position 2962 of SEQ ID NO: 452
cguagagucuguaucguua

SEQ ID NO: 38149 - RNA, 19 nt, Artificial Sequence
  Description of Artificial Sequence: Synthetic oligonucleotide
  Antisense strand to SEQ ID NO: 38148
uaacgauacagacucuacg

SEQ ID NO: 38150 - RNA, 19 nt, Artificial Sequence
  Description of Artificial Sequence: Synthetic oligonucleotide
  Sense strand starting at position 2925 of SEQ ID NO: 452
gaagcuccuuaguuggaga

SEQ ID NO: 38151 - RNA, 19 nt, Artificial Sequence
  Description of Artificial Sequence: Synthetic oligonucleotide
  Antisense strand to SEQ ID NO: 38150
ucuccaacuaaggagcuuc

SEQ ID NO: 38152 - RNA, 19 nt, Artificial Sequence
  Description of Artificial Sequence: Synthetic oligonucleotide
  Sense strand starting at position 2300 of SEQ ID NO: 452
agcauuugccggcgaggaa

SEQ ID NO: 38153 - RNA, 19 nt, Artificial Sequence
  Description of Artificial Sequence: Synthetic oligonucleotide
  Antisense strand to SEQ ID NO: 38152
uuccucgccggcaaaugcu

SEQ ID NO: 38154 - RNA, 19 nt, Artificial Sequence
  Description of Artificial Sequence: Synthetic oligonucleotide
  Sense strand starting at position 2114 of SEQ ID NO: 452
aaauguuccacgugggaua

SEQ ID NO: 38155 - RNA, 19 nt, Artificial Sequence
  Description of Artificial Sequence: Synthetic oligonucleotide
  Antisense strand to SEQ ID NO: 38154
uaucccacguggaacauuu

SEQ ID NO: 38156 - RNA, 19 nt, Artificial Sequence
  Description of Artificial Sequence: Synthetic oligonucleotide
  Sense strand starting at position 1064 of SEQ ID NO: 452
guguuugacuaaguuuaca

SEQ ID NO: 38157 - RNA, 19 nt, Artificial Sequence
  Description of Artificial Sequence: Synthetic oligonucleotide
  Antisense strand to SEQ ID NO: 38156
uguaaacuuagucaaacac

SEQ ID NO: 38158 - RNA, 19 nt, Artificial Sequence
  Description of Artificial Sequence: Synthetic oligonucleotide
  Sense strand starting at position 942 of SEQ ID NO: 452
agaaccgugucuucuaaca

SEQ ID NO: 38159 - RNA, 19 nt, Artificial Sequence
  Description of Artificial Sequence: Synthetic oligonucleotide
  Antisense strand to SEQ ID NO: 38158
uguuagaagacacgguucu

SEQ ID NO: 38160 - RNA, 19 nt, Artificial Sequence
  Description of Artificial Sequence: Synthetic oligonucleotide
  Sense strand starting at position 940 of SEQ ID NO: 452
aaagaaccgugucuucuaa

SEQ ID NO: 38161 - RNA, 19 nt, Artificial Sequence
  Description of Artificial Sequence: Synthetic oligonucleotide
  Antisense strand to SEQ ID NO: 38160
uuagaagacacgguucuuu

SEQ ID NO: 38162 - RNA, 19 nt, Artificial Sequence
  Description of Artificial Sequence: Synthetic oligonucleotide
  Sense strand starting at position 904 of SEQ ID NO: 452
cucuaaguuugauccugaa

SEQ ID NO: 38163 - RNA, 19 nt, Artificial Sequence
  Description of Artificial Sequence: Synthetic oligonucleotide
  Antisense strand to SEQ ID NO: 38162
uucaggaucaaacuuagag

SEQ ID NO: 38164 - RNA, 19 nt, Artificial Sequence
  Description of Artificial Sequence: Synthetic oligonucleotide
  Sense strand starting at position 829 of SEQ ID NO: 452
gauuguacguauucuaaga

SEQ ID NO: 38165 - RNA, 19 nt, Artificial Sequence
  Description of Artificial Sequence: Synthetic oligonucleotide
  Antisense strand to SEQ ID NO: 38164
ucuuagaauacguacaauc

SEQ ID NO: 38166 - RNA, 19 nt, Artificial Sequence
  Description of Artificial Sequence: Synthetic oligonucleotide
  Sense strand starting at position 825 of SEQ ID NO: 452
aaaggauuguacguauucu

SEQ ID NO: 38167 - RNA, 19 nt, Artificial Sequence
  Description of Artificial Sequence: Synthetic oligonucleotide
  Antisense strand to SEQ ID NO: 38166
agaauacguacaauccuuu

SEQ ID NO: 38168 - RNA, 19 nt, Artificial Sequence
  Description of Artificial Sequence: Synthetic oligonucleotide
  Sense strand starting at position 820 of SEQ ID NO: 452
agcagaaaggauuguacgu

SEQ ID NO: 38169 - RNA, 19 nt, Artificial Sequence
  Description of Artificial Sequence: Synthetic oligonucleotide
  Antisense strand to SEQ ID NO: 38168
acguacaauccuuucugcu

SEQ ID NO: 38170 - RNA, 19 nt, Artificial Sequence
  Description of Artificial Sequence: Synthetic oligonucleotide
  Sense strand starting at position 801 of SEQ ID NO: 452
uuacacucucaguagagua

SEQ ID NO: 38171 - RNA, 19 nt, Artificial Sequence
  Description of Artificial Sequence: Synthetic oligonucleotide
  Antisense strand to SEQ ID NO: 38170
uacucuacugagaguguaa

SEQ ID NO: 38172 - RNA, 19 nt, Artificial Sequence
  Description of Artificial Sequence: Synthetic oligonucleotide
  Sense strand starting at position 800 of SEQ ID NO: 452
auuacacucucaguagagu

SEQ ID NO: 38173 - RNA, 19 nt, Artificial Sequence
  Description of Artificial Sequence: Synthetic oligonucleotide
  Antisense strand to SEQ ID NO: 38172
acucuacugagaguguaau

SEQ ID NO: 38174 - RNA, 19 nt, Artificial Sequence
  Description of Artificial Sequence: Synthetic oligonucleotide
  Sense strand starting at position 749 of SEQ ID NO: 452
gugauacauuccuuaggaa

SEQ ID NO: 38175 - RNA, 19 nt, Artificial Sequence
  Description of Artificial Sequence: Synthetic oligonucleotide
  Antisense strand to SEQ ID NO: 38174
uuccuaaggaauguaucac

SEQ ID NO: 38176 - RNA, 19 nt, Artificial Sequence
  Description of Artificial Sequence: Synthetic oligonucleotide
  Sense strand starting at position 748 of SEQ ID NO: 452
ggugauacauuccuuagga

SEQ ID NO: 38177 - RNA, 19 nt, Artificial Sequence
  Description of Artificial Sequence: Synthetic oligonucleotide
  Antisense strand to SEQ ID NO: 38176
uccuaaggaauguaucacc

SEQ ID NO: 38178 - RNA, 19 nt, Artificial Sequence
  Description of Artificial Sequence: Synthetic oligonucleotide
  Sense strand starting at position 621 of SEQ ID NO: 452
aacaguugaugagauauuu

SEQ ID NO: 38179 - RNA, 19 nt, Artificial Sequence
  Description of Artificial Sequence: Synthetic oligonucleotide
  Antisense strand to SEQ ID NO: 38178
aaauaucucaucaacuguu

SEQ ID NO: 38180 - RNA, 19 nt, Artificial Sequence
  Description of Artificial Sequence: Synthetic oligonucleotide
  Sense strand starting at position 491 of SEQ ID NO: 452
gaggcagcucaguaaugga

SEQ ID NO: 38181 - RNA, 19 nt, Artificial Sequence
  Description of Artificial Sequence: Synthetic oligonucleotide
  Antisense strand to SEQ ID NO: 38180
uccauuacugagcugccuc

SEQ ID NO: 38182 - RNA, 19 nt, Artificial Sequence
  Description of Artificial Sequence: Synthetic oligonucleotide
  Sense strand starting at position 357 of SEQ ID NO: 452
acacauuucuaugagugaa

SEQ ID NO: 38183 - RNA, 19 nt, Artificial Sequence
  Description of Artificial Sequence: Synthetic oligonucleotide
  Antisense strand to SEQ ID NO: 38182
uucacucauagaaaugugu

SEQ ID NO: 38184 - RNA, 19 nt, Artificial Sequence
  Description of Artificial Sequence: Synthetic oligonucleotide
  Sense strand starting at position 354 of SEQ ID NO: 452
acgacacauuucuaugagu

SEQ ID NO: 38185 - RNA, 19 nt, Artificial Sequence
  Description of Artificial Sequence: Synthetic oligonucleotide
  Antisense strand to SEQ ID NO: 38184
acucauagaaaugugucgu

SEQ ID NO: 38186 - RNA, 19 nt, Artificial Sequence
  Description of Artificial Sequence: Synthetic oligonucleotide
  Sense strand starting at position 86 of SEQ ID NO: 452
ggcuaacuuugguccacaa

SEQ ID NO: 38187 - RNA, 19 nt, Artificial Sequence
  Description of Artificial Sequence: Synthetic oligonucleotide
  Antisense strand to SEQ ID NO: 38186
uuguggaccaaaguuagcc

SEQ ID NO: 38188 - RNA, 19 nt, Artificial Sequence
  Description of Artificial Sequence: Synthetic oligonucleotide
  Sense strand starting at position 77 of SEQ ID NO: 452
gacucaguaggcuaacuuu

SEQ ID NO: 38189 - RNA, 19 nt, Artificial Sequence
  Description of Artificial Sequence: Synthetic oligonucleotide
  Antisense strand to SEQ ID NO: 38188
aaaguuagccuacugaguc

SEQ ID NO: 38190 - RNA, 19 nt, Artificial Sequence
  Description of Artificial Sequence: Synthetic oligonucleotide
  Sense strand starting at position 3939 of SEQ ID NO: 453
ugacuugggucuuaaagac

SEQ ID NO: 38191 - RNA, 19 nt, Artificial Sequence
  Description of Artificial Sequence: Synthetic oligonucleotide
  Antisense strand to SEQ ID NO: 38190
gucuuuaagacccaaguca

SEQ ID NO: 38192 - RNA, 19 nt, Artificial Sequence
  Description of Artificial Sequence: Synthetic oligonucleotide
  Sense strand starting at position 3860 of SEQ ID NO: 453
cugucuuugugacucuauu

SEQ ID NO: 38193 - RNA, 19 nt, Artificial Sequence
  Description of Artificial Sequence: Synthetic oligonucleotide
  Antisense strand to SEQ ID NO: 38192
aauagagucacaaagacag

SEQ ID NO: 38194 - RNA, 19 nt, Artificial Sequence
  Description of Artificial Sequence: Synthetic oligonucleotide
  Sense strand starting at position 3855 of SEQ ID NO: 453
gacagcugucuuugugacu

SEQ ID NO: 38195 - RNA, 19 nt, Artificial Sequence
  Description of Artificial Sequence: Synthetic oligonucleotide
  Antisense strand to SEQ ID NO: 38194
agucacaaagacagcuguc

SEQ ID NO: 38196 - RNA, 19 nt, Artificial Sequence
  Description of Artificial Sequence: Synthetic oligonucleotide
  Sense strand starting at position 3849 of SEQ ID NO: 453
gacggagacagcugucuuu

SEQ ID NO: 38197 - RNA, 19 nt, Artificial Sequence
  Description of Artificial Sequence: Synthetic oligonucleotide
  Antisense strand to SEQ ID NO: 38196
aaagacagcugucuccguc

SEQ ID NO: 38198 - RNA, 19 nt, Artificial Sequence
  Description of Artificial Sequence: Synthetic oligonucleotide
  Sense strand starting at position 3840 of SEQ ID NO: 453
auugcuuuagacggagaca

SEQ ID NO: 38199 - RNA, 19 nt, Artificial Sequence
  Description of Artificial Sequence: Synthetic oligonucleotide
  Antisense strand to SEQ ID NO: 38198
ugucuccgucuaaagcaau

SEQ ID NO: 38200 - RNA, 19 nt, Artificial Sequence
  Description of Artificial Sequence: Synthetic oligonucleotide
  Sense strand starting at position 3832 of SEQ ID NO: 453
uugcaaggauugcuuuaga

SEQ ID NO: 38201 - RNA, 19 nt, Artificial Sequence
  Description of Artificial Sequence: Synthetic oligonucleotide
  Antisense strand to SEQ ID NO: 38200
ucuaaagcaauccuugcaa

SEQ ID NO: 38202 - RNA, 19 nt, Artificial Sequence
  Description of Artificial Sequence: Synthetic oligonucleotide
  Sense strand starting at position 3830 of SEQ ID NO: 453
gcuugcaaggauugcuuua

SEQ ID NO: 38203 - RNA, 19 nt, Artificial Sequence
  Description of Artificial Sequence: Synthetic oligonucleotide
  Antisense strand to SEQ ID NO: 38202
uaaagcaauccuugcaagc

SEQ ID NO: 38204 - RNA, 19 nt, Artificial Sequence
  Description of Artificial Sequence: Synthetic oligonucleotide
  Sense strand starting at position 3735 of SEQ ID NO: 453
ggaacaaguccuugccaag

SEQ ID NO: 38205 - RNA, 19 nt, Artificial Sequence
  Description of Artificial Sequence: Synthetic oligonucleotide
  Antisense strand to SEQ ID NO: 38204
cuuggcaaggacuuguucc

SEQ ID NO: 38206 - RNA, 19 nt, Artificial Sequence
  Description of Artificial Sequence: Synthetic oligonucleotide
  Sense strand starting at position 3734 of SEQ ID NO: 453
aggaacaaguccuugccaa

SEQ ID NO: 38207 - RNA, 19 nt, Artificial Sequence
  Description of Artificial Sequence: Synthetic oligonucleotide
  Antisense strand to SEQ ID NO: 38206
uuggcaaggacuuguuccu

SEQ ID NO: 38208 - RNA, 19 nt, Artificial Sequence
  Description of Artificial Sequence: Synthetic oligonucleotide
  Sense strand starting at position 3695 of SEQ ID NO: 453
aagagaggcucugcaaguu

SEQ ID NO: 38209 - RNA, 19 nt, Artificial Sequence
  Description of Artificial Sequence: Synthetic oligonucleotide
  Antisense strand to SEQ ID NO: 38208
aacuugcagagccucucuu

SEQ ID NO: 38210 - RNA, 19 nt, Artificial Sequence
  Description of Artificial Sequence: Synthetic oligonucleotide
  Sense strand starting at position 3602 of SEQ ID NO: 453
ugccuaucuguaugucuga

SEQ ID NO: 38211 - RNA, 19 nt, Artificial Sequence
  Description of Artificial Sequence: Synthetic oligonucleotide
  Antisense strand to SEQ ID NO: 38210
ucagacauacagauaggca

SEQ ID NO: 38212 - RNA, 19 nt, Artificial Sequence
  Description of Artificial Sequence: Synthetic oligonucleotide
  Sense strand starting at position 3498 of SEQ ID NO: 453
ugcuaaugauguuucuuaa

SEQ ID NO: 38213 - RNA, 19 nt, Artificial Sequence
  Description of Artificial Sequence: Synthetic oligonucleotide
  Antisense strand to SEQ ID NO: 38212
uuaagaaacaucauuagca

SEQ ID NO: 38214 - RNA, 19 nt, Artificial Sequence
  Description of Artificial Sequence: Synthetic oligonucleotide
  Sense strand starting at position 3462 of SEQ ID NO: 453
agucuucuuuguuccugau

SEQ ID NO: 38215 - RNA, 19 nt, Artificial Sequence
  Description of Artificial Sequence: Synthetic oligonucleotide
  Antisense strand to SEQ ID NO: 38214
aucaggaacaaagaagacu

SEQ ID NO: 38216 - RNA, 19 nt, Artificial Sequence
  Description of Artificial Sequence: Synthetic oligonucleotide
  Sense strand starting at position 3457 of SEQ ID NO: 453
gagauagucuucuuuguuc

SEQ ID NO: 38217 - RNA, 19 nt, Artificial Sequence
  Description of Artificial Sequence: Synthetic oligonucleotide
  Antisense strand to SEQ ID NO: 38216
gaacaaagaagacuaucuc

SEQ ID NO: 38218 - RNA, 19 nt, Artificial Sequence
  Description of Artificial Sequence: Synthetic oligonucleotide
  Sense strand starting at position 3266 of SEQ ID NO: 453
ggaucauggcuccaugucu

SEQ ID NO: 38219 - RNA, 19 nt, Artificial Sequence
  Description of Artificial Sequence: Synthetic oligonucleotide
  Antisense strand to SEQ ID NO: 38218
agacauggagccaugaucc

SEQ ID NO: 38220 - RNA, 19 nt, Artificial Sequence
  Description of Artificial Sequence: Synthetic oligonucleotide
  Sense strand starting at position 3254 of SEQ ID NO: 453
ccugucaagccuggaucau

SEQ ID NO: 38221 - RNA, 19 nt, Artificial Sequence
  Description of Artificial Sequence: Synthetic oligonucleotide
  Antisense strand to SEQ ID NO: 38220
augauccaggcuugacagg

SEQ ID NO: 38222 - RNA, 19 nt, Artificial Sequence
  Description of Artificial Sequence: Synthetic oligonucleotide
  Sense strand starting at position 2989 of SEQ ID NO: 453
cugagauucuaagugcuca

SEQ ID NO: 38223 - RNA, 19 nt, Artificial Sequence
  Description of Artificial Sequence: Synthetic oligonucleotide
  Antisense strand to SEQ ID NO: 38222
ugagcacuuagaaucucag

SEQ ID NO: 38224 - RNA, 19 nt, Artificial Sequence
  Description of Artificial Sequence: Synthetic oligonucleotide
  Sense strand starting at position 2978 of SEQ ID NO: 453
uccugccagcucugagauu

SEQ ID NO: 38225 - RNA, 19 nt, Artificial Sequence
  Description of Artificial Sequence: Synthetic oligonucleotide
  Antisense strand to SEQ ID NO: 38224
aaucucagagcuggcagga

SEQ ID NO: 38226 - RNA, 19 nt, Artificial Sequence
  Description of Artificial Sequence: Synthetic oligonucleotide
  Sense strand starting at position 2946 of SEQ ID NO: 453
cugguaccugaagggauua

SEQ ID NO: 38227 - RNA, 19 nt, Artificial Sequence
  Description of Artificial Sequence: Synthetic oligonucleotide
  Antisense strand to SEQ ID NO: 38226
uaaucccuucagguaccag

SEQ ID NO: 38228 - RNA, 19 nt, Artificial Sequence
  Description of Artificial Sequence: Synthetic oligonucleotide
  Sense strand starting at position 2760 of SEQ ID NO: 453
guaacugaucuuggacacu

SEQ ID NO: 38229 - RNA, 19 nt, Artificial Sequence
  Description of Artificial Sequence: Synthetic oligonucleotide
  Antisense strand to SEQ ID NO: 38228
aguguccaagaucaguuac

SEQ ID NO: 38230 - RNA, 19 nt, Artificial Sequence
  Description of Artificial Sequence: Synthetic oligonucleotide
  Sense strand starting at position 2756 of SEQ ID NO: 453
cuguguaacugaucuugga

SEQ ID NO: 38231 - RNA, 19 nt, Artificial Sequence
  Description of Artificial Sequence: Synthetic oligonucleotide
  Antisense strand to SEQ ID NO: 38230
uccaagaucaguuacacag

SEQ ID NO: 38232 - RNA, 19 nt, Artificial Sequence
  Description of Artificial Sequence: Synthetic oligonucleotide
  Sense strand starting at position 2679 of SEQ ID NO: 453
acaauuacauggguuagua

SEQ ID NO: 38233 - RNA, 19 nt, Artificial Sequence
  Description of Artificial Sequence: Synthetic oligonucleotide
  Antisense strand to SEQ ID NO: 38232
uacuaacccauguaauugu

SEQ ID NO: 38234 - RNA, 19 nt, Artificial Sequence
  Description of Artificial Sequence: Synthetic oligonucleotide
  Sense strand starting at position 2576 of SEQ ID NO: 453
aucuaaauauuagaggaca

SEQ ID NO: 38235 - RNA, 19 nt, Artificial Sequence
  Description of Artificial Sequence: Synthetic oligonucleotide
  Antisense strand to SEQ ID NO: 38234
uguccucuaauauuuagau

SEQ ID NO: 38236 - RNA, 19 nt, Artificial Sequence
  Description of Artificial Sequence: Synthetic oligonucleotide
  Sense strand starting at position 2518 of SEQ ID NO: 453
ccauguuccucuuuauugu

SEQ ID NO: 38237 - RNA, 19 nt, Artificial Sequence
  Description of Artificial Sequence: Synthetic oligonucleotide
  Antisense strand to SEQ ID NO: 38236
acaauaaagaggaacaugg

SEQ ID NO: 38238 - RNA, 19 nt, Artificial Sequence
  Description of Artificial Sequence: Synthetic oligonucleotide
  Sense strand starting at position 2024 of SEQ ID NO: 453
gcaucucugcaucaagaug

SEQ ID NO: 38239 - RNA, 19 nt, Artificial Sequence
  Description of Artificial Sequence: Synthetic oligonucleotide
  Antisense strand to SEQ ID NO: 38238
caucuugaugcagagaugc

SEQ ID NO: 38240 - RNA, 19 nt, Artificial Sequence
  Description of Artificial Sequence: Synthetic oligonucleotide
  Sense strand starting at position 2020 of SEQ ID NO: 453
ugcagcaucucugcaucaa

SEQ ID NO: 38241 - RNA, 19 nt, Artificial Sequence
  Description of Artificial Sequence: Synthetic oligonucleotide
  Antisense strand to SEQ ID NO: 38240
uugaugcagagaugcugca

SEQ ID NO: 38242 - RNA, 19 nt, Artificial Sequence
  Description of Artificial Sequence: Synthetic oligonucleotide
  Sense strand starting at position 1073 of SEQ ID NO: 453
gccaaacuuugugcaaauu

SEQ ID NO: 38243 - RNA, 19 nt, Artificial Sequence
  Description of Artificial Sequence: Synthetic oligonucleotide
  Antisense strand to SEQ ID NO: 38242
aauuugcacaaaguuuggc

SEQ ID NO: 38244 - RNA, 19 nt, Artificial Sequence
  Description of Artificial Sequence: Synthetic oligonucleotide
  Sense strand starting at position 879 of SEQ ID NO: 453
gagagacccucuuggagaa

SEQ ID NO: 38245 - RNA, 19 nt, Artificial Sequence
  Description of Artificial Sequence: Synthetic oligonucleotide
  Antisense strand to SEQ ID NO: 38244
uucuccaagagggucucuc

SEQ ID NO: 38246 - RNA, 19 nt, Artificial Sequence
  Description of Artificial Sequence: Synthetic oligonucleotide
  Sense strand starting at position 580 of SEQ ID NO: 453
aacuguugcccagacgaga

SEQ ID NO: 38247 - RNA, 19 nt, Artificial Sequence
  Description of Artificial Sequence: Synthetic oligonucleotide
  Antisense strand to SEQ ID NO: 38246
ucucgucugggcaacaguu

SEQ ID NO: 38248 - RNA, 19 nt, Artificial Sequence
  Description of Artificial Sequence: Synthetic oligonucleotide
  Sense strand starting at position 578 of SEQ ID NO: 453
gaaacuguugcccagacga

SEQ ID NO: 38249 - RNA, 19 nt, Artificial Sequence
  Description of Artificial Sequence: Synthetic oligonucleotide
  Antisense strand to SEQ ID NO: 38248
ucgucugggcaacaguuuc

SEQ ID NO: 38250 - RNA, 19 nt, Artificial Sequence
  Description of Artificial Sequence: Synthetic oligonucleotide
  Sense strand starting at position 545 of SEQ ID NO: 453
gcgucuuuggccagacggu

SEQ ID NO: 38251 - RNA, 19 nt, Artificial Sequence
  Description of Artificial Sequence: Synthetic oligonucleotide
  Antisense strand to SEQ ID NO: 38250
accgucuggccaaagacgc

SEQ ID NO: 38252 - RNA, 19 nt, Artificial Sequence
  Description of Artificial Sequence: Synthetic oligonucleotide
  Sense strand starting at position 330 of SEQ ID NO: 453
ggaugcugcugucuuuaag

SEQ ID NO: 38253 - RNA, 19 nt, Artificial Sequence
  Description of Artificial Sequence: Synthetic oligonucleotide
  Antisense strand to SEQ ID NO: 38252
cuuaaagacagcagcaucc

SEQ ID NO: 38254 - RNA, 19 nt, Artificial Sequence
  Description of Artificial Sequence: Synthetic oligonucleotide
  Sense strand starting at position 217 of SEQ ID NO: 453
aggacuuccacgggagauu

SEQ ID NO: 38255 - RNA, 19 nt, Artificial Sequence
  Description of Artificial Sequence: Synthetic oligonucleotide
  Antisense strand to SEQ ID NO: 38254
aaucucccguggaaguccu

SEQ ID NO: 38256 - RNA, 19 nt, Artificial Sequence
  Description of Artificial Sequence: Synthetic oligonucleotide
  Sense strand starting at position 216 of SEQ ID NO: 453
gaggacuuccacgggagau

SEQ ID NO: 38257 - RNA, 19 nt, Artificial Sequence
  Description of Artificial Sequence: Synthetic oligonucleotide
  Antisense strand to SEQ ID NO: 38256
aucucccguggaaguccuc

SEQ ID NO: 38258 - RNA, 19 nt, Artificial Sequence
  Description of Artificial Sequence: Synthetic oligonucleotide
  Sense strand starting at position 215 of SEQ ID NO: 453
ugaggacuuccacgggaga

SEQ ID NO: 38259 - RNA, 19 nt, Artificial Sequence
  Description of Artificial Sequence: Synthetic oligonucleotide
  Antisense strand to SEQ ID NO: 38258
ucucccguggaaguccuca

SEQ ID NO: 38260 - RNA, 19 nt, Artificial Sequence
  Description of Artificial Sequence: Synthetic oligonucleotide
  Sense strand starting at position 204 of SEQ ID NO: 453
cucuuauucgcugaggacu

SEQ ID NO: 38261 - RNA, 19 nt, Artificial Sequence
  Description of Artificial Sequence: Synthetic oligonucleotide
  Antisense strand to SEQ ID NO: 38260
aguccucagcgaauaagag

SEQ ID NO: 38262 - RNA, 19 nt, Artificial Sequence
  Description of Artificial Sequence: Synthetic oligonucleotide
  Sense strand starting at position 203 of SEQ ID NO: 453
ccucuuauucgcugaggac

SEQ ID NO: 38263 - RNA, 19 nt, Artificial Sequence
  Description of Artificial Sequence: Synthetic oligonucleotide
  Antisense strand to SEQ ID NO: 38262
guccucagcgaauaagagg

SEQ ID NO: 38264 - RNA, 19 nt, Artificial Sequence
  Description of Artificial Sequence: Synthetic oligonucleotide
  Sense strand starting at position 202 of SEQ ID NO: 453
cccucuuauucgcugagga

SEQ ID NO: 38265 - RNA, 19 nt, Artificial Sequence
  Description of Artificial Sequence: Synthetic oligonucleotide
  Antisense strand to SEQ ID NO: 38264
uccucagcgaauaagaggg

SEQ ID NO: 38266 - RNA, 19 nt, Artificial Sequence
  Description of Artificial Sequence: Synthetic oligonucleotide
  Sense strand starting at position 144 of SEQ ID NO: 453
gggugacuuugacaucauc

SEQ ID NO: 38267 - RNA, 19 nt, Artificial Sequence
  Description of Artificial Sequence: Synthetic oligonucleotide
  Antisense strand to SEQ ID NO: 38266
gaugaugucaaagucaccc

SEQ ID NO: 38268 - RNA, 19 nt, Artificial Sequence
  Description of Artificial Sequence: Synthetic oligonucleotide
  Sense strand starting at position 142 of SEQ ID NO: 453
uugggugacuuugacauca

SEQ ID NO: 38269 - RNA, 19 nt, Artificial Sequence
  Description of Artificial Sequence: Synthetic oligonucleotide
  Antisense strand to SEQ ID NO: 38268
ugaugucaaagucacccaa

SEQ ID NO: 38270 - RNA, 19 nt, Artificial Sequence
  Description of Artificial Sequence: Synthetic oligonucleotide
  Sense strand starting at position 3789 of SEQ ID NO: 454
cagggacauuuauagccau

SEQ ID NO: 38271 - RNA, 19 nt, Artificial Sequence
  Description of Artificial Sequence: Synthetic oligonucleotide
  Antisense strand to SEQ ID NO: 38270
auggcuauaaaugucccug

SEQ ID NO: 38272 - RNA, 19 nt, Artificial Sequence
  Description of Artificial Sequence: Synthetic oligonucleotide
  Sense strand starting at position 3757 of SEQ ID NO: 454
acaccugugggaugaaacu

SEQ ID NO: 38273 - RNA, 19 nt, Artificial Sequence
  Description of Artificial Sequence: Synthetic oligonucleotide
  Antisense strand to SEQ ID NO: 38272
aguuucaucccacaggugu

SEQ ID NO: 38274 - RNA, 19 nt, Artificial Sequence
  Description of Artificial Sequence: Synthetic oligonucleotide
  Sense strand starting at position 3699 of SEQ ID NO: 454
gacagagucaaugguauug

SEQ ID NO: 38275 - RNA, 19 nt, Artificial Sequence
  Description of Artificial Sequence: Synthetic oligonucleotide
  Antisense strand to SEQ ID NO: 38274
caauaccauugacucuguc

SEQ ID NO: 38276 - RNA, 19 nt, Artificial Sequence
  Description of Artificial Sequence: Synthetic oligonucleotide
  Sense strand starting at position 3640 of SEQ ID NO: 454
cagugcauuuaagauagaa

SEQ ID NO: 38277 - RNA, 19 nt, Artificial Sequence
  Description of Artificial Sequence: Synthetic oligonucleotide
  Antisense strand to SEQ ID NO: 38276
uucuaucuuaaaugcacug

SEQ ID NO: 38278 - RNA, 19 nt, Artificial Sequence
  Description of Artificial Sequence: Synthetic oligonucleotide
  Sense strand starting at position 3495 of SEQ ID NO: 454
cgcaauuaauauguacaga

SEQ ID NO: 38279 - RNA, 19 nt, Artificial Sequence
  Description of Artificial Sequence: Synthetic oligonucleotide
  Antisense strand to SEQ ID NO: 38278
ucuguacauauuaauugcg

SEQ ID NO: 38280 - RNA, 19 nt, Artificial Sequence
  Description of Artificial Sequence: Synthetic oligonucleotide
  Sense strand starting at position 3470 of SEQ ID NO: 454
cgugaauaacaugauguaa

SEQ ID NO: 38281 - RNA, 19 nt, Artificial Sequence
  Description of Artificial Sequence: Synthetic oligonucleotide
  Antisense strand to SEQ ID NO: 38280
uuacaucauguuauucacg

SEQ ID NO: 38282 - RNA, 19 nt, Artificial Sequence
  Description of Artificial Sequence: Synthetic oligonucleotide
  Sense strand starting at position 3469 of SEQ ID NO: 454
acgugaauaacaugaugua

SEQ ID NO: 38283 - RNA, 19 nt, Artificial Sequence
  Description of Artificial Sequence: Synthetic oligonucleotide
  Antisense strand to SEQ ID NO: 38282
uacaucauguuauucacgu

SEQ ID NO: 38284 - RNA, 19 nt, Artificial Sequence
  Description of Artificial Sequence: Synthetic oligonucleotide
  Sense strand starting at position 3422 of SEQ ID NO: 454
cucacuaaucguuaagacu

SEQ ID NO: 38285 - RNA, 19 nt, Artificial Sequence
  Description of Artificial Sequence: Synthetic oligonucleotide
  Antisense strand to SEQ ID NO: 38284
agucuuaacgauuagugag

SEQ ID NO: 38286 - RNA, 19 nt, Artificial Sequence
  Description of Artificial Sequence: Synthetic oligonucleotide
  Sense strand starting at position 3421 of SEQ ID NO: 454
ucucacuaaucguuaagac

SEQ ID NO: 38287 - RNA, 19 nt, Artificial Sequence
  Description of Artificial Sequence: Synthetic oligonucleotide
  Antisense strand to SEQ ID NO: 38286
gucuuaacgauuagugaga

SEQ ID NO: 38288 - RNA, 19 nt, Artificial Sequence
  Description of Artificial Sequence: Synthetic oligonucleotide
  Sense strand starting at position 3415 of SEQ ID NO: 454
ggacuuucucacuaaucgu

SEQ ID NO: 38289 - RNA, 19 nt, Artificial Sequence
  Description of Artificial Sequence: Synthetic oligonucleotide
  Antisense strand to SEQ ID NO: 38288
acgauuagugagaaagucc

SEQ ID NO: 38290 - RNA, 19 nt, Artificial Sequence
  Description of Artificial Sequence: Synthetic oligonucleotide
  Sense strand starting at position 3389 of SEQ ID NO: 454
ccuggucauauuggguaau

SEQ ID NO: 38291 - RNA, 19 nt, Artificial Sequence
  Description of Artificial Sequence: Synthetic oligonucleotide
  Antisense strand to SEQ ID NO: 38290
auuacccaauaugaccagg

SEQ ID NO: 38292 - RNA, 19 nt, Artificial Sequence
  Description of Artificial Sequence: Synthetic oligonucleotide
  Sense strand starting at position 3276 of SEQ ID NO: 454
gaugacuucugagucuaaa

SEQ ID NO: 38293 - RNA, 19 nt, Artificial Sequence
  Description of Artificial Sequence: Synthetic oligonucleotide
  Antisense strand to SEQ ID NO: 38292
uuuagacucagaagucauc

SEQ ID NO: 38294 - RNA, 19 nt, Artificial Sequence
  Description of Artificial Sequence: Synthetic oligonucleotide
  Sense strand starting at position 3269 of SEQ ID NO: 454
agucuuagaugacuucuga

SEQ ID NO: 38295 - RNA, 19 nt, Artificial Sequence
  Description of Artificial Sequence: Synthetic oligonucleotide
  Antisense strand to SEQ ID NO: 38294
ucagaagucaucuaagacu

SEQ ID NO: 38296 - RNA, 19 nt, Artificial Sequence
  Description of Artificial Sequence: Synthetic oligonucleotide
  Sense strand starting at position 3185 of SEQ ID NO: 454
uuuacaucaugucuauuga

SEQ ID NO: 38297 - RNA, 19 nt, Artificial Sequence
  Description of Artificial Sequence: Synthetic oligonucleotide
  Antisense strand to SEQ ID NO: 38296
ucaauagacaugauguaaa

SEQ ID NO: 38298 - RNA, 19 nt, Artificial Sequence
  Description of Artificial Sequence: Synthetic oligonucleotide
  Sense strand starting at position 3096 of SEQ ID NO: 454
uguguucugcaauauagaa

SEQ ID NO: 38299 - RNA, 19 nt, Artificial Sequence
  Description of Artificial Sequence: Synthetic oligonucleotide
  Antisense strand to SEQ ID NO: 38298
uucuauauugcagaacaca

SEQ ID NO: 38300 - RNA, 19 nt, Artificial Sequence
  Description of Artificial Sequence: Synthetic oligonucleotide
  Sense strand starting at position 3093 of SEQ ID NO: 454
auauguguucugcaauaua

SEQ ID NO: 38301 - RNA, 19 nt, Artificial Sequence
  Description of Artificial Sequence: Synthetic oligonucleotide
  Antisense strand to SEQ ID NO: 38300
uauauugcagaacacauau

SEQ ID NO: 38302 - RNA, 19 nt, Artificial Sequence
  Description of Artificial Sequence: Synthetic oligonucleotide
  Sense strand starting at position 2910 of SEQ ID NO: 454
cauguuuauggucagucau

SEQ ID NO: 38303 - RNA, 19 nt, Artificial Sequence
  Description of Artificial Sequence: Synthetic oligonucleotide
  Antisense strand to SEQ ID NO: 38302
augacugaccauaaacaug

SEQ ID NO: 38304 - RNA, 19 nt, Artificial Sequence
  Description of Artificial Sequence: Synthetic oligonucleotide
  Sense strand starting at position 2887 of SEQ ID NO: 454
ucagcagagucuuuauuaa

SEQ ID NO: 38305 - RNA, 19 nt, Artificial Sequence
  Description of Artificial Sequence: Synthetic oligonucleotide
  Antisense strand to SEQ ID NO: 38304
uuaauaaagacucugcuga

SEQ ID NO: 38306 - RNA, 19 nt, Artificial Sequence
  Description of Artificial Sequence: Synthetic oligonucleotide
  Sense strand starting at position 2874 of SEQ ID NO: 454
augaguuaaucucucagca

SEQ ID NO: 38307 - RNA, 19 nt, Artificial Sequence
  Description of Artificial Sequence: Synthetic oligonucleotide
  Antisense strand to SEQ ID NO: 38306
ugcugagagauuaacucau

SEQ ID NO: 38308 - RNA, 19 nt, Artificial Sequence
  Description of Artificial Sequence: Synthetic oligonucleotide
  Sense strand starting at position 2819 of SEQ ID NO: 454
gugagugaauaucuuagaa

SEQ ID NO: 38309 - RNA, 19 nt, Artificial Sequence
  Description of Artificial Sequence: Synthetic oligonucleotide
  Antisense strand to SEQ ID NO: 38308
uucuaagauauucacucac

SEQ ID NO: 38310 - RNA, 19 nt, Artificial Sequence
  Description of Artificial Sequence: Synthetic oligonucleotide
  Sense strand starting at position 2373 of SEQ ID NO: 454
ggaguuuguguggaaguuu

SEQ ID NO: 38311 - RNA, 19 nt, Artificial Sequence
  Description of Artificial Sequence: Synthetic oligonucleotide
  Antisense strand to SEQ ID NO: 38310
aaacuuccacacaaacucc

SEQ ID NO: 38312 - RNA, 19 nt, Artificial Sequence
  Description of Artificial Sequence: Synthetic oligonucleotide
  Sense strand starting at position 2370 of SEQ ID NO: 454
cgaggaguuuguguggaag

SEQ ID NO: 38313 - RNA, 19 nt, Artificial Sequence
  Description of Artificial Sequence: Synthetic oligonucleotide
  Antisense strand to SEQ ID NO: 38312
cuuccacacaaacuccucg

SEQ ID NO: 38314 - RNA, 19 nt, Artificial Sequence
  Description of Artificial Sequence: Synthetic oligonucleotide
  Sense strand starting at position 2296 of SEQ ID NO: 454
gguauauacguauauauca

SEQ ID NO: 38315 - RNA, 19 nt, Artificial Sequence
  Description of Artificial Sequence: Synthetic oligonucleotide
  Antisense strand to SEQ ID NO: 38314
ugauauauacguauauacc

SEQ ID NO: 38316 - RNA, 19 nt, Artificial Sequence
  Description of Artificial Sequence: Synthetic oligonucleotide
  Sense strand starting at position 1817 of SEQ ID NO: 454
ccuaguuuacaggguuacu

SEQ ID NO: 38317 - RNA, 19 nt, Artificial Sequence
  Description of Artificial Sequence: Synthetic oligonucleotide
  Antisense strand to SEQ ID NO: 38316
aguaacccuguaaacuagg

SEQ ID NO: 38318 - RNA, 19 nt, Artificial Sequence
  Description of Artificial Sequence: Synthetic oligonucleotide
  Sense strand starting at position 1763 of SEQ ID NO: 454
gcucauuuauucucuccga

SEQ ID NO: 38319 - RNA, 19 nt, Artificial Sequence
  Description of Artificial Sequence: Synthetic oligonucleotide
  Antisense strand to SEQ ID NO: 38318
ucggagagaauaaaugagc

SEQ ID NO: 38320 - RNA, 19 nt, Artificial Sequence
  Description of Artificial Sequence: Synthetic oligonucleotide
  Sense strand starting at position 1657 of SEQ ID NO: 454
ucuugaggcuuaucucaca

SEQ ID NO: 38321 - RNA, 19 nt, Artificial Sequence
  Description of Artificial Sequence: Synthetic oligonucleotide
  Antisense strand to SEQ ID NO: 38320
ugugagauaagccucaaga

SEQ ID NO: 38322 - RNA, 19 nt, Artificial Sequence
  Description of Artificial Sequence: Synthetic oligonucleotide
  Sense strand starting at position 1655 of SEQ ID NO: 454
gcucuugaggcuuaucuca

SEQ ID NO: 38323 - RNA, 19 nt, Artificial Sequence
  Description of Artificial Sequence: Synthetic oligonucleotide
  Antisense strand to SEQ ID NO: 38322
ugagauaagccucaagagc

SEQ ID NO: 38324 - RNA, 19 nt, Artificial Sequence
  Description of Artificial Sequence: Synthetic oligonucleotide
  Sense strand starting at position 1487 of SEQ ID NO: 454
ugaacuuuguaaucugaag

SEQ ID NO: 38325 - RNA, 19 nt, Artificial Sequence
  Description of Artificial Sequence: Synthetic oligonucleotide
  Antisense strand to SEQ ID NO: 38324
cuucagauuacaaaguuca

SEQ ID NO: 38326 - RNA, 19 nt, Artificial Sequence
  Description of Artificial Sequence: Synthetic oligonucleotide
  Sense strand starting at position 1284 of SEQ ID NO: 454
gugugacuuacccacuguu

SEQ ID NO: 38327 - RNA, 19 nt, Artificial Sequence
  Description of Artificial Sequence: Synthetic oligonucleotide
  Antisense strand to SEQ ID NO: 38326
aacaguggguaagucacac

SEQ ID NO: 38328 - RNA, 19 nt, Artificial Sequence
  Description of Artificial Sequence: Synthetic oligonucleotide
  Sense strand starting at position 1238 of SEQ ID NO: 454
caguauaagcucgauguau

SEQ ID NO: 38329 - RNA, 19 nt, Artificial Sequence
  Description of Artificial Sequence: Synthetic oligonucleotide
  Antisense strand to SEQ ID NO: 38328
auacaucgagcuuauacug

SEQ ID NO: 38330 - RNA, 19 nt, Artificial Sequence
  Description of Artificial Sequence: Synthetic oligonucleotide
  Sense strand starting at position 1150 of SEQ ID NO: 454
ugaauuaccaggcaagguu

SEQ ID NO: 38331 - RNA, 19 nt, Artificial Sequence
  Description of Artificial Sequence: Synthetic oligonucleotide
  Antisense strand to SEQ ID NO: 38330
aaccuugccugguaauuca

SEQ ID NO: 38332 - RNA, 19 nt, Artificial Sequence
  Description of Artificial Sequence: Synthetic oligonucleotide
  Sense strand starting at position 1138 of SEQ ID NO: 454
gucaaauaaggcugaauua

SEQ ID NO: 38333 - RNA, 19 nt, Artificial Sequence
  Description of Artificial Sequence: Synthetic oligonucleotide
  Antisense strand to SEQ ID NO: 38332
uaauucagccuuauuugac

SEQ ID NO: 38334 - RNA, 19 nt, Artificial Sequence
  Description of Artificial Sequence: Synthetic oligonucleotide
  Sense strand starting at position 1128 of SEQ ID NO: 454
auguaagugcgucaaauaa

SEQ ID NO: 38335 - RNA, 19 nt, Artificial Sequence
  Description of Artificial Sequence: Synthetic oligonucleotide
  Antisense strand to SEQ ID NO: 38334
uuauuugacgcacuuacau

SEQ ID NO: 38336 - RNA, 19 nt, Artificial Sequence
  Description of Artificial Sequence: Synthetic oligonucleotide
  Sense strand starting at position 1101 of SEQ ID NO: 454
aguugacauucuccaaaga

SEQ ID NO: 38337 - RNA, 19 nt, Artificial Sequence
  Description of Artificial Sequence: Synthetic oligonucleotide
  Antisense strand to SEQ ID NO: 38336
ucuuuggagaaugucaacu

SEQ ID NO: 38338 - RNA, 19 nt, Artificial Sequence
  Description of Artificial Sequence: Synthetic oligonucleotide
  Sense strand starting at position 1019 of SEQ ID NO: 454
aaagucuaccagugaaaug

SEQ ID NO: 38339 - RNA, 19 nt, Artificial Sequence
  Description of Artificial Sequence: Synthetic oligonucleotide
  Antisense strand to SEQ ID NO: 38338
cauuucacugguagacuuu

SEQ ID NO: 38340 - RNA, 19 nt, Artificial Sequence
  Description of Artificial Sequence: Synthetic oligonucleotide
  Sense strand starting at position 949 of SEQ ID NO: 454
guagcucuaggucaauaau

SEQ ID NO: 38341 - RNA, 19 nt, Artificial Sequence
  Description of Artificial Sequence: Synthetic oligonucleotide
  Antisense strand to SEQ ID NO: 38340
auuauugaccuagagcuac

SEQ ID NO: 38342 - RNA, 19 nt, Artificial Sequence
  Description of Artificial Sequence: Synthetic oligonucleotide
  Sense strand starting at position 890 of SEQ ID NO: 454
gguauaugaugacuuacag

SEQ ID NO: 38343 - RNA, 19 nt, Artificial Sequence
  Description of Artificial Sequence: Synthetic oligonucleotide
  Antisense strand to SEQ ID NO: 38342
cuguaagucaucauauacc

SEQ ID NO: 38344 - RNA, 19 nt, Artificial Sequence
  Description of Artificial Sequence: Synthetic oligonucleotide
  Sense strand starting at position 316 of SEQ ID NO: 454
aguaauaacaagcgaguua

SEQ ID NO: 38345 - RNA, 19 nt, Artificial Sequence
  Description of Artificial Sequence: Synthetic oligonucleotide
  Antisense strand to SEQ ID NO: 38344
uaacucgcuuguuauuacu

SEQ ID NO: 38346 - RNA, 19 nt, Artificial Sequence
  Description of Artificial Sequence: Synthetic oligonucleotide
  Sense strand starting at position 306 of SEQ ID NO: 454
ccacuugcugaguaauaac

SEQ ID NO: 38347 - RNA, 19 nt, Artificial Sequence
  Description of Artificial Sequence: Synthetic oligonucleotide
  Antisense strand to SEQ ID NO: 38346
guuauuacucagcaagugg

SEQ ID NO: 38348 - RNA, 19 nt, Artificial Sequence
  Description of Artificial Sequence: Synthetic oligonucleotide
  Sense strand starting at position 139 of SEQ ID NO: 454
ugagguaugagagggcaaa

SEQ ID NO: 38349 - RNA, 19 nt, Artificial Sequence
  Description of Artificial Sequence: Synthetic oligonucleotide
  Antisense strand to SEQ ID NO: 38348
uuugcccucucauaccuca

SEQ ID NO: 38350 - RNA, 19 nt, Artificial Sequence
  Description of Artificial Sequence: Synthetic oligonucleotide
  Sense strand starting at position 3981 of SEQ ID NO: 456
agcauagaauagguugaaa

SEQ ID NO: 38351 - RNA, 19 nt, Artificial Sequence
  Description of Artificial Sequence: Synthetic oligonucleotide
  Antisense strand to SEQ ID NO: 38350
uuucaaccuauucuaugcu

SEQ ID NO: 38352 - RNA, 19 nt, Artificial Sequence
  Description of Artificial Sequence: Synthetic oligonucleotide
  Sense strand starting at position 3915 of SEQ ID NO: 456
cuguuuacacuauggaaau

SEQ ID NO: 38353 - RNA, 19 nt, Artificial Sequence
  Description of Artificial Sequence: Synthetic oligonucleotide
  Antisense strand to SEQ ID NO: 38352
auuuccauaguguaaacag

SEQ ID NO: 38354 - RNA, 19 nt, Artificial Sequence
  Description of Artificial Sequence: Synthetic oligonucleotide
  Sense strand starting at position 3904 of SEQ ID NO: 456
ccaugaugggacuguuuac

SEQ ID NO: 38355 - RNA, 19 nt, Artificial Sequence
  Description of Artificial Sequence: Synthetic oligonucleotide
  Antisense strand to SEQ ID NO: 38354
guaaacagucccaucaugg

SEQ ID NO: 38356 - RNA, 19 nt, Artificial Sequence
  Description of Artificial Sequence: Synthetic oligonucleotide
  Sense strand starting at position 3789 of SEQ ID NO: 456
aaauaaguagcuugaaguc

SEQ ID NO: 38357 - RNA, 19 nt, Artificial Sequence
  Description of Artificial Sequence: Synthetic oligonucleotide
  Antisense strand to SEQ ID NO: 38356
gacuucaagcuacuuauuu

SEQ ID NO: 38358 - RNA, 19 nt, Artificial Sequence
  Description of Artificial Sequence: Synthetic oligonucleotide
  Sense strand starting at position 3764 of SEQ ID NO: 456
uggcaacuccaugaucaau

SEQ ID NO: 38359 - RNA, 19 nt, Artificial Sequence
  Description of Artificial Sequence: Synthetic oligonucleotide
  Antisense strand to SEQ ID NO: 38358
auugaucauggaguugcca

SEQ ID NO: 38360 - RNA, 19 nt, Artificial Sequence
  Description of Artificial Sequence: Synthetic oligonucleotide
  Sense strand starting at position 3763 of SEQ ID NO: 456
uuggcaacuccaugaucaa

SEQ ID NO: 38361 - RNA, 19 nt, Artificial Sequence
  Description of Artificial Sequence: Synthetic oligonucleotide
  Antisense strand to SEQ ID NO: 38360
uugaucauggaguugccaa

SEQ ID NO: 38362 - RNA, 19 nt, Artificial Sequence
  Description of Artificial Sequence: Synthetic oligonucleotide
  Sense strand starting at position 3543 of SEQ ID NO: 456
cagggacauuuauagccau

SEQ ID NO: 38363 - RNA, 19 nt, Artificial Sequence
  Description of Artificial Sequence: Synthetic oligonucleotide
  Antisense strand to SEQ ID NO: 38362
auggcuauaaaugucccug

SEQ ID NO: 38364 - RNA, 19 nt, Artificial Sequence
  Description of Artificial Sequence: Synthetic oligonucleotide
  Sense strand starting at position 3511 of SEQ ID NO: 456
acaccugugggaugaaacu

SEQ ID NO: 38365 - RNA, 19 nt, Artificial Sequence
  Description of Artificial Sequence: Synthetic oligonucleotide
  Antisense strand to SEQ ID NO: 38364
aguuucaucccacaggugu

SEQ ID NO: 38366 - RNA, 19 nt, Artificial Sequence
  Description of Artificial Sequence: Synthetic oligonucleotide
  Sense strand starting at position 3453 of SEQ ID NO: 456
gacagagucaaugguauug

SEQ ID NO: 38367 - RNA, 19 nt, Artificial Sequence
  Description of Artificial Sequence: Synthetic oligonucleotide
  Antisense strand to SEQ ID NO: 38366
caauaccauugacucuguc

SEQ ID NO: 38368 - RNA, 19 nt, Artificial Sequence
  Description of Artificial Sequence: Synthetic oligonucleotide
  Sense strand starting at position 3394 of SEQ ID NO: 456
cagugcauuuaagauagaa

SEQ ID NO: 38369 - RNA, 19 nt, Artificial Sequence
  Description of Artificial Sequence: Synthetic oligonucleotide
  Antisense strand to SEQ ID NO: 38368
uucuaucuuaaaugcacug

SEQ ID NO: 38370 - RNA, 19 nt, Artificial Sequence
  Description of Artificial Sequence: Synthetic oligonucleotide
  Sense strand starting at position 3249 of SEQ ID NO: 456
cgcaauuaauauguacaga

SEQ ID NO: 38371 - RNA, 19 nt, Artificial Sequence
  Description of Artificial Sequence: Synthetic oligonucleotide
  Antisense strand to SEQ ID NO: 38370
ucuguacauauuaauugcg

SEQ ID NO: 38372 - RNA, 19 nt, Artificial Sequence
  Description of Artificial Sequence: Synthetic oligonucleotide
  Sense strand starting at position 3224 of SEQ ID NO: 456
cgugaauaacaugauguaa

SEQ ID NO: 38373 - RNA, 19 nt, Artificial Sequence
  Description of Artificial Sequence: Synthetic oligonucleotide
  Antisense strand to SEQ ID NO: 38372
uuacaucauguuauucacg

SEQ ID NO: 38374 - RNA, 19 nt, Artificial Sequence
  Description of Artificial Sequence: Synthetic oligonucleotide
  Sense strand starting at position 3223 of SEQ ID NO: 456
acgugaauaacaugaugua

SEQ ID NO: 38375 - RNA, 19 nt, Artificial Sequence
  Description of Artificial Sequence: Synthetic oligonucleotide
  Antisense strand to SEQ ID NO: 38374
uacaucauguuauucacgu

SEQ ID NO: 38376 - RNA, 19 nt, Artificial Sequence
  Description of Artificial Sequence: Synthetic oligonucleotide
  Sense strand starting at position 3176 of SEQ ID NO: 456
cucacuaaucguuaagacu

SEQ ID NO: 38377 - RNA, 19 nt, Artificial Sequence
  Description of Artificial Sequence: Synthetic oligonucleotide
  Antisense strand to SEQ ID NO: 38376
agucuuaacgauuagugag

SEQ ID NO: 38378 - RNA, 19 nt, Artificial Sequence
  Description of Artificial Sequence: Synthetic oligonucleotide
  Sense strand starting at position 3175 of SEQ ID NO: 456
ucucacuaaucguuaagac

SEQ ID NO: 38379 - RNA, 19 nt, Artificial Sequence
  Description of Artificial Sequence: Synthetic oligonucleotide
  Antisense strand to SEQ ID NO: 38378
gucuuaacgauuagugaga

SEQ ID NO: 38380 - RNA, 19 nt, Artificial Sequence
  Description of Artificial Sequence: Synthetic oligonucleotide
  Sense strand starting at position 3169 of SEQ ID NO: 456
ggacuuucucacuaaucgu

SEQ ID NO: 38381 - RNA, 19 nt, Artificial Sequence
  Description of Artificial Sequence: Synthetic oligonucleotide
  Antisense strand to SEQ ID NO: 38380
acgauuagugagaaagucc

SEQ ID NO: 38382 - RNA, 19 nt, Artificial Sequence
  Description of Artificial Sequence: Synthetic oligonucleotide
  Sense strand starting at position 3143 of SEQ ID NO: 456
ccuggucauauuggguaau

SEQ ID NO: 38383 - RNA, 19 nt, Artificial Sequence
  Description of Artificial Sequence: Synthetic oligonucleotide
  Antisense strand to SEQ ID NO: 38382
auuacccaauaugaccagg

SEQ ID NO: 38384 - RNA, 19 nt, Artificial Sequence
  Description of Artificial Sequence: Synthetic oligonucleotide
  Sense strand starting at position 3030 of SEQ ID NO: 456
gaugacuucugagucuaaa

SEQ ID NO: 38385 - RNA, 19 nt, Artificial Sequence
  Description of Artificial Sequence: Synthetic oligonucleotide
  Antisense strand to SEQ ID NO: 38384
uuuagacucagaagucauc

SEQ ID NO: 38386 - RNA, 19 nt, Artificial Sequence
  Description of Artificial Sequence: Synthetic oligonucleotide
  Sense strand starting at position 3023 of SEQ ID NO: 456
agucuuagaugacuucuga

SEQ ID NO: 38387 - RNA, 19 nt, Artificial Sequence
  Description of Artificial Sequence: Synthetic oligonucleotide
  Antisense strand to SEQ ID NO: 38386
ucagaagucaucuaagacu

SEQ ID NO: 38388 - RNA, 19 nt, Artificial Sequence
  Description of Artificial Sequence: Synthetic oligonucleotide
  Sense strand starting at position 2939 of SEQ ID NO: 456
uuuacaucaugucuauuga

SEQ ID NO: 38389 - RNA, 19 nt, Artificial Sequence
  Description of Artificial Sequence: Synthetic oligonucleotide
  Antisense strand to SEQ ID NO: 38388
ucaauagacaugauguaaa

SEQ ID NO: 38390 - RNA, 19 nt, Artificial Sequence
  Description of Artificial Sequence: Synthetic oligonucleotide
  Sense strand starting at position 2850 of SEQ ID NO: 456
uguguucugcaauauagaa

SEQ ID NO: 38391 - RNA, 19 nt, Artificial Sequence
  Description of Artificial Sequence: Synthetic oligonucleotide
  Antisense strand to SEQ ID NO: 38390
uucuauauugcagaacaca

SEQ ID NO: 38392 - RNA, 19 nt, Artificial Sequence
  Description of Artificial Sequence: Synthetic oligonucleotide
  Sense strand starting at position 2847 of SEQ ID NO: 456
auauguguucugcaauaua

SEQ ID NO: 38393 - RNA, 19 nt, Artificial Sequence
  Description of Artificial Sequence: Synthetic oligonucleotide
  Antisense strand to SEQ ID NO: 38392
uauauugcagaacacauau

SEQ ID NO: 38394 - RNA, 19 nt, Artificial Sequence
  Description of Artificial Sequence: Synthetic oligonucleotide
  Sense strand starting at position 2664 of SEQ ID NO: 456
cauguuuauggucagucau

SEQ ID NO: 38395 - RNA, 19 nt, Artificial Sequence
  Description of Artificial Sequence: Synthetic oligonucleotide
  Antisense strand to SEQ ID NO: 38394
augacugaccauaaacaug

SEQ ID NO: 38396 - RNA, 19 nt, Artificial Sequence
  Description of Artificial Sequence: Synthetic oligonucleotide
  Sense strand starting at position 2641 of SEQ ID NO: 456
ucagcagagucuuuauuaa

SEQ ID NO: 38397 - RNA, 19 nt, Artificial Sequence
  Description of Artificial Sequence: Synthetic oligonucleotide
  Antisense strand to SEQ ID NO: 38396
uuaauaaagacucugcuga

SEQ ID NO: 38398 - RNA, 19 nt, Artificial Sequence
  Description of Artificial Sequence: Synthetic oligonucleotide
  Sense strand starting at position 2628 of SEQ ID NO: 456
augaguuaaucucucagca

SEQ ID NO: 38399 - RNA, 19 nt, Artificial Sequence
  Description of Artificial Sequence: Synthetic oligonucleotide
  Antisense strand to SEQ ID NO: 38398
ugcugagagauuaacucau

SEQ ID NO: 38400 - RNA, 19 nt, Artificial Sequence
  Description of Artificial Sequence: Synthetic oligonucleotide
  Sense strand starting at position 2573 of SEQ ID NO: 456
gugagugaauaucuuagaa

SEQ ID NO: 38401 - RNA, 19 nt, Artificial Sequence
  Description of Artificial Sequence: Synthetic oligonucleotide
  Antisense strand to SEQ ID NO: 38400
uucuaagauauucacucac

SEQ ID NO: 38402 - RNA, 19 nt, Artificial Sequence
  Description of Artificial Sequence: Synthetic oligonucleotide
  Sense strand starting at position 2127 of SEQ ID NO: 456
ggaguuuguguggaaguuu

SEQ ID NO: 38403 - RNA, 19 nt, Artificial Sequence
  Description of Artificial Sequence: Synthetic oligonucleotide
  Antisense strand to SEQ ID NO: 38402
aaacuuccacacaaacucc

SEQ ID NO: 38404 - RNA, 19 nt, Artificial Sequence
  Description of Artificial Sequence: Synthetic oligonucleotide
  Sense strand starting at position 2050 of SEQ ID NO: 456
gguauauacguauauauca

SEQ ID NO: 38405 - RNA, 19 nt, Artificial Sequence
  Description of Artificial Sequence: Synthetic oligonucleotide
  Antisense strand to SEQ ID NO: 38404
ugauauauacguauauacc

SEQ ID NO: 38406 - RNA, 19 nt, Artificial Sequence
  Description of Artificial Sequence: Synthetic oligonucleotide
  Sense strand starting at position 1517 of SEQ ID NO: 456
gcucauuuauucucuccga

SEQ ID NO: 38407 - RNA, 19 nt, Artificial Sequence
  Description of Artificial Sequence: Synthetic oligonucleotide
  Antisense strand to SEQ ID NO: 38406
ucggagagaauaaaugagc

SEQ ID NO: 38408 - RNA, 19 nt, Artificial Sequence
  Description of Artificial Sequence: Synthetic oligonucleotide
  Sense strand starting at position 1411 of SEQ ID NO: 456
ucuugaggcuuaucucaca

SEQ ID NO: 38409 - RNA, 19 nt, Artificial Sequence
  Description of Artificial Sequence: Synthetic oligonucleotide
  Antisense strand to SEQ ID NO: 38408
ugugagauaagccucaaga

SEQ ID NO: 38410 - RNA, 19 nt, Artificial Sequence
  Description of Artificial Sequence: Synthetic oligonucleotide
  Sense strand starting at position 1241 of SEQ ID NO: 456
ugaacuuuguaaucugaag

SEQ ID NO: 38411 - RNA, 19 nt, Artificial Sequence
  Description of Artificial Sequence: Synthetic oligonucleotide
  Antisense strand to SEQ ID NO: 38410
cuucagauuacaaaguuca

SEQ ID NO: 38412 - RNA, 19 nt, Artificial Sequence
  Description of Artificial Sequence: Synthetic oligonucleotide
  Sense strand starting at position 904 of SEQ ID NO: 456
ugaauuaccaggcaagguu

SEQ ID NO: 38413 - RNA, 19 nt, Artificial Sequence
  Description of Artificial Sequence: Synthetic oligonucleotide
  Antisense strand to SEQ ID NO: 38412
aaccuugccugguaauuca

SEQ ID NO: 38414 - RNA, 19 nt, Artificial Sequence
  Description of Artificial Sequence: Synthetic oligonucleotide
  Sense strand starting at position 892 of SEQ ID NO: 456
gucaaauaaggcugaauua

SEQ ID NO: 38415 - RNA, 19 nt, Artificial Sequence
  Description of Artificial Sequence: Synthetic oligonucleotide
  Antisense strand to SEQ ID NO: 38414
uaauucagccuuauuugac

SEQ ID NO: 38416 - RNA, 19 nt, Artificial Sequence
  Description of Artificial Sequence: Synthetic oligonucleotide
  Sense strand starting at position 882 of SEQ ID NO: 456
auguaagugcgucaaauaa

SEQ ID NO: 38417 - RNA, 19 nt, Artificial Sequence
  Description of Artificial Sequence: Synthetic oligonucleotide
  Antisense strand to SEQ ID NO: 38416
uuauuugacgcacuuacau

SEQ ID NO: 38418 - RNA, 19 nt, Artificial Sequence
  Description of Artificial Sequence: Synthetic oligonucleotide
  Sense strand starting at position 855 of SEQ ID NO: 456
aguugacauucuccaaaga

SEQ ID NO: 38419 - RNA, 19 nt, Artificial Sequence
  Description of Artificial Sequence: Synthetic oligonucleotide
  Antisense strand to SEQ ID NO: 38418
ucuuuggagaaugucaacu

SEQ ID NO: 38420 - RNA, 19 nt, Artificial Sequence
  Description of Artificial Sequence: Synthetic oligonucleotide
  Sense strand starting at position 773 of SEQ ID NO: 456
aaagucuaccagugaaaug

SEQ ID NO: 38421 - RNA, 19 nt, Artificial Sequence
  Description of Artificial Sequence: Synthetic oligonucleotide
  Antisense strand to SEQ ID NO: 38420
cauuucacugguagacuuu

SEQ ID NO: 38422 - RNA, 19 nt, Artificial Sequence
  Description of Artificial Sequence: Synthetic oligonucleotide
  Sense strand starting at position 703 of SEQ ID NO: 456
guagcucuaggucaauaau

SEQ ID NO: 38423 - RNA, 19 nt, Artificial Sequence
  Description of Artificial Sequence: Synthetic oligonucleotide
  Antisense strand to SEQ ID NO: 38422
auuauugaccuagagcuac

SEQ ID NO: 38424 - RNA, 19 nt, Artificial Sequence
  Description of Artificial Sequence: Synthetic oligonucleotide
  Sense strand starting at position 644 of SEQ ID NO: 456
gguauaugaugacuuacag

SEQ ID NO: 38425 - RNA, 19 nt, Artificial Sequence
  Description of Artificial Sequence: Synthetic oligonucleotide
  Antisense strand to SEQ ID NO: 38424
cuguaagucaucauauacc

SEQ ID NO: 38426 - RNA, 19 nt, Artificial Sequence
  Description of Artificial Sequence: Synthetic oligonucleotide
  Sense strand starting at position 70 of SEQ ID NO: 456
aguaauaacaagcgaguua

SEQ ID NO: 38427 - RNA, 19 nt, Artificial Sequence
  Description of Artificial Sequence: Synthetic oligonucleotide
  Antisense strand to SEQ ID NO: 38426
uaacucgcuuguuauuacu

SEQ ID NO: 38428 - RNA, 19 nt, Artificial Sequence
  Description of Artificial Sequence: Synthetic oligonucleotide
  Sense strand starting at position 60 of SEQ ID NO: 456
ccacuugcugaguaauaac

SEQ ID NO: 38429 - RNA, 19 nt, Artificial Sequence
  Description of Artificial Sequence: Synthetic oligonucleotide
  Antisense strand to SEQ ID NO: 38428
guuauuacucagcaagugg

SEQ ID NO: 38430 - RNA, 19 nt, Artificial Sequence
  Description of Artificial Sequence: Synthetic oligonucleotide
  Sense strand starting at position 3807 of SEQ ID NO: 455
cagggacauuuauagccau

SEQ ID NO: 38431 - RNA, 19 nt, Artificial Sequence
  Description of Artificial Sequence: Synthetic oligonucleotide
  Antisense strand to SEQ ID NO: 38430
auggcuauaaaugucccug

SEQ ID NO: 38432 - RNA, 19 nt, Artificial Sequence
  Description of Artificial Sequence: Synthetic oligonucleotide
  Sense strand starting at position 3775 of SEQ ID NO: 455
acaccugugggaugaaacu

SEQ ID NO: 38433 - RNA, 19 nt, Artificial Sequence
  Description of Artificial Sequence: Synthetic oligonucleotide
  Antisense strand to SEQ ID NO: 38432
aguuucaucccacaggugu

SEQ ID NO: 38434 - RNA, 19 nt, Artificial Sequence
  Description of Artificial Sequence: Synthetic oligonucleotide
  Sense strand starting at position 3717 of SEQ ID NO: 455
gacagagucaaugguauug

SEQ ID NO: 38435 - RNA, 19 nt, Artificial Sequence
  Description of Artificial Sequence: Synthetic oligonucleotide
  Antisense strand to SEQ ID NO: 38434
caauaccauugacucuguc

SEQ ID NO: 38436 - RNA, 19 nt, Artificial Sequence
  Description of Artificial Sequence: Synthetic oligonucleotide
  Sense strand starting at position 3658 of SEQ ID NO: 455
cagugcauuuaagauagaa

SEQ ID NO: 38437 - RNA, 19 nt, Artificial Sequence
  Description of Artificial Sequence: Synthetic oligonucleotide
  Antisense strand to SEQ ID NO: 38436
uucuaucuuaaaugcacug

SEQ ID NO: 38438 - RNA, 19 nt, Artificial Sequence
  Description of Artificial Sequence: Synthetic oligonucleotide
  Sense strand starting at position 3513 of SEQ ID NO: 455
cgcaauuaauauguacaga

SEQ ID NO: 38439 - RNA, 19 nt, Artificial Sequence
  Description of Artificial Sequence: Synthetic oligonucleotide
  Antisense strand to SEQ ID NO: 38438
ucuguacauauuaauugcg

SEQ ID NO: 38440 - RNA, 19 nt, Artificial Sequence
  Description of Artificial Sequence: Synthetic oligonucleotide
  Sense strand starting at position 3488 of SEQ ID NO: 455
cgugaauaacaugauguaa

SEQ ID NO: 38441 - RNA, 19 nt, Artificial Sequence
  Description of Artificial Sequence: Synthetic oligonucleotide
  Antisense strand to SEQ ID NO: 38440
uuacaucauguuauucacg

SEQ ID NO: 38442 - RNA, 19 nt, Artificial Sequence
  Description of Artificial Sequence: Synthetic oligonucleotide
  Sense strand starting at position 3487 of SEQ ID NO: 455
acgugaauaacaugaugua

SEQ ID NO: 38443 - RNA, 19 nt, Artificial Sequence
  Description of Artificial Sequence: Synthetic oligonucleotide
  Antisense strand to SEQ ID NO: 38442
uacaucauguuauucacgu

SEQ ID NO: 38444 - RNA, 19 nt, Artificial Sequence
  Description of Artificial Sequence: Synthetic oligonucleotide
  Sense strand starting at position 3440 of SEQ ID NO: 455
cucacuaaucguuaagacu

SEQ ID NO: 38445 - RNA, 19 nt, Artificial Sequence
  Description of Artificial Sequence: Synthetic oligonucleotide
  Antisense strand to SEQ ID NO: 38444
agucuuaacgauuagugag

SEQ ID NO: 38446 - RNA, 19 nt, Artificial Sequence
  Description of Artificial Sequence: Synthetic oligonucleotide
  Sense strand starting at position 3439 of SEQ ID NO: 455
ucucacuaaucguuaagac

SEQ ID NO: 38447 - RNA, 19 nt, Artificial Sequence
  Description of Artificial Sequence: Synthetic oligonucleotide
  Antisense strand to SEQ ID NO: 38446
gucuuaacgauuagugaga

SEQ ID NO: 38448 - RNA, 19 nt, Artificial Sequence
  Description of Artificial Sequence: Synthetic oligonucleotide
  Sense strand starting at position 3433 of SEQ ID NO: 455
ggacuuucucacuaaucgu

SEQ ID NO: 38449 - RNA, 19 nt, Artificial Sequence
  Description of Artificial Sequence: Synthetic oligonucleotide
  Antisense strand to SEQ ID NO: 38448
acgauuagugagaaagucc

SEQ ID NO: 38450 - RNA, 19 nt, Artificial Sequence
  Description of Artificial Sequence: Synthetic oligonucleotide
  Sense strand starting at position 3407 of SEQ ID NO: 455
ccuggucauauuggguaau

SEQ ID NO: 38451 - RNA, 19 nt, Artificial Sequence
  Description of Artificial Sequence: Synthetic oligonucleotide
  Antisense strand to SEQ ID NO: 38450
auuacccaauaugaccagg

SEQ ID NO: 38452 - RNA, 19 nt, Artificial Sequence
  Description of Artificial Sequence: Synthetic oligonucleotide
  Sense strand starting at position 3294 of SEQ ID NO: 455
gaugacuucugagucuaaa

SEQ ID NO: 38453 - RNA, 19 nt, Artificial Sequence
  Description of Artificial Sequence: Synthetic oligonucleotide
  Antisense strand to SEQ ID NO: 38452
uuuagacucagaagucauc

SEQ ID NO: 38454 - RNA, 19 nt, Artificial Sequence
  Description of Artificial Sequence: Synthetic oligonucleotide
  Sense strand starting at position 3287 of SEQ ID NO: 455
agucuuagaugacuucuga

SEQ ID NO: 38455 - RNA, 19 nt, Artificial Sequence
  Description of Artificial Sequence: Synthetic oligonucleotide
  Antisense strand to SEQ ID NO: 38454
ucagaagucaucuaagacu

SEQ ID NO: 38456 - RNA, 19 nt, Artificial Sequence
  Description of Artificial Sequence: Synthetic oligonucleotide
  Sense strand starting at position 3203 of SEQ ID NO: 455
uuuacaucaugucuauuga

SEQ ID NO: 38457 - RNA, 19 nt, Artificial Sequence
  Description of Artificial Sequence: Synthetic oligonucleotide
  Antisense strand to SEQ ID NO: 38456
ucaauagacaugauguaaa

SEQ ID NO: 38458 - RNA, 19 nt, Artificial Sequence
  Description of Artificial Sequence: Synthetic oligonucleotide
  Sense strand starting at position 3114 of SEQ ID NO: 455
uguguucugcaauauagaa

SEQ ID NO: 38459 - RNA, 19 nt, Artificial Sequence
  Description of Artificial Sequence: Synthetic oligonucleotide
  Antisense strand to SEQ ID NO: 38458
uucuauauugcagaacaca

SEQ ID NO: 38460 - RNA, 19 nt, Artificial Sequence
  Description of Artificial Sequence: Synthetic oligonucleotide
  Sense strand starting at position 3111 of SEQ ID NO: 455
auauguguucugcaauaua

SEQ ID NO: 38461 - RNA, 19 nt, Artificial Sequence
  Description of Artificial Sequence: Synthetic oligonucleotide
  Antisense strand to SEQ ID NO: 38460
uauauugcagaacacauau

SEQ ID NO: 38462 - RNA, 19 nt, Artificial Sequence
  Description of Artificial Sequence: Synthetic oligonucleotide
  Sense strand starting at position 2928 of SEQ ID NO: 455
cauguuuauggucagucau

SEQ ID NO: 38463 - RNA, 19 nt, Artificial Sequence
  Description of Artificial Sequence: Synthetic oligonucleotide
  Antisense strand to SEQ ID NO: 38462
augacugaccauaaacaug

SEQ ID NO: 38464 - RNA, 19 nt, Artificial Sequence
  Description of Artificial Sequence: Synthetic oligonucleotide
  Sense strand starting at position 2905 of SEQ ID NO: 455
ucagcagagucuuuauuaa

SEQ ID NO: 38465 - RNA, 19 nt, Artificial Sequence
  Description of Artificial Sequence: Synthetic oligonucleotide
  Antisense strand to SEQ ID NO: 38464
uuaauaaagacucugcuga

SEQ ID NO: 38466 - RNA, 19 nt, Artificial Sequence
  Description of Artificial Sequence: Synthetic oligonucleotide
  Sense strand starting at position 2892 of SEQ ID NO: 455
augaguuaaucucucagca

SEQ ID NO: 38467 - RNA, 19 nt, Artificial Sequence
  Description of Artificial Sequence: Synthetic oligonucleotide
  Antisense strand to SEQ ID NO: 38466
ugcugagagauuaacucau

SEQ ID NO: 38468 - RNA, 19 nt, Artificial Sequence
  Description of Artificial Sequence: Synthetic oligonucleotide
  Sense strand starting at position 2837 of SEQ ID NO: 455
gugagugaauaucuuagaa

SEQ ID NO: 38469 - RNA, 19 nt, Artificial Sequence
  Description of Artificial Sequence: Synthetic oligonucleotide
  Antisense strand to SEQ ID NO: 38468
uucuaagauauucacucac

SEQ ID NO: 38470 - RNA, 19 nt, Artificial Sequence
  Description of Artificial Sequence: Synthetic oligonucleotide
  Sense strand starting at position 2391 of SEQ ID NO: 455
ggaguuuguguggaaguuu

SEQ ID NO: 38471 - RNA, 19 nt, Artificial Sequence
  Description of Artificial Sequence: Synthetic oligonucleotide
  Antisense strand to SEQ ID NO: 38470
aaacuuccacacaaacucc

SEQ ID NO: 38472 - RNA, 19 nt, Artificial Sequence
  Description of Artificial Sequence: Synthetic oligonucleotide
  Sense strand starting at position 2388 of SEQ ID NO: 455
cgaggaguuuguguggaag

SEQ ID NO: 38473 - RNA, 19 nt, Artificial Sequence
  Description of Artificial Sequence: Synthetic oligonucleotide
  Antisense strand to SEQ ID NO: 38472
cuuccacacaaacuccucg

SEQ ID NO: 38474 - RNA, 19 nt, Artificial Sequence
  Description of Artificial Sequence: Synthetic oligonucleotide
  Sense strand starting at position 2314 of SEQ ID NO: 455
gguauauacguauauauca

SEQ ID NO: 38475 - RNA, 19 nt, Artificial Sequence
  Description of Artificial Sequence: Synthetic oligonucleotide
  Antisense strand to SEQ ID NO: 38474
ugauauauacguauauacc

SEQ ID NO: 38476 - RNA, 19 nt, Artificial Sequence
  Description of Artificial Sequence: Synthetic oligonucleotide
  Sense strand starting at position 1835 of SEQ ID NO: 455
ccuaguuuacaggguuacu

SEQ ID NO: 38477 - RNA, 19 nt, Artificial Sequence
  Description of Artificial Sequence: Synthetic oligonucleotide
  Antisense strand to SEQ ID NO: 38476
aguaacccuguaaacuagg

SEQ ID NO: 38478 - RNA, 19 nt, Artificial Sequence
  Description of Artificial Sequence: Synthetic oligonucleotide
  Sense strand starting at position 1781 of SEQ ID NO: 455
gcucauuuauucucuccga

SEQ ID NO: 38479 - RNA, 19 nt, Artificial Sequence
  Description of Artificial Sequence: Synthetic oligonucleotide
  Antisense strand to SEQ ID NO: 38478
ucggagagaauaaaugagc

SEQ ID NO: 38480 - RNA, 19 nt, Artificial Sequence
  Description of Artificial Sequence: Synthetic oligonucleotide
  Sense strand starting at position 1675 of SEQ ID NO: 455
ucuugaggcuuaucucaca

SEQ ID NO: 38481 - RNA, 19 nt, Artificial Sequence
  Description of Artificial Sequence: Synthetic oligonucleotide
  Antisense strand to SEQ ID NO: 38480
ugugagauaagccucaaga

SEQ ID NO: 38482 - RNA, 19 nt, Artificial Sequence
  Description of Artificial Sequence: Synthetic oligonucleotide
  Sense strand starting at position 1673 of SEQ ID NO: 455
gcucuugaggcuuaucuca

SEQ ID NO: 38483 - RNA, 19 nt, Artificial Sequence
  Description of Artificial Sequence: Synthetic oligonucleotide
  Antisense strand to SEQ ID NO: 38482
ugagauaagccucaagagc

SEQ ID NO: 38484 - RNA, 19 nt, Artificial Sequence
  Description of Artificial Sequence: Synthetic oligonucleotide
  Sense strand starting at position 1505 of SEQ ID NO: 455
ugaacuuuguaaucugaag

SEQ ID NO: 38485 - RNA, 19 nt, Artificial Sequence
  Description of Artificial Sequence: Synthetic oligonucleotide
  Antisense strand to SEQ ID NO: 38484
cuucagauuacaaaguuca

SEQ ID NO: 38486 - RNA, 19 nt, Artificial Sequence
  Description of Artificial Sequence: Synthetic oligonucleotide
  Sense strand starting at position 1302 of SEQ ID NO: 455
gugugacuuacccacuguu

SEQ ID NO: 38487 - RNA, 19 nt, Artificial Sequence
  Description of Artificial Sequence: Synthetic oligonucleotide
  Antisense strand to SEQ ID NO: 38486
aacaguggguaagucacac

SEQ ID NO: 38488 - RNA, 19 nt, Artificial Sequence
  Description of Artificial Sequence: Synthetic oligonucleotide
  Sense strand starting at position 1256 of SEQ ID NO: 455
caguauaagcucgauguau

SEQ ID NO: 38489 - RNA, 19 nt, Artificial Sequence
  Description of Artificial Sequence: Synthetic oligonucleotide
  Antisense strand to SEQ ID NO: 38488
auacaucgagcuuauacug

SEQ ID NO: 38490 - RNA, 19 nt, Artificial Sequence
  Description of Artificial Sequence: Synthetic oligonucleotide
  Sense strand starting at position 1168 of SEQ ID NO: 455
ugaauuaccaggcaagguu

SEQ ID NO: 38491 - RNA, 19 nt, Artificial Sequence
  Description of Artificial Sequence: Synthetic oligonucleotide
  Antisense strand to SEQ ID NO: 38490
aaccuugccugguaauuca

SEQ ID NO: 38492 - RNA, 19 nt, Artificial Sequence
  Description of Artificial Sequence: Synthetic oligonucleotide
  Sense strand starting at position 1156 of SEQ ID NO: 455
gucaaauaaggcugaauua

SEQ ID NO: 38493 - RNA, 19 nt, Artificial Sequence
  Description of Artificial Sequence: Synthetic oligonucleotide
  Antisense strand to SEQ ID NO: 38492
uaauucagccuuauuugac

SEQ ID NO: 38494 - RNA, 19 nt, Artificial Sequence
  Description of Artificial Sequence: Synthetic oligonucleotide
  Sense strand starting at position 1146 of SEQ ID NO: 455
auguaagugcgucaaauaa

SEQ ID NO: 38495 - RNA, 19 nt, Artificial Sequence
  Description of Artificial Sequence: Synthetic oligonucleotide
  Antisense strand to SEQ ID NO: 38494
uuauuugacgcacuuacau

SEQ ID NO: 38496 - RNA, 19 nt, Artificial Sequence
  Description of Artificial Sequence: Synthetic oligonucleotide
  Sense strand starting at position 1119 of SEQ ID NO: 455
aguugacauucuccaaaga

SEQ ID NO: 38497 - RNA, 19 nt, Artificial Sequence
  Description of Artificial Sequence: Synthetic oligonucleotide
  Antisense strand to SEQ ID NO: 38496
ucuuuggagaaugucaacu

SEQ ID NO: 38498 - RNA, 19 nt, Artificial Sequence
  Description of Artificial Sequence: Synthetic oligonucleotide
  Sense strand starting at position 1037 of SEQ ID NO: 455
aaagucuaccagugaaaug

SEQ ID NO: 38499 - RNA, 19 nt, Artificial Sequence
  Description of Artificial Sequence: Synthetic oligonucleotide
  Antisense strand to SEQ ID NO: 38498
cauuucacugguagacuuu

SEQ ID NO: 38500 - RNA, 19 nt, Artificial Sequence
  Description of Artificial Sequence: Synthetic oligonucleotide
  Sense strand starting at position 967 of SEQ ID NO: 455
guagcucuaggucaauaau

SEQ ID NO: 38501 - RNA, 19 nt, Artificial Sequence
  Description of Artificial Sequence: Synthetic oligonucleotide
  Antisense strand to SEQ ID NO: 38500
auuauugaccuagagcuac

SEQ ID NO: 38502 - RNA, 19 nt, Artificial Sequence
  Description of Artificial Sequence: Synthetic oligonucleotide
  Sense strand starting at position 908 of SEQ ID NO: 455
gguauaugaugacuuacag

SEQ ID NO: 38503 - RNA, 19 nt, Artificial Sequence
  Description of Artificial Sequence: Synthetic oligonucleotide
  Antisense strand to SEQ ID NO: 38502
cuguaagucaucauauacc

SEQ ID NO: 38504 - RNA, 19 nt, Artificial Sequence
  Description of Artificial Sequence: Synthetic oligonucleotide
  Sense strand starting at position 334 of SEQ ID NO: 455
aguaauaacaagcgaguua

SEQ ID NO: 38505 - RNA, 19 nt, Artificial Sequence
  Description of Artificial Sequence: Synthetic oligonucleotide
  Antisense strand to SEQ ID NO: 38504
uaacucgcuuguuauuacu

SEQ ID NO: 38506 - RNA, 19 nt, Artificial Sequence
  Description of Artificial Sequence: Synthetic oligonucleotide
  Sense strand starting at position 324 of SEQ ID NO: 455
ccacuugcugaguaauaac

SEQ ID NO: 38507 - RNA, 19 nt, Artificial Sequence
  Description of Artificial Sequence: Synthetic oligonucleotide
  Antisense strand to SEQ ID NO: 38506
guuauuacucagcaagugg

SEQ ID NO: 38508 - RNA, 19 nt, Artificial Sequence
  Description of Artificial Sequence: Synthetic oligonucleotide
  Sense strand starting at position 157 of SEQ ID NO: 455
ugagguaugagagggcaaa

SEQ ID NO: 38509 - RNA, 19 nt, Artificial Sequence
  Description of Artificial Sequence: Synthetic oligonucleotide
  Antisense strand to SEQ ID NO: 38508
uuugcccucucauaccuca

SEQ ID NO: 38510 - RNA, 19 nt, Artificial Sequence
  Description of Artificial Sequence: Synthetic oligonucleotide
  Sense strand starting at position 138 of SEQ ID NO: 457
cagagcaacucugugucau

SEQ ID NO: 38511 - RNA, 19 nt, Artificial Sequence
  Description of Artificial Sequence: Synthetic oligonucleotide
  Antisense strand to SEQ ID NO: 38510
augacacagaguugcucug

SEQ ID NO: 38512 - RNA, 19 nt, Artificial Sequence
  Description of Artificial Sequence: Synthetic oligonucleotide
  Sense strand starting at position 139 of SEQ ID NO: 457
agagcaacucugugucaug

SEQ ID NO: 38513 - RNA, 19 nt, Artificial Sequence
  Description of Artificial Sequence: Synthetic oligonucleotide
  Antisense strand to SEQ ID NO: 38512
caugacacagaguugcucu

SEQ ID NO: 38514 - RNA, 19 nt, Artificial Sequence
  Description of Artificial Sequence: Synthetic oligonucleotide
  Sense strand starting at position 140 of SEQ ID NO: 457
gagcaacucugugucauga

SEQ ID NO: 38515 - RNA, 19 nt, Artificial Sequence
  Description of Artificial Sequence: Synthetic oligonucleotide
  Antisense strand to SEQ ID NO: 38514
ucaugacacagaguugcuc

SEQ ID NO: 38516 - RNA, 19 nt, Artificial Sequence
  Description of Artificial Sequence: Synthetic oligonucleotide
  Sense strand starting at position 148 of SEQ ID NO: 457
cugugucaugacuauguua

SEQ ID NO: 38517 - RNA, 19 nt, Artificial Sequence
  Description of Artificial Sequence: Synthetic oligonucleotide
  Antisense strand to SEQ ID NO: 38516
uaacauagucaugacacag

SEQ ID NO: 38518 - RNA, 19 nt, Artificial Sequence
  Description of Artificial Sequence: Synthetic oligonucleotide
  Sense strand starting at position 150 of SEQ ID NO: 457
gugucaugacuauguuaug

SEQ ID NO: 38519 - RNA, 19 nt, Artificial Sequence
  Description of Artificial Sequence: Synthetic oligonucleotide
  Antisense strand to SEQ ID NO: 38518
cauaacauagucaugacac

SEQ ID NO: 38520 - RNA, 19 nt, Artificial Sequence
  Description of Artificial Sequence: Synthetic oligonucleotide
  Sense strand starting at position 151 of SEQ ID NO: 457
ugucaugacuauguuauga

SEQ ID NO: 38521 - RNA, 19 nt, Artificial Sequence
  Description of Artificial Sequence: Synthetic oligonucleotide
  Antisense strand to SEQ ID NO: 38520
ucauaacauagucaugaca

SEQ ID NO: 38522 - RNA, 19 nt, Artificial Sequence
  Description of Artificial Sequence: Synthetic oligonucleotide
  Sense strand starting at position 182 of SEQ ID NO: 457
uguguuauggucuauguua

SEQ ID NO: 38523 - RNA, 19 nt, Artificial Sequence
  Description of Artificial Sequence: Synthetic oligonucleotide
  Antisense strand to SEQ ID NO: 38522
uaacauagaccauaacaca

SEQ ID NO: 38524 - RNA, 19 nt, Artificial Sequence
  Description of Artificial Sequence: Synthetic oligonucleotide
  Sense strand starting at position 213 of SEQ ID NO: 457
aaggaauagcuaugucauu

SEQ ID NO: 38525 - RNA, 19 nt, Artificial Sequence
  Description of Artificial Sequence: Synthetic oligonucleotide
  Antisense strand to SEQ ID NO: 38524
aaugacauagcuauuccuu

SEQ ID NO: 38526 - RNA, 19 nt, Artificial Sequence
  Description of Artificial Sequence: Synthetic oligonucleotide
  Sense strand starting at position 431 of SEQ ID NO: 457
aguccuuuauuugaaagaa

SEQ ID NO: 38527 - RNA, 19 nt, Artificial Sequence
  Description of Artificial Sequence: Synthetic oligonucleotide
  Antisense strand to SEQ ID NO: 38526
uucuuucaaauaaaggacu

SEQ ID NO: 38528 - RNA, 19 nt, Artificial Sequence
  Description of Artificial Sequence: Synthetic oligonucleotide
  Sense strand starting at position 1039 of SEQ ID NO: 457
agcuguuaccuaugguaag

SEQ ID NO: 38529 - RNA, 19 nt, Artificial Sequence
  Description of Artificial Sequence: Synthetic oligonucleotide
  Antisense strand to SEQ ID NO: 38528
cuuaccauagguaacagcu

SEQ ID NO: 38530 - RNA, 19 nt, Artificial Sequence
  Description of Artificial Sequence: Synthetic oligonucleotide
  Sense strand starting at position 1051 of SEQ ID NO: 457
ugguaagaacugcaugguu

SEQ ID NO: 38531 - RNA, 19 nt, Artificial Sequence
  Description of Artificial Sequence: Synthetic oligonucleotide
  Antisense strand to SEQ ID NO: 38530
aaccaugcaguucuuacca

SEQ ID NO: 38532 - RNA, 19 nt, Artificial Sequence
  Description of Artificial Sequence: Synthetic oligonucleotide
  Sense strand starting at position 1105 of SEQ ID NO: 457
ccacuuucucagugaucuu

SEQ ID NO: 38533 - RNA, 19 nt, Artificial Sequence
  Description of Artificial Sequence: Synthetic oligonucleotide
  Antisense strand to SEQ ID NO: 38532
aagaucacugagaaagugg

SEQ ID NO: 38534 - RNA, 19 nt, Artificial Sequence
  Description of Artificial Sequence: Synthetic oligonucleotide
  Sense strand starting at position 1115 of SEQ ID NO: 457
agugaucuucccugaucac

SEQ ID NO: 38535 - RNA, 19 nt, Artificial Sequence
  Description of Artificial Sequence: Synthetic oligonucleotide
  Antisense strand to SEQ ID NO: 38534
gugaucagggaagaucacu

SEQ ID NO: 38536 - RNA, 19 nt, Artificial Sequence
  Description of Artificial Sequence: Synthetic oligonucleotide
  Sense strand starting at position 1116 of SEQ ID NO: 457
gugaucuucccugaucacu

SEQ ID NO: 38537 - RNA, 19 nt, Artificial Sequence
  Description of Artificial Sequence: Synthetic oligonucleotide
  Antisense strand to SEQ ID NO: 38536
agugaucagggaagaucac

SEQ ID NO: 38538 - RNA, 19 nt, Artificial Sequence
  Description of Artificial Sequence: Synthetic oligonucleotide
  Sense strand starting at position 1506 of SEQ ID NO: 457
gguacuuacuacuuucgaa

SEQ ID NO: 38539 - RNA, 19 nt, Artificial Sequence
  Description of Artificial Sequence: Synthetic oligonucleotide
  Antisense strand to SEQ ID NO: 38538
uucgaaaguaguaaguacc

SEQ ID NO: 38540 - RNA, 19 nt, Artificial Sequence
  Description of Artificial Sequence: Synthetic oligonucleotide
  Sense strand starting at position 1513 of SEQ ID NO: 457
acuacuuucgaacacgauu

SEQ ID NO: 38541 - RNA, 19 nt, Artificial Sequence
  Description of Artificial Sequence: Synthetic oligonucleotide
  Antisense strand to SEQ ID NO: 38540
aaucguguucgaaaguagu

SEQ ID NO: 38542 - RNA, 19 nt, Artificial Sequence
  Description of Artificial Sequence: Synthetic oligonucleotide
  Sense strand starting at position 2190 of SEQ ID NO: 457
cgcuuuguagccuuaguga

SEQ ID NO: 38543 - RNA, 19 nt, Artificial Sequence
  Description of Artificial Sequence: Synthetic oligonucleotide
  Antisense strand to SEQ ID NO: 38542
ucacuaaggcuacaaagcg

SEQ ID NO: 38544 - RNA, 19 nt, Artificial Sequence
  Description of Artificial Sequence: Synthetic oligonucleotide
  Sense strand starting at position 2193 of SEQ ID NO: 457
uuuguagccuuagugauuu

SEQ ID NO: 38545 - RNA, 19 nt, Artificial Sequence
  Description of Artificial Sequence: Synthetic oligonucleotide
  Antisense strand to SEQ ID NO: 38544
aaaucacuaaggcuacaaa

SEQ ID NO: 38546 - RNA, 19 nt, Artificial Sequence
  Description of Artificial Sequence: Synthetic oligonucleotide
  Sense strand starting at position 2218 of SEQ ID NO: 457
ugcagucauuuaucuaugu

SEQ ID NO: 38547 - RNA, 19 nt, Artificial Sequence
  Description of Artificial Sequence: Synthetic oligonucleotide
  Antisense strand to SEQ ID NO: 38546
acauagauaaaugacugca

SEQ ID NO: 38548 - RNA, 19 nt, Artificial Sequence
  Description of Artificial Sequence: Synthetic oligonucleotide
  Sense strand starting at position 2219 of SEQ ID NO: 457
gcagucauuuaucuaugua

SEQ ID NO: 38549 - RNA, 19 nt, Artificial Sequence
  Description of Artificial Sequence: Synthetic oligonucleotide
  Antisense strand to SEQ ID NO: 38548
uacauagauaaaugacugc

SEQ ID NO: 38550 - RNA, 19 nt, Artificial Sequence
  Description of Artificial Sequence: Synthetic oligonucleotide
  Sense strand starting at position 2271 of SEQ ID NO: 457
ugcauuguucuagggauau

SEQ ID NO: 38551 - RNA, 19 nt, Artificial Sequence
  Description of Artificial Sequence: Synthetic oligonucleotide
  Antisense strand to SEQ ID NO: 38550
auaucccuagaacaaugca

SEQ ID NO: 38552 - RNA, 19 nt, Artificial Sequence
  Description of Artificial Sequence: Synthetic oligonucleotide
  Sense strand starting at position 2286 of SEQ ID NO: 457
auaugacagcuaggaauau

SEQ ID NO: 38553 - RNA, 19 nt, Artificial Sequence
  Description of Artificial Sequence: Synthetic oligonucleotide
  Antisense strand to SEQ ID NO: 38552
auauuccuagcugucauau

SEQ ID NO: 38554 - RNA, 19 nt, Artificial Sequence
  Description of Artificial Sequence: Synthetic oligonucleotide
  Sense strand starting at position 2298 of SEQ ID NO: 457
ggaauauggucccugccuu

SEQ ID NO: 38555 - RNA, 19 nt, Artificial Sequence
  Description of Artificial Sequence: Synthetic oligonucleotide
  Antisense strand to SEQ ID NO: 38554
aaggcagggaccauauucc

SEQ ID NO: 38556 - RNA, 19 nt, Artificial Sequence
  Description of Artificial Sequence: Synthetic oligonucleotide
  Sense strand starting at position 2391 of SEQ ID NO: 457
ccagguguagcuggacaaa

SEQ ID NO: 38557 - RNA, 19 nt, Artificial Sequence
  Description of Artificial Sequence: Synthetic oligonucleotide
  Antisense strand to SEQ ID NO: 38556
uuuguccagcuacaccugg

SEQ ID NO: 38558 - RNA, 19 nt, Artificial Sequence
  Description of Artificial Sequence: Synthetic oligonucleotide
  Sense strand starting at position 2468 of SEQ ID NO: 457
ugaauuaccuaagcaauga

SEQ ID NO: 38559 - RNA, 19 nt, Artificial Sequence
  Description of Artificial Sequence: Synthetic oligonucleotide
  Antisense strand to SEQ ID NO: 38558
ucauugcuuagguaauuca

SEQ ID NO: 38560 - RNA, 19 nt, Artificial Sequence
  Description of Artificial Sequence: Synthetic oligonucleotide
  Sense strand starting at position 2496 of SEQ ID NO: 457
ggagauguugacuggcaca

SEQ ID NO: 38561 - RNA, 19 nt, Artificial Sequence
  Description of Artificial Sequence: Synthetic oligonucleotide
  Antisense strand to SEQ ID NO: 38560
ugugccagucaacaucucc

SEQ ID NO: 38562 - RNA, 19 nt, Artificial Sequence
  Description of Artificial Sequence: Synthetic oligonucleotide
  Sense strand starting at position 2559 of SEQ ID NO: 457
guacucaaacagugcugaa

SEQ ID NO: 38563 - RNA, 19 nt, Artificial Sequence
  Description of Artificial Sequence: Synthetic oligonucleotide
  Antisense strand to SEQ ID NO: 38562
uucagcacuguuugaguac

SEQ ID NO: 38564 - RNA, 19 nt, Artificial Sequence
  Description of Artificial Sequence: Synthetic oligonucleotide
  Sense strand starting at position 2588 of SEQ ID NO: 457
ggcucuaaaugcuuuauau

SEQ ID NO: 38565 - RNA, 19 nt, Artificial Sequence
  Description of Artificial Sequence: Synthetic oligonucleotide
  Antisense strand to SEQ ID NO: 38564
auauaaagcauuuagagcc

SEQ ID NO: 38566 - RNA, 19 nt, Artificial Sequence
  Description of Artificial Sequence: Synthetic oligonucleotide
  Sense strand starting at position 2762 of SEQ ID NO: 457
gggaguugguaugcaauaa

SEQ ID NO: 38567 - RNA, 19 nt, Artificial Sequence
  Description of Artificial Sequence: Synthetic oligonucleotide
  Antisense strand to SEQ ID NO: 38566
uuauugcauaccaacuccc

SEQ ID NO: 38568 - RNA, 19 nt, Artificial Sequence
  Description of Artificial Sequence: Synthetic oligonucleotide
  Sense strand starting at position 2763 of SEQ ID NO: 457
ggaguugguaugcaauaau

SEQ ID NO: 38569 - RNA, 19 nt, Artificial Sequence
  Description of Artificial Sequence: Synthetic oligonucleotide
  Antisense strand to SEQ ID NO: 38568
auuauugcauaccaacucc

SEQ ID NO: 38570 - RNA, 19 nt, Artificial Sequence
  Description of Artificial Sequence: Synthetic oligonucleotide
  Sense strand starting at position 2766 of SEQ ID NO: 457
guugguaugcaauaauaau

SEQ ID NO: 38571 - RNA, 19 nt, Artificial Sequence
  Description of Artificial Sequence: Synthetic oligonucleotide
  Antisense strand to SEQ ID NO: 38570
auuauuauugcauaccaac

SEQ ID NO: 38572 - RNA, 19 nt, Artificial Sequence
  Description of Artificial Sequence: Synthetic oligonucleotide
  Sense strand starting at position 3203 of SEQ ID NO: 457
ugcuaagaaucaucaguuc

SEQ ID NO: 38573 - RNA, 19 nt, Artificial Sequence
  Description of Artificial Sequence: Synthetic oligonucleotide
  Antisense strand to SEQ ID NO: 38572
gaacugaugauucuuagca

SEQ ID NO: 38574 - RNA, 19 nt, Artificial Sequence
  Description of Artificial Sequence: Synthetic oligonucleotide
  Sense strand starting at position 3224 of SEQ ID NO: 457
uaaagcuuagauggaaagu

SEQ ID NO: 38575 - RNA, 19 nt, Artificial Sequence
  Description of Artificial Sequence: Synthetic oligonucleotide
  Antisense strand to SEQ ID NO: 38574
acuuuccaucuaagcuuua

SEQ ID NO: 38576 - RNA, 19 nt, Artificial Sequence
  Description of Artificial Sequence: Synthetic oligonucleotide
  Sense strand starting at position 3233 of SEQ ID NO: 457
gauggaaaguucuccuaag

SEQ ID NO: 38577 - RNA, 19 nt, Artificial Sequence
  Description of Artificial Sequence: Synthetic oligonucleotide
  Antisense strand to SEQ ID NO: 38576
cuuaggagaacuuuccauc

SEQ ID NO: 38578 - RNA, 19 nt, Artificial Sequence
  Description of Artificial Sequence: Synthetic oligonucleotide
  Sense strand starting at position 3234 of SEQ ID NO: 457
auggaaaguucuccuaaga

SEQ ID NO: 38579 - RNA, 19 nt, Artificial Sequence
  Description of Artificial Sequence: Synthetic oligonucleotide
  Antisense strand to SEQ ID NO: 38578
ucuuaggagaacuuuccau

SEQ ID NO: 38580 - RNA, 19 nt, Artificial Sequence
  Description of Artificial Sequence: Synthetic oligonucleotide
  Sense strand starting at position 3615 of SEQ ID NO: 457
uugaauucucaauggagcu

SEQ ID NO: 38581 - RNA, 19 nt, Artificial Sequence
  Description of Artificial Sequence: Synthetic oligonucleotide
  Antisense strand to SEQ ID NO: 38580
agcuccauugagaauucaa

SEQ ID NO: 38582 - RNA, 19 nt, Artificial Sequence
  Description of Artificial Sequence: Synthetic oligonucleotide
  Sense strand starting at position 3730 of SEQ ID NO: 457
acuuauuuauuggaaggca

SEQ ID NO: 38583 - RNA, 19 nt, Artificial Sequence
  Description of Artificial Sequence: Synthetic oligonucleotide
  Antisense strand to SEQ ID NO: 38582
ugccuuccaauaaauaagu

SEQ ID NO: 38584 - RNA, 19 nt, Artificial Sequence
  Description of Artificial Sequence: Synthetic oligonucleotide
  Sense strand starting at position 3748 of SEQ ID NO: 457
agccaauaaugucugaaau

SEQ ID NO: 38585 - RNA, 19 nt, Artificial Sequence
  Description of Artificial Sequence: Synthetic oligonucleotide
  Antisense strand to SEQ ID NO: 38584
auuucagacauuauuggcu

SEQ ID NO: 38586 - RNA, 19 nt, Artificial Sequence
  Description of Artificial Sequence: Synthetic oligonucleotide
  Sense strand starting at position 3749 of SEQ ID NO: 457
gccaauaaugucugaaauc

SEQ ID NO: 38587 - RNA, 19 nt, Artificial Sequence
  Description of Artificial Sequence: Synthetic oligonucleotide
  Antisense strand to SEQ ID NO: 38586
gauuucagacauuauuggc

SEQ ID NO: 38588 - RNA, 19 nt, Artificial Sequence
  Description of Artificial Sequence: Synthetic oligonucleotide
  Sense strand starting at position 3874 of SEQ ID NO: 457
auugacauuccaggcaaua

SEQ ID NO: 38589 - RNA, 19 nt, Artificial Sequence
  Description of Artificial Sequence: Synthetic oligonucleotide
  Antisense strand to SEQ ID NO: 38588
uauugccuggaaugucaau

SEQ ID NO: 38590 - RNA, 19 nt, Artificial Sequence
  Description of Artificial Sequence: Synthetic oligonucleotide
  Sense strand starting at position 3979 of SEQ ID NO: 458
aaucuauaguggcucugaa

SEQ ID NO: 38591 - RNA, 19 nt, Artificial Sequence
  Description of Artificial Sequence: Synthetic oligonucleotide
  Antisense strand to SEQ ID NO: 38590
uucagagccacuauagauu

SEQ ID NO: 38592 - RNA, 19 nt, Artificial Sequence
  Description of Artificial Sequence: Synthetic oligonucleotide
  Sense strand starting at position 3303 of SEQ ID NO: 458
gucccuguuauguuuguuu

SEQ ID NO: 38593 - RNA, 19 nt, Artificial Sequence
  Description of Artificial Sequence: Synthetic oligonucleotide
  Antisense strand to SEQ ID NO: 38592
aaacaaacauaacagggac

SEQ ID NO: 38594 - RNA, 19 nt, Artificial Sequence
  Description of Artificial Sequence: Synthetic oligonucleotide
  Sense strand starting at position 3230 of SEQ ID NO: 458
ggauaagagccggaagcua

SEQ ID NO: 38595 - RNA, 19 nt, Artificial Sequence
  Description of Artificial Sequence: Synthetic oligonucleotide
  Antisense strand to SEQ ID NO: 38594
uagcuuccggcucuuaucc

SEQ ID NO: 38596 - RNA, 19 nt, Artificial Sequence
  Description of Artificial Sequence: Synthetic oligonucleotide
  Sense strand starting at position 3014 of SEQ ID NO: 458
uaagauuaacgccaugaug

SEQ ID NO: 38597 - RNA, 19 nt, Artificial Sequence
  Description of Artificial Sequence: Synthetic oligonucleotide
  Antisense strand to SEQ ID NO: 38596
caucauggcguuaaucuua

SEQ ID NO: 38598 - RNA, 19 nt, Artificial Sequence
  Description of Artificial Sequence: Synthetic oligonucleotide
  Sense strand starting at position 2964 of SEQ ID NO: 458
gcuucuguugaggaaucua

SEQ ID NO: 38599 - RNA, 19 nt, Artificial Sequence
  Description of Artificial Sequence: Synthetic oligonucleotide
  Antisense strand to SEQ ID NO: 38598
uagauuccucaacagaagc

SEQ ID NO: 38600 - RNA, 19 nt, Artificial Sequence
  Description of Artificial Sequence: Synthetic oligonucleotide
  Sense strand starting at position 2849 of SEQ ID NO: 458
uaaauaccguggucaaaug

SEQ ID NO: 38601 - RNA, 19 nt, Artificial Sequence
  Description of Artificial Sequence: Synthetic oligonucleotide
  Antisense strand to SEQ ID NO: 38600
cauuugaccacgguauuua

SEQ ID NO: 38602 - RNA, 19 nt, Artificial Sequence
  Description of Artificial Sequence: Synthetic oligonucleotide
  Sense strand starting at position 2622 of SEQ ID NO: 458
ucgcuaucugauuaaacac

SEQ ID NO: 38603 - RNA, 19 nt, Artificial Sequence
  Description of Artificial Sequence: Synthetic oligonucleotide
  Antisense strand to SEQ ID NO: 38602
guguuuaaucagauagcga

SEQ ID NO: 38604 - RNA, 19 nt, Artificial Sequence
  Description of Artificial Sequence: Synthetic oligonucleotide
  Sense strand starting at position 2616 of SEQ ID NO: 458
agugccucgcuaucugauu

SEQ ID NO: 38605 - RNA, 19 nt, Artificial Sequence
  Description of Artificial Sequence: Synthetic oligonucleotide
  Antisense strand to SEQ ID NO: 38604
aaucagauagcgaggcacu

SEQ ID NO: 38606 - RNA, 19 nt, Artificial Sequence
  Description of Artificial Sequence: Synthetic oligonucleotide
  Sense strand starting at position 2496 of SEQ ID NO: 458
ggaagaagguggucagcua

SEQ ID NO: 38607 - RNA, 19 nt, Artificial Sequence
  Description of Artificial Sequence: Synthetic oligonucleotide
  Antisense strand to SEQ ID NO: 38606
uagcugaccaccuucuucc

SEQ ID NO: 38608 - RNA, 19 nt, Artificial Sequence
  Description of Artificial Sequence: Synthetic oligonucleotide
  Sense strand starting at position 2399 of SEQ ID NO: 458
gcgcuaacgccucuaugga

SEQ ID NO: 38609 - RNA, 19 nt, Artificial Sequence
  Description of Artificial Sequence: Synthetic oligonucleotide
  Antisense strand to SEQ ID NO: 38608
uccauagaggcguuagcgc

SEQ ID NO: 38610 - RNA, 19 nt, Artificial Sequence
  Description of Artificial Sequence: Synthetic oligonucleotide
  Sense strand starting at position 2273 of SEQ ID NO: 458
gacugcucugcuucguuau

SEQ ID NO: 38611 - RNA, 19 nt, Artificial Sequence
  Description of Artificial Sequence: Synthetic oligonucleotide
  Antisense strand to SEQ ID NO: 38610
auaacgaagcagagcaguc

SEQ ID NO: 38612 - RNA, 19 nt, Artificial Sequence
  Description of Artificial Sequence: Synthetic oligonucleotide
  Sense strand starting at position 1267 of SEQ ID NO: 458
ugcaauagucgguaagaau

SEQ ID NO: 38613 - RNA, 19 nt, Artificial Sequence
  Description of Artificial Sequence: Synthetic oligonucleotide
  Antisense strand to SEQ ID NO: 38612
auucuuaccgacuauugca

SEQ ID NO: 38614 - RNA, 19 nt, Artificial Sequence
  Description of Artificial Sequence: Synthetic oligonucleotide
  Sense strand starting at position 1254 of SEQ ID NO: 458
ugcuuugucguacugcaau

SEQ ID NO: 38615 - RNA, 19 nt, Artificial Sequence
  Description of Artificial Sequence: Synthetic oligonucleotide
  Antisense strand to SEQ ID NO: 38614
auugcaguacgacaaagca

SEQ ID NO: 38616 - RNA, 19 nt, Artificial Sequence
  Description of Artificial Sequence: Synthetic oligonucleotide
  Sense strand starting at position 1234 of SEQ ID NO: 458
uucuuuaaagaguaauggu

SEQ ID NO: 38617 - RNA, 19 nt, Artificial Sequence
  Description of Artificial Sequence: Synthetic oligonucleotide
  Antisense strand to SEQ ID NO: 38616
accauuacucuuuaaagaa

SEQ ID NO: 38618 - RNA, 19 nt, Artificial Sequence
  Description of Artificial Sequence: Synthetic oligonucleotide
  Sense strand starting at position 1226 of SEQ ID NO: 458
agagcaacuucuuuaaaga

SEQ ID NO: 38619 - RNA, 19 nt, Artificial Sequence
  Description of Artificial Sequence: Synthetic oligonucleotide
  Antisense strand to SEQ ID NO: 38618
ucuuuaaagaaguugcucu

SEQ ID NO: 38620 - RNA, 19 nt, Artificial Sequence
  Description of Artificial Sequence: Synthetic oligonucleotide
  Sense strand starting at position 1132 of SEQ ID NO: 458
uuuaucaucagugaagugu

SEQ ID NO: 38621 - RNA, 19 nt, Artificial Sequence
  Description of Artificial Sequence: Synthetic oligonucleotide
  Antisense strand to SEQ ID NO: 38620
acacuucacugaugauaaa

SEQ ID NO: 38622 - RNA, 19 nt, Artificial Sequence
  Description of Artificial Sequence: Synthetic oligonucleotide
  Sense strand starting at position 1131 of SEQ ID NO: 458
cuuuaucaucagugaagug

SEQ ID NO: 38623 - RNA, 19 nt, Artificial Sequence
  Description of Artificial Sequence: Synthetic oligonucleotide
  Antisense strand to SEQ ID NO: 38622
cacuucacugaugauaaag

SEQ ID NO: 38624 - RNA, 19 nt, Artificial Sequence
  Description of Artificial Sequence: Synthetic oligonucleotide
  Sense strand starting at position 1130 of SEQ ID NO: 458
acuuuaucaucagugaagu

SEQ ID NO: 38625 - RNA, 19 nt, Artificial Sequence
  Description of Artificial Sequence: Synthetic oligonucleotide
  Antisense strand to SEQ ID NO: 38624
acuucacugaugauaaagu

SEQ ID NO: 38626 - RNA, 19 nt, Artificial Sequence
  Description of Artificial Sequence: Synthetic oligonucleotide
  Sense strand starting at position 1127 of SEQ ID NO: 458
ugaacuuuaucaucaguga

SEQ ID NO: 38627 - RNA, 19 nt, Artificial Sequence
  Description of Artificial Sequence: Synthetic oligonucleotide
  Antisense strand to SEQ ID NO: 38626
ucacugaugauaaaguuca

SEQ ID NO: 38628 - RNA, 19 nt, Artificial Sequence
  Description of Artificial Sequence: Synthetic oligonucleotide
  Sense strand starting at position 918 of SEQ ID NO: 458
auuguagaugucuacuaac

SEQ ID NO: 38629 - RNA, 19 nt, Artificial Sequence
  Description of Artificial Sequence: Synthetic oligonucleotide
  Antisense strand to SEQ ID NO: 38628
guuaguagacaucuacaau

SEQ ID NO: 38630 - RNA, 19 nt, Artificial Sequence
  Description of Artificial Sequence: Synthetic oligonucleotide
  Sense strand starting at position 813 of SEQ ID NO: 458
auguaaucugaaugcaaau

SEQ ID NO: 38631 - RNA, 19 nt, Artificial Sequence
  Description of Artificial Sequence: Synthetic oligonucleotide
  Antisense strand to SEQ ID NO: 38630
auuugcauucagauuacau

SEQ ID NO: 38632 - RNA, 19 nt, Artificial Sequence
  Description of Artificial Sequence: Synthetic oligonucleotide
  Sense strand starting at position 809 of SEQ ID NO: 458
ggagauguaaucugaaugc

SEQ ID NO: 38633 - RNA, 19 nt, Artificial Sequence
  Description of Artificial Sequence: Synthetic oligonucleotide
  Antisense strand to SEQ ID NO: 38632
gcauucagauuacaucucc

SEQ ID NO: 38634 - RNA, 19 nt, Artificial Sequence
  Description of Artificial Sequence: Synthetic oligonucleotide
  Sense strand starting at position 717 of SEQ ID NO: 458
cauuauuccuggguauaga

SEQ ID NO: 38635 - RNA, 19 nt, Artificial Sequence
  Description of Artificial Sequence: Synthetic oligonucleotide
  Antisense strand to SEQ ID NO: 38634
ucuauacccaggaauaaug

SEQ ID NO: 38636 - RNA, 19 nt, Artificial Sequence
  Description of Artificial Sequence: Synthetic oligonucleotide
  Sense strand starting at position 716 of SEQ ID NO: 458
acauuauuccuggguauag

SEQ ID NO: 38637 - RNA, 19 nt, Artificial Sequence
  Description of Artificial Sequence: Synthetic oligonucleotide
  Antisense strand to SEQ ID NO: 38636
cuauacccaggaauaaugu

SEQ ID NO: 38638 - RNA, 19 nt, Artificial Sequence
  Description of Artificial Sequence: Synthetic oligonucleotide
  Sense strand starting at position 679 of SEQ ID NO: 458
aguggucuaauaggaauau

SEQ ID NO: 38639 - RNA, 19 nt, Artificial Sequence
  Description of Artificial Sequence: Synthetic oligonucleotide
  Antisense strand to SEQ ID NO: 38638
auauuccuauuagaccacu

SEQ ID NO: 38640 - RNA, 19 nt, Artificial Sequence
  Description of Artificial Sequence: Synthetic oligonucleotide
  Sense strand starting at position 633 of SEQ ID NO: 458
cuguacauucuuugagaca

SEQ ID NO: 38641 - RNA, 19 nt, Artificial Sequence
  Description of Artificial Sequence: Synthetic oligonucleotide
  Antisense strand to SEQ ID NO: 38640
ugucucaaagaauguacag

SEQ ID NO: 38642 - RNA, 19 nt, Artificial Sequence
  Description of Artificial Sequence: Synthetic oligonucleotide
  Sense strand starting at position 632 of SEQ ID NO: 458
ucuguacauucuuugagac

SEQ ID NO: 38643 - RNA, 19 nt, Artificial Sequence
  Description of Artificial Sequence: Synthetic oligonucleotide
  Antisense strand to SEQ ID NO: 38642
gucucaaagaauguacaga

SEQ ID NO: 38644 - RNA, 19 nt, Artificial Sequence
  Description of Artificial Sequence: Synthetic oligonucleotide
  Sense strand starting at position 631 of SEQ ID NO: 458
uucuguacauucuuugaga

SEQ ID NO: 38645 - RNA, 19 nt, Artificial Sequence
  Description of Artificial Sequence: Synthetic oligonucleotide
  Antisense strand to SEQ ID NO: 38644
ucucaaagaauguacagaa

SEQ ID NO: 38646 - RNA, 19 nt, Artificial Sequence
  Description of Artificial Sequence: Synthetic oligonucleotide
  Sense strand starting at position 626 of SEQ ID NO: 458
guugauucuguacauucuu

SEQ ID NO: 38647 - RNA, 19 nt, Artificial Sequence
  Description of Artificial Sequence: Synthetic oligonucleotide
  Antisense strand to SEQ ID NO: 38646
aagaauguacagaaucaac

SEQ ID NO: 38648 - RNA, 19 nt, Artificial Sequence
  Description of Artificial Sequence: Synthetic oligonucleotide
  Sense strand starting at position 616 of SEQ ID NO: 458
ggaucaaugaguugauucu

SEQ ID NO: 38649 - RNA, 19 nt, Artificial Sequence
  Description of Artificial Sequence: Synthetic oligonucleotide
  Antisense strand to SEQ ID NO: 38648
agaaucaacucauugaucc

SEQ ID NO: 38650 - RNA, 19 nt, Artificial Sequence
  Description of Artificial Sequence: Synthetic oligonucleotide
  Sense strand starting at position 614 of SEQ ID NO: 458
cuggaucaaugaguugauu

SEQ ID NO: 38651 - RNA, 19 nt, Artificial Sequence
  Description of Artificial Sequence: Synthetic oligonucleotide
  Antisense strand to SEQ ID NO: 38650
aaucaacucauugauccag

SEQ ID NO: 38652 - RNA, 19 nt, Artificial Sequence
  Description of Artificial Sequence: Synthetic oligonucleotide
  Sense strand starting at position 471 of SEQ ID NO: 458
gauucuugacgucaacaag

SEQ ID NO: 38653 - RNA, 19 nt, Artificial Sequence
  Description of Artificial Sequence: Synthetic oligonucleotide
  Antisense strand to SEQ ID NO: 38652
cuuguugacgucaagaauc

SEQ ID NO: 38654 - RNA, 19 nt, Artificial Sequence
  Description of Artificial Sequence: Synthetic oligonucleotide
  Sense strand starting at position 454 of SEQ ID NO: 458
auuauucuguacucugaga

SEQ ID NO: 38655 - RNA, 19 nt, Artificial Sequence
  Description of Artificial Sequence: Synthetic oligonucleotide
  Antisense strand to SEQ ID NO: 38654
ucucagaguacagaauaau

SEQ ID NO: 38656 - RNA, 19 nt, Artificial Sequence
  Description of Artificial Sequence: Synthetic oligonucleotide
  Sense strand starting at position 451 of SEQ ID NO: 458
gagauuauucuguacucug

SEQ ID NO: 38657 - RNA, 19 nt, Artificial Sequence
  Description of Artificial Sequence: Synthetic oligonucleotide
  Antisense strand to SEQ ID NO: 38656
cagaguacagaauaaucuc

SEQ ID NO: 38658 - RNA, 19 nt, Artificial Sequence
  Description of Artificial Sequence: Synthetic oligonucleotide
  Sense strand starting at position 450 of SEQ ID NO: 458
ugagauuauucuguacucu

SEQ ID NO: 38659 - RNA, 19 nt, Artificial Sequence
  Description of Artificial Sequence: Synthetic oligonucleotide
  Antisense strand to SEQ ID NO: 38658
agaguacagaauaaucuca

SEQ ID NO: 38660 - RNA, 19 nt, Artificial Sequence
  Description of Artificial Sequence: Synthetic oligonucleotide
  Sense strand starting at position 414 of SEQ ID NO: 458
gguguugagccuuaagaag

SEQ ID NO: 38661 - RNA, 19 nt, Artificial Sequence
  Description of Artificial Sequence: Synthetic oligonucleotide
  Antisense strand to SEQ ID NO: 38660
cuucuuaaggcucaacacc

SEQ ID NO: 38662 - RNA, 19 nt, Artificial Sequence
  Description of Artificial Sequence: Synthetic oligonucleotide
  Sense strand starting at position 389 of SEQ ID NO: 458
gggcuagugagucagagaa

SEQ ID NO: 38663 - RNA, 19 nt, Artificial Sequence
  Description of Artificial Sequence: Synthetic oligonucleotide
  Antisense strand to SEQ ID NO: 38662
uucucugacucacuagccc

SEQ ID NO: 38664 - RNA, 19 nt, Artificial Sequence
  Description of Artificial Sequence: Synthetic oligonucleotide
  Sense strand starting at position 363 of SEQ ID NO: 458
gucaacucagagugggaaa

SEQ ID NO: 38665 - RNA, 19 nt, Artificial Sequence
  Description of Artificial Sequence: Synthetic oligonucleotide
  Antisense strand to SEQ ID NO: 38664
uuucccacucugaguugac

SEQ ID NO: 38666 - RNA, 19 nt, Artificial Sequence
  Description of Artificial Sequence: Synthetic oligonucleotide
  Sense strand starting at position 165 of SEQ ID NO: 458
acagcuguucuauguauuu

SEQ ID NO: 38667 - RNA, 19 nt, Artificial Sequence
  Description of Artificial Sequence: Synthetic oligonucleotide
  Antisense strand to SEQ ID NO: 38666
aaauacauagaacagcugu

SEQ ID NO: 38668 - RNA, 19 nt, Artificial Sequence
  Description of Artificial Sequence: Synthetic oligonucleotide
  Sense strand starting at position 61 of SEQ ID NO: 458
ggaagugcaacuuauaugu

SEQ ID NO: 38669 - RNA, 19 nt, Artificial Sequence
  Description of Artificial Sequence: Synthetic oligonucleotide
  Antisense strand to SEQ ID NO: 38668
acauauaaguugcacuucc

SEQ ID NO: 38670 - RNA, 19 nt, Artificial Sequence
  Description of Artificial Sequence: Synthetic oligonucleotide
  Sense strand starting at position 210 of SEQ ID NO: 459
cacuguauuuagcaggaaa

SEQ ID NO: 38671 - RNA, 19 nt, Artificial Sequence
  Description of Artificial Sequence: Synthetic oligonucleotide
  Antisense strand to SEQ ID NO: 38670
uuuccugcuaaauacagug

SEQ ID NO: 38672 - RNA, 19 nt, Artificial Sequence
  Description of Artificial Sequence: Synthetic oligonucleotide
  Sense strand starting at position 285 of SEQ ID NO: 459
aagcguguggaaggaauaa

SEQ ID NO: 38673 - RNA, 19 nt, Artificial Sequence
  Description of Artificial Sequence: Synthetic oligonucleotide
  Antisense strand to SEQ ID NO: 38672
uuauuccuuccacacgcuu

SEQ ID NO: 38674 - RNA, 19 nt, Artificial Sequence
  Description of Artificial Sequence: Synthetic oligonucleotide
  Sense strand starting at position 297 of SEQ ID NO: 459
ggaauaaccuggucucaga

SEQ ID NO: 38675 - RNA, 19 nt, Artificial Sequence
  Description of Artificial Sequence: Synthetic oligonucleotide
  Antisense strand to SEQ ID NO: 38674
ucugagaccagguuauucc

SEQ ID NO: 38676 - RNA, 19 nt, Artificial Sequence
  Description of Artificial Sequence: Synthetic oligonucleotide
  Sense strand starting at position 332 of SEQ ID NO: 459
ggcugacucucauuaggga

SEQ ID NO: 38677 - RNA, 19 nt, Artificial Sequence
  Description of Artificial Sequence: Synthetic oligonucleotide
  Antisense strand to SEQ ID NO: 38676
ucccuaaugagagucagcc

SEQ ID NO: 38678 - RNA, 19 nt, Artificial Sequence
  Description of Artificial Sequence: Synthetic oligonucleotide
  Sense strand starting at position 385 of SEQ ID NO: 459
acucaaguuucugcuaaag

SEQ ID NO: 38679 - RNA, 19 nt, Artificial Sequence
  Description of Artificial Sequence: Synthetic oligonucleotide
  Antisense strand to SEQ ID NO: 38678
cuuuagcagaaacuugagu

SEQ ID NO: 38680 - RNA, 19 nt, Artificial Sequence
  Description of Artificial Sequence: Synthetic oligonucleotide
  Sense strand starting at position 408 of SEQ ID NO: 459
cgcauuugggcuugaccau

SEQ ID NO: 38681 - RNA, 19 nt, Artificial Sequence
  Description of Artificial Sequence: Synthetic oligonucleotide
  Antisense strand to SEQ ID NO: 38680
auggucaagcccaaaugcg

SEQ ID NO: 38682 - RNA, 19 nt, Artificial Sequence
  Description of Artificial Sequence: Synthetic oligonucleotide
  Sense strand starting at position 704 of SEQ ID NO: 459
aggucuggccauugaauau

SEQ ID NO: 38683 - RNA, 19 nt, Artificial Sequence
  Description of Artificial Sequence: Synthetic oligonucleotide
  Antisense strand to SEQ ID NO: 38682
auauucaauggccagaccu

SEQ ID NO: 38684 - RNA, 19 nt, Artificial Sequence
  Description of Artificial Sequence: Synthetic oligonucleotide
  Sense strand starting at position 716 of SEQ ID NO: 459
ugaauauuugguggugcca

SEQ ID NO: 38685 - RNA, 19 nt, Artificial Sequence
  Description of Artificial Sequence: Synthetic oligonucleotide
  Antisense strand to SEQ ID NO: 38684
uggcaccaccaaauauuca

SEQ ID NO: 38686 - RNA, 19 nt, Artificial Sequence
  Description of Artificial Sequence: Synthetic oligonucleotide
  Sense strand starting at position 851 of SEQ ID NO: 459
aagagaacugcacguccaa

SEQ ID NO: 38687 - RNA, 19 nt, Artificial Sequence
  Description of Artificial Sequence: Synthetic oligonucleotide
  Antisense strand to SEQ ID NO: 38686
uuggacgugcaguucucuu

SEQ ID NO: 38688 - RNA, 19 nt, Artificial Sequence
  Description of Artificial Sequence: Synthetic oligonucleotide
  Sense strand starting at position 920 of SEQ ID NO: 459
gggaaaguguucucccuau

SEQ ID NO: 38689 - RNA, 19 nt, Artificial Sequence
  Description of Artificial Sequence: Synthetic oligonucleotide
  Antisense strand to SEQ ID NO: 38688
auagggagaacacuuuccc

SEQ ID NO: 38690 - RNA, 19 nt, Artificial Sequence
  Description of Artificial Sequence: Synthetic oligonucleotide
  Sense strand starting at position 1193 of SEQ ID NO: 459
gaaaccagauguguuccaa

SEQ ID NO: 38691 - RNA, 19 nt, Artificial Sequence
  Description of Artificial Sequence: Synthetic oligonucleotide
  Antisense strand to SEQ ID NO: 38690
uuggaacacaucugguuuc

SEQ ID NO: 38692 - RNA, 19 nt, Artificial Sequence
  Description of Artificial Sequence: Synthetic oligonucleotide
  Sense strand starting at position 1327 of SEQ ID NO: 459
ggcucuccuccugacagau

SEQ ID NO: 38693 - RNA, 19 nt, Artificial Sequence
  Description of Artificial Sequence: Synthetic oligonucleotide
  Antisense strand to SEQ ID NO: 38692
aucugucaggaggagagcc

SEQ ID NO: 38694 - RNA, 19 nt, Artificial Sequence
  Description of Artificial Sequence: Synthetic oligonucleotide
  Sense strand starting at position 1433 of SEQ ID NO: 459
agcuacaaucuggauugua

SEQ ID NO: 38695 - RNA, 19 nt, Artificial Sequence
  Description of Artificial Sequence: Synthetic oligonucleotide
  Antisense strand to SEQ ID NO: 38694
uacaauccagauuguagcu

SEQ ID NO: 38696 - RNA, 19 nt, Artificial Sequence
  Description of Artificial Sequence: Synthetic oligonucleotide
  Sense strand starting at position 1445 of SEQ ID NO: 459
gauuguauuuaagggaauu

SEQ ID NO: 38697 - RNA, 19 nt, Artificial Sequence
  Description of Artificial Sequence: Synthetic oligonucleotide
  Antisense strand to SEQ ID NO: 38696
aauucccuuaaauacaauc

SEQ ID NO: 38698 - RNA, 19 nt, Artificial Sequence
  Description of Artificial Sequence: Synthetic oligonucleotide
  Sense strand starting at position 1583 of SEQ ID NO: 459
ugaccucucuagcuuggaa

SEQ ID NO: 38699 - RNA, 19 nt, Artificial Sequence
  Description of Artificial Sequence: Synthetic oligonucleotide
  Antisense strand to SEQ ID NO: 38698
uuccaagcuagagagguca

SEQ ID NO: 38700 - RNA, 19 nt, Artificial Sequence
  Description of Artificial Sequence: Synthetic oligonucleotide
  Sense strand starting at position 1585 of SEQ ID NO: 459
accucucuagcuuggaaga

SEQ ID NO: 38701 - RNA, 19 nt, Artificial Sequence
  Description of Artificial Sequence: Synthetic oligonucleotide
  Antisense strand to SEQ ID NO: 38700
ucuuccaagcuagagaggu

SEQ ID NO: 38702 - RNA, 19 nt, Artificial Sequence
  Description of Artificial Sequence: Synthetic oligonucleotide
  Sense strand starting at position 1765 of SEQ ID NO: 459
cagggauguuugcuacaca

SEQ ID NO: 38703 - RNA, 19 nt, Artificial Sequence
  Description of Artificial Sequence: Synthetic oligonucleotide
  Antisense strand to SEQ ID NO: 38702
uguguagcaaacaucccug

SEQ ID NO: 38704 - RNA, 19 nt, Artificial Sequence
  Description of Artificial Sequence: Synthetic oligonucleotide
  Sense strand starting at position 1844 of SEQ ID NO: 459
ugcguucuucgugucucua

SEQ ID NO: 38705 - RNA, 19 nt, Artificial Sequence
  Description of Artificial Sequence: Synthetic oligonucleotide
  Antisense strand to SEQ ID NO: 38704
uagagacacgaagaacgca

SEQ ID NO: 38706 - RNA, 19 nt, Artificial Sequence
  Description of Artificial Sequence: Synthetic oligonucleotide
  Sense strand starting at position 2557 of SEQ ID NO: 459
ggacucauugcgcugccua

SEQ ID NO: 38707 - RNA, 19 nt, Artificial Sequence
  Description of Artificial Sequence: Synthetic oligonucleotide
  Antisense strand to SEQ ID NO: 38706
uaggcagcgcaaugagucc

SEQ ID NO: 38708 - RNA, 19 nt, Artificial Sequence
  Description of Artificial Sequence: Synthetic oligonucleotide
  Sense strand starting at position 2679 of SEQ ID NO: 459
ggaaguccucuuuggagau

SEQ ID NO: 38709 - RNA, 19 nt, Artificial Sequence
  Description of Artificial Sequence: Synthetic oligonucleotide
  Antisense strand to SEQ ID NO: 38708
aucuccaaagaggacuucc

SEQ ID NO: 38710 - RNA, 19 nt, Artificial Sequence
  Description of Artificial Sequence: Synthetic oligonucleotide
  Sense strand starting at position 2683 of SEQ ID NO: 459
guccucuuuggagaucuga

SEQ ID NO: 38711 - RNA, 19 nt, Artificial Sequence
  Description of Artificial Sequence: Synthetic oligonucleotide
  Antisense strand to SEQ ID NO: 38710
ucagaucuccaaagaggac

SEQ ID NO: 38712 - RNA, 19 nt, Artificial Sequence
  Description of Artificial Sequence: Synthetic oligonucleotide
  Sense strand starting at position 2775 of SEQ ID NO: 459
ugaacuguacucugaggga

SEQ ID NO: 38713 - RNA, 19 nt, Artificial Sequence
  Description of Artificial Sequence: Synthetic oligonucleotide
  Antisense strand to SEQ ID NO: 38712
ucccucagaguacaguuca

SEQ ID NO: 38714 - RNA, 19 nt, Artificial Sequence
  Description of Artificial Sequence: Synthetic oligonucleotide
  Sense strand starting at position 2819 of SEQ ID NO: 459
ugacauuaagagggugagu

SEQ ID NO: 38715 - RNA, 19 nt, Artificial Sequence
  Description of Artificial Sequence: Synthetic oligonucleotide
  Antisense strand to SEQ ID NO: 38714
acucacccucuuaauguca

SEQ ID NO: 38716 - RNA, 19 nt, Artificial Sequence
  Description of Artificial Sequence: Synthetic oligonucleotide
  Sense strand starting at position 2883 of SEQ ID NO: 459
uacugaggaguguguagaa

SEQ ID NO: 38717 - RNA, 19 nt, Artificial Sequence
  Description of Artificial Sequence: Synthetic oligonucleotide
  Antisense strand to SEQ ID NO: 38716
uucuacacacuccucagua

SEQ ID NO: 38718 - RNA, 19 nt, Artificial Sequence
  Description of Artificial Sequence: Synthetic oligonucleotide
  Sense strand starting at position 3028 of SEQ ID NO: 459
gagggcagguuucuaaauu

SEQ ID NO: 38719 - RNA, 19 nt, Artificial Sequence
  Description of Artificial Sequence: Synthetic oligonucleotide
  Antisense strand to SEQ ID NO: 38718
aauuuagaaaccugcccuc

SEQ ID NO: 38720 - RNA, 19 nt, Artificial Sequence
  Description of Artificial Sequence: Synthetic oligonucleotide
  Sense strand starting at position 3157 of SEQ ID NO: 459
cguuaauaauuccuaagau

SEQ ID NO: 38721 - RNA, 19 nt, Artificial Sequence
  Description of Artificial Sequence: Synthetic oligonucleotide
  Antisense strand to SEQ ID NO: 38720
aucuuaggaauuauuaacg

SEQ ID NO: 38722 - RNA, 19 nt, Artificial Sequence
  Description of Artificial Sequence: Synthetic oligonucleotide
  Sense strand starting at position 3345 of SEQ ID NO: 459
caacuaaguuuacugggua

SEQ ID NO: 38723 - RNA, 19 nt, Artificial Sequence
  Description of Artificial Sequence: Synthetic oligonucleotide
  Antisense strand to SEQ ID NO: 38722
uacccaguaaacuuaguug

SEQ ID NO: 38724 - RNA, 19 nt, Artificial Sequence
  Description of Artificial Sequence: Synthetic oligonucleotide
  Sense strand starting at position 3348 of SEQ ID NO: 459
cuaaguuuacuggguacau

SEQ ID NO: 38725 - RNA, 19 nt, Artificial Sequence
  Description of Artificial Sequence: Synthetic oligonucleotide
  Antisense strand to SEQ ID NO: 38724
auguacccaguaaacuuag

SEQ ID NO: 38726 - RNA, 19 nt, Artificial Sequence
  Description of Artificial Sequence: Synthetic oligonucleotide
  Sense strand starting at position 3349 of SEQ ID NO: 459
uaaguuuacuggguacaua

SEQ ID NO: 38727 - RNA, 19 nt, Artificial Sequence
  Description of Artificial Sequence: Synthetic oligonucleotide
  Antisense strand to SEQ ID NO: 38726
uauguacccaguaaacuua

SEQ ID NO: 38728 - RNA, 19 nt, Artificial Sequence
  Description of Artificial Sequence: Synthetic oligonucleotide
  Sense strand starting at position 3350 of SEQ ID NO: 459
aaguuuacuggguacauau

SEQ ID NO: 38729 - RNA, 19 nt, Artificial Sequence
  Description of Artificial Sequence: Synthetic oligonucleotide
  Antisense strand to SEQ ID NO: 38728
auauguacccaguaaacuu

SEQ ID NO: 38730 - RNA, 19 nt, Artificial Sequence
  Description of Artificial Sequence: Synthetic oligonucleotide
  Sense strand starting at position 3384 of SEQ ID NO: 459
ugccacuaaucuuuaggaa

SEQ ID NO: 38731 - RNA, 19 nt, Artificial Sequence
  Description of Artificial Sequence: Synthetic oligonucleotide
  Antisense strand to SEQ ID NO: 38730
uuccuaaagauuaguggca

SEQ ID NO: 38732 - RNA, 19 nt, Artificial Sequence
  Description of Artificial Sequence: Synthetic oligonucleotide
  Sense strand starting at position 3385 of SEQ ID NO: 459
gccacuaaucuuuaggaac

SEQ ID NO: 38733 - RNA, 19 nt, Artificial Sequence
  Description of Artificial Sequence: Synthetic oligonucleotide
  Antisense strand to SEQ ID NO: 38732
guuccuaaagauuaguggc

SEQ ID NO: 38734 - RNA, 19 nt, Artificial Sequence
  Description of Artificial Sequence: Synthetic oligonucleotide
  Sense strand starting at position 3498 of SEQ ID NO: 459
agacuagauugagcccuua

SEQ ID NO: 38735 - RNA, 19 nt, Artificial Sequence
  Description of Artificial Sequence: Synthetic oligonucleotide
  Antisense strand to SEQ ID NO: 38734
uaagggcucaaucuagucu

SEQ ID NO: 38736 - RNA, 19 nt, Artificial Sequence
  Description of Artificial Sequence: Synthetic oligonucleotide
  Sense strand starting at position 3620 of SEQ ID NO: 459
ucaagaagcuaucucuuag

SEQ ID NO: 38737 - RNA, 19 nt, Artificial Sequence
  Description of Artificial Sequence: Synthetic oligonucleotide
  Antisense strand to SEQ ID NO: 38736
cuaagagauagcuucuuga

SEQ ID NO: 38738 - RNA, 19 nt, Artificial Sequence
  Description of Artificial Sequence: Synthetic oligonucleotide
  Sense strand starting at position 3676 of SEQ ID NO: 459
uuggcagaauguuugggau

SEQ ID NO: 38739 - RNA, 19 nt, Artificial Sequence
  Description of Artificial Sequence: Synthetic oligonucleotide
  Antisense strand to SEQ ID NO: 38738
aucccaaacauucugccaa

SEQ ID NO: 38740 - RNA, 19 nt, Artificial Sequence
  Description of Artificial Sequence: Synthetic oligonucleotide
  Sense strand starting at position 3682 of SEQ ID NO: 459
gaauguuugggaugccuca

SEQ ID NO: 38741 - RNA, 19 nt, Artificial Sequence
  Description of Artificial Sequence: Synthetic oligonucleotide
  Antisense strand to SEQ ID NO: 38740
ugaggcaucccaaacauuc

SEQ ID NO: 38742 - RNA, 19 nt, Artificial Sequence
  Description of Artificial Sequence: Synthetic oligonucleotide
  Sense strand starting at position 3698 of SEQ ID NO: 459
ucauaucagcugcagagaa

SEQ ID NO: 38743 - RNA, 19 nt, Artificial Sequence
  Description of Artificial Sequence: Synthetic oligonucleotide
  Antisense strand to SEQ ID NO: 38742
uucucugcagcugauauga

SEQ ID NO: 38744 - RNA, 19 nt, Artificial Sequence
  Description of Artificial Sequence: Synthetic oligonucleotide
  Sense strand starting at position 3700 of SEQ ID NO: 459
auaucagcugcagagaaau

SEQ ID NO: 38745 - RNA, 19 nt, Artificial Sequence
  Description of Artificial Sequence: Synthetic oligonucleotide
  Antisense strand to SEQ ID NO: 38744
auuucucugcagcugauau

SEQ ID NO: 38746 - RNA, 19 nt, Artificial Sequence
  Description of Artificial Sequence: Synthetic oligonucleotide
  Sense strand starting at position 3746 of SEQ ID NO: 459
ccuuaaacuguugguuaaa

SEQ ID NO: 38747 - RNA, 19 nt, Artificial Sequence
  Description of Artificial Sequence: Synthetic oligonucleotide
  Antisense strand to SEQ ID NO: 38746
uuuaaccaacaguuuaagg

SEQ ID NO: 38748 - RNA, 19 nt, Artificial Sequence
  Description of Artificial Sequence: Synthetic oligonucleotide
  Sense strand starting at position 3902 of SEQ ID NO: 459
uuccaaacuuguguacaaa

SEQ ID NO: 38749 - RNA, 19 nt, Artificial Sequence
  Description of Artificial Sequence: Synthetic oligonucleotide
  Antisense strand to SEQ ID NO: 38748
uuuguacacaaguuuggaa

SEQ ID NO: 38750 - RNA, 19 nt, Artificial Sequence
  Description of Artificial Sequence: Synthetic oligonucleotide
  Sense strand starting at position 85 of SEQ ID NO: 460
gcggauuucugaguucaca

SEQ ID NO: 38751 - RNA, 19 nt, Artificial Sequence
  Description of Artificial Sequence: Synthetic oligonucleotide
  Antisense strand to SEQ ID NO: 38750
ugugaacucagaaauccgc

SEQ ID NO: 38752 - RNA, 19 nt, Artificial Sequence
  Description of Artificial Sequence: Synthetic oligonucleotide
  Sense strand starting at position 308 of SEQ ID NO: 460
ugccuacugcacugaaaua

SEQ ID NO: 38753 - RNA, 19 nt, Artificial Sequence
  Description of Artificial Sequence: Synthetic oligonucleotide
  Antisense strand to SEQ ID NO: 38752
uauuucagugcaguaggca

SEQ ID NO: 38754 - RNA, 19 nt, Artificial Sequence
  Description of Artificial Sequence: Synthetic oligonucleotide
  Sense strand starting at position 319 of SEQ ID NO: 460
cugaaauaguguccaggca

SEQ ID NO: 38755 - RNA, 19 nt, Artificial Sequence
  Description of Artificial Sequence: Synthetic oligonucleotide
  Antisense strand to SEQ ID NO: 38754
ugccuggacacuauuucag

SEQ ID NO: 38756 - RNA, 19 nt, Artificial Sequence
  Description of Artificial Sequence: Synthetic oligonucleotide
  Sense strand starting at position 353 of SEQ ID NO: 460
aguggauacuugcuggauu

SEQ ID NO: 38757 - RNA, 19 nt, Artificial Sequence
  Description of Artificial Sequence: Synthetic oligonucleotide
  Antisense strand to SEQ ID NO: 38756
aauccagcaaguauccacu

SEQ ID NO: 38758 - RNA, 19 nt, Artificial Sequence
  Description of Artificial Sequence: Synthetic oligonucleotide
  Sense strand starting at position 375 of SEQ ID NO: 460
agaggucuagaaggucuua

SEQ ID NO: 38759 - RNA, 19 nt, Artificial Sequence
  Description of Artificial Sequence: Synthetic oligonucleotide
  Antisense strand to SEQ ID NO: 38758
uaagaccuucuagaccucu

SEQ ID NO: 38760 - RNA, 19 nt, Artificial Sequence
  Description of Artificial Sequence: Synthetic oligonucleotide
  Sense strand starting at position 412 of SEQ ID NO: 460
aauagugaugagggcuuaa

SEQ ID NO: 38761 - RNA, 19 nt, Artificial Sequence
  Description of Artificial Sequence: Synthetic oligonucleotide
  Antisense strand to SEQ ID NO: 38760
uuaagcccucaucacuauu

SEQ ID NO: 38762 - RNA, 19 nt, Artificial Sequence
  Description of Artificial Sequence: Synthetic oligonucleotide
  Sense strand starting at position 446 of SEQ ID NO: 460
ucaagacacguggaaguau

SEQ ID NO: 38763 - RNA, 19 nt, Artificial Sequence
  Description of Artificial Sequence: Synthetic oligonucleotide
  Antisense strand to SEQ ID NO: 38762
auacuuccacgugucuuga

SEQ ID NO: 38764 - RNA, 19 nt, Artificial Sequence
  Description of Artificial Sequence: Synthetic oligonucleotide
  Sense strand starting at position 482 of SEQ ID NO: 460
gugcacuguccugguauau

SEQ ID NO: 38765 - RNA, 19 nt, Artificial Sequence
  Description of Artificial Sequence: Synthetic oligonucleotide
  Antisense strand to SEQ ID NO: 38764
auauaccaggacagugcac

SEQ ID NO: 38766 - RNA, 19 nt, Artificial Sequence
  Description of Artificial Sequence: Synthetic oligonucleotide
  Sense strand starting at position 576 of SEQ ID NO: 460
uggugacugggcugagauu

SEQ ID NO: 38767 - RNA, 19 nt, Artificial Sequence
  Description of Artificial Sequence: Synthetic oligonucleotide
  Antisense strand to SEQ ID NO: 38766
aaucucagcccagucacca

SEQ ID NO: 38768 - RNA, 19 nt, Artificial Sequence
  Description of Artificial Sequence: Synthetic oligonucleotide
  Sense strand starting at position 739 of SEQ ID NO: 460
uuuauuaaacccugaugga

SEQ ID NO: 38769 - RNA, 19 nt, Artificial Sequence
  Description of Artificial Sequence: Synthetic oligonucleotide
  Antisense strand to SEQ ID NO: 38768
uccaucaggguuuaauaaa

SEQ ID NO: 38770 - RNA, 19 nt, Artificial Sequence
  Description of Artificial Sequence: Synthetic oligonucleotide
  Sense strand starting at position 954 of SEQ ID NO: 460
aggcaugcucacggaaaca

SEQ ID NO: 38771 - RNA, 19 nt, Artificial Sequence
  Description of Artificial Sequence: Synthetic oligonucleotide
  Antisense strand to SEQ ID NO: 38770
uguuuccgugagcaugccu

SEQ ID NO: 38772 - RNA, 19 nt, Artificial Sequence
  Description of Artificial Sequence: Synthetic oligonucleotide
  Sense strand starting at position 966 of SEQ ID NO: 460
ggaaacauaugcucgcuga

SEQ ID NO: 38773 - RNA, 19 nt, Artificial Sequence
  Description of Artificial Sequence: Synthetic oligonucleotide
  Antisense strand to SEQ ID NO: 38772
ucagcgagcauauguuucc

SEQ ID NO: 38774 - RNA, 19 nt, Artificial Sequence
  Description of Artificial Sequence: Synthetic oligonucleotide
  Sense strand starting at position 967 of SEQ ID NO: 460
gaaacauaugcucgcugau

SEQ ID NO: 38775 - RNA, 19 nt, Artificial Sequence
  Description of Artificial Sequence: Synthetic oligonucleotide
  Antisense strand to SEQ ID NO: 38774
aucagcgagcauauguuuc

SEQ ID NO: 38776 - RNA, 19 nt, Artificial Sequence
  Description of Artificial Sequence: Synthetic oligonucleotide
  Sense strand starting at position 970 of SEQ ID NO: 460
acauaugcucgcugauaua

SEQ ID NO: 38777 - RNA, 19 nt, Artificial Sequence
  Description of Artificial Sequence: Synthetic oligonucleotide
  Antisense strand to SEQ ID NO: 38776
uauaucagcgagcauaugu

SEQ ID NO: 38778 - RNA, 19 nt, Artificial Sequence
  Description of Artificial Sequence: Synthetic oligonucleotide
  Sense strand starting at position 1053 of SEQ ID NO: 460
ggucuuccuguugggaagu

SEQ ID NO: 38779 - RNA, 19 nt, Artificial Sequence
  Description of Artificial Sequence: Synthetic oligonucleotide
  Antisense strand to SEQ ID NO: 38778
acuucccaacaggaagacc

SEQ ID NO: 38780 - RNA, 19 nt, Artificial Sequence
  Description of Artificial Sequence: Synthetic oligonucleotide
  Sense strand starting at position 1076 of SEQ ID NO: 460
augcaagucugacugcauu

SEQ ID NO: 38781 - RNA, 19 nt, Artificial Sequence
  Description of Artificial Sequence: Synthetic oligonucleotide
  Antisense strand to SEQ ID NO: 38780
aaugcagucagacuugcau

SEQ ID NO: 38782 - RNA, 19 nt, Artificial Sequence
  Description of Artificial Sequence: Synthetic oligonucleotide
  Sense strand starting at position 1171 of SEQ ID NO: 460
cccaauauauuuggagaua

SEQ ID NO: 38783 - RNA, 19 nt, Artificial Sequence
  Description of Artificial Sequence: Synthetic oligonucleotide
  Antisense strand to SEQ ID NO: 38782
uaucuccaaauauauuggg

SEQ ID NO: 38784 - RNA, 19 nt, Artificial Sequence
  Description of Artificial Sequence: Synthetic oligonucleotide
  Sense strand starting at position 1172 of SEQ ID NO: 460
ccaauauauuuggagauag

SEQ ID NO: 38785 - RNA, 19 nt, Artificial Sequence
  Description of Artificial Sequence: Synthetic oligonucleotide
  Antisense strand to SEQ ID NO: 38784
cuaucuccaaauauauugg

SEQ ID NO: 38786 - RNA, 19 nt, Artificial Sequence
  Description of Artificial Sequence: Synthetic oligonucleotide
  Sense strand starting at position 1359 of SEQ ID NO: 460
ugaggauggaugugauccu

SEQ ID NO: 38787 - RNA, 19 nt, Artificial Sequence
  Description of Artificial Sequence: Synthetic oligonucleotide
  Antisense strand to SEQ ID NO: 38786
aggaucacauccauccuca

SEQ ID NO: 38788 - RNA, 19 nt, Artificial Sequence
  Description of Artificial Sequence: Synthetic oligonucleotide
  Sense strand starting at position 1536 of SEQ ID NO: 460
gagcucaucucgcucuaga

SEQ ID NO: 38789 - RNA, 19 nt, Artificial Sequence
  Description of Artificial Sequence: Synthetic oligonucleotide
  Antisense strand to SEQ ID NO: 38788
ucuagagcgagaugagcuc

SEQ ID NO: 38790 - RNA, 19 nt, Artificial Sequence
  Description of Artificial Sequence: Synthetic oligonucleotide
  Sense strand starting at position 1539 of SEQ ID NO: 460
cucaucucgcucuagagaa

SEQ ID NO: 38791 - RNA, 19 nt, Artificial Sequence
  Description of Artificial Sequence: Synthetic oligonucleotide
  Antisense strand to SEQ ID NO: 38790
uucucuagagcgagaugag

SEQ ID NO: 38792 - RNA, 19 nt, Artificial Sequence
  Description of Artificial Sequence: Synthetic oligonucleotide
  Sense strand starting at position 2143 of SEQ ID NO: 460
aagagucaggccuggaguu

SEQ ID NO: 38793 - RNA, 19 nt, Artificial Sequence
  Description of Artificial Sequence: Synthetic oligonucleotide
  Antisense strand to SEQ ID NO: 38792
aacuccaggccugacucuu

SEQ ID NO: 38794 - RNA, 19 nt, Artificial Sequence
  Description of Artificial Sequence: Synthetic oligonucleotide
  Sense strand starting at position 2402 of SEQ ID NO: 460
cucccuccuccgugcuaaa

SEQ ID NO: 38795 - RNA, 19 nt, Artificial Sequence
  Description of Artificial Sequence: Synthetic oligonucleotide
  Antisense strand to SEQ ID NO: 38794
uuuagcacggaggagggag

SEQ ID NO: 38796 - RNA, 19 nt, Artificial Sequence
  Description of Artificial Sequence: Synthetic oligonucleotide
  Sense strand starting at position 2439 of SEQ ID NO: 460
gccugacucccagagaagu

SEQ ID NO: 38797 - RNA, 19 nt, Artificial Sequence
  Description of Artificial Sequence: Synthetic oligonucleotide
  Antisense strand to SEQ ID NO: 38796
acuucucugggagucaggc

SEQ ID NO: 38798 - RNA, 19 nt, Artificial Sequence
  Description of Artificial Sequence: Synthetic oligonucleotide
  Sense strand starting at position 2482 of SEQ ID NO: 460
cuccuuacuccaugagguu

SEQ ID NO: 38799 - RNA, 19 nt, Artificial Sequence
  Description of Artificial Sequence: Synthetic oligonucleotide
  Antisense strand to SEQ ID NO: 38798
aaccucauggaguaaggag

SEQ ID NO: 38800 - RNA, 19 nt, Artificial Sequence
  Description of Artificial Sequence: Synthetic oligonucleotide
  Sense strand starting at position 2545 of SEQ ID NO: 460
aaaugugcuguguaaccau

SEQ ID NO: 38801 - RNA, 19 nt, Artificial Sequence
  Description of Artificial Sequence: Synthetic oligonucleotide
  Antisense strand to SEQ ID NO: 38800
augguuacacagcacauuu

SEQ ID NO: 38802 - RNA, 19 nt, Artificial Sequence
  Description of Artificial Sequence: Synthetic oligonucleotide
  Sense strand starting at position 2594 of SEQ ID NO: 460
gugagaguauaugccucau

SEQ ID NO: 38803 - RNA, 19 nt, Artificial Sequence
  Description of Artificial Sequence: Synthetic oligonucleotide
  Antisense strand to SEQ ID NO: 38802
augaggcauauacucucac

SEQ ID NO: 38804 - RNA, 19 nt, Artificial Sequence
  Description of Artificial Sequence: Synthetic oligonucleotide
  Sense strand starting at position 2596 of SEQ ID NO: 460
gagaguauaugccucauag

SEQ ID NO: 38805 - RNA, 19 nt, Artificial Sequence
  Description of Artificial Sequence: Synthetic oligonucleotide
  Antisense strand to SEQ ID NO: 38804
cuaugaggcauauacucuc

SEQ ID NO: 38806 - RNA, 19 nt, Artificial Sequence
  Description of Artificial Sequence: Synthetic oligonucleotide
  Sense strand starting at position 2598 of SEQ ID NO: 460
gaguauaugccucauagac

SEQ ID NO: 38807 - RNA, 19 nt, Artificial Sequence
  Description of Artificial Sequence: Synthetic oligonucleotide
  Antisense strand to SEQ ID NO: 38806
gucuaugaggcauauacuc

SEQ ID NO: 38808 - RNA, 19 nt, Artificial Sequence
  Description of Artificial Sequence: Synthetic oligonucleotide
  Sense strand starting at position 2608 of SEQ ID NO: 460
cucauagaccuuugcugua

SEQ ID NO: 38809 - RNA, 19 nt, Artificial Sequence
  Description of Artificial Sequence: Synthetic oligonucleotide
  Antisense strand to SEQ ID NO: 38808
uacagcaaaggucuaugag

SEQ ID NO: 38810 - RNA, 19 nt, Artificial Sequence
  Description of Artificial Sequence: Synthetic oligonucleotide
  Sense strand starting at position 2689 of SEQ ID NO: 460
aguaaauauuugcugcuau

SEQ ID NO: 38811 - RNA, 19 nt, Artificial Sequence
  Description of Artificial Sequence: Synthetic oligonucleotide
  Antisense strand to SEQ ID NO: 38810
auagcagcaaauauuuacu

SEQ ID NO: 38812 - RNA, 19 nt, Artificial Sequence
  Description of Artificial Sequence: Synthetic oligonucleotide
  Sense strand starting at position 2701 of SEQ ID NO: 460
cugcuauuaucguuauuac

SEQ ID NO: 38813 - RNA, 19 nt, Artificial Sequence
  Description of Artificial Sequence: Synthetic oligonucleotide
  Antisense strand to SEQ ID NO: 38812
guaauaacgauaauagcag

SEQ ID NO: 38814 - RNA, 19 nt, Artificial Sequence
  Description of Artificial Sequence: Synthetic oligonucleotide
  Sense strand starting at position 2702 of SEQ ID NO: 460
ugcuauuaucguuauuacu

SEQ ID NO: 38815 - RNA, 19 nt, Artificial Sequence
  Description of Artificial Sequence: Synthetic oligonucleotide
  Antisense strand to SEQ ID NO: 38814
aguaauaacgauaauagca

SEQ ID NO: 38816 - RNA, 19 nt, Artificial Sequence
  Description of Artificial Sequence: Synthetic oligonucleotide
  Sense strand starting at position 2704 of SEQ ID NO: 460
cuauuaucguuauuacugu

SEQ ID NO: 38817 - RNA, 19 nt, Artificial Sequence
  Description of Artificial Sequence: Synthetic oligonucleotide
  Antisense strand to SEQ ID NO: 38816
acaguaauaacgauaauag

SEQ ID NO: 38818 - RNA, 19 nt, Artificial Sequence
  Description of Artificial Sequence: Synthetic oligonucleotide
  Sense strand starting at position 2814 of SEQ ID NO: 460
ggaauugagcugggcugaa

SEQ ID NO: 38819 - RNA, 19 nt, Artificial Sequence
  Description of Artificial Sequence: Synthetic oligonucleotide
  Antisense strand to SEQ ID NO: 38818
uucagcccagcucaauucc

SEQ ID NO: 38820 - RNA, 19 nt, Artificial Sequence
  Description of Artificial Sequence: Synthetic oligonucleotide
  Sense strand starting at position 2858 of SEQ ID NO: 460
gccgguaauguuccgaguu

SEQ ID NO: 38821 - RNA, 19 nt, Artificial Sequence
  Description of Artificial Sequence: Synthetic oligonucleotide
  Antisense strand to SEQ ID NO: 38820
aacucggaacauuaccggc

SEQ ID NO: 38822 - RNA, 19 nt, Artificial Sequence
  Description of Artificial Sequence: Synthetic oligonucleotide
  Sense strand starting at position 3415 of SEQ ID NO: 460
aggcucugugcugagaacu

SEQ ID NO: 38823 - RNA, 19 nt, Artificial Sequence
  Description of Artificial Sequence: Synthetic oligonucleotide
  Antisense strand to SEQ ID NO: 38822
aguucucagcacagagccu

SEQ ID NO: 38824 - RNA, 19 nt, Artificial Sequence
  Description of Artificial Sequence: Synthetic oligonucleotide
  Sense strand starting at position 3441 of SEQ ID NO: 460
ugcuaacuccuucgaucuu

SEQ ID NO: 38825 - RNA, 19 nt, Artificial Sequence
  Description of Artificial Sequence: Synthetic oligonucleotide
  Antisense strand to SEQ ID NO: 38824
aagaucgaaggaguuagca

SEQ ID NO: 38826 - RNA, 19 nt, Artificial Sequence
  Description of Artificial Sequence: Synthetic oligonucleotide
  Sense strand starting at position 3839 of SEQ ID NO: 460
cacgcagucagguaaaguu

SEQ ID NO: 38827 - RNA, 19 nt, Artificial Sequence
  Description of Artificial Sequence: Synthetic oligonucleotide
  Antisense strand to SEQ ID NO: 38826
aacuuuaccugacugcgug

SEQ ID NO: 38828 - RNA, 19 nt, Artificial Sequence
  Description of Artificial Sequence: Synthetic oligonucleotide
  Sense strand starting at position 3882 of SEQ ID NO: 460
acuccauaugcauguauag

SEQ ID NO: 38829 - RNA, 19 nt, Artificial Sequence
  Description of Artificial Sequence: Synthetic oligonucleotide
  Antisense strand to SEQ ID NO: 38828
cuauacaugcauauggagu

SEQ ID NO: 38830 - RNA, 19 nt, Artificial Sequence
  Description of Artificial Sequence: Synthetic oligonucleotide
  Sense strand starting at position 240 of SEQ ID NO: 461
aggagcagaucugcuuuaa

SEQ ID NO: 38831 - RNA, 19 nt, Artificial Sequence
  Description of Artificial Sequence: Synthetic oligonucleotide
  Antisense strand to SEQ ID NO: 38830
uuaaagcagaucugcuccu

SEQ ID NO: 38832 - RNA, 19 nt, Artificial Sequence
  Description of Artificial Sequence: Synthetic oligonucleotide
  Sense strand starting at position 288 of SEQ ID NO: 461
gaguguuagucaccagcgu

SEQ ID NO: 38833 - RNA, 19 nt, Artificial Sequence
  Description of Artificial Sequence: Synthetic oligonucleotide
  Antisense strand to SEQ ID NO: 38832
acgcuggugacuaacacuc

SEQ ID NO: 38834 - RNA, 19 nt, Artificial Sequence
  Description of Artificial Sequence: Synthetic oligonucleotide
  Sense strand starting at position 456 of SEQ ID NO: 461
cccugaucagcgggaagau

SEQ ID NO: 38835 - RNA, 19 nt, Artificial Sequence
  Description of Artificial Sequence: Synthetic oligonucleotide
  Antisense strand to SEQ ID NO: 38834
aucuucccgcugaucaggg

SEQ ID NO: 38836 - RNA, 19 nt, Artificial Sequence
  Description of Artificial Sequence: Synthetic oligonucleotide
  Sense strand starting at position 465 of SEQ ID NO: 461
gcgggaagaucugucaguu

SEQ ID NO: 38837 - RNA, 19 nt, Artificial Sequence
  Description of Artificial Sequence: Synthetic oligonucleotide
  Antisense strand to SEQ ID NO: 38836
aacugacagaucuucccgc

SEQ ID NO: 38838 - RNA, 19 nt, Artificial Sequence
  Description of Artificial Sequence: Synthetic oligonucleotide
  Sense strand starting at position 524 of SEQ ID NO: 461
cacacagagggauguuuau

SEQ ID NO: 38839 - RNA, 19 nt, Artificial Sequence
  Description of Artificial Sequence: Synthetic oligonucleotide
  Antisense strand to SEQ ID NO: 38838
auaaacaucccucugugug

SEQ ID NO: 38840 - RNA, 19 nt, Artificial Sequence
  Description of Artificial Sequence: Synthetic oligonucleotide
  Sense strand starting at position 530 of SEQ ID NO: 461
gagggauguuuaucgagaa

SEQ ID NO: 38841 - RNA, 19 nt, Artificial Sequence
  Description of Artificial Sequence: Synthetic oligonucleotide
  Antisense strand to SEQ ID NO: 38840
uucucgauaaacaucccuc

SEQ ID NO: 38842 - RNA, 19 nt, Artificial Sequence
  Description of Artificial Sequence: Synthetic oligonucleotide
  Sense strand starting at position 534 of SEQ ID NO: 461
gauguuuaucgagaacagu

SEQ ID NO: 38843 - RNA, 19 nt, Artificial Sequence
  Description of Artificial Sequence: Synthetic oligonucleotide
  Antisense strand to SEQ ID NO: 38842
acuguucucgauaaacauc

SEQ ID NO: 38844 - RNA, 19 nt, Artificial Sequence
  Description of Artificial Sequence: Synthetic oligonucleotide
  Sense strand starting at position 558 of SEQ ID NO: 461
gaaaucuucugccugggaa

SEQ ID NO: 38845 - RNA, 19 nt, Artificial Sequence
  Description of Artificial Sequence: Synthetic oligonucleotide
  Antisense strand to SEQ ID NO: 38844
uucccaggcagaagauuuc

SEQ ID NO: 38846 - RNA, 19 nt, Artificial Sequence
  Description of Artificial Sequence: Synthetic oligonucleotide
  Sense strand starting at position 590 of SEQ ID NO: 461
gcgugagccgcucugagaa

SEQ ID NO: 38847 - RNA, 19 nt, Artificial Sequence
  Description of Artificial Sequence: Synthetic oligonucleotide
  Antisense strand to SEQ ID NO: 38846
uucucagagcggcucacgc

SEQ ID NO: 38848 - RNA, 19 nt, Artificial Sequence
  Description of Artificial Sequence: Synthetic oligonucleotide
  Sense strand starting at position 1329 of SEQ ID NO: 461
cucugagcccguggguaaa

SEQ ID NO: 38849 - RNA, 19 nt, Artificial Sequence
  Description of Artificial Sequence: Synthetic oligonucleotide
  Antisense strand to SEQ ID NO: 38848
uuuacccacgggcucagag

SEQ ID NO: 38850 - RNA, 19 nt, Artificial Sequence
  Description of Artificial Sequence: Synthetic oligonucleotide
  Sense strand starting at position 1412 of SEQ ID NO: 461
gccugaguccaguggucca

SEQ ID NO: 38851 - RNA, 19 nt, Artificial Sequence
  Description of Artificial Sequence: Synthetic oligonucleotide
  Antisense strand to SEQ ID NO: 38850
uggaccacuggacucaggc

SEQ ID NO: 38852 - RNA, 19 nt, Artificial Sequence
  Description of Artificial Sequence: Synthetic oligonucleotide
  Sense strand starting at position 1682 of SEQ ID NO: 461
agcauaaacugucugagau

SEQ ID NO: 38853 - RNA, 19 nt, Artificial Sequence
  Description of Artificial Sequence: Synthetic oligonucleotide
  Antisense strand to SEQ ID NO: 38852
aucucagacaguuuaugcu

SEQ ID NO: 38854 - RNA, 19 nt, Artificial Sequence
  Description of Artificial Sequence: Synthetic oligonucleotide
  Sense strand starting at position 1683 of SEQ ID NO: 461
gcauaaacugucugagauc

SEQ ID NO: 38855 - RNA, 19 nt, Artificial Sequence
  Description of Artificial Sequence: Synthetic oligonucleotide
  Antisense strand to SEQ ID NO: 38854
gaucucagacaguuuaugc

SEQ ID NO: 38856 - RNA, 19 nt, Artificial Sequence
  Description of Artificial Sequence: Synthetic oligonucleotide
  Sense strand starting at position 1694 of SEQ ID NO: 461
cugagaucugcuggcacga

SEQ ID NO: 38857 - RNA, 19 nt, Artificial Sequence
  Description of Artificial Sequence: Synthetic oligonucleotide
  Antisense strand to SEQ ID NO: 38856
ucgugccagcagaucucag

SEQ ID NO: 38858 - RNA, 19 nt, Artificial Sequence
  Description of Artificial Sequence: Synthetic oligonucleotide
  Sense strand starting at position 1757 of SEQ ID NO: 461
ggaagauaccgcggguacu

SEQ ID NO: 38859 - RNA, 19 nt, Artificial Sequence
  Description of Artificial Sequence: Synthetic oligonucleotide
  Antisense strand to SEQ ID NO: 38858
aguacccgcgguaucuucc

SEQ ID NO: 38860 - RNA, 19 nt, Artificial Sequence
  Description of Artificial Sequence: Synthetic oligonucleotide
  Sense strand starting at position 1964 of SEQ ID NO: 461
ugcauuuguccgugcagca

SEQ ID NO: 38861 - RNA, 19 nt, Artificial Sequence
  Description of Artificial Sequence: Synthetic oligonucleotide
  Antisense strand to SEQ ID NO: 38860
ugcugcacggacaaaugca

SEQ ID NO: 38862 - RNA, 19 nt, Artificial Sequence
  Description of Artificial Sequence: Synthetic oligonucleotide
  Sense strand starting at position 2027 of SEQ ID NO: 461
gcagguacuguccaugaaa

SEQ ID NO: 38863 - RNA, 19 nt, Artificial Sequence
  Description of Artificial Sequence: Synthetic oligonucleotide
  Antisense strand to SEQ ID NO: 38862
uuucauggacaguaccugc

SEQ ID NO: 38864 - RNA, 19 nt, Artificial Sequence
  Description of Artificial Sequence: Synthetic oligonucleotide
  Sense strand starting at position 2424 of SEQ ID NO: 461
gcccgaacguuugucaaac

SEQ ID NO: 38865 - RNA, 19 nt, Artificial Sequence
  Description of Artificial Sequence: Synthetic oligonucleotide
  Antisense strand to SEQ ID NO: 38864
guuugacaaacguucgggc

SEQ ID NO: 38866 - RNA, 19 nt, Artificial Sequence
  Description of Artificial Sequence: Synthetic oligonucleotide
  Sense strand starting at position 2425 of SEQ ID NO: 461
cccgaacguuugucaaaca

SEQ ID NO: 38867 - RNA, 19 nt, Artificial Sequence
  Description of Artificial Sequence: Synthetic oligonucleotide
  Antisense strand to SEQ ID NO: 38866
uguuugacaaacguucggg

SEQ ID NO: 38868 - RNA, 19 nt, Artificial Sequence
  Description of Artificial Sequence: Synthetic oligonucleotide
  Sense strand starting at position 2524 of SEQ ID NO: 461
ggcugcuuugccuggaaga

SEQ ID NO: 38869 - RNA, 19 nt, Artificial Sequence
  Description of Artificial Sequence: Synthetic oligonucleotide
  Antisense strand to SEQ ID NO: 38868
ucuuccaggcaaagcagcc

SEQ ID NO: 38870 - RNA, 19 nt, Artificial Sequence
  Description of Artificial Sequence: Synthetic oligonucleotide
  Sense strand starting at position 2525 of SEQ ID NO: 461
gcugcuuugccuggaagaa

SEQ ID NO: 38871 - RNA, 19 nt, Artificial Sequence
  Description of Artificial Sequence: Synthetic oligonucleotide
  Antisense strand to SEQ ID NO: 38870
uucuuccaggcaaagcagc

SEQ ID NO: 38872 - RNA, 19 nt, Artificial Sequence
  Description of Artificial Sequence: Synthetic oligonucleotide
  Sense strand starting at position 2526 of SEQ ID NO: 461
cugcuuugccuggaagaag

SEQ ID NO: 38873 - RNA, 19 nt, Artificial Sequence
  Description of Artificial Sequence: Synthetic oligonucleotide
  Antisense strand to SEQ ID NO: 38872
cuucuuccaggcaaagcag

SEQ ID NO: 38874 - RNA, 19 nt, Artificial Sequence
  Description of Artificial Sequence: Synthetic oligonucleotide
  Sense strand starting at position 2556 of SEQ ID NO: 461
aaauccggccgguguuaaa

SEQ ID NO: 38875 - RNA, 19 nt, Artificial Sequence
  Description of Artificial Sequence: Synthetic oligonucleotide
  Antisense strand to SEQ ID NO: 38874
uuuaacaccggccggauuu

SEQ ID NO: 38876 - RNA, 19 nt, Artificial Sequence
  Description of Artificial Sequence: Synthetic oligonucleotide
  Sense strand starting at position 3271 of SEQ ID NO: 461
auggccuuauacuaagaaa

SEQ ID NO: 38877 - RNA, 19 nt, Artificial Sequence
  Description of Artificial Sequence: Synthetic oligonucleotide
  Antisense strand to SEQ ID NO: 38876
uuucuuaguauaaggccau

SEQ ID NO: 38878 - RNA, 19 nt, Artificial Sequence
  Description of Artificial Sequence: Synthetic oligonucleotide
  Sense strand starting at position 3447 of SEQ ID NO: 461
ccuggcauaucuguugaau

SEQ ID NO: 38879 - RNA, 19 nt, Artificial Sequence
  Description of Artificial Sequence: Synthetic oligonucleotide
  Antisense strand to SEQ ID NO: 38878
auucaacagauaugccagg

SEQ ID NO: 38880 - RNA, 19 nt, Artificial Sequence
  Description of Artificial Sequence: Synthetic oligonucleotide
  Sense strand starting at position 3464 of SEQ ID NO: 461
augaaugcugcauaucacu

SEQ ID NO: 38881 - RNA, 19 nt, Artificial Sequence
  Description of Artificial Sequence: Synthetic oligonucleotide
  Antisense strand to SEQ ID NO: 38880
agugauaugcagcauucau

SEQ ID NO: 38882 - RNA, 19 nt, Artificial Sequence
  Description of Artificial Sequence: Synthetic oligonucleotide
  Sense strand starting at position 3469 of SEQ ID NO: 461
ugcugcauaucacugagaa

SEQ ID NO: 38883 - RNA, 19 nt, Artificial Sequence
  Description of Artificial Sequence: Synthetic oligonucleotide
  Antisense strand to SEQ ID NO: 38882
uucucagugauaugcagca

SEQ ID NO: 38884 - RNA, 19 nt, Artificial Sequence
  Description of Artificial Sequence: Synthetic oligonucleotide
  Sense strand starting at position 3470 of SEQ ID NO: 461
gcugcauaucacugagaau

SEQ ID NO: 38885 - RNA, 19 nt, Artificial Sequence
  Description of Artificial Sequence: Synthetic oligonucleotide
  Antisense strand to SEQ ID NO: 38884
auucucagugauaugcagc

SEQ ID NO: 38886 - RNA, 19 nt, Artificial Sequence
  Description of Artificial Sequence: Synthetic oligonucleotide
  Sense strand starting at position 3473 of SEQ ID NO: 461
gcauaucacugagaaucau

SEQ ID NO: 38887 - RNA, 19 nt, Artificial Sequence
  Description of Artificial Sequence: Synthetic oligonucleotide
  Antisense strand to SEQ ID NO: 38886
augauucucagugauaugc

SEQ ID NO: 38888 - RNA, 19 nt, Artificial Sequence
  Description of Artificial Sequence: Synthetic oligonucleotide
  Sense strand starting at position 3482 of SEQ ID NO: 461
ugagaaucauugcuccaaa

SEQ ID NO: 38889 - RNA, 19 nt, Artificial Sequence
  Description of Artificial Sequence: Synthetic oligonucleotide
  Antisense strand to SEQ ID NO: 38888
uuuggagcaaugauucuca

SEQ ID NO: 38890 - RNA, 19 nt, Artificial Sequence
  Description of Artificial Sequence: Synthetic oligonucleotide
  Sense strand starting at position 3518 of SEQ ID NO: 461
gugugccuuccagagcuaa

SEQ ID NO: 38891 - RNA, 19 nt, Artificial Sequence
  Description of Artificial Sequence: Synthetic oligonucleotide
  Antisense strand to SEQ ID NO: 38890
uuagcucuggaaggcacac

SEQ ID NO: 38892 - RNA, 19 nt, Artificial Sequence
  Description of Artificial Sequence: Synthetic oligonucleotide
  Sense strand starting at position 3586 of SEQ ID NO: 461
agguuaaagugaucauauu

SEQ ID NO: 38893 - RNA, 19 nt, Artificial Sequence
  Description of Artificial Sequence: Synthetic oligonucleotide
  Antisense strand to SEQ ID NO: 38892
aauaugaucacuuuaaccu

SEQ ID NO: 38894 - RNA, 19 nt, Artificial Sequence
  Description of Artificial Sequence: Synthetic oligonucleotide
  Sense strand starting at position 3595 of SEQ ID NO: 461
ugaucauauuggugaauga

SEQ ID NO: 38895 - RNA, 19 nt, Artificial Sequence
  Description of Artificial Sequence: Synthetic oligonucleotide
  Antisense strand to SEQ ID NO: 38894
ucauucaccaauaugauca

SEQ ID NO: 38896 - RNA, 19 nt, Artificial Sequence
  Description of Artificial Sequence: Synthetic oligonucleotide
  Sense strand starting at position 3599 of SEQ ID NO: 461
cauauuggugaaugacaau

SEQ ID NO: 38897 - RNA, 19 nt, Artificial Sequence
  Description of Artificial Sequence: Synthetic oligonucleotide
  Antisense strand to SEQ ID NO: 38896
auugucauucaccaauaug

SEQ ID NO: 38898 - RNA, 19 nt, Artificial Sequence
  Description of Artificial Sequence: Synthetic oligonucleotide
  Sense strand starting at position 3602 of SEQ ID NO: 461
auuggugaaugacaaugau

SEQ ID NO: 38899 - RNA, 19 nt, Artificial Sequence
  Description of Artificial Sequence: Synthetic oligonucleotide
  Antisense strand to SEQ ID NO: 38898
aucauugucauucaccaau

SEQ ID NO: 38900 - RNA, 19 nt, Artificial Sequence
  Description of Artificial Sequence: Synthetic oligonucleotide
  Sense strand starting at position 3612 of SEQ ID NO: 461
gacaaugauugaugugacu

SEQ ID NO: 38901 - RNA, 19 nt, Artificial Sequence
  Description of Artificial Sequence: Synthetic oligonucleotide
  Antisense strand to SEQ ID NO: 38900
agucacaucaaucauuguc

SEQ ID NO: 38902 - RNA, 19 nt, Artificial Sequence
  Description of Artificial Sequence: Synthetic oligonucleotide
  Sense strand starting at position 3627 of SEQ ID NO: 461
gacucucaagcuugguaau

SEQ ID NO: 38903 - RNA, 19 nt, Artificial Sequence
  Description of Artificial Sequence: Synthetic oligonucleotide
  Antisense strand to SEQ ID NO: 38902
auuaccaagcuugagaguc

SEQ ID NO: 38904 - RNA, 19 nt, Artificial Sequence
  Description of Artificial Sequence: Synthetic oligonucleotide
  Sense strand starting at position 3628 of SEQ ID NO: 461
acucucaagcuugguaauu

SEQ ID NO: 38905 - RNA, 19 nt, Artificial Sequence
  Description of Artificial Sequence: Synthetic oligonucleotide
  Antisense strand to SEQ ID NO: 38904
aauuaccaagcuugagagu

SEQ ID NO: 38906 - RNA, 19 nt, Artificial Sequence
  Description of Artificial Sequence: Synthetic oligonucleotide
  Sense strand starting at position 3629 of SEQ ID NO: 461
cucucaagcuugguaauuu

SEQ ID NO: 38907 - RNA, 19 nt, Artificial Sequence
  Description of Artificial Sequence: Synthetic oligonucleotide
  Antisense strand to SEQ ID NO: 38906
aaauuaccaagcuugagag

SEQ ID NO: 38908 - RNA, 19 nt, Artificial Sequence
  Description of Artificial Sequence: Synthetic oligonucleotide
  Sense strand starting at position 3725 of SEQ ID NO: 461
uagaaaguugcacaauagu

SEQ ID NO: 38909 - RNA, 19 nt, Artificial Sequence
  Description of Artificial Sequence: Synthetic oligonucleotide
  Antisense strand to SEQ ID NO: 38908
acuauugugcaacuuucua

SEQ ID NO: 38910 - RNA, 19 nt, Artificial Sequence
  Description of Artificial Sequence: Synthetic oligonucleotide
  Sense strand starting at position 432 of SEQ ID NO: 462
gaaagagacccuggugagu

SEQ ID NO: 38911 - RNA, 19 nt, Artificial Sequence
  Description of Artificial Sequence: Synthetic oligonucleotide
  Antisense strand to SEQ ID NO: 38910
acucaccagggucucuuuc

SEQ ID NO: 38912 - RNA, 19 nt, Artificial Sequence
  Description of Artificial Sequence: Synthetic oligonucleotide
  Sense strand starting at position 521 of SEQ ID NO: 462
cugccaugugucuguagga

SEQ ID NO: 38913 - RNA, 19 nt, Artificial Sequence
  Description of Artificial Sequence: Synthetic oligonucleotide
  Antisense strand to SEQ ID NO: 38912
uccuacagacacauggcag

SEQ ID NO: 38914 - RNA, 19 nt, Artificial Sequence
  Description of Artificial Sequence: Synthetic oligonucleotide
  Sense strand starting at position 577 of SEQ ID NO: 462
ggugguguauguuucauua

SEQ ID NO: 38915 - RNA, 19 nt, Artificial Sequence
  Description of Artificial Sequence: Synthetic oligonucleotide
  Antisense strand to SEQ ID NO: 38914
uaaugaaacauacaccacc

SEQ ID NO: 38916 - RNA, 19 nt, Artificial Sequence
  Description of Artificial Sequence: Synthetic oligonucleotide
  Sense strand starting at position 581 of SEQ ID NO: 462
guguauguuucauuagagg

SEQ ID NO: 38917 - RNA, 19 nt, Artificial Sequence
  Description of Artificial Sequence: Synthetic oligonucleotide
  Antisense strand to SEQ ID NO: 38916
ccucuaaugaaacauacac

SEQ ID NO: 38918 - RNA, 19 nt, Artificial Sequence
  Description of Artificial Sequence: Synthetic oligonucleotide
  Sense strand starting at position 598 of SEQ ID NO: 462
ggaggguguccgcaugaau

SEQ ID NO: 38919 - RNA, 19 nt, Artificial Sequence
  Description of Artificial Sequence: Synthetic oligonucleotide
  Antisense strand to SEQ ID NO: 38918
auucaugcggacacccucc

SEQ ID NO: 38920 - RNA, 19 nt, Artificial Sequence
  Description of Artificial Sequence: Synthetic oligonucleotide
  Sense strand starting at position 601 of SEQ ID NO: 462
ggguguccgcaugaaucua

SEQ ID NO: 38921 - RNA, 19 nt, Artificial Sequence
  Description of Artificial Sequence: Synthetic oligonucleotide
  Antisense strand to SEQ ID NO: 38920
uagauucaugcggacaccc

SEQ ID NO: 38922 - RNA, 19 nt, Artificial Sequence
  Description of Artificial Sequence: Synthetic oligonucleotide
  Sense strand starting at position 687 of SEQ ID NO: 462
gugagcaugucugugguuu

SEQ ID NO: 38923 - RNA, 19 nt, Artificial Sequence
  Description of Artificial Sequence: Synthetic oligonucleotide
  Antisense strand to SEQ ID NO: 38922
aaaccacagacaugcucac

SEQ ID NO: 38924 - RNA, 19 nt, Artificial Sequence
  Description of Artificial Sequence: Synthetic oligonucleotide
  Sense strand starting at position 698 of SEQ ID NO: 462
ugugguuucuccucauuau

SEQ ID NO: 38925 - RNA, 19 nt, Artificial Sequence
  Description of Artificial Sequence: Synthetic oligonucleotide
  Antisense strand to SEQ ID NO: 38924
auaaugaggagaaaccaca

SEQ ID NO: 38926 - RNA, 19 nt, Artificial Sequence
  Description of Artificial Sequence: Synthetic oligonucleotide
  Sense strand starting at position 699 of SEQ ID NO: 462
gugguuucuccucauuauc

SEQ ID NO: 38927 - RNA, 19 nt, Artificial Sequence
  Description of Artificial Sequence: Synthetic oligonucleotide
  Antisense strand to SEQ ID NO: 38926
gauaaugaggagaaaccac

SEQ ID NO: 38928 - RNA, 19 nt, Artificial Sequence
  Description of Artificial Sequence: Synthetic oligonucleotide
  Sense strand starting at position 701 of SEQ ID NO: 462
gguuucuccucauuaucau

SEQ ID NO: 38929 - RNA, 19 nt, Artificial Sequence
  Description of Artificial Sequence: Synthetic oligonucleotide
  Antisense strand to SEQ ID NO: 38928
augauaaugaggagaaacc

SEQ ID NO: 38930 - RNA, 19 nt, Artificial Sequence
  Description of Artificial Sequence: Synthetic oligonucleotide
  Sense strand starting at position 722 of SEQ ID NO: 462
agggucauuguguguccaa

SEQ ID NO: 38931 - RNA, 19 nt, Artificial Sequence
  Description of Artificial Sequence: Synthetic oligonucleotide
  Antisense strand to SEQ ID NO: 38930
uuggacacacaaugacccu

SEQ ID NO: 38932 - RNA, 19 nt, Artificial Sequence
  Description of Artificial Sequence: Synthetic oligonucleotide
  Sense strand starting at position 723 of SEQ ID NO: 462
gggucauuguguguccaag

SEQ ID NO: 38933 - RNA, 19 nt, Artificial Sequence
  Description of Artificial Sequence: Synthetic oligonucleotide
  Antisense strand to SEQ ID NO: 38932
cuuggacacacaaugaccc

SEQ ID NO: 38934 - RNA, 19 nt, Artificial Sequence
  Description of Artificial Sequence: Synthetic oligonucleotide
  Sense strand starting at position 747 of SEQ ID NO: 462
guagguguucaccagucca

SEQ ID NO: 38935 - RNA, 19 nt, Artificial Sequence
  Description of Artificial Sequence: Synthetic oligonucleotide
  Antisense strand to SEQ ID NO: 38934
uggacuggugaacaccuac

SEQ ID NO: 38936 - RNA, 19 nt, Artificial Sequence
  Description of Artificial Sequence: Synthetic oligonucleotide
  Sense strand starting at position 783 of SEQ ID NO: 462
gcaccugugcccugaugga

SEQ ID NO: 38937 - RNA, 19 nt, Artificial Sequence
  Description of Artificial Sequence: Synthetic oligonucleotide
  Antisense strand to SEQ ID NO: 38936
uccaucagggcacaggugc

SEQ ID NO: 38938 - RNA, 19 nt, Artificial Sequence
  Description of Artificial Sequence: Synthetic oligonucleotide
  Sense strand starting at position 812 of SEQ ID NO: 462
cauggugucucuccagaga

SEQ ID NO: 38939 - RNA, 19 nt, Artificial Sequence
  Description of Artificial Sequence: Synthetic oligonucleotide
  Antisense strand to SEQ ID NO: 38938
ucucuggagagacaccaug

SEQ ID NO: 38940 - RNA, 19 nt, Artificial Sequence
  Description of Artificial Sequence: Synthetic oligonucleotide
  Sense strand starting at position 815 of SEQ ID NO: 462
ggugucucuccagagauca

SEQ ID NO: 38941 - RNA, 19 nt, Artificial Sequence
  Description of Artificial Sequence: Synthetic oligonucleotide
  Antisense strand to SEQ ID NO: 38940
ugaucucuggagagacacc

SEQ ID NO: 38942 - RNA, 19 nt, Artificial Sequence
  Description of Artificial Sequence: Synthetic oligonucleotide
  Sense strand starting at position 871 of SEQ ID NO: 462
uaaggaucagucgaucuua

SEQ ID NO: 38943 - RNA, 19 nt, Artificial Sequence
  Description of Artificial Sequence: Synthetic oligonucleotide
  Antisense strand to SEQ ID NO: 38942
uaagaucgacugauccuua

SEQ ID NO: 38944 - RNA, 19 nt, Artificial Sequence
  Description of Artificial Sequence: Synthetic oligonucleotide
  Sense strand starting at position 1004 of SEQ ID NO: 462
ggacucugcuaagaggagu

SEQ ID NO: 38945 - RNA, 19 nt, Artificial Sequence
  Description of Artificial Sequence: Synthetic oligonucleotide
  Antisense strand to SEQ ID NO: 38944
acuccucuuagcagagucc

SEQ ID NO: 38946 - RNA, 19 nt, Artificial Sequence
  Description of Artificial Sequence: Synthetic oligonucleotide
  Sense strand starting at position 1048 of SEQ ID NO: 462
gcaagagguacugauagca

SEQ ID NO: 38947 - RNA, 19 nt, Artificial Sequence
  Description of Artificial Sequence: Synthetic oligonucleotide
  Antisense strand to SEQ ID NO: 38946
ugcuaucaguaccucuugc

SEQ ID NO: 38948 - RNA, 19 nt, Artificial Sequence
  Description of Artificial Sequence: Synthetic oligonucleotide
  Sense strand starting at position 1403 of SEQ ID NO: 462
caggaacauuccugggaac

SEQ ID NO: 38949 - RNA, 19 nt, Artificial Sequence
  Description of Artificial Sequence: Synthetic oligonucleotide
  Antisense strand to SEQ ID NO: 38948
guucccaggaauguuccug

SEQ ID NO: 38950 - RNA, 19 nt, Artificial Sequence
  Description of Artificial Sequence: Synthetic oligonucleotide
  Sense strand starting at position 1406 of SEQ ID NO: 462
gaacauuccugggaacuug

SEQ ID NO: 38951 - RNA, 19 nt, Artificial Sequence
  Description of Artificial Sequence: Synthetic oligonucleotide
  Antisense strand to SEQ ID NO: 38950
caaguucccaggaauguuc

SEQ ID NO: 38952 - RNA, 19 nt, Artificial Sequence
  Description of Artificial Sequence: Synthetic oligonucleotide
  Sense strand starting at position 1503 of SEQ ID NO: 462
acuggaaggucuccagcaa

SEQ ID NO: 38953 - RNA, 19 nt, Artificial Sequence
  Description of Artificial Sequence: Synthetic oligonucleotide
  Antisense strand to SEQ ID NO: 38952
uugcuggagaccuuccagu

SEQ ID NO: 38954 - RNA, 19 nt, Artificial Sequence
  Description of Artificial Sequence: Synthetic oligonucleotide
  Sense strand starting at position 1504 of SEQ ID NO: 462
cuggaaggucuccagcaaa

SEQ ID NO: 38955 - RNA, 19 nt, Artificial Sequence
  Description of Artificial Sequence: Synthetic oligonucleotide
  Antisense strand to SEQ ID NO: 38954
uuugcuggagaccuuccag

SEQ ID NO: 38956 - RNA, 19 nt, Artificial Sequence
  Description of Artificial Sequence: Synthetic oligonucleotide
  Sense strand starting at position 1507 of SEQ ID NO: 462
gaaggucuccagcaaauca

SEQ ID NO: 38957 - RNA, 19 nt, Artificial Sequence
  Description of Artificial Sequence: Synthetic oligonucleotide
  Antisense strand to SEQ ID NO: 38956
ugauuugcuggagaccuuc

SEQ ID NO: 38958 - RNA, 19 nt, Artificial Sequence
  Description of Artificial Sequence: Synthetic oligonucleotide
  Sense strand starting at position 1518 of SEQ ID NO: 462
gcaaaucagcaauggcaga

SEQ ID NO: 38959 - RNA, 19 nt, Artificial Sequence
  Description of Artificial Sequence: Synthetic oligonucleotide
  Antisense strand to SEQ ID NO: 38958
ucugccauugcugauuugc

SEQ ID NO: 38960 - RNA, 19 nt, Artificial Sequence
  Description of Artificial Sequence: Synthetic oligonucleotide
  Sense strand starting at position 2618 of SEQ ID NO: 462
gaccucgucccucggaaau

SEQ ID NO: 38961 - RNA, 19 nt, Artificial Sequence
  Description of Artificial Sequence: Synthetic oligonucleotide
  Antisense strand to SEQ ID NO: 38960
auuuccgagggacgagguc

SEQ ID NO: 38962 - RNA, 19 nt, Artificial Sequence
  Description of Artificial Sequence: Synthetic oligonucleotide
  Sense strand starting at position 2663 of SEQ ID NO: 462
gggcagucacguggucaga

SEQ ID NO: 38963 - RNA, 19 nt, Artificial Sequence
  Description of Artificial Sequence: Synthetic oligonucleotide
  Antisense strand to SEQ ID NO: 38962
ucugaccacgugacugccc

SEQ ID NO: 38964 - RNA, 19 nt, Artificial Sequence
  Description of Artificial Sequence: Synthetic oligonucleotide
  Sense strand starting at position 2708 of SEQ ID NO: 462
agcuguguggaggaagaua

SEQ ID NO: 38965 - RNA, 19 nt, Artificial Sequence
  Description of Artificial Sequence: Synthetic oligonucleotide
  Antisense strand to SEQ ID NO: 38964
uaucuuccuccacacagcu

SEQ ID NO: 38966 - RNA, 19 nt, Artificial Sequence
  Description of Artificial Sequence: Synthetic oligonucleotide
  Sense strand starting at position 2947 of SEQ ID NO: 462
uaaugaauuggaugagccu

SEQ ID NO: 38967 - RNA, 19 nt, Artificial Sequence
  Description of Artificial Sequence: Synthetic oligonucleotide
  Antisense strand to SEQ ID NO: 38966
aggcucauccaauucauua

SEQ ID NO: 38968 - RNA, 19 nt, Artificial Sequence
  Description of Artificial Sequence: Synthetic oligonucleotide
  Sense strand starting at position 2994 of SEQ ID NO: 462
gugagaguucugggauagc

SEQ ID NO: 38969 - RNA, 19 nt, Artificial Sequence
  Description of Artificial Sequence: Synthetic oligonucleotide
  Antisense strand to SEQ ID NO: 38968
gcuaucccagaacucucac

SEQ ID NO: 38970 - RNA, 19 nt, Artificial Sequence
  Description of Artificial Sequence: Synthetic oligonucleotide
  Sense strand starting at position 3092 of SEQ ID NO: 462
gcaggacacucaucagcau

SEQ ID NO: 38971 - RNA, 19 nt, Artificial Sequence
  Description of Artificial Sequence: Synthetic oligonucleotide
  Antisense strand to SEQ ID NO: 38970
augcugaugaguguccugc

SEQ ID NO: 38972 - RNA, 19 nt, Artificial Sequence
  Description of Artificial Sequence: Synthetic oligonucleotide
  Sense strand starting at position 3193 of SEQ ID NO: 462
aaggcagagugcuucuaga

SEQ ID NO: 38973 - RNA, 19 nt, Artificial Sequence
  Description of Artificial Sequence: Synthetic oligonucleotide
  Antisense strand to SEQ ID NO: 38972
ucuagaagcacucugccuu

SEQ ID NO: 38974 - RNA, 19 nt, Artificial Sequence
  Description of Artificial Sequence: Synthetic oligonucleotide
  Sense strand starting at position 3245 of SEQ ID NO: 462
gaaggacauucuuagggac

SEQ ID NO: 38975 - RNA, 19 nt, Artificial Sequence
  Description of Artificial Sequence: Synthetic oligonucleotide
  Antisense strand to SEQ ID NO: 38974
gucccuaagaauguccuuc

SEQ ID NO: 38976 - RNA, 19 nt, Artificial Sequence
  Description of Artificial Sequence: Synthetic oligonucleotide
  Sense strand starting at position 3265 of SEQ ID NO: 462
gcaauuaaggguuggaggu

SEQ ID NO: 38977 - RNA, 19 nt, Artificial Sequence
  Description of Artificial Sequence: Synthetic oligonucleotide
  Antisense strand to SEQ ID NO: 38976
accuccaacccuuaauugc

SEQ ID NO: 38978 - RNA, 19 nt, Artificial Sequence
  Description of Artificial Sequence: Synthetic oligonucleotide
  Sense strand starting at position 3266 of SEQ ID NO: 462
caauuaaggguuggagguu

SEQ ID NO: 38979 - RNA, 19 nt, Artificial Sequence
  Description of Artificial Sequence: Synthetic oligonucleotide
  Antisense strand to SEQ ID NO: 38978
aaccuccaacccuuaauug

SEQ ID NO: 38980 - RNA, 19 nt, Artificial Sequence
  Description of Artificial Sequence: Synthetic oligonucleotide
  Sense strand starting at position 3591 of SEQ ID NO: 462
ugggcauauguggagguau

SEQ ID NO: 38981 - RNA, 19 nt, Artificial Sequence
  Description of Artificial Sequence: Synthetic oligonucleotide
  Antisense strand to SEQ ID NO: 38980
auaccuccacauaugccca

SEQ ID NO: 38982 - RNA, 19 nt, Artificial Sequence
  Description of Artificial Sequence: Synthetic oligonucleotide
  Sense strand starting at position 3593 of SEQ ID NO: 462
ggcauauguggagguaugu

SEQ ID NO: 38983 - RNA, 19 nt, Artificial Sequence
  Description of Artificial Sequence: Synthetic oligonucleotide
  Antisense strand to SEQ ID NO: 38982
acauaccuccacauaugcc

SEQ ID NO: 38984 - RNA, 19 nt, Artificial Sequence
  Description of Artificial Sequence: Synthetic oligonucleotide
  Sense strand starting at position 3797 of SEQ ID NO: 462
gcuguguggguguauugua

SEQ ID NO: 38985 - RNA, 19 nt, Artificial Sequence
  Description of Artificial Sequence: Synthetic oligonucleotide
  Antisense strand to SEQ ID NO: 38984
uacaauacacccacacagc

SEQ ID NO: 38986 - RNA, 19 nt, Artificial Sequence
  Description of Artificial Sequence: Synthetic oligonucleotide
  Sense strand starting at position 3804 of SEQ ID NO: 462
ggguguauuguagcuuugu

SEQ ID NO: 38987 - RNA, 19 nt, Artificial Sequence
  Description of Artificial Sequence: Synthetic oligonucleotide
  Antisense strand to SEQ ID NO: 38986
acaaagcuacaauacaccc

SEQ ID NO: 38988 - RNA, 19 nt, Artificial Sequence
  Description of Artificial Sequence: Synthetic oligonucleotide
  Sense strand starting at position 3806 of SEQ ID NO: 462
guguauuguagcuuugugu

SEQ ID NO: 38989 - RNA, 19 nt, Artificial Sequence
  Description of Artificial Sequence: Synthetic oligonucleotide
  Antisense strand to SEQ ID NO: 38988
acacaaagcuacaauacac

SEQ ID NO: 38990 - RNA, 19 nt, Artificial Sequence
  Description of Artificial Sequence: Synthetic oligonucleotide
  Sense strand starting at position 262 of SEQ ID NO: 463
ucacaaaguucuccuuugu

SEQ ID NO: 38991 - RNA, 19 nt, Artificial Sequence
  Description of Artificial Sequence: Synthetic oligonucleotide
  Antisense strand to SEQ ID NO: 38990
acaaaggagaacuuuguga

SEQ ID NO: 38992 - RNA, 19 nt, Artificial Sequence
  Description of Artificial Sequence: Synthetic oligonucleotide
  Sense strand starting at position 522 of SEQ ID NO: 463
ugagaaucuucuguauagc

SEQ ID NO: 38993 - RNA, 19 nt, Artificial Sequence
  Description of Artificial Sequence: Synthetic oligonucleotide
  Antisense strand to SEQ ID NO: 38992
gcuauacagaagauucuca

SEQ ID NO: 38994 - RNA, 19 nt, Artificial Sequence
  Description of Artificial Sequence: Synthetic oligonucleotide
  Sense strand starting at position 523 of SEQ ID NO: 463
gagaaucuucuguauagca

SEQ ID NO: 38995 - RNA, 19 nt, Artificial Sequence
  Description of Artificial Sequence: Synthetic oligonucleotide
  Antisense strand to SEQ ID NO: 38994
ugcuauacagaagauucuc

SEQ ID NO: 38996 - RNA, 19 nt, Artificial Sequence
  Description of Artificial Sequence: Synthetic oligonucleotide
  Sense strand starting at position 617 of SEQ ID NO: 463
ccaguuugcagucgaagaa

SEQ ID NO: 38997 - RNA, 19 nt, Artificial Sequence
  Description of Artificial Sequence: Synthetic oligonucleotide
  Antisense strand to SEQ ID NO: 38996
uucuucgacugcaaacugg

SEQ ID NO: 38998 - RNA, 19 nt, Artificial Sequence
  Description of Artificial Sequence: Synthetic oligonucleotide
  Sense strand starting at position 618 of SEQ ID NO: 463
caguuugcagucgaagaaa

SEQ ID NO: 38999 - RNA, 19 nt, Artificial Sequence
  Description of Artificial Sequence: Synthetic oligonucleotide
  Antisense strand to SEQ ID NO: 38998
uuucuucgacugcaaacug

SEQ ID NO: 39000 - RNA, 19 nt, Artificial Sequence
  Description of Artificial Sequence: Synthetic oligonucleotide
  Sense strand starting at position 629 of SEQ ID NO: 463
cgaagaaacuggcucagaa

SEQ ID NO: 39001 - RNA, 19 nt, Artificial Sequence
  Description of Artificial Sequence: Synthetic oligonucleotide
  Antisense strand to SEQ ID NO: 39000
uucugagccaguuucuucg

SEQ ID NO: 39002 - RNA, 19 nt, Artificial Sequence
  Description of Artificial Sequence: Synthetic oligonucleotide
  Sense strand starting at position 656 of SEQ ID NO: 463
guccauggucacugagagu

SEQ ID NO: 39003 - RNA, 19 nt, Artificial Sequence
  Description of Artificial Sequence: Synthetic oligonucleotide
  Antisense strand to SEQ ID NO: 39002
acucucagugaccauggac

SEQ ID NO: 39004 - RNA, 19 nt, Artificial Sequence
  Description of Artificial Sequence: Synthetic oligonucleotide
  Sense strand starting at position 853 of SEQ ID NO: 463
guuguucuuacgugaacga

SEQ ID NO: 39005 - RNA, 19 nt, Artificial Sequence
  Description of Artificial Sequence: Synthetic oligonucleotide
  Antisense strand to SEQ ID NO: 39004
ucguucacguaagaacaac

SEQ ID NO: 39006 - RNA, 19 nt, Artificial Sequence
  Description of Artificial Sequence: Synthetic oligonucleotide
  Sense strand starting at position 1150 of SEQ ID NO: 463
ggucacaagucauaucaag

SEQ ID NO: 39007 - RNA, 19 nt, Artificial Sequence
  Description of Artificial Sequence: Synthetic oligonucleotide
  Antisense strand to SEQ ID NO: 39006
cuugauaugacuugugacc

SEQ ID NO: 39008 - RNA, 19 nt, Artificial Sequence
  Description of Artificial Sequence: Synthetic oligonucleotide
  Sense strand starting at position 1205 of SEQ ID NO: 463
cugcccaucucugaacaga

SEQ ID NO: 39009 - RNA, 19 nt, Artificial Sequence
  Description of Artificial Sequence: Synthetic oligonucleotide
  Antisense strand to SEQ ID NO: 39008
ucuguucagagaugggcag

SEQ ID NO: 39010 - RNA, 19 nt, Artificial Sequence
  Description of Artificial Sequence: Synthetic oligonucleotide
  Sense strand starting at position 1527 of SEQ ID NO: 463
gugaaugagcaccauugua

SEQ ID NO: 39011 - RNA, 19 nt, Artificial Sequence
  Description of Artificial Sequence: Synthetic oligonucleotide
  Antisense strand to SEQ ID NO: 39010
uacaauggugcucauucac

SEQ ID NO: 39012 - RNA, 19 nt, Artificial Sequence
  Description of Artificial Sequence: Synthetic oligonucleotide
  Sense strand starting at position 2205 of SEQ ID NO: 463
cggagaugaugguccaguu

SEQ ID NO: 39013 - RNA, 19 nt, Artificial Sequence
  Description of Artificial Sequence: Synthetic oligonucleotide
  Antisense strand to SEQ ID NO: 39012
aacuggaccaucaucuccg

SEQ ID NO: 39014 - RNA, 19 nt, Artificial Sequence
  Description of Artificial Sequence: Synthetic oligonucleotide
  Sense strand starting at position 2214 of SEQ ID NO: 463
ugguccaguuucuuuguga

SEQ ID NO: 39015 - RNA, 19 nt, Artificial Sequence
  Description of Artificial Sequence: Synthetic oligonucleotide
  Antisense strand to SEQ ID NO: 39014
ucacaaagaaacuggacca

SEQ ID NO: 39016 - RNA, 19 nt, Artificial Sequence
  Description of Artificial Sequence: Synthetic oligonucleotide
  Sense strand starting at position 2215 of SEQ ID NO: 463
gguccaguuucuuugugag

SEQ ID NO: 39017 - RNA, 19 nt, Artificial Sequence
  Description of Artificial Sequence: Synthetic oligonucleotide
  Antisense strand to SEQ ID NO: 39016
cucacaaagaaacuggacc

SEQ ID NO: 39018 - RNA, 19 nt, Artificial Sequence
  Description of Artificial Sequence: Synthetic oligonucleotide
  Sense strand starting at position 2217 of SEQ ID NO: 463
uccaguuucuuugugagaa

SEQ ID NO: 39019 - RNA, 19 nt, Artificial Sequence
  Description of Artificial Sequence: Synthetic oligonucleotide
  Antisense strand to SEQ ID NO: 39018
uucucacaaagaaacugga

SEQ ID NO: 39020 - RNA, 19 nt, Artificial Sequence
  Description of Artificial Sequence: Synthetic oligonucleotide
  Sense strand starting at position 2618 of SEQ ID NO: 463
ccuggaggucugcagugaa

SEQ ID NO: 39021 - RNA, 19 nt, Artificial Sequence
  Description of Artificial Sequence: Synthetic oligonucleotide
  Antisense strand to SEQ ID NO: 39020
uucacugcagaccuccagg

SEQ ID NO: 39022 - RNA, 19 nt, Artificial Sequence
  Description of Artificial Sequence: Synthetic oligonucleotide
  Sense strand starting at position 3014 of SEQ ID NO: 463
ggauacuaauaguccauau

SEQ ID NO: 39023 - RNA, 19 nt, Artificial Sequence
  Description of Artificial Sequence: Synthetic oligonucleotide
  Antisense strand to SEQ ID NO: 39022
auauggacuauuaguaucc

SEQ ID NO: 39024 - RNA, 19 nt, Artificial Sequence
  Description of Artificial Sequence: Synthetic oligonucleotide
  Sense strand starting at position 3116 of SEQ ID NO: 463
ucgccucgcggguucaaau

SEQ ID NO: 39025 - RNA, 19 nt, Artificial Sequence
  Description of Artificial Sequence: Synthetic oligonucleotide
  Antisense strand to SEQ ID NO: 39024
auuugaacccgcgaggcga

SEQ ID NO: 39026 - RNA, 19 nt, Artificial Sequence
  Description of Artificial Sequence: Synthetic oligonucleotide
  Sense strand starting at position 3361 of SEQ ID NO: 463
gaaauugaaugagaugacu

SEQ ID NO: 39027 - RNA, 19 nt, Artificial Sequence
  Description of Artificial Sequence: Synthetic oligonucleotide
  Antisense strand to SEQ ID NO: 39026
agucaucucauucaauuuc

SEQ ID NO: 39028 - RNA, 19 nt, Artificial Sequence
  Description of Artificial Sequence: Synthetic oligonucleotide
  Sense strand starting at position 3372 of SEQ ID NO: 463
agaugacucaugcgaggca

SEQ ID NO: 39029 - RNA, 19 nt, Artificial Sequence
  Description of Artificial Sequence: Synthetic oligonucleotide
  Antisense strand to SEQ ID NO: 39028
ugccucgcaugagucaucu

SEQ ID NO: 39030 - RNA, 19 nt, Artificial Sequence
  Description of Artificial Sequence: Synthetic oligonucleotide
  Sense strand starting at position 3375 of SEQ ID NO: 463
ugacucaugcgaggcauuu

SEQ ID NO: 39031 - RNA, 19 nt, Artificial Sequence
  Description of Artificial Sequence: Synthetic oligonucleotide
  Antisense strand to SEQ ID NO: 39030
aaaugccucgcaugaguca

SEQ ID NO: 39032 - RNA, 19 nt, Artificial Sequence
  Description of Artificial Sequence: Synthetic oligonucleotide
  Sense strand starting at position 3410 of SEQ ID NO: 463
auaguaggugcuugauaca

SEQ ID NO: 39033 - RNA, 19 nt, Artificial Sequence
  Description of Artificial Sequence: Synthetic oligonucleotide
  Antisense strand to SEQ ID NO: 39032
uguaucaagcaccuacuau

SEQ ID NO: 39034 - RNA, 19 nt, Artificial Sequence
  Description of Artificial Sequence: Synthetic oligonucleotide
  Sense strand starting at position 3439 of SEQ ID NO: 463
ccuuaugauuuauggauga

SEQ ID NO: 39035 - RNA, 19 nt, Artificial Sequence
  Description of Artificial Sequence: Synthetic oligonucleotide
  Antisense strand to SEQ ID NO: 39034
ucauccauaaaucauaagg

SEQ ID NO: 39036 - RNA, 19 nt, Artificial Sequence
  Description of Artificial Sequence: Synthetic oligonucleotide
  Sense strand starting at position 3582 of SEQ ID NO: 463
uuugaaagguuguccugga

SEQ ID NO: 39037 - RNA, 19 nt, Artificial Sequence
  Description of Artificial Sequence: Synthetic oligonucleotide
  Antisense strand to SEQ ID NO: 39036
uccaggacaaccuuucaaa

SEQ ID NO: 39038 - RNA, 19 nt, Artificial Sequence
  Description of Artificial Sequence: Synthetic oligonucleotide
  Sense strand starting at position 3598 of SEQ ID NO: 463
ggagcugaguuugggagaa

SEQ ID NO: 39039 - RNA, 19 nt, Artificial Sequence
  Description of Artificial Sequence: Synthetic oligonucleotide
  Antisense strand to SEQ ID NO: 39038
uucucccaaacucagcucc

SEQ ID NO: 39040 - RNA, 19 nt, Artificial Sequence
  Description of Artificial Sequence: Synthetic oligonucleotide
  Sense strand starting at position 3600 of SEQ ID NO: 463
agcugaguuugggagaaag

SEQ ID NO: 39041 - RNA, 19 nt, Artificial Sequence
  Description of Artificial Sequence: Synthetic oligonucleotide
  Antisense strand to SEQ ID NO: 39040
cuuucucccaaacucagcu

SEQ ID NO: 39042 - RNA, 19 nt, Artificial Sequence
  Description of Artificial Sequence: Synthetic oligonucleotide
  Sense strand starting at position 3614 of SEQ ID NO: 463
gaaagagcuugagagaaug

SEQ ID NO: 39043 - RNA, 19 nt, Artificial Sequence
  Description of Artificial Sequence: Synthetic oligonucleotide
  Antisense strand to SEQ ID NO: 39042
cauucucucaagcucuuuc

SEQ ID NO: 39044 - RNA, 19 nt, Artificial Sequence
  Description of Artificial Sequence: Synthetic oligonucleotide
  Sense strand starting at position 3624 of SEQ ID NO: 463
gagagaauguaauugcucu

SEQ ID NO: 39045 - RNA, 19 nt, Artificial Sequence
  Description of Artificial Sequence: Synthetic oligonucleotide
  Antisense strand to SEQ ID NO: 39044
agagcaauuacauucucuc

SEQ ID NO: 39046 - RNA, 19 nt, Artificial Sequence
  Description of Artificial Sequence: Synthetic oligonucleotide
  Sense strand starting at position 3628 of SEQ ID NO: 463
gaauguaauugcucugccu

SEQ ID NO: 39047 - RNA, 19 nt, Artificial Sequence
  Description of Artificial Sequence: Synthetic oligonucleotide
  Antisense strand to SEQ ID NO: 39046
aggcagagcaauuacauuc

SEQ ID NO: 39048 - RNA, 19 nt, Artificial Sequence
  Description of Artificial Sequence: Synthetic oligonucleotide
  Sense strand starting at position 3630 of SEQ ID NO: 463
auguaauugcucugccuaa

SEQ ID NO: 39049 - RNA, 19 nt, Artificial Sequence
  Description of Artificial Sequence: Synthetic oligonucleotide
  Antisense strand to SEQ ID NO: 39048
uuaggcagagcaauuacau

SEQ ID NO: 39050 - RNA, 19 nt, Artificial Sequence
  Description of Artificial Sequence: Synthetic oligonucleotide
  Sense strand starting at position 3642 of SEQ ID NO: 463
ugccuaacagagugaagaa

SEQ ID NO: 39051 - RNA, 19 nt, Artificial Sequence
  Description of Artificial Sequence: Synthetic oligonucleotide
  Antisense strand to SEQ ID NO: 39050
uucuucacucuguuaggca

SEQ ID NO: 39052 - RNA, 19 nt, Artificial Sequence
  Description of Artificial Sequence: Synthetic oligonucleotide
  Sense strand starting at position 3666 of SEQ ID NO: 463
ugaaguuuguuggaagaug

SEQ ID NO: 39053 - RNA, 19 nt, Artificial Sequence
  Description of Artificial Sequence: Synthetic oligonucleotide
  Antisense strand to SEQ ID NO: 39052
caucuuccaacaaacuuca

SEQ ID NO: 39054 - RNA, 19 nt, Artificial Sequence
  Description of Artificial Sequence: Synthetic oligonucleotide
  Sense strand starting at position 3762 of SEQ ID NO: 463
uuagaacugggauguccaa

SEQ ID NO: 39055 - RNA, 19 nt, Artificial Sequence
  Description of Artificial Sequence: Synthetic oligonucleotide
  Antisense strand to SEQ ID NO: 39054
uuggacaucccaguucuaa

SEQ ID NO: 39056 - RNA, 19 nt, Artificial Sequence
  Description of Artificial Sequence: Synthetic oligonucleotide
  Sense strand starting at position 3841 of SEQ ID NO: 463
caagaaaggccuuguguga

SEQ ID NO: 39057 - RNA, 19 nt, Artificial Sequence
  Description of Artificial Sequence: Synthetic oligonucleotide
  Antisense strand to SEQ ID NO: 39056
ucacacaaggccuuucuug

SEQ ID NO: 39058 - RNA, 19 nt, Artificial Sequence
  Description of Artificial Sequence: Synthetic oligonucleotide
  Sense strand starting at position 3845 of SEQ ID NO: 463
aaaggccuugugugaguaa

SEQ ID NO: 39059 - RNA, 19 nt, Artificial Sequence
  Description of Artificial Sequence: Synthetic oligonucleotide
  Antisense strand to SEQ ID NO: 39058
uuacucacacaaggccuuu

SEQ ID NO: 39060 - RNA, 19 nt, Artificial Sequence
  Description of Artificial Sequence: Synthetic oligonucleotide
  Sense strand starting at position 3847 of SEQ ID NO: 463
aggccuugugugaguaagu

SEQ ID NO: 39061 - RNA, 19 nt, Artificial Sequence
  Description of Artificial Sequence: Synthetic oligonucleotide
  Antisense strand to SEQ ID NO: 39060
acuuacucacacaaggccu

SEQ ID NO: 39062 - RNA, 19 nt, Artificial Sequence
  Description of Artificial Sequence: Synthetic oligonucleotide
  Sense strand starting at position 3848 of SEQ ID NO: 463
ggccuugugugaguaaguu

SEQ ID NO: 39063 - RNA, 19 nt, Artificial Sequence
  Description of Artificial Sequence: Synthetic oligonucleotide
  Antisense strand to SEQ ID NO: 39062
aacuuacucacacaaggcc

SEQ ID NO: 39064 - RNA, 19 nt, Artificial Sequence
  Description of Artificial Sequence: Synthetic oligonucleotide
  Sense strand starting at position 3875 of SEQ ID NO: 463
guguguggaaauuauggaa

SEQ ID NO: 39065 - RNA, 19 nt, Artificial Sequence
  Description of Artificial Sequence: Synthetic oligonucleotide
  Antisense strand to SEQ ID NO: 39064
uuccauaauuuccacacac

SEQ ID NO: 39066 - RNA, 19 nt, Artificial Sequence
  Description of Artificial Sequence: Synthetic oligonucleotide
  Sense strand starting at position 3897 of SEQ ID NO: 463
ggaugaguuucacagucug

SEQ ID NO: 39067 - RNA, 19 nt, Artificial Sequence
  Description of Artificial Sequence: Synthetic oligonucleotide
  Antisense strand to SEQ ID NO: 39066
cagacugugaaacucaucc

SEQ ID NO: 39068 - RNA, 19 nt, Artificial Sequence
  Description of Artificial Sequence: Synthetic oligonucleotide
  Sense strand starting at position 3916 of SEQ ID NO: 463
gacagcacacauugaugua

SEQ ID NO: 39069 - RNA, 19 nt, Artificial Sequence
  Description of Artificial Sequence: Synthetic oligonucleotide
  Antisense strand to SEQ ID NO: 39068
uacaucaaugugugcuguc

SEQ ID NO: 39070 - RNA, 19 nt, Artificial Sequence
  Description of Artificial Sequence: Synthetic oligonucleotide
  Sense strand starting at position 5 of SEQ ID NO: 464
agguaacugauauguguga

SEQ ID NO: 39071 - RNA, 19 nt, Artificial Sequence
  Description of Artificial Sequence: Synthetic oligonucleotide
  Antisense strand to SEQ ID NO: 39070
ucacacauaucaguuaccu

SEQ ID NO: 39072 - RNA, 19 nt, Artificial Sequence
  Description of Artificial Sequence: Synthetic oligonucleotide
  Sense strand starting at position 7 of SEQ ID NO: 464
guaacugauaugugugaau

SEQ ID NO: 39073 - RNA, 19 nt, Artificial Sequence
  Description of Artificial Sequence: Synthetic oligonucleotide
  Antisense strand to SEQ ID NO: 39072
auucacacauaucaguuac

SEQ ID NO: 39074 - RNA, 19 nt, Artificial Sequence
  Description of Artificial Sequence: Synthetic oligonucleotide
  Sense strand starting at position 10 of SEQ ID NO: 464
acugauaugugugaauuuc

SEQ ID NO: 39075 - RNA, 19 nt, Artificial Sequence
  Description of Artificial Sequence: Synthetic oligonucleotide
  Antisense strand to SEQ ID NO: 39074
gaaauucacacauaucagu

SEQ ID NO: 39076 - RNA, 19 nt, Artificial Sequence
  Description of Artificial Sequence: Synthetic oligonucleotide
  Sense strand starting at position 58 of SEQ ID NO: 464
ccuuccuucugguuuaaag

SEQ ID NO: 39077 - RNA, 19 nt, Artificial Sequence
  Description of Artificial Sequence: Synthetic oligonucleotide
  Antisense strand to SEQ ID NO: 39076
cuuuaaaccagaaggaagg

SEQ ID NO: 39078 - RNA, 19 nt, Artificial Sequence
  Description of Artificial Sequence: Synthetic oligonucleotide
  Sense strand starting at position 166 of SEQ ID NO: 464
agcacagagcuguacuaua

SEQ ID NO: 39079 - RNA, 19 nt, Artificial Sequence
  Description of Artificial Sequence: Synthetic oligonucleotide
  Antisense strand to SEQ ID NO: 39078
uauaguacagcucugugcu

SEQ ID NO: 39080 - RNA, 19 nt, Artificial Sequence
  Description of Artificial Sequence: Synthetic oligonucleotide
  Sense strand starting at position 171 of SEQ ID NO: 464
agagcuguacuauaucaca

SEQ ID NO: 39081 - RNA, 19 nt, Artificial Sequence
  Description of Artificial Sequence: Synthetic oligonucleotide
  Antisense strand to SEQ ID NO: 39080
ugugauauaguacagcucu

SEQ ID NO: 39082 - RNA, 19 nt, Artificial Sequence
  Description of Artificial Sequence: Synthetic oligonucleotide
  Sense strand starting at position 299 of SEQ ID NO: 464
ugugucucgccugagaaca

SEQ ID NO: 39083 - RNA, 19 nt, Artificial Sequence
  Description of Artificial Sequence: Synthetic oligonucleotide
  Antisense strand to SEQ ID NO: 39082
uguucucaggcgagacaca

SEQ ID NO: 39084 - RNA, 19 nt, Artificial Sequence
  Description of Artificial Sequence: Synthetic oligonucleotide
  Sense strand starting at position 337 of SEQ ID NO: 464
gacagaaauugcuccagag

SEQ ID NO: 39085 - RNA, 19 nt, Artificial Sequence
  Description of Artificial Sequence: Synthetic oligonucleotide
  Antisense strand to SEQ ID NO: 39084
cucuggagcaauuucuguc

SEQ ID NO: 39086 - RNA, 19 nt, Artificial Sequence
  Description of Artificial Sequence: Synthetic oligonucleotide
  Sense strand starting at position 339 of SEQ ID NO: 464
cagaaauugcuccagagug

SEQ ID NO: 39087 - RNA, 19 nt, Artificial Sequence
  Description of Artificial Sequence: Synthetic oligonucleotide
  Antisense strand to SEQ ID NO: 39086
cacucuggagcaauuucug

SEQ ID NO: 39088 - RNA, 19 nt, Artificial Sequence
  Description of Artificial Sequence: Synthetic oligonucleotide
  Sense strand starting at position 341 of SEQ ID NO: 464
gaaauugcuccagagugac

SEQ ID NO: 39089 - RNA, 19 nt, Artificial Sequence
  Description of Artificial Sequence: Synthetic oligonucleotide
  Antisense strand to SEQ ID NO: 39088
gucacucuggagcaauuuc

SEQ ID NO: 39090 - RNA, 19 nt, Artificial Sequence
  Description of Artificial Sequence: Synthetic oligonucleotide
  Sense strand starting at position 502 of SEQ ID NO: 464
ucggauccucgcguuuaua

SEQ ID NO: 39091 - RNA, 19 nt, Artificial Sequence
  Description of Artificial Sequence: Synthetic oligonucleotide
  Antisense strand to SEQ ID NO: 39090
uauaaacgcgaggauccga

SEQ ID NO: 39092 - RNA, 19 nt, Artificial Sequence
  Description of Artificial Sequence: Synthetic oligonucleotide
  Sense strand starting at position 503 of SEQ ID NO: 464
cggauccucgcguuuauaa

SEQ ID NO: 39093 - RNA, 19 nt, Artificial Sequence
  Description of Artificial Sequence: Synthetic oligonucleotide
  Antisense strand to SEQ ID NO: 39092
uuauaaacgcgaggauccg

SEQ ID NO: 39094 - RNA, 19 nt, Artificial Sequence
  Description of Artificial Sequence: Synthetic oligonucleotide
  Sense strand starting at position 935 of SEQ ID NO: 464
gucguaucuacaugggaau

SEQ ID NO: 39095 - RNA, 19 nt, Artificial Sequence
  Description of Artificial Sequence: Synthetic oligonucleotide
  Antisense strand to SEQ ID NO: 39094
auucccauguagauacgac

SEQ ID NO: 39096 - RNA, 19 nt, Artificial Sequence
  Description of Artificial Sequence: Synthetic oligonucleotide
  Sense strand starting at position 936 of SEQ ID NO: 464
ucguaucuacaugggaaua

SEQ ID NO: 39097 - RNA, 19 nt, Artificial Sequence
  Description of Artificial Sequence: Synthetic oligonucleotide
  Antisense strand to SEQ ID NO: 39096
uauucccauguagauacga

SEQ ID NO: 39098 - RNA, 19 nt, Artificial Sequence
  Description of Artificial Sequence: Synthetic oligonucleotide
  Sense strand starting at position 1223 of SEQ ID NO: 464
gggugugugcgccagauuu

SEQ ID NO: 39099 - RNA, 19 nt, Artificial Sequence
  Description of Artificial Sequence: Synthetic oligonucleotide
  Antisense strand to SEQ ID NO: 39098
aaaucuggcgcacacaccc

SEQ ID NO: 39100 - RNA, 19 nt, Artificial Sequence
  Description of Artificial Sequence: Synthetic oligonucleotide
  Sense strand starting at position 1918 of SEQ ID NO: 464
cugaguccugaggaaaguu

SEQ ID NO: 39101 - RNA, 19 nt, Artificial Sequence
  Description of Artificial Sequence: Synthetic oligonucleotide
  Antisense strand to SEQ ID NO: 39100
aacuuuccucaggacucag

SEQ ID NO: 39102 - RNA, 19 nt, Artificial Sequence
  Description of Artificial Sequence: Synthetic oligonucleotide
  Sense strand starting at position 1926 of SEQ ID NO: 464
ugaggaaaguuccucuagu

SEQ ID NO: 39103 - RNA, 19 nt, Artificial Sequence
  Description of Artificial Sequence: Synthetic oligonucleotide
  Antisense strand to SEQ ID NO: 39102
acuagaggaacuuuccuca

SEQ ID NO: 39104 - RNA, 19 nt, Artificial Sequence
  Description of Artificial Sequence: Synthetic oligonucleotide
  Sense strand starting at position 1927 of SEQ ID NO: 464
gaggaaaguuccucuaguc

SEQ ID NO: 39105 - RNA, 19 nt, Artificial Sequence
  Description of Artificial Sequence: Synthetic oligonucleotide
  Antisense strand to SEQ ID NO: 39104
gacuagaggaacuuuccuc

SEQ ID NO: 39106 - RNA, 19 nt, Artificial Sequence
  Description of Artificial Sequence: Synthetic oligonucleotide
  Sense strand starting at position 1991 of SEQ ID NO: 464
gcgaguuguggcccugucu

SEQ ID NO: 39107 - RNA, 19 nt, Artificial Sequence
  Description of Artificial Sequence: Synthetic oligonucleotide
  Antisense strand to SEQ ID NO: 39106
agacagggccacaacucgc

SEQ ID NO: 39108 - RNA, 19 nt, Artificial Sequence
  Description of Artificial Sequence: Synthetic oligonucleotide
  Sense strand starting at position 2132 of SEQ ID NO: 464
gaugcaauguauccaguuu

SEQ ID NO: 39109 - RNA, 19 nt, Artificial Sequence
  Description of Artificial Sequence: Synthetic oligonucleotide
  Antisense strand to SEQ ID NO: 39108
aaacuggauacauugcauc

SEQ ID NO: 39110 - RNA, 19 nt, Artificial Sequence
  Description of Artificial Sequence: Synthetic oligonucleotide
  Sense strand starting at position 2158 of SEQ ID NO: 464
gcaccuauugacugaguag

SEQ ID NO: 39111 - RNA, 19 nt, Artificial Sequence
  Description of Artificial Sequence: Synthetic oligonucleotide
  Antisense strand to SEQ ID NO: 39110
cuacucagucaauaggugc

SEQ ID NO: 39112 - RNA, 19 nt, Artificial Sequence
  Description of Artificial Sequence: Synthetic oligonucleotide
  Sense strand starting at position 2161 of SEQ ID NO: 464
ccuauugacugaguagagu

SEQ ID NO: 39113 - RNA, 19 nt, Artificial Sequence
  Description of Artificial Sequence: Synthetic oligonucleotide
  Antisense strand to SEQ ID NO: 39112
acucuacucagucaauagg

SEQ ID NO: 39114 - RNA, 19 nt, Artificial Sequence
  Description of Artificial Sequence: Synthetic oligonucleotide
  Sense strand starting at position 2287 of SEQ ID NO: 464
auucuugacugaguagaca

SEQ ID NO: 39115 - RNA, 19 nt, Artificial Sequence
  Description of Artificial Sequence: Synthetic oligonucleotide
  Antisense strand to SEQ ID NO: 39114
ugucuacucagucaagaau

SEQ ID NO: 39116 - RNA, 19 nt, Artificial Sequence
  Description of Artificial Sequence: Synthetic oligonucleotide
  Sense strand starting at position 2433 of SEQ ID NO: 464
acaggagggcugugaaaga

SEQ ID NO: 39117 - RNA, 19 nt, Artificial Sequence
  Description of Artificial Sequence: Synthetic oligonucleotide
  Antisense strand to SEQ ID NO: 39116
ucuuucacagcccuccugu

SEQ ID NO: 39118 - RNA, 19 nt, Artificial Sequence
  Description of Artificial Sequence: Synthetic oligonucleotide
  Sense strand starting at position 2960 of SEQ ID NO: 464
aagauauauuguguagccu

SEQ ID NO: 39119 - RNA, 19 nt, Artificial Sequence
  Description of Artificial Sequence: Synthetic oligonucleotide
  Antisense strand to SEQ ID NO: 39118
aggcuacacaauauaucuu

SEQ ID NO: 39120 - RNA, 19 nt, Artificial Sequence
  Description of Artificial Sequence: Synthetic oligonucleotide
  Sense strand starting at position 2961 of SEQ ID NO: 464
agauauauuguguagccuu

SEQ ID NO: 39121 - RNA, 19 nt, Artificial Sequence
  Description of Artificial Sequence: Synthetic oligonucleotide
  Antisense strand to SEQ ID NO: 39120
aaggcuacacaauauaucu

SEQ ID NO: 39122 - RNA, 19 nt, Artificial Sequence
  Description of Artificial Sequence: Synthetic oligonucleotide
  Sense strand starting at position 3049 of SEQ ID NO: 464
aggucugucccauagucuu

SEQ ID NO: 39123 - RNA, 19 nt, Artificial Sequence
  Description of Artificial Sequence: Synthetic oligonucleotide
  Antisense strand to SEQ ID NO: 39122
aagacuaugggacagaccu

SEQ ID NO: 39124 - RNA, 19 nt, Artificial Sequence
  Description of Artificial Sequence: Synthetic oligonucleotide
  Sense strand starting at position 3220 of SEQ ID NO: 464
acgacagggucuuugauca

SEQ ID NO: 39125 - RNA, 19 nt, Artificial Sequence
  Description of Artificial Sequence: Synthetic oligonucleotide
  Antisense strand to SEQ ID NO: 39124
ugaucaaagacccugucgu

SEQ ID NO: 39126 - RNA, 19 nt, Artificial Sequence
  Description of Artificial Sequence: Synthetic oligonucleotide
  Sense strand starting at position 3224 of SEQ ID NO: 464
cagggucuuugaucacaga

SEQ ID NO: 39127 - RNA, 19 nt, Artificial Sequence
  Description of Artificial Sequence: Synthetic oligonucleotide
  Antisense strand to SEQ ID NO: 39126
ucugugaucaaagacccug

SEQ ID NO: 39128 - RNA, 19 nt, Artificial Sequence
  Description of Artificial Sequence: Synthetic oligonucleotide
  Sense strand starting at position 3342 of SEQ ID NO: 464
agcuaaauacuuggucagu

SEQ ID NO: 39129 - RNA, 19 nt, Artificial Sequence
  Description of Artificial Sequence: Synthetic oligonucleotide
  Antisense strand to SEQ ID NO: 39128
acugaccaaguauuuagcu

SEQ ID NO: 39130 - RNA, 19 nt, Artificial Sequence
  Description of Artificial Sequence: Synthetic oligonucleotide
  Sense strand starting at position 3344 of SEQ ID NO: 464
cuaaauacuuggucagucu

SEQ ID NO: 39131 - RNA, 19 nt, Artificial Sequence
  Description of Artificial Sequence: Synthetic oligonucleotide
  Antisense strand to SEQ ID NO: 39130
agacugaccaaguauuuag

SEQ ID NO: 39132 - RNA, 19 nt, Artificial Sequence
  Description of Artificial Sequence: Synthetic oligonucleotide
  Sense strand starting at position 3441 of SEQ ID NO: 464
gaccaagcuccuuggaaga

SEQ ID NO: 39133 - RNA, 19 nt, Artificial Sequence
  Description of Artificial Sequence: Synthetic oligonucleotide
  Antisense strand to SEQ ID NO: 39132
ucuuccaaggagcuugguc

SEQ ID NO: 39134 - RNA, 19 nt, Artificial Sequence
  Description of Artificial Sequence: Synthetic oligonucleotide
  Sense strand starting at position 3459 of SEQ ID NO: 464
agagaucuauacuuguauu

SEQ ID NO: 39135 - RNA, 19 nt, Artificial Sequence
  Description of Artificial Sequence: Synthetic oligonucleotide
  Antisense strand to SEQ ID NO: 39134
aauacaaguauagaucucu

SEQ ID NO: 39136 - RNA, 19 nt, Artificial Sequence
  Description of Artificial Sequence: Synthetic oligonucleotide
  Sense strand starting at position 3646 of SEQ ID NO: 464
ugauacuacuugucucuga

SEQ ID NO: 39137 - RNA, 19 nt, Artificial Sequence
  Description of Artificial Sequence: Synthetic oligonucleotide
  Antisense strand to SEQ ID NO: 39136
ucagagacaaguaguauca

SEQ ID NO: 39138 - RNA, 19 nt, Artificial Sequence
  Description of Artificial Sequence: Synthetic oligonucleotide
  Sense strand starting at position 3794 of SEQ ID NO: 464
ucgaauggccuacagacau

SEQ ID NO: 39139 - RNA, 19 nt, Artificial Sequence
  Description of Artificial Sequence: Synthetic oligonucleotide
  Antisense strand to SEQ ID NO: 39138
augucuguaggccauucga

SEQ ID NO: 39140 - RNA, 19 nt, Artificial Sequence
  Description of Artificial Sequence: Synthetic oligonucleotide
  Sense strand starting at position 3865 of SEQ ID NO: 464
cagucuuguagggaagacu

SEQ ID NO: 39141 - RNA, 19 nt, Artificial Sequence
  Description of Artificial Sequence: Synthetic oligonucleotide
  Antisense strand to SEQ ID NO: 39140
agucuucccuacaagacug

SEQ ID NO: 39142 - RNA, 19 nt, Artificial Sequence
  Description of Artificial Sequence: Synthetic oligonucleotide
  Sense strand starting at position 3874 of SEQ ID NO: 464
agggaagacugagaguuaa

SEQ ID NO: 39143 - RNA, 19 nt, Artificial Sequence
  Description of Artificial Sequence: Synthetic oligonucleotide
  Antisense strand to SEQ ID NO: 39142
uuaacucucagucuucccu

SEQ ID NO: 39144 - RNA, 19 nt, Artificial Sequence
  Description of Artificial Sequence: Synthetic oligonucleotide
  Sense strand starting at position 3887 of SEQ ID NO: 464
aguuaaacaucuguuagaa

SEQ ID NO: 39145 - RNA, 19 nt, Artificial Sequence
  Description of Artificial Sequence: Synthetic oligonucleotide
  Antisense strand to SEQ ID NO: 39144
uucuaacagauguuuaacu

SEQ ID NO: 39146 - RNA, 19 nt, Artificial Sequence
  Description of Artificial Sequence: Synthetic oligonucleotide
  Sense strand starting at position 3895 of SEQ ID NO: 464
aucuguuagaaguacugua

SEQ ID NO: 39147 - RNA, 19 nt, Artificial Sequence
  Description of Artificial Sequence: Synthetic oligonucleotide
  Antisense strand to SEQ ID NO: 39146
uacaguacuucuaacagau

SEQ ID NO: 39148 - RNA, 19 nt, Artificial Sequence
  Description of Artificial Sequence: Synthetic oligonucleotide
  Sense strand starting at position 3974 of SEQ ID NO: 464
uagugaugggacuguuaga

SEQ ID NO: 39149 - RNA, 19 nt, Artificial Sequence
  Description of Artificial Sequence: Synthetic oligonucleotide
  Antisense strand to SEQ ID NO: 39148
ucuaacagucccaucacua

SEQ ID NO: 39150 - RNA, 19 nt, Artificial Sequence
  Description of Artificial Sequence: Synthetic oligonucleotide
  Sense strand starting at position 169 of SEQ ID NO: 465
uuacuagugagguggaacu

SEQ ID NO: 39151 - RNA, 19 nt, Artificial Sequence
  Description of Artificial Sequence: Synthetic oligonucleotide
  Antisense strand to SEQ ID NO: 39150
aguuccaccucacuaguaa

SEQ ID NO: 39152 - RNA, 19 nt, Artificial Sequence
  Description of Artificial Sequence: Synthetic oligonucleotide
  Sense strand starting at position 332 of SEQ ID NO: 465
uguacugcccagcaagaaa

SEQ ID NO: 39153 - RNA, 19 nt, Artificial Sequence
  Description of Artificial Sequence: Synthetic oligonucleotide
  Antisense strand to SEQ ID NO: 39152
uuucuugcugggcaguaca

SEQ ID NO: 39154 - RNA, 19 nt, Artificial Sequence
  Description of Artificial Sequence: Synthetic oligonucleotide
  Sense strand starting at position 630 of SEQ ID NO: 465
uuaaguaagucauccaagu

SEQ ID NO: 39155 - RNA, 19 nt, Artificial Sequence
  Description of Artificial Sequence: Synthetic oligonucleotide
  Antisense strand to SEQ ID NO: 39154
acuuggaugacuuacuuaa

SEQ ID NO: 39156 - RNA, 19 nt, Artificial Sequence
  Description of Artificial Sequence: Synthetic oligonucleotide
  Sense strand starting at position 767 of SEQ ID NO: 465
caggucuucggagaccuua

SEQ ID NO: 39157 - RNA, 19 nt, Artificial Sequence
  Description of Artificial Sequence: Synthetic oligonucleotide
  Antisense strand to SEQ ID NO: 39156
uaaggucuccgaagaccug

SEQ ID NO: 39158 - RNA, 19 nt, Artificial Sequence
  Description of Artificial Sequence: Synthetic oligonucleotide
  Sense strand starting at position 808 of SEQ ID NO: 465
acguucugaggcuaauacu

SEQ ID NO: 39159 - RNA, 19 nt, Artificial Sequence
  Description of Artificial Sequence: Synthetic oligonucleotide
  Antisense strand to SEQ ID NO: 39158
aguauuagccucagaacgu

SEQ ID NO: 39160 - RNA, 19 nt, Artificial Sequence
  Description of Artificial Sequence: Synthetic oligonucleotide
  Sense strand starting at position 902 of SEQ ID NO: 465
auacgagauuuccagauaa

SEQ ID NO: 39161 - RNA, 19 nt, Artificial Sequence
  Description of Artificial Sequence: Synthetic oligonucleotide
  Antisense strand to SEQ ID NO: 39160
uuaucuggaaaucucguau

SEQ ID NO: 39162 - RNA, 19 nt, Artificial Sequence
  Description of Artificial Sequence: Synthetic oligonucleotide
  Sense strand starting at position 1041 of SEQ ID NO: 465
gguuauaagccucaaguac

SEQ ID NO: 39163 - RNA, 19 nt, Artificial Sequence
  Description of Artificial Sequence: Synthetic oligonucleotide
  Antisense strand to SEQ ID NO: 39162
guacuugaggcuuauaacc

SEQ ID NO: 39164 - RNA, 19 nt, Artificial Sequence
  Description of Artificial Sequence: Synthetic oligonucleotide
  Sense strand starting at position 1056 of SEQ ID NO: 465
guacuauuuccggguagua

SEQ ID NO: 39165 - RNA, 19 nt, Artificial Sequence
  Description of Artificial Sequence: Synthetic oligonucleotide
  Antisense strand to SEQ ID NO: 39164
uacuacccggaaauaguac

SEQ ID NO: 39166 - RNA, 19 nt, Artificial Sequence
  Description of Artificial Sequence: Synthetic oligonucleotide
  Sense strand starting at position 1352 of SEQ ID NO: 465
gccacuuuauagguaaauc

SEQ ID NO: 39167 - RNA, 19 nt, Artificial Sequence
  Description of Artificial Sequence: Synthetic oligonucleotide
  Antisense strand to SEQ ID NO: 39166
gauuuaccuauaaaguggc

SEQ ID NO: 39168 - RNA, 19 nt, Artificial Sequence
  Description of Artificial Sequence: Synthetic oligonucleotide
  Sense strand starting at position 1577 of SEQ ID NO: 465
cgcgcucuuggucucgaau

SEQ ID NO: 39169 - RNA, 19 nt, Artificial Sequence
  Description of Artificial Sequence: Synthetic oligonucleotide
  Antisense strand to SEQ ID NO: 39168
auucgagaccaagagcgcg

SEQ ID NO: 39170 - RNA, 19 nt, Artificial Sequence
  Description of Artificial Sequence: Synthetic oligonucleotide
  Sense strand starting at position 1578 of SEQ ID NO: 465
gcgcucuuggucucgaauu

SEQ ID NO: 39171 - RNA, 19 nt, Artificial Sequence
  Description of Artificial Sequence: Synthetic oligonucleotide
  Antisense strand to SEQ ID NO: 39170
aauucgagaccaagagcgc

SEQ ID NO: 39172 - RNA, 19 nt, Artificial Sequence
  Description of Artificial Sequence: Synthetic oligonucleotide
  Sense strand starting at position 1585 of SEQ ID NO: 465
uggucucgaauuugguuaa

SEQ ID NO: 39173 - RNA, 19 nt, Artificial Sequence
  Description of Artificial Sequence: Synthetic oligonucleotide
  Antisense strand to SEQ ID NO: 39172
uuaaccaaauucgagacca

SEQ ID NO: 39174 - RNA, 19 nt, Artificial Sequence
  Description of Artificial Sequence: Synthetic oligonucleotide
  Sense strand starting at position 1933 of SEQ ID NO: 465
ccgugagcuccguucucua

SEQ ID NO: 39175 - RNA, 19 nt, Artificial Sequence
  Description of Artificial Sequence: Synthetic oligonucleotide
  Antisense strand to SEQ ID NO: 39174
uagagaacggagcucacgg

SEQ ID NO: 39176 - RNA, 19 nt, Artificial Sequence
  Description of Artificial Sequence: Synthetic oligonucleotide
  Sense strand starting at position 2048 of SEQ ID NO: 465
uuucguucccacgacagaa

SEQ ID NO: 39177 - RNA, 19 nt, Artificial Sequence
  Description of Artificial Sequence: Synthetic oligonucleotide
  Antisense strand to SEQ ID NO: 39176
uucugucgugggaacgaaa

SEQ ID NO: 39178 - RNA, 19 nt, Artificial Sequence
  Description of Artificial Sequence: Synthetic oligonucleotide
  Sense strand starting at position 2172 of SEQ ID NO: 465
ccacuuuguccagaugucu

SEQ ID NO: 39179 - RNA, 19 nt, Artificial Sequence
  Description of Artificial Sequence: Synthetic oligonucleotide
  Antisense strand to SEQ ID NO: 39178
agacaucuggacaaagugg

SEQ ID NO: 39180 - RNA, 19 nt, Artificial Sequence
  Description of Artificial Sequence: Synthetic oligonucleotide
  Sense strand starting at position 2251 of SEQ ID NO: 465
gcuuucuuccucgcguuua

SEQ ID NO: 39181 - RNA, 19 nt, Artificial Sequence
  Description of Artificial Sequence: Synthetic oligonucleotide
  Antisense strand to SEQ ID NO: 39180
uaaacgcgaggaagaaagc

SEQ ID NO: 39182 - RNA, 19 nt, Artificial Sequence
  Description of Artificial Sequence: Synthetic oligonucleotide
  Sense strand starting at position 2253 of SEQ ID NO: 465
uuucuuccucgcguuuaga

SEQ ID NO: 39183 - RNA, 19 nt, Artificial Sequence
  Description of Artificial Sequence: Synthetic oligonucleotide
  Antisense strand to SEQ ID NO: 39182
ucuaaacgcgaggaagaaa

SEQ ID NO: 39184 - RNA, 19 nt, Artificial Sequence
  Description of Artificial Sequence: Synthetic oligonucleotide
  Sense strand starting at position 2434 of SEQ ID NO: 465
guaggauauggguacucuu

SEQ ID NO: 39185 - RNA, 19 nt, Artificial Sequence
  Description of Artificial Sequence: Synthetic oligonucleotide
  Antisense strand to SEQ ID NO: 39184
aagaguacccauauccuac

SEQ ID NO: 39186 - RNA, 19 nt, Artificial Sequence
  Description of Artificial Sequence: Synthetic oligonucleotide
  Sense strand starting at position 2437 of SEQ ID NO: 465
ggauauggguacucuuaac

SEQ ID NO: 39187 - RNA, 19 nt, Artificial Sequence
  Description of Artificial Sequence: Synthetic oligonucleotide
  Antisense strand to SEQ ID NO: 39186
guuaagaguacccauaucc

SEQ ID NO: 39188 - RNA, 19 nt, Artificial Sequence
  Description of Artificial Sequence: Synthetic oligonucleotide
  Sense strand starting at position 2443 of SEQ ID NO: 465
ggguacucuuaacugugaa

SEQ ID NO: 39189 - RNA, 19 nt, Artificial Sequence
  Description of Artificial Sequence: Synthetic oligonucleotide
  Antisense strand to SEQ ID NO: 39188
uucacaguuaagaguaccc

SEQ ID NO: 39190 - RNA, 19 nt, Artificial Sequence
  Description of Artificial Sequence: Synthetic oligonucleotide
  Sense strand starting at position 2444 of SEQ ID NO: 465
gguacucuuaacugugaag

SEQ ID NO: 39191 - RNA, 19 nt, Artificial Sequence
  Description of Artificial Sequence: Synthetic oligonucleotide
  Antisense strand to SEQ ID NO: 39190
cuucacaguuaagaguacc

SEQ ID NO: 39192 - RNA, 19 nt, Artificial Sequence
  Description of Artificial Sequence: Synthetic oligonucleotide
  Sense strand starting at position 2455 of SEQ ID NO: 465
cugugaagacccugaagua

SEQ ID NO: 39193 - RNA, 19 nt, Artificial Sequence
  Description of Artificial Sequence: Synthetic oligonucleotide
  Antisense strand to SEQ ID NO: 39192
uacuucagggucuucacag

SEQ ID NO: 39194 - RNA, 19 nt, Artificial Sequence
  Description of Artificial Sequence: Synthetic oligonucleotide
  Sense strand starting at position 2573 of SEQ ID NO: 465
ugcaaaugccuguauauaa

SEQ ID NO: 39195 - RNA, 19 nt, Artificial Sequence
  Description of Artificial Sequence: Synthetic oligonucleotide
  Antisense strand to SEQ ID NO: 39194
uuauauacaggcauuugca

SEQ ID NO: 39196 - RNA, 19 nt, Artificial Sequence
  Description of Artificial Sequence: Synthetic oligonucleotide
  Sense strand starting at position 2583 of SEQ ID NO: 465
uguauauaacuaugacugu

SEQ ID NO: 39197 - RNA, 19 nt, Artificial Sequence
  Description of Artificial Sequence: Synthetic oligonucleotide
  Antisense strand to SEQ ID NO: 39196
acagucauaguuauauaca

SEQ ID NO: 39198 - RNA, 19 nt, Artificial Sequence
  Description of Artificial Sequence: Synthetic oligonucleotide
  Sense strand starting at position 2676 of SEQ ID NO: 465
aaaugaccugcugauguua

SEQ ID NO: 39199 - RNA, 19 nt, Artificial Sequence
  Description of Artificial Sequence: Synthetic oligonucleotide
  Antisense strand to SEQ ID NO: 39198
uaacaucagcaggucauuu

SEQ ID NO: 39200 - RNA, 19 nt, Artificial Sequence
  Description of Artificial Sequence: Synthetic oligonucleotide
  Sense strand starting at position 2714 of SEQ ID NO: 465
gucauaagguuucucucaa

SEQ ID NO: 39201 - RNA, 19 nt, Artificial Sequence
  Description of Artificial Sequence: Synthetic oligonucleotide
  Antisense strand to SEQ ID NO: 39200
uugagagaaaccuuaugac

SEQ ID NO: 39202 - RNA, 19 nt, Artificial Sequence
  Description of Artificial Sequence: Synthetic oligonucleotide
  Sense strand starting at position 3086 of SEQ ID NO: 465
agguuaaugacacgauaga

SEQ ID NO: 39203 - RNA, 19 nt, Artificial Sequence
  Description of Artificial Sequence: Synthetic oligonucleotide
  Antisense strand to SEQ ID NO: 39202
ucuaucgugucauuaaccu

SEQ ID NO: 39204 - RNA, 19 nt, Artificial Sequence
  Description of Artificial Sequence: Synthetic oligonucleotide
  Sense strand starting at position 3263 of SEQ ID NO: 465
gugaguugagauggauuca

SEQ ID NO: 39205 - RNA, 19 nt, Artificial Sequence
  Description of Artificial Sequence: Synthetic oligonucleotide
  Antisense strand to SEQ ID NO: 39204
ugaauccaucucaacucac

SEQ ID NO: 39206 - RNA, 19 nt, Artificial Sequence
  Description of Artificial Sequence: Synthetic oligonucleotide
  Sense strand starting at position 3273 of SEQ ID NO: 465
auggauucauguuugugga

SEQ ID NO: 39207 - RNA, 19 nt, Artificial Sequence
  Description of Artificial Sequence: Synthetic oligonucleotide
  Antisense strand to SEQ ID NO: 39206
uccacaaacaugaauccau

SEQ ID NO: 39208 - RNA, 19 nt, Artificial Sequence
  Description of Artificial Sequence: Synthetic oligonucleotide
  Sense strand starting at position 3275 of SEQ ID NO: 465
ggauucauguuuguggaca

SEQ ID NO: 39209 - RNA, 19 nt, Artificial Sequence
  Description of Artificial Sequence: Synthetic oligonucleotide
  Antisense strand to SEQ ID NO: 39208
uguccacaaacaugaaucc

SEQ ID NO: 39210 - RNA, 19 nt, Artificial Sequence
  Description of Artificial Sequence: Synthetic oligonucleotide
  Sense strand starting at position 3280 of SEQ ID NO: 465
cauguuuguggacauugau

SEQ ID NO: 39211 - RNA, 19 nt, Artificial Sequence
  Description of Artificial Sequence: Synthetic oligonucleotide
  Antisense strand to SEQ ID NO: 39210
aucaauguccacaaacaug

SEQ ID NO: 39212 - RNA, 19 nt, Artificial Sequence
  Description of Artificial Sequence: Synthetic oligonucleotide
  Sense strand starting at position 3283 of SEQ ID NO: 465
guuuguggacauugauauu

SEQ ID NO: 39213 - RNA, 19 nt, Artificial Sequence
  Description of Artificial Sequence: Synthetic oligonucleotide
  Antisense strand to SEQ ID NO: 39212
aauaucaauguccacaaac

SEQ ID NO: 39214 - RNA, 19 nt, Artificial Sequence
  Description of Artificial Sequence: Synthetic oligonucleotide
  Sense strand starting at position 3296 of SEQ ID NO: 465
gauauuugucugugcccua

SEQ ID NO: 39215 - RNA, 19 nt, Artificial Sequence
  Description of Artificial Sequence: Synthetic oligonucleotide
  Antisense strand to SEQ ID NO: 39214
uagggcacagacaaauauc

SEQ ID NO: 39216 - RNA, 19 nt, Artificial Sequence
  Description of Artificial Sequence: Synthetic oligonucleotide
  Sense strand starting at position 3299 of SEQ ID NO: 465
auuugucugugcccuagau

SEQ ID NO: 39217 - RNA, 19 nt, Artificial Sequence
  Description of Artificial Sequence: Synthetic oligonucleotide
  Antisense strand to SEQ ID NO: 39216
aucuagggcacagacaaau

SEQ ID NO: 39218 - RNA, 19 nt, Artificial Sequence
  Description of Artificial Sequence: Synthetic oligonucleotide
  Sense strand starting at position 3330 of SEQ ID NO: 465
ccauguccugcuuaggaga

SEQ ID NO: 39219 - RNA, 19 nt, Artificial Sequence
  Description of Artificial Sequence: Synthetic oligonucleotide
  Antisense strand to SEQ ID NO: 39218
ucuccuaagcaggacaugg

SEQ ID NO: 39220 - RNA, 19 nt, Artificial Sequence
  Description of Artificial Sequence: Synthetic oligonucleotide
  Sense strand starting at position 3348 of SEQ ID NO: 465
auuugacacuuauauugga

SEQ ID NO: 39221 - RNA, 19 nt, Artificial Sequence
  Description of Artificial Sequence: Synthetic oligonucleotide
  Antisense strand to SEQ ID NO: 39220
uccaauauaagugucaaau

SEQ ID NO: 39222 - RNA, 19 nt, Artificial Sequence
  Description of Artificial Sequence: Synthetic oligonucleotide
  Sense strand starting at position 3376 of SEQ ID NO: 465
ggcaguuacagauaaccgu

SEQ ID NO: 39223 - RNA, 19 nt, Artificial Sequence
  Description of Artificial Sequence: Synthetic oligonucleotide
  Antisense strand to SEQ ID NO: 39222
acgguuaucuguaacugcc

SEQ ID NO: 39224 - RNA, 19 nt, Artificial Sequence
  Description of Artificial Sequence: Synthetic oligonucleotide
  Sense strand starting at position 3396 of SEQ ID NO: 465
ugucaagcuaggcaagaua

SEQ ID NO: 39225 - RNA, 19 nt, Artificial Sequence
  Description of Artificial Sequence: Synthetic oligonucleotide
  Antisense strand to SEQ ID NO: 39224
uaucuugccuagcuugaca

SEQ ID NO: 39226 - RNA, 19 nt, Artificial Sequence
  Description of Artificial Sequence: Synthetic oligonucleotide
  Sense strand starting at position 3579 of SEQ ID NO: 465
acugguaauaagugaugau

SEQ ID NO: 39227 - RNA, 19 nt, Artificial Sequence
  Description of Artificial Sequence: Synthetic oligonucleotide
  Antisense strand to SEQ ID NO: 39226
aucaucacuuauuaccagu

SEQ ID NO: 39228 - RNA, 19 nt, Artificial Sequence
  Description of Artificial Sequence: Synthetic oligonucleotide
  Sense strand starting at position 3583 of SEQ ID NO: 465
guaauaagugaugaugcca

SEQ ID NO: 39229 - RNA, 19 nt, Artificial Sequence
  Description of Artificial Sequence: Synthetic oligonucleotide
  Antisense strand to SEQ ID NO: 39228
uggcaucaucacuuauuac

SEQ ID NO: 39230 - RNA, 19 nt, Artificial Sequence
  Description of Artificial Sequence: Synthetic oligonucleotide
  Sense strand starting at position 3681 of SEQ ID NO: 466
aggcuuauacaucguaugu

SEQ ID NO: 39231 - RNA, 19 nt, Artificial Sequence
  Description of Artificial Sequence: Synthetic oligonucleotide
  Antisense strand to SEQ ID NO: 39230
acauacgauguauaagccu

SEQ ID NO: 39232 - RNA, 19 nt, Artificial Sequence
  Description of Artificial Sequence: Synthetic oligonucleotide
  Sense strand starting at position 3674 of SEQ ID NO: 466
uggccagaggcuuauacau

SEQ ID NO: 39233 - RNA, 19 nt, Artificial Sequence
  Description of Artificial Sequence: Synthetic oligonucleotide
  Antisense strand to SEQ ID NO: 39232
auguauaagccucuggcca

SEQ ID NO: 39234 - RNA, 19 nt, Artificial Sequence
  Description of Artificial Sequence: Synthetic oligonucleotide
  Sense strand starting at position 3613 of SEQ ID NO: 466
uugaauuugucacagucuu

SEQ ID NO: 39235 - RNA, 19 nt, Artificial Sequence
  Description of Artificial Sequence: Synthetic oligonucleotide
  Antisense strand to SEQ ID NO: 39234
aagacugugacaaauucaa

SEQ ID NO: 39236 - RNA, 19 nt, Artificial Sequence
  Description of Artificial Sequence: Synthetic oligonucleotide
  Sense strand starting at position 3611 of SEQ ID NO: 466
ucuugaauuugucacaguc

SEQ ID NO: 39237 - RNA, 19 nt, Artificial Sequence
  Description of Artificial Sequence: Synthetic oligonucleotide
  Antisense strand to SEQ ID NO: 39236
gacugugacaaauucaaga

SEQ ID NO: 39238 - RNA, 19 nt, Artificial Sequence
  Description of Artificial Sequence: Synthetic oligonucleotide
  Sense strand starting at position 3541 of SEQ ID NO: 466
ucuagaagugaacauguuu

SEQ ID NO: 39239 - RNA, 19 nt, Artificial Sequence
  Description of Artificial Sequence: Synthetic oligonucleotide
  Antisense strand to SEQ ID NO: 39238
aaacauguucacuucuaga

SEQ ID NO: 39240 - RNA, 19 nt, Artificial Sequence
  Description of Artificial Sequence: Synthetic oligonucleotide
  Sense strand starting at position 3533 of SEQ ID NO: 466
cggcacuuucuagaaguga

SEQ ID NO: 39241 - RNA, 19 nt, Artificial Sequence
  Description of Artificial Sequence: Synthetic oligonucleotide
  Antisense strand to SEQ ID NO: 39240
ucacuucuagaaagugccg

SEQ ID NO: 39242 - RNA, 19 nt, Artificial Sequence
  Description of Artificial Sequence: Synthetic oligonucleotide
  Sense strand starting at position 3216 of SEQ ID NO: 466
aggugugagaugugcuguu

SEQ ID NO: 39243 - RNA, 19 nt, Artificial Sequence
  Description of Artificial Sequence: Synthetic oligonucleotide
  Antisense strand to SEQ ID NO: 39242
aacagcacaucucacaccu

SEQ ID NO: 39244 - RNA, 19 nt, Artificial Sequence
  Description of Artificial Sequence: Synthetic oligonucleotide
  Sense strand starting at position 3209 of SEQ ID NO: 466
gugugucaggugugagaug

SEQ ID NO: 39245 - RNA, 19 nt, Artificial Sequence
  Description of Artificial Sequence: Synthetic oligonucleotide
  Antisense strand to SEQ ID NO: 39244
caucucacaccugacacac

SEQ ID NO: 39246 - RNA, 19 nt, Artificial Sequence
  Description of Artificial Sequence: Synthetic oligonucleotide
  Sense strand starting at position 3194 of SEQ ID NO: 466
aaugauucgcauugugugu

SEQ ID NO: 39247 - RNA, 19 nt, Artificial Sequence
  Description of Artificial Sequence: Synthetic oligonucleotide
  Antisense strand to SEQ ID NO: 39246
acacacaaugcgaaucauu

SEQ ID NO: 39248 - RNA, 19 nt, Artificial Sequence
  Description of Artificial Sequence: Synthetic oligonucleotide
  Sense strand starting at position 3190 of SEQ ID NO: 466
aaauaaugauucgcauugu

SEQ ID NO: 39249 - RNA, 19 nt, Artificial Sequence
  Description of Artificial Sequence: Synthetic oligonucleotide
  Antisense strand to SEQ ID NO: 39248
acaaugcgaaucauuauuu

SEQ ID NO: 39250 - RNA, 19 nt, Artificial Sequence
  Description of Artificial Sequence: Synthetic oligonucleotide
  Sense strand starting at position 3175 of SEQ ID NO: 466
acccguaguaaggauaaau

SEQ ID NO: 39251 - RNA, 19 nt, Artificial Sequence
  Description of Artificial Sequence: Synthetic oligonucleotide
  Antisense strand to SEQ ID NO: 39250
auuuauccuuacuacgggu

SEQ ID NO: 39252 - RNA, 19 nt, Artificial Sequence
  Description of Artificial Sequence: Synthetic oligonucleotide
  Sense strand starting at position 3168 of SEQ ID NO: 466
gugcaucacccguaguaag

SEQ ID NO: 39253 - RNA, 19 nt, Artificial Sequence
  Description of Artificial Sequence: Synthetic oligonucleotide
  Antisense strand to SEQ ID NO: 39252
cuuacuacgggugaugcac

SEQ ID NO: 39254 - RNA, 19 nt, Artificial Sequence
  Description of Artificial Sequence: Synthetic oligonucleotide
  Sense strand starting at position 3166 of SEQ ID NO: 466
gugugcaucacccguagua

SEQ ID NO: 39255 - RNA, 19 nt, Artificial Sequence
  Description of Artificial Sequence: Synthetic oligonucleotide
  Antisense strand to SEQ ID NO: 39254
uacuacgggugaugcacac

SEQ ID NO: 39256 - RNA, 19 nt, Artificial Sequence
  Description of Artificial Sequence: Synthetic oligonucleotide
  Sense strand starting at position 3140 of SEQ ID NO: 466
uuuccuuucgaaugaaauu

SEQ ID NO: 39257 - RNA, 19 nt, Artificial Sequence
  Description of Artificial Sequence: Synthetic oligonucleotide
  Antisense strand to SEQ ID NO: 39256
aauuucauucgaaaggaaa

SEQ ID NO: 39258 - RNA, 19 nt, Artificial Sequence
  Description of Artificial Sequence: Synthetic oligonucleotide
  Sense strand starting at position 3133 of SEQ ID NO: 466
ccaguacuuuccuuucgaa

SEQ ID NO: 39259 - RNA, 19 nt, Artificial Sequence
  Description of Artificial Sequence: Synthetic oligonucleotide
  Antisense strand to SEQ ID NO: 39258
uucgaaaggaaaguacugg

SEQ ID NO: 39260 - RNA, 19 nt, Artificial Sequence
  Description of Artificial Sequence: Synthetic oligonucleotide
  Sense strand starting at position 3132 of SEQ ID NO: 466
gccaguacuuuccuuucga

SEQ ID NO: 39261 - RNA, 19 nt, Artificial Sequence
  Description of Artificial Sequence: Synthetic oligonucleotide
  Antisense strand to SEQ ID NO: 39260
ucgaaaggaaaguacuggc

SEQ ID NO: 39262 - RNA, 19 nt, Artificial Sequence
  Description of Artificial Sequence: Synthetic oligonucleotide
  Sense strand starting at position 3112 of SEQ ID NO: 466
cacccacuugugggucaua

SEQ ID NO: 39263 - RNA, 19 nt, Artificial Sequence
  Description of Artificial Sequence: Synthetic oligonucleotide
  Antisense strand to SEQ ID NO: 39262
uaugacccacaagugggug

SEQ ID NO: 39264 - RNA, 19 nt, Artificial Sequence
  Description of Artificial Sequence: Synthetic oligonucleotide
  Sense strand starting at position 2215 of SEQ ID NO: 466
ggaguugagagcugcauuu

SEQ ID NO: 39265 - RNA, 19 nt, Artificial Sequence
  Description of Artificial Sequence: Synthetic oligonucleotide
  Antisense strand to SEQ ID NO: 39264
aaaugcagcucucaacucc

SEQ ID NO: 39266 - RNA, 19 nt, Artificial Sequence
  Description of Artificial Sequence: Synthetic oligonucleotide
  Sense strand starting at position 2063 of SEQ ID NO: 466
acccaauugucggcaagga

SEQ ID NO: 39267 - RNA, 19 nt, Artificial Sequence
  Description of Artificial Sequence: Synthetic oligonucleotide
  Antisense strand to SEQ ID NO: 39266
uccuugccgacaauugggu

SEQ ID NO: 39268 - RNA, 19 nt, Artificial Sequence
  Description of Artificial Sequence: Synthetic oligonucleotide
  Sense strand starting at position 1210 of SEQ ID NO: 466
gaggaucaguggucugaau

SEQ ID NO: 39269 - RNA, 19 nt, Artificial Sequence
  Description of Artificial Sequence: Synthetic oligonucleotide
  Antisense strand to SEQ ID NO: 39268
auucagaccacugauccuc

SEQ ID NO: 39270 - RNA, 19 nt, Artificial Sequence
  Description of Artificial Sequence: Synthetic oligonucleotide
  Sense strand starting at position 1191 of SEQ ID NO: 466
uggguugggacauguaacu

SEQ ID NO: 39271 - RNA, 19 nt, Artificial Sequence
  Description of Artificial Sequence: Synthetic oligonucleotide
  Antisense strand to SEQ ID NO: 39270
aguuacaugucccaaccca

SEQ ID NO: 39272 - RNA, 19 nt, Artificial Sequence
  Description of Artificial Sequence: Synthetic oligonucleotide
  Sense strand starting at position 1185 of SEQ ID NO: 466
gcuucauggguugggacau

SEQ ID NO: 39273 - RNA, 19 nt, Artificial Sequence
  Description of Artificial Sequence: Synthetic oligonucleotide
  Antisense strand to SEQ ID NO: 39272
augucccaacccaugaagc

SEQ ID NO: 39274 - RNA, 19 nt, Artificial Sequence
  Description of Artificial Sequence: Synthetic oligonucleotide
  Sense strand starting at position 1048 of SEQ ID NO: 466
cugugcuauguauaacuga

SEQ ID NO: 39275 - RNA, 19 nt, Artificial Sequence
  Description of Artificial Sequence: Synthetic oligonucleotide
  Antisense strand to SEQ ID NO: 39274
ucaguuauacauagcacag

SEQ ID NO: 39276 - RNA, 19 nt, Artificial Sequence
  Description of Artificial Sequence: Synthetic oligonucleotide
  Sense strand starting at position 1044 of SEQ ID NO: 466
gagccugugcuauguauaa

SEQ ID NO: 39277 - RNA, 19 nt, Artificial Sequence
  Description of Artificial Sequence: Synthetic oligonucleotide
  Antisense strand to SEQ ID NO: 39276
uuauacauagcacaggcuc

SEQ ID NO: 39278 - RNA, 19 nt, Artificial Sequence
  Description of Artificial Sequence: Synthetic oligonucleotide
  Sense strand starting at position 1021 of SEQ ID NO: 466
ugccaauuacucugagcca

SEQ ID NO: 39279 - RNA, 19 nt, Artificial Sequence
  Description of Artificial Sequence: Synthetic oligonucleotide
  Antisense strand to SEQ ID NO: 39278
uggcucagaguaauuggca

SEQ ID NO: 39280 - RNA, 19 nt, Artificial Sequence
  Description of Artificial Sequence: Synthetic oligonucleotide
  Sense strand starting at position 877 of SEQ ID NO: 466
ugaaacucaucugguaauu

SEQ ID NO: 39281 - RNA, 19 nt, Artificial Sequence
  Description of Artificial Sequence: Synthetic oligonucleotide
  Antisense strand to SEQ ID NO: 39280
aauuaccagaugaguuuca

SEQ ID NO: 39282 - RNA, 19 nt, Artificial Sequence
  Description of Artificial Sequence: Synthetic oligonucleotide
  Sense strand starting at position 874 of SEQ ID NO: 466
gccugaaacucaucuggua

SEQ ID NO: 39283 - RNA, 19 nt, Artificial Sequence
  Description of Artificial Sequence: Synthetic oligonucleotide
  Antisense strand to SEQ ID NO: 39282
uaccagaugaguuucaggc

SEQ ID NO: 39284 - RNA, 19 nt, Artificial Sequence
  Description of Artificial Sequence: Synthetic oligonucleotide
  Sense strand starting at position 861 of SEQ ID NO: 466
ugauaaauggccugccuga

SEQ ID NO: 39285 - RNA, 19 nt, Artificial Sequence
  Description of Artificial Sequence: Synthetic oligonucleotide
  Antisense strand to SEQ ID NO: 39284
ucaggcaggccauuuauca

SEQ ID NO: 39286 - RNA, 19 nt, Artificial Sequence
  Description of Artificial Sequence: Synthetic oligonucleotide
  Sense strand starting at position 850 of SEQ ID NO: 466
gaguaaucugcugauaaau

SEQ ID NO: 39287 - RNA, 19 nt, Artificial Sequence
  Description of Artificial Sequence: Synthetic oligonucleotide
  Antisense strand to SEQ ID NO: 39286
auuuaucagcagauuacuc

SEQ ID NO: 39288 - RNA, 19 nt, Artificial Sequence
  Description of Artificial Sequence: Synthetic oligonucleotide
  Sense strand starting at position 849 of SEQ ID NO: 466
ggaguaaucugcugauaaa

SEQ ID NO: 39289 - RNA, 19 nt, Artificial Sequence
  Description of Artificial Sequence: Synthetic oligonucleotide
  Antisense strand to SEQ ID NO: 39288
uuuaucagcagauuacucc

SEQ ID NO: 39290 - RNA, 19 nt, Artificial Sequence
  Description of Artificial Sequence: Synthetic oligonucleotide
  Sense strand starting at position 846 of SEQ ID NO: 466
cugggaguaaucugcugau

SEQ ID NO: 39291 - RNA, 19 nt, Artificial Sequence
  Description of Artificial Sequence: Synthetic oligonucleotide
  Antisense strand to SEQ ID NO: 39290
aucagcagauuacucccag

SEQ ID NO: 39292 - RNA, 19 nt, Artificial Sequence
  Description of Artificial Sequence: Synthetic oligonucleotide
  Sense strand starting at position 838 of SEQ ID NO: 466
gaaagcuucugggaguaau

SEQ ID NO: 39293 - RNA, 19 nt, Artificial Sequence
  Description of Artificial Sequence: Synthetic oligonucleotide
  Antisense strand to SEQ ID NO: 39292
auuacucccagaagcuuuc

SEQ ID NO: 39294 - RNA, 19 nt, Artificial Sequence
  Description of Artificial Sequence: Synthetic oligonucleotide
  Sense strand starting at position 836 of SEQ ID NO: 466
uagaaagcuucugggagua

SEQ ID NO: 39295 - RNA, 19 nt, Artificial Sequence
  Description of Artificial Sequence: Synthetic oligonucleotide
  Antisense strand to SEQ ID NO: 39294
uacucccagaagcuuucua

SEQ ID NO: 39296 - RNA, 19 nt, Artificial Sequence
  Description of Artificial Sequence: Synthetic oligonucleotide
  Sense strand starting at position 773 of SEQ ID NO: 466
acaaguugcuuucugagac

SEQ ID NO: 39297 - RNA, 19 nt, Artificial Sequence
  Description of Artificial Sequence: Synthetic oligonucleotide
  Antisense strand to SEQ ID NO: 39296
gucucagaaagcaacuugu

SEQ ID NO: 39298 - RNA, 19 nt, Artificial Sequence
  Description of Artificial Sequence: Synthetic oligonucleotide
  Sense strand starting at position 656 of SEQ ID NO: 466
uuaggagaggucgggaaau

SEQ ID NO: 39299 - RNA, 19 nt, Artificial Sequence
  Description of Artificial Sequence: Synthetic oligonucleotide
  Antisense strand to SEQ ID NO: 39298
auuucccgaccucuccuaa

SEQ ID NO: 39300 - RNA, 19 nt, Artificial Sequence
  Description of Artificial Sequence: Synthetic oligonucleotide
  Sense strand starting at position 648 of SEQ ID NO: 466
guccuuaauuaggagaggu

SEQ ID NO: 39301 - RNA, 19 nt, Artificial Sequence
  Description of Artificial Sequence: Synthetic oligonucleotide
  Antisense strand to SEQ ID NO: 39300
accucuccuaauuaaggac

SEQ ID NO: 39302 - RNA, 19 nt, Artificial Sequence
  Description of Artificial Sequence: Synthetic oligonucleotide
  Sense strand starting at position 641 of SEQ ID NO: 466
ugcuaagguccuuaauuag

SEQ ID NO: 39303 - RNA, 19 nt, Artificial Sequence
  Description of Artificial Sequence: Synthetic oligonucleotide
  Antisense strand to SEQ ID NO: 39302
cuaauuaaggaccuuagca

SEQ ID NO: 39304 - RNA, 19 nt, Artificial Sequence
  Description of Artificial Sequence: Synthetic oligonucleotide
  Sense strand starting at position 640 of SEQ ID NO: 466
cugcuaagguccuuaauua

SEQ ID NO: 39305 - RNA, 19 nt, Artificial Sequence
  Description of Artificial Sequence: Synthetic oligonucleotide
  Antisense strand to SEQ ID NO: 39304
uaauuaaggaccuuagcag

SEQ ID NO: 39306 - RNA, 19 nt, Artificial Sequence
  Description of Artificial Sequence: Synthetic oligonucleotide
  Sense strand starting at position 502 of SEQ ID NO: 466
gcuccauagcgauaagccu

SEQ ID NO: 39307 - RNA, 19 nt, Artificial Sequence
  Description of Artificial Sequence: Synthetic oligonucleotide
  Antisense strand to SEQ ID NO: 39306
aggcuuaucgcuauggagc

SEQ ID NO: 39308 - RNA, 19 nt, Artificial Sequence
  Description of Artificial Sequence: Synthetic oligonucleotide
  Sense strand starting at position 496 of SEQ ID NO: 466
aaagaugcuccauagcgau

SEQ ID NO: 39309 - RNA, 19 nt, Artificial Sequence
  Description of Artificial Sequence: Synthetic oligonucleotide
  Antisense strand to SEQ ID NO: 39308
aucgcuauggagcaucuuu

SEQ ID NO: 39310 - RNA, 19 nt, Artificial Sequence
  Description of Artificial Sequence: Synthetic oligonucleotide
  Sense strand starting at position 3588 of SEQ ID NO: 467
accaccgagucauccuauu

SEQ ID NO: 39311 - RNA, 19 nt, Artificial Sequence
  Description of Artificial Sequence: Synthetic oligonucleotide
  Antisense strand to SEQ ID NO: 39310
aauaggaugacucgguggu

SEQ ID NO: 39312 - RNA, 19 nt, Artificial Sequence
  Description of Artificial Sequence: Synthetic oligonucleotide
  Sense strand starting at position 3463 of SEQ ID NO: 467
cuuugaacuccggaucuga

SEQ ID NO: 39313 - RNA, 19 nt, Artificial Sequence
  Description of Artificial Sequence: Synthetic oligonucleotide
  Antisense strand to SEQ ID NO: 39312
ucagauccggaguucaaag

SEQ ID NO: 39314 - RNA, 19 nt, Artificial Sequence
  Description of Artificial Sequence: Synthetic oligonucleotide
  Sense strand starting at position 3430 of SEQ ID NO: 467
ggauucucugcugaaauua

SEQ ID NO: 39315 - RNA, 19 nt, Artificial Sequence
  Description of Artificial Sequence: Synthetic oligonucleotide
  Antisense strand to SEQ ID NO: 39314
uaauuucagcagagaaucc

SEQ ID NO: 39316 - RNA, 19 nt, Artificial Sequence
  Description of Artificial Sequence: Synthetic oligonucleotide
  Sense strand starting at position 3427 of SEQ ID NO: 467
ucuggauucucugcugaaa

SEQ ID NO: 39317 - RNA, 19 nt, Artificial Sequence
  Description of Artificial Sequence: Synthetic oligonucleotide
  Antisense strand to SEQ ID NO: 39316
uuucagcagagaauccaga

SEQ ID NO: 39318 - RNA, 19 nt, Artificial Sequence
  Description of Artificial Sequence: Synthetic oligonucleotide
  Sense strand starting at position 2964 of SEQ ID NO: 467
guauuuaugugucacauuu

SEQ ID NO: 39319 - RNA, 19 nt, Artificial Sequence
  Description of Artificial Sequence: Synthetic oligonucleotide
  Antisense strand to SEQ ID NO: 39318
aaaugugacacauaaauac

SEQ ID NO: 39320 - RNA, 19 nt, Artificial Sequence
  Description of Artificial Sequence: Synthetic oligonucleotide
  Sense strand starting at position 2961 of SEQ ID NO: 467
uguguauuuaugugucaca

SEQ ID NO: 39321 - RNA, 19 nt, Artificial Sequence
  Description of Artificial Sequence: Synthetic oligonucleotide
  Antisense strand to SEQ ID NO: 39320
ugugacacauaaauacaca

SEQ ID NO: 39322 - RNA, 19 nt, Artificial Sequence
  Description of Artificial Sequence: Synthetic oligonucleotide
  Sense strand starting at position 2952 of SEQ ID NO: 467
aguuaagguuguguauuua

SEQ ID NO: 39323 - RNA, 19 nt, Artificial Sequence
  Description of Artificial Sequence: Synthetic oligonucleotide
  Antisense strand to SEQ ID NO: 39322
uaaauacacaaccuuaacu

SEQ ID NO: 39324 - RNA, 19 nt, Artificial Sequence
  Description of Artificial Sequence: Synthetic oligonucleotide
  Sense strand starting at position 2883 of SEQ ID NO: 467
uuucuuacuccguaaggac

SEQ ID NO: 39325 - RNA, 19 nt, Artificial Sequence
  Description of Artificial Sequence: Synthetic oligonucleotide
  Antisense strand to SEQ ID NO: 39324
guccuuacggaguaagaaa

SEQ ID NO: 39326 - RNA, 19 nt, Artificial Sequence
  Description of Artificial Sequence: Synthetic oligonucleotide
  Sense strand starting at position 2840 of SEQ ID NO: 467
guuaacgaugucgaauuca

SEQ ID NO: 39327 - RNA, 19 nt, Artificial Sequence
  Description of Artificial Sequence: Synthetic oligonucleotide
  Antisense strand to SEQ ID NO: 39326
ugaauucgacaucguuaac

SEQ ID NO: 39328 - RNA, 19 nt, Artificial Sequence
  Description of Artificial Sequence: Synthetic oligonucleotide
  Sense strand starting at position 2782 of SEQ ID NO: 467
gugcaaagucaugcugcuu

SEQ ID NO: 39329 - RNA, 19 nt, Artificial Sequence
  Description of Artificial Sequence: Synthetic oligonucleotide
  Antisense strand to SEQ ID NO: 39328
aagcagcaugacuuugcac

SEQ ID NO: 39330 - RNA, 19 nt, Artificial Sequence
  Description of Artificial Sequence: Synthetic oligonucleotide
  Sense strand starting at position 2580 of SEQ ID NO: 467
ugucgagcucaauggagaa

SEQ ID NO: 39331 - RNA, 19 nt, Artificial Sequence
  Description of Artificial Sequence: Synthetic oligonucleotide
  Antisense strand to SEQ ID NO: 39330
uucuccauugagcucgaca

SEQ ID NO: 39332 - RNA, 19 nt, Artificial Sequence
  Description of Artificial Sequence: Synthetic oligonucleotide
  Sense strand starting at position 2549 of SEQ ID NO: 467
gcgacauaacgugaaacaa

SEQ ID NO: 39333 - RNA, 19 nt, Artificial Sequence
  Description of Artificial Sequence: Synthetic oligonucleotide
  Antisense strand to SEQ ID NO: 39332
uuguuucacguuaugucgc

SEQ ID NO: 39334 - RNA, 19 nt, Artificial Sequence
  Description of Artificial Sequence: Synthetic oligonucleotide
  Sense strand starting at position 2548 of SEQ ID NO: 467
ugcgacauaacgugaaaca

SEQ ID NO: 39335 - RNA, 19 nt, Artificial Sequence
  Description of Artificial Sequence: Synthetic oligonucleotide
  Antisense strand to SEQ ID NO: 39334
uguuucacguuaugucgca

SEQ ID NO: 39336 - RNA, 19 nt, Artificial Sequence
  Description of Artificial Sequence: Synthetic oligonucleotide
  Sense strand starting at position 2538 of SEQ ID NO: 467
ucccuaagacugcgacaua

SEQ ID NO: 39337 - RNA, 19 nt, Artificial Sequence
  Description of Artificial Sequence: Synthetic oligonucleotide
  Antisense strand to SEQ ID NO: 39336
uaugucgcagucuuaggga

SEQ ID NO: 39338 - RNA, 19 nt, Artificial Sequence
  Description of Artificial Sequence: Synthetic oligonucleotide
  Sense strand starting at position 2393 of SEQ ID NO: 467
ggagcagcucgcuaaugaa

SEQ ID NO: 39339 - RNA, 19 nt, Artificial Sequence
  Description of Artificial Sequence: Synthetic oligonucleotide
  Antisense strand to SEQ ID NO: 39338
uucauuagcgagcugcucc

SEQ ID NO: 39340 - RNA, 19 nt, Artificial Sequence
  Description of Artificial Sequence: Synthetic oligonucleotide
  Sense strand starting at position 1522 of SEQ ID NO: 467
cggagaacguccuuaccca

SEQ ID NO: 39341 - RNA, 19 nt, Artificial Sequence
  Description of Artificial Sequence: Synthetic oligonucleotide
  Antisense strand to SEQ ID NO: 39340
uggguaaggacguucuccg

SEQ ID NO: 39342 - RNA, 19 nt, Artificial Sequence
  Description of Artificial Sequence: Synthetic oligonucleotide
  Sense strand starting at position 1345 of SEQ ID NO: 467
guaguaagucauuaguacu

SEQ ID NO: 39343 - RNA, 19 nt, Artificial Sequence
  Description of Artificial Sequence: Synthetic oligonucleotide
  Antisense strand to SEQ ID NO: 39342
aguacuaaugacuuacuac

SEQ ID NO: 39344 - RNA, 19 nt, Artificial Sequence
  Description of Artificial Sequence: Synthetic oligonucleotide
  Sense strand starting at position 1342 of SEQ ID NO: 467
ccuguaguaagucauuagu

SEQ ID NO: 39345 - RNA, 19 nt, Artificial Sequence
  Description of Artificial Sequence: Synthetic oligonucleotide
  Antisense strand to SEQ ID NO: 39344
acuaaugacuuacuacagg

SEQ ID NO: 39346 - RNA, 19 nt, Artificial Sequence
  Description of Artificial Sequence: Synthetic oligonucleotide
  Sense strand starting at position 1191 of SEQ ID NO: 467
ugaugaauacaacguguua

SEQ ID NO: 39347 - RNA, 19 nt, Artificial Sequence
  Description of Artificial Sequence: Synthetic oligonucleotide
  Antisense strand to SEQ ID NO: 39346
uaacacguuguauucauca

SEQ ID NO: 39348 - RNA, 19 nt, Artificial Sequence
  Description of Artificial Sequence: Synthetic oligonucleotide
  Sense strand starting at position 921 of SEQ ID NO: 467
uugguuuagcuuuacuaua

SEQ ID NO: 39349 - RNA, 19 nt, Artificial Sequence
  Description of Artificial Sequence: Synthetic oligonucleotide
  Antisense strand to SEQ ID NO: 39348
uauaguaaagcuaaaccaa

SEQ ID NO: 39350 - RNA, 19 nt, Artificial Sequence
  Description of Artificial Sequence: Synthetic oligonucleotide
  Sense strand starting at position 877 of SEQ ID NO: 467
aagucagcuuuggugaaac

SEQ ID NO: 39351 - RNA, 19 nt, Artificial Sequence
  Description of Artificial Sequence: Synthetic oligonucleotide
  Antisense strand to SEQ ID NO: 39350
guuucaccaaagcugacuu

SEQ ID NO: 39352 - RNA, 19 nt, Artificial Sequence
  Description of Artificial Sequence: Synthetic oligonucleotide
  Sense strand starting at position 735 of SEQ ID NO: 467
cuguucugcccugaggaua

SEQ ID NO: 39353 - RNA, 19 nt, Artificial Sequence
  Description of Artificial Sequence: Synthetic oligonucleotide
  Antisense strand to SEQ ID NO: 39352
uauccucagggcagaacag

SEQ ID NO: 39354 - RNA, 19 nt, Artificial Sequence
  Description of Artificial Sequence: Synthetic oligonucleotide
  Sense strand starting at position 675 of SEQ ID NO: 467
uuacgaucucccuaguuua

SEQ ID NO: 39355 - RNA, 19 nt, Artificial Sequence
  Description of Artificial Sequence: Synthetic oligonucleotide
  Antisense strand to SEQ ID NO: 39354
uaaacuagggagaucguaa

SEQ ID NO: 39356 - RNA, 19 nt, Artificial Sequence
  Description of Artificial Sequence: Synthetic oligonucleotide
  Sense strand starting at position 648 of SEQ ID NO: 467
uaaauauuugcucgugauu

SEQ ID NO: 39357 - RNA, 19 nt, Artificial Sequence
  Description of Artificial Sequence: Synthetic oligonucleotide
  Antisense strand to SEQ ID NO: 39356
aaucacgagcaaauauuua

SEQ ID NO: 39358 - RNA, 19 nt, Artificial Sequence
  Description of Artificial Sequence: Synthetic oligonucleotide
  Sense strand starting at position 632 of SEQ ID NO: 467
cacagugggucuucuauaa

SEQ ID NO: 39359 - RNA, 19 nt, Artificial Sequence
  Description of Artificial Sequence: Synthetic oligonucleotide
  Antisense strand to SEQ ID NO: 39358
uuauagaagacccacugug

SEQ ID NO: 39360 - RNA, 19 nt, Artificial Sequence
  Description of Artificial Sequence: Synthetic oligonucleotide
  Sense strand starting at position 591 of SEQ ID NO: 467
cugggagaauaucuuaagu

SEQ ID NO: 39361 - RNA, 19 nt, Artificial Sequence
  Description of Artificial Sequence: Synthetic oligonucleotide
  Antisense strand to SEQ ID NO: 39360
acuuaagauauucucccag

SEQ ID NO: 39362 - RNA, 19 nt, Artificial Sequence
  Description of Artificial Sequence: Synthetic oligonucleotide
  Sense strand starting at position 524 of SEQ ID NO: 467
uggccaaauuuggauggaa

SEQ ID NO: 39363 - RNA, 19 nt, Artificial Sequence
  Description of Artificial Sequence: Synthetic oligonucleotide
  Antisense strand to SEQ ID NO: 39362
uuccauccaaauuuggcca

SEQ ID NO: 39364 - RNA, 19 nt, Artificial Sequence
  Description of Artificial Sequence: Synthetic oligonucleotide
  Sense strand starting at position 513 of SEQ ID NO: 467
aucugaugucauggccaaa

SEQ ID NO: 39365 - RNA, 19 nt, Artificial Sequence
  Description of Artificial Sequence: Synthetic oligonucleotide
  Antisense strand to SEQ ID NO: 39364
uuuggccaugacaucagau

SEQ ID NO: 39366 - RNA, 19 nt, Artificial Sequence
  Description of Artificial Sequence: Synthetic oligonucleotide
  Sense strand starting at position 457 of SEQ ID NO: 467
guuggauauuaaguaugaa

SEQ ID NO: 39367 - RNA, 19 nt, Artificial Sequence
  Description of Artificial Sequence: Synthetic oligonucleotide
  Antisense strand to SEQ ID NO: 39366
uucauacuuaauauccaac

SEQ ID NO: 39368 - RNA, 19 nt, Artificial Sequence
  Description of Artificial Sequence: Synthetic oligonucleotide
  Sense strand starting at position 448 of SEQ ID NO: 467
ugacaaccuguuggauauu

SEQ ID NO: 39369 - RNA, 19 nt, Artificial Sequence
  Description of Artificial Sequence: Synthetic oligonucleotide
  Antisense strand to SEQ ID NO: 39368
aauauccaacagguuguca

SEQ ID NO: 39370 - RNA, 19 nt, Artificial Sequence
  Description of Artificial Sequence: Synthetic oligonucleotide
  Sense strand starting at position 400 of SEQ ID NO: 467
caguguaugggacaguaaa

SEQ ID NO: 39371 - RNA, 19 nt, Artificial Sequence
  Description of Artificial Sequence: Synthetic oligonucleotide
  Antisense strand to SEQ ID NO: 39370
uuuacugucccauacacug

SEQ ID NO: 39372 - RNA, 19 nt, Artificial Sequence
  Description of Artificial Sequence: Synthetic oligonucleotide
  Sense strand starting at position 337 of SEQ ID NO: 467
gauuuacuguguguaugca

SEQ ID NO: 39373 - RNA, 19 nt, Artificial Sequence
  Description of Artificial Sequence: Synthetic oligonucleotide
  Antisense strand to SEQ ID NO: 39372
ugcauacacacaguaaauc

SEQ ID NO: 39374 - RNA, 19 nt, Artificial Sequence
  Description of Artificial Sequence: Synthetic oligonucleotide
  Sense strand starting at position 334 of SEQ ID NO: 467
uaggauuuacuguguguau

SEQ ID NO: 39375 - RNA, 19 nt, Artificial Sequence
  Description of Artificial Sequence: Synthetic oligonucleotide
  Antisense strand to SEQ ID NO: 39374
auacacacaguaaauccua

SEQ ID NO: 39376 - RNA, 19 nt, Artificial Sequence
  Description of Artificial Sequence: Synthetic oligonucleotide
  Sense strand starting at position 301 of SEQ ID NO: 467
ucaggauuccaguguuuau

SEQ ID NO: 39377 - RNA, 19 nt, Artificial Sequence
  Description of Artificial Sequence: Synthetic oligonucleotide
  Antisense strand to SEQ ID NO: 39376
auaaacacuggaauccuga

SEQ ID NO: 39378 - RNA, 19 nt, Artificial Sequence
  Description of Artificial Sequence: Synthetic oligonucleotide
  Sense strand starting at position 190 of SEQ ID NO: 467
uaaauaggucaauguugau

SEQ ID NO: 39379 - RNA, 19 nt, Artificial Sequence
  Description of Artificial Sequence: Synthetic oligonucleotide
  Antisense strand to SEQ ID NO: 39378
aucaacauugaccuauuua

SEQ ID NO: 39380 - RNA, 19 nt, Artificial Sequence
  Description of Artificial Sequence: Synthetic oligonucleotide
  Sense strand starting at position 187 of SEQ ID NO: 467
aguuaaauaggucaauguu

SEQ ID NO: 39381 - RNA, 19 nt, Artificial Sequence
  Description of Artificial Sequence: Synthetic oligonucleotide
  Antisense strand to SEQ ID NO: 39380
aacauugaccuauuuaacu

SEQ ID NO: 39382 - RNA, 19 nt, Artificial Sequence
  Description of Artificial Sequence: Synthetic oligonucleotide
  Sense strand starting at position 124 of SEQ ID NO: 467
ugaggcuuauaacuaucuu

SEQ ID NO: 39383 - RNA, 19 nt, Artificial Sequence
  Description of Artificial Sequence: Synthetic oligonucleotide
  Antisense strand to SEQ ID NO: 39382
aagauaguuauaagccuca

SEQ ID NO: 39384 - RNA, 19 nt, Artificial Sequence
  Description of Artificial Sequence: Synthetic oligonucleotide
  Sense strand starting at position 119 of SEQ ID NO: 467
cgguuugaggcuuauaacu

SEQ ID NO: 39385 - RNA, 19 nt, Artificial Sequence
  Description of Artificial Sequence: Synthetic oligonucleotide
  Antisense strand to SEQ ID NO: 39384
aguuauaagccucaaaccg

SEQ ID NO: 39386 - RNA, 19 nt, Artificial Sequence
  Description of Artificial Sequence: Synthetic oligonucleotide
  Sense strand starting at position 51 of SEQ ID NO: 467
ggcucugauagguacuacu

SEQ ID NO: 39387 - RNA, 19 nt, Artificial Sequence
  Description of Artificial Sequence: Synthetic oligonucleotide
  Antisense strand to SEQ ID NO: 39386
aguaguaccuaucagagcc

SEQ ID NO: 39388 - RNA, 19 nt, Artificial Sequence
  Description of Artificial Sequence: Synthetic oligonucleotide
  Sense strand starting at position 49 of SEQ ID NO: 467
ugggcucugauagguacua

SEQ ID NO: 39389 - RNA, 19 nt, Artificial Sequence
  Description of Artificial Sequence: Synthetic oligonucleotide
  Antisense strand to SEQ ID NO: 39388
uaguaccuaucagagccca

SEQ ID NO: 39390 - RNA, 19 nt, Artificial Sequence
  Description of Artificial Sequence: Synthetic oligonucleotide
  Sense strand starting at position 184 of SEQ ID NO: 468
ggacuucggcuuugaugau

SEQ ID NO: 39391 - RNA, 19 nt, Artificial Sequence
  Description of Artificial Sequence: Synthetic oligonucleotide
  Antisense strand to SEQ ID NO: 39390
aucaucaaagccgaagucc

SEQ ID NO: 39392 - RNA, 19 nt, Artificial Sequence
  Description of Artificial Sequence: Synthetic oligonucleotide
  Sense strand starting at position 185 of SEQ ID NO: 468
gacuucggcuuugaugaua

SEQ ID NO: 39393 - RNA, 19 nt, Artificial Sequence
  Description of Artificial Sequence: Synthetic oligonucleotide
  Antisense strand to SEQ ID NO: 39392
uaucaucaaagccgaaguc

SEQ ID NO: 39394 - RNA, 19 nt, Artificial Sequence
  Description of Artificial Sequence: Synthetic oligonucleotide
  Sense strand starting at position 213 of SEQ ID NO: 468
aggugaccuugagaauaua

SEQ ID NO: 39395 - RNA, 19 nt, Artificial Sequence
  Description of Artificial Sequence: Synthetic oligonucleotide
  Antisense strand to SEQ ID NO: 39394
uauauucucaaggucaccu

SEQ ID NO: 39396 - RNA, 19 nt, Artificial Sequence
  Description of Artificial Sequence: Synthetic oligonucleotide
  Sense strand starting at position 221 of SEQ ID NO: 468
uugagaauauacccaggua

SEQ ID NO: 39397 - RNA, 19 nt, Artificial Sequence
  Description of Artificial Sequence: Synthetic oligonucleotide
  Antisense strand to SEQ ID NO: 39396
uaccuggguauauucucaa

SEQ ID NO: 39398 - RNA, 19 nt, Artificial Sequence
  Description of Artificial Sequence: Synthetic oligonucleotide
  Sense strand starting at position 236 of SEQ ID NO: 468
gguacagauugcggguaau

SEQ ID NO: 39399 - RNA, 19 nt, Artificial Sequence
  Description of Artificial Sequence: Synthetic oligonucleotide
  Antisense strand to SEQ ID NO: 39398
auuacccgcaaucuguacc

SEQ ID NO: 39400 - RNA, 19 nt, Artificial Sequence
  Description of Artificial Sequence: Synthetic oligonucleotide
  Sense strand starting at position 239 of SEQ ID NO: 468
acagauugcggguaauuga

SEQ ID NO: 39401 - RNA, 19 nt, Artificial Sequence
  Description of Artificial Sequence: Synthetic oligonucleotide
  Antisense strand to SEQ ID NO: 39400
ucaauuacccgcaaucugu

SEQ ID NO: 39402 - RNA, 19 nt, Artificial Sequence
  Description of Artificial Sequence: Synthetic oligonucleotide
  Sense strand starting at position 521 of SEQ ID NO: 468
ccuggugucugugcuggaa

SEQ ID NO: 39403 - RNA, 19 nt, Artificial Sequence
  Description of Artificial Sequence: Synthetic oligonucleotide
  Antisense strand to SEQ ID NO: 39402
uuccagcacagacaccagg

SEQ ID NO: 39404 - RNA, 19 nt, Artificial Sequence
  Description of Artificial Sequence: Synthetic oligonucleotide
  Sense strand starting at position 706 of SEQ ID NO: 468
guucuauacuguuacgacu

SEQ ID NO: 39405 - RNA, 19 nt, Artificial Sequence
  Description of Artificial Sequence: Synthetic oligonucleotide
  Antisense strand to SEQ ID NO: 39404
agucguaacaguauagaac

SEQ ID NO: 39406 - RNA, 19 nt, Artificial Sequence
  Description of Artificial Sequence: Synthetic oligonucleotide
  Sense strand starting at position 714 of SEQ ID NO: 468
cuguuacgacuuugacuuu

SEQ ID NO: 39407 - RNA, 19 nt, Artificial Sequence
  Description of Artificial Sequence: Synthetic oligonucleotide
  Antisense strand to SEQ ID NO: 39406
aaagucaaagucguaacag

SEQ ID NO: 39408 - RNA, 19 nt, Artificial Sequence
  Description of Artificial Sequence: Synthetic oligonucleotide
  Sense strand starting at position 1017 of SEQ ID NO: 468
cccagacugucaggacuuu

SEQ ID NO: 39409 - RNA, 19 nt, Artificial Sequence
  Description of Artificial Sequence: Synthetic oligonucleotide
  Antisense strand to SEQ ID NO: 39408
aaaguccugacagucuggg

SEQ ID NO: 39410 - RNA, 19 nt, Artificial Sequence
  Description of Artificial Sequence: Synthetic oligonucleotide
  Sense strand starting at position 1038 of SEQ ID NO: 468
ggaguacauauuugcguuu

SEQ ID NO: 39411 - RNA, 19 nt, Artificial Sequence
  Description of Artificial Sequence: Synthetic oligonucleotide
  Antisense strand to SEQ ID NO: 39410
aaacgcaaauauguacucc

SEQ ID NO: 39412 - RNA, 19 nt, Artificial Sequence
  Description of Artificial Sequence: Synthetic oligonucleotide
  Sense strand starting at position 1098 of SEQ ID NO: 468
gagcuaaagugagaguuga

SEQ ID NO: 39413 - RNA, 19 nt, Artificial Sequence
  Description of Artificial Sequence: Synthetic oligonucleotide
  Antisense strand to SEQ ID NO: 39412
ucaacucucacuuuagcuc

SEQ ID NO: 39414 - RNA, 19 nt, Artificial Sequence
  Description of Artificial Sequence: Synthetic oligonucleotide
  Sense strand starting at position 1102 of SEQ ID NO: 468
uaaagugagaguugauugu

SEQ ID NO: 39415 - RNA, 19 nt, Artificial Sequence
  Description of Artificial Sequence: Synthetic oligonucleotide
  Antisense strand to SEQ ID NO: 39414
acaaucaacucucacuuua

SEQ ID NO: 39416 - RNA, 19 nt, Artificial Sequence
  Description of Artificial Sequence: Synthetic oligonucleotide
  Sense strand starting at position 1106 of SEQ ID NO: 468
gugagaguugauuguaacu

SEQ ID NO: 39417 - RNA, 19 nt, Artificial Sequence
  Description of Artificial Sequence: Synthetic oligonucleotide
  Antisense strand to SEQ ID NO: 39416
aguuacaaucaacucucac

SEQ ID NO: 39418 - RNA, 19 nt, Artificial Sequence
  Description of Artificial Sequence: Synthetic oligonucleotide
  Sense strand starting at position 1115 of SEQ ID NO: 468
gauuguaacucgggcguga

SEQ ID NO: 39419 - RNA, 19 nt, Artificial Sequence
  Description of Artificial Sequence: Synthetic oligonucleotide
  Antisense strand to SEQ ID NO: 39418
ucacgcccgaguuacaauc

SEQ ID NO: 39420 - RNA, 19 nt, Artificial Sequence
  Description of Artificial Sequence: Synthetic oligonucleotide
  Sense strand starting at position 1898 of SEQ ID NO: 468
gggcgugacucugaucuca

SEQ ID NO: 39421 - RNA, 19 nt, Artificial Sequence
  Description of Artificial Sequence: Synthetic oligonucleotide
  Antisense strand to SEQ ID NO: 39420
ugagaucagagucacgccc

SEQ ID NO: 39422 - RNA, 19 nt, Artificial Sequence
  Description of Artificial Sequence: Synthetic oligonucleotide
  Sense strand starting at position 2721 of SEQ ID NO: 468
gcucgaaucugggcaggaa

SEQ ID NO: 39423 - RNA, 19 nt, Artificial Sequence
  Description of Artificial Sequence: Synthetic oligonucleotide
  Antisense strand to SEQ ID NO: 39422
uuccugcccagauucgagc

SEQ ID NO: 39424 - RNA, 19 nt, Artificial Sequence
  Description of Artificial Sequence: Synthetic oligonucleotide
  Sense strand starting at position 2751 of SEQ ID NO: 468
cagaauaucuggugaccaa

SEQ ID NO: 39425 - RNA, 19 nt, Artificial Sequence
  Description of Artificial Sequence: Synthetic oligonucleotide
  Antisense strand to SEQ ID NO: 39424
uuggucaccagauauucug

SEQ ID NO: 39426 - RNA, 19 nt, Artificial Sequence
  Description of Artificial Sequence: Synthetic oligonucleotide
  Sense strand starting at position 2794 of SEQ ID NO: 468
accaucuucucaguggaca

SEQ ID NO: 39427 - RNA, 19 nt, Artificial Sequence
  Description of Artificial Sequence: Synthetic oligonucleotide
  Antisense strand to SEQ ID NO: 39426
uguccacugagaagauggu

SEQ ID NO: 39428 - RNA, 19 nt, Artificial Sequence
  Description of Artificial Sequence: Synthetic oligonucleotide
  Sense strand starting at position 2795 of SEQ ID NO: 468
ccaucuucucaguggacaa

SEQ ID NO: 39429 - RNA, 19 nt, Artificial Sequence
  Description of Artificial Sequence: Synthetic oligonucleotide
  Antisense strand to SEQ ID NO: 39428
uuguccacugagaagaugg

SEQ ID NO: 39430 - RNA, 19 nt, Artificial Sequence
  Description of Artificial Sequence: Synthetic oligonucleotide
  Sense strand starting at position 2836 of SEQ ID NO: 468
gggcgugcuggaagucuau

SEQ ID NO: 39431 - RNA, 19 nt, Artificial Sequence
  Description of Artificial Sequence: Synthetic oligonucleotide
  Antisense strand to SEQ ID NO: 39430
auagacuuccagcacgccc

SEQ ID NO: 39432 - RNA, 19 nt, Artificial Sequence
  Description of Artificial Sequence: Synthetic oligonucleotide
  Sense strand starting at position 2842 of SEQ ID NO: 468
gcuggaagucuaugggacu

SEQ ID NO: 39433 - RNA, 19 nt, Artificial Sequence
  Description of Artificial Sequence: Synthetic oligonucleotide
  Antisense strand to SEQ ID NO: 39432
agucccauagacuuccagc

SEQ ID NO: 39434 - RNA, 19 nt, Artificial Sequence
  Description of Artificial Sequence: Synthetic oligonucleotide
  Sense strand starting at position 3042 of SEQ ID NO: 468
agcccaugaucccuaguga

SEQ ID NO: 39435 - RNA, 19 nt, Artificial Sequence
  Description of Artificial Sequence: Synthetic oligonucleotide
  Antisense strand to SEQ ID NO: 39434
ucacuagggaucaugggcu

SEQ ID NO: 39436 - RNA, 19 nt, Artificial Sequence
  Description of Artificial Sequence: Synthetic oligonucleotide
  Sense strand starting at position 3043 of SEQ ID NO: 468
gcccaugaucccuagugau

SEQ ID NO: 39437 - RNA, 19 nt, Artificial Sequence
  Description of Artificial Sequence: Synthetic oligonucleotide
  Antisense strand to SEQ ID NO: 39436
aucacuagggaucaugggc

SEQ ID NO: 39438 - RNA, 19 nt, Artificial Sequence
  Description of Artificial Sequence: Synthetic oligonucleotide
  Sense strand starting at position 3046 of SEQ ID NO: 468
caugaucccuagugaugaa

SEQ ID NO: 39439 - RNA, 19 nt, Artificial Sequence
  Description of Artificial Sequence: Synthetic oligonucleotide
  Antisense strand to SEQ ID NO: 39438
uucaucacuagggaucaug

SEQ ID NO: 39440 - RNA, 19 nt, Artificial Sequence
  Description of Artificial Sequence: Synthetic oligonucleotide
  Sense strand starting at position 3347 of SEQ ID NO: 468
ccuggaugucuguggaucu

SEQ ID NO: 39441 - RNA, 19 nt, Artificial Sequence
  Description of Artificial Sequence: Synthetic oligonucleotide
  Antisense strand to SEQ ID NO: 39440
agauccacagacauccagg

SEQ ID NO: 39442 - RNA, 19 nt, Artificial Sequence
  Description of Artificial Sequence: Synthetic oligonucleotide
  Sense strand starting at position 3360 of SEQ ID NO: 468
ggaucuguggagugacuau

SEQ ID NO: 39443 - RNA, 19 nt, Artificial Sequence
  Description of Artificial Sequence: Synthetic oligonucleotide
  Antisense strand to SEQ ID NO: 39442
auagucacuccacagaucc

SEQ ID NO: 39444 - RNA, 19 nt, Artificial Sequence
  Description of Artificial Sequence: Synthetic oligonucleotide
  Sense strand starting at position 3367 of SEQ ID NO: 468
uggagugacuaugugaaug

SEQ ID NO: 39445 - RNA, 19 nt, Artificial Sequence
  Description of Artificial Sequence: Synthetic oligonucleotide
  Antisense strand to SEQ ID NO: 39444
cauucacauagucacucca

SEQ ID NO: 39446 - RNA, 19 nt, Artificial Sequence
  Description of Artificial Sequence: Synthetic oligonucleotide
  Sense strand starting at position 3375 of SEQ ID NO: 468
cuaugugaaugccagcaga

SEQ ID NO: 39447 - RNA, 19 nt, Artificial Sequence
  Description of Artificial Sequence: Synthetic oligonucleotide
  Antisense strand to SEQ ID NO: 39446
ucugcuggcauucacauag

SEQ ID NO: 39448 - RNA, 19 nt, Artificial Sequence
  Description of Artificial Sequence: Synthetic oligonucleotide
  Sense strand starting at position 3378 of SEQ ID NO: 468
ugugaaugccagcagaauc

SEQ ID NO: 39449 - RNA, 19 nt, Artificial Sequence
  Description of Artificial Sequence: Synthetic oligonucleotide
  Antisense strand to SEQ ID NO: 39448
gauucugcuggcauucaca

SEQ ID NO: 39450 - RNA, 19 nt, Artificial Sequence
  Description of Artificial Sequence: Synthetic oligonucleotide
  Sense strand starting at position 3442 of SEQ ID NO: 468
acaagagccucguggcaau

SEQ ID NO: 39451 - RNA, 19 nt, Artificial Sequence
  Description of Artificial Sequence: Synthetic oligonucleotide
  Antisense strand to SEQ ID NO: 39450
auugccacgaggcucuugu

SEQ ID NO: 39452 - RNA, 19 nt, Artificial Sequence
  Description of Artificial Sequence: Synthetic oligonucleotide
  Sense strand starting at position 3454 of SEQ ID NO: 468
uggcaaucuucugaguggu

SEQ ID NO: 39453 - RNA, 19 nt, Artificial Sequence
  Description of Artificial Sequence: Synthetic oligonucleotide
  Antisense strand to SEQ ID NO: 39452
accacucagaagauugcca

SEQ ID NO: 39454 - RNA, 19 nt, Artificial Sequence
  Description of Artificial Sequence: Synthetic oligonucleotide
  Sense strand starting at position 3456 of SEQ ID NO: 468
gcaaucuucugagugguaa

SEQ ID NO: 39455 - RNA, 19 nt, Artificial Sequence
  Description of Artificial Sequence: Synthetic oligonucleotide
  Antisense strand to SEQ ID NO: 39454
uuaccacucagaagauugc

SEQ ID NO: 39456 - RNA, 19 nt, Artificial Sequence
  Description of Artificial Sequence: Synthetic oligonucleotide
  Sense strand starting at position 3457 of SEQ ID NO: 468
caaucuucugagugguaaa

SEQ ID NO: 39457 - RNA, 19 nt, Artificial Sequence
  Description of Artificial Sequence: Synthetic oligonucleotide
  Antisense strand to SEQ ID NO: 39456
uuuaccacucagaagauug

SEQ ID NO: 39458 - RNA, 19 nt, Artificial Sequence
  Description of Artificial Sequence: Synthetic oligonucleotide
  Sense strand starting at position 3574 of SEQ ID NO: 468
gggauguagcagugaggaa

SEQ ID NO: 39459 - RNA, 19 nt, Artificial Sequence
  Description of Artificial Sequence: Synthetic oligonucleotide
  Antisense strand to SEQ ID NO: 39458
uuccucacugcuacauccc

SEQ ID NO: 39460 - RNA, 19 nt, Artificial Sequence
  Description of Artificial Sequence: Synthetic oligonucleotide
  Sense strand starting at position 3691 of SEQ ID NO: 468
ugucuuuguugucaucuga

SEQ ID NO: 39461 - RNA, 19 nt, Artificial Sequence
  Description of Artificial Sequence: Synthetic oligonucleotide
  Antisense strand to SEQ ID NO: 39460
ucagaugacaacaaagaca

SEQ ID NO: 39462 - RNA, 19 nt, Artificial Sequence
  Description of Artificial Sequence: Synthetic oligonucleotide
  Sense strand starting at position 3746 of SEQ ID NO: 468
ccagauagauggcuaggau

SEQ ID NO: 39463 - RNA, 19 nt, Artificial Sequence
  Description of Artificial Sequence: Synthetic oligonucleotide
  Antisense strand to SEQ ID NO: 39462
auccuagccaucuaucugg

SEQ ID NO: 39464 - RNA, 19 nt, Artificial Sequence
  Description of Artificial Sequence: Synthetic oligonucleotide
  Sense strand starting at position 3883 of SEQ ID NO: 468
ggccuaguggucugauaaa

SEQ ID NO: 39465 - RNA, 19 nt, Artificial Sequence
  Description of Artificial Sequence: Synthetic oligonucleotide
  Antisense strand to SEQ ID NO: 39464
uuuaucagaccacuaggcc

SEQ ID NO: 39466 - RNA, 19 nt, Artificial Sequence
  Description of Artificial Sequence: Synthetic oligonucleotide
  Sense strand starting at position 3940 of SEQ ID NO: 468
gagucaguggccugaucca

SEQ ID NO: 39467 - RNA, 19 nt, Artificial Sequence
  Description of Artificial Sequence: Synthetic oligonucleotide
  Antisense strand to SEQ ID NO: 39466
uggaucaggccacugacuc

SEQ ID NO: 39468 - RNA, 19 nt, Artificial Sequence
  Description of Artificial Sequence: Synthetic oligonucleotide
  Sense strand starting at position 3709 of SEQ ID NO: 469
cuggaauguucuuuccaug

SEQ ID NO: 39469 - RNA, 19 nt, Artificial Sequence
  Description of Artificial Sequence: Synthetic oligonucleotide
  Antisense strand to SEQ ID NO: 39468
cauggaaagaacauuccag

SEQ ID NO: 39470 - RNA, 19 nt, Artificial Sequence
  Description of Artificial Sequence: Synthetic oligonucleotide
  Sense strand starting at position 3708 of SEQ ID NO: 469
ccuggaauguucuuuccau

SEQ ID NO: 39471 - RNA, 19 nt, Artificial Sequence
  Description of Artificial Sequence: Synthetic oligonucleotide
  Antisense strand to SEQ ID NO: 39470
auggaaagaacauuccagg

SEQ ID NO: 39472 - RNA, 19 nt, Artificial Sequence
  Description of Artificial Sequence: Synthetic oligonucleotide
  Sense strand starting at position 3560 of SEQ ID NO: 469
uaauuuguguuggccucau

SEQ ID NO: 39473 - RNA, 19 nt, Artificial Sequence
  Description of Artificial Sequence: Synthetic oligonucleotide
  Antisense strand to SEQ ID NO: 39472
augaggccaacacaaauua

SEQ ID NO: 39474 - RNA, 19 nt, Artificial Sequence
  Description of Artificial Sequence: Synthetic oligonucleotide
  Sense strand starting at position 3137 of SEQ ID NO: 469
ggcaaauaucgagaucugu

SEQ ID NO: 39475 - RNA, 19 nt, Artificial Sequence
  Description of Artificial Sequence: Synthetic oligonucleotide
  Antisense strand to SEQ ID NO: 39474
acagaucucgauauuugcc

SEQ ID NO: 39476 - RNA, 19 nt, Artificial Sequence
  Description of Artificial Sequence: Synthetic oligonucleotide
  Sense strand starting at position 3125 of SEQ ID NO: 469
cuugauacccgaggcaaau

SEQ ID NO: 39477 - RNA, 19 nt, Artificial Sequence
  Description of Artificial Sequence: Synthetic oligonucleotide
  Antisense strand to SEQ ID NO: 39476
auuugccucggguaucaag

SEQ ID NO: 39478 - RNA, 19 nt, Artificial Sequence
  Description of Artificial Sequence: Synthetic oligonucleotide
  Sense strand starting at position 3032 of SEQ ID NO: 469
gccauuugccuguagugua

SEQ ID NO: 39479 - RNA, 19 nt, Artificial Sequence
  Description of Artificial Sequence: Synthetic oligonucleotide
  Antisense strand to SEQ ID NO: 39478
uacacuacaggcaaauggc

SEQ ID NO: 39480 - RNA, 19 nt, Artificial Sequence
  Description of Artificial Sequence: Synthetic oligonucleotide
  Sense strand starting at position 2787 of SEQ ID NO: 469
uuaggugaccucggauuga

SEQ ID NO: 39481 - RNA, 19 nt, Artificial Sequence
  Description of Artificial Sequence: Synthetic oligonucleotide
  Antisense strand to SEQ ID NO: 39480
ucaauccgaggucaccuaa

SEQ ID NO: 39482 - RNA, 19 nt, Artificial Sequence
  Description of Artificial Sequence: Synthetic oligonucleotide
  Sense strand starting at position 2776 of SEQ ID NO: 469
uuguuaucuaguuagguga

SEQ ID NO: 39483 - RNA, 19 nt, Artificial Sequence
  Description of Artificial Sequence: Synthetic oligonucleotide
  Antisense strand to SEQ ID NO: 39482
ucaccuaacuagauaacaa

SEQ ID NO: 39484 - RNA, 19 nt, Artificial Sequence
  Description of Artificial Sequence: Synthetic oligonucleotide
  Sense strand starting at position 2517 of SEQ ID NO: 469
gaaguagcugcaggauuaa

SEQ ID NO: 39485 - RNA, 19 nt, Artificial Sequence
  Description of Artificial Sequence: Synthetic oligonucleotide
  Antisense strand to SEQ ID NO: 39484
uuaauccugcagcuacuuc

SEQ ID NO: 39486 - RNA, 19 nt, Artificial Sequence
  Description of Artificial Sequence: Synthetic oligonucleotide
  Sense strand starting at position 2432 of SEQ ID NO: 469
ccgcuacuugaacauagau

SEQ ID NO: 39487 - RNA, 19 nt, Artificial Sequence
  Description of Artificial Sequence: Synthetic oligonucleotide
  Antisense strand to SEQ ID NO: 39486
aucuauguucaaguagcgg

SEQ ID NO: 39488 - RNA, 19 nt, Artificial Sequence
  Description of Artificial Sequence: Synthetic oligonucleotide
  Sense strand starting at position 2424 of SEQ ID NO: 469
cuaagauuccgcuacuuga

SEQ ID NO: 39489 - RNA, 19 nt, Artificial Sequence
  Description of Artificial Sequence: Synthetic oligonucleotide
  Antisense strand to SEQ ID NO: 39488
ucaaguagcggaaucuuag

SEQ ID NO: 39490 - RNA, 19 nt, Artificial Sequence
  Description of Artificial Sequence: Synthetic oligonucleotide
  Sense strand starting at position 2148 of SEQ ID NO: 469
accugaguggauggauauu

SEQ ID NO: 39491 - RNA, 19 nt, Artificial Sequence
  Description of Artificial Sequence: Synthetic oligonucleotide
  Antisense strand to SEQ ID NO: 39490
aauauccauccacucaggu

SEQ ID NO: 39492 - RNA, 19 nt, Artificial Sequence
  Description of Artificial Sequence: Synthetic oligonucleotide
  Sense strand starting at position 2088 of SEQ ID NO: 469
gcugaaggucauugacaua

SEQ ID NO: 39493 - RNA, 19 nt, Artificial Sequence
  Description of Artificial Sequence: Synthetic oligonucleotide
  Antisense strand to SEQ ID NO: 39492
uaugucaaugaccuucagc

SEQ ID NO: 39494 - RNA, 19 nt, Artificial Sequence
  Description of Artificial Sequence: Synthetic oligonucleotide
  Sense strand starting at position 2087 of SEQ ID NO: 469
ugcugaaggucauugacau

SEQ ID NO: 39495 - RNA, 19 nt, Artificial Sequence
  Description of Artificial Sequence: Synthetic oligonucleotide
  Antisense strand to SEQ ID NO: 39494
augucaaugaccuucagca

SEQ ID NO: 39496 - RNA, 19 nt, Artificial Sequence
  Description of Artificial Sequence: Synthetic oligonucleotide
  Sense strand starting at position 1244 of SEQ ID NO: 469
gguucacuagaggagucau

SEQ ID NO: 39497 - RNA, 19 nt, Artificial Sequence
  Description of Artificial Sequence: Synthetic oligonucleotide
  Antisense strand to SEQ ID NO: 39496
augacuccucuagugaacc

SEQ ID NO: 39498 - RNA, 19 nt, Artificial Sequence
  Description of Artificial Sequence: Synthetic oligonucleotide
  Sense strand starting at position 1241 of SEQ ID NO: 469
acggguucacuagaggagu

SEQ ID NO: 39499 - RNA, 19 nt, Artificial Sequence
  Description of Artificial Sequence: Synthetic oligonucleotide
  Antisense strand to SEQ ID NO: 39498
acuccucuagugaacccgu

SEQ ID NO: 39500 - RNA, 19 nt, Artificial Sequence
  Description of Artificial Sequence: Synthetic oligonucleotide
  Sense strand starting at position 1160 of SEQ ID NO: 469
gugcuaggagauugugaaa

SEQ ID NO: 39501 - RNA, 19 nt, Artificial Sequence
  Description of Artificial Sequence: Synthetic oligonucleotide
  Antisense strand to SEQ ID NO: 39500
uuucacaaucuccuagcac

SEQ ID NO: 39502 - RNA, 19 nt, Artificial Sequence
  Description of Artificial Sequence: Synthetic oligonucleotide
  Sense strand starting at position 1130 of SEQ ID NO: 469
ggaagagaauuugaggguu

SEQ ID NO: 39503 - RNA, 19 nt, Artificial Sequence
  Description of Artificial Sequence: Synthetic oligonucleotide
  Antisense strand to SEQ ID NO: 39502
aacccucaaauucucuucc

SEQ ID NO: 39504 - RNA, 19 nt, Artificial Sequence
  Description of Artificial Sequence: Synthetic oligonucleotide
  Sense strand starting at position 1088 of SEQ ID NO: 469
agcguucaagauggagaau

SEQ ID NO: 39505 - RNA, 19 nt, Artificial Sequence
  Description of Artificial Sequence: Synthetic oligonucleotide
  Antisense strand to SEQ ID NO: 39504
auucuccaucuugaacgcu

SEQ ID NO: 39506 - RNA, 19 nt, Artificial Sequence
  Description of Artificial Sequence: Synthetic oligonucleotide
  Sense strand starting at position 1082 of SEQ ID NO: 469
cugagaagcguucaagaug

SEQ ID NO: 39507 - RNA, 19 nt, Artificial Sequence
  Description of Artificial Sequence: Synthetic oligonucleotide
  Antisense strand to SEQ ID NO: 39506
caucuugaacgcuucucag

SEQ ID NO: 39508 - RNA, 19 nt, Artificial Sequence
  Description of Artificial Sequence: Synthetic oligonucleotide
  Sense strand starting at position 1045 of SEQ ID NO: 469
gauagcuggcuggaaguua

SEQ ID NO: 39509 - RNA, 19 nt, Artificial Sequence
  Description of Artificial Sequence: Synthetic oligonucleotide
  Antisense strand to SEQ ID NO: 39508
uaacuuccagccagcuauc

SEQ ID NO: 39510 - RNA, 19 nt, Artificial Sequence
  Description of Artificial Sequence: Synthetic oligonucleotide
  Sense strand starting at position 973 of SEQ ID NO: 469
accauagucgagggauuac

SEQ ID NO: 39511 - RNA, 19 nt, Artificial Sequence
  Description of Artificial Sequence: Synthetic oligonucleotide
  Antisense strand to SEQ ID NO: 39510
guaaucccucgacuauggu

SEQ ID NO: 39512 - RNA, 19 nt, Artificial Sequence
  Description of Artificial Sequence: Synthetic oligonucleotide
  Sense strand starting at position 972 of SEQ ID NO: 469
caccauagucgagggauua

SEQ ID NO: 39513 - RNA, 19 nt, Artificial Sequence
  Description of Artificial Sequence: Synthetic oligonucleotide
  Antisense strand to SEQ ID NO: 39512
uaaucccucgacuauggug

SEQ ID NO: 39514 - RNA, 19 nt, Artificial Sequence
  Description of Artificial Sequence: Synthetic oligonucleotide
  Sense strand starting at position 943 of SEQ ID NO: 469
ugaggcagucauuaaagua

SEQ ID NO: 39515 - RNA, 19 nt, Artificial Sequence
  Description of Artificial Sequence: Synthetic oligonucleotide
  Antisense strand to SEQ ID NO: 39514
uacuuuaaugacugccuca

SEQ ID NO: 39516 - RNA, 19 nt, Artificial Sequence
  Description of Artificial Sequence: Synthetic oligonucleotide
  Sense strand starting at position 940 of SEQ ID NO: 469
augugaggcagucauuaaa

SEQ ID NO: 39517 - RNA, 19 nt, Artificial Sequence
  Description of Artificial Sequence: Synthetic oligonucleotide
  Antisense strand to SEQ ID NO: 39516
uuuaaugacugccucacau

SEQ ID NO: 39518 - RNA, 19 nt, Artificial Sequence
  Description of Artificial Sequence: Synthetic oligonucleotide
  Sense strand starting at position 936 of SEQ ID NO: 469
aggaaugugaggcagucau

SEQ ID NO: 39519 - RNA, 19 nt, Artificial Sequence
  Description of Artificial Sequence: Synthetic oligonucleotide
  Antisense strand to SEQ ID NO: 39518
augacugccucacauuccu

SEQ ID NO: 39520 - RNA, 19 nt, Artificial Sequence
  Description of Artificial Sequence: Synthetic oligonucleotide
  Sense strand starting at position 923 of SEQ ID NO: 469
ccauauuccggguaggaau

SEQ ID NO: 39521 - RNA, 19 nt, Artificial Sequence
  Description of Artificial Sequence: Synthetic oligonucleotide
  Antisense strand to SEQ ID NO: 39520
auuccuacccggaauaugg

SEQ ID NO: 39522 - RNA, 19 nt, Artificial Sequence
  Description of Artificial Sequence: Synthetic oligonucleotide
  Sense strand starting at position 921 of SEQ ID NO: 469
acccauauuccggguagga

SEQ ID NO: 39523 - RNA, 19 nt, Artificial Sequence
  Description of Artificial Sequence: Synthetic oligonucleotide
  Antisense strand to SEQ ID NO: 39522
uccuacccggaauaugggu

SEQ ID NO: 39524 - RNA, 19 nt, Artificial Sequence
  Description of Artificial Sequence: Synthetic oligonucleotide
  Sense strand starting at position 866 of SEQ ID NO: 469
ggcggugcugggagaaguu

SEQ ID NO: 39525 - RNA, 19 nt, Artificial Sequence
  Description of Artificial Sequence: Synthetic oligonucleotide
  Antisense strand to SEQ ID NO: 39524
aacuucucccagcaccgcc

SEQ ID NO: 39526 - RNA, 19 nt, Artificial Sequence
  Description of Artificial Sequence: Synthetic oligonucleotide
  Sense strand starting at position 627 of SEQ ID NO: 469
gugggugaggaaggauauu

SEQ ID NO: 39527 - RNA, 19 nt, Artificial Sequence
  Description of Artificial Sequence: Synthetic oligonucleotide
  Antisense strand to SEQ ID NO: 39526
aauauccuuccucacccac

SEQ ID NO: 39528 - RNA, 19 nt, Artificial Sequence
  Description of Artificial Sequence: Synthetic oligonucleotide
  Sense strand starting at position 620 of SEQ ID NO: 469
ggguacugugggugaggaa

SEQ ID NO: 39529 - RNA, 19 nt, Artificial Sequence
  Description of Artificial Sequence: Synthetic oligonucleotide
  Antisense strand to SEQ ID NO: 39528
uuccucacccacaguaccc

SEQ ID NO: 39530 - RNA, 19 nt, Artificial Sequence
  Description of Artificial Sequence: Synthetic oligonucleotide
  Sense strand starting at position 585 of SEQ ID NO: 469
ucuagaauucugugagggu

SEQ ID NO: 39531 - RNA, 19 nt, Artificial Sequence
  Description of Artificial Sequence: Synthetic oligonucleotide
  Antisense strand to SEQ ID NO: 39530
acccucacagaauucuaga

SEQ ID NO: 39532 - RNA, 19 nt, Artificial Sequence
  Description of Artificial Sequence: Synthetic oligonucleotide
  Sense strand starting at position 575 of SEQ ID NO: 469
gaggguggugucuagaauu

SEQ ID NO: 39533 - RNA, 19 nt, Artificial Sequence
  Description of Artificial Sequence: Synthetic oligonucleotide
  Antisense strand to SEQ ID NO: 39532
aauucuagacaccacccuc

SEQ ID NO: 39534 - RNA, 19 nt, Artificial Sequence
  Description of Artificial Sequence: Synthetic oligonucleotide
  Sense strand starting at position 540 of SEQ ID NO: 469
uggaucugaguaugaugga

SEQ ID NO: 39535 - RNA, 19 nt, Artificial Sequence
  Description of Artificial Sequence: Synthetic oligonucleotide
  Antisense strand to SEQ ID NO: 39534
uccaucauacucagaucca

SEQ ID NO: 39536 - RNA, 19 nt, Artificial Sequence
  Description of Artificial Sequence: Synthetic oligonucleotide
  Sense strand starting at position 534 of SEQ ID NO: 469
ggacccuggaucugaguau

SEQ ID NO: 39537 - RNA, 19 nt, Artificial Sequence
  Description of Artificial Sequence: Synthetic oligonucleotide
  Antisense strand to SEQ ID NO: 39536
auacucagauccagggucc

SEQ ID NO: 39538 - RNA, 19 nt, Artificial Sequence
  Description of Artificial Sequence: Synthetic oligonucleotide
  Sense strand starting at position 306 of SEQ ID NO: 469
ugguuuagagggugaagaa

SEQ ID NO: 39539 - RNA, 19 nt, Artificial Sequence
  Description of Artificial Sequence: Synthetic oligonucleotide
  Antisense strand to SEQ ID NO: 39538
uucuucacccucuaaacca

SEQ ID NO: 39540 - RNA, 19 nt, Artificial Sequence
  Description of Artificial Sequence: Synthetic oligonucleotide
  Sense strand starting at position 274 of SEQ ID NO: 469
cucacucaguaaguuagaa

SEQ ID NO: 39541 - RNA, 19 nt, Artificial Sequence
  Description of Artificial Sequence: Synthetic oligonucleotide
  Antisense strand to SEQ ID NO: 39540
uucuaacuuacugagugag

SEQ ID NO: 39542 - RNA, 19 nt, Artificial Sequence
  Description of Artificial Sequence: Synthetic oligonucleotide
  Sense strand starting at position 271 of SEQ ID NO: 469
uuacucacucaguaaguua

SEQ ID NO: 39543 - RNA, 19 nt, Artificial Sequence
  Description of Artificial Sequence: Synthetic oligonucleotide
  Antisense strand to SEQ ID NO: 39542
uaacuuacugagugaguaa

SEQ ID NO: 39544 - RNA, 19 nt, Artificial Sequence
  Description of Artificial Sequence: Synthetic oligonucleotide
  Sense strand starting at position 266 of SEQ ID NO: 469
cugaguuacucacucagua

SEQ ID NO: 39545 - RNA, 19 nt, Artificial Sequence
  Description of Artificial Sequence: Synthetic oligonucleotide
  Antisense strand to SEQ ID NO: 39544
uacugagugaguaacucag

SEQ ID NO: 39546 - RNA, 19 nt, Artificial Sequence
  Description of Artificial Sequence: Synthetic oligonucleotide
  Sense strand starting at position 126 of SEQ ID NO: 469
aggccugugacacaauguu

SEQ ID NO: 39547 - RNA, 19 nt, Artificial Sequence
  Description of Artificial Sequence: Synthetic oligonucleotide
  Antisense strand to SEQ ID NO: 39546
aacauugugucacaggccu

SEQ ID NO: 39548 - RNA, 19 nt, Artificial Sequence
  Description of Artificial Sequence: Synthetic oligonucleotide
  Sense strand starting at position 3842 of SEQ ID NO: 470
uggguauauucucaagguc

SEQ ID NO: 39549 - RNA, 19 nt, Artificial Sequence
  Description of Artificial Sequence: Synthetic oligonucleotide
  Antisense strand to SEQ ID NO: 39548
gaccuugagaauauaccca

SEQ ID NO: 39550 - RNA, 19 nt, Artificial Sequence
  Description of Artificial Sequence: Synthetic oligonucleotide
  Sense strand starting at position 3841 of SEQ ID NO: 470
cuggguauauucucaaggu

SEQ ID NO: 39551 - RNA, 19 nt, Artificial Sequence
  Description of Artificial Sequence: Synthetic oligonucleotide
  Antisense strand to SEQ ID NO: 39550
accuugagaauauacccag

SEQ ID NO: 39552 - RNA, 19 nt, Artificial Sequence
  Description of Artificial Sequence: Synthetic oligonucleotide
  Sense strand starting at position 3833 of SEQ ID NO: 470
aucuguaccuggguauauu

SEQ ID NO: 39553 - RNA, 19 nt, Artificial Sequence
  Description of Artificial Sequence: Synthetic oligonucleotide
  Antisense strand to SEQ ID NO: 39552
aauauacccagguacagau

SEQ ID NO: 39554 - RNA, 19 nt, Artificial Sequence
  Description of Artificial Sequence: Synthetic oligonucleotide
  Sense strand starting at position 3831 of SEQ ID NO: 470
caaucuguaccuggguaua

SEQ ID NO: 39555 - RNA, 19 nt, Artificial Sequence
  Description of Artificial Sequence: Synthetic oligonucleotide
  Antisense strand to SEQ ID NO: 39554
uauacccagguacagauug

SEQ ID NO: 39556 - RNA, 19 nt, Artificial Sequence
  Description of Artificial Sequence: Synthetic oligonucleotide
  Sense strand starting at position 3830 of SEQ ID NO: 470
gcaaucuguaccuggguau

SEQ ID NO: 39557 - RNA, 19 nt, Artificial Sequence
  Description of Artificial Sequence: Synthetic oligonucleotide
  Antisense strand to SEQ ID NO: 39556
auacccagguacagauugc

SEQ ID NO: 39558 - RNA, 19 nt, Artificial Sequence
  Description of Artificial Sequence: Synthetic oligonucleotide
  Sense strand starting at position 3450 of SEQ ID NO: 470
uccugauguccuuagcguu

SEQ ID NO: 39559 - RNA, 19 nt, Artificial Sequence
  Description of Artificial Sequence: Synthetic oligonucleotide
  Antisense strand to SEQ ID NO: 39558
aacgcuaaggacaucagga

SEQ ID NO: 39560 - RNA, 19 nt, Artificial Sequence
  Description of Artificial Sequence: Synthetic oligonucleotide
  Sense strand starting at position 3432 of SEQ ID NO: 470
gguguugguggccagucau

SEQ ID NO: 39561 - RNA, 19 nt, Artificial Sequence
  Description of Artificial Sequence: Synthetic oligonucleotide
  Antisense strand to SEQ ID NO: 39560
augacuggccaccaacacc

SEQ ID NO: 39562 - RNA, 19 nt, Artificial Sequence
  Description of Artificial Sequence: Synthetic oligonucleotide
  Sense strand starting at position 3362 of SEQ ID NO: 470
aguauagaacgaugugaag

SEQ ID NO: 39563 - RNA, 19 nt, Artificial Sequence
  Description of Artificial Sequence: Synthetic oligonucleotide
  Antisense strand to SEQ ID NO: 39562
cuucacaucguucuauacu

SEQ ID NO: 39564 - RNA, 19 nt, Artificial Sequence
  Description of Artificial Sequence: Synthetic oligonucleotide
  Sense strand starting at position 3346 of SEQ ID NO: 470
aagucaaagucguaacagu

SEQ ID NO: 39565 - RNA, 19 nt, Artificial Sequence
  Description of Artificial Sequence: Synthetic oligonucleotide
  Antisense strand to SEQ ID NO: 39564
acuguuacgacuuugacuu

SEQ ID NO: 39566 - RNA, 19 nt, Artificial Sequence
  Description of Artificial Sequence: Synthetic oligonucleotide
  Sense strand starting at position 2939 of SEQ ID NO: 470
ugugcucacgcccgaguua

SEQ ID NO: 39567 - RNA, 19 nt, Artificial Sequence
  Description of Artificial Sequence: Synthetic oligonucleotide
  Antisense strand to SEQ ID NO: 39566
uaacucgggcgugagcaca

SEQ ID NO: 39568 - RNA, 19 nt, Artificial Sequence
  Description of Artificial Sequence: Synthetic oligonucleotide
  Sense strand starting at position 2152 of SEQ ID NO: 470
gacgaugccugagaucaga

SEQ ID NO: 39569 - RNA, 19 nt, Artificial Sequence
  Description of Artificial Sequence: Synthetic oligonucleotide
  Antisense strand to SEQ ID NO: 39568
ucugaucucaggcaucguc

SEQ ID NO: 39570 - RNA, 19 nt, Artificial Sequence
  Description of Artificial Sequence: Synthetic oligonucleotide
  Sense strand starting at position 2149 of SEQ ID NO: 470
ggagacgaugccugagauc

SEQ ID NO: 39571 - RNA, 19 nt, Artificial Sequence
  Description of Artificial Sequence: Synthetic oligonucleotide
  Antisense strand to SEQ ID NO: 39570
gaucucaggcaucgucucc

SEQ ID NO: 39572 - RNA, 19 nt, Artificial Sequence
  Description of Artificial Sequence: Synthetic oligonucleotide
  Sense strand starting at position 2015 of SEQ ID NO: 470
guuggaugcugcccaauca

SEQ ID NO: 39573 - RNA, 19 nt, Artificial Sequence
  Description of Artificial Sequence: Synthetic oligonucleotide
  Antisense strand to SEQ ID NO: 39572
ugauugggcagcauccaac

SEQ ID NO: 39574 - RNA, 19 nt, Artificial Sequence
  Description of Artificial Sequence: Synthetic oligonucleotide
  Sense strand starting at position 1398 of SEQ ID NO: 470
gcugguggcucgguaacaa

SEQ ID NO: 39575 - RNA, 19 nt, Artificial Sequence
  Description of Artificial Sequence: Synthetic oligonucleotide
  Antisense strand to SEQ ID NO: 39574
uuguuaccgagccaccagc

SEQ ID NO: 39576 - RNA, 19 nt, Artificial Sequence
  Description of Artificial Sequence: Synthetic oligonucleotide
  Sense strand starting at position 1397 of SEQ ID NO: 470
ggcugguggcucgguaaca

SEQ ID NO: 39577 - RNA, 19 nt, Artificial Sequence
  Description of Artificial Sequence: Synthetic oligonucleotide
  Antisense strand to SEQ ID NO: 39576
uguuaccgagccaccagcc

SEQ ID NO: 39578 - RNA, 19 nt, Artificial Sequence
  Description of Artificial Sequence: Synthetic oligonucleotide
  Sense strand starting at position 1333 of SEQ ID NO: 470
uugccuuccugcccagauu

SEQ ID NO: 39579 - RNA, 19 nt, Artificial Sequence
  Description of Artificial Sequence: Synthetic oligonucleotide
  Antisense strand to SEQ ID NO: 39578
aaucugggcaggaaggcaa

SEQ ID NO: 39580 - RNA, 19 nt, Artificial Sequence
  Description of Artificial Sequence: Synthetic oligonucleotide
  Sense strand starting at position 1316 of SEQ ID NO: 470
cagauauucugcgggccuu

SEQ ID NO: 39581 - RNA, 19 nt, Artificial Sequence
  Description of Artificial Sequence: Synthetic oligonucleotide
  Antisense strand to SEQ ID NO: 39580
aaggcccgcagaauaucug

SEQ ID NO: 39582 - RNA, 19 nt, Artificial Sequence
  Description of Artificial Sequence: Synthetic oligonucleotide
  Sense strand starting at position 1304 of SEQ ID NO: 470
cuucuuggucaccagauau

SEQ ID NO: 39583 - RNA, 19 nt, Artificial Sequence
  Description of Artificial Sequence: Synthetic oligonucleotide
  Antisense strand to SEQ ID NO: 39582
auaucuggugaccaagaag

SEQ ID NO: 39584 - RNA, 19 nt, Artificial Sequence
  Description of Artificial Sequence: Synthetic oligonucleotide
  Sense strand starting at position 1303 of SEQ ID NO: 470
ccuucuuggucaccagaua

SEQ ID NO: 39585 - RNA, 19 nt, Artificial Sequence
  Description of Artificial Sequence: Synthetic oligonucleotide
  Antisense strand to SEQ ID NO: 39584
uaucuggugaccaagaagg

SEQ ID NO: 39586 - RNA, 19 nt, Artificial Sequence
  Description of Artificial Sequence: Synthetic oligonucleotide
  Sense strand starting at position 1275 of SEQ ID NO: 470
gaagauggucucugaggcu

SEQ ID NO: 39587 - RNA, 19 nt, Artificial Sequence
  Description of Artificial Sequence: Synthetic oligonucleotide
  Antisense strand to SEQ ID NO: 39586
agccucagagaccaucuuc

SEQ ID NO: 39588 - RNA, 19 nt, Artificial Sequence
  Description of Artificial Sequence: Synthetic oligonucleotide
  Sense strand starting at position 1271 of SEQ ID NO: 470
cugagaagauggucucuga

SEQ ID NO: 39589 - RNA, 19 nt, Artificial Sequence
  Description of Artificial Sequence: Synthetic oligonucleotide
  Antisense strand to SEQ ID NO: 39588
ucagagaccaucuucucag

SEQ ID NO: 39590 - RNA, 19 nt, Artificial Sequence
  Description of Artificial Sequence: Synthetic oligonucleotide
  Sense strand starting at position 1212 of SEQ ID NO: 470
gaugcagucccauagacuu

SEQ ID NO: 39591 - RNA, 19 nt, Artificial Sequence
  Description of Artificial Sequence: Synthetic oligonucleotide
  Antisense strand to SEQ ID NO: 39590
aagucuaugggacugcauc

SEQ ID NO: 39592 - RNA, 19 nt, Artificial Sequence
  Description of Artificial Sequence: Synthetic oligonucleotide
  Sense strand starting at position 743 of SEQ ID NO: 470
gugugaguguugccaagca

SEQ ID NO: 39593 - RNA, 19 nt, Artificial Sequence
  Description of Artificial Sequence: Synthetic oligonucleotide
  Antisense strand to SEQ ID NO: 39592
ugcuuggcaacacucacac

SEQ ID NO: 39594 - RNA, 19 nt, Artificial Sequence
  Description of Artificial Sequence: Synthetic oligonucleotide
  Sense strand starting at position 735 of SEQ ID NO: 470
caugcuuugugugaguguu

SEQ ID NO: 39595 - RNA, 19 nt, Artificial Sequence
  Description of Artificial Sequence: Synthetic oligonucleotide
  Antisense strand to SEQ ID NO: 39594
aacacucacacaaagcaug

SEQ ID NO: 39596 - RNA, 19 nt, Artificial Sequence
  Description of Artificial Sequence: Synthetic oligonucleotide
  Sense strand starting at position 734 of SEQ ID NO: 470
ccaugcuuugugugagugu

SEQ ID NO: 39597 - RNA, 19 nt, Artificial Sequence
  Description of Artificial Sequence: Synthetic oligonucleotide
  Antisense strand to SEQ ID NO: 39596
acacucacacaaagcaugg

SEQ ID NO: 39598 - RNA, 19 nt, Artificial Sequence
  Description of Artificial Sequence: Synthetic oligonucleotide
  Sense strand starting at position 732 of SEQ ID NO: 470
acccaugcuuugugugagu

SEQ ID NO: 39599 - RNA, 19 nt, Artificial Sequence
  Description of Artificial Sequence: Synthetic oligonucleotide
  Antisense strand to SEQ ID NO: 39598
acucacacaaagcaugggu

SEQ ID NO: 39600 - RNA, 19 nt, Artificial Sequence
  Description of Artificial Sequence: Synthetic oligonucleotide
  Sense strand starting at position 730 of SEQ ID NO: 470
gcacccaugcuuuguguga

SEQ ID NO: 39601 - RNA, 19 nt, Artificial Sequence
  Description of Artificial Sequence: Synthetic oligonucleotide
  Antisense strand to SEQ ID NO: 39600
ucacacaaagcaugggugc

SEQ ID NO: 39602 - RNA, 19 nt, Artificial Sequence
  Description of Artificial Sequence: Synthetic oligonucleotide
  Sense strand starting at position 677 of SEQ ID NO: 470
uuuggauucugcuggcauu

SEQ ID NO: 39603 - RNA, 19 nt, Artificial Sequence
  Description of Artificial Sequence: Synthetic oligonucleotide
  Antisense strand to SEQ ID NO: 39602
aaugccagcagaauccaaa

SEQ ID NO: 39604 - RNA, 19 nt, Artificial Sequence
  Description of Artificial Sequence: Synthetic oligonucleotide
  Sense strand starting at position 621 of SEQ ID NO: 470
ccacgaggcucuuguacua

SEQ ID NO: 39605 - RNA, 19 nt, Artificial Sequence
  Description of Artificial Sequence: Synthetic oligonucleotide
  Antisense strand to SEQ ID NO: 39604
uaguacaagagccucgugg

SEQ ID NO: 39606 - RNA, 19 nt, Artificial Sequence
  Description of Artificial Sequence: Synthetic oligonucleotide
  Sense strand starting at position 612 of SEQ ID NO: 470
agaagauugccacgaggcu

SEQ ID NO: 39607 - RNA, 19 nt, Artificial Sequence
  Description of Artificial Sequence: Synthetic oligonucleotide
  Antisense strand to SEQ ID NO: 39606
agccucguggcaaucuucu

SEQ ID NO: 39608 - RNA, 19 nt, Artificial Sequence
  Description of Artificial Sequence: Synthetic oligonucleotide
  Sense strand starting at position 579 of SEQ ID NO: 470
cuccaugucccacacagau

SEQ ID NO: 39609 - RNA, 19 nt, Artificial Sequence
  Description of Artificial Sequence: Synthetic oligonucleotide
  Antisense strand to SEQ ID NO: 39608
aucugugugggacauggag

SEQ ID NO: 39610 - RNA, 19 nt, Artificial Sequence
  Description of Artificial Sequence: Synthetic oligonucleotide
  Sense strand starting at position 542 of SEQ ID NO: 470
gauggauggacacguguuu

SEQ ID NO: 39611 - RNA, 19 nt, Artificial Sequence
  Description of Artificial Sequence: Synthetic oligonucleotide
  Antisense strand to SEQ ID NO: 39610
aaacacguguccauccauc

SEQ ID NO: 39612 - RNA, 19 nt, Artificial Sequence
  Description of Artificial Sequence: Synthetic oligonucleotide
  Sense strand starting at position 319 of SEQ ID NO: 470
gccaucuaucugggugcau

SEQ ID NO: 39613 - RNA, 19 nt, Artificial Sequence
  Description of Artificial Sequence: Synthetic oligonucleotide
  Antisense strand to SEQ ID NO: 39612
augcacccagauagauggc

SEQ ID NO: 39614 - RNA, 19 nt, Artificial Sequence
  Description of Artificial Sequence: Synthetic oligonucleotide
  Sense strand starting at position 171 of SEQ ID NO: 470
cuggcuuuaucagaccacu

SEQ ID NO: 39615 - RNA, 19 nt, Artificial Sequence
  Description of Artificial Sequence: Synthetic oligonucleotide
  Antisense strand to SEQ ID NO: 39614
aguggucugauaaagccag

SEQ ID NO: 39616 - RNA, 19 nt, Artificial Sequence
  Description of Artificial Sequence: Synthetic oligonucleotide
  Sense strand starting at position 3948 of SEQ ID NO: 471
cucggagacuugucacuuu

SEQ ID NO: 39617 - RNA, 19 nt, Artificial Sequence
  Description of Artificial Sequence: Synthetic oligonucleotide
  Antisense strand to SEQ ID NO: 39616
aaagugacaagucuccgag

SEQ ID NO: 39618 - RNA, 19 nt, Artificial Sequence
  Description of Artificial Sequence: Synthetic oligonucleotide
  Sense strand starting at position 3816 of SEQ ID NO: 471
gccacaguuccuggugauu

SEQ ID NO: 39619 - RNA, 19 nt, Artificial Sequence
  Description of Artificial Sequence: Synthetic oligonucleotide
  Antisense strand to SEQ ID NO: 39618
aaucaccaggaacuguggc

SEQ ID NO: 39620 - RNA, 19 nt, Artificial Sequence
  Description of Artificial Sequence: Synthetic oligonucleotide
  Sense strand starting at position 3727 of SEQ ID NO: 471
ugguauccaucuccuagua

SEQ ID NO: 39621 - RNA, 19 nt, Artificial Sequence
  Description of Artificial Sequence: Synthetic oligonucleotide
  Antisense strand to SEQ ID NO: 39620
uacuaggagauggauacca

SEQ ID NO: 39622 - RNA, 19 nt, Artificial Sequence
  Description of Artificial Sequence: Synthetic oligonucleotide
  Sense strand starting at position 3595 of SEQ ID NO: 471
aguuauucucaacagagua

SEQ ID NO: 39623 - RNA, 19 nt, Artificial Sequence
  Description of Artificial Sequence: Synthetic oligonucleotide
  Antisense strand to SEQ ID NO: 39622
uacucuguugagaauaacu

SEQ ID NO: 39624 - RNA, 19 nt, Artificial Sequence
  Description of Artificial Sequence: Synthetic oligonucleotide
  Sense strand starting at position 3573 of SEQ ID NO: 471
aggauuugcuaucaucauu

SEQ ID NO: 39625 - RNA, 19 nt, Artificial Sequence
  Description of Artificial Sequence: Synthetic oligonucleotide
  Antisense strand to SEQ ID NO: 39624
aaugaugauagcaaauccu

SEQ ID NO: 39626 - RNA, 19 nt, Artificial Sequence
  Description of Artificial Sequence: Synthetic oligonucleotide
  Sense strand starting at position 3515 of SEQ ID NO: 471
gucuacuuugaucauauca

SEQ ID NO: 39627 - RNA, 19 nt, Artificial Sequence
  Description of Artificial Sequence: Synthetic oligonucleotide
  Antisense strand to SEQ ID NO: 39626
ugauaugaucaaaguagac

SEQ ID NO: 39628 - RNA, 19 nt, Artificial Sequence
  Description of Artificial Sequence: Synthetic oligonucleotide
  Sense strand starting at position 3514 of SEQ ID NO: 471
ugucuacuuugaucauauc

SEQ ID NO: 39629 - RNA, 19 nt, Artificial Sequence
  Description of Artificial Sequence: Synthetic oligonucleotide
  Antisense strand to SEQ ID NO: 39628
gauaugaucaaaguagaca

SEQ ID NO: 39630 - RNA, 19 nt, Artificial Sequence
  Description of Artificial Sequence: Synthetic oligonucleotide
  Sense strand starting at position 3509 of SEQ ID NO: 471
agaaaugucuacuuugauc

SEQ ID NO: 39631 - RNA, 19 nt, Artificial Sequence
  Description of Artificial Sequence: Synthetic oligonucleotide
  Antisense strand to SEQ ID NO: 39630
gaucaaaguagacauuucu

SEQ ID NO: 39632 - RNA, 19 nt, Artificial Sequence
  Description of Artificial Sequence: Synthetic oligonucleotide
  Sense strand starting at position 3465 of SEQ ID NO: 471
ugcgcauugguuuccauua

SEQ ID NO: 39633 - RNA, 19 nt, Artificial Sequence
  Description of Artificial Sequence: Synthetic oligonucleotide
  Antisense strand to SEQ ID NO: 39632
uaauggaaaccaaugcgca

SEQ ID NO: 39634 - RNA, 19 nt, Artificial Sequence
  Description of Artificial Sequence: Synthetic oligonucleotide
  Sense strand starting at position 3464 of SEQ ID NO: 471
gugcgcauugguuuccauu

SEQ ID NO: 39635 - RNA, 19 nt, Artificial Sequence
  Description of Artificial Sequence: Synthetic oligonucleotide
  Antisense strand to SEQ ID NO: 39634
aauggaaaccaaugcgcac

SEQ ID NO: 39636 - RNA, 19 nt, Artificial Sequence
  Description of Artificial Sequence: Synthetic oligonucleotide
  Sense strand starting at position 3395 of SEQ ID NO: 471
ccucuacuucuaugagaug

SEQ ID NO: 39637 - RNA, 19 nt, Artificial Sequence
  Description of Artificial Sequence: Synthetic oligonucleotide
  Antisense strand to SEQ ID NO: 39636
caucucauagaaguagagg

SEQ ID NO: 39638 - RNA, 19 nt, Artificial Sequence
  Description of Artificial Sequence: Synthetic oligonucleotide
  Sense strand starting at position 3303 of SEQ ID NO: 471
ccuaucuaucugugauccu

SEQ ID NO: 39639 - RNA, 19 nt, Artificial Sequence
  Description of Artificial Sequence: Synthetic oligonucleotide
  Antisense strand to SEQ ID NO: 39638
aggaucacagauagauagg

SEQ ID NO: 39640 - RNA, 19 nt, Artificial Sequence
  Description of Artificial Sequence: Synthetic oligonucleotide
  Sense strand starting at position 3300 of SEQ ID NO: 471
ccuccuaucuaucugugau

SEQ ID NO: 39641 - RNA, 19 nt, Artificial Sequence
  Description of Artificial Sequence: Synthetic oligonucleotide
  Antisense strand to SEQ ID NO: 39640
aucacagauagauaggagg

SEQ ID NO: 39642 - RNA, 19 nt, Artificial Sequence
  Description of Artificial Sequence: Synthetic oligonucleotide
  Sense strand starting at position 3287 of SEQ ID NO: 471
ggaugaauguauuccuccu

SEQ ID NO: 39643 - RNA, 19 nt, Artificial Sequence
  Description of Artificial Sequence: Synthetic oligonucleotide
  Antisense strand to SEQ ID NO: 39642
aggaggaauacauucaucc

SEQ ID NO: 39644 - RNA, 19 nt, Artificial Sequence
  Description of Artificial Sequence: Synthetic oligonucleotide
  Sense strand starting at position 3215 of SEQ ID NO: 471
uggugcuacuuacugaaau

SEQ ID NO: 39645 - RNA, 19 nt, Artificial Sequence
  Description of Artificial Sequence: Synthetic oligonucleotide
  Antisense strand to SEQ ID NO: 39644
auuucaguaaguagcacca

SEQ ID NO: 39646 - RNA, 19 nt, Artificial Sequence
  Description of Artificial Sequence: Synthetic oligonucleotide
  Sense strand starting at position 3213 of SEQ ID NO: 471
gguggugcuacuuacugaa

SEQ ID NO: 39647 - RNA, 19 nt, Artificial Sequence
  Description of Artificial Sequence: Synthetic oligonucleotide
  Antisense strand to SEQ ID NO: 39646
uucaguaaguagcaccacc

SEQ ID NO: 39648 - RNA, 19 nt, Artificial Sequence
  Description of Artificial Sequence: Synthetic oligonucleotide
  Sense strand starting at position 2495 of SEQ ID NO: 471
ccgacauccaagugagguu

SEQ ID NO: 39649 - RNA, 19 nt, Artificial Sequence
  Description of Artificial Sequence: Synthetic oligonucleotide
  Antisense strand to SEQ ID NO: 39648
aaccucacuuggaugucgg

SEQ ID NO: 39650 - RNA, 19 nt, Artificial Sequence
  Description of Artificial Sequence: Synthetic oligonucleotide
  Sense strand starting at position 2456 of SEQ ID NO: 471
gcaauaauggacugcgaag

SEQ ID NO: 39651 - RNA, 19 nt, Artificial Sequence
  Description of Artificial Sequence: Synthetic oligonucleotide
  Antisense strand to SEQ ID NO: 39650
cuucgcaguccauuauugc

SEQ ID NO: 39652 - RNA, 19 nt, Artificial Sequence
  Description of Artificial Sequence: Synthetic oligonucleotide
  Sense strand starting at position 2428 of SEQ ID NO: 471
uauaguauggaagguagau

SEQ ID NO: 39653 - RNA, 19 nt, Artificial Sequence
  Description of Artificial Sequence: Synthetic oligonucleotide
  Antisense strand to SEQ ID NO: 39652
aucuaccuuccauacuaua

SEQ ID NO: 39654 - RNA, 19 nt, Artificial Sequence
  Description of Artificial Sequence: Synthetic oligonucleotide
  Sense strand starting at position 2425 of SEQ ID NO: 471
guguauaguauggaaggua

SEQ ID NO: 39655 - RNA, 19 nt, Artificial Sequence
  Description of Artificial Sequence: Synthetic oligonucleotide
  Antisense strand to SEQ ID NO: 39654
uaccuuccauacuauacac

SEQ ID NO: 39656 - RNA, 19 nt, Artificial Sequence
  Description of Artificial Sequence: Synthetic oligonucleotide
  Sense strand starting at position 2356 of SEQ ID NO: 471
acgucaugccauuguaaga

SEQ ID NO: 39657 - RNA, 19 nt, Artificial Sequence
  Description of Artificial Sequence: Synthetic oligonucleotide
  Antisense strand to SEQ ID NO: 39656
ucuuacaauggcaugacgu

SEQ ID NO: 39658 - RNA, 19 nt, Artificial Sequence
  Description of Artificial Sequence: Synthetic oligonucleotide
  Sense strand starting at position 2345 of SEQ ID NO: 471
ccugaauugagacgucaug

SEQ ID NO: 39659 - RNA, 19 nt, Artificial Sequence
  Description of Artificial Sequence: Synthetic oligonucleotide
  Antisense strand to SEQ ID NO: 39658
caugacgucucaauucagg

SEQ ID NO: 39660 - RNA, 19 nt, Artificial Sequence
  Description of Artificial Sequence: Synthetic oligonucleotide
  Sense strand starting at position 1240 of SEQ ID NO: 471
gcuuaaugccacugaggca

SEQ ID NO: 39661 - RNA, 19 nt, Artificial Sequence
  Description of Artificial Sequence: Synthetic oligonucleotide
  Antisense strand to SEQ ID NO: 39660
ugccucaguggcauuaagc

SEQ ID NO: 39662 - RNA, 19 nt, Artificial Sequence
  Description of Artificial Sequence: Synthetic oligonucleotide
  Sense strand starting at position 1211 of SEQ ID NO: 471
cacauagcccuguguuaga

SEQ ID NO: 39663 - RNA, 19 nt, Artificial Sequence
  Description of Artificial Sequence: Synthetic oligonucleotide
  Antisense strand to SEQ ID NO: 39662
ucuaacacagggcuaugug

SEQ ID NO: 39664 - RNA, 19 nt, Artificial Sequence
  Description of Artificial Sequence: Synthetic oligonucleotide
  Sense strand starting at position 1209 of SEQ ID NO: 471
gacacauagcccuguguua

SEQ ID NO: 39665 - RNA, 19 nt, Artificial Sequence
  Description of Artificial Sequence: Synthetic oligonucleotide
  Antisense strand to SEQ ID NO: 39664
uaacacagggcuauguguc

SEQ ID NO: 39666 - RNA, 19 nt, Artificial Sequence
  Description of Artificial Sequence: Synthetic oligonucleotide
  Sense strand starting at position 1042 of SEQ ID NO: 471
caauuaagugcauggugau

SEQ ID NO: 39667 - RNA, 19 nt, Artificial Sequence
  Description of Artificial Sequence: Synthetic oligonucleotide
  Antisense strand to SEQ ID NO: 39666
aucaccaugcacuuaauug

SEQ ID NO: 39668 - RNA, 19 nt, Artificial Sequence
  Description of Artificial Sequence: Synthetic oligonucleotide
  Sense strand starting at position 821 of SEQ ID NO: 471
guuuaccuauuugaaguua

SEQ ID NO: 39669 - RNA, 19 nt, Artificial Sequence
  Description of Artificial Sequence: Synthetic oligonucleotide
  Antisense strand to SEQ ID NO: 39668
uaacuucaaauagguaaac

SEQ ID NO: 39670 - RNA, 19 nt, Artificial Sequence
  Description of Artificial Sequence: Synthetic oligonucleotide
  Sense strand starting at position 686 of SEQ ID NO: 471
cggaguugucaggaauagg

SEQ ID NO: 39671 - RNA, 19 nt, Artificial Sequence
  Description of Artificial Sequence: Synthetic oligonucleotide
  Antisense strand to SEQ ID NO: 39670
ccuauuccugacaacuccg

SEQ ID NO: 39672 - RNA, 19 nt, Artificial Sequence
  Description of Artificial Sequence: Synthetic oligonucleotide
  Sense strand starting at position 452 of SEQ ID NO: 471
uugacaacagauugcuuaa

SEQ ID NO: 39673 - RNA, 19 nt, Artificial Sequence
  Description of Artificial Sequence: Synthetic oligonucleotide
  Antisense strand to SEQ ID NO: 39672
uuaagcaaucuguugucaa

SEQ ID NO: 39674 - RNA, 19 nt, Artificial Sequence
  Description of Artificial Sequence: Synthetic oligonucleotide
  Sense strand starting at position 442 of SEQ ID NO: 471
uuccuaagcguugacaaca

SEQ ID NO: 39675 - RNA, 19 nt, Artificial Sequence
  Description of Artificial Sequence: Synthetic oligonucleotide
  Antisense strand to SEQ ID NO: 39674
uguugucaacgcuuaggaa

SEQ ID NO: 39676 - RNA, 19 nt, Artificial Sequence
  Description of Artificial Sequence: Synthetic oligonucleotide
  Sense strand starting at position 441 of SEQ ID NO: 471
auuccuaagcguugacaac

SEQ ID NO: 39677 - RNA, 19 nt, Artificial Sequence
  Description of Artificial Sequence: Synthetic oligonucleotide
  Antisense strand to SEQ ID NO: 39676
guugucaacgcuuaggaau

SEQ ID NO: 39678 - RNA, 19 nt, Artificial Sequence
  Description of Artificial Sequence: Synthetic oligonucleotide
  Sense strand starting at position 437 of SEQ ID NO: 471
acaaauuccuaagcguuga

SEQ ID NO: 39679 - RNA, 19 nt, Artificial Sequence
  Description of Artificial Sequence: Synthetic oligonucleotide
  Antisense strand to SEQ ID NO: 39678
ucaacgcuuaggaauuugu

SEQ ID NO: 39680 - RNA, 19 nt, Artificial Sequence
  Description of Artificial Sequence: Synthetic oligonucleotide
  Sense strand starting at position 394 of SEQ ID NO: 471
acaacauucuaguaagaag

SEQ ID NO: 39681 - RNA, 19 nt, Artificial Sequence
  Description of Artificial Sequence: Synthetic oligonucleotide
  Antisense strand to SEQ ID NO: 39680
cuucuuacuagaauguugu

SEQ ID NO: 39682 - RNA, 19 nt, Artificial Sequence
  Description of Artificial Sequence: Synthetic oligonucleotide
  Sense strand starting at position 343 of SEQ ID NO: 471
agugucugggauuguuuau

SEQ ID NO: 39683 - RNA, 19 nt, Artificial Sequence
  Description of Artificial Sequence: Synthetic oligonucleotide
  Antisense strand to SEQ ID NO: 39682
auaaacaaucccagacacu

SEQ ID NO: 39684 - RNA, 19 nt, Artificial Sequence
  Description of Artificial Sequence: Synthetic oligonucleotide
  Sense strand starting at position 337 of SEQ ID NO: 471
auuaauagugucugggauu

SEQ ID NO: 39685 - RNA, 19 nt, Artificial Sequence
  Description of Artificial Sequence: Synthetic oligonucleotide
  Antisense strand to SEQ ID NO: 39684
aaucccagacacuauuaau

SEQ ID NO: 39686 - RNA, 19 nt, Artificial Sequence
  Description of Artificial Sequence: Synthetic oligonucleotide
  Sense strand starting at position 336 of SEQ ID NO: 471
aauuaauagugucugggau

SEQ ID NO: 39687 - RNA, 19 nt, Artificial Sequence
  Description of Artificial Sequence: Synthetic oligonucleotide
  Antisense strand to SEQ ID NO: 39686
aucccagacacuauuaauu

SEQ ID NO: 39688 - RNA, 19 nt, Artificial Sequence
  Description of Artificial Sequence: Synthetic oligonucleotide
  Sense strand starting at position 307 of SEQ ID NO: 471
gugauaaccucaguaaauu

SEQ ID NO: 39689 - RNA, 19 nt, Artificial Sequence
  Description of Artificial Sequence: Synthetic oligonucleotide
  Antisense strand to SEQ ID NO: 39688
aauuuacugagguuaucac

SEQ ID NO: 39690 - RNA, 19 nt, Artificial Sequence
  Description of Artificial Sequence: Synthetic oligonucleotide
  Sense strand starting at position 305 of SEQ ID NO: 471
uugugauaaccucaguaaa

SEQ ID NO: 39691 - RNA, 19 nt, Artificial Sequence
  Description of Artificial Sequence: Synthetic oligonucleotide
  Antisense strand to SEQ ID NO: 39690
uuuacugagguuaucacaa

SEQ ID NO: 39692 - RNA, 19 nt, Artificial Sequence
  Description of Artificial Sequence: Synthetic oligonucleotide
  Sense strand starting at position 214 of SEQ ID NO: 471
ggaagcauccaucagcauu

SEQ ID NO: 39693 - RNA, 19 nt, Artificial Sequence
  Description of Artificial Sequence: Synthetic oligonucleotide
  Antisense strand to SEQ ID NO: 39692
aaugcugauggaugcuucc

SEQ ID NO: 39694 - RNA, 19 nt, Artificial Sequence
  Description of Artificial Sequence: Synthetic oligonucleotide
  Sense strand starting at position 105 of SEQ ID NO: 471
gcuuccuaauaaguagauu

SEQ ID NO: 39695 - RNA, 19 nt, Artificial Sequence
  Description of Artificial Sequence: Synthetic oligonucleotide
  Antisense strand to SEQ ID NO: 39694
aaucuacuuauuaggaagc

SEQ ID NO: 39696 - RNA, 19 nt, Artificial Sequence
  Description of Artificial Sequence: Synthetic oligonucleotide
  Sense strand starting at position 3941 of SEQ ID NO: 472
guguuugauuuccuaguuu

SEQ ID NO: 39697 - RNA, 19 nt, Artificial Sequence
  Description of Artificial Sequence: Synthetic oligonucleotide
  Antisense strand to SEQ ID NO: 39696
aaacuaggaaaucaaacac

SEQ ID NO: 39698 - RNA, 19 nt, Artificial Sequence
  Description of Artificial Sequence: Synthetic oligonucleotide
  Sense strand starting at position 3940 of SEQ ID NO: 472
aguguuugauuuccuaguu

SEQ ID NO: 39699 - RNA, 19 nt, Artificial Sequence
  Description of Artificial Sequence: Synthetic oligonucleotide
  Antisense strand to SEQ ID NO: 39698
aacuaggaaaucaaacacu

SEQ ID NO: 39700 - RNA, 19 nt, Artificial Sequence
  Description of Artificial Sequence: Synthetic oligonucleotide
  Sense strand starting at position 3937 of SEQ ID NO: 472
gcuaguguuugauuuccua

SEQ ID NO: 39701 - RNA, 19 nt, Artificial Sequence
  Description of Artificial Sequence: Synthetic oligonucleotide
  Antisense strand to SEQ ID NO: 39700
uaggaaaucaaacacuagc

SEQ ID NO: 39702 - RNA, 19 nt, Artificial Sequence
  Description of Artificial Sequence: Synthetic oligonucleotide
  Sense strand starting at position 3933 of SEQ ID NO: 472
uauggcuaguguuugauuu

SEQ ID NO: 39703 - RNA, 19 nt, Artificial Sequence
  Description of Artificial Sequence: Synthetic oligonucleotide
  Antisense strand to SEQ ID NO: 39702
aaaucaaacacuagccaua

SEQ ID NO: 39704 - RNA, 19 nt, Artificial Sequence
  Description of Artificial Sequence: Synthetic oligonucleotide
  Sense strand starting at position 3802 of SEQ ID NO: 472
ugugaaagcagauagucua

SEQ ID NO: 39705 - RNA, 19 nt, Artificial Sequence
  Description of Artificial Sequence: Synthetic oligonucleotide
  Antisense strand to SEQ ID NO: 39704
uagacuaucugcuuucaca

SEQ ID NO: 39706 - RNA, 19 nt, Artificial Sequence
  Description of Artificial Sequence: Synthetic oligonucleotide
  Sense strand starting at position 3789 of SEQ ID NO: 472
gccagcacuuauuugugaa

SEQ ID NO: 39707 - RNA, 19 nt, Artificial Sequence
  Description of Artificial Sequence: Synthetic oligonucleotide
  Antisense strand to SEQ ID NO: 39706
uucacaaauaagugcuggc

SEQ ID NO: 39708 - RNA, 19 nt, Artificial Sequence
  Description of Artificial Sequence: Synthetic oligonucleotide
  Sense strand starting at position 3739 of SEQ ID NO: 472
uaauguauggugugaaaga

SEQ ID NO: 39709 - RNA, 19 nt, Artificial Sequence
  Description of Artificial Sequence: Synthetic oligonucleotide
  Antisense strand to SEQ ID NO: 39708
ucuuucacaccauacauua

SEQ ID NO: 39710 - RNA, 19 nt, Artificial Sequence
  Description of Artificial Sequence: Synthetic oligonucleotide
  Sense strand starting at position 3518 of SEQ ID NO: 472
acugaagacuuucuggguu

SEQ ID NO: 39711 - RNA, 19 nt, Artificial Sequence
  Description of Artificial Sequence: Synthetic oligonucleotide
  Antisense strand to SEQ ID NO: 39710
aacccagaaagucuucagu

SEQ ID NO: 39712 - RNA, 19 nt, Artificial Sequence
  Description of Artificial Sequence: Synthetic oligonucleotide
  Sense strand starting at position 3497 of SEQ ID NO: 472
acaguucuauaacugagau

SEQ ID NO: 39713 - RNA, 19 nt, Artificial Sequence
  Description of Artificial Sequence: Synthetic oligonucleotide
  Antisense strand to SEQ ID NO: 39712
aucucaguuauagaacugu

SEQ ID NO: 39714 - RNA, 19 nt, Artificial Sequence
  Description of Artificial Sequence: Synthetic oligonucleotide
  Sense strand starting at position 3434 of SEQ ID NO: 472
agaugcuuaguguauaaac

SEQ ID NO: 39715 - RNA, 19 nt, Artificial Sequence
  Description of Artificial Sequence: Synthetic oligonucleotide
  Antisense strand to SEQ ID NO: 39714
guuuauacacuaagcaucu

SEQ ID NO: 39716 - RNA, 19 nt, Artificial Sequence
  Description of Artificial Sequence: Synthetic oligonucleotide
  Sense strand starting at position 3429 of SEQ ID NO: 472
gaauuagaugcuuagugua

SEQ ID NO: 39717 - RNA, 19 nt, Artificial Sequence
  Description of Artificial Sequence: Synthetic oligonucleotide
  Antisense strand to SEQ ID NO: 39716
uacacuaagcaucuaauuc

SEQ ID NO: 39718 - RNA, 19 nt, Artificial Sequence
  Description of Artificial Sequence: Synthetic oligonucleotide
  Sense strand starting at position 3428 of SEQ ID NO: 472
ggaauuagaugcuuagugu

SEQ ID NO: 39719 - RNA, 19 nt, Artificial Sequence
  Description of Artificial Sequence: Synthetic oligonucleotide
  Antisense strand to SEQ ID NO: 39718
acacuaagcaucuaauucc

SEQ ID NO: 39720 - RNA, 19 nt, Artificial Sequence
  Description of Artificial Sequence: Synthetic oligonucleotide
  Sense strand starting at position 3425 of SEQ ID NO: 472
ugaggaauuagaugcuuag

SEQ ID NO: 39721 - RNA, 19 nt, Artificial Sequence
  Description of Artificial Sequence: Synthetic oligonucleotide
  Antisense strand to SEQ ID NO: 39720
cuaagcaucuaauuccuca

SEQ ID NO: 39722 - RNA, 19 nt, Artificial Sequence
  Description of Artificial Sequence: Synthetic oligonucleotide
  Sense strand starting at position 3407 of SEQ ID NO: 472
guuuguaugagaggauagu

SEQ ID NO: 39723 - RNA, 19 nt, Artificial Sequence
  Description of Artificial Sequence: Synthetic oligonucleotide
  Antisense strand to SEQ ID NO: 39722
acuauccucucauacaaac

SEQ ID NO: 39724 - RNA, 19 nt, Artificial Sequence
  Description of Artificial Sequence: Synthetic oligonucleotide
  Sense strand starting at position 3382 of SEQ ID NO: 472
gggaguagaacuuguauua

SEQ ID NO: 39725 - RNA, 19 nt, Artificial Sequence
  Description of Artificial Sequence: Synthetic oligonucleotide
  Antisense strand to SEQ ID NO: 39724
uaauacaaguucuacuccc

SEQ ID NO: 39726 - RNA, 19 nt, Artificial Sequence
  Description of Artificial Sequence: Synthetic oligonucleotide
  Sense strand starting at position 3286 of SEQ ID NO: 472
cuauguugacccuauguua

SEQ ID NO: 39727 - RNA, 19 nt, Artificial Sequence
  Description of Artificial Sequence: Synthetic oligonucleotide
  Antisense strand to SEQ ID NO: 39726
uaacauagggucaacauag

SEQ ID NO: 39728 - RNA, 19 nt, Artificial Sequence
  Description of Artificial Sequence: Synthetic oligonucleotide
  Sense strand starting at position 2912 of SEQ ID NO: 472
guggaaaugacuuguguua

SEQ ID NO: 39729 - RNA, 19 nt, Artificial Sequence
  Description of Artificial Sequence: Synthetic oligonucleotide
  Antisense strand to SEQ ID NO: 39728
uaacacaagucauuuccac

SEQ ID NO: 39730 - RNA, 19 nt, Artificial Sequence
  Description of Artificial Sequence: Synthetic oligonucleotide
  Sense strand starting at position 2832 of SEQ ID NO: 472
agccaaugugagugaacau

SEQ ID NO: 39731 - RNA, 19 nt, Artificial Sequence
  Description of Artificial Sequence: Synthetic oligonucleotide
  Antisense strand to SEQ ID NO: 39730
auguucacucacauuggcu

SEQ ID NO: 39732 - RNA, 19 nt, Artificial Sequence
  Description of Artificial Sequence: Synthetic oligonucleotide
  Sense strand starting at position 2752 of SEQ ID NO: 472
gggaacaugacuggcauua

SEQ ID NO: 39733 - RNA, 19 nt, Artificial Sequence
  Description of Artificial Sequence: Synthetic oligonucleotide
  Antisense strand to SEQ ID NO: 39732
uaaugccagucauguuccc

SEQ ID NO: 39734 - RNA, 19 nt, Artificial Sequence
  Description of Artificial Sequence: Synthetic oligonucleotide
  Sense strand starting at position 2751 of SEQ ID NO: 472
agggaacaugacuggcauu

SEQ ID NO: 39735 - RNA, 19 nt, Artificial Sequence
  Description of Artificial Sequence: Synthetic oligonucleotide
  Antisense strand to SEQ ID NO: 39734
aaugccagucauguucccu

SEQ ID NO: 39736 - RNA, 19 nt, Artificial Sequence
  Description of Artificial Sequence: Synthetic oligonucleotide
  Sense strand starting at position 2717 of SEQ ID NO: 472
aagccaguaugacugguaa

SEQ ID NO: 39737 - RNA, 19 nt, Artificial Sequence
  Description of Artificial Sequence: Synthetic oligonucleotide
  Antisense strand to SEQ ID NO: 39736
uuaccagucauacuggcuu

SEQ ID NO: 39738 - RNA, 19 nt, Artificial Sequence
  Description of Artificial Sequence: Synthetic oligonucleotide
  Sense strand starting at position 2712 of SEQ ID NO: 472
ugaguaagccaguaugacu

SEQ ID NO: 39739 - RNA, 19 nt, Artificial Sequence
  Description of Artificial Sequence: Synthetic oligonucleotide
  Antisense strand to SEQ ID NO: 39738
agucauacuggcuuacuca

SEQ ID NO: 39740 - RNA, 19 nt, Artificial Sequence
  Description of Artificial Sequence: Synthetic oligonucleotide
  Sense strand starting at position 2704 of SEQ ID NO: 472
uaggguucugaguaagcca

SEQ ID NO: 39741 - RNA, 19 nt, Artificial Sequence
  Description of Artificial Sequence: Synthetic oligonucleotide
  Antisense strand to SEQ ID NO: 39740
uggcuuacucagaacccua

SEQ ID NO: 39742 - RNA, 19 nt, Artificial Sequence
  Description of Artificial Sequence: Synthetic oligonucleotide
  Sense strand starting at position 2692 of SEQ ID NO: 472
aggauugauuuguaggguu

SEQ ID NO: 39743 - RNA, 19 nt, Artificial Sequence
  Description of Artificial Sequence: Synthetic oligonucleotide
  Antisense strand to SEQ ID NO: 39742
aacccuacaaaucaauccu

SEQ ID NO: 39744 - RNA, 19 nt, Artificial Sequence
  Description of Artificial Sequence: Synthetic oligonucleotide
  Sense strand starting at position 2607 of SEQ ID NO: 472
agaaauuguuaggcgaagu

SEQ ID NO: 39745 - RNA, 19 nt, Artificial Sequence
  Description of Artificial Sequence: Synthetic oligonucleotide
  Antisense strand to SEQ ID NO: 39744
acuucgccuaacaauuucu

SEQ ID NO: 39746 - RNA, 19 nt, Artificial Sequence
  Description of Artificial Sequence: Synthetic oligonucleotide
  Sense strand starting at position 2578 of SEQ ID NO: 472
gcaauaaaugcaggaggau

SEQ ID NO: 39747 - RNA, 19 nt, Artificial Sequence
  Description of Artificial Sequence: Synthetic oligonucleotide
  Antisense strand to SEQ ID NO: 39746
auccuccugcauuuauugc

SEQ ID NO: 39748 - RNA, 19 nt, Artificial Sequence
  Description of Artificial Sequence: Synthetic oligonucleotide
  Sense strand starting at position 2041 of SEQ ID NO: 472
gugugaaauugagucuuag

SEQ ID NO: 39749 - RNA, 19 nt, Artificial Sequence
  Description of Artificial Sequence: Synthetic oligonucleotide
  Antisense strand to SEQ ID NO: 39748
cuaagacucaauuucacac

SEQ ID NO: 39750 - RNA, 19 nt, Artificial Sequence
  Description of Artificial Sequence: Synthetic oligonucleotide
  Sense strand starting at position 2034 of SEQ ID NO: 472
gcgcguagugugaaauuga

SEQ ID NO: 39751 - RNA, 19 nt, Artificial Sequence
  Description of Artificial Sequence: Synthetic oligonucleotide
  Antisense strand to SEQ ID NO: 39750
ucaauuucacacuacgcgc

SEQ ID NO: 39752 - RNA, 19 nt, Artificial Sequence
  Description of Artificial Sequence: Synthetic oligonucleotide
  Sense strand starting at position 941 of SEQ ID NO: 472
gucuauauugguugggaac

SEQ ID NO: 39753 - RNA, 19 nt, Artificial Sequence
  Description of Artificial Sequence: Synthetic oligonucleotide
  Antisense strand to SEQ ID NO: 39752
guucccaaccaauauagac

SEQ ID NO: 39754 - RNA, 19 nt, Artificial Sequence
  Description of Artificial Sequence: Synthetic oligonucleotide
  Sense strand starting at position 940 of SEQ ID NO: 472
ugucuauauugguugggaa

SEQ ID NO: 39755 - RNA, 19 nt, Artificial Sequence
  Description of Artificial Sequence: Synthetic oligonucleotide
  Antisense strand to SEQ ID NO: 39754
uucccaaccaauauagaca

SEQ ID NO: 39756 - RNA, 19 nt, Artificial Sequence
  Description of Artificial Sequence: Synthetic oligonucleotide
  Sense strand starting at position 932 of SEQ ID NO: 472
ucagauacugucuauauug

SEQ ID NO: 39757 - RNA, 19 nt, Artificial Sequence
  Description of Artificial Sequence: Synthetic oligonucleotide
  Antisense strand to SEQ ID NO: 39756
caauauagacaguaucuga

SEQ ID NO: 39758 - RNA, 19 nt, Artificial Sequence
  Description of Artificial Sequence: Synthetic oligonucleotide
  Sense strand starting at position 931 of SEQ ID NO: 472
aucagauacugucuauauu

SEQ ID NO: 39759 - RNA, 19 nt, Artificial Sequence
  Description of Artificial Sequence: Synthetic oligonucleotide
  Antisense strand to SEQ ID NO: 39758
aauauagacaguaucugau

SEQ ID NO: 39760 - RNA, 19 nt, Artificial Sequence
  Description of Artificial Sequence: Synthetic oligonucleotide
  Sense strand starting at position 351 of SEQ ID NO: 472
gccuguauuuaagcaugua

SEQ ID NO: 39761 - RNA, 19 nt, Artificial Sequence
  Description of Artificial Sequence: Synthetic oligonucleotide
  Antisense strand to SEQ ID NO: 39760
uacaugcuuaaauacaggc

SEQ ID NO: 39762 - RNA, 19 nt, Artificial Sequence
  Description of Artificial Sequence: Synthetic oligonucleotide
  Sense strand starting at position 342 of SEQ ID NO: 472
gcacaauaagccuguauuu

SEQ ID NO: 39763 - RNA, 19 nt, Artificial Sequence
  Description of Artificial Sequence: Synthetic oligonucleotide
  Antisense strand to SEQ ID NO: 39762
aaauacaggcuuauugugc

SEQ ID NO: 39764 - RNA, 19 nt, Artificial Sequence
  Description of Artificial Sequence: Synthetic oligonucleotide
  Sense strand starting at position 276 of SEQ ID NO: 472
acaauaaagucagaaggaa

SEQ ID NO: 39765 - RNA, 19 nt, Artificial Sequence
  Description of Artificial Sequence: Synthetic oligonucleotide
  Antisense strand to SEQ ID NO: 39764
uuccuucugacuuuauugu

SEQ ID NO: 39766 - RNA, 19 nt, Artificial Sequence
  Description of Artificial Sequence: Synthetic oligonucleotide
  Sense strand starting at position 203 of SEQ ID NO: 472
gaagaaaugcaacguacaa

SEQ ID NO: 39767 - RNA, 19 nt, Artificial Sequence
  Description of Artificial Sequence: Synthetic oligonucleotide
  Antisense strand to SEQ ID NO: 39766
uuguacguugcauuucuuc

SEQ ID NO: 39768 - RNA, 19 nt, Artificial Sequence
  Description of Artificial Sequence: Synthetic oligonucleotide
  Sense strand starting at position 183 of SEQ ID NO: 472
uugaaugaauguuccuaag

SEQ ID NO: 39769 - RNA, 19 nt, Artificial Sequence
  Description of Artificial Sequence: Synthetic oligonucleotide
  Antisense strand to SEQ ID NO: 39768
cuuaggaacauucauucaa

SEQ ID NO: 39770 - RNA, 19 nt, Artificial Sequence
  Description of Artificial Sequence: Synthetic oligonucleotide
  Sense strand starting at position 122 of SEQ ID NO: 472
uaggaauugucuguuauua

SEQ ID NO: 39771 - RNA, 19 nt, Artificial Sequence
  Description of Artificial Sequence: Synthetic oligonucleotide
  Antisense strand to SEQ ID NO: 39770
uaauaacagacaauuccua

SEQ ID NO: 39772 - RNA, 19 nt, Artificial Sequence
  Description of Artificial Sequence: Synthetic oligonucleotide
  Sense strand starting at position 121 of SEQ ID NO: 472
auaggaauugucuguuauu

SEQ ID NO: 39773 - RNA, 19 nt, Artificial Sequence
  Description of Artificial Sequence: Synthetic oligonucleotide
  Antisense strand to SEQ ID NO: 39772
aauaacagacaauuccuau

SEQ ID NO: 39774 - RNA, 19 nt, Artificial Sequence
  Description of Artificial Sequence: Synthetic oligonucleotide
  Sense strand starting at position 34 of SEQ ID NO: 472
agcacuuaacaaugagcaa

SEQ ID NO: 39775 - RNA, 19 nt, Artificial Sequence
  Description of Artificial Sequence: Synthetic oligonucleotide
  Antisense strand to SEQ ID NO: 39774
uugcucauuguuaagugcu

SEQ ID NO: 39776 - RNA, 19 nt, Artificial Sequence
  Description of Artificial Sequence: Synthetic oligonucleotide
  Sense strand starting at position 3948 of SEQ ID NO: 473
uuuacucaaugggucauaa

SEQ ID NO: 39777 - RNA, 19 nt, Artificial Sequence
  Description of Artificial Sequence: Synthetic oligonucleotide
  Antisense strand to SEQ ID NO: 39776
uuaugacccauugaguaaa

SEQ ID NO: 39778 - RNA, 19 nt, Artificial Sequence
  Description of Artificial Sequence: Synthetic oligonucleotide
  Sense strand starting at position 3794 of SEQ ID NO: 473
cuaugaugguugucaaagg

SEQ ID NO: 39779 - RNA, 19 nt, Artificial Sequence
  Description of Artificial Sequence: Synthetic oligonucleotide
  Antisense strand to SEQ ID NO: 39778
ccuuugacaaccaucauag

SEQ ID NO: 39780 - RNA, 19 nt, Artificial Sequence
  Description of Artificial Sequence: Synthetic oligonucleotide
  Sense strand starting at position 3766 of SEQ ID NO: 473
ugaugauccuuucuugaau

SEQ ID NO: 39781 - RNA, 19 nt, Artificial Sequence
  Description of Artificial Sequence: Synthetic oligonucleotide
  Antisense strand to SEQ ID NO: 39780
auucaagaaaggaucauca

SEQ ID NO: 39782 - RNA, 19 nt, Artificial Sequence
  Description of Artificial Sequence: Synthetic oligonucleotide
  Sense strand starting at position 3575 of SEQ ID NO: 473
uugucuauuuguccuauua

SEQ ID NO: 39783 - RNA, 19 nt, Artificial Sequence
  Description of Artificial Sequence: Synthetic oligonucleotide
  Antisense strand to SEQ ID NO: 39782
uaauaggacaaauagacaa

SEQ ID NO: 39784 - RNA, 19 nt, Artificial Sequence
  Description of Artificial Sequence: Synthetic oligonucleotide
  Sense strand starting at position 3568 of SEQ ID NO: 473
gcauauguugucuauuugu

SEQ ID NO: 39785 - RNA, 19 nt, Artificial Sequence
  Description of Artificial Sequence: Synthetic oligonucleotide
  Antisense strand to SEQ ID NO: 39784
acaaauagacaacauaugc

SEQ ID NO: 39786 - RNA, 19 nt, Artificial Sequence
  Description of Artificial Sequence: Synthetic oligonucleotide
  Sense strand starting at position 3567 of SEQ ID NO: 473
ggcauauguugucuauuug

SEQ ID NO: 39787 - RNA, 19 nt, Artificial Sequence
  Description of Artificial Sequence: Synthetic oligonucleotide
  Antisense strand to SEQ ID NO: 39786
caaauagacaacauaugcc

SEQ ID NO: 39788 - RNA, 19 nt, Artificial Sequence
  Description of Artificial Sequence: Synthetic oligonucleotide
  Sense strand starting at position 3566 of SEQ ID NO: 473
aggcauauguugucuauuu

SEQ ID NO: 39789 - RNA, 19 nt, Artificial Sequence
  Description of Artificial Sequence: Synthetic oligonucleotide
  Antisense strand to SEQ ID NO: 39788
aaauagacaacauaugccu

SEQ ID NO: 39790 - RNA, 19 nt, Artificial Sequence
  Description of Artificial Sequence: Synthetic oligonucleotide
  Sense strand starting at position 3518 of SEQ ID NO: 473
cuaauuauuugacaggaau

SEQ ID NO: 39791 - RNA, 19 nt, Artificial Sequence
  Description of Artificial Sequence: Synthetic oligonucleotide
  Antisense strand to SEQ ID NO: 39790
auuccugucaaauaauuag

SEQ ID NO: 39792 - RNA, 19 nt, Artificial Sequence
  Description of Artificial Sequence: Synthetic oligonucleotide
  Sense strand starting at position 3516 of SEQ ID NO: 473
aucuaauuauuugacagga

SEQ ID NO: 39793 - RNA, 19 nt, Artificial Sequence
  Description of Artificial Sequence: Synthetic oligonucleotide
  Antisense strand to SEQ ID NO: 39792
uccugucaaauaauuagau

SEQ ID NO: 39794 - RNA, 19 nt, Artificial Sequence
  Description of Artificial Sequence: Synthetic oligonucleotide
  Sense strand starting at position 3474 of SEQ ID NO: 473
ggauuugucuaucauuucu

SEQ ID NO: 39795 - RNA, 19 nt, Artificial Sequence
  Description of Artificial Sequence: Synthetic oligonucleotide
  Antisense strand to SEQ ID NO: 39794
agaaaugauagacaaaucc

SEQ ID NO: 39796 - RNA, 19 nt, Artificial Sequence
  Description of Artificial Sequence: Synthetic oligonucleotide
  Sense strand starting at position 3340 of SEQ ID NO: 473
gugaccuguccucagaaau

SEQ ID NO: 39797 - RNA, 19 nt, Artificial Sequence
  Description of Artificial Sequence: Synthetic oligonucleotide
  Antisense strand to SEQ ID NO: 39796
auuucugaggacaggucac

SEQ ID NO: 39798 - RNA, 19 nt, Artificial Sequence
  Description of Artificial Sequence: Synthetic oligonucleotide
  Sense strand starting at position 3269 of SEQ ID NO: 473
guguugaguguccucguga

SEQ ID NO: 39799 - RNA, 19 nt, Artificial Sequence
  Description of Artificial Sequence: Synthetic oligonucleotide
  Antisense strand to SEQ ID NO: 39798
ucacgaggacacucaacac

SEQ ID NO: 39800 - RNA, 19 nt, Artificial Sequence
  Description of Artificial Sequence: Synthetic oligonucleotide
  Sense strand starting at position 3148 of SEQ ID NO: 473
cagucaucugaaggguuaa

SEQ ID NO: 39801 - RNA, 19 nt, Artificial Sequence
  Description of Artificial Sequence: Synthetic oligonucleotide
  Antisense strand to SEQ ID NO: 39800
uuaacccuucagaugacug

SEQ ID NO: 39802 - RNA, 19 nt, Artificial Sequence
  Description of Artificial Sequence: Synthetic oligonucleotide
  Sense strand starting at position 3035 of SEQ ID NO: 473
agugguguaaagcaagaau

SEQ ID NO: 39803 - RNA, 19 nt, Artificial Sequence
  Description of Artificial Sequence: Synthetic oligonucleotide
  Antisense strand to SEQ ID NO: 39802
auucuugcuuuacaccacu

SEQ ID NO: 39804 - RNA, 19 nt, Artificial Sequence
  Description of Artificial Sequence: Synthetic oligonucleotide
  Sense strand starting at position 2829 of SEQ ID NO: 473
uuuccugguccagaaucau

SEQ ID NO: 39805 - RNA, 19 nt, Artificial Sequence
  Description of Artificial Sequence: Synthetic oligonucleotide
  Antisense strand to SEQ ID NO: 39804
augauucuggaccaggaaa

SEQ ID NO: 39806 - RNA, 19 nt, Artificial Sequence
  Description of Artificial Sequence: Synthetic oligonucleotide
  Sense strand starting at position 2689 of SEQ ID NO: 473
acuagagugcaaugaucaa

SEQ ID NO: 39807 - RNA, 19 nt, Artificial Sequence
  Description of Artificial Sequence: Synthetic oligonucleotide
  Antisense strand to SEQ ID NO: 39806
uugaucauugcacucuagu

SEQ ID NO: 39808 - RNA, 19 nt, Artificial Sequence
  Description of Artificial Sequence: Synthetic oligonucleotide
  Sense strand starting at position 2671 of SEQ ID NO: 473
aggacuuucuguuccauaa

SEQ ID NO: 39809 - RNA, 19 nt, Artificial Sequence
  Description of Artificial Sequence: Synthetic oligonucleotide
  Antisense strand to SEQ ID NO: 39808
uuauggaacagaaaguccu

SEQ ID NO: 39810 - RNA, 19 nt, Artificial Sequence
  Description of Artificial Sequence: Synthetic oligonucleotide
  Sense strand starting at position 2498 of SEQ ID NO: 473
auauacuugucacccagau

SEQ ID NO: 39811 - RNA, 19 nt, Artificial Sequence
  Description of Artificial Sequence: Synthetic oligonucleotide
  Antisense strand to SEQ ID NO: 39810
aucugggugacaaguauau

SEQ ID NO: 39812 - RNA, 19 nt, Artificial Sequence
  Description of Artificial Sequence: Synthetic oligonucleotide
  Sense strand starting at position 2254 of SEQ ID NO: 473
cuuaguaaucuacaauguu

SEQ ID NO: 39813 - RNA, 19 nt, Artificial Sequence
  Description of Artificial Sequence: Synthetic oligonucleotide
  Antisense strand to SEQ ID NO: 39812
aacauuguagauuacuaag

SEQ ID NO: 39814 - RNA, 19 nt, Artificial Sequence
  Description of Artificial Sequence: Synthetic oligonucleotide
  Sense strand starting at position 2244 of SEQ ID NO: 473
aguacucacccuuaguaau

SEQ ID NO: 39815 - RNA, 19 nt, Artificial Sequence
  Description of Artificial Sequence: Synthetic oligonucleotide
  Antisense strand to SEQ ID NO: 39814
auuacuaagggugaguacu

SEQ ID NO: 39816 - RNA, 19 nt, Artificial Sequence
  Description of Artificial Sequence: Synthetic oligonucleotide
  Sense strand starting at position 1452 of SEQ ID NO: 473
gguagguuucccguggcga

SEQ ID NO: 39817 - RNA, 19 nt, Artificial Sequence
  Description of Artificial Sequence: Synthetic oligonucleotide
  Antisense strand to SEQ ID NO: 39816
ucgccacgggaaaccuacc

SEQ ID NO: 39818 - RNA, 19 nt, Artificial Sequence
  Description of Artificial Sequence: Synthetic oligonucleotide
  Sense strand starting at position 1273 of SEQ ID NO: 473
uguuuaggaucucuaccaa

SEQ ID NO: 39819 - RNA, 19 nt, Artificial Sequence
  Description of Artificial Sequence: Synthetic oligonucleotide
  Antisense strand to SEQ ID NO: 39818
uugguagagauccuaaaca

SEQ ID NO: 39820 - RNA, 19 nt, Artificial Sequence
  Description of Artificial Sequence: Synthetic oligonucleotide
  Sense strand starting at position 1264 of SEQ ID NO: 473
gaugguuaauguuuaggau

SEQ ID NO: 39821 - RNA, 19 nt, Artificial Sequence
  Description of Artificial Sequence: Synthetic oligonucleotide
  Antisense strand to SEQ ID NO: 39820
auccuaaacauuaaccauc

SEQ ID NO: 39822 - RNA, 19 nt, Artificial Sequence
  Description of Artificial Sequence: Synthetic oligonucleotide
  Sense strand starting at position 1255 of SEQ ID NO: 473
auaacuacggaugguuaau

SEQ ID NO: 39823 - RNA, 19 nt, Artificial Sequence
  Description of Artificial Sequence: Synthetic oligonucleotide
  Antisense strand to SEQ ID NO: 39822
auuaaccauccguaguuau

SEQ ID NO: 39824 - RNA, 19 nt, Artificial Sequence
  Description of Artificial Sequence: Synthetic oligonucleotide
  Sense strand starting at position 1254 of SEQ ID NO: 473
aauaacuacggaugguuaa

SEQ ID NO: 39825 - RNA, 19 nt, Artificial Sequence
  Description of Artificial Sequence: Synthetic oligonucleotide
  Antisense strand to SEQ ID NO: 39824
uuaaccauccguaguuauu

SEQ ID NO: 39826 - RNA, 19 nt, Artificial Sequence
  Description of Artificial Sequence: Synthetic oligonucleotide
  Sense strand starting at position 1198 of SEQ ID NO: 473
ccauuacaguagguuaaua

SEQ ID NO: 39827 - RNA, 19 nt, Artificial Sequence
  Description of Artificial Sequence: Synthetic oligonucleotide
  Antisense strand to SEQ ID NO: 39826
uauuaaccuacuguaaugg

SEQ ID NO: 39828 - RNA, 19 nt, Artificial Sequence
  Description of Artificial Sequence: Synthetic oligonucleotide
  Sense strand starting at position 1197 of SEQ ID NO: 473
accauuacaguagguuaau

SEQ ID NO: 39829 - RNA, 19 nt, Artificial Sequence
  Description of Artificial Sequence: Synthetic oligonucleotide
  Antisense strand to SEQ ID NO: 39828
auuaaccuacuguaauggu

SEQ ID NO: 39830 - RNA, 19 nt, Artificial Sequence
  Description of Artificial Sequence: Synthetic oligonucleotide
  Sense strand starting at position 1195 of SEQ ID NO: 473
acaccauuacaguagguua

SEQ ID NO: 39831 - RNA, 19 nt, Artificial Sequence
  Description of Artificial Sequence: Synthetic oligonucleotide
  Antisense strand to SEQ ID NO: 39830
uaaccuacuguaauggugu

SEQ ID NO: 39832 - RNA, 19 nt, Artificial Sequence
  Description of Artificial Sequence: Synthetic oligonucleotide
  Sense strand starting at position 1159 of SEQ ID NO: 473
uauaauaaacggugaauga

SEQ ID NO: 39833 - RNA, 19 nt, Artificial Sequence
  Description of Artificial Sequence: Synthetic oligonucleotide
  Antisense strand to SEQ ID NO: 39832
ucauucaccguuuauuaua

SEQ ID NO: 39834 - RNA, 19 nt, Artificial Sequence
  Description of Artificial Sequence: Synthetic oligonucleotide
  Sense strand starting at position 1050 of SEQ ID NO: 473
cacgguaccguggagauaa

SEQ ID NO: 39835 - RNA, 19 nt, Artificial Sequence
  Description of Artificial Sequence: Synthetic oligonucleotide
  Antisense strand to SEQ ID NO: 39834
uuaucuccacgguaccgug

SEQ ID NO: 39836 - RNA, 19 nt, Artificial Sequence
  Description of Artificial Sequence: Synthetic oligonucleotide
  Sense strand starting at position 927 of SEQ ID NO: 473
ccaguuaaucacuaguuuc

SEQ ID NO: 39837 - RNA, 19 nt, Artificial Sequence
  Description of Artificial Sequence: Synthetic oligonucleotide
  Antisense strand to SEQ ID NO: 39836
gaaacuagugauuaacugg

SEQ ID NO: 39838 - RNA, 19 nt, Artificial Sequence
  Description of Artificial Sequence: Synthetic oligonucleotide
  Sense strand starting at position 853 of SEQ ID NO: 473
aguaguaacgacuaacauc

SEQ ID NO: 39839 - RNA, 19 nt, Artificial Sequence
  Description of Artificial Sequence: Synthetic oligonucleotide
  Antisense strand to SEQ ID NO: 39838
gauguuagucguuacuacu

SEQ ID NO: 39840 - RNA, 19 nt, Artificial Sequence
  Description of Artificial Sequence: Synthetic oligonucleotide
  Sense strand starting at position 832 of SEQ ID NO: 473
ggaggcuuauuacugauau

SEQ ID NO: 39841 - RNA, 19 nt, Artificial Sequence
  Description of Artificial Sequence: Synthetic oligonucleotide
  Antisense strand to SEQ ID NO: 39840
auaucaguaauaagccucc

SEQ ID NO: 39842 - RNA, 19 nt, Artificial Sequence
  Description of Artificial Sequence: Synthetic oligonucleotide
  Sense strand starting at position 829 of SEQ ID NO: 473
acaggaggcuuauuacuga

SEQ ID NO: 39843 - RNA, 19 nt, Artificial Sequence
  Description of Artificial Sequence: Synthetic oligonucleotide
  Antisense strand to SEQ ID NO: 39842
ucaguaauaagccuccugu

SEQ ID NO: 39844 - RNA, 19 nt, Artificial Sequence
  Description of Artificial Sequence: Synthetic oligonucleotide
  Sense strand starting at position 756 of SEQ ID NO: 473
gcuggauguccauagaaac

SEQ ID NO: 39845 - RNA, 19 nt, Artificial Sequence
  Description of Artificial Sequence: Synthetic oligonucleotide
  Antisense strand to SEQ ID NO: 39844
guuucuauggacauccagc

SEQ ID NO: 39846 - RNA, 19 nt, Artificial Sequence
  Description of Artificial Sequence: Synthetic oligonucleotide
  Sense strand starting at position 617 of SEQ ID NO: 473
gggaguuaauaugcagaaa

SEQ ID NO: 39847 - RNA, 19 nt, Artificial Sequence
  Description of Artificial Sequence: Synthetic oligonucleotide
  Antisense strand to SEQ ID NO: 39846
uuucugcauauuaacuccc

SEQ ID NO: 39848 - RNA, 19 nt, Artificial Sequence
  Description of Artificial Sequence: Synthetic oligonucleotide
  Sense strand starting at position 477 of SEQ ID NO: 473
gcugcuguggcccugaauu

SEQ ID NO: 39849 - RNA, 19 nt, Artificial Sequence
  Description of Artificial Sequence: Synthetic oligonucleotide
  Antisense strand to SEQ ID NO: 39848
aauucagggccacagcagc

SEQ ID NO: 39850 - RNA, 19 nt, Artificial Sequence
  Description of Artificial Sequence: Synthetic oligonucleotide
  Sense strand starting at position 326 of SEQ ID NO: 473
gagguuguuacacagguaa

SEQ ID NO: 39851 - RNA, 19 nt, Artificial Sequence
  Description of Artificial Sequence: Synthetic oligonucleotide
  Antisense strand to SEQ ID NO: 39850
uuaccuguguaacaaccuc

SEQ ID NO: 39852 - RNA, 19 nt, Artificial Sequence
  Description of Artificial Sequence: Synthetic oligonucleotide
  Sense strand starting at position 319 of SEQ ID NO: 473
aagagaugagguuguuaca

SEQ ID NO: 39853 - RNA, 19 nt, Artificial Sequence
  Description of Artificial Sequence: Synthetic oligonucleotide
  Antisense strand to SEQ ID NO: 39852
uguaacaaccucaucucuu

SEQ ID NO: 39854 - RNA, 19 nt, Artificial Sequence
  Description of Artificial Sequence: Synthetic oligonucleotide
  Sense strand starting at position 37 of SEQ ID NO: 473
aagcaugagccaugggaga

SEQ ID NO: 39855 - RNA, 19 nt, Artificial Sequence
  Description of Artificial Sequence: Synthetic oligonucleotide
  Antisense strand to SEQ ID NO: 39854
ucucccauggcucaugcuu

SEQ ID NO: 39856 - RNA, 19 nt, Artificial Sequence
  Description of Artificial Sequence: Synthetic oligonucleotide
  Sense strand starting at position 86 of SEQ ID NO: 475
ucaggacuguguuugucua

SEQ ID NO: 39857 - RNA, 19 nt, Artificial Sequence
  Description of Artificial Sequence: Synthetic oligonucleotide
  Antisense strand to SEQ ID NO: 39856
uagacaaacacaguccuga

SEQ ID NO: 39858 - RNA, 19 nt, Artificial Sequence
  Description of Artificial Sequence: Synthetic oligonucleotide
  Sense strand starting at position 87 of SEQ ID NO: 475
caggacuguguuugucuaa

SEQ ID NO: 39859 - RNA, 19 nt, Artificial Sequence
  Description of Artificial Sequence: Synthetic oligonucleotide
  Antisense strand to SEQ ID NO: 39858
uuagacaaacacaguccug

SEQ ID NO: 39860 - RNA, 19 nt, Artificial Sequence
  Description of Artificial Sequence: Synthetic oligonucleotide
  Sense strand starting at position 88 of SEQ ID NO: 475
aggacuguguuugucuaau

SEQ ID NO: 39861 - RNA, 19 nt, Artificial Sequence
  Description of Artificial Sequence: Synthetic oligonucleotide
  Antisense strand to SEQ ID NO: 39860
auuagacaaacacaguccu

SEQ ID NO: 39862 - RNA, 19 nt, Artificial Sequence
  Description of Artificial Sequence: Synthetic oligonucleotide
  Sense strand starting at position 210 of SEQ ID NO: 475
ggccuugaaucuuacucuu

SEQ ID NO: 39863 - RNA, 19 nt, Artificial Sequence
  Description of Artificial Sequence: Synthetic oligonucleotide
  Antisense strand to SEQ ID NO: 39862
aagaguaagauucaaggcc

SEQ ID NO: 39864 - RNA, 19 nt, Artificial Sequence
  Description of Artificial Sequence: Synthetic oligonucleotide
  Sense strand starting at position 348 of SEQ ID NO: 475
ucuuuaaguuuagcaagga

SEQ ID NO: 39865 - RNA, 19 nt, Artificial Sequence
  Description of Artificial Sequence: Synthetic oligonucleotide
  Antisense strand to SEQ ID NO: 39864
uccuugcuaaacuuaaaga

SEQ ID NO: 39866 - RNA, 19 nt, Artificial Sequence
  Description of Artificial Sequence: Synthetic oligonucleotide
  Sense strand starting at position 352 of SEQ ID NO: 475
uaaguuuagcaaggacaga

SEQ ID NO: 39867 - RNA, 19 nt, Artificial Sequence
  Description of Artificial Sequence: Synthetic oligonucleotide
  Antisense strand to SEQ ID NO: 39866
ucuguccuugcuaaacuua

SEQ ID NO: 39868 - RNA, 19 nt, Artificial Sequence
  Description of Artificial Sequence: Synthetic oligonucleotide
  Sense strand starting at position 396 of SEQ ID NO: 475
gaaguauugugguuagauc

SEQ ID NO: 39869 - RNA, 19 nt, Artificial Sequence
  Description of Artificial Sequence: Synthetic oligonucleotide
  Antisense strand to SEQ ID NO: 39868
gaucuaaccacaauacuuc

SEQ ID NO: 39870 - RNA, 19 nt, Artificial Sequence
  Description of Artificial Sequence: Synthetic oligonucleotide
  Sense strand starting at position 407 of SEQ ID NO: 475
guuagaucgcaggaagaac

SEQ ID NO: 39871 - RNA, 19 nt, Artificial Sequence
  Description of Artificial Sequence: Synthetic oligonucleotide
  Antisense strand to SEQ ID NO: 39870
guucuuccugcgaucuaac

SEQ ID NO: 39872 - RNA, 19 nt, Artificial Sequence
  Description of Artificial Sequence: Synthetic oligonucleotide
  Sense strand starting at position 566 of SEQ ID NO: 475
cucuguugagugcaggaau

SEQ ID NO: 39873 - RNA, 19 nt, Artificial Sequence
  Description of Artificial Sequence: Synthetic oligonucleotide
  Antisense strand to SEQ ID NO: 39872
auuccugcacucaacagag

SEQ ID NO: 39874 - RNA, 19 nt, Artificial Sequence
  Description of Artificial Sequence: Synthetic oligonucleotide
  Sense strand starting at position 569 of SEQ ID NO: 475
uguugagugcaggaauuga

SEQ ID NO: 39875 - RNA, 19 nt, Artificial Sequence
  Description of Artificial Sequence: Synthetic oligonucleotide
  Antisense strand to SEQ ID NO: 39874
ucaauuccugcacucaaca

SEQ ID NO: 39876 - RNA, 19 nt, Artificial Sequence
  Description of Artificial Sequence: Synthetic oligonucleotide
  Sense strand starting at position 696 of SEQ ID NO: 475
ccagaugucuagcccaguu

SEQ ID NO: 39877 - RNA, 19 nt, Artificial Sequence
  Description of Artificial Sequence: Synthetic oligonucleotide
  Antisense strand to SEQ ID NO: 39876
aacugggcuagacaucugg

SEQ ID NO: 39878 - RNA, 19 nt, Artificial Sequence
  Description of Artificial Sequence: Synthetic oligonucleotide
  Sense strand starting at position 757 of SEQ ID NO: 475
ggcagucuggauugacuua

SEQ ID NO: 39879 - RNA, 19 nt, Artificial Sequence
  Description of Artificial Sequence: Synthetic oligonucleotide
  Antisense strand to SEQ ID NO: 39878
uaagucaauccagacugcc

SEQ ID NO: 39880 - RNA, 19 nt, Artificial Sequence
  Description of Artificial Sequence: Synthetic oligonucleotide
  Sense strand starting at position 903 of SEQ ID NO: 475
ccaagaaagugauaauuau

SEQ ID NO: 39881 - RNA, 19 nt, Artificial Sequence
  Description of Artificial Sequence: Synthetic oligonucleotide
  Antisense strand to SEQ ID NO: 39880
auaauuaucacuuucuugg

SEQ ID NO: 39882 - RNA, 19 nt, Artificial Sequence
  Description of Artificial Sequence: Synthetic oligonucleotide
  Sense strand starting at position 912 of SEQ ID NO: 475
ugauaauuaucccuagcga

SEQ ID NO: 39883 - RNA, 19 nt, Artificial Sequence
  Description of Artificial Sequence: Synthetic oligonucleotide
  Antisense strand to SEQ ID NO: 39882
ucgcuagggauaauuauca

SEQ ID NO: 39884 - RNA, 19 nt, Artificial Sequence
  Description of Artificial Sequence: Synthetic oligonucleotide
  Sense strand starting at position 943 of SEQ ID NO: 475
ggagcugcucgcuguauga

SEQ ID NO: 39885 - RNA, 19 nt, Artificial Sequence
  Description of Artificial Sequence: Synthetic oligonucleotide
  Antisense strand to SEQ ID NO: 39884
ucauacagcgagcagcucc

SEQ ID NO: 39886 - RNA, 19 nt, Artificial Sequence
  Description of Artificial Sequence: Synthetic oligonucleotide
  Sense strand starting at position 945 of SEQ ID NO: 475
agcugcucgcuguaugaaa

SEQ ID NO: 39887 - RNA, 19 nt, Artificial Sequence
  Description of Artificial Sequence: Synthetic oligonucleotide
  Antisense strand to SEQ ID NO: 39886
uuucauacagcgagcagcu

SEQ ID NO: 39888 - RNA, 19 nt, Artificial Sequence
  Description of Artificial Sequence: Synthetic oligonucleotide
  Sense strand starting at position 1313 of SEQ ID NO: 475
ucugguuucuacgugauuc

SEQ ID NO: 39889 - RNA, 19 nt, Artificial Sequence
  Description of Artificial Sequence: Synthetic oligonucleotide
  Antisense strand to SEQ ID NO: 39888
gaaucacguagaaaccaga

SEQ ID NO: 39890 - RNA, 19 nt, Artificial Sequence
  Description of Artificial Sequence: Synthetic oligonucleotide
  Sense strand starting at position 1338 of SEQ ID NO: 475
cgugagucaccgcaguguu

SEQ ID NO: 39891 - RNA, 19 nt, Artificial Sequence
  Description of Artificial Sequence: Synthetic oligonucleotide
  Antisense strand to SEQ ID NO: 39890
aacacugcggugacucacg

SEQ ID NO: 39892 - RNA, 19 nt, Artificial Sequence
  Description of Artificial Sequence: Synthetic oligonucleotide
  Sense strand starting at position 1569 of SEQ ID NO: 475
uugagcaauuccucgaagu

SEQ ID NO: 39893 - RNA, 19 nt, Artificial Sequence
  Description of Artificial Sequence: Synthetic oligonucleotide
  Antisense strand to SEQ ID NO: 39892
acuucgaggaauugcucaa

SEQ ID NO: 39894 - RNA, 19 nt, Artificial Sequence
  Description of Artificial Sequence: Synthetic oligonucleotide
  Sense strand starting at position 1570 of SEQ ID NO: 475
ugagcaauuccucgaaguu

SEQ ID NO: 39895 - RNA, 19 nt, Artificial Sequence
  Description of Artificial Sequence: Synthetic oligonucleotide
  Antisense strand to SEQ ID NO: 39894
aacuucgaggaauugcuca

SEQ ID NO: 39896 - RNA, 19 nt, Artificial Sequence
  Description of Artificial Sequence: Synthetic oligonucleotide
  Sense strand starting at position 1571 of SEQ ID NO: 475
gagcaauuccucgaaguuu

SEQ ID NO: 39897 - RNA, 19 nt, Artificial Sequence
  Description of Artificial Sequence: Synthetic oligonucleotide
  Antisense strand to SEQ ID NO: 39896
aaacuucgaggaauugcuc

SEQ ID NO: 39898 - RNA, 19 nt, Artificial Sequence
  Description of Artificial Sequence: Synthetic oligonucleotide
  Sense strand starting at position 1944 of SEQ ID NO: 475
ccuucuccugcgcuaguaa

SEQ ID NO: 39899 - RNA, 19 nt, Artificial Sequence
  Description of Artificial Sequence: Synthetic oligonucleotide
  Antisense strand to SEQ ID NO: 39898
uuacuagcgcaggagaagg

SEQ ID NO: 39900 - RNA, 19 nt, Artificial Sequence
  Description of Artificial Sequence: Synthetic oligonucleotide
  Sense strand starting at position 2286 of SEQ ID NO: 475
uagggaucuaagugaggca

SEQ ID NO: 39901 - RNA, 19 nt, Artificial Sequence
  Description of Artificial Sequence: Synthetic oligonucleotide
  Antisense strand to SEQ ID NO: 39900
ugccucacuuagaucccua

SEQ ID NO: 39902 - RNA, 19 nt, Artificial Sequence
  Description of Artificial Sequence: Synthetic oligonucleotide
  Sense strand starting at position 2407 of SEQ ID NO: 475
ggaaguagucgccaggcga

SEQ ID NO: 39903 - RNA, 19 nt, Artificial Sequence
  Description of Artificial Sequence: Synthetic oligonucleotide
  Antisense strand to SEQ ID NO: 39902
ucgccuggcgacuacuucc

SEQ ID NO: 39904 - RNA, 19 nt, Artificial Sequence
  Description of Artificial Sequence: Synthetic oligonucleotide
  Sense strand starting at position 2519 of SEQ ID NO: 475
gacgcaaggucuuuauuaa

SEQ ID NO: 39905 - RNA, 19 nt, Artificial Sequence
  Description of Artificial Sequence: Synthetic oligonucleotide
  Antisense strand to SEQ ID NO: 39904
uuaauaaagaccuugcguc

SEQ ID NO: 39906 - RNA, 19 nt, Artificial Sequence
  Description of Artificial Sequence: Synthetic oligonucleotide
  Sense strand starting at position 2520 of SEQ ID NO: 475
acgcaaggucuuuauuaaa

SEQ ID NO: 39907 - RNA, 19 nt, Artificial Sequence
  Description of Artificial Sequence: Synthetic oligonucleotide
  Antisense strand to SEQ ID NO: 39906
uuuaauaaagaccuugcgu

SEQ ID NO: 39908 - RNA, 19 nt, Artificial Sequence
  Description of Artificial Sequence: Synthetic oligonucleotide
  Sense strand starting at position 2700 of SEQ ID NO: 475
ucaccauccugagcuguaa

SEQ ID NO: 39909 - RNA, 19 nt, Artificial Sequence
  Description of Artificial Sequence: Synthetic oligonucleotide
  Antisense strand to SEQ ID NO: 39908
uuacagcucaggaugguga

SEQ ID NO: 39910 - RNA, 19 nt, Artificial Sequence
  Description of Artificial Sequence: Synthetic oligonucleotide
  Sense strand starting at position 2943 of SEQ ID NO: 475
gcgggaugcagugauugga

SEQ ID NO: 39911 - RNA, 19 nt, Artificial Sequence
  Description of Artificial Sequence: Synthetic oligonucleotide
  Antisense strand to SEQ ID NO: 39910
uccaaucacugcaucccgc

SEQ ID NO: 39912 - RNA, 19 nt, Artificial Sequence
  Description of Artificial Sequence: Synthetic oligonucleotide
  Sense strand starting at position 3190 of SEQ ID NO: 475
ucagaucucugagcccuua

SEQ ID NO: 39913 - RNA, 19 nt, Artificial Sequence
  Description of Artificial Sequence: Synthetic oligonucleotide
  Antisense strand to SEQ ID NO: 39912
uaagggcucagagaucuga

SEQ ID NO: 39914 - RNA, 19 nt, Artificial Sequence
  Description of Artificial Sequence: Synthetic oligonucleotide
  Sense strand starting at position 3200 of SEQ ID NO: 475
gagcccuuauguuuagaac

SEQ ID NO: 39915 - RNA, 19 nt, Artificial Sequence
  Description of Artificial Sequence: Synthetic oligonucleotide
  Antisense strand to SEQ ID NO: 39914
guucuaaacauaagggcuc

SEQ ID NO: 39916 - RNA, 19 nt, Artificial Sequence
  Description of Artificial Sequence: Synthetic oligonucleotide
  Sense strand starting at position 3261 of SEQ ID NO: 475
ggaagagucuggaggaaga

SEQ ID NO: 39917 - RNA, 19 nt, Artificial Sequence
  Description of Artificial Sequence: Synthetic oligonucleotide
  Antisense strand to SEQ ID NO: 39916
ucuuccuccagacucuucc

SEQ ID NO: 39918 - RNA, 19 nt, Artificial Sequence
  Description of Artificial Sequence: Synthetic oligonucleotide
  Sense strand starting at position 3300 of SEQ ID NO: 475
gagugaccucagcauuaag

SEQ ID NO: 39919 - RNA, 19 nt, Artificial Sequence
  Description of Artificial Sequence: Synthetic oligonucleotide
  Antisense strand to SEQ ID NO: 39918
cuuaaugcugaggucacuc

SEQ ID NO: 39920 - RNA, 19 nt, Artificial Sequence
  Description of Artificial Sequence: Synthetic oligonucleotide
  Sense strand starting at position 3436 of SEQ ID NO: 475
uggagauuccacugcauag

SEQ ID NO: 39921 - RNA, 19 nt, Artificial Sequence
  Description of Artificial Sequence: Synthetic oligonucleotide
  Antisense strand to SEQ ID NO: 39920
cuaugcaguggaaucucca

SEQ ID NO: 39922 - RNA, 19 nt, Artificial Sequence
  Description of Artificial Sequence: Synthetic oligonucleotide
  Sense strand starting at position 3485 of SEQ ID NO: 475
ccaacaaacugagauuuga

SEQ ID NO: 39923 - RNA, 19 nt, Artificial Sequence
  Description of Artificial Sequence: Synthetic oligonucleotide
  Antisense strand to SEQ ID NO: 39922
ucaaaucucaguuuguugg

SEQ ID NO: 39924 - RNA, 19 nt, Artificial Sequence
  Description of Artificial Sequence: Synthetic oligonucleotide
  Sense strand starting at position 3603 of SEQ ID NO: 475
caaggagcucucugaggaa

SEQ ID NO: 39925 - RNA, 19 nt, Artificial Sequence
  Description of Artificial Sequence: Synthetic oligonucleotide
  Antisense strand to SEQ ID NO: 39924
uuccucagagagcuccuug

SEQ ID NO: 39926 - RNA, 19 nt, Artificial Sequence
  Description of Artificial Sequence: Synthetic oligonucleotide
  Sense strand starting at position 3606 of SEQ ID NO: 475
ggagcucucugaggaagga

SEQ ID NO: 39927 - RNA, 19 nt, Artificial Sequence
  Description of Artificial Sequence: Synthetic oligonucleotide
  Antisense strand to SEQ ID NO: 39926
uccuuccucagagagcucc

SEQ ID NO: 39928 - RNA, 19 nt, Artificial Sequence
  Description of Artificial Sequence: Synthetic oligonucleotide
  Sense strand starting at position 3743 of SEQ ID NO: 475
ucagcaaugcuguagguaa

SEQ ID NO: 39929 - RNA, 19 nt, Artificial Sequence
  Description of Artificial Sequence: Synthetic oligonucleotide
  Antisense strand to SEQ ID NO: 39928
uuaccuacagcauugcuga

SEQ ID NO: 39930 - RNA, 19 nt, Artificial Sequence
  Description of Artificial Sequence: Synthetic oligonucleotide
  Sense strand starting at position 3768 of SEQ ID NO: 475
gggauuaggcucugacagu

SEQ ID NO: 39931 - RNA, 19 nt, Artificial Sequence
  Description of Artificial Sequence: Synthetic oligonucleotide
  Antisense strand to SEQ ID NO: 39930
acugucagagccuaauccc

SEQ ID NO: 39932 - RNA, 19 nt, Artificial Sequence
  Description of Artificial Sequence: Synthetic oligonucleotide
  Sense strand starting at position 3769 of SEQ ID NO: 475
ggauuaggcucugacagug

SEQ ID NO: 39933 - RNA, 19 nt, Artificial Sequence
  Description of Artificial Sequence: Synthetic oligonucleotide
  Antisense strand to SEQ ID NO: 39932
cacugucagagccuaaucc

SEQ ID NO: 39934 - RNA, 19 nt, Artificial Sequence
  Description of Artificial Sequence: Synthetic oligonucleotide
  Sense strand starting at position 3774 of SEQ ID NO: 475
aggcucugacagugaaauc

SEQ ID NO: 39935 - RNA, 19 nt, Artificial Sequence
  Description of Artificial Sequence: Synthetic oligonucleotide
  Antisense strand to SEQ ID NO: 39934
gauuucacugucagagccu

SEQ ID NO: 39936 - RNA, 19 nt, Artificial Sequence
  Description of Artificial Sequence: Synthetic oligonucleotide
  Sense strand starting at position 29 of SEQ ID NO: 474
cccauuguuggcugcugaa

SEQ ID NO: 39937 - RNA, 19 nt, Artificial Sequence
  Description of Artificial Sequence: Synthetic oligonucleotide
  Antisense strand to SEQ ID NO: 39936
uucagcagccaacaauggg

SEQ ID NO: 39938 - RNA, 19 nt, Artificial Sequence
  Description of Artificial Sequence: Synthetic oligonucleotide
  Sense strand starting at position 45 of SEQ ID NO: 474
gaacucuugugucuaggaa

SEQ ID NO: 39939 - RNA, 19 nt, Artificial Sequence
  Description of Artificial Sequence: Synthetic oligonucleotide
  Antisense strand to SEQ ID NO: 39938
uuccuagacacaagaguuc

SEQ ID NO: 39940 - RNA, 19 nt, Artificial Sequence
  Description of Artificial Sequence: Synthetic oligonucleotide
  Sense strand starting at position 46 of SEQ ID NO: 474
aacucuugugucuaggaag

SEQ ID NO: 39941 - RNA, 19 nt, Artificial Sequence
  Description of Artificial Sequence: Synthetic oligonucleotide
  Antisense strand to SEQ ID NO: 39940
cuuccuagacacaagaguu

SEQ ID NO: 39942 - RNA, 19 nt, Artificial Sequence
  Description of Artificial Sequence: Synthetic oligonucleotide
  Sense strand starting at position 49 of SEQ ID NO: 474
ucuugugucuaggaagaaa

SEQ ID NO: 39943 - RNA, 19 nt, Artificial Sequence
  Description of Artificial Sequence: Synthetic oligonucleotide
  Antisense strand to SEQ ID NO: 39942
uuucuuccuagacacaaga

SEQ ID NO: 39944 - RNA, 19 nt, Artificial Sequence
  Description of Artificial Sequence: Synthetic oligonucleotide
  Sense strand starting at position 80 of SEQ ID NO: 474
aagucuuauugagauggac

SEQ ID NO: 39945 - RNA, 19 nt, Artificial Sequence
  Description of Artificial Sequence: Synthetic oligonucleotide
  Antisense strand to SEQ ID NO: 39944
guccaucucaauaagacuu

SEQ ID NO: 39946 - RNA, 19 nt, Artificial Sequence
  Description of Artificial Sequence: Synthetic oligonucleotide
  Sense strand starting at position 235 of SEQ ID NO: 474
ucaggacuguguuugucua

SEQ ID NO: 39947 - RNA, 19 nt, Artificial Sequence
  Description of Artificial Sequence: Synthetic oligonucleotide
  Antisense strand to SEQ ID NO: 39946
uagacaaacacaguccuga

SEQ ID NO: 39948 - RNA, 19 nt, Artificial Sequence
  Description of Artificial Sequence: Synthetic oligonucleotide
  Sense strand starting at position 236 of SEQ ID NO: 474
caggacuguguuugucuaa

SEQ ID NO: 39949 - RNA, 19 nt, Artificial Sequence
  Description of Artificial Sequence: Synthetic oligonucleotide
  Antisense strand to SEQ ID NO: 39948
uuagacaaacacaguccug

SEQ ID NO: 39950 - RNA, 19 nt, Artificial Sequence
  Description of Artificial Sequence: Synthetic oligonucleotide
  Sense strand starting at position 237 of SEQ ID NO: 474
aggacuguguuugucuaau

SEQ ID NO: 39951 - RNA, 19 nt, Artificial Sequence
  Description of Artificial Sequence: Synthetic oligonucleotide
  Antisense strand to SEQ ID NO: 39950
auuagacaaacacaguccu

SEQ ID NO: 39952 - RNA, 19 nt, Artificial Sequence
  Description of Artificial Sequence: Synthetic oligonucleotide
  Sense strand starting at position 497 of SEQ ID NO: 474
ucuuuaaguuuagcaagga

SEQ ID NO: 39953 - RNA, 19 nt, Artificial Sequence
  Description of Artificial Sequence: Synthetic oligonucleotide
  Antisense strand to SEQ ID NO: 39952
uccuugcuaaacuuaaaga

SEQ ID NO: 39954 - RNA, 19 nt, Artificial Sequence
  Description of Artificial Sequence: Synthetic oligonucleotide
  Sense strand starting at position 501 of SEQ ID NO: 474
uaaguuuagcaaggacaga

SEQ ID NO: 39955 - RNA, 19 nt, Artificial Sequence
  Description of Artificial Sequence: Synthetic oligonucleotide
  Antisense strand to SEQ ID NO: 39954
ucuguccuugcuaaacuua

SEQ ID NO: 39956 - RNA, 19 nt, Artificial Sequence
  Description of Artificial Sequence: Synthetic oligonucleotide
  Sense strand starting at position 545 of SEQ ID NO: 474
gaaguauugugguuagauc

SEQ ID NO: 39957 - RNA, 19 nt, Artificial Sequence
  Description of Artificial Sequence: Synthetic oligonucleotide
  Antisense strand to SEQ ID NO: 39956
gaucuaaccacaauacuuc

SEQ ID NO: 39958 - RNA, 19 nt, Artificial Sequence
  Description of Artificial Sequence: Synthetic oligonucleotide
  Sense strand starting at position 556 of SEQ ID NO: 474
guuagaucgcaggaagaac

SEQ ID NO: 39959 - RNA, 19 nt, Artificial Sequence
  Description of Artificial Sequence: Synthetic oligonucleotide
  Antisense strand to SEQ ID NO: 39958
guucuuccugcgaucuaac

SEQ ID NO: 39960 - RNA, 19 nt, Artificial Sequence
  Description of Artificial Sequence: Synthetic oligonucleotide
  Sense strand starting at position 715 of SEQ ID NO: 474
cucuguugagugcaggaau

SEQ ID NO: 39961 - RNA, 19 nt, Artificial Sequence
  Description of Artificial Sequence: Synthetic oligonucleotide
  Antisense strand to SEQ ID NO: 39960
auuccugcacucaacagag

SEQ ID NO: 39962 - RNA, 19 nt, Artificial Sequence
  Description of Artificial Sequence: Synthetic oligonucleotide
  Sense strand starting at position 718 of SEQ ID NO: 474
uguugagugcaggaauuga

SEQ ID NO: 39963 - RNA, 19 nt, Artificial Sequence
  Description of Artificial Sequence: Synthetic oligonucleotide
  Antisense strand to SEQ ID NO: 39962
ucaauuccugcacucaaca

SEQ ID NO: 39964 - RNA, 19 nt, Artificial Sequence
  Description of Artificial Sequence: Synthetic oligonucleotide
  Sense strand starting at position 845 of SEQ ID NO: 474
ccagaugucuagcccaguu

SEQ ID NO: 39965 - RNA, 19 nt, Artificial Sequence
  Description of Artificial Sequence: Synthetic oligonucleotide
  Antisense strand to SEQ ID NO: 39964
aacugggcuagacaucugg

SEQ ID NO: 39966 - RNA, 19 nt, Artificial Sequence
  Description of Artificial Sequence: Synthetic oligonucleotide
  Sense strand starting at position 906 of SEQ ID NO: 474
ggcagucuggauugacuua

SEQ ID NO: 39967 - RNA, 19 nt, Artificial Sequence
  Description of Artificial Sequence: Synthetic oligonucleotide
  Antisense strand to SEQ ID NO: 39966
uaagucaauccagacugcc

SEQ ID NO: 39968 - RNA, 19 nt, Artificial Sequence
  Description of Artificial Sequence: Synthetic oligonucleotide
  Sense strand starting at position 1052 of SEQ ID NO: 474
ccaagaaagugauaauuau

SEQ ID NO: 39969 - RNA, 19 nt, Artificial Sequence
  Description of Artificial Sequence: Synthetic oligonucleotide
  Antisense strand to SEQ ID NO: 39968
auaauuaucacuuucuugg

SEQ ID NO: 39970 - RNA, 19 nt, Artificial Sequence
  Description of Artificial Sequence: Synthetic oligonucleotide
  Sense strand starting at position 1061 of SEQ ID NO: 474
ugauaauuaucccuagcga

SEQ ID NO: 39971 - RNA, 19 nt, Artificial Sequence
  Description of Artificial Sequence: Synthetic oligonucleotide
  Antisense strand to SEQ ID NO: 39970
ucgcuagggauaauuauca

SEQ ID NO: 39972 - RNA, 19 nt, Artificial Sequence
  Description of Artificial Sequence: Synthetic oligonucleotide
  Sense strand starting at position 1094 of SEQ ID NO: 474
agcugcucgcuguaugaaa

SEQ ID NO: 39973 - RNA, 19 nt, Artificial Sequence
  Description of Artificial Sequence: Synthetic oligonucleotide
  Antisense strand to SEQ ID NO: 39972
uuucauacagcgagcagcu

SEQ ID NO: 39974 - RNA, 19 nt, Artificial Sequence
  Description of Artificial Sequence: Synthetic oligonucleotide
  Sense strand starting at position 1462 of SEQ ID NO: 474
ucugguuucuacgugauuc

SEQ ID NO: 39975 - RNA, 19 nt, Artificial Sequence
  Description of Artificial Sequence: Synthetic oligonucleotide
  Antisense strand to SEQ ID NO: 39974
gaaucacguagaaaccaga

SEQ ID NO: 39976 - RNA, 19 nt, Artificial Sequence
  Description of Artificial Sequence: Synthetic oligonucleotide
  Sense strand starting at position 1718 of SEQ ID NO: 474
uugagcaauuccucgaagu

SEQ ID NO: 39977 - RNA, 19 nt, Artificial Sequence
  Description of Artificial Sequence: Synthetic oligonucleotide
  Antisense strand to SEQ ID NO: 39976
acuucgaggaauugcucaa

SEQ ID NO: 39978 - RNA, 19 nt, Artificial Sequence
  Description of Artificial Sequence: Synthetic oligonucleotide
  Sense strand starting at position 1719 of SEQ ID NO: 474
ugagcaauuccucgaaguu

SEQ ID NO: 39979 - RNA, 19 nt, Artificial Sequence
  Description of Artificial Sequence: Synthetic oligonucleotide
  Antisense strand to SEQ ID NO: 39978
aacuucgaggaauugcuca

SEQ ID NO: 39980 - RNA, 19 nt, Artificial Sequence
  Description of Artificial Sequence: Synthetic oligonucleotide
  Sense strand starting at position 1720 of SEQ ID NO: 474
gagcaauuccucgaaguuu

SEQ ID NO: 39981 - RNA, 19 nt, Artificial Sequence
  Description of Artificial Sequence: Synthetic oligonucleotide
  Antisense strand to SEQ ID NO: 39980
aaacuucgaggaauugcuc

SEQ ID NO: 39982 - RNA, 19 nt, Artificial Sequence
  Description of Artificial Sequence: Synthetic oligonucleotide
  Sense strand starting at position 2093 of SEQ ID NO: 474
ccuucuccugcgcuaguaa

SEQ ID NO: 39983 - RNA, 19 nt, Artificial Sequence
  Description of Artificial Sequence: Synthetic oligonucleotide
  Antisense strand to SEQ ID NO: 39982
uuacuagcgcaggagaagg

SEQ ID NO: 39984 - RNA, 19 nt, Artificial Sequence
  Description of Artificial Sequence: Synthetic oligonucleotide
  Sense strand starting at position 2435 of SEQ ID NO: 474
uagggaucuaagugaggca

SEQ ID NO: 39985 - RNA, 19 nt, Artificial Sequence
  Description of Artificial Sequence: Synthetic oligonucleotide
  Antisense strand to SEQ ID NO: 39984
ugccucacuuagaucccua

SEQ ID NO: 39986 - RNA, 19 nt, Artificial Sequence
  Description of Artificial Sequence: Synthetic oligonucleotide
  Sense strand starting at position 2556 of SEQ ID NO: 474
ggaaguagucgccaggcga

SEQ ID NO: 39987 - RNA, 19 nt, Artificial Sequence
  Description of Artificial Sequence: Synthetic oligonucleotide
  Antisense strand to SEQ ID NO: 39986
ucgccuggcgacuacuucc

SEQ ID NO: 39988 - RNA, 19 nt, Artificial Sequence
  Description of Artificial Sequence: Synthetic oligonucleotide
  Sense strand starting at position 2668 of SEQ ID NO: 474
gacgcaaggucuuuauuaa

SEQ ID NO: 39989 - RNA, 19 nt, Artificial Sequence
  Description of Artificial Sequence: Synthetic oligonucleotide
  Antisense strand to SEQ ID NO: 39988
uuaauaaagaccuugcguc

SEQ ID NO: 39990 - RNA, 19 nt, Artificial Sequence
  Description of Artificial Sequence: Synthetic oligonucleotide
  Sense strand starting at position 2669 of SEQ ID NO: 474
acgcaaggucuuuauuaaa

SEQ ID NO: 39991 - RNA, 19 nt, Artificial Sequence
  Description of Artificial Sequence: Synthetic oligonucleotide
  Antisense strand to SEQ ID NO: 39990
uuuaauaaagaccuugcgu

SEQ ID NO: 39992 - RNA, 19 nt, Artificial Sequence
  Description of Artificial Sequence: Synthetic oligonucleotide
  Sense strand starting at position 2849 of SEQ ID NO: 474
ucaccauccugagcuguaa

SEQ ID NO: 39993 - RNA, 19 nt, Artificial Sequence
  Description of Artificial Sequence: Synthetic oligonucleotide
  Antisense strand to SEQ ID NO: 39992
uuacagcucaggaugguga

SEQ ID NO: 39994 - RNA, 19 nt, Artificial Sequence
  Description of Artificial Sequence: Synthetic oligonucleotide
  Sense strand starting at position 3092 of SEQ ID NO: 474
gcgggaugcagugauugga

SEQ ID NO: 39995 - RNA, 19 nt, Artificial Sequence
  Description of Artificial Sequence: Synthetic oligonucleotide
  Antisense strand to SEQ ID NO: 39994
uccaaucacugcaucccgc

SEQ ID NO: 39996 - RNA, 19 nt, Artificial Sequence
  Description of Artificial Sequence: Synthetic oligonucleotide
  Sense strand starting at position 3339 of SEQ ID NO: 474
ucagaucucugagcccuua

SEQ ID NO: 39997 - RNA, 19 nt, Artificial Sequence
  Description of Artificial Sequence: Synthetic oligonucleotide
  Antisense strand to SEQ ID NO: 39996
uaagggcucagagaucuga

SEQ ID NO: 39998 - RNA, 19 nt, Artificial Sequence
  Description of Artificial Sequence: Synthetic oligonucleotide
  Sense strand starting at position 3349 of SEQ ID NO: 474
gagcccuuauguuuagaac

SEQ ID NO: 39999 - RNA, 19 nt, Artificial Sequence
  Description of Artificial Sequence: Synthetic oligonucleotide
  Antisense strand to SEQ ID NO: 39998
guucuaaacauaagggcuc

SEQ ID NO: 40000 - RNA, 19 nt, Artificial Sequence
  Description of Artificial Sequence: Synthetic oligonucleotide
  Sense strand starting at position 3410 of SEQ ID NO: 474
ggaagagucuggaggaaga

SEQ ID NO: 40001 - RNA, 19 nt, Artificial Sequence
  Description of Artificial Sequence: Synthetic oligonucleotide
  Antisense strand to SEQ ID NO: 40000
ucuuccuccagacucuucc

SEQ ID NO: 40002 - RNA, 19 nt, Artificial Sequence
  Description of Artificial Sequence: Synthetic oligonucleotide
  Sense strand starting at position 3449 of SEQ ID NO: 474
gagugaccucagcauuaag

SEQ ID NO: 40003 - RNA, 19 nt, Artificial Sequence
  Description of Artificial Sequence: Synthetic oligonucleotide
  Antisense strand to SEQ ID NO: 40002
cuuaaugcugaggucacuc

SEQ ID NO: 40004 - RNA, 19 nt, Artificial Sequence
  Description of Artificial Sequence: Synthetic oligonucleotide
  Sense strand starting at position 3585 of SEQ ID NO: 474
uggagauuccacugcauag

SEQ ID NO: 40005 - RNA, 19 nt, Artificial Sequence
  Description of Artificial Sequence: Synthetic oligonucleotide
  Antisense strand to SEQ ID NO: 40004
cuaugcaguggaaucucca

SEQ ID NO: 40006 - RNA, 19 nt, Artificial Sequence
  Description of Artificial Sequence: Synthetic oligonucleotide
  Sense strand starting at position 3634 of SEQ ID NO: 474
ccaacaaacugagauuuga

SEQ ID NO: 40007 - RNA, 19 nt, Artificial Sequence
  Description of Artificial Sequence: Synthetic oligonucleotide
  Antisense strand to SEQ ID NO: 40006
ucaaaucucaguuuguugg

SEQ ID NO: 40008 - RNA, 19 nt, Artificial Sequence
  Description of Artificial Sequence: Synthetic oligonucleotide
  Sense strand starting at position 3752 of SEQ ID NO: 474
caaggagcucucugaggaa

SEQ ID NO: 40009 - RNA, 19 nt, Artificial Sequence
  Description of Artificial Sequence: Synthetic oligonucleotide
  Antisense strand to SEQ ID NO: 40008
uuccucagagagcuccuug

SEQ ID NO: 40010 - RNA, 19 nt, Artificial Sequence
  Description of Artificial Sequence: Synthetic oligonucleotide
  Sense strand starting at position 3892 of SEQ ID NO: 474
ucagcaaugcuguagguaa

SEQ ID NO: 40011 - RNA, 19 nt, Artificial Sequence
  Description of Artificial Sequence: Synthetic oligonucleotide
  Antisense strand to SEQ ID NO: 40010
uuaccuacagcauugcuga

SEQ ID NO: 40012 - RNA, 19 nt, Artificial Sequence
  Description of Artificial Sequence: Synthetic oligonucleotide
  Sense strand starting at position 3917 of SEQ ID NO: 474
gggauuaggcucugacagu

SEQ ID NO: 40013 - RNA, 19 nt, Artificial Sequence
  Description of Artificial Sequence: Synthetic oligonucleotide
  Antisense strand to SEQ ID NO: 40012
acugucagagccuaauccc

SEQ ID NO: 40014 - RNA, 19 nt, Artificial Sequence
  Description of Artificial Sequence: Synthetic oligonucleotide
  Sense strand starting at position 3923 of SEQ ID NO: 474
aggcucugacagugaaauc

SEQ ID NO: 40015 - RNA, 19 nt, Artificial Sequence
  Description of Artificial Sequence: Synthetic oligonucleotide
  Antisense strand to SEQ ID NO: 40014
gauuucacugucagagccu

SEQ ID NO: 40016 - RNA, 19 nt, Artificial Sequence
  Description of Artificial Sequence: Synthetic oligonucleotide
  Sense strand starting at position 3783 of SEQ ID NO: 477
ggugguuagaccuaacccu

SEQ ID NO: 40017 - RNA, 19 nt, Artificial Sequence
  Description of Artificial Sequence: Synthetic oligonucleotide
  Antisense strand to SEQ ID NO: 40016
aggguuaggucuaaccacc

SEQ ID NO: 40018 - RNA, 19 nt, Artificial Sequence
  Description of Artificial Sequence: Synthetic oligonucleotide
  Sense strand starting at position 3607 of SEQ ID NO: 477
augugucagauuugggcua

SEQ ID NO: 40019 - RNA, 19 nt, Artificial Sequence
  Description of Artificial Sequence: Synthetic oligonucleotide
  Antisense strand to SEQ ID NO: 40018
uagcccaaaucugacacau

SEQ ID NO: 40020 - RNA, 19 nt, Artificial Sequence
  Description of Artificial Sequence: Synthetic oligonucleotide
  Sense strand starting at position 3518 of SEQ ID NO: 477
aaaggaugguuauaggaau

SEQ ID NO: 40021 - RNA, 19 nt, Artificial Sequence
  Description of Artificial Sequence: Synthetic oligonucleotide
  Antisense strand to SEQ ID NO: 40020
auuccuauaaccauccuuu

SEQ ID NO: 40022 - RNA, 19 nt, Artificial Sequence
  Description of Artificial Sequence: Synthetic oligonucleotide
  Sense strand starting at position 3503 of SEQ ID NO: 477
gagaacauguuauacaaag

SEQ ID NO: 40023 - RNA, 19 nt, Artificial Sequence
  Description of Artificial Sequence: Synthetic oligonucleotide
  Antisense strand to SEQ ID NO: 40022
cuuuguauaacauguucuc

SEQ ID NO: 40024 - RNA, 19 nt, Artificial Sequence
  Description of Artificial Sequence: Synthetic oligonucleotide
  Sense strand starting at position 3501 of SEQ ID NO: 477
gagagaacauguuauacaa

SEQ ID NO: 40025 - RNA, 19 nt, Artificial Sequence
  Description of Artificial Sequence: Synthetic oligonucleotide
  Antisense strand to SEQ ID NO: 40024
uuguauaacauguucucuc

SEQ ID NO: 40026 - RNA, 19 nt, Artificial Sequence
  Description of Artificial Sequence: Synthetic oligonucleotide
  Sense strand starting at position 3420 of SEQ ID NO: 477
uuuaauuaugagugucaca

SEQ ID NO: 40027 - RNA, 19 nt, Artificial Sequence
  Description of Artificial Sequence: Synthetic oligonucleotide
  Antisense strand to SEQ ID NO: 40026
ugugacacucauaauuaaa

SEQ ID NO: 40028 - RNA, 19 nt, Artificial Sequence
  Description of Artificial Sequence: Synthetic oligonucleotide
  Sense strand starting at position 3414 of SEQ ID NO: 477
ggugucuuuaauuaugagu

SEQ ID NO: 40029 - RNA, 19 nt, Artificial Sequence
  Description of Artificial Sequence: Synthetic oligonucleotide
  Antisense strand to SEQ ID NO: 40028
acucauaauuaaagacacc

SEQ ID NO: 40030 - RNA, 19 nt, Artificial Sequence
  Description of Artificial Sequence: Synthetic oligonucleotide
  Sense strand starting at position 3413 of SEQ ID NO: 477
gggugucuuuaauuaugag

SEQ ID NO: 40031 - RNA, 19 nt, Artificial Sequence
  Description of Artificial Sequence: Synthetic oligonucleotide
  Antisense strand to SEQ ID NO: 40030
cucauaauuaaagacaccc

SEQ ID NO: 40032 - RNA, 19 nt, Artificial Sequence
  Description of Artificial Sequence: Synthetic oligonucleotide
  Sense strand starting at position 3407 of SEQ ID NO: 477
cuguuagggugucuuuaau

SEQ ID NO: 40033 - RNA, 19 nt, Artificial Sequence
  Description of Artificial Sequence: Synthetic oligonucleotide
  Antisense strand to SEQ ID NO: 40032
auuaaagacacccuaacag

SEQ ID NO: 40034 - RNA, 19 nt, Artificial Sequence
  Description of Artificial Sequence: Synthetic oligonucleotide
  Sense strand starting at position 3337 of SEQ ID NO: 477
ggccgauugauagacugga

SEQ ID NO: 40035 - RNA, 19 nt, Artificial Sequence
  Description of Artificial Sequence: Synthetic oligonucleotide
  Antisense strand to SEQ ID NO: 40034
uccagucuaucaaucggcc

SEQ ID NO: 40036 - RNA, 19 nt, Artificial Sequence
  Description of Artificial Sequence: Synthetic oligonucleotide
  Sense strand starting at position 3270 of SEQ ID NO: 477
ugaucuccauucguucuaa

SEQ ID NO: 40037 - RNA, 19 nt, Artificial Sequence
  Description of Artificial Sequence: Synthetic oligonucleotide
  Antisense strand to SEQ ID NO: 40036
uuagaacgaauggagauca

SEQ ID NO: 40038 - RNA, 19 nt, Artificial Sequence
  Description of Artificial Sequence: Synthetic oligonucleotide
  Sense strand starting at position 3132 of SEQ ID NO: 477
accagagucuucccaugau

SEQ ID NO: 40039 - RNA, 19 nt, Artificial Sequence
  Description of Artificial Sequence: Synthetic oligonucleotide
  Antisense strand to SEQ ID NO: 40038
aucaugggaagacucuggu

SEQ ID NO: 40040 - RNA, 19 nt, Artificial Sequence
  Description of Artificial Sequence: Synthetic oligonucleotide
  Sense strand starting at position 3130 of SEQ ID NO: 477
ggaccagagucuucccaug

SEQ ID NO: 40041 - RNA, 19 nt, Artificial Sequence
  Description of Artificial Sequence: Synthetic oligonucleotide
  Antisense strand to SEQ ID NO: 40040
caugggaagacucuggucc

SEQ ID NO: 40042 - RNA, 19 nt, Artificial Sequence
  Description of Artificial Sequence: Synthetic oligonucleotide
  Sense strand starting at position 2640 of SEQ ID NO: 477
gguguuagugcuaguacag

SEQ ID NO: 40043 - RNA, 19 nt, Artificial Sequence
  Description of Artificial Sequence: Synthetic oligonucleotide
  Antisense strand to SEQ ID NO: 40042
cuguacuagcacuaacacc

SEQ ID NO: 40044 - RNA, 19 nt, Artificial Sequence
  Description of Artificial Sequence: Synthetic oligonucleotide
  Sense strand starting at position 2489 of SEQ ID NO: 477
auguaaacauguuugcuua

SEQ ID NO: 40045 - RNA, 19 nt, Artificial Sequence
  Description of Artificial Sequence: Synthetic oligonucleotide
  Antisense strand to SEQ ID NO: 40044
uaagcaaacauguuuacau

SEQ ID NO: 40046 - RNA, 19 nt, Artificial Sequence
  Description of Artificial Sequence: Synthetic oligonucleotide
  Sense strand starting at position 2437 of SEQ ID NO: 477
gaaauuauaugcucuggga

SEQ ID NO: 40047 - RNA, 19 nt, Artificial Sequence
  Description of Artificial Sequence: Synthetic oligonucleotide
  Antisense strand to SEQ ID NO: 40046
ucccagagcauauaauuuc

SEQ ID NO: 40048 - RNA, 19 nt, Artificial Sequence
  Description of Artificial Sequence: Synthetic oligonucleotide
  Sense strand starting at position 2205 of SEQ ID NO: 477
aaaggaauaccguauguuc

SEQ ID NO: 40049 - RNA, 19 nt, Artificial Sequence
  Description of Artificial Sequence: Synthetic oligonucleotide
  Antisense strand to SEQ ID NO: 40048
gaacauacgguauuccuuu

SEQ ID NO: 40050 - RNA, 19 nt, Artificial Sequence
  Description of Artificial Sequence: Synthetic oligonucleotide
  Sense strand starting at position 2180 of SEQ ID NO: 477
acacaauuaugaucuggca

SEQ ID NO: 40051 - RNA, 19 nt, Artificial Sequence
  Description of Artificial Sequence: Synthetic oligonucleotide
  Antisense strand to SEQ ID NO: 40050
ugccagaucauaauugugu

SEQ ID NO: 40052 - RNA, 19 nt, Artificial Sequence
  Description of Artificial Sequence: Synthetic oligonucleotide
  Sense strand starting at position 2164 of SEQ ID NO: 477
ugauaacugccuugccaca

SEQ ID NO: 40053 - RNA, 19 nt, Artificial Sequence
  Description of Artificial Sequence: Synthetic oligonucleotide
  Antisense strand to SEQ ID NO: 40052
uguggcaaggcaguuauca

SEQ ID NO: 40054 - RNA, 19 nt, Artificial Sequence
  Description of Artificial Sequence: Synthetic oligonucleotide
  Sense strand starting at position 2153 of SEQ ID NO: 477
ggauuaauuucugauaacu

SEQ ID NO: 40055 - RNA, 19 nt, Artificial Sequence
  Description of Artificial Sequence: Synthetic oligonucleotide
  Antisense strand to SEQ ID NO: 40054
aguuaucagaaauuaaucc

SEQ ID NO: 40056 - RNA, 19 nt, Artificial Sequence
  Description of Artificial Sequence: Synthetic oligonucleotide
  Sense strand starting at position 2152 of SEQ ID NO: 477
gggauuaauuucugauaac

SEQ ID NO: 40057 - RNA, 19 nt, Artificial Sequence
  Description of Artificial Sequence: Synthetic oligonucleotide
  Antisense strand to SEQ ID NO: 40056
guuaucagaaauuaauccc

SEQ ID NO: 40058 - RNA, 19 nt, Artificial Sequence
  Description of Artificial Sequence: Synthetic oligonucleotide
  Sense strand starting at position 2140 of SEQ ID NO: 477
gcucucaauagagggauua

SEQ ID NO: 40059 - RNA, 19 nt, Artificial Sequence
  Description of Artificial Sequence: Synthetic oligonucleotide
  Antisense strand to SEQ ID NO: 40058
uaaucccucuauugagagc

SEQ ID NO: 40060 - RNA, 19 nt, Artificial Sequence
  Description of Artificial Sequence: Synthetic oligonucleotide
  Sense strand starting at position 1566 of SEQ ID NO: 477
ugauuucuuuaacacagga

SEQ ID NO: 40061 - RNA, 19 nt, Artificial Sequence
  Description of Artificial Sequence: Synthetic oligonucleotide
  Antisense strand to SEQ ID NO: 40060
uccuguguuaaagaaauca

SEQ ID NO: 40062 - RNA, 19 nt, Artificial Sequence
  Description of Artificial Sequence: Synthetic oligonucleotide
  Sense strand starting at position 1322 of SEQ ID NO: 477
auauauaguaugugggaau

SEQ ID NO: 40063 - RNA, 19 nt, Artificial Sequence
  Description of Artificial Sequence: Synthetic oligonucleotide
  Antisense strand to SEQ ID NO: 40062
auucccacauacuauauau

SEQ ID NO: 40064 - RNA, 19 nt, Artificial Sequence
  Description of Artificial Sequence: Synthetic oligonucleotide
  Sense strand starting at position 1321 of SEQ ID NO: 477
aauauauaguaugugggaa

SEQ ID NO: 40065 - RNA, 19 nt, Artificial Sequence
  Description of Artificial Sequence: Synthetic oligonucleotide
  Antisense strand to SEQ ID NO: 40064
uucccacauacuauauauu

SEQ ID NO: 40066 - RNA, 19 nt, Artificial Sequence
  Description of Artificial Sequence: Synthetic oligonucleotide
  Sense strand starting at position 1320 of SEQ ID NO: 477
aaauauauaguauguggga

SEQ ID NO: 40067 - RNA, 19 nt, Artificial Sequence
  Description of Artificial Sequence: Synthetic oligonucleotide
  Antisense strand to SEQ ID NO: 40066
ucccacauacuauauauuu

SEQ ID NO: 40068 - RNA, 19 nt, Artificial Sequence
  Description of Artificial Sequence: Synthetic oligonucleotide
  Sense strand starting at position 1248 of SEQ ID NO: 477
gggaaacauugagacuauc

SEQ ID NO: 40069 - RNA, 19 nt, Artificial Sequence
  Description of Artificial Sequence: Synthetic oligonucleotide
  Antisense strand to SEQ ID NO: 40068
gauagucucaauguuuccc

SEQ ID NO: 40070 - RNA, 19 nt, Artificial Sequence
  Description of Artificial Sequence: Synthetic oligonucleotide
  Sense strand starting at position 1235 of SEQ ID NO: 477
accauuauccucugggaaa

SEQ ID NO: 40071 - RNA, 19 nt, Artificial Sequence
  Description of Artificial Sequence: Synthetic oligonucleotide
  Antisense strand to SEQ ID NO: 40070
uuucccagaggauaauggu

SEQ ID NO: 40072 - RNA, 19 nt, Artificial Sequence
  Description of Artificial Sequence: Synthetic oligonucleotide
  Sense strand starting at position 1206 of SEQ ID NO: 477
ccauuucucuggugaaaga

SEQ ID NO: 40073 - RNA, 19 nt, Artificial Sequence
  Description of Artificial Sequence: Synthetic oligonucleotide
  Antisense strand to SEQ ID NO: 40072
ucuuucaccagagaaaugg

SEQ ID NO: 40074 - RNA, 19 nt, Artificial Sequence
  Description of Artificial Sequence: Synthetic oligonucleotide
  Sense strand starting at position 1104 of SEQ ID NO: 477
ccgacaagauuaucucaga

SEQ ID NO: 40075 - RNA, 19 nt, Artificial Sequence
  Description of Artificial Sequence: Synthetic oligonucleotide
  Antisense strand to SEQ ID NO: 40074
ucugagauaaucuugucgg

SEQ ID NO: 40076 - RNA, 19 nt, Artificial Sequence
  Description of Artificial Sequence: Synthetic oligonucleotide
  Sense strand starting at position 1065 of SEQ ID NO: 477
gcaauuuggucuccucuga

SEQ ID NO: 40077 - RNA, 19 nt, Artificial Sequence
  Description of Artificial Sequence: Synthetic oligonucleotide
  Antisense strand to SEQ ID NO: 40076
ucagaggagaccaaauugc

SEQ ID NO: 40078 - RNA, 19 nt, Artificial Sequence
  Description of Artificial Sequence: Synthetic oligonucleotide
  Sense strand starting at position 826 of SEQ ID NO: 477
cuguaaaccguacaaguaa

SEQ ID NO: 40079 - RNA, 19 nt, Artificial Sequence
  Description of Artificial Sequence: Synthetic oligonucleotide
  Antisense strand to SEQ ID NO: 40078
uuacuuguacgguuuacag

SEQ ID NO: 40080 - RNA, 19 nt, Artificial Sequence
  Description of Artificial Sequence: Synthetic oligonucleotide
  Sense strand starting at position 824 of SEQ ID NO: 477
aacuguaaaccguacaagu

SEQ ID NO: 40081 - RNA, 19 nt, Artificial Sequence
  Description of Artificial Sequence: Synthetic oligonucleotide
  Antisense strand to SEQ ID NO: 40080
acuuguacgguuuacaguu

SEQ ID NO: 40082 - RNA, 19 nt, Artificial Sequence
  Description of Artificial Sequence: Synthetic oligonucleotide
  Sense strand starting at position 703 of SEQ ID NO: 477
guugcagucaaguauuaua

SEQ ID NO: 40083 - RNA, 19 nt, Artificial Sequence
  Description of Artificial Sequence: Synthetic oligonucleotide
  Antisense strand to SEQ ID NO: 40082
uauaauacuugacugcaac

SEQ ID NO: 40084 - RNA, 19 nt, Artificial Sequence
  Description of Artificial Sequence: Synthetic oligonucleotide
  Sense strand starting at position 623 of SEQ ID NO: 477
aguuucaaggaggguaaau

SEQ ID NO: 40085 - RNA, 19 nt, Artificial Sequence
  Description of Artificial Sequence: Synthetic oligonucleotide
  Antisense strand to SEQ ID NO: 40084
auuuacccuccuugaaacu

SEQ ID NO: 40086 - RNA, 19 nt, Artificial Sequence
  Description of Artificial Sequence: Synthetic oligonucleotide
  Sense strand starting at position 477 of SEQ ID NO: 477
gacaaagcuguuugccaua

SEQ ID NO: 40087 - RNA, 19 nt, Artificial Sequence
  Description of Artificial Sequence: Synthetic oligonucleotide
  Antisense strand to SEQ ID NO: 40086
uauggcaaacagcuuuguc

SEQ ID NO: 40088 - RNA, 19 nt, Artificial Sequence
  Description of Artificial Sequence: Synthetic oligonucleotide
  Sense strand starting at position 129 of SEQ ID NO: 477
gcuaacaaggucuaaacua

SEQ ID NO: 40089 - RNA, 19 nt, Artificial Sequence
  Description of Artificial Sequence: Synthetic oligonucleotide
  Antisense strand to SEQ ID NO: 40088
uaguuuagaccuuguuagc

SEQ ID NO: 40090 - RNA, 19 nt, Artificial Sequence
  Description of Artificial Sequence: Synthetic oligonucleotide
  Sense strand starting at position 102 of SEQ ID NO: 477
uuuaaagucaggugggaaa

SEQ ID NO: 40091 - RNA, 19 nt, Artificial Sequence
  Description of Artificial Sequence: Synthetic oligonucleotide
  Antisense strand to SEQ ID NO: 40090
uuucccaccugacuuuaaa

SEQ ID NO: 40092 - RNA, 19 nt, Artificial Sequence
  Description of Artificial Sequence: Synthetic oligonucleotide
  Sense strand starting at position 41 of SEQ ID NO: 477
cagaauuugugucaagaau

SEQ ID NO: 40093 - RNA, 19 nt, Artificial Sequence
  Description of Artificial Sequence: Synthetic oligonucleotide
  Antisense strand to SEQ ID NO: 40092
auucuugacacaaauucug

SEQ ID NO: 40094 - RNA, 19 nt, Artificial Sequence
  Description of Artificial Sequence: Synthetic oligonucleotide
  Sense strand starting at position 8 of SEQ ID NO: 477
gcuagauauuauguuauuc

SEQ ID NO: 40095 - RNA, 19 nt, Artificial Sequence
  Description of Artificial Sequence: Synthetic oligonucleotide
  Antisense strand to SEQ ID NO: 40094
gaauaacauaauaucuagc

SEQ ID NO: 40096 - RNA, 19 nt, Artificial Sequence
  Description of Artificial Sequence: Synthetic oligonucleotide
  Sense strand starting at position 3937 of SEQ ID NO: 476
guacucugacauugaagaa

SEQ ID NO: 40097 - RNA, 19 nt, Artificial Sequence
  Description of Artificial Sequence: Synthetic oligonucleotide
  Antisense strand to SEQ ID NO: 40096
uucuucaaugucagaguac

SEQ ID NO: 40098 - RNA, 19 nt, Artificial Sequence
  Description of Artificial Sequence: Synthetic oligonucleotide
  Sense strand starting at position 3931 of SEQ ID NO: 476
agaugaguacucugacauu

SEQ ID NO: 40099 - RNA, 19 nt, Artificial Sequence
  Description of Artificial Sequence: Synthetic oligonucleotide
  Antisense strand to SEQ ID NO: 40098
aaugucagaguacucaucu

SEQ ID NO: 40100 - RNA, 19 nt, Artificial Sequence
  Description of Artificial Sequence: Synthetic oligonucleotide
  Sense strand starting at position 3929 of SEQ ID NO: 476
ucagaugaguacucugaca

SEQ ID NO: 40101 - RNA, 19 nt, Artificial Sequence
  Description of Artificial Sequence: Synthetic oligonucleotide
  Antisense strand to SEQ ID NO: 40100
ugucagaguacucaucuga

SEQ ID NO: 40102 - RNA, 19 nt, Artificial Sequence
  Description of Artificial Sequence: Synthetic oligonucleotide
  Sense strand starting at position 3922 of SEQ ID NO: 476
ggagaugucagaugaguac

SEQ ID NO: 40103 - RNA, 19 nt, Artificial Sequence
  Description of Artificial Sequence: Synthetic oligonucleotide
  Antisense strand to SEQ ID NO: 40102
guacucaucugacaucucc

SEQ ID NO: 40104 - RNA, 19 nt, Artificial Sequence
  Description of Artificial Sequence: Synthetic oligonucleotide
  Sense strand starting at position 3778 of SEQ ID NO: 476
ugaugacaccagcgaugau

SEQ ID NO: 40105 - RNA, 19 nt, Artificial Sequence
  Description of Artificial Sequence: Synthetic oligonucleotide
  Antisense strand to SEQ ID NO: 40104
aucaucgcuggugucauca

SEQ ID NO: 40106 - RNA, 19 nt, Artificial Sequence
  Description of Artificial Sequence: Synthetic oligonucleotide
  Sense strand starting at position 3775 of SEQ ID NO: 476
guuugaugacaccagcgau

SEQ ID NO: 40107 - RNA, 19 nt, Artificial Sequence
  Description of Artificial Sequence: Synthetic oligonucleotide
  Antisense strand to SEQ ID NO: 40106
aucgcuggugucaucaaac

SEQ ID NO: 40108 - RNA, 19 nt, Artificial Sequence
  Description of Artificial Sequence: Synthetic oligonucleotide
  Sense strand starting at position 3726 of SEQ ID NO: 476
gaaguuucuccgcaagaag

SEQ ID NO: 40109 - RNA, 19 nt, Artificial Sequence
  Description of Artificial Sequence: Synthetic oligonucleotide
  Antisense strand to SEQ ID NO: 40108
cuucuugcggagaaacuuc

SEQ ID NO: 40110 - RNA, 19 nt, Artificial Sequence
  Description of Artificial Sequence: Synthetic oligonucleotide
  Sense strand starting at position 3725 of SEQ ID NO: 476
agaaguuucuccgcaagaa

SEQ ID NO: 40111 - RNA, 19 nt, Artificial Sequence
  Description of Artificial Sequence: Synthetic oligonucleotide
  Antisense strand to SEQ ID NO: 40110
uucuugcggagaaacuucu

SEQ ID NO: 40112 - RNA, 19 nt, Artificial Sequence
  Description of Artificial Sequence: Synthetic oligonucleotide
  Sense strand starting at position 3613 of SEQ ID NO: 476
gugcaaauucuguaguaga

SEQ ID NO: 40113 - RNA, 19 nt, Artificial Sequence
  Description of Artificial Sequence: Synthetic oligonucleotide
  Antisense strand to SEQ ID NO: 40112
ucuacuacagaauuugcac

SEQ ID NO: 40114 - RNA, 19 nt, Artificial Sequence
  Description of Artificial Sequence: Synthetic oligonucleotide
  Sense strand starting at position 3255 of SEQ ID NO: 476
auuuacuuaucauagugga

SEQ ID NO: 40115 - RNA, 19 nt, Artificial Sequence
  Description of Artificial Sequence: Synthetic oligonucleotide
  Antisense strand to SEQ ID NO: 40114
uccacuaugauaaguaaau

SEQ ID NO: 40116 - RNA, 19 nt, Artificial Sequence
  Description of Artificial Sequence: Synthetic oligonucleotide
  Sense strand starting at position 3182 of SEQ ID NO: 476
aguucuuugcaguauaaua

SEQ ID NO: 40117 - RNA, 19 nt, Artificial Sequence
  Description of Artificial Sequence: Synthetic oligonucleotide
  Antisense strand to SEQ ID NO: 40116
uauuauacugcaaagaacu

SEQ ID NO: 40118 - RNA, 19 nt, Artificial Sequence
  Description of Artificial Sequence: Synthetic oligonucleotide
  Sense strand starting at position 2976 of SEQ ID NO: 476
auugcuguacugcaaugaa

SEQ ID NO: 40119 - RNA, 19 nt, Artificial Sequence
  Description of Artificial Sequence: Synthetic oligonucleotide
  Antisense strand to SEQ ID NO: 40118
uucauugcaguacagcaau

SEQ ID NO: 40120 - RNA, 19 nt, Artificial Sequence
  Description of Artificial Sequence: Synthetic oligonucleotide
  Sense strand starting at position 2958 of SEQ ID NO: 476
gaaguuucuuguucugaaa

SEQ ID NO: 40121 - RNA, 19 nt, Artificial Sequence
  Description of Artificial Sequence: Synthetic oligonucleotide
  Antisense strand to SEQ ID NO: 40120
uuucagaacaagaaacuuc

SEQ ID NO: 40122 - RNA, 19 nt, Artificial Sequence
  Description of Artificial Sequence: Synthetic oligonucleotide
  Sense strand starting at position 2905 of SEQ ID NO: 476
gcuguuauccaagacaauc

SEQ ID NO: 40123 - RNA, 19 nt, Artificial Sequence
  Description of Artificial Sequence: Synthetic oligonucleotide
  Antisense strand to SEQ ID NO: 40122
gauugucuuggauaacagc

SEQ ID NO: 40124 - RNA, 19 nt, Artificial Sequence
  Description of Artificial Sequence: Synthetic oligonucleotide
  Sense strand starting at position 2788 of SEQ ID NO: 476
gaaagaauucguugaugau

SEQ ID NO: 40125 - RNA, 19 nt, Artificial Sequence
  Description of Artificial Sequence: Synthetic oligonucleotide
  Antisense strand to SEQ ID NO: 40124
aucaucaacgaauucuuuc

SEQ ID NO: 40126 - RNA, 19 nt, Artificial Sequence
  Description of Artificial Sequence: Synthetic oligonucleotide
  Sense strand starting at position 2786 of SEQ ID NO: 476
uagaaagaauucguugaug

SEQ ID NO: 40127 - RNA, 19 nt, Artificial Sequence
  Description of Artificial Sequence: Synthetic oligonucleotide
  Antisense strand to SEQ ID NO: 40126
caucaacgaauucuuucua

SEQ ID NO: 40128 - RNA, 19 nt, Artificial Sequence
  Description of Artificial Sequence: Synthetic oligonucleotide
  Sense strand starting at position 2785 of SEQ ID NO: 476
uuagaaagaauucguugau

SEQ ID NO: 40129 - RNA, 19 nt, Artificial Sequence
  Description of Artificial Sequence: Synthetic oligonucleotide
  Antisense strand to SEQ ID NO: 40128
aucaacgaauucuuucuaa

SEQ ID NO: 40130 - RNA, 19 nt, Artificial Sequence
  Description of Artificial Sequence: Synthetic oligonucleotide
  Sense strand starting at position 2581 of SEQ ID NO: 476
gucaacgaucuuggaagau

SEQ ID NO: 40131 - RNA, 19 nt, Artificial Sequence
  Description of Artificial Sequence: Synthetic oligonucleotide
  Antisense strand to SEQ ID NO: 40130
aucuuccaagaucguugac

SEQ ID NO: 40132 - RNA, 19 nt, Artificial Sequence
  Description of Artificial Sequence: Synthetic oligonucleotide
  Sense strand starting at position 2230 of SEQ ID NO: 476
uuggguucccgguaaugga

SEQ ID NO: 40133 - RNA, 19 nt, Artificial Sequence
  Description of Artificial Sequence: Synthetic oligonucleotide
  Antisense strand to SEQ ID NO: 40132
uccauuaccgggaacccaa

SEQ ID NO: 40134 - RNA, 19 nt, Artificial Sequence
  Description of Artificial Sequence: Synthetic oligonucleotide
  Sense strand starting at position 1804 of SEQ ID NO: 476
ucggcaaacuacuucuaaa

SEQ ID NO: 40135 - RNA, 19 nt, Artificial Sequence
  Description of Artificial Sequence: Synthetic oligonucleotide
  Antisense strand to SEQ ID NO: 40134
uuuagaaguaguuugccga

SEQ ID NO: 40136 - RNA, 19 nt, Artificial Sequence
  Description of Artificial Sequence: Synthetic oligonucleotide
  Sense strand starting at position 1736 of SEQ ID NO: 476
ugcuguuugguagauuaca

SEQ ID NO: 40137 - RNA, 19 nt, Artificial Sequence
  Description of Artificial Sequence: Synthetic oligonucleotide
  Antisense strand to SEQ ID NO: 40136
uguaaucuaccaaacagca

SEQ ID NO: 40138 - RNA, 19 nt, Artificial Sequence
  Description of Artificial Sequence: Synthetic oligonucleotide
  Sense strand starting at position 1623 of SEQ ID NO: 476
aguaaucgcguuuagauuu

SEQ ID NO: 40139 - RNA, 19 nt, Artificial Sequence
  Description of Artificial Sequence: Synthetic oligonucleotide
  Antisense strand to SEQ ID NO: 40138
aaaucuaaacgcgauuacu

SEQ ID NO: 40140 - RNA, 19 nt, Artificial Sequence
  Description of Artificial Sequence: Synthetic oligonucleotide
  Sense strand starting at position 1618 of SEQ ID NO: 476
uucuuaguaaucgcguuua

SEQ ID NO: 40141 - RNA, 19 nt, Artificial Sequence
  Description of Artificial Sequence: Synthetic oligonucleotide
  Antisense strand to SEQ ID NO: 40140
uaaacgcgauuacuaagaa

SEQ ID NO: 40142 - RNA, 19 nt, Artificial Sequence
  Description of Artificial Sequence: Synthetic oligonucleotide
  Sense strand starting at position 1422 of SEQ ID NO: 476
cgaguccgcagauaaauga

SEQ ID NO: 40143 - RNA, 19 nt, Artificial Sequence
  Description of Artificial Sequence: Synthetic oligonucleotide
  Antisense strand to SEQ ID NO: 40142
ucauuuaucugcggacucg

SEQ ID NO: 40144 - RNA, 19 nt, Artificial Sequence
  Description of Artificial Sequence: Synthetic oligonucleotide
  Sense strand starting at position 1251 of SEQ ID NO: 476
ggaguucuuccauggagug

SEQ ID NO: 40145 - RNA, 19 nt, Artificial Sequence
  Description of Artificial Sequence: Synthetic oligonucleotide
  Antisense strand to SEQ ID NO: 40144
cacuccauggaagaacucc

SEQ ID NO: 40146 - RNA, 19 nt, Artificial Sequence
  Description of Artificial Sequence: Synthetic oligonucleotide
  Sense strand starting at position 1110 of SEQ ID NO: 476
aauccaugugaaugugagu

SEQ ID NO: 40147 - RNA, 19 nt, Artificial Sequence
  Description of Artificial Sequence: Synthetic oligonucleotide
  Antisense strand to SEQ ID NO: 40146
acucacauucacauggauu

SEQ ID NO: 40148 - RNA, 19 nt, Artificial Sequence
  Description of Artificial Sequence: Synthetic oligonucleotide
  Sense strand starting at position 1095 of SEQ ID NO: 476
augaaucuuugugcaaauc

SEQ ID NO: 40149 - RNA, 19 nt, Artificial Sequence
  Description of Artificial Sequence: Synthetic oligonucleotide
  Antisense strand to SEQ ID NO: 40148
gauuugcacaaagauucau

SEQ ID NO: 40150 - RNA, 19 nt, Artificial Sequence
  Description of Artificial Sequence: Synthetic oligonucleotide
  Sense strand starting at position 1093 of SEQ ID NO: 476
auaugaaucuuugugcaaa

SEQ ID NO: 40151 - RNA, 19 nt, Artificial Sequence
  Description of Artificial Sequence: Synthetic oligonucleotide
  Antisense strand to SEQ ID NO: 40150
uuugcacaaagauucauau

SEQ ID NO: 40152 - RNA, 19 nt, Artificial Sequence
  Description of Artificial Sequence: Synthetic oligonucleotide
  Sense strand starting at position 1079 of SEQ ID NO: 476
gagucucacaggugauaug

SEQ ID NO: 40153 - RNA, 19 nt, Artificial Sequence
  Description of Artificial Sequence: Synthetic oligonucleotide
  Antisense strand to SEQ ID NO: 40152
cauaucaccugugagacuc

SEQ ID NO: 40154 - RNA, 19 nt, Artificial Sequence
  Description of Artificial Sequence: Synthetic oligonucleotide
  Sense strand starting at position 1077 of SEQ ID NO: 476
augagucucacaggugaua

SEQ ID NO: 40155 - RNA, 19 nt, Artificial Sequence
  Description of Artificial Sequence: Synthetic oligonucleotide
  Antisense strand to SEQ ID NO: 40154
uaucaccugugagacucau

SEQ ID NO: 40156 - RNA, 19 nt, Artificial Sequence
  Description of Artificial Sequence: Synthetic oligonucleotide
  Sense strand starting at position 995 of SEQ ID NO: 476
uugcaauaucugcagacua

SEQ ID NO: 40157 - RNA, 19 nt, Artificial Sequence
  Description of Artificial Sequence: Synthetic oligonucleotide
  Antisense strand to SEQ ID NO: 40156
uagucugcagauauugcaa

SEQ ID NO: 40158 - RNA, 19 nt, Artificial Sequence
  Description of Artificial Sequence: Synthetic oligonucleotide
  Sense strand starting at position 744 of SEQ ID NO: 476
auugguucucuuuauugua

SEQ ID NO: 40159 - RNA, 19 nt, Artificial Sequence
  Description of Artificial Sequence: Synthetic oligonucleotide
  Antisense strand to SEQ ID NO: 40158
uacaauaaagagaaccaau

SEQ ID NO: 40160 - RNA, 19 nt, Artificial Sequence
  Description of Artificial Sequence: Synthetic oligonucleotide
  Sense strand starting at position 594 of SEQ ID NO: 476
ggguauaaucauuaugcuu

SEQ ID NO: 40161 - RNA, 19 nt, Artificial Sequence
  Description of Artificial Sequence: Synthetic oligonucleotide
  Antisense strand to SEQ ID NO: 40160
aagcauaaugauuauaccc

SEQ ID NO: 40162 - RNA, 19 nt, Artificial Sequence
  Description of Artificial Sequence: Synthetic oligonucleotide
  Sense strand starting at position 587 of SEQ ID NO: 476
caaguuuggguauaaucau

SEQ ID NO: 40163 - RNA, 19 nt, Artificial Sequence
  Description of Artificial Sequence: Synthetic oligonucleotide
  Antisense strand to SEQ ID NO: 40162
augauuauacccaaacuug

SEQ ID NO: 40164 - RNA, 19 nt, Artificial Sequence
  Description of Artificial Sequence: Synthetic oligonucleotide
  Sense strand starting at position 548 of SEQ ID NO: 476
gaguuugaccuauaauguu

SEQ ID NO: 40165 - RNA, 19 nt, Artificial Sequence
  Description of Artificial Sequence: Synthetic oligonucleotide
  Antisense strand to SEQ ID NO: 40164
aacauuauaggucaaacuc

SEQ ID NO: 40166 - RNA, 19 nt, Artificial Sequence
  Description of Artificial Sequence: Synthetic oligonucleotide
  Sense strand starting at position 544 of SEQ ID NO: 476
uuaugaguuugaccuauaa

SEQ ID NO: 40167 - RNA, 19 nt, Artificial Sequence
  Description of Artificial Sequence: Synthetic oligonucleotide
  Antisense strand to SEQ ID NO: 40166
uuauaggucaaacucauaa

SEQ ID NO: 40168 - RNA, 19 nt, Artificial Sequence
  Description of Artificial Sequence: Synthetic oligonucleotide
  Sense strand starting at position 269 of SEQ ID NO: 476
ucuaauccuugcuugagau

SEQ ID NO: 40169 - RNA, 19 nt, Artificial Sequence
  Description of Artificial Sequence: Synthetic oligonucleotide
  Antisense strand to SEQ ID NO: 40168
aucucaagcaaggauuaga

SEQ ID NO: 40170 - RNA, 19 nt, Artificial Sequence
  Description of Artificial Sequence: Synthetic oligonucleotide
  Sense strand starting at position 268 of SEQ ID NO: 476
uucuaauccuugcuugaga

SEQ ID NO: 40171 - RNA, 19 nt, Artificial Sequence
  Description of Artificial Sequence: Synthetic oligonucleotide
  Antisense strand to SEQ ID NO: 40170
ucucaagcaaggauuagaa

SEQ ID NO: 40172 - RNA, 19 nt, Artificial Sequence
  Description of Artificial Sequence: Synthetic oligonucleotide
  Sense strand starting at position 176 of SEQ ID NO: 476
ucaaauuccguggaaguuu

SEQ ID NO: 40173 - RNA, 19 nt, Artificial Sequence
  Description of Artificial Sequence: Synthetic oligonucleotide
  Antisense strand to SEQ ID NO: 40172
aaacuuccacggaauuuga

SEQ ID NO: 40174 - RNA, 19 nt, Artificial Sequence
  Description of Artificial Sequence: Synthetic oligonucleotide
  Sense strand starting at position 155 of SEQ ID NO: 476
gaaagcauacuugguuuau

SEQ ID NO: 40175 - RNA, 19 nt, Artificial Sequence
  Description of Artificial Sequence: Synthetic oligonucleotide
  Antisense strand to SEQ ID NO: 40174
auaaaccaaguaugcuuuc

SEQ ID NO: 40176 - RNA, 19 nt, Artificial Sequence
  Description of Artificial Sequence: Synthetic oligonucleotide
  Sense strand starting at position 3872 of SEQ ID NO: 478
ggaaacaccugagcuuaua

SEQ ID NO: 40177 - RNA, 19 nt, Artificial Sequence
  Description of Artificial Sequence: Synthetic oligonucleotide
  Antisense strand to SEQ ID NO: 40176
uauaagcucagguguuucc

SEQ ID NO: 40178 - RNA, 19 nt, Artificial Sequence
  Description of Artificial Sequence: Synthetic oligonucleotide
  Sense strand starting at position 3719 of SEQ ID NO: 478
gagacagucuuugcaaaga

SEQ ID NO: 40179 - RNA, 19 nt, Artificial Sequence
  Description of Artificial Sequence: Synthetic oligonucleotide
  Antisense strand to SEQ ID NO: 40178
ucuuugcaaagacugucuc

SEQ ID NO: 40180 - RNA, 19 nt, Artificial Sequence
  Description of Artificial Sequence: Synthetic oligonucleotide
  Sense strand starting at position 3717 of SEQ ID NO: 478
uagagacagucuuugcaaa

SEQ ID NO: 40181 - RNA, 19 nt, Artificial Sequence
  Description of Artificial Sequence: Synthetic oligonucleotide
  Antisense strand to SEQ ID NO: 40180
uuugcaaagacugucucua

SEQ ID NO: 40182 - RNA, 19 nt, Artificial Sequence
  Description of Artificial Sequence: Synthetic oligonucleotide
  Sense strand starting at position 3599 of SEQ ID NO: 478
aagaaauguugcuuggaaa

SEQ ID NO: 40183 - RNA, 19 nt, Artificial Sequence
  Description of Artificial Sequence: Synthetic oligonucleotide
  Antisense strand to SEQ ID NO: 40182
uuuccaagcaacauuucuu

SEQ ID NO: 40184 - RNA, 19 nt, Artificial Sequence
  Description of Artificial Sequence: Synthetic oligonucleotide
  Sense strand starting at position 3598 of SEQ ID NO: 478
aaagaaauguugcuuggaa

SEQ ID NO: 40185 - RNA, 19 nt, Artificial Sequence
  Description of Artificial Sequence: Synthetic oligonucleotide
  Antisense strand to SEQ ID NO: 40184
uuccaagcaacauuucuuu

SEQ ID NO: 40186 - RNA, 19 nt, Artificial Sequence
  Description of Artificial Sequence: Synthetic oligonucleotide
  Sense strand starting at position 3517 of SEQ ID NO: 478
aaggcugauuuggaauuaa

SEQ ID NO: 40187 - RNA, 19 nt, Artificial Sequence
  Description of Artificial Sequence: Synthetic oligonucleotide
  Antisense strand to SEQ ID NO: 40186
uuaauuccaaaucagccuu

SEQ ID NO: 40188 - RNA, 19 nt, Artificial Sequence
  Description of Artificial Sequence: Synthetic oligonucleotide
  Sense strand starting at position 3428 of SEQ ID NO: 478
ggcauccuaugaucucaua

SEQ ID NO: 40189 - RNA, 19 nt, Artificial Sequence
  Description of Artificial Sequence: Synthetic oligonucleotide
  Antisense strand to SEQ ID NO: 40188
uaugagaucauaggaugcc

SEQ ID NO: 40190 - RNA, 19 nt, Artificial Sequence
  Description of Artificial Sequence: Synthetic oligonucleotide
  Sense strand starting at position 3394 of SEQ ID NO: 478
gagauaaucugggcaagug

SEQ ID NO: 40191 - RNA, 19 nt, Artificial Sequence
  Description of Artificial Sequence: Synthetic oligonucleotide
  Antisense strand to SEQ ID NO: 40190
cacuugcccagauuaucuc

SEQ ID NO: 40192 - RNA, 19 nt, Artificial Sequence
  Description of Artificial Sequence: Synthetic oligonucleotide
  Sense strand starting at position 3393 of SEQ ID NO: 478
ggagauaaucugggcaagu

SEQ ID NO: 40193 - RNA, 19 nt, Artificial Sequence
  Description of Artificial Sequence: Synthetic oligonucleotide
  Antisense strand to SEQ ID NO: 40192
acuugcccagauuaucucc

SEQ ID NO: 40194 - RNA, 19 nt, Artificial Sequence
  Description of Artificial Sequence: Synthetic oligonucleotide
  Sense strand starting at position 3368 of SEQ ID NO: 478
gaacguuugguaggaauca

SEQ ID NO: 40195 - RNA, 19 nt, Artificial Sequence
  Description of Artificial Sequence: Synthetic oligonucleotide
  Antisense strand to SEQ ID NO: 40194
ugauuccuaccaaacguuc

SEQ ID NO: 40196 - RNA, 19 nt, Artificial Sequence
  Description of Artificial Sequence: Synthetic oligonucleotide
  Sense strand starting at position 3365 of SEQ ID NO: 478
gaagaacguuugguaggaa

SEQ ID NO: 40197 - RNA, 19 nt, Artificial Sequence
  Description of Artificial Sequence: Synthetic oligonucleotide
  Antisense strand to SEQ ID NO: 40196
uuccuaccaaacguucuuc

SEQ ID NO: 40198 - RNA, 19 nt, Artificial Sequence
  Description of Artificial Sequence: Synthetic oligonucleotide
  Sense strand starting at position 3231 of SEQ ID NO: 478
gugaguauaggugagacau

SEQ ID NO: 40199 - RNA, 19 nt, Artificial Sequence
  Description of Artificial Sequence: Synthetic oligonucleotide
  Antisense strand to SEQ ID NO: 40198
augucucaccuauacucac

SEQ ID NO: 40200 - RNA, 19 nt, Artificial Sequence
  Description of Artificial Sequence: Synthetic oligonucleotide
  Sense strand starting at position 2981 of SEQ ID NO: 478
gaggauacuuuggcaguca

SEQ ID NO: 40201 - RNA, 19 nt, Artificial Sequence
  Description of Artificial Sequence: Synthetic oligonucleotide
  Antisense strand to SEQ ID NO: 40200
ugacugccaaaguauccuc

SEQ ID NO: 40202 - RNA, 19 nt, Artificial Sequence
  Description of Artificial Sequence: Synthetic oligonucleotide
  Sense strand starting at position 2811 of SEQ ID NO: 478
gaagauaaguucucccuag

SEQ ID NO: 40203 - RNA, 19 nt, Artificial Sequence
  Description of Artificial Sequence: Synthetic oligonucleotide
  Antisense strand to SEQ ID NO: 40202
cuagggagaacuuaucuuc

SEQ ID NO: 40204 - RNA, 19 nt, Artificial Sequence
  Description of Artificial Sequence: Synthetic oligonucleotide
  Sense strand starting at position 2802 of SEQ ID NO: 478
ucugccuuugaagauaagu

SEQ ID NO: 40205 - RNA, 19 nt, Artificial Sequence
  Description of Artificial Sequence: Synthetic oligonucleotide
  Antisense strand to SEQ ID NO: 40204
acuuaucuucaaaggcaga

SEQ ID NO: 40206 - RNA, 19 nt, Artificial Sequence
  Description of Artificial Sequence: Synthetic oligonucleotide
  Sense strand starting at position 2798 of SEQ ID NO: 478
ccaaucugccuuugaagau

SEQ ID NO: 40207 - RNA, 19 nt, Artificial Sequence
  Description of Artificial Sequence: Synthetic oligonucleotide
  Antisense strand to SEQ ID NO: 40206
aucuucaaaggcagauugg

SEQ ID NO: 40208 - RNA, 19 nt, Artificial Sequence
  Description of Artificial Sequence: Synthetic oligonucleotide
  Sense strand starting at position 2587 of SEQ ID NO: 478
gugauuucucucugucacu

SEQ ID NO: 40209 - RNA, 19 nt, Artificial Sequence
  Description of Artificial Sequence: Synthetic oligonucleotide
  Antisense strand to SEQ ID NO: 40208
agugacagagagaaaucac

SEQ ID NO: 40210 - RNA, 19 nt, Artificial Sequence
  Description of Artificial Sequence: Synthetic oligonucleotide
  Sense strand starting at position 2586 of SEQ ID NO: 478
ggugauuucucucugucac

SEQ ID NO: 40211 - RNA, 19 nt, Artificial Sequence
  Description of Artificial Sequence: Synthetic oligonucleotide
  Antisense strand to SEQ ID NO: 40210
gugacagagagaaaucacc

SEQ ID NO: 40212 - RNA, 19 nt, Artificial Sequence
  Description of Artificial Sequence: Synthetic oligonucleotide
  Sense strand starting at position 2535 of SEQ ID NO: 478
agaugcagugagugaagau

SEQ ID NO: 40213 - RNA, 19 nt, Artificial Sequence
  Description of Artificial Sequence: Synthetic oligonucleotide
  Antisense strand to SEQ ID NO: 40212
aucuucacucacugcaucu

SEQ ID NO: 40214 - RNA, 19 nt, Artificial Sequence
  Description of Artificial Sequence: Synthetic oligonucleotide
  Sense strand starting at position 2532 of SEQ ID NO: 478
ucaagaugcagugagugaa

SEQ ID NO: 40215 - RNA, 19 nt, Artificial Sequence
  Description of Artificial Sequence: Synthetic oligonucleotide
  Antisense strand to SEQ ID NO: 40214
uucacucacugcaucuuga

SEQ ID NO: 40216 - RNA, 19 nt, Artificial Sequence
  Description of Artificial Sequence: Synthetic oligonucleotide
  Sense strand starting at position 2500 of SEQ ID NO: 478
gcgauaagccugcuggguu

SEQ ID NO: 40217 - RNA, 19 nt, Artificial Sequence
  Description of Artificial Sequence: Synthetic oligonucleotide
  Antisense strand to SEQ ID NO: 40216
aacccagcaggcuuaucgc

SEQ ID NO: 40218 - RNA, 19 nt, Artificial Sequence
  Description of Artificial Sequence: Synthetic oligonucleotide
  Sense strand starting at position 1814 of SEQ ID NO: 478
gagguuggcucacuagaag

SEQ ID NO: 40219 - RNA, 19 nt, Artificial Sequence
  Description of Artificial Sequence: Synthetic oligonucleotide
  Antisense strand to SEQ ID NO: 40218
cuucuagugagccaaccuc

SEQ ID NO: 40220 - RNA, 19 nt, Artificial Sequence
  Description of Artificial Sequence: Synthetic oligonucleotide
  Sense strand starting at position 1810 of SEQ ID NO: 478
uuaagagguuggcucacua

SEQ ID NO: 40221 - RNA, 19 nt, Artificial Sequence
  Description of Artificial Sequence: Synthetic oligonucleotide
  Antisense strand to SEQ ID NO: 40220
uagugagccaaccucuuaa

SEQ ID NO: 40222 - RNA, 19 nt, Artificial Sequence
  Description of Artificial Sequence: Synthetic oligonucleotide
  Sense strand starting at position 1712 of SEQ ID NO: 478
cugaaagaccuggguucua

SEQ ID NO: 40223 - RNA, 19 nt, Artificial Sequence
  Description of Artificial Sequence: Synthetic oligonucleotide
  Antisense strand to SEQ ID NO: 40222
uagaacccaggucuuucag

SEQ ID NO: 40224 - RNA, 19 nt, Artificial Sequence
  Description of Artificial Sequence: Synthetic oligonucleotide
  Sense strand starting at position 1612 of SEQ ID NO: 478
gaagcauguccugaucauu

SEQ ID NO: 40225 - RNA, 19 nt, Artificial Sequence
  Description of Artificial Sequence: Synthetic oligonucleotide
  Antisense strand to SEQ ID NO: 40224
aaugaucaggacaugcuuc

SEQ ID NO: 40226 - RNA, 19 nt, Artificial Sequence
  Description of Artificial Sequence: Synthetic oligonucleotide
  Sense strand starting at position 1582 of SEQ ID NO: 478
accugcugggucuaaauaa

SEQ ID NO: 40227 - RNA, 19 nt, Artificial Sequence
  Description of Artificial Sequence: Synthetic oligonucleotide
  Antisense strand to SEQ ID NO: 40226
uuauuuagacccagcaggu

SEQ ID NO: 40228 - RNA, 19 nt, Artificial Sequence
  Description of Artificial Sequence: Synthetic oligonucleotide
  Sense strand starting at position 1436 of SEQ ID NO: 478
gcaacuuaucuguaugauc

SEQ ID NO: 40229 - RNA, 19 nt, Artificial Sequence
  Description of Artificial Sequence: Synthetic oligonucleotide
  Antisense strand to SEQ ID NO: 40228
gaucauacagauaaguugc

SEQ ID NO: 40230 - RNA, 19 nt, Artificial Sequence
  Description of Artificial Sequence: Synthetic oligonucleotide
  Sense strand starting at position 1398 of SEQ ID NO: 478
ucaaguucuccacagugga

SEQ ID NO: 40231 - RNA, 19 nt, Artificial Sequence
  Description of Artificial Sequence: Synthetic oligonucleotide
  Antisense strand to SEQ ID NO: 40230
uccacuguggagaacuuga

SEQ ID NO: 40232 - RNA, 19 nt, Artificial Sequence
  Description of Artificial Sequence: Synthetic oligonucleotide
  Sense strand starting at position 1386 of SEQ ID NO: 478
gaagaagacugcucaaguu

SEQ ID NO: 40233 - RNA, 19 nt, Artificial Sequence
  Description of Artificial Sequence: Synthetic oligonucleotide
  Antisense strand to SEQ ID NO: 40232
aacuugagcagucuucuuc

SEQ ID NO: 40234 - RNA, 19 nt, Artificial Sequence
  Description of Artificial Sequence: Synthetic oligonucleotide
  Sense strand starting at position 1319 of SEQ ID NO: 478
guuaaacaugcucagagca

SEQ ID NO: 40235 - RNA, 19 nt, Artificial Sequence
  Description of Artificial Sequence: Synthetic oligonucleotide
  Antisense strand to SEQ ID NO: 40234
ugcucugagcauguuuaac

SEQ ID NO: 40236 - RNA, 19 nt, Artificial Sequence
  Description of Artificial Sequence: Synthetic oligonucleotide
  Sense strand starting at position 492 of SEQ ID NO: 478
guguucucaggagguagaa

SEQ ID NO: 40237 - RNA, 19 nt, Artificial Sequence
  Description of Artificial Sequence: Synthetic oligonucleotide
  Antisense strand to SEQ ID NO: 40236
uucuaccuccugagaacac

SEQ ID NO: 40238 - RNA, 19 nt, Artificial Sequence
  Description of Artificial Sequence: Synthetic oligonucleotide
  Sense strand starting at position 353 of SEQ ID NO: 478
cgauaugugaucgcugcua

SEQ ID NO: 40239 - RNA, 19 nt, Artificial Sequence
  Description of Artificial Sequence: Synthetic oligonucleotide
  Antisense strand to SEQ ID NO: 40238
uagcagcgaucacauaucg

SEQ ID NO: 40240 - RNA, 19 nt, Artificial Sequence
  Description of Artificial Sequence: Synthetic oligonucleotide
  Sense strand starting at position 344 of SEQ ID NO: 478
cgaaacagucgauauguga

SEQ ID NO: 40241 - RNA, 19 nt, Artificial Sequence
  Description of Artificial Sequence: Synthetic oligonucleotide
  Antisense strand to SEQ ID NO: 40240
ucacauaucgacuguuucg

SEQ ID NO: 40242 - RNA, 19 nt, Artificial Sequence
  Description of Artificial Sequence: Synthetic oligonucleotide
  Sense strand starting at position 341 of SEQ ID NO: 478
acucgaaacagucgauaug

SEQ ID NO: 40243 - RNA, 19 nt, Artificial Sequence
  Description of Artificial Sequence: Synthetic oligonucleotide
  Antisense strand to SEQ ID NO: 40242
cauaucgacuguuucgagu

SEQ ID NO: 40244 - RNA, 19 nt, Artificial Sequence
  Description of Artificial Sequence: Synthetic oligonucleotide
  Sense strand starting at position 278 of SEQ ID NO: 478
cagauugugccacauaaag

SEQ ID NO: 40245 - RNA, 19 nt, Artificial Sequence
  Description of Artificial Sequence: Synthetic oligonucleotide
  Antisense strand to SEQ ID NO: 40244
cuuuauguggcacaaucug

SEQ ID NO: 40246 - RNA, 19 nt, Artificial Sequence
  Description of Artificial Sequence: Synthetic oligonucleotide
  Sense strand starting at position 274 of SEQ ID NO: 478
gaaucagauugugccacau

SEQ ID NO: 40247 - RNA, 19 nt, Artificial Sequence
  Description of Artificial Sequence: Synthetic oligonucleotide
  Antisense strand to SEQ ID NO: 40246
auguggcacaaucugauuc

SEQ ID NO: 40248 - RNA, 19 nt, Artificial Sequence
  Description of Artificial Sequence: Synthetic oligonucleotide
  Sense strand starting at position 271 of SEQ ID NO: 478
ugagaaucagauugugcca

SEQ ID NO: 40249 - RNA, 19 nt, Artificial Sequence
  Description of Artificial Sequence: Synthetic oligonucleotide
  Antisense strand to SEQ ID NO: 40248
uggcacaaucugauucuca

SEQ ID NO: 40250 - RNA, 19 nt, Artificial Sequence
  Description of Artificial Sequence: Synthetic oligonucleotide
  Sense strand starting at position 257 of SEQ ID NO: 478
uacgcaagucauuaugaga

SEQ ID NO: 40251 - RNA, 19 nt, Artificial Sequence
  Description of Artificial Sequence: Synthetic oligonucleotide
  Antisense strand to SEQ ID NO: 40250
ucucauaaugacuugcgua

SEQ ID NO: 40252 - RNA, 19 nt, Artificial Sequence
  Description of Artificial Sequence: Synthetic oligonucleotide
  Sense strand starting at position 123 of SEQ ID NO: 478
gugagaacucagcagagca

SEQ ID NO: 40253 - RNA, 19 nt, Artificial Sequence
  Description of Artificial Sequence: Synthetic oligonucleotide
  Antisense strand to SEQ ID NO: 40252
ugcucugcugaguucucac

SEQ ID NO: 40254 - RNA, 19 nt, Artificial Sequence
  Description of Artificial Sequence: Synthetic oligonucleotide
  Sense strand starting at position 4 of SEQ ID NO: 478
gaagacagcuggcuugauu

SEQ ID NO: 40255 - RNA, 19 nt, Artificial Sequence
  Description of Artificial Sequence: Synthetic oligonucleotide
  Antisense strand to SEQ ID NO: 40254
aaucaagccagcugucuuc

SEQ ID NO: 40256 - RNA, 19 nt, Artificial Sequence
  Description of Artificial Sequence: Synthetic oligonucleotide
  Sense strand starting at position 3837 of SEQ ID NO: 480
ugcagucaucugcuuguuu

SEQ ID NO: 40257 - RNA, 19 nt, Artificial Sequence
  Description of Artificial Sequence: Synthetic oligonucleotide
  Antisense strand to SEQ ID NO: 40256
aaacaagcagaugacugca

SEQ ID NO: 40258 - RNA, 19 nt, Artificial Sequence
  Description of Artificial Sequence: Synthetic oligonucleotide
  Sense strand starting at position 3801 of SEQ ID NO: 480
uuagcuuccguugauguua

SEQ ID NO: 40259 - RNA, 19 nt, Artificial Sequence
  Description of Artificial Sequence: Synthetic oligonucleotide
  Antisense strand to SEQ ID NO: 40258
uaacaucaacggaagcuaa

SEQ ID NO: 40260 - RNA, 19 nt, Artificial Sequence
  Description of Artificial Sequence: Synthetic oligonucleotide
  Sense strand starting at position 3796 of SEQ ID NO: 480
uguaguuagcuuccguuga

SEQ ID NO: 40261 - RNA, 19 nt, Artificial Sequence
  Description of Artificial Sequence: Synthetic oligonucleotide
  Antisense strand to SEQ ID NO: 40260
ucaacggaagcuaacuaca

SEQ ID NO: 40262 - RNA, 19 nt, Artificial Sequence
  Description of Artificial Sequence: Synthetic oligonucleotide
  Sense strand starting at position 3764 of SEQ ID NO: 480
gcuguaugugcagagauga

SEQ ID NO: 40263 - RNA, 19 nt, Artificial Sequence
  Description of Artificial Sequence: Synthetic oligonucleotide
  Antisense strand to SEQ ID NO: 40262
ucaucucugcacauacagc

SEQ ID NO: 40264 - RNA, 19 nt, Artificial Sequence
  Description of Artificial Sequence: Synthetic oligonucleotide
  Sense strand starting at position 3723 of SEQ ID NO: 480
cgagaaaggugguuaaaua

SEQ ID NO: 40265 - RNA, 19 nt, Artificial Sequence
  Description of Artificial Sequence: Synthetic oligonucleotide
  Antisense strand to SEQ ID NO: 40264
uauuuaaccaccuuucucg

SEQ ID NO: 40266 - RNA, 19 nt, Artificial Sequence
  Description of Artificial Sequence: Synthetic oligonucleotide
  Sense strand starting at position 3720 of SEQ ID NO: 480
gagcgagaaaggugguuaa

SEQ ID NO: 40267 - RNA, 19 nt, Artificial Sequence
  Description of Artificial Sequence: Synthetic oligonucleotide
  Antisense strand to SEQ ID NO: 40266
uuaaccaccuuucucgcuc

SEQ ID NO: 40268 - RNA, 19 nt, Artificial Sequence
  Description of Artificial Sequence: Synthetic oligonucleotide
  Sense strand starting at position 3711 of SEQ ID NO: 480
ucauucugagagcgagaaa

SEQ ID NO: 40269 - RNA, 19 nt, Artificial Sequence
  Description of Artificial Sequence: Synthetic oligonucleotide
  Antisense strand to SEQ ID NO: 40268
uuucucgcucucagaauga

SEQ ID NO: 40270 - RNA, 19 nt, Artificial Sequence
  Description of Artificial Sequence: Synthetic oligonucleotide
  Sense strand starting at position 3662 of SEQ ID NO: 480
ccuagauugaugcagagcu

SEQ ID NO: 40271 - RNA, 19 nt, Artificial Sequence
  Description of Artificial Sequence: Synthetic oligonucleotide
  Antisense strand to SEQ ID NO: 40270
agcucugcaucaaucuagg

SEQ ID NO: 40272 - RNA, 19 nt, Artificial Sequence
  Description of Artificial Sequence: Synthetic oligonucleotide
  Sense strand starting at position 3654 of SEQ ID NO: 480
gcagccuuccuagauugau

SEQ ID NO: 40273 - RNA, 19 nt, Artificial Sequence
  Description of Artificial Sequence: Synthetic oligonucleotide
  Antisense strand to SEQ ID NO: 40272
aucaaucuaggaaggcugc

SEQ ID NO: 40274 - RNA, 19 nt, Artificial Sequence
  Description of Artificial Sequence: Synthetic oligonucleotide
  Sense strand starting at position 3631 of SEQ ID NO: 480
ugcucaaguagugaagaga

SEQ ID NO: 40275 - RNA, 19 nt, Artificial Sequence
  Description of Artificial Sequence: Synthetic oligonucleotide
  Antisense strand to SEQ ID NO: 40274
ucucuucacuacuugagca

SEQ ID NO: 40276 - RNA, 19 nt, Artificial Sequence
  Description of Artificial Sequence: Synthetic oligonucleotide
  Sense strand starting at position 3504 of SEQ ID NO: 480
aagguuacccuguaaguag

SEQ ID NO: 40277 - RNA, 19 nt, Artificial Sequence
  Description of Artificial Sequence: Synthetic oligonucleotide
  Antisense strand to SEQ ID NO: 40276
cuacuuacaggguaaccuu

SEQ ID NO: 40278 - RNA, 19 nt, Artificial Sequence
  Description of Artificial Sequence: Synthetic oligonucleotide
  Sense strand starting at position 3481 of SEQ ID NO: 480
ugacaaguuuaaguaacuu

SEQ ID NO: 40279 - RNA, 19 nt, Artificial Sequence
  Description of Artificial Sequence: Synthetic oligonucleotide
  Antisense strand to SEQ ID NO: 40278
aaguuacuuaaacuuguca

SEQ ID NO: 40280 - RNA, 19 nt, Artificial Sequence
  Description of Artificial Sequence: Synthetic oligonucleotide
  Sense strand starting at position 3478 of SEQ ID NO: 480
agcugacaaguuuaaguaa

SEQ ID NO: 40281 - RNA, 19 nt, Artificial Sequence
  Description of Artificial Sequence: Synthetic oligonucleotide
  Antisense strand to SEQ ID NO: 40280
uuacuuaaacuugucagcu

SEQ ID NO: 40282 - RNA, 19 nt, Artificial Sequence
  Description of Artificial Sequence: Synthetic oligonucleotide
  Sense strand starting at position 3193 of SEQ ID NO: 480
cugacaaguuuguuuguuu

SEQ ID NO: 40283 - RNA, 19 nt, Artificial Sequence
  Description of Artificial Sequence: Synthetic oligonucleotide
  Antisense strand to SEQ ID NO: 40282
aaacaaacaaacuugucag

SEQ ID NO: 40284 - RNA, 19 nt, Artificial Sequence
  Description of Artificial Sequence: Synthetic oligonucleotide
  Sense strand starting at position 3063 of SEQ ID NO: 480
gugugaaucccagaacuca

SEQ ID NO: 40285 - RNA, 19 nt, Artificial Sequence
  Description of Artificial Sequence: Synthetic oligonucleotide
  Antisense strand to SEQ ID NO: 40284
ugaguucugggauucacac

SEQ ID NO: 40286 - RNA, 19 nt, Artificial Sequence
  Description of Artificial Sequence: Synthetic oligonucleotide
  Sense strand starting at position 3052 of SEQ ID NO: 480
aguaguuuggagugugaau

SEQ ID NO: 40287 - RNA, 19 nt, Artificial Sequence
  Description of Artificial Sequence: Synthetic oligonucleotide
  Antisense strand to SEQ ID NO: 40286
auucacacuccaaacuacu

SEQ ID NO: 40288 - RNA, 19 nt, Artificial Sequence
  Description of Artificial Sequence: Synthetic oligonucleotide
  Sense strand starting at position 2939 of SEQ ID NO: 480
uggucuaaugucugauggu

SEQ ID NO: 40289 - RNA, 19 nt, Artificial Sequence
  Description of Artificial Sequence: Synthetic oligonucleotide
  Antisense strand to SEQ ID NO: 40288
accaucagacauuagacca

SEQ ID NO: 40290 - RNA, 19 nt, Artificial Sequence
  Description of Artificial Sequence: Synthetic oligonucleotide
  Sense strand starting at position 2867 of SEQ ID NO: 480
gaggcagauccaugacuag

SEQ ID NO: 40291 - RNA, 19 nt, Artificial Sequence
  Description of Artificial Sequence: Synthetic oligonucleotide
  Antisense strand to SEQ ID NO: 40290
cuagucauggaucugccuc

SEQ ID NO: 40292 - RNA, 19 nt, Artificial Sequence
  Description of Artificial Sequence: Synthetic oligonucleotide
  Sense strand starting at position 2732 of SEQ ID NO: 480
uacaguuaccgggaacauu

SEQ ID NO: 40293 - RNA, 19 nt, Artificial Sequence
  Description of Artificial Sequence: Synthetic oligonucleotide
  Antisense strand to SEQ ID NO: 40292
aauguucccgguaacugua

SEQ ID NO: 40294 - RNA, 19 nt, Artificial Sequence
  Description of Artificial Sequence: Synthetic oligonucleotide
  Sense strand starting at position 2717 of SEQ ID NO: 480
gucuuauuguuugcauaca

SEQ ID NO: 40295 - RNA, 19 nt, Artificial Sequence
  Description of Artificial Sequence: Synthetic oligonucleotide
  Antisense strand to SEQ ID NO: 40294
uguaugcaaacaauaagac

SEQ ID NO: 40296 - RNA, 19 nt, Artificial Sequence
  Description of Artificial Sequence: Synthetic oligonucleotide
  Sense strand starting at position 2708 of SEQ ID NO: 480
gcguuuguugucuuauugu

SEQ ID NO: 40297 - RNA, 19 nt, Artificial Sequence
  Description of Artificial Sequence: Synthetic oligonucleotide
  Antisense strand to SEQ ID NO: 40296
acaauaagacaacaaacgc

SEQ ID NO: 40298 - RNA, 19 nt, Artificial Sequence
  Description of Artificial Sequence: Synthetic oligonucleotide
  Sense strand starting at position 2598 of SEQ ID NO: 480
gcaguguggcguuaaugga

SEQ ID NO: 40299 - RNA, 19 nt, Artificial Sequence
  Description of Artificial Sequence: Synthetic oligonucleotide
  Antisense strand to SEQ ID NO: 40298
uccauuaacgccacacugc

SEQ ID NO: 40300 - RNA, 19 nt, Artificial Sequence
  Description of Artificial Sequence: Synthetic oligonucleotide
  Sense strand starting at position 2422 of SEQ ID NO: 480
gggagaaagcuccgggaaa

SEQ ID NO: 40301 - RNA, 19 nt, Artificial Sequence
  Description of Artificial Sequence: Synthetic oligonucleotide
  Antisense strand to SEQ ID NO: 40300
uuucccggagcuuucuccc

SEQ ID NO: 40302 - RNA, 19 nt, Artificial Sequence
  Description of Artificial Sequence: Synthetic oligonucleotide
  Sense strand starting at position 2403 of SEQ ID NO: 480
uaugaaucgccgggaagcu

SEQ ID NO: 40303 - RNA, 19 nt, Artificial Sequence
  Description of Artificial Sequence: Synthetic oligonucleotide
  Antisense strand to SEQ ID NO: 40302
agcuucccggcgauucaua

SEQ ID NO: 40304 - RNA, 19 nt, Artificial Sequence
  Description of Artificial Sequence: Synthetic oligonucleotide
  Sense strand starting at position 2400 of SEQ ID NO: 480
gaauaugaaucgccgggaa

SEQ ID NO: 40305 - RNA, 19 nt, Artificial Sequence
  Description of Artificial Sequence: Synthetic oligonucleotide
  Antisense strand to SEQ ID NO: 40304
uucccggcgauucauauuc

SEQ ID NO: 40306 - RNA, 19 nt, Artificial Sequence
  Description of Artificial Sequence: Synthetic oligonucleotide
  Sense strand starting at position 2388 of SEQ ID NO: 480
ggguaagcgccagaauaug

SEQ ID NO: 40307 - RNA, 19 nt, Artificial Sequence
  Description of Artificial Sequence: Synthetic oligonucleotide
  Antisense strand to SEQ ID NO: 40306
cauauucuggcgcuuaccc

SEQ ID NO: 40308 - RNA, 19 nt, Artificial Sequence
  Description of Artificial Sequence: Synthetic oligonucleotide
  Sense strand starting at position 2097 of SEQ ID NO: 480
ccguaacuggucggagaca

SEQ ID NO: 40309 - RNA, 19 nt, Artificial Sequence
  Description of Artificial Sequence: Synthetic oligonucleotide
  Antisense strand to SEQ ID NO: 40308
ugucuccgaccaguuacgg

SEQ ID NO: 40310 - RNA, 19 nt, Artificial Sequence
  Description of Artificial Sequence: Synthetic oligonucleotide
  Sense strand starting at position 2095 of SEQ ID NO: 480
uuccguaacuggucggaga

SEQ ID NO: 40311 - RNA, 19 nt, Artificial Sequence
  Description of Artificial Sequence: Synthetic oligonucleotide
  Antisense strand to SEQ ID NO: 40310
ucuccgaccaguuacggaa

SEQ ID NO: 40312 - RNA, 19 nt, Artificial Sequence
  Description of Artificial Sequence: Synthetic oligonucleotide
  Sense strand starting at position 1522 of SEQ ID NO: 480
agcauuaccuguucugaag

SEQ ID NO: 40313 - RNA, 19 nt, Artificial Sequence
  Description of Artificial Sequence: Synthetic oligonucleotide
  Antisense strand to SEQ ID NO: 40312
cuucagaacagguaaugcu

SEQ ID NO: 40314 - RNA, 19 nt, Artificial Sequence
  Description of Artificial Sequence: Synthetic oligonucleotide
  Sense strand starting at position 1483 of SEQ ID NO: 480
agcccuaucccucagguuu

SEQ ID NO: 40315 - RNA, 19 nt, Artificial Sequence
  Description of Artificial Sequence: Synthetic oligonucleotide
  Antisense strand to SEQ ID NO: 40314
aaaccugagggauagggcu

SEQ ID NO: 40316 - RNA, 19 nt, Artificial Sequence
  Description of Artificial Sequence: Synthetic oligonucleotide
  Sense strand starting at position 1354 of SEQ ID NO: 480
acggaaugauggcugcuua

SEQ ID NO: 40317 - RNA, 19 nt, Artificial Sequence
  Description of Artificial Sequence: Synthetic oligonucleotide
  Antisense strand to SEQ ID NO: 40316
uaagcagccaucauuccgu

SEQ ID NO: 40318 - RNA, 19 nt, Artificial Sequence
  Description of Artificial Sequence: Synthetic oligonucleotide
  Sense strand starting at position 1345 of SEQ ID NO: 480
guugcagaaacggaaugau

SEQ ID NO: 40319 - RNA, 19 nt, Artificial Sequence
  Description of Artificial Sequence: Synthetic oligonucleotide
  Antisense strand to SEQ ID NO: 40318
aucauuccguuucugcaac

SEQ ID NO: 40320 - RNA, 19 nt, Artificial Sequence
  Description of Artificial Sequence: Synthetic oligonucleotide
  Sense strand starting at position 1079 of SEQ ID NO: 480
ugaagccucuuaucacaga

SEQ ID NO: 40321 - RNA, 19 nt, Artificial Sequence
  Description of Artificial Sequence: Synthetic oligonucleotide
  Antisense strand to SEQ ID NO: 40320
ucugugauaagaggcuuca

SEQ ID NO: 40322 - RNA, 19 nt, Artificial Sequence
  Description of Artificial Sequence: Synthetic oligonucleotide
  Sense strand starting at position 1007 of SEQ ID NO: 480
ggagacaguuauuauacaa

SEQ ID NO: 40323 - RNA, 19 nt, Artificial Sequence
  Description of Artificial Sequence: Synthetic oligonucleotide
  Antisense strand to SEQ ID NO: 40322
uuguauaauaacugucucc

SEQ ID NO: 40324 - RNA, 19 nt, Artificial Sequence
  Description of Artificial Sequence: Synthetic oligonucleotide
  Sense strand starting at position 1006 of SEQ ID NO: 480
uggagacaguuauuauaca

SEQ ID NO: 40325 - RNA, 19 nt, Artificial Sequence
  Description of Artificial Sequence: Synthetic oligonucleotide
  Antisense strand to SEQ ID NO: 40324
uguauaauaacugucucca

SEQ ID NO: 40326 - RNA, 19 nt, Artificial Sequence
  Description of Artificial Sequence: Synthetic oligonucleotide
  Sense strand starting at position 1000 of SEQ ID NO: 480
ugggcauggagacaguuau

SEQ ID NO: 40327 - RNA, 19 nt, Artificial Sequence
  Description of Artificial Sequence: Synthetic oligonucleotide
  Antisense strand to SEQ ID NO: 40326
auaacugucuccaugccca

SEQ ID NO: 40328 - RNA, 19 nt, Artificial Sequence
  Description of Artificial Sequence: Synthetic oligonucleotide
  Sense strand starting at position 496 of SEQ ID NO: 480
gcuccacugaucuggagua

SEQ ID NO: 40329 - RNA, 19 nt, Artificial Sequence
  Description of Artificial Sequence: Synthetic oligonucleotide
  Antisense strand to SEQ ID NO: 40328
uacuccagaucaguggagc

SEQ ID NO: 40330 - RNA, 19 nt, Artificial Sequence
  Description of Artificial Sequence: Synthetic oligonucleotide
  Sense strand starting at position 376 of SEQ ID NO: 480
aagacucaccaggguugua

SEQ ID NO: 40331 - RNA, 19 nt, Artificial Sequence
  Description of Artificial Sequence: Synthetic oligonucleotide
  Antisense strand to SEQ ID NO: 40330
uacaacccuggugagucuu

SEQ ID NO: 40332 - RNA, 19 nt, Artificial Sequence
  Description of Artificial Sequence: Synthetic oligonucleotide
  Sense strand starting at position 341 of SEQ ID NO: 480
auauguaucaaggaguagu

SEQ ID NO: 40333 - RNA, 19 nt, Artificial Sequence
  Description of Artificial Sequence: Synthetic oligonucleotide
  Antisense strand to SEQ ID NO: 40332
acuacuccuugauacauau

SEQ ID NO: 40334 - RNA, 19 nt, Artificial Sequence
  Description of Artificial Sequence: Synthetic oligonucleotide
  Sense strand starting at position 325 of SEQ ID NO: 480
cugucugugugauuauaua

SEQ ID NO: 40335 - RNA, 19 nt, Artificial Sequence
  Description of Artificial Sequence: Synthetic oligonucleotide
  Antisense strand to SEQ ID NO: 40334
uauauaaucacacagacag

SEQ ID NO: 40336 - RNA, 19 nt, Artificial Sequence
  Description of Artificial Sequence: Synthetic oligonucleotide
  Sense strand starting at position 3864 of SEQ ID NO: 479
aagguuacccuguaaguag

SEQ ID NO: 40337 - RNA, 19 nt, Artificial Sequence
  Description of Artificial Sequence: Synthetic oligonucleotide
  Antisense strand to SEQ ID NO: 40336
cuacuuacaggguaaccuu

SEQ ID NO: 40338 - RNA, 19 nt, Artificial Sequence
  Description of Artificial Sequence: Synthetic oligonucleotide
  Sense strand starting at position 3841 of SEQ ID NO: 479
ugacaaguuuaaguaacuu

SEQ ID NO: 40339 - RNA, 19 nt, Artificial Sequence
  Description of Artificial Sequence: Synthetic oligonucleotide
  Antisense strand to SEQ ID NO: 40338
aaguuacuuaaacuuguca

SEQ ID NO: 40340 - RNA, 19 nt, Artificial Sequence
  Description of Artificial Sequence: Synthetic oligonucleotide
  Sense strand starting at position 3838 of SEQ ID NO: 479
agcugacaaguuuaaguaa

SEQ ID NO: 40341 - RNA, 19 nt, Artificial Sequence
  Description of Artificial Sequence: Synthetic oligonucleotide
  Antisense strand to SEQ ID NO: 40340
uuacuuaaacuugucagcu

SEQ ID NO: 40342 - RNA, 19 nt, Artificial Sequence
  Description of Artificial Sequence: Synthetic oligonucleotide
  Sense strand starting at position 3553 of SEQ ID NO: 479
cugacaaguuuguuuguuu

SEQ ID NO: 40343 - RNA, 19 nt, Artificial Sequence
  Description of Artificial Sequence: Synthetic oligonucleotide
  Antisense strand to SEQ ID NO: 40342
aaacaaacaaacuugucag

SEQ ID NO: 40344 - RNA, 19 nt, Artificial Sequence
  Description of Artificial Sequence: Synthetic oligonucleotide
  Sense strand starting at position 3552 of SEQ ID NO: 479
gcugacaaguuuguuuguu

SEQ ID NO: 40345 - RNA, 19 nt, Artificial Sequence
  Description of Artificial Sequence: Synthetic oligonucleotide
  Antisense strand to SEQ ID NO: 40344
aacaaacaaacuugucagc

SEQ ID NO: 40346 - RNA, 19 nt, Artificial Sequence
  Description of Artificial Sequence: Synthetic oligonucleotide
  Sense strand starting at position 3512 of SEQ ID NO: 479
gcauuuccauguuacucau

SEQ ID NO: 40347 - RNA, 19 nt, Artificial Sequence
  Description of Artificial Sequence: Synthetic oligonucleotide
  Antisense strand to SEQ ID NO: 40346
augaguaacauggaaaugc

SEQ ID NO: 40348 - RNA, 19 nt, Artificial Sequence
  Description of Artificial Sequence: Synthetic oligonucleotide
  Sense strand starting at position 3499 of SEQ ID NO: 479
agggucuagucaggcauuu

SEQ ID NO: 40349 - RNA, 19 nt, Artificial Sequence
  Description of Artificial Sequence: Synthetic oligonucleotide
  Antisense strand to SEQ ID NO: 40348
aaaugccugacuagacccu

SEQ ID NO: 40350 - RNA, 19 nt, Artificial Sequence
  Description of Artificial Sequence: Synthetic oligonucleotide
  Sense strand starting at position 3423 of SEQ ID NO: 479
gugugaaucccagaacuca

SEQ ID NO: 40351 - RNA, 19 nt, Artificial Sequence
  Description of Artificial Sequence: Synthetic oligonucleotide
  Antisense strand to SEQ ID NO: 40350
ugaguucugggauucacac

SEQ ID NO: 40352 - RNA, 19 nt, Artificial Sequence
  Description of Artificial Sequence: Synthetic oligonucleotide
  Sense strand starting at position 3412 of SEQ ID NO: 479
aguaguuuggagugugaau

SEQ ID NO: 40353 - RNA, 19 nt, Artificial Sequence
  Description of Artificial Sequence: Synthetic oligonucleotide
  Antisense strand to SEQ ID NO: 40352
auucacacuccaaacuacu

SEQ ID NO: 40354 - RNA, 19 nt, Artificial Sequence
  Description of Artificial Sequence: Synthetic oligonucleotide
  Sense strand starting at position 3346 of SEQ ID NO: 479
gagguaaacugauacaggu

SEQ ID NO: 40355 - RNA, 19 nt, Artificial Sequence
  Description of Artificial Sequence: Synthetic oligonucleotide
  Antisense strand to SEQ ID NO: 40354
accuguaucaguuuaccuc

SEQ ID NO: 40356 - RNA, 19 nt, Artificial Sequence
  Description of Artificial Sequence: Synthetic oligonucleotide
  Sense strand starting at position 3299 of SEQ ID NO: 479
uggucuaaugucugauggu

SEQ ID NO: 40357 - RNA, 19 nt, Artificial Sequence
  Description of Artificial Sequence: Synthetic oligonucleotide
  Antisense strand to SEQ ID NO: 40356
accaucagacauuagacca

SEQ ID NO: 40358 - RNA, 19 nt, Artificial Sequence
  Description of Artificial Sequence: Synthetic oligonucleotide
  Sense strand starting at position 3227 of SEQ ID NO: 479
gaggcagauccaugacuag

SEQ ID NO: 40359 - RNA, 19 nt, Artificial Sequence
  Description of Artificial Sequence: Synthetic oligonucleotide
  Antisense strand to SEQ ID NO: 40358
cuagucauggaucugccuc

SEQ ID NO: 40360 - RNA, 19 nt, Artificial Sequence
  Description of Artificial Sequence: Synthetic oligonucleotide
  Sense strand starting at position 3092 of SEQ ID NO: 479
uacaguuaccgggaacauu

SEQ ID NO: 40361 - RNA, 19 nt, Artificial Sequence
  Description of Artificial Sequence: Synthetic oligonucleotide
  Antisense strand to SEQ ID NO: 40360
aauguucccgguaacugua

SEQ ID NO: 40362 - RNA, 19 nt, Artificial Sequence
  Description of Artificial Sequence: Synthetic oligonucleotide
  Sense strand starting at position 3077 of SEQ ID NO: 479
gucuuauuguuugcauaca

SEQ ID NO: 40363 - RNA, 19 nt, Artificial Sequence
  Description of Artificial Sequence: Synthetic oligonucleotide
  Antisense strand to SEQ ID NO: 40362
uguaugcaaacaauaagac

SEQ ID NO: 40364 - RNA, 19 nt, Artificial Sequence
  Description of Artificial Sequence: Synthetic oligonucleotide
  Sense strand starting at position 3076 of SEQ ID NO: 479
ugucuuauuguuugcauac

SEQ ID NO: 40365 - RNA, 19 nt, Artificial Sequence
  Description of Artificial Sequence: Synthetic oligonucleotide
  Antisense strand to SEQ ID NO: 40364
guaugcaaacaauaagaca

SEQ ID NO: 40366 - RNA, 19 nt, Artificial Sequence
  Description of Artificial Sequence: Synthetic oligonucleotide
  Sense strand starting at position 3075 of SEQ ID NO: 479
uugucuuauuguuugcaua

SEQ ID NO: 40367 - RNA, 19 nt, Artificial Sequence
  Description of Artificial Sequence: Synthetic oligonucleotide
  Antisense strand to SEQ ID NO: 40366
uaugcaaacaauaagacaa

SEQ ID NO: 40368 - RNA, 19 nt, Artificial Sequence
  Description of Artificial Sequence: Synthetic oligonucleotide
  Sense strand starting at position 3074 of SEQ ID NO: 479
guugucuuauuguuugcau

SEQ ID NO: 40369 - RNA, 19 nt, Artificial Sequence
  Description of Artificial Sequence: Synthetic oligonucleotide
  Antisense strand to SEQ ID NO: 40368
augcaaacaauaagacaac

SEQ ID NO: 40370 - RNA, 19 nt, Artificial Sequence
  Description of Artificial Sequence: Synthetic oligonucleotide
  Sense strand starting at position 3068 of SEQ ID NO: 479
gcguuuguugucuuauugu

SEQ ID NO: 40371 - RNA, 19 nt, Artificial Sequence
  Description of Artificial Sequence: Synthetic oligonucleotide
  Antisense strand to SEQ ID NO: 40370
acaauaagacaacaaacgc

SEQ ID NO: 40372 - RNA, 19 nt, Artificial Sequence
  Description of Artificial Sequence: Synthetic oligonucleotide
  Sense strand starting at position 2958 of SEQ ID NO: 479
gcaguguggcguuaaugga

SEQ ID NO: 40373 - RNA, 19 nt, Artificial Sequence
  Description of Artificial Sequence: Synthetic oligonucleotide
  Antisense strand to SEQ ID NO: 40372
uccauuaacgccacacugc

SEQ ID NO: 40374 - RNA, 19 nt, Artificial Sequence
  Description of Artificial Sequence: Synthetic oligonucleotide
  Sense strand starting at position 2782 of SEQ ID NO: 479
gggagaaagcuccgggaaa

SEQ ID NO: 40375 - RNA, 19 nt, Artificial Sequence
  Description of Artificial Sequence: Synthetic oligonucleotide
  Antisense strand to SEQ ID NO: 40374
uuucccggagcuuucuccc

SEQ ID NO: 40376 - RNA, 19 nt, Artificial Sequence
  Description of Artificial Sequence: Synthetic oligonucleotide
  Sense strand starting at position 2763 of SEQ ID NO: 479
uaugaaucgccgggaagcu

SEQ ID NO: 40377 - RNA, 19 nt, Artificial Sequence
  Description of Artificial Sequence: Synthetic oligonucleotide
  Antisense strand to SEQ ID NO: 40376
agcuucccggcgauucaua

SEQ ID NO: 40378 - RNA, 19 nt, Artificial Sequence
  Description of Artificial Sequence: Synthetic oligonucleotide
  Sense strand starting at position 2760 of SEQ ID NO: 479
gaauaugaaucgccgggaa

SEQ ID NO: 40379 - RNA, 19 nt, Artificial Sequence
  Description of Artificial Sequence: Synthetic oligonucleotide
  Antisense strand to SEQ ID NO: 40378
uucccggcgauucauauuc

SEQ ID NO: 40380 - RNA, 19 nt, Artificial Sequence
  Description of Artificial Sequence: Synthetic oligonucleotide
  Sense strand starting at position 2748 of SEQ ID NO: 479
ggguaagcgccagaauaug

SEQ ID NO: 40381 - RNA, 19 nt, Artificial Sequence
  Description of Artificial Sequence: Synthetic oligonucleotide
  Antisense strand to SEQ ID NO: 40380
cauauucuggcgcuuaccc

SEQ ID NO: 40382 - RNA, 19 nt, Artificial Sequence
  Description of Artificial Sequence: Synthetic oligonucleotide
  Sense strand starting at position 2457 of SEQ ID NO: 479
ccguaacuggucggagaca

SEQ ID NO: 40383 - RNA, 19 nt, Artificial Sequence
  Description of Artificial Sequence: Synthetic oligonucleotide
  Antisense strand to SEQ ID NO: 40382
ugucuccgaccaguuacgg

SEQ ID NO: 40384 - RNA, 19 nt, Artificial Sequence
  Description of Artificial Sequence: Synthetic oligonucleotide
  Sense strand starting at position 2455 of SEQ ID NO: 479
uuccguaacuggucggaga

SEQ ID NO: 40385 - RNA, 19 nt, Artificial Sequence
  Description of Artificial Sequence: Synthetic oligonucleotide
  Antisense strand to SEQ ID NO: 40384
ucuccgaccaguuacggaa

SEQ ID NO: 40386 - RNA, 19 nt, Artificial Sequence
  Description of Artificial Sequence: Synthetic oligonucleotide
  Sense strand starting at position 1882 of SEQ ID NO: 479
agcauuaccuguucugaag

SEQ ID NO: 40387 - RNA, 19 nt, Artificial Sequence
  Description of Artificial Sequence: Synthetic oligonucleotide
  Antisense strand to SEQ ID NO: 40386
cuucagaacagguaaugcu

SEQ ID NO: 40388 - RNA, 19 nt, Artificial Sequence
  Description of Artificial Sequence: Synthetic oligonucleotide
  Sense strand starting at position 1843 of SEQ ID NO: 479
agcccuaucccucagguuu

SEQ ID NO: 40389 - RNA, 19 nt, Artificial Sequence
  Description of Artificial Sequence: Synthetic oligonucleotide
  Antisense strand to SEQ ID NO: 40388
aaaccugagggauagggcu

SEQ ID NO: 40390 - RNA, 19 nt, Artificial Sequence
  Description of Artificial Sequence: Synthetic oligonucleotide
  Sense strand starting at position 1714 of SEQ ID NO: 479
acggaaugauggcugcuua

SEQ ID NO: 40391 - RNA, 19 nt, Artificial Sequence
  Description of Artificial Sequence: Synthetic oligonucleotide
  Antisense strand to SEQ ID NO: 40390
uaagcagccaucauuccgu

SEQ ID NO: 40392 - RNA, 19 nt, Artificial Sequence
  Description of Artificial Sequence: Synthetic oligonucleotide
  Sense strand starting at position 1705 of SEQ ID NO: 479
guugcagaaacggaaugau

SEQ ID NO: 40393 - RNA, 19 nt, Artificial Sequence
  Description of Artificial Sequence: Synthetic oligonucleotide
  Antisense strand to SEQ ID NO: 40392
aucauuccguuucugcaac

SEQ ID NO: 40394 - RNA, 19 nt, Artificial Sequence
  Description of Artificial Sequence: Synthetic oligonucleotide
  Sense strand starting at position 1439 of SEQ ID NO: 479
ugaagccucuuaucacaga

SEQ ID NO: 40395 - RNA, 19 nt, Artificial Sequence
  Description of Artificial Sequence: Synthetic oligonucleotide
  Antisense strand to SEQ ID NO: 40394
ucugugauaagaggcuuca

SEQ ID NO: 40396 - RNA, 19 nt, Artificial Sequence
  Description of Artificial Sequence: Synthetic oligonucleotide
  Sense strand starting at position 1367 of SEQ ID NO: 479
ggagacaguuauuauacaa

SEQ ID NO: 40397 - RNA, 19 nt, Artificial Sequence
  Description of Artificial Sequence: Synthetic oligonucleotide
  Antisense strand to SEQ ID NO: 40396
uuguauaauaacugucucc

SEQ ID NO: 40398 - RNA, 19 nt, Artificial Sequence
  Description of Artificial Sequence: Synthetic oligonucleotide
  Sense strand starting at position 1366 of SEQ ID NO: 479
uggagacaguuauuauaca

SEQ ID NO: 40399 - RNA, 19 nt, Artificial Sequence
  Description of Artificial Sequence: Synthetic oligonucleotide
  Antisense strand to SEQ ID NO: 40398
uguauaauaacugucucca

SEQ ID NO: 40400 - RNA, 19 nt, Artificial Sequence
  Description of Artificial Sequence: Synthetic oligonucleotide
  Sense strand starting at position 1360 of SEQ ID NO: 479
ugggcauggagacaguuau

SEQ ID NO: 40401 - RNA, 19 nt, Artificial Sequence
  Description of Artificial Sequence: Synthetic oligonucleotide
  Antisense strand to SEQ ID NO: 40400
auaacugucuccaugccca

SEQ ID NO: 40402 - RNA, 19 nt, Artificial Sequence
  Description of Artificial Sequence: Synthetic oligonucleotide
  Sense strand starting at position 856 of SEQ ID NO: 479
gcuccacugaucuggagua

SEQ ID NO: 40403 - RNA, 19 nt, Artificial Sequence
  Description of Artificial Sequence: Synthetic oligonucleotide
  Antisense strand to SEQ ID NO: 40402
uacuccagaucaguggagc

SEQ ID NO: 40404 - RNA, 19 nt, Artificial Sequence
  Description of Artificial Sequence: Synthetic oligonucleotide
  Sense strand starting at position 736 of SEQ ID NO: 479
aagacucaccaggguugua

SEQ ID NO: 40405 - RNA, 19 nt, Artificial Sequence
  Description of Artificial Sequence: Synthetic oligonucleotide
  Antisense strand to SEQ ID NO: 40404
uacaacccuggugagucuu

SEQ ID NO: 40406 - RNA, 19 nt, Artificial Sequence
  Description of Artificial Sequence: Synthetic oligonucleotide
  Sense strand starting at position 701 of SEQ ID NO: 479
auauguaucaaggaguagu

SEQ ID NO: 40407 - RNA, 19 nt, Artificial Sequence
  Description of Artificial Sequence: Synthetic oligonucleotide
  Antisense strand to SEQ ID NO: 40406
acuacuccuugauacauau

SEQ ID NO: 40408 - RNA, 19 nt, Artificial Sequence
  Description of Artificial Sequence: Synthetic oligonucleotide
  Sense strand starting at position 685 of SEQ ID NO: 479
cugucugugugauuauaua

SEQ ID NO: 40409 - RNA, 19 nt, Artificial Sequence
  Description of Artificial Sequence: Synthetic oligonucleotide
  Antisense strand to SEQ ID NO: 40408
uauauaaucacacagacag

SEQ ID NO: 40410 - RNA, 19 nt, Artificial Sequence
  Description of Artificial Sequence: Synthetic oligonucleotide
  Sense strand starting at position 681 of SEQ ID NO: 479
ugcucugucugugugauua

SEQ ID NO: 40411 - RNA, 19 nt, Artificial Sequence
  Description of Artificial Sequence: Synthetic oligonucleotide
  Antisense strand to SEQ ID NO: 40410
uaaucacacagacagagca

SEQ ID NO: 40412 - RNA, 19 nt, Artificial Sequence
  Description of Artificial Sequence: Synthetic oligonucleotide
  Sense strand starting at position 680 of SEQ ID NO: 479
uugcucugucugugugauu

SEQ ID NO: 40413 - RNA, 19 nt, Artificial Sequence
  Description of Artificial Sequence: Synthetic oligonucleotide
  Antisense strand to SEQ ID NO: 40412
aaucacacagacagagcaa

SEQ ID NO: 40414 - RNA, 19 nt, Artificial Sequence
  Description of Artificial Sequence: Synthetic oligonucleotide
  Sense strand starting at position 679 of SEQ ID NO: 479
uuugcucugucugugugau

SEQ ID NO: 40415 - RNA, 19 nt, Artificial Sequence
  Description of Artificial Sequence: Synthetic oligonucleotide
  Antisense strand to SEQ ID NO: 40414
aucacacagacagagcaaa

SEQ ID NO: 40416 - RNA, 19 nt, Artificial Sequence
  Description of Artificial Sequence: Synthetic oligonucleotide
  Sense strand starting at position 20 of SEQ ID NO: 481
uguggaaugggcugggaau

SEQ ID NO: 40417 - RNA, 19 nt, Artificial Sequence
  Description of Artificial Sequence: Synthetic oligonucleotide
  Antisense strand to SEQ ID NO: 40416
auucccagcccauuccaca

SEQ ID NO: 40418 - RNA, 19 nt, Artificial Sequence
  Description of Artificial Sequence: Synthetic oligonucleotide
  Sense strand starting at position 21 of SEQ ID NO: 481
guggaaugggcugggaaua

SEQ ID NO: 40419 - RNA, 19 nt, Artificial Sequence
  Description of Artificial Sequence: Synthetic oligonucleotide
  Antisense strand to SEQ ID NO: 40418
uauucccagcccauuccac

SEQ ID NO: 40420 - RNA, 19 nt, Artificial Sequence
  Description of Artificial Sequence: Synthetic oligonucleotide
  Sense strand starting at position 290 of SEQ ID NO: 481
ugugauaggugguuugaag

SEQ ID NO: 40421 - RNA, 19 nt, Artificial Sequence
  Description of Artificial Sequence: Synthetic oligonucleotide
  Antisense strand to SEQ ID NO: 40420
cuucaaaccaccuaucaca

SEQ ID NO: 40422 - RNA, 19 nt, Artificial Sequence
  Description of Artificial Sequence: Synthetic oligonucleotide
  Sense strand starting at position 311 of SEQ ID NO: 481
agaugaaccugagaugaaa

SEQ ID NO: 40423 - RNA, 19 nt, Artificial Sequence
  Description of Artificial Sequence: Synthetic oligonucleotide
  Antisense strand to SEQ ID NO: 40422
uuucaucucagguucaucu

SEQ ID NO: 40424 - RNA, 19 nt, Artificial Sequence
  Description of Artificial Sequence: Synthetic oligonucleotide
  Sense strand starting at position 498 of SEQ ID NO: 481
ugucuuuaucaacaauguu

SEQ ID NO: 40425 - RNA, 19 nt, Artificial Sequence
  Description of Artificial Sequence: Synthetic oligonucleotide
  Antisense strand to SEQ ID NO: 40424
aacauuguugauaaagaca

SEQ ID NO: 40426 - RNA, 19 nt, Artificial Sequence
  Description of Artificial Sequence: Synthetic oligonucleotide
  Sense strand starting at position 501 of SEQ ID NO: 481
cuuuaucaacaauguugua

SEQ ID NO: 40427 - RNA, 19 nt, Artificial Sequence
  Description of Artificial Sequence: Synthetic oligonucleotide
  Antisense strand to SEQ ID NO: 40426
uacaacauuguugauaaag

SEQ ID NO: 40428 - RNA, 19 nt, Artificial Sequence
  Description of Artificial Sequence: Synthetic oligonucleotide
  Sense strand starting at position 528 of SEQ ID NO: 481
guugaacucaaaugugaga

SEQ ID NO: 40429 - RNA, 19 nt, Artificial Sequence
  Description of Artificial Sequence: Synthetic oligonucleotide
  Antisense strand to SEQ ID NO: 40428
ucucacauuugaguucaac

SEQ ID NO: 40430 - RNA, 19 nt, Artificial Sequence
  Description of Artificial Sequence: Synthetic oligonucleotide
  Sense strand starting at position 765 of SEQ ID NO: 481
gccuaaagacugcaguaau

SEQ ID NO: 40431 - RNA, 19 nt, Artificial Sequence
  Description of Artificial Sequence: Synthetic oligonucleotide
  Antisense strand to SEQ ID NO: 40430
auuacugcagucuuuaggc

SEQ ID NO: 40432 - RNA, 19 nt, Artificial Sequence
  Description of Artificial Sequence: Synthetic oligonucleotide
  Sense strand starting at position 785 of SEQ ID NO: 481
auuguaaucguccaugaua

SEQ ID NO: 40433 - RNA, 19 nt, Artificial Sequence
  Description of Artificial Sequence: Synthetic oligonucleotide
  Antisense strand to SEQ ID NO: 40432
uaucauggacgauuacaau

SEQ ID NO: 40434 - RNA, 19 nt, Artificial Sequence
  Description of Artificial Sequence: Synthetic oligonucleotide
  Sense strand starting at position 788 of SEQ ID NO: 481
guaaucguccaugauauug

SEQ ID NO: 40435 - RNA, 19 nt, Artificial Sequence
  Description of Artificial Sequence: Synthetic oligonucleotide
  Antisense strand to SEQ ID NO: 40434
caauaucauggacgauuac

SEQ ID NO: 40436 - RNA, 19 nt, Artificial Sequence
  Description of Artificial Sequence: Synthetic oligonucleotide
  Sense strand starting at position 799 of SEQ ID NO: 481
ugauauuguacguuagcgu

SEQ ID NO: 40437 - RNA, 19 nt, Artificial Sequence
  Description of Artificial Sequence: Synthetic oligonucleotide
  Antisense strand to SEQ ID NO: 40436
acgcuaacguacaauauca

SEQ ID NO: 40438 - RNA, 19 nt, Artificial Sequence
  Description of Artificial Sequence: Synthetic oligonucleotide
  Sense strand starting at position 1473 of SEQ ID NO: 481
cuccacuucccgggaagaa

SEQ ID NO: 40439 - RNA, 19 nt, Artificial Sequence
  Description of Artificial Sequence: Synthetic oligonucleotide
  Antisense strand to SEQ ID NO: 40438
uucuucccgggaaguggag

SEQ ID NO: 40440 - RNA, 19 nt, Artificial Sequence
  Description of Artificial Sequence: Synthetic oligonucleotide
  Sense strand starting at position 1724 of SEQ ID NO: 481
cggagacgugcgucacgaa

SEQ ID NO: 40441 - RNA, 19 nt, Artificial Sequence
  Description of Artificial Sequence: Synthetic oligonucleotide
  Antisense strand to SEQ ID NO: 40440
uucgugacgcacgucuccg

SEQ ID NO: 40442 - RNA, 19 nt, Artificial Sequence
  Description of Artificial Sequence: Synthetic oligonucleotide
  Sense strand starting at position 1925 of SEQ ID NO: 481
cggugucuccaggaagagu

SEQ ID NO: 40443 - RNA, 19 nt, Artificial Sequence
  Description of Artificial Sequence: Synthetic oligonucleotide
  Antisense strand to SEQ ID NO: 40442
acucuuccuggagacaccg

SEQ ID NO: 40444 - RNA, 19 nt, Artificial Sequence
  Description of Artificial Sequence: Synthetic oligonucleotide
  Sense strand starting at position 2111 of SEQ ID NO: 481
gccugcccucuuuaaggau

SEQ ID NO: 40445 - RNA, 19 nt, Artificial Sequence
  Description of Artificial Sequence: Synthetic oligonucleotide
  Antisense strand to SEQ ID NO: 40444
auccuuaaagagggcaggc

SEQ ID NO: 40446 - RNA, 19 nt, Artificial Sequence
  Description of Artificial Sequence: Synthetic oligonucleotide
  Sense strand starting at position 2118 of SEQ ID NO: 481
cucuuuaaggauugugaau

SEQ ID NO: 40447 - RNA, 19 nt, Artificial Sequence
  Description of Artificial Sequence: Synthetic oligonucleotide
  Antisense strand to SEQ ID NO: 40446
auucacaauccuuaaagag

SEQ ID NO: 40448 - RNA, 19 nt, Artificial Sequence
  Description of Artificial Sequence: Synthetic oligonucleotide
  Sense strand starting at position 2137 of SEQ ID NO: 481
uuguccuaaacgggauauu

SEQ ID NO: 40449 - RNA, 19 nt, Artificial Sequence
  Description of Artificial Sequence: Synthetic oligonucleotide
  Antisense strand to SEQ ID NO: 40448
aauaucccguuuaggacaa

SEQ ID NO: 40450 - RNA, 19 nt, Artificial Sequence
  Description of Artificial Sequence: Synthetic oligonucleotide
  Sense strand starting at position 2283 of SEQ ID NO: 481
ggagaugaauaucuggcau

SEQ ID NO: 40451 - RNA, 19 nt, Artificial Sequence
  Description of Artificial Sequence: Synthetic oligonucleotide
  Antisense strand to SEQ ID NO: 40450
augccagauauucaucucc

SEQ ID NO: 40452 - RNA, 19 nt, Artificial Sequence
  Description of Artificial Sequence: Synthetic oligonucleotide
  Sense strand starting at position 2446 of SEQ ID NO: 481
acauauaggugcuuggaga

SEQ ID NO: 40453 - RNA, 19 nt, Artificial Sequence
  Description of Artificial Sequence: Synthetic oligonucleotide
  Antisense strand to SEQ ID NO: 40452
ucuccaagcaccuauaugu

SEQ ID NO: 40454 - RNA, 19 nt, Artificial Sequence
  Description of Artificial Sequence: Synthetic oligonucleotide
  Sense strand starting at position 2447 of SEQ ID NO: 481
cauauaggugcuuggagau

SEQ ID NO: 40455 - RNA, 19 nt, Artificial Sequence
  Description of Artificial Sequence: Synthetic oligonucleotide
  Antisense strand to SEQ ID NO: 40454
aucuccaagcaccuauaug

SEQ ID NO: 40456 - RNA, 19 nt, Artificial Sequence
  Description of Artificial Sequence: Synthetic oligonucleotide
  Sense strand starting at position 2470 of SEQ ID NO: 481
guuuauucgauuuggccaa

SEQ ID NO: 40457 - RNA, 19 nt, Artificial Sequence
  Description of Artificial Sequence: Synthetic oligonucleotide
  Antisense strand to SEQ ID NO: 40456
uuggccaaaucgaauaaac

SEQ ID NO: 40458 - RNA, 19 nt, Artificial Sequence
  Description of Artificial Sequence: Synthetic oligonucleotide
  Sense strand starting at position 2503 of SEQ ID NO: 481
agggcaagaucucucaaau

SEQ ID NO: 40459 - RNA, 19 nt, Artificial Sequence
  Description of Artificial Sequence: Synthetic oligonucleotide
  Antisense strand to SEQ ID NO: 40458
auuugagagaucuugcccu

SEQ ID NO: 40460 - RNA, 19 nt, Artificial Sequence
  Description of Artificial Sequence: Synthetic oligonucleotide
  Sense strand starting at position 2539 of SEQ ID NO: 481
agaagcagagaguguuuau

SEQ ID NO: 40461 - RNA, 19 nt, Artificial Sequence
  Description of Artificial Sequence: Synthetic oligonucleotide
  Antisense strand to SEQ ID NO: 40460
auaaacacucucugcuucu

SEQ ID NO: 40462 - RNA, 19 nt, Artificial Sequence
  Description of Artificial Sequence: Synthetic oligonucleotide
  Sense strand starting at position 2550 of SEQ ID NO: 481
guguuuaugcggccagcga

SEQ ID NO: 40463 - RNA, 19 nt, Artificial Sequence
  Description of Artificial Sequence: Synthetic oligonucleotide
  Antisense strand to SEQ ID NO: 40462
ucgcuggccgcauaaacac

SEQ ID NO: 40464 - RNA, 19 nt, Artificial Sequence
  Description of Artificial Sequence: Synthetic oligonucleotide
  Sense strand starting at position 2643 of SEQ ID NO: 481
aucagacuucugggcgaca

SEQ ID NO: 40465 - RNA, 19 nt, Artificial Sequence
  Description of Artificial Sequence: Synthetic oligonucleotide
  Antisense strand to SEQ ID NO: 40464
ugucgcccagaagucugau

SEQ ID NO: 40466 - RNA, 19 nt, Artificial Sequence
  Description of Artificial Sequence: Synthetic oligonucleotide
  Sense strand starting at position 2645 of SEQ ID NO: 481
cagacuucugggcgacaga

SEQ ID NO: 40467 - RNA, 19 nt, Artificial Sequence
  Description of Artificial Sequence: Synthetic oligonucleotide
  Antisense strand to SEQ ID NO: 40466
ucugucgcccagaagucug

SEQ ID NO: 40468 - RNA, 19 nt, Artificial Sequence
  Description of Artificial Sequence: Synthetic oligonucleotide
  Sense strand starting at position 2658 of SEQ ID NO: 481
gacagaagcuggccucaaa

SEQ ID NO: 40469 - RNA, 19 nt, Artificial Sequence
  Description of Artificial Sequence: Synthetic oligonucleotide
  Antisense strand to SEQ ID NO: 40468
uuugaggccagcuucuguc

SEQ ID NO: 40470 - RNA, 19 nt, Artificial Sequence
  Description of Artificial Sequence: Synthetic oligonucleotide
  Sense strand starting at position 2661 of SEQ ID NO: 481
agaagcuggccucaaagua

SEQ ID NO: 40471 - RNA, 19 nt, Artificial Sequence
  Description of Artificial Sequence: Synthetic oligonucleotide
  Antisense strand to SEQ ID NO: 40470
uacuuugaggccagcuucu

SEQ ID NO: 40472 - RNA, 19 nt, Artificial Sequence
  Description of Artificial Sequence: Synthetic oligonucleotide
  Sense strand starting at position 2686 of SEQ ID NO: 481
aggacuuauuccuccugca

SEQ ID NO: 40473 - RNA, 19 nt, Artificial Sequence
  Description of Artificial Sequence: Synthetic oligonucleotide
  Antisense strand to SEQ ID NO: 40472
ugcaggaggaauaaguccu

SEQ ID NO: 40474 - RNA, 19 nt, Artificial Sequence
  Description of Artificial Sequence: Synthetic oligonucleotide
  Sense strand starting at position 2710 of SEQ ID NO: 481
uuucguaacccugaaguua

SEQ ID NO: 40475 - RNA, 19 nt, Artificial Sequence
  Description of Artificial Sequence: Synthetic oligonucleotide
  Antisense strand to SEQ ID NO: 40474
uaacuucaggguuacgaaa

SEQ ID NO: 40476 - RNA, 19 nt, Artificial Sequence
  Description of Artificial Sequence: Synthetic oligonucleotide
  Sense strand starting at position 2759 of SEQ ID NO: 481
acaucagcaguuuaugauu

SEQ ID NO: 40477 - RNA, 19 nt, Artificial Sequence
  Description of Artificial Sequence: Synthetic oligonucleotide
  Antisense strand to SEQ ID NO: 40476
aaucauaaacugcugaugu

SEQ ID NO: 40478 - RNA, 19 nt, Artificial Sequence
  Description of Artificial Sequence: Synthetic oligonucleotide
  Sense strand starting at position 2774 of SEQ ID NO: 481
gauuauguuguaggaacaa

SEQ ID NO: 40479 - RNA, 19 nt, Artificial Sequence
  Description of Artificial Sequence: Synthetic oligonucleotide
  Antisense strand to SEQ ID NO: 40478
uuguuccuacaacauaauc

SEQ ID NO: 40480 - RNA, 19 nt, Artificial Sequence
  Description of Artificial Sequence: Synthetic oligonucleotide
  Sense strand starting at position 3352 of SEQ ID NO: 481
caaauaagugaggaugugu

SEQ ID NO: 40481 - RNA, 19 nt, Artificial Sequence
  Description of Artificial Sequence: Synthetic oligonucleotide
  Antisense strand to SEQ ID NO: 40480
acacauccucacuuauuug

SEQ ID NO: 40482 - RNA, 19 nt, Artificial Sequence
  Description of Artificial Sequence: Synthetic oligonucleotide
  Sense strand starting at position 3708 of SEQ ID NO: 481
uuccaaagcgguuauucua

SEQ ID NO: 40483 - RNA, 19 nt, Artificial Sequence
  Description of Artificial Sequence: Synthetic oligonucleotide
  Antisense strand to SEQ ID NO: 40482
uagaauaaccgcuuuggaa

SEQ ID NO: 40484 - RNA, 19 nt, Artificial Sequence
  Description of Artificial Sequence: Synthetic oligonucleotide
  Sense strand starting at position 3784 of SEQ ID NO: 481
auuuguuauugcccgucaa

SEQ ID NO: 40485 - RNA, 19 nt, Artificial Sequence
  Description of Artificial Sequence: Synthetic oligonucleotide
  Antisense strand to SEQ ID NO: 40484
uugacgggcaauaacaaau

SEQ ID NO: 40486 - RNA, 19 nt, Artificial Sequence
  Description of Artificial Sequence: Synthetic oligonucleotide
  Sense strand starting at position 3843 of SEQ ID NO: 481
gcacaaagggauuguuagu

SEQ ID NO: 40487 - RNA, 19 nt, Artificial Sequence
  Description of Artificial Sequence: Synthetic oligonucleotide
  Antisense strand to SEQ ID NO: 40486
acuaacaaucccuuugugc

SEQ ID NO: 40488 - RNA, 19 nt, Artificial Sequence
  Description of Artificial Sequence: Synthetic oligonucleotide
  Sense strand starting at position 3848 of SEQ ID NO: 481
aagggauuguuagucuacu

SEQ ID NO: 40489 - RNA, 19 nt, Artificial Sequence
  Description of Artificial Sequence: Synthetic oligonucleotide
  Antisense strand to SEQ ID NO: 40488
aguagacuaacaaucccuu

SEQ ID NO: 40490 - RNA, 19 nt, Artificial Sequence
  Description of Artificial Sequence: Synthetic oligonucleotide
  Sense strand starting at position 3849 of SEQ ID NO: 481
agggauuguuagucuacua

SEQ ID NO: 40491 - RNA, 19 nt, Artificial Sequence
  Description of Artificial Sequence: Synthetic oligonucleotide
  Antisense strand to SEQ ID NO: 40490
uaguagacuaacaaucccu

SEQ ID NO: 40492 - RNA, 19 nt, Artificial Sequence
  Description of Artificial Sequence: Synthetic oligonucleotide
  Sense strand starting at position 3909 of SEQ ID NO: 481
cuguuaagacauuaagcuu

SEQ ID NO: 40493 - RNA, 19 nt, Artificial Sequence
  Description of Artificial Sequence: Synthetic oligonucleotide
  Antisense strand to SEQ ID NO: 40492
aagcuuaaugucuuaacag

SEQ ID NO: 40494 - RNA, 19 nt, Artificial Sequence
  Description of Artificial Sequence: Synthetic oligonucleotide
  Sense strand starting at position 3973 of SEQ ID NO: 481
gcuccauguaagggacauu

SEQ ID NO: 40495 - RNA, 19 nt, Artificial Sequence
  Description of Artificial Sequence: Synthetic oligonucleotide
  Antisense strand to SEQ ID NO: 40494
aaugucccuuacauggagc

SEQ ID NO: 40496 - RNA, 19 nt, Artificial Sequence
  Description of Artificial Sequence: Synthetic oligonucleotide
  Sense strand starting at position 106 of SEQ ID NO: 482
augcaucuuauguauggga

SEQ ID NO: 40497 - RNA, 19 nt, Artificial Sequence
  Description of Artificial Sequence: Synthetic oligonucleotide
  Antisense strand to SEQ ID NO: 40496
ucccauacauaagaugcau

SEQ ID NO: 40498 - RNA, 19 nt, Artificial Sequence
  Description of Artificial Sequence: Synthetic oligonucleotide
  Sense strand starting at position 108 of SEQ ID NO: 482
gcaucuuauguaugggaag

SEQ ID NO: 40499 - RNA, 19 nt, Artificial Sequence
  Description of Artificial Sequence: Synthetic oligonucleotide
  Antisense strand to SEQ ID NO: 40498
cuucccauacauaagaugc

SEQ ID NO: 40500 - RNA, 19 nt, Artificial Sequence
  Description of Artificial Sequence: Synthetic oligonucleotide
  Sense strand starting at position 149 of SEQ ID NO: 482
agguuccugagucaggauu

SEQ ID NO: 40501 - RNA, 19 nt, Artificial Sequence
  Description of Artificial Sequence: Synthetic oligonucleotide
  Antisense strand to SEQ ID NO: 40500
aauccugacucaggaaccu

SEQ ID NO: 40502 - RNA, 19 nt, Artificial Sequence
  Description of Artificial Sequence: Synthetic oligonucleotide
  Sense strand starting at position 246 of SEQ ID NO: 482
auuguaauugaaggugaua

SEQ ID NO: 40503 - RNA, 19 nt, Artificial Sequence
  Description of Artificial Sequence: Synthetic oligonucleotide
  Antisense strand to SEQ ID NO: 40502
uaucaccuucaauuacaau

SEQ ID NO: 40504 - RNA, 19 nt, Artificial Sequence
  Description of Artificial Sequence: Synthetic oligonucleotide
  Sense strand starting at position 248 of SEQ ID NO: 482
uguaauugaaggugauauu

SEQ ID NO: 40505 - RNA, 19 nt, Artificial Sequence
  Description of Artificial Sequence: Synthetic oligonucleotide
  Antisense strand to SEQ ID NO: 40504
aauaucaccuucaauuaca

SEQ ID NO: 40506 - RNA, 19 nt, Artificial Sequence
  Description of Artificial Sequence: Synthetic oligonucleotide
  Sense strand starting at position 262 of SEQ ID NO: 482
auauuaguacucuguggga

SEQ ID NO: 40507 - RNA, 19 nt, Artificial Sequence
  Description of Artificial Sequence: Synthetic oligonucleotide
  Antisense strand to SEQ ID NO: 40506
ucccacagaguacuaauau

SEQ ID NO: 40508 - RNA, 19 nt, Artificial Sequence
  Description of Artificial Sequence: Synthetic oligonucleotide
  Sense strand starting at position 266 of SEQ ID NO: 482
uaguacucugugggauuau

SEQ ID NO: 40509 - RNA, 19 nt, Artificial Sequence
  Description of Artificial Sequence: Synthetic oligonucleotide
  Antisense strand to SEQ ID NO: 40508
auaaucccacagaguacua

SEQ ID NO: 40510 - RNA, 19 nt, Artificial Sequence
  Description of Artificial Sequence: Synthetic oligonucleotide
  Sense strand starting at position 325 of SEQ ID NO: 482
agaugccuggcuuauauua

SEQ ID NO: 40511 - RNA, 19 nt, Artificial Sequence
  Description of Artificial Sequence: Synthetic oligonucleotide
  Antisense strand to SEQ ID NO: 40510
uaauauaagccaggcaucu

SEQ ID NO: 40512 - RNA, 19 nt, Artificial Sequence
  Description of Artificial Sequence: Synthetic oligonucleotide
  Sense strand starting at position 494 of SEQ ID NO: 482
gaaguuaggccacacaauu

SEQ ID NO: 40513 - RNA, 19 nt, Artificial Sequence
  Description of Artificial Sequence: Synthetic oligonucleotide
  Antisense strand to SEQ ID NO: 40512
aauuguguggccuaacuuc

SEQ ID NO: 40514 - RNA, 19 nt, Artificial Sequence
  Description of Artificial Sequence: Synthetic oligonucleotide
  Sense strand starting at position 563 of SEQ ID NO: 482
augggcuuucuagaaugua

SEQ ID NO: 40515 - RNA, 19 nt, Artificial Sequence
  Description of Artificial Sequence: Synthetic oligonucleotide
  Antisense strand to SEQ ID NO: 40514
uacauucuagaaagcccau

SEQ ID NO: 40516 - RNA, 19 nt, Artificial Sequence
  Description of Artificial Sequence: Synthetic oligonucleotide
  Sense strand starting at position 648 of SEQ ID NO: 482
aguaaauacaucugugagu

SEQ ID NO: 40517 - RNA, 19 nt, Artificial Sequence
  Description of Artificial Sequence: Synthetic oligonucleotide
  Antisense strand to SEQ ID NO: 40516
acucacagauguauuuacu

SEQ ID NO: 40518 - RNA, 19 nt, Artificial Sequence
  Description of Artificial Sequence: Synthetic oligonucleotide
  Sense strand starting at position 693 of SEQ ID NO: 482
gcagaaauuccagggacac

SEQ ID NO: 40519 - RNA, 19 nt, Artificial Sequence
  Description of Artificial Sequence: Synthetic oligonucleotide
  Antisense strand to SEQ ID NO: 40518
gugucccuggaauuucugc

SEQ ID NO: 40520 - RNA, 19 nt, Artificial Sequence
  Description of Artificial Sequence: Synthetic oligonucleotide
  Sense strand starting at position 934 of SEQ ID NO: 482
augaguugguuccuaauca

SEQ ID NO: 40521 - RNA, 19 nt, Artificial Sequence
  Description of Artificial Sequence: Synthetic oligonucleotide
  Antisense strand to SEQ ID NO: 40520
ugauuaggaaccaacucau

SEQ ID NO: 40522 - RNA, 19 nt, Artificial Sequence
  Description of Artificial Sequence: Synthetic oligonucleotide
  Sense strand starting at position 1012 of SEQ ID NO: 482
ggguuugguugcaugagca

SEQ ID NO: 40523 - RNA, 19 nt, Artificial Sequence
  Description of Artificial Sequence: Synthetic oligonucleotide
  Antisense strand to SEQ ID NO: 40522
ugcucaugcaaccaaaccc

SEQ ID NO: 40524 - RNA, 19 nt, Artificial Sequence
  Description of Artificial Sequence: Synthetic oligonucleotide
  Sense strand starting at position 1059 of SEQ ID NO: 482
agcagaagccuuggagaga

SEQ ID NO: 40525 - RNA, 19 nt, Artificial Sequence
  Description of Artificial Sequence: Synthetic oligonucleotide
  Antisense strand to SEQ ID NO: 40524
ucucuccaaggcuucugcu

SEQ ID NO: 40526 - RNA, 19 nt, Artificial Sequence
  Description of Artificial Sequence: Synthetic oligonucleotide
  Sense strand starting at position 1718 of SEQ ID NO: 482
acaguuucccagugagagg

SEQ ID NO: 40527 - RNA, 19 nt, Artificial Sequence
  Description of Artificial Sequence: Synthetic oligonucleotide
  Antisense strand to SEQ ID NO: 40526
ccucucacugggaaacugu

SEQ ID NO: 40528 - RNA, 19 nt, Artificial Sequence
  Description of Artificial Sequence: Synthetic oligonucleotide
  Sense strand starting at position 1765 of SEQ ID NO: 482
aggagaaagccugauugcu

SEQ ID NO: 40529 - RNA, 19 nt, Artificial Sequence
  Description of Artificial Sequence: Synthetic oligonucleotide
  Antisense strand to SEQ ID NO: 40528
agcaaucaggcuuucuccu

SEQ ID NO: 40530 - RNA, 19 nt, Artificial Sequence
  Description of Artificial Sequence: Synthetic oligonucleotide
  Sense strand starting at position 1786 of SEQ ID NO: 482
aggagagcauguuucccaa

SEQ ID NO: 40531 - RNA, 19 nt, Artificial Sequence
  Description of Artificial Sequence: Synthetic oligonucleotide
  Antisense strand to SEQ ID NO: 40530
uugggaaacaugcucuccu

SEQ ID NO: 40532 - RNA, 19 nt, Artificial Sequence
  Description of Artificial Sequence: Synthetic oligonucleotide
  Sense strand starting at position 1848 of SEQ ID NO: 482
augcauaguccauaccuga

SEQ ID NO: 40533 - RNA, 19 nt, Artificial Sequence
  Description of Artificial Sequence: Synthetic oligonucleotide
  Antisense strand to SEQ ID NO: 40532
ucagguauggacuaugcau

SEQ ID NO: 40534 - RNA, 19 nt, Artificial Sequence
  Description of Artificial Sequence: Synthetic oligonucleotide
  Sense strand starting at position 1958 of SEQ ID NO: 482
gaaacaaguggcuguuaag

SEQ ID NO: 40535 - RNA, 19 nt, Artificial Sequence
  Description of Artificial Sequence: Synthetic oligonucleotide
  Antisense strand to SEQ ID NO: 40534
cuuaacagccacuuguuuc

SEQ ID NO: 40536 - RNA, 19 nt, Artificial Sequence
  Description of Artificial Sequence: Synthetic oligonucleotide
  Sense strand starting at position 1982 of SEQ ID NO: 482
ugaggaguaccaggucagu

SEQ ID NO: 40537 - RNA, 19 nt, Artificial Sequence
  Description of Artificial Sequence: Synthetic oligonucleotide
  Antisense strand to SEQ ID NO: 40536
acugaccugguacuccuca

SEQ ID NO: 40538 - RNA, 19 nt, Artificial Sequence
  Description of Artificial Sequence: Synthetic oligonucleotide
  Sense strand starting at position 2145 of SEQ ID NO: 482
acugccuuggucuaauuaa

SEQ ID NO: 40539 - RNA, 19 nt, Artificial Sequence
  Description of Artificial Sequence: Synthetic oligonucleotide
  Antisense strand to SEQ ID NO: 40538
uuaauuagaccaaggcagu

SEQ ID NO: 40540 - RNA, 19 nt, Artificial Sequence
  Description of Artificial Sequence: Synthetic oligonucleotide
  Sense strand starting at position 2214 of SEQ ID NO: 482
agggaagcuucuuuccauu

SEQ ID NO: 40541 - RNA, 19 nt, Artificial Sequence
  Description of Artificial Sequence: Synthetic oligonucleotide
  Antisense strand to SEQ ID NO: 40540
aauggaaagaagcuucccu

SEQ ID NO: 40542 - RNA, 19 nt, Artificial Sequence
  Description of Artificial Sequence: Synthetic oligonucleotide
  Sense strand starting at position 2287 of SEQ ID NO: 482
ucucuaugagccuacaaag

SEQ ID NO: 40543 - RNA, 19 nt, Artificial Sequence
  Description of Artificial Sequence: Synthetic oligonucleotide
  Antisense strand to SEQ ID NO: 40542
cuuuguaggcucauagaga

SEQ ID NO: 40544 - RNA, 19 nt, Artificial Sequence
  Description of Artificial Sequence: Synthetic oligonucleotide
  Sense strand starting at position 2659 of SEQ ID NO: 482
aucuauugagguuaacuuu

SEQ ID NO: 40545 - RNA, 19 nt, Artificial Sequence
  Description of Artificial Sequence: Synthetic oligonucleotide
  Antisense strand to SEQ ID NO: 40544
aaaguuaaccucaauagau

SEQ ID NO: 40546 - RNA, 19 nt, Artificial Sequence
  Description of Artificial Sequence: Synthetic oligonucleotide
  Sense strand starting at position 2716 of SEQ ID NO: 482
uggugauguuacuuagaac

SEQ ID NO: 40547 - RNA, 19 nt, Artificial Sequence
  Description of Artificial Sequence: Synthetic oligonucleotide
  Antisense strand to SEQ ID NO: 40546
guucuaaguaacaucacca

SEQ ID NO: 40548 - RNA, 19 nt, Artificial Sequence
  Description of Artificial Sequence: Synthetic oligonucleotide
  Sense strand starting at position 2717 of SEQ ID NO: 482
ggugauguuacuuagaacu

SEQ ID NO: 40549 - RNA, 19 nt, Artificial Sequence
  Description of Artificial Sequence: Synthetic oligonucleotide
  Antisense strand to SEQ ID NO: 40548
aguucuaaguaacaucacc

SEQ ID NO: 40550 - RNA, 19 nt, Artificial Sequence
  Description of Artificial Sequence: Synthetic oligonucleotide
  Sense strand starting at position 2784 of SEQ ID NO: 482
acaccuaguguaugagaca

SEQ ID NO: 40551 - RNA, 19 nt, Artificial Sequence
  Description of Artificial Sequence: Synthetic oligonucleotide
  Antisense strand to SEQ ID NO: 40550
ugucucauacacuaggugu

SEQ ID NO: 40552 - RNA, 19 nt, Artificial Sequence
  Description of Artificial Sequence: Synthetic oligonucleotide
  Sense strand starting at position 2976 of SEQ ID NO: 482
guggcuaaucagcaaauau

SEQ ID NO: 40553 - RNA, 19 nt, Artificial Sequence
  Description of Artificial Sequence: Synthetic oligonucleotide
  Antisense strand to SEQ ID NO: 40552
auauuugcugauuagccac

SEQ ID NO: 40554 - RNA, 19 nt, Artificial Sequence
  Description of Artificial Sequence: Synthetic oligonucleotide
  Sense strand starting at position 2986 of SEQ ID NO: 482
agcaaauauuuauggaaag

SEQ ID NO: 40555 - RNA, 19 nt, Artificial Sequence
  Description of Artificial Sequence: Synthetic oligonucleotide
  Antisense strand to SEQ ID NO: 40554
cuuuccauaaauauuugcu

SEQ ID NO: 40556 - RNA, 19 nt, Artificial Sequence
  Description of Artificial Sequence: Synthetic oligonucleotide
  Sense strand starting at position 2998 of SEQ ID NO: 482
uggaaagcuugcuccauuu

SEQ ID NO: 40557 - RNA, 19 nt, Artificial Sequence
  Description of Artificial Sequence: Synthetic oligonucleotide
  Antisense strand to SEQ ID NO: 40556
aaauggagcaagcuuucca

SEQ ID NO: 40558 - RNA, 19 nt, Artificial Sequence
  Description of Artificial Sequence: Synthetic oligonucleotide
  Sense strand starting at position 3025 of SEQ ID NO: 482
gggcuaaggcccuaggaau

SEQ ID NO: 40559 - RNA, 19 nt, Artificial Sequence
  Description of Artificial Sequence: Synthetic oligonucleotide
  Antisense strand to SEQ ID NO: 40558
auuccuagggccuuagccc

SEQ ID NO: 40560 - RNA, 19 nt, Artificial Sequence
  Description of Artificial Sequence: Synthetic oligonucleotide
  Sense strand starting at position 3406 of SEQ ID NO: 482
auccucaaugcaugaagaa

SEQ ID NO: 40561 - RNA, 19 nt, Artificial Sequence
  Description of Artificial Sequence: Synthetic oligonucleotide
  Antisense strand to SEQ ID NO: 40560
uucuucaugcauugaggau

SEQ ID NO: 40562 - RNA, 19 nt, Artificial Sequence
  Description of Artificial Sequence: Synthetic oligonucleotide
  Sense strand starting at position 3485 of SEQ ID NO: 482
uggcacuuugcagauaaua

SEQ ID NO: 40563 - RNA, 19 nt, Artificial Sequence
  Description of Artificial Sequence: Synthetic oligonucleotide
  Antisense strand to SEQ ID NO: 40562
uauuaucugcaaagugcca

SEQ ID NO: 40564 - RNA, 19 nt, Artificial Sequence
  Description of Artificial Sequence: Synthetic oligonucleotide
  Sense strand starting at position 3561 of SEQ ID NO: 482
cuuauagaucagcaugcaa

SEQ ID NO: 40565 - RNA, 19 nt, Artificial Sequence
  Description of Artificial Sequence: Synthetic oligonucleotide
  Antisense strand to SEQ ID NO: 40564
uugcaugcugaucuauaag

SEQ ID NO: 40566 - RNA, 19 nt, Artificial Sequence
  Description of Artificial Sequence: Synthetic oligonucleotide
  Sense strand starting at position 3627 of SEQ ID NO: 482
gguugaagagacuggugua

SEQ ID NO: 40567 - RNA, 19 nt, Artificial Sequence
  Description of Artificial Sequence: Synthetic oligonucleotide
  Antisense strand to SEQ ID NO: 40566
uacaccagucucuucaacc

SEQ ID NO: 40568 - RNA, 19 nt, Artificial Sequence
  Description of Artificial Sequence: Synthetic oligonucleotide
  Sense strand starting at position 3628 of SEQ ID NO: 482
guugaagagacugguguau

SEQ ID NO: 40569 - RNA, 19 nt, Artificial Sequence
  Description of Artificial Sequence: Synthetic oligonucleotide
  Antisense strand to SEQ ID NO: 40568
auacaccagucucuucaac

SEQ ID NO: 40570 - RNA, 19 nt, Artificial Sequence
  Description of Artificial Sequence: Synthetic oligonucleotide
  Sense strand starting at position 3746 of SEQ ID NO: 482
uguguuuggagagaucugu

SEQ ID NO: 40571 - RNA, 19 nt, Artificial Sequence
  Description of Artificial Sequence: Synthetic oligonucleotide
  Antisense strand to SEQ ID NO: 40570
acagaucucuccaaacaca

SEQ ID NO: 40572 - RNA, 19 nt, Artificial Sequence
  Description of Artificial Sequence: Synthetic oligonucleotide
  Sense strand starting at position 3750 of SEQ ID NO: 482
uuuggagagaucugucuac

SEQ ID NO: 40573 - RNA, 19 nt, Artificial Sequence
  Description of Artificial Sequence: Synthetic oligonucleotide
  Antisense strand to SEQ ID NO: 40572
guagacagaucucuccaaa

SEQ ID NO: 40574 - RNA, 19 nt, Artificial Sequence
  Description of Artificial Sequence: Synthetic oligonucleotide
  Sense strand starting at position 3917 of SEQ ID NO: 482
gggugaaguuggagaacaa

SEQ ID NO: 40575 - RNA, 19 nt, Artificial Sequence
  Description of Artificial Sequence: Synthetic oligonucleotide
  Antisense strand to SEQ ID NO: 40574
uuguucuccaacuucaccc

SEQ ID NO: 40576 - RNA, 19 nt, Artificial Sequence
  Description of Artificial Sequence: Synthetic oligonucleotide
  Sense strand starting at position 3339 of SEQ ID NO: 483
ugagguugcaugugagacu

SEQ ID NO: 40577 - RNA, 19 nt, Artificial Sequence
  Description of Artificial Sequence: Synthetic oligonucleotide
  Antisense strand to SEQ ID NO: 40576
agucucacaugcaaccuca

SEQ ID NO: 40578 - RNA, 19 nt, Artificial Sequence
  Description of Artificial Sequence: Synthetic oligonucleotide
  Sense strand starting at position 2798 of SEQ ID NO: 483
acaguaucgugugugcaua

SEQ ID NO: 40579 - RNA, 19 nt, Artificial Sequence
  Description of Artificial Sequence: Synthetic oligonucleotide
  Antisense strand to SEQ ID NO: 40578
uaugcacacacgauacugu

SEQ ID NO: 40580 - RNA, 19 nt, Artificial Sequence
  Description of Artificial Sequence: Synthetic oligonucleotide
  Sense strand starting at position 2797 of SEQ ID NO: 483
aacaguaucgugugugcau

SEQ ID NO: 40581 - RNA, 19 nt, Artificial Sequence
  Description of Artificial Sequence: Synthetic oligonucleotide
  Antisense strand to SEQ ID NO: 40580
augcacacacgauacuguu

SEQ ID NO: 40582 - RNA, 19 nt, Artificial Sequence
  Description of Artificial Sequence: Synthetic oligonucleotide
  Sense strand starting at position 2755 of SEQ ID NO: 483
ugauaauauugguacucau

SEQ ID NO: 40583 - RNA, 19 nt, Artificial Sequence
  Description of Artificial Sequence: Synthetic oligonucleotide
  Antisense strand to SEQ ID NO: 40582
augaguaccaauauuauca

SEQ ID NO: 40584 - RNA, 19 nt, Artificial Sequence
  Description of Artificial Sequence: Synthetic oligonucleotide
  Sense strand starting at position 2754 of SEQ ID NO: 483
gugauaauauugguacuca

SEQ ID NO: 40585 - RNA, 19 nt, Artificial Sequence
  Description of Artificial Sequence: Synthetic oligonucleotide
  Antisense strand to SEQ ID NO: 40584
ugaguaccaauauuaucac

SEQ ID NO: 40586 - RNA, 19 nt, Artificial Sequence
  Description of Artificial Sequence: Synthetic oligonucleotide
  Sense strand starting at position 2752 of SEQ ID NO: 483
augugauaauauugguacu

SEQ ID NO: 40587 - RNA, 19 nt, Artificial Sequence
  Description of Artificial Sequence: Synthetic oligonucleotide
  Antisense strand to SEQ ID NO: 40586
aguaccaauauuaucacau

SEQ ID NO: 40588 - RNA, 19 nt, Artificial Sequence
  Description of Artificial Sequence: Synthetic oligonucleotide
  Sense strand starting at position 2744 of SEQ ID NO: 483
uacguaagaugugauaaua

SEQ ID NO: 40589 - RNA, 19 nt, Artificial Sequence
  Description of Artificial Sequence: Synthetic oligonucleotide
  Antisense strand to SEQ ID NO: 40588
uauuaucacaucuuacgua

SEQ ID NO: 40590 - RNA, 19 nt, Artificial Sequence
  Description of Artificial Sequence: Synthetic oligonucleotide
  Sense strand starting at position 2743 of SEQ ID NO: 483
uuacguaagaugugauaau

SEQ ID NO: 40591 - RNA, 19 nt, Artificial Sequence
  Description of Artificial Sequence: Synthetic oligonucleotide
  Antisense strand to SEQ ID NO: 40590
auuaucacaucuuacguaa

SEQ ID NO: 40592 - RNA, 19 nt, Artificial Sequence
  Description of Artificial Sequence: Synthetic oligonucleotide
  Sense strand starting at position 2741 of SEQ ID NO: 483
ucuuacguaagaugugaua

SEQ ID NO: 40593 - RNA, 19 nt, Artificial Sequence
  Description of Artificial Sequence: Synthetic oligonucleotide
  Antisense strand to SEQ ID NO: 40592
uaucacaucuuacguaaga

SEQ ID NO: 40594 - RNA, 19 nt, Artificial Sequence
  Description of Artificial Sequence: Synthetic oligonucleotide
  Sense strand starting at position 2739 of SEQ ID NO: 483
ccucuuacguaagauguga

SEQ ID NO: 40595 - RNA, 19 nt, Artificial Sequence
  Description of Artificial Sequence: Synthetic oligonucleotide
  Antisense strand to SEQ ID NO: 40594
ucacaucuuacguaagagg

SEQ ID NO: 40596 - RNA, 19 nt, Artificial Sequence
  Description of Artificial Sequence: Synthetic oligonucleotide
  Sense strand starting at position 2736 of SEQ ID NO: 483
uguccucuuacguaagaug

SEQ ID NO: 40597 - RNA, 19 nt, Artificial Sequence
  Description of Artificial Sequence: Synthetic oligonucleotide
  Antisense strand to SEQ ID NO: 40596
caucuuacguaagaggaca

SEQ ID NO: 40598 - RNA, 19 nt, Artificial Sequence
  Description of Artificial Sequence: Synthetic oligonucleotide
  Sense strand starting at position 2735 of SEQ ID NO: 483
guguccucuuacguaagau

SEQ ID NO: 40599 - RNA, 19 nt, Artificial Sequence
  Description of Artificial Sequence: Synthetic oligonucleotide
  Antisense strand to SEQ ID NO: 40598
aucuuacguaagaggacac

SEQ ID NO: 40600 - RNA, 19 nt, Artificial Sequence
  Description of Artificial Sequence: Synthetic oligonucleotide
  Sense strand starting at position 2734 of SEQ ID NO: 483
aguguccucuuacguaaga

SEQ ID NO: 40601 - RNA, 19 nt, Artificial Sequence
  Description of Artificial Sequence: Synthetic oligonucleotide
  Antisense strand to SEQ ID NO: 40600
ucuuacguaagaggacacu

SEQ ID NO: 40602 - RNA, 19 nt, Artificial Sequence
  Description of Artificial Sequence: Synthetic oligonucleotide
  Sense strand starting at position 2727 of SEQ ID NO: 483
gagacucaguguccucuua

SEQ ID NO: 40603 - RNA, 19 nt, Artificial Sequence
  Description of Artificial Sequence: Synthetic oligonucleotide
  Antisense strand to SEQ ID NO: 40602
uaagaggacacugagucuc

SEQ ID NO: 40604 - RNA, 19 nt, Artificial Sequence
  Description of Artificial Sequence: Synthetic oligonucleotide
  Sense strand starting at position 2640 of SEQ ID NO: 483
ggcacuuauugggaagcuu

SEQ ID NO: 40605 - RNA, 19 nt, Artificial Sequence
  Description of Artificial Sequence: Synthetic oligonucleotide
  Antisense strand to SEQ ID NO: 40604
aagcuucccaauaagugcc

SEQ ID NO: 40606 - RNA, 19 nt, Artificial Sequence
  Description of Artificial Sequence: Synthetic oligonucleotide
  Sense strand starting at position 2597 of SEQ ID NO: 483
gugguagagccucgaacua

SEQ ID NO: 40607 - RNA, 19 nt, Artificial Sequence
  Description of Artificial Sequence: Synthetic oligonucleotide
  Antisense strand to SEQ ID NO: 40606
uaguucgaggcucuaccac

SEQ ID NO: 40608 - RNA, 19 nt, Artificial Sequence
  Description of Artificial Sequence: Synthetic oligonucleotide
  Sense strand starting at position 2568 of SEQ ID NO: 483
gcggcauuccuaggucuga

SEQ ID NO: 40609 - RNA, 19 nt, Artificial Sequence
  Description of Artificial Sequence: Synthetic oligonucleotide
  Antisense strand to SEQ ID NO: 40608
ucagaccuaggaaugccgc

SEQ ID NO: 40610 - RNA, 19 nt, Artificial Sequence
  Description of Artificial Sequence: Synthetic oligonucleotide
  Sense strand starting at position 2434 of SEQ ID NO: 483
gcaugcugggaguauguuu

SEQ ID NO: 40611 - RNA, 19 nt, Artificial Sequence
  Description of Artificial Sequence: Synthetic oligonucleotide
  Antisense strand to SEQ ID NO: 40610
aaacauacucccagcaugc

SEQ ID NO: 40612 - RNA, 19 nt, Artificial Sequence
  Description of Artificial Sequence: Synthetic oligonucleotide
  Sense strand starting at position 2411 of SEQ ID NO: 483
agcuaagaaugagaggauu

SEQ ID NO: 40613 - RNA, 19 nt, Artificial Sequence
  Description of Artificial Sequence: Synthetic oligonucleotide
  Antisense strand to SEQ ID NO: 40612
aauccucucauucuuagcu

SEQ ID NO: 40614 - RNA, 19 nt, Artificial Sequence
  Description of Artificial Sequence: Synthetic oligonucleotide
  Sense strand starting at position 2400 of SEQ ID NO: 483
gucacaugguuagcuaaga

SEQ ID NO: 40615 - RNA, 19 nt, Artificial Sequence
  Description of Artificial Sequence: Synthetic oligonucleotide
  Antisense strand to SEQ ID NO: 40614
ucuuagcuaaccaugugac

SEQ ID NO: 40616 - RNA, 19 nt, Artificial Sequence
  Description of Artificial Sequence: Synthetic oligonucleotide
  Sense strand starting at position 2398 of SEQ ID NO: 483
gagucacaugguuagcuaa

SEQ ID NO: 40617 - RNA, 19 nt, Artificial Sequence
  Description of Artificial Sequence: Synthetic oligonucleotide
  Antisense strand to SEQ ID NO: 40616
uuagcuaaccaugugacuc

SEQ ID NO: 40618 - RNA, 19 nt, Artificial Sequence
  Description of Artificial Sequence: Synthetic oligonucleotide
  Sense strand starting at position 2397 of SEQ ID NO: 483
ggagucacaugguuagcua

SEQ ID NO: 40619 - RNA, 19 nt, Artificial Sequence
  Description of Artificial Sequence: Synthetic oligonucleotide
  Antisense strand to SEQ ID NO: 40618
uagcuaaccaugugacucc

SEQ ID NO: 40620 - RNA, 19 nt, Artificial Sequence
  Description of Artificial Sequence: Synthetic oligonucleotide
  Sense strand starting at position 2394 of SEQ ID NO: 483
acgggagucacaugguuag

SEQ ID NO: 40621 - RNA, 19 nt, Artificial Sequence
  Description of Artificial Sequence: Synthetic oligonucleotide
  Antisense strand to SEQ ID NO: 40620
cuaaccaugugacucccgu

SEQ ID NO: 40622 - RNA, 19 nt, Artificial Sequence
  Description of Artificial Sequence: Synthetic oligonucleotide
  Sense strand starting at position 2376 of SEQ ID NO: 483
ccaucuuucuggcccagaa

SEQ ID NO: 40623 - RNA, 19 nt, Artificial Sequence
  Description of Artificial Sequence: Synthetic oligonucleotide
  Antisense strand to SEQ ID NO: 40622
uucugggccagaaagaugg

SEQ ID NO: 40624 - RNA, 19 nt, Artificial Sequence
  Description of Artificial Sequence: Synthetic oligonucleotide
  Sense strand starting at position 2362 of SEQ ID NO: 483
cuaaguauuugugaccauc

SEQ ID NO: 40625 - RNA, 19 nt, Artificial Sequence
  Description of Artificial Sequence: Synthetic oligonucleotide
  Antisense strand to SEQ ID NO: 40624
gauggucacaaauacuuag

SEQ ID NO: 40626 - RNA, 19 nt, Artificial Sequence
  Description of Artificial Sequence: Synthetic oligonucleotide
  Sense strand starting at position 2351 of SEQ ID NO: 483
aggccagaguccuaaguau

SEQ ID NO: 40627 - RNA, 19 nt, Artificial Sequence
  Description of Artificial Sequence: Synthetic oligonucleotide
  Antisense strand to SEQ ID NO: 40626
auacuuaggacucuggccu

SEQ ID NO: 40628 - RNA, 19 nt, Artificial Sequence
  Description of Artificial Sequence: Synthetic oligonucleotide
  Sense strand starting at position 1408 of SEQ ID NO: 483
gagugaagccugggaguua

SEQ ID NO: 40629 - RNA, 19 nt, Artificial Sequence
  Description of Artificial Sequence: Synthetic oligonucleotide
  Antisense strand to SEQ ID NO: 40628
uaacucccaggcuucacuc

SEQ ID NO: 40630 - RNA, 19 nt, Artificial Sequence
  Description of Artificial Sequence: Synthetic oligonucleotide
  Sense strand starting at position 1407 of SEQ ID NO: 483
ggagugaagccugggaguu

SEQ ID NO: 40631 - RNA, 19 nt, Artificial Sequence
  Description of Artificial Sequence: Synthetic oligonucleotide
  Antisense strand to SEQ ID NO: 40630
aacucccaggcuucacucc

SEQ ID NO: 40632 - RNA, 19 nt, Artificial Sequence
  Description of Artificial Sequence: Synthetic oligonucleotide
  Sense strand starting at position 1279 of SEQ ID NO: 483
ucuccagugucugugggaa

SEQ ID NO: 40633 - RNA, 19 nt, Artificial Sequence
  Description of Artificial Sequence: Synthetic oligonucleotide
  Antisense strand to SEQ ID NO: 40632
uucccacagacacuggaga

SEQ ID NO: 40634 - RNA, 19 nt, Artificial Sequence
  Description of Artificial Sequence: Synthetic oligonucleotide
  Sense strand starting at position 1071 of SEQ ID NO: 483
cauggugacugcucaggaa

SEQ ID NO: 40635 - RNA, 19 nt, Artificial Sequence
  Description of Artificial Sequence: Synthetic oligonucleotide
  Antisense strand to SEQ ID NO: 40634
uuccugagcagucaccaug

SEQ ID NO: 40636 - RNA, 19 nt, Artificial Sequence
  Description of Artificial Sequence: Synthetic oligonucleotide
  Sense strand starting at position 1058 of SEQ ID NO: 483
cagucaugaucaucauggu

SEQ ID NO: 40637 - RNA, 19 nt, Artificial Sequence
  Description of Artificial Sequence: Synthetic oligonucleotide
  Antisense strand to SEQ ID NO: 40636
accaugaugaucaugacug

SEQ ID NO: 40638 - RNA, 19 nt, Artificial Sequence
  Description of Artificial Sequence: Synthetic oligonucleotide
  Sense strand starting at position 1052 of SEQ ID NO: 483
gaguuacagucaugaucau

SEQ ID NO: 40639 - RNA, 19 nt, Artificial Sequence
  Description of Artificial Sequence: Synthetic oligonucleotide
  Antisense strand to SEQ ID NO: 40638
augaucaugacuguaacuc

SEQ ID NO: 40640 - RNA, 19 nt, Artificial Sequence
  Description of Artificial Sequence: Synthetic oligonucleotide
  Sense strand starting at position 1013 of SEQ ID NO: 483
auggguucuucugucauaa

SEQ ID NO: 40641 - RNA, 19 nt, Artificial Sequence
  Description of Artificial Sequence: Synthetic oligonucleotide
  Antisense strand to SEQ ID NO: 40640
uuaugacagaagaacccau

SEQ ID NO: 40642 - RNA, 19 nt, Artificial Sequence
  Description of Artificial Sequence: Synthetic oligonucleotide
  Sense strand starting at position 959 of SEQ ID NO: 483
cggaauaagucuggacaaa

SEQ ID NO: 40643 - RNA, 19 nt, Artificial Sequence
  Description of Artificial Sequence: Synthetic oligonucleotide
  Antisense strand to SEQ ID NO: 40642
uuuguccagacuuauuccg

SEQ ID NO: 40644 - RNA, 19 nt, Artificial Sequence
  Description of Artificial Sequence: Synthetic oligonucleotide
  Sense strand starting at position 958 of SEQ ID NO: 483
gcggaauaagucuggacaa

SEQ ID NO: 40645 - RNA, 19 nt, Artificial Sequence
  Description of Artificial Sequence: Synthetic oligonucleotide
  Antisense strand to SEQ ID NO: 40644
uuguccagacuuauuccgc

SEQ ID NO: 40646 - RNA, 19 nt, Artificial Sequence
  Description of Artificial Sequence: Synthetic oligonucleotide
  Sense strand starting at position 664 of SEQ ID NO: 483
gagugugccuuucccagau

SEQ ID NO: 40647 - RNA, 19 nt, Artificial Sequence
  Description of Artificial Sequence: Synthetic oligonucleotide
  Antisense strand to SEQ ID NO: 40646
aucugggaaaggcacacuc

SEQ ID NO: 40648 - RNA, 19 nt, Artificial Sequence
  Description of Artificial Sequence: Synthetic oligonucleotide
  Sense strand starting at position 468 of SEQ ID NO: 483
cccuucuacccugggagaa

SEQ ID NO: 40649 - RNA, 19 nt, Artificial Sequence
  Description of Artificial Sequence: Synthetic oligonucleotide
  Antisense strand to SEQ ID NO: 40648
uucucccaggguagaaggg

SEQ ID NO: 40650 - RNA, 19 nt, Artificial Sequence
  Description of Artificial Sequence: Synthetic oligonucleotide
  Sense strand starting at position 6 of SEQ ID NO: 483
cacuuugggagucgagaua

SEQ ID NO: 40651 - RNA, 19 nt, Artificial Sequence
  Description of Artificial Sequence: Synthetic oligonucleotide
  Antisense strand to SEQ ID NO: 40650
uaucucgacucccaaagug

SEQ ID NO: 40652 - RNA, 19 nt, Artificial Sequence
  Description of Artificial Sequence: Synthetic oligonucleotide
  Sense strand starting at position 229 of SEQ ID NO: 484
auuuaaguucuuggcagua

SEQ ID NO: 40653 - RNA, 19 nt, Artificial Sequence
  Description of Artificial Sequence: Synthetic oligonucleotide
  Antisense strand to SEQ ID NO: 40652
uacugccaagaacuuaaau

SEQ ID NO: 40654 - RNA, 19 nt, Artificial Sequence
  Description of Artificial Sequence: Synthetic oligonucleotide
  Sense strand starting at position 234 of SEQ ID NO: 484
aguucuuggcaguaacaac

SEQ ID NO: 40655 - RNA, 19 nt, Artificial Sequence
  Description of Artificial Sequence: Synthetic oligonucleotide
  Antisense strand to SEQ ID NO: 40654
guuguuacugccaagaacu

SEQ ID NO: 40656 - RNA, 19 nt, Artificial Sequence
  Description of Artificial Sequence: Synthetic oligonucleotide
  Sense strand starting at position 398 of SEQ ID NO: 484
ccagcaguucuaugacaug

SEQ ID NO: 40657 - RNA, 19 nt, Artificial Sequence
  Description of Artificial Sequence: Synthetic oligonucleotide
  Antisense strand to SEQ ID NO: 40656
caugucauagaacugcugg

SEQ ID NO: 40658 - RNA, 19 nt, Artificial Sequence
  Description of Artificial Sequence: Synthetic oligonucleotide
  Sense strand starting at position 471 of SEQ ID NO: 484
acugaagagcccugugaau

SEQ ID NO: 40659 - RNA, 19 nt, Artificial Sequence
  Description of Artificial Sequence: Synthetic oligonucleotide
  Antisense strand to SEQ ID NO: 40658
auucacagggcucuucagu

SEQ ID NO: 40660 - RNA, 19 nt, Artificial Sequence
  Description of Artificial Sequence: Synthetic oligonucleotide
  Sense strand starting at position 473 of SEQ ID NO: 484
ugaagagcccugugaaugu

SEQ ID NO: 40661 - RNA, 19 nt, Artificial Sequence
  Description of Artificial Sequence: Synthetic oligonucleotide
  Antisense strand to SEQ ID NO: 40660
acauucacagggcucuuca

SEQ ID NO: 40662 - RNA, 19 nt, Artificial Sequence
  Description of Artificial Sequence: Synthetic oligonucleotide
  Sense strand starting at position 646 of SEQ ID NO: 484
ccaagaucuguccaacuug

SEQ ID NO: 40663 - RNA, 19 nt, Artificial Sequence
  Description of Artificial Sequence: Synthetic oligonucleotide
  Antisense strand to SEQ ID NO: 40662
caaguuggacagaucuugg

SEQ ID NO: 40664 - RNA, 19 nt, Artificial Sequence
  Description of Artificial Sequence: Synthetic oligonucleotide
  Sense strand starting at position 831 of SEQ ID NO: 484
gugggaaccaugcagugua

SEQ ID NO: 40665 - RNA, 19 nt, Artificial Sequence
  Description of Artificial Sequence: Synthetic oligonucleotide
  Antisense strand to SEQ ID NO: 40664
uacacugcaugguucccac

SEQ ID NO: 40666 - RNA, 19 nt, Artificial Sequence
  Description of Artificial Sequence: Synthetic oligonucleotide
  Sense strand starting at position 1118 of SEQ ID NO: 484
caaaguucccaccgaagga

SEQ ID NO: 40667 - RNA, 19 nt, Artificial Sequence
  Description of Artificial Sequence: Synthetic oligonucleotide
  Antisense strand to SEQ ID NO: 40666
uccuucggugggaacuuug

SEQ ID NO: 40668 - RNA, 19 nt, Artificial Sequence
  Description of Artificial Sequence: Synthetic oligonucleotide
  Sense strand starting at position 1363 of SEQ ID NO: 484
augagaaucucauugucuu

SEQ ID NO: 40669 - RNA, 19 nt, Artificial Sequence
  Description of Artificial Sequence: Synthetic oligonucleotide
  Antisense strand to SEQ ID NO: 40668
aagacaaugagauucucau

SEQ ID NO: 40670 - RNA, 19 nt, Artificial Sequence
  Description of Artificial Sequence: Synthetic oligonucleotide
  Sense strand starting at position 1364 of SEQ ID NO: 484
ugagaaucucauugucuug

SEQ ID NO: 40671 - RNA, 19 nt, Artificial Sequence
  Description of Artificial Sequence: Synthetic oligonucleotide
  Antisense strand to SEQ ID NO: 40670
caagacaaugagauucuca

SEQ ID NO: 40672 - RNA, 19 nt, Artificial Sequence
  Description of Artificial Sequence: Synthetic oligonucleotide
  Sense strand starting at position 1386 of SEQ ID NO: 484
cuugguggcauacgagaaa

SEQ ID NO: 40673 - RNA, 19 nt, Artificial Sequence
  Description of Artificial Sequence: Synthetic oligonucleotide
  Antisense strand to SEQ ID NO: 40672
uuucucguaugccaccaag

SEQ ID NO: 40674 - RNA, 19 nt, Artificial Sequence
  Description of Artificial Sequence: Synthetic oligonucleotide
  Sense strand starting at position 1423 of SEQ ID NO: 484
gaggacaguuccguguaga

SEQ ID NO: 40675 - RNA, 19 nt, Artificial Sequence
  Description of Artificial Sequence: Synthetic oligonucleotide
  Antisense strand to SEQ ID NO: 40674
ucuacacggaacuguccuc

SEQ ID NO: 40676 - RNA, 19 nt, Artificial Sequence
  Description of Artificial Sequence: Synthetic oligonucleotide
  Sense strand starting at position 1424 of SEQ ID NO: 484
aggacaguuccguguagaa

SEQ ID NO: 40677 - RNA, 19 nt, Artificial Sequence
  Description of Artificial Sequence: Synthetic oligonucleotide
  Antisense strand to SEQ ID NO: 40676
uucuacacggaacuguccu

SEQ ID NO: 40678 - RNA, 19 nt, Artificial Sequence
  Description of Artificial Sequence: Synthetic oligonucleotide
  Sense strand starting at position 1482 of SEQ ID NO: 484
cggugcuuugagggauaca

SEQ ID NO: 40679 - RNA, 19 nt, Artificial Sequence
  Description of Artificial Sequence: Synthetic oligonucleotide
  Antisense strand to SEQ ID NO: 40678
uguaucccucaaagcaccg

SEQ ID NO: 40680 - RNA, 19 nt, Artificial Sequence
  Description of Artificial Sequence: Synthetic oligonucleotide
  Sense strand starting at position 1500 of SEQ ID NO: 484
auaggaaguauccgacucu

SEQ ID NO: 40681 - RNA, 19 nt, Artificial Sequence
  Description of Artificial Sequence: Synthetic oligonucleotide
  Antisense strand to SEQ ID NO: 40680
agagucggauacuuccuau

SEQ ID NO: 40682 - RNA, 19 nt, Artificial Sequence
  Description of Artificial Sequence: Synthetic oligonucleotide
  Sense strand starting at position 1507 of SEQ ID NO: 484
guauccgacucuuugggaa

SEQ ID NO: 40683 - RNA, 19 nt, Artificial Sequence
  Description of Artificial Sequence: Synthetic oligonucleotide
  Antisense strand to SEQ ID NO: 40682
uucccaaagagucggauac

SEQ ID NO: 40684 - RNA, 19 nt, Artificial Sequence
  Description of Artificial Sequence: Synthetic oligonucleotide
  Sense strand starting at position 1544 of SEQ ID NO: 484
acaugucugugagccagaa

SEQ ID NO: 40685 - RNA, 19 nt, Artificial Sequence
  Description of Artificial Sequence: Synthetic oligonucleotide
  Antisense strand to SEQ ID NO: 40684
uucuggcucacagacaugu

SEQ ID NO: 40686 - RNA, 19 nt, Artificial Sequence
  Description of Artificial Sequence: Synthetic oligonucleotide
  Sense strand starting at position 1569 of SEQ ID NO: 484
gcaaaugugagagguuucu

SEQ ID NO: 40687 - RNA, 19 nt, Artificial Sequence
  Description of Artificial Sequence: Synthetic oligonucleotide
  Antisense strand to SEQ ID NO: 40686
agaaaccucucacauuugc

SEQ ID NO: 40688 - RNA, 19 nt, Artificial Sequence
  Description of Artificial Sequence: Synthetic oligonucleotide
  Sense strand starting at position 1575 of SEQ ID NO: 484
gugagagguuucucagauc

SEQ ID NO: 40689 - RNA, 19 nt, Artificial Sequence
  Description of Artificial Sequence: Synthetic oligonucleotide
  Antisense strand to SEQ ID NO: 40688
gaucugagaaaccucucac

SEQ ID NO: 40690 - RNA, 19 nt, Artificial Sequence
  Description of Artificial Sequence: Synthetic oligonucleotide
  Sense strand starting at position 1609 of SEQ ID NO: 484
cucacuuacguauagaauu

SEQ ID NO: 40691 - RNA, 19 nt, Artificial Sequence
  Description of Artificial Sequence: Synthetic oligonucleotide
  Antisense strand to SEQ ID NO: 40690
aauucuauacguaagugag

SEQ ID NO: 40692 - RNA, 19 nt, Artificial Sequence
  Description of Artificial Sequence: Synthetic oligonucleotide
  Sense strand starting at position 1951 of SEQ ID NO: 484
auguauucggcugaaaguu

SEQ ID NO: 40693 - RNA, 19 nt, Artificial Sequence
  Description of Artificial Sequence: Synthetic oligonucleotide
  Antisense strand to SEQ ID NO: 40692
aacuuucagccgaauacau

SEQ ID NO: 40694 - RNA, 19 nt, Artificial Sequence
  Description of Artificial Sequence: Synthetic oligonucleotide
  Sense strand starting at position 1976 of SEQ ID NO: 484
cuagaaguccuagaucucu

SEQ ID NO: 40695 - RNA, 19 nt, Artificial Sequence
  Description of Artificial Sequence: Synthetic oligonucleotide
  Antisense strand to SEQ ID NO: 40694
agagaucuaggacuucuag

SEQ ID NO: 40696 - RNA, 19 nt, Artificial Sequence
  Description of Artificial Sequence: Synthetic oligonucleotide
  Sense strand starting at position 1985 of SEQ ID NO: 484
cuagaucucuugccuuaga

SEQ ID NO: 40697 - RNA, 19 nt, Artificial Sequence
  Description of Artificial Sequence: Synthetic oligonucleotide
  Antisense strand to SEQ ID NO: 40696
ucuaaggcaagagaucuag

SEQ ID NO: 40698 - RNA, 19 nt, Artificial Sequence
  Description of Artificial Sequence: Synthetic oligonucleotide
  Sense strand starting at position 1988 of SEQ ID NO: 484
gaucucuugccuuagagcu

SEQ ID NO: 40699 - RNA, 19 nt, Artificial Sequence
  Description of Artificial Sequence: Synthetic oligonucleotide
  Antisense strand to SEQ ID NO: 40698
agcucuaaggcaagagauc

SEQ ID NO: 40700 - RNA, 19 nt, Artificial Sequence
  Description of Artificial Sequence: Synthetic oligonucleotide
  Sense strand starting at position 2045 of SEQ ID NO: 484
gaguuugcgccacuaugua

SEQ ID NO: 40701 - RNA, 19 nt, Artificial Sequence
  Description of Artificial Sequence: Synthetic oligonucleotide
  Antisense strand to SEQ ID NO: 40700
uacauaguggcgcaaacuc

SEQ ID NO: 40702 - RNA, 19 nt, Artificial Sequence
  Description of Artificial Sequence: Synthetic oligonucleotide
  Sense strand starting at position 2138 of SEQ ID NO: 484
cagagaaaucaaugugagu

SEQ ID NO: 40703 - RNA, 19 nt, Artificial Sequence
  Description of Artificial Sequence: Synthetic oligonucleotide
  Antisense strand to SEQ ID NO: 40702
acucacauugauuucucug

SEQ ID NO: 40704 - RNA, 19 nt, Artificial Sequence
  Description of Artificial Sequence: Synthetic oligonucleotide
  Sense strand starting at position 2277 of SEQ ID NO: 484
auauuaaacgaguggccau

SEQ ID NO: 40705 - RNA, 19 nt, Artificial Sequence
  Description of Artificial Sequence: Synthetic oligonucleotide
  Antisense strand to SEQ ID NO: 40704
auggccacucguuuaauau

SEQ ID NO: 40706 - RNA, 19 nt, Artificial Sequence
  Description of Artificial Sequence: Synthetic oligonucleotide
  Sense strand starting at position 2754 of SEQ ID NO: 484
gccaauugaguacacuuau

SEQ ID NO: 40707 - RNA, 19 nt, Artificial Sequence
  Description of Artificial Sequence: Synthetic oligonucleotide
  Antisense strand to SEQ ID NO: 40706
auaaguguacucaauuggc

SEQ ID NO: 40708 - RNA, 19 nt, Artificial Sequence
  Description of Artificial Sequence: Synthetic oligonucleotide
  Sense strand starting at position 2782 of SEQ ID NO: 484
ucuagacaucuuggcacua

SEQ ID NO: 40709 - RNA, 19 nt, Artificial Sequence
  Description of Artificial Sequence: Synthetic oligonucleotide
  Antisense strand to SEQ ID NO: 40708
uagugccaagaugucuaga

SEQ ID NO: 40710 - RNA, 19 nt, Artificial Sequence
  Description of Artificial Sequence: Synthetic oligonucleotide
  Sense strand starting at position 2783 of SEQ ID NO: 484
cuagacaucuuggcacuaa

SEQ ID NO: 40711 - RNA, 19 nt, Artificial Sequence
  Description of Artificial Sequence: Synthetic oligonucleotide
  Antisense strand to SEQ ID NO: 40710
uuagugccaagaugucuag

SEQ ID NO: 40712 - RNA, 19 nt, Artificial Sequence
  Description of Artificial Sequence: Synthetic oligonucleotide
  Sense strand starting at position 2831 of SEQ ID NO: 484
aaaugugugccugaucaca

SEQ ID NO: 40713 - RNA, 19 nt, Artificial Sequence
  Description of Artificial Sequence: Synthetic oligonucleotide
  Antisense strand to SEQ ID NO: 40712
ugugaucaggcacacauuu

SEQ ID NO: 40714 - RNA, 19 nt, Artificial Sequence
  Description of Artificial Sequence: Synthetic oligonucleotide
  Sense strand starting at position 2913 of SEQ ID NO: 484
gagucaggauaaucugauu

SEQ ID NO: 40715 - RNA, 19 nt, Artificial Sequence
  Description of Artificial Sequence: Synthetic oligonucleotide
  Antisense strand to SEQ ID NO: 40714
aaucagauuauccugacuc

SEQ ID NO: 40716 - RNA, 19 nt, Artificial Sequence
  Description of Artificial Sequence: Synthetic oligonucleotide
  Sense strand starting at position 3293 of SEQ ID NO: 484
aauuaaggccaacgagaua

SEQ ID NO: 40717 - RNA, 19 nt, Artificial Sequence
  Description of Artificial Sequence: Synthetic oligonucleotide
  Antisense strand to SEQ ID NO: 40716
uaucucguuggccuuaauu

SEQ ID NO: 40718 - RNA, 19 nt, Artificial Sequence
  Description of Artificial Sequence: Synthetic oligonucleotide
  Sense strand starting at position 3336 of SEQ ID NO: 484
gguugugcucuuuaagaaa

SEQ ID NO: 40719 - RNA, 19 nt, Artificial Sequence
  Description of Artificial Sequence: Synthetic oligonucleotide
  Antisense strand to SEQ ID NO: 40718
uuucuuaaagagcacaacc

SEQ ID NO: 40720 - RNA, 19 nt, Artificial Sequence
  Description of Artificial Sequence: Synthetic oligonucleotide
  Sense strand starting at position 3347 of SEQ ID NO: 484
uuaagaaagguaugugcuu

SEQ ID NO: 40721 - RNA, 19 nt, Artificial Sequence
  Description of Artificial Sequence: Synthetic oligonucleotide
  Antisense strand to SEQ ID NO: 40720
aagcacauaccuuucuuaa

SEQ ID NO: 40722 - RNA, 19 nt, Artificial Sequence
  Description of Artificial Sequence: Synthetic oligonucleotide
  Sense strand starting at position 3348 of SEQ ID NO: 484
uaagaaagguaugugcuuu

SEQ ID NO: 40723 - RNA, 19 nt, Artificial Sequence
  Description of Artificial Sequence: Synthetic oligonucleotide
  Antisense strand to SEQ ID NO: 40722
aaagcacauaccuuucuua

SEQ ID NO: 40724 - RNA, 19 nt, Artificial Sequence
  Description of Artificial Sequence: Synthetic oligonucleotide
  Sense strand starting at position 3386 of SEQ ID NO: 484
uuucccuuugacuaguauu

SEQ ID NO: 40725 - RNA, 19 nt, Artificial Sequence
  Description of Artificial Sequence: Synthetic oligonucleotide
  Antisense strand to SEQ ID NO: 40724
aauacuagucaaagggaaa

SEQ ID NO: 40726 - RNA, 19 nt, Artificial Sequence
  Description of Artificial Sequence: Synthetic oligonucleotide
  Sense strand starting at position 3471 of SEQ ID NO: 484
uuggcauggcaacaagaua

SEQ ID NO: 40727 - RNA, 19 nt, Artificial Sequence
  Description of Artificial Sequence: Synthetic oligonucleotide
  Antisense strand to SEQ ID NO: 40726
uaucuuguugccaugccaa

SEQ ID NO: 40728 - RNA, 19 nt, Artificial Sequence
  Description of Artificial Sequence: Synthetic oligonucleotide
  Sense strand starting at position 3581 of SEQ ID NO: 484
uuguuaaaucacuguuaac

SEQ ID NO: 40729 - RNA, 19 nt, Artificial Sequence
  Description of Artificial Sequence: Synthetic oligonucleotide
  Antisense strand to SEQ ID NO: 40728
guuaacagugauuuaacaa

SEQ ID NO: 40730 - RNA, 19 nt, Artificial Sequence
  Description of Artificial Sequence: Synthetic oligonucleotide
  Sense strand starting at position 3751 of SEQ ID NO: 484
gacccugucgacuaugcaa

SEQ ID NO: 40731 - RNA, 19 nt, Artificial Sequence
  Description of Artificial Sequence: Synthetic oligonucleotide
  Antisense strand to SEQ ID NO: 40730
uugcauagucgacaggguc

SEQ ID NO: 40732 - RNA, 19 nt, Artificial Sequence
  Description of Artificial Sequence: Synthetic oligonucleotide
  Sense strand starting at position 60 of SEQ ID NO: 485
ggcugagucccagaucucu

SEQ ID NO: 40733 - RNA, 19 nt, Artificial Sequence
  Description of Artificial Sequence: Synthetic oligonucleotide
  Antisense strand to SEQ ID NO: 40732
agagaucugggacucagcc

SEQ ID NO: 40734 - RNA, 19 nt, Artificial Sequence
  Description of Artificial Sequence: Synthetic oligonucleotide
  Sense strand starting at position 113 of SEQ ID NO: 485
auguaugcccacuagacuu

SEQ ID NO: 40735 - RNA, 19 nt, Artificial Sequence
  Description of Artificial Sequence: Synthetic oligonucleotide
  Antisense strand to SEQ ID NO: 40734
aagucuagugggcauacau

SEQ ID NO: 40736 - RNA, 19 nt, Artificial Sequence
  Description of Artificial Sequence: Synthetic oligonucleotide
  Sense strand starting at position 132 of SEQ ID NO: 485
uucuguguagcugagaaau

SEQ ID NO: 40737 - RNA, 19 nt, Artificial Sequence
  Description of Artificial Sequence: Synthetic oligonucleotide
  Antisense strand to SEQ ID NO: 40736
auuucucagcuacacagaa

SEQ ID NO: 40738 - RNA, 19 nt, Artificial Sequence
  Description of Artificial Sequence: Synthetic oligonucleotide
  Sense strand starting at position 440 of SEQ ID NO: 485
ugcauuuaagugugcacau

SEQ ID NO: 40739 - RNA, 19 nt, Artificial Sequence
  Description of Artificial Sequence: Synthetic oligonucleotide
  Antisense strand to SEQ ID NO: 40738
augugcacacuuaaaugca

SEQ ID NO: 40740 - RNA, 19 nt, Artificial Sequence
  Description of Artificial Sequence: Synthetic oligonucleotide
  Sense strand starting at position 441 of SEQ ID NO: 485
gcauuuaagugugcacaug

SEQ ID NO: 40741 - RNA, 19 nt, Artificial Sequence
  Description of Artificial Sequence: Synthetic oligonucleotide
  Antisense strand to SEQ ID NO: 40740
caugugcacacuuaaaugc

SEQ ID NO: 40742 - RNA, 19 nt, Artificial Sequence
  Description of Artificial Sequence: Synthetic oligonucleotide
  Sense strand starting at position 520 of SEQ ID NO: 485
ggcacauagucccuagaga

SEQ ID NO: 40743 - RNA, 19 nt, Artificial Sequence
  Description of Artificial Sequence: Synthetic oligonucleotide
  Antisense strand to SEQ ID NO: 40742
ucucuagggacuaugugcc

SEQ ID NO: 40744 - RNA, 19 nt, Artificial Sequence
  Description of Artificial Sequence: Synthetic oligonucleotide
  Sense strand starting at position 521 of SEQ ID NO: 485
gcacauagucccuagagac

SEQ ID NO: 40745 - RNA, 19 nt, Artificial Sequence
  Description of Artificial Sequence: Synthetic oligonucleotide
  Antisense strand to SEQ ID NO: 40744
gucucuagggacuaugugc

SEQ ID NO: 40746 - RNA, 19 nt, Artificial Sequence
  Description of Artificial Sequence: Synthetic oligonucleotide
  Sense strand starting at position 651 of SEQ ID NO: 485
aaaggcuagagauguugua

SEQ ID NO: 40747 - RNA, 19 nt, Artificial Sequence
  Description of Artificial Sequence: Synthetic oligonucleotide
  Antisense strand to SEQ ID NO: 40746
uacaacaucucuagccuuu

SEQ ID NO: 40748 - RNA, 19 nt, Artificial Sequence
  Description of Artificial Sequence: Synthetic oligonucleotide
  Sense strand starting at position 704 of SEQ ID NO: 485
agcucucugccaugaggaa

SEQ ID NO: 40749 - RNA, 19 nt, Artificial Sequence
  Description of Artificial Sequence: Synthetic oligonucleotide
  Antisense strand to SEQ ID NO: 40748
uuccucauggcagagagcu

SEQ ID NO: 40750 - RNA, 19 nt, Artificial Sequence
  Description of Artificial Sequence: Synthetic oligonucleotide
  Sense strand starting at position 705 of SEQ ID NO: 485
gcucucugccaugaggaau

SEQ ID NO: 40751 - RNA, 19 nt, Artificial Sequence
  Description of Artificial Sequence: Synthetic oligonucleotide
  Antisense strand to SEQ ID NO: 40750
auuccucauggcagagagc

SEQ ID NO: 40752 - RNA, 19 nt, Artificial Sequence
  Description of Artificial Sequence: Synthetic oligonucleotide
  Sense strand starting at position 752 of SEQ ID NO: 485
uuagaagaaugugucccua

SEQ ID NO: 40753 - RNA, 19 nt, Artificial Sequence
  Description of Artificial Sequence: Synthetic oligonucleotide
  Antisense strand to SEQ ID NO: 40752
uagggacacauucuucuaa

SEQ ID NO: 40754 - RNA, 19 nt, Artificial Sequence
  Description of Artificial Sequence: Synthetic oligonucleotide
  Sense strand starting at position 754 of SEQ ID NO: 485
agaagaaugugucccuaaa

SEQ ID NO: 40755 - RNA, 19 nt, Artificial Sequence
  Description of Artificial Sequence: Synthetic oligonucleotide
  Antisense strand to SEQ ID NO: 40754
uuuagggacacauucuucu

SEQ ID NO: 40756 - RNA, 19 nt, Artificial Sequence
  Description of Artificial Sequence: Synthetic oligonucleotide
  Sense strand starting at position 970 of SEQ ID NO: 485
gcagccaacucccuagaaa

SEQ ID NO: 40757 - RNA, 19 nt, Artificial Sequence
  Description of Artificial Sequence: Synthetic oligonucleotide
  Antisense strand to SEQ ID NO: 40756
uuucuagggaguuggcugc

SEQ ID NO: 40758 - RNA, 19 nt, Artificial Sequence
  Description of Artificial Sequence: Synthetic oligonucleotide
  Sense strand starting at position 1263 of SEQ ID NO: 485
ggaccaguuuggaggagau

SEQ ID NO: 40759 - RNA, 19 nt, Artificial Sequence
  Description of Artificial Sequence: Synthetic oligonucleotide
  Antisense strand to SEQ ID NO: 40758
aucuccuccaaacuggucc

SEQ ID NO: 40760 - RNA, 19 nt, Artificial Sequence
  Description of Artificial Sequence: Synthetic oligonucleotide
  Sense strand starting at position 1772 of SEQ ID NO: 485
cacuaaauuugcgcggauu

SEQ ID NO: 40761 - RNA, 19 nt, Artificial Sequence
  Description of Artificial Sequence: Synthetic oligonucleotide
  Antisense strand to SEQ ID NO: 40760
aauccgcgcaaauuuagug

SEQ ID NO: 40762 - RNA, 19 nt, Artificial Sequence
  Description of Artificial Sequence: Synthetic oligonucleotide
  Sense strand starting at position 2121 of SEQ ID NO: 485
cggcuacucccugagaggu

SEQ ID NO: 40763 - RNA, 19 nt, Artificial Sequence
  Description of Artificial Sequence: Synthetic oligonucleotide
  Antisense strand to SEQ ID NO: 40762
accucucagggaguagccg

SEQ ID NO: 40764 - RNA, 19 nt, Artificial Sequence
  Description of Artificial Sequence: Synthetic oligonucleotide
  Sense strand starting at position 2146 of SEQ ID NO: 485
ugggaagaguaguucuaaa

SEQ ID NO: 40765 - RNA, 19 nt, Artificial Sequence
  Description of Artificial Sequence: Synthetic oligonucleotide
  Antisense strand to SEQ ID NO: 40764
uuuagaacuacucuuccca

SEQ ID NO: 40766 - RNA, 19 nt, Artificial Sequence
  Description of Artificial Sequence: Synthetic oligonucleotide
  Sense strand starting at position 2160 of SEQ ID NO: 485
cuaaauuagcccugagacu

SEQ ID NO: 40767 - RNA, 19 nt, Artificial Sequence
  Description of Artificial Sequence: Synthetic oligonucleotide
  Antisense strand to SEQ ID NO: 40766
agucucagggcuaauuuag

SEQ ID NO: 40768 - RNA, 19 nt, Artificial Sequence
  Description of Artificial Sequence: Synthetic oligonucleotide
  Sense strand starting at position 2368 of SEQ ID NO: 485
gcuguaaacaucugggacu

SEQ ID NO: 40769 - RNA, 19 nt, Artificial Sequence
  Description of Artificial Sequence: Synthetic oligonucleotide
  Antisense strand to SEQ ID NO: 40768
agucccagauguuuacagc

SEQ ID NO: 40770 - RNA, 19 nt, Artificial Sequence
  Description of Artificial Sequence: Synthetic oligonucleotide
  Sense strand starting at position 2370 of SEQ ID NO: 485
uguaaacaucugggacuca

SEQ ID NO: 40771 - RNA, 19 nt, Artificial Sequence
  Description of Artificial Sequence: Synthetic oligonucleotide
  Antisense strand to SEQ ID NO: 40770
ugagucccagauguuuaca

SEQ ID NO: 40772 - RNA, 19 nt, Artificial Sequence
  Description of Artificial Sequence: Synthetic oligonucleotide
  Sense strand starting at position 2445 of SEQ ID NO: 485
cuguacagaugucuagaaa

SEQ ID NO: 40773 - RNA, 19 nt, Artificial Sequence
  Description of Artificial Sequence: Synthetic oligonucleotide
  Antisense strand to SEQ ID NO: 40772
uuucuagacaucuguacag

SEQ ID NO: 40774 - RNA, 19 nt, Artificial Sequence
  Description of Artificial Sequence: Synthetic oligonucleotide
  Sense strand starting at position 2521 of SEQ ID NO: 485
agaauaugucccuaugcac

SEQ ID NO: 40775 - RNA, 19 nt, Artificial Sequence
  Description of Artificial Sequence: Synthetic oligonucleotide
  Antisense strand to SEQ ID NO: 40774
gugcauagggacauauucu

SEQ ID NO: 40776 - RNA, 19 nt, Artificial Sequence
  Description of Artificial Sequence: Synthetic oligonucleotide
  Sense strand starting at position 2592 of SEQ ID NO: 485
gggcuccucggguguauuu

SEQ ID NO: 40777 - RNA, 19 nt, Artificial Sequence
  Description of Artificial Sequence: Synthetic oligonucleotide
  Antisense strand to SEQ ID NO: 40776
aaauacacccgaggagccc

SEQ ID NO: 40778 - RNA, 19 nt, Artificial Sequence
  Description of Artificial Sequence: Synthetic oligonucleotide
  Sense strand starting at position 2594 of SEQ ID NO: 485
gcuccucggguguauuuaa

SEQ ID NO: 40779 - RNA, 19 nt, Artificial Sequence
  Description of Artificial Sequence: Synthetic oligonucleotide
  Antisense strand to SEQ ID NO: 40778
uuaaauacacccgaggagc

SEQ ID NO: 40780 - RNA, 19 nt, Artificial Sequence
  Description of Artificial Sequence: Synthetic oligonucleotide
  Sense strand starting at position 2671 of SEQ ID NO: 485
cccauauuccuaggguaca

SEQ ID NO: 40781 - RNA, 19 nt, Artificial Sequence
  Description of Artificial Sequence: Synthetic oligonucleotide
  Antisense strand to SEQ ID NO: 40780
uguacccuaggaauauggg

SEQ ID NO: 40782 - RNA, 19 nt, Artificial Sequence
  Description of Artificial Sequence: Synthetic oligonucleotide
  Sense strand starting at position 2824 of SEQ ID NO: 485
acauuacugugcuuugaga

SEQ ID NO: 40783 - RNA, 19 nt, Artificial Sequence
  Description of Artificial Sequence: Synthetic oligonucleotide
  Antisense strand to SEQ ID NO: 40782
ucucaaagcacaguaaugu

SEQ ID NO: 40784 - RNA, 19 nt, Artificial Sequence
  Description of Artificial Sequence: Synthetic oligonucleotide
  Sense strand starting at position 2826 of SEQ ID NO: 485
auuacugugcuuugagaaa

SEQ ID NO: 40785 - RNA, 19 nt, Artificial Sequence
  Description of Artificial Sequence: Synthetic oligonucleotide
  Antisense strand to SEQ ID NO: 40784
uuucucaaagcacaguaau

SEQ ID NO: 40786 - RNA, 19 nt, Artificial Sequence
  Description of Artificial Sequence: Synthetic oligonucleotide
  Sense strand starting at position 2968 of SEQ ID NO: 485
gggagauagguaugagggu

SEQ ID NO: 40787 - RNA, 19 nt, Artificial Sequence
  Description of Artificial Sequence: Synthetic oligonucleotide
  Antisense strand to SEQ ID NO: 40786
acccucauaccuaucuccc

SEQ ID NO: 40788 - RNA, 19 nt, Artificial Sequence
  Description of Artificial Sequence: Synthetic oligonucleotide
  Sense strand starting at position 3202 of SEQ ID NO: 485
cugauaugucucuagcgac

SEQ ID NO: 40789 - RNA, 19 nt, Artificial Sequence
  Description of Artificial Sequence: Synthetic oligonucleotide
  Antisense strand to SEQ ID NO: 40788
gucgcuagagacauaucag

SEQ ID NO: 40790 - RNA, 19 nt, Artificial Sequence
  Description of Artificial Sequence: Synthetic oligonucleotide
  Sense strand starting at position 3272 of SEQ ID NO: 485
ucccucucauuagucagau

SEQ ID NO: 40791 - RNA, 19 nt, Artificial Sequence
  Description of Artificial Sequence: Synthetic oligonucleotide
  Antisense strand to SEQ ID NO: 40790
aucugacuaaugagaggga

SEQ ID NO: 40792 - RNA, 19 nt, Artificial Sequence
  Description of Artificial Sequence: Synthetic oligonucleotide
  Sense strand starting at position 3273 of SEQ ID NO: 485
cccucucauuagucagaua

SEQ ID NO: 40793 - RNA, 19 nt, Artificial Sequence
  Description of Artificial Sequence: Synthetic oligonucleotide
  Antisense strand to SEQ ID NO: 40792
uaucugacuaaugagaggg

SEQ ID NO: 40794 - RNA, 19 nt, Artificial Sequence
  Description of Artificial Sequence: Synthetic oligonucleotide
  Sense strand starting at position 3492 of SEQ ID NO: 485
gcagaaugaccuugaggau

SEQ ID NO: 40795 - RNA, 19 nt, Artificial Sequence
  Description of Artificial Sequence: Synthetic oligonucleotide
  Antisense strand to SEQ ID NO: 40794
auccucaaggucauucugc

SEQ ID NO: 40796 - RNA, 19 nt, Artificial Sequence
  Description of Artificial Sequence: Synthetic oligonucleotide
  Sense strand starting at position 3504 of SEQ ID NO: 485
ugaggauccuuugcucaga

SEQ ID NO: 40797 - RNA, 19 nt, Artificial Sequence
  Description of Artificial Sequence: Synthetic oligonucleotide
  Antisense strand to SEQ ID NO: 40796
ucugagcaaaggauccuca

SEQ ID NO: 40798 - RNA, 19 nt, Artificial Sequence
  Description of Artificial Sequence: Synthetic oligonucleotide
  Sense strand starting at position 3505 of SEQ ID NO: 485
gaggauccuuugcucagaa

SEQ ID NO: 40799 - RNA, 19 nt, Artificial Sequence
  Description of Artificial Sequence: Synthetic oligonucleotide
  Antisense strand to SEQ ID NO: 40798
uucugagcaaaggauccuc

SEQ ID NO: 40800 - RNA, 19 nt, Artificial Sequence
  Description of Artificial Sequence: Synthetic oligonucleotide
  Sense strand starting at position 3507 of SEQ ID NO: 485
ggauccuuugcucagaacu

SEQ ID NO: 40801 - RNA, 19 nt, Artificial Sequence
  Description of Artificial Sequence: Synthetic oligonucleotide
  Antisense strand to SEQ ID NO: 40800
aguucugagcaaaggaucc

SEQ ID NO: 40802 - RNA, 19 nt, Artificial Sequence
  Description of Artificial Sequence: Synthetic oligonucleotide
  Sense strand starting at position 3662 of SEQ ID NO: 485
agaggugucaugcaugaga

SEQ ID NO: 40803 - RNA, 19 nt, Artificial Sequence
  Description of Artificial Sequence: Synthetic oligonucleotide
  Antisense strand to SEQ ID NO: 40802
ucucaugcaugacaccucu

SEQ ID NO: 40804 - RNA, 19 nt, Artificial Sequence
  Description of Artificial Sequence: Synthetic oligonucleotide
  Sense strand starting at position 3664 of SEQ ID NO: 485
aggugucaugcaugagaag

SEQ ID NO: 40805 - RNA, 19 nt, Artificial Sequence
  Description of Artificial Sequence: Synthetic oligonucleotide
  Antisense strand to SEQ ID NO: 40804
cuucucaugcaugacaccu

SEQ ID NO: 40806 - RNA, 19 nt, Artificial Sequence
  Description of Artificial Sequence: Synthetic oligonucleotide
  Sense strand starting at position 3665 of SEQ ID NO: 485
ggugucaugcaugagaaga

SEQ ID NO: 40807 - RNA, 19 nt, Artificial Sequence
  Description of Artificial Sequence: Synthetic oligonucleotide
  Antisense strand to SEQ ID NO: 40806
ucuucucaugcaugacacc

SEQ ID NO: 40808 - RNA, 19 nt, Artificial Sequence
  Description of Artificial Sequence: Synthetic oligonucleotide
  Sense strand starting at position 3979 of SEQ ID NO: 485
ccuuguuuccuccagaggu

SEQ ID NO: 40809 - RNA, 19 nt, Artificial Sequence
  Description of Artificial Sequence: Synthetic oligonucleotide
  Antisense strand to SEQ ID NO: 40808
accucuggaggaaacaagg

SEQ ID NO: 40810 - RNA, 19 nt, Artificial Sequence
  Description of Artificial Sequence: Synthetic oligonucleotide
  Sense strand starting at position 3981 of SEQ ID NO: 485
uuguuuccuccagagguga

SEQ ID NO: 40811 - RNA, 19 nt, Artificial Sequence
  Description of Artificial Sequence: Synthetic oligonucleotide
  Antisense strand to SEQ ID NO: 40810
ucaccucuggaggaaacaa

SEQ ID NO: 40812 - RNA, 19 nt, Artificial Sequence
  Description of Artificial Sequence: Synthetic oligonucleotide
  Sense strand starting at position 97 of SEQ ID NO: 486
agaauuacaaguggucaga

SEQ ID NO: 40813 - RNA, 19 nt, Artificial Sequence
  Description of Artificial Sequence: Synthetic oligonucleotide
  Antisense strand to SEQ ID NO: 40812
ucugaccacuuguaauucu

SEQ ID NO: 40814 - RNA, 19 nt, Artificial Sequence
  Description of Artificial Sequence: Synthetic oligonucleotide
  Sense strand starting at position 99 of SEQ ID NO: 486
aauuacaaguggucagaga

SEQ ID NO: 40815 - RNA, 19 nt, Artificial Sequence
  Description of Artificial Sequence: Synthetic oligonucleotide
  Antisense strand to SEQ ID NO: 40814
ucucugaccacuuguaauu

SEQ ID NO: 40816 - RNA, 19 nt, Artificial Sequence
  Description of Artificial Sequence: Synthetic oligonucleotide
  Sense strand starting at position 190 of SEQ ID NO: 486
ggaggaguuuaauaauuuc

SEQ ID NO: 40817 - RNA, 19 nt, Artificial Sequence
  Description of Artificial Sequence: Synthetic oligonucleotide
  Antisense strand to SEQ ID NO: 40816
gaaauuauuaaacuccucc

SEQ ID NO: 40818 - RNA, 19 nt, Artificial Sequence
  Description of Artificial Sequence: Synthetic oligonucleotide
  Sense strand starting at position 253 of SEQ ID NO: 486
ucccuaaugcuggaggagu

SEQ ID NO: 40819 - RNA, 19 nt, Artificial Sequence
  Description of Artificial Sequence: Synthetic oligonucleotide
  Antisense strand to SEQ ID NO: 40818
acuccuccagcauuaggga

SEQ ID NO: 40820 - RNA, 19 nt, Artificial Sequence
  Description of Artificial Sequence: Synthetic oligonucleotide
  Sense strand starting at position 267 of SEQ ID NO: 486
ggaguagagcuuggagaga

SEQ ID NO: 40821 - RNA, 19 nt, Artificial Sequence
  Description of Artificial Sequence: Synthetic oligonucleotide
  Antisense strand to SEQ ID NO: 40820
ucucuccaagcucuacucc

SEQ ID NO: 40822 - RNA, 19 nt, Artificial Sequence
  Description of Artificial Sequence: Synthetic oligonucleotide
  Sense strand starting at position 389 of SEQ ID NO: 486
agccuuuagguuuaaucau

SEQ ID NO: 40823 - RNA, 19 nt, Artificial Sequence
  Description of Artificial Sequence: Synthetic oligonucleotide
  Antisense strand to SEQ ID NO: 40822
augauuaaaccuaaaggcu

SEQ ID NO: 40824 - RNA, 19 nt, Artificial Sequence
  Description of Artificial Sequence: Synthetic oligonucleotide
  Sense strand starting at position 396 of SEQ ID NO: 486
agguuuaaucauugacaca

SEQ ID NO: 40825 - RNA, 19 nt, Artificial Sequence
  Description of Artificial Sequence: Synthetic oligonucleotide
  Antisense strand to SEQ ID NO: 40824
ugugucaaugauuaaaccu

SEQ ID NO: 40826 - RNA, 19 nt, Artificial Sequence
  Description of Artificial Sequence: Synthetic oligonucleotide
  Sense strand starting at position 428 of SEQ ID NO: 486
cugagucuccucuagaaac

SEQ ID NO: 40827 - RNA, 19 nt, Artificial Sequence
  Description of Artificial Sequence: Synthetic oligonucleotide
  Antisense strand to SEQ ID NO: 40826
guuucuagaggagacucag

SEQ ID NO: 40828 - RNA, 19 nt, Artificial Sequence
  Description of Artificial Sequence: Synthetic oligonucleotide
  Sense strand starting at position 496 of SEQ ID NO: 486
uuugaagauuauucuaggu

SEQ ID NO: 40829 - RNA, 19 nt, Artificial Sequence
  Description of Artificial Sequence: Synthetic oligonucleotide
  Antisense strand to SEQ ID NO: 40828
accuagaauaaucuucaaa

SEQ ID NO: 40830 - RNA, 19 nt, Artificial Sequence
  Description of Artificial Sequence: Synthetic oligonucleotide
  Sense strand starting at position 520 of SEQ ID NO: 486
gcgucacagggucaauaaa

SEQ ID NO: 40831 - RNA, 19 nt, Artificial Sequence
  Description of Artificial Sequence: Synthetic oligonucleotide
  Antisense strand to SEQ ID NO: 40830
uuuauugacccugugacgc

SEQ ID NO: 40832 - RNA, 19 nt, Artificial Sequence
  Description of Artificial Sequence: Synthetic oligonucleotide
  Sense strand starting at position 558 of SEQ ID NO: 486
gacugcaauccugauggca

SEQ ID NO: 40833 - RNA, 19 nt, Artificial Sequence
  Description of Artificial Sequence: Synthetic oligonucleotide
  Antisense strand to SEQ ID NO: 40832
ugccaucaggauugcaguc

SEQ ID NO: 40834 - RNA, 19 nt, Artificial Sequence
  Description of Artificial Sequence: Synthetic oligonucleotide
  Sense strand starting at position 592 of SEQ ID NO: 486
ccgggaaaccuguaauugu

SEQ ID NO: 40835 - RNA, 19 nt, Artificial Sequence
  Description of Artificial Sequence: Synthetic oligonucleotide
  Antisense strand to SEQ ID NO: 40834
acaauuacagguuucccgg

SEQ ID NO: 40836 - RNA, 19 nt, Artificial Sequence
  Description of Artificial Sequence: Synthetic oligonucleotide
  Sense strand starting at position 904 of SEQ ID NO: 486
gagcccuaccuaggagaaa

SEQ ID NO: 40837 - RNA, 19 nt, Artificial Sequence
  Description of Artificial Sequence: Synthetic oligonucleotide
  Antisense strand to SEQ ID NO: 40836
uuucuccuagguagggcuc

SEQ ID NO: 40838 - RNA, 19 nt, Artificial Sequence
  Description of Artificial Sequence: Synthetic oligonucleotide
  Sense strand starting at position 1065 of SEQ ID NO: 486
ggacaaauccucuacagcu

SEQ ID NO: 40839 - RNA, 19 nt, Artificial Sequence
  Description of Artificial Sequence: Synthetic oligonucleotide
  Antisense strand to SEQ ID NO: 40838
agcuguagaggauuugucc

SEQ ID NO: 40840 - RNA, 19 nt, Artificial Sequence
  Description of Artificial Sequence: Synthetic oligonucleotide
  Sense strand starting at position 1422 of SEQ ID NO: 486
acuaguucucugggaggac

SEQ ID NO: 40841 - RNA, 19 nt, Artificial Sequence
  Description of Artificial Sequence: Synthetic oligonucleotide
  Antisense strand to SEQ ID NO: 40840
guccucccagagaacuagu

SEQ ID NO: 40842 - RNA, 19 nt, Artificial Sequence
  Description of Artificial Sequence: Synthetic oligonucleotide
  Sense strand starting at position 1502 of SEQ ID NO: 486
agauucgcugucuaaacaa

SEQ ID NO: 40843 - RNA, 19 nt, Artificial Sequence
  Description of Artificial Sequence: Synthetic oligonucleotide
  Antisense strand to SEQ ID NO: 40842
uuguuuagacagcgaaucu

SEQ ID NO: 40844 - RNA, 19 nt, Artificial Sequence
  Description of Artificial Sequence: Synthetic oligonucleotide
  Sense strand starting at position 1693 of SEQ ID NO: 486
aggcgaaggcacuagaauu

SEQ ID NO: 40845 - RNA, 19 nt, Artificial Sequence
  Description of Artificial Sequence: Synthetic oligonucleotide
  Antisense strand to SEQ ID NO: 40844
aauucuagugccuucgccu

SEQ ID NO: 40846 - RNA, 19 nt, Artificial Sequence
  Description of Artificial Sequence: Synthetic oligonucleotide
  Sense strand starting at position 2230 of SEQ ID NO: 486
auucuuuaaguguagggua

SEQ ID NO: 40847 - RNA, 19 nt, Artificial Sequence
  Description of Artificial Sequence: Synthetic oligonucleotide
  Antisense strand to SEQ ID NO: 40846
uacccuacacuuaaagaau

SEQ ID NO: 40848 - RNA, 19 nt, Artificial Sequence
  Description of Artificial Sequence: Synthetic oligonucleotide
  Sense strand starting at position 2242 of SEQ ID NO: 486
uaggguagggccugauacu

SEQ ID NO: 40849 - RNA, 19 nt, Artificial Sequence
  Description of Artificial Sequence: Synthetic oligonucleotide
  Antisense strand to SEQ ID NO: 40848
aguaucaggcccuacccua

SEQ ID NO: 40850 - RNA, 19 nt, Artificial Sequence
  Description of Artificial Sequence: Synthetic oligonucleotide
  Sense strand starting at position 2295 of SEQ ID NO: 486
acugcugaccugggaacua

SEQ ID NO: 40851 - RNA, 19 nt, Artificial Sequence
  Description of Artificial Sequence: Synthetic oligonucleotide
  Antisense strand to SEQ ID NO: 40850
uaguucccaggucagcagu

SEQ ID NO: 40852 - RNA, 19 nt, Artificial Sequence
  Description of Artificial Sequence: Synthetic oligonucleotide
  Sense strand starting at position 2453 of SEQ ID NO: 486
gaacaucaccaguguuaag

SEQ ID NO: 40853 - RNA, 19 nt, Artificial Sequence
  Description of Artificial Sequence: Synthetic oligonucleotide
  Antisense strand to SEQ ID NO: 40852
cuuaacacuggugauguuc

SEQ ID NO: 40854 - RNA, 19 nt, Artificial Sequence
  Description of Artificial Sequence: Synthetic oligonucleotide
  Sense strand starting at position 2460 of SEQ ID NO: 486
accaguguuaaggaguuua

SEQ ID NO: 40855 - RNA, 19 nt, Artificial Sequence
  Description of Artificial Sequence: Synthetic oligonucleotide
  Antisense strand to SEQ ID NO: 40854
uaaacuccuuaacacuggu

SEQ ID NO: 40856 - RNA, 19 nt, Artificial Sequence
  Description of Artificial Sequence: Synthetic oligonucleotide
  Sense strand starting at position 2502 of SEQ ID NO: 486
uuauuacaacucuaguagu

SEQ ID NO: 40857 - RNA, 19 nt, Artificial Sequence
  Description of Artificial Sequence: Synthetic oligonucleotide
  Antisense strand to SEQ ID NO: 40856
acuacuagaguuguaauaa

SEQ ID NO: 40858 - RNA, 19 nt, Artificial Sequence
  Description of Artificial Sequence: Synthetic oligonucleotide
  Sense strand starting at position 2577 of SEQ ID NO: 486
uaacuuuaugauggguuua

SEQ ID NO: 40859 - RNA, 19 nt, Artificial Sequence
  Description of Artificial Sequence: Synthetic oligonucleotide
  Antisense strand to SEQ ID NO: 40858
uaaacccaucauaaaguua

SEQ ID NO: 40860 - RNA, 19 nt, Artificial Sequence
  Description of Artificial Sequence: Synthetic oligonucleotide
  Sense strand starting at position 2579 of SEQ ID NO: 486
acuuuaugauggguuuaca

SEQ ID NO: 40861 - RNA, 19 nt, Artificial Sequence
  Description of Artificial Sequence: Synthetic oligonucleotide
  Antisense strand to SEQ ID NO: 40860
uguaaacccaucauaaagu

SEQ ID NO: 40862 - RNA, 19 nt, Artificial Sequence
  Description of Artificial Sequence: Synthetic oligonucleotide
  Sense strand starting at position 2993 of SEQ ID NO: 486
cccaaaguacgggaguaau

SEQ ID NO: 40863 - RNA, 19 nt, Artificial Sequence
  Description of Artificial Sequence: Synthetic oligonucleotide
  Antisense strand to SEQ ID NO: 40862
auuacucccguacuuuggg

SEQ ID NO: 40864 - RNA, 19 nt, Artificial Sequence
  Description of Artificial Sequence: Synthetic oligonucleotide
  Sense strand starting at position 3019 of SEQ ID NO: 486
gcgauuuggaucugccaac

SEQ ID NO: 40865 - RNA, 19 nt, Artificial Sequence
  Description of Artificial Sequence: Synthetic oligonucleotide
  Antisense strand to SEQ ID NO: 40864
guuggcagauccaaaucgc

SEQ ID NO: 40866 - RNA, 19 nt, Artificial Sequence
  Description of Artificial Sequence: Synthetic oligonucleotide
  Sense strand starting at position 3070 of SEQ ID NO: 486
aggugaaaguucuuaagga

SEQ ID NO: 40867 - RNA, 19 nt, Artificial Sequence
  Description of Artificial Sequence: Synthetic oligonucleotide
  Antisense strand to SEQ ID NO: 40866
uccuuaagaacuuucaccu

SEQ ID NO: 40868 - RNA, 19 nt, Artificial Sequence
  Description of Artificial Sequence: Synthetic oligonucleotide
  Sense strand starting at position 3124 of SEQ ID NO: 486
guugcuaagaucuacggaa

SEQ ID NO: 40869 - RNA, 19 nt, Artificial Sequence
  Description of Artificial Sequence: Synthetic oligonucleotide
  Antisense strand to SEQ ID NO: 40868
uuccguagaucuuagcaac

SEQ ID NO: 40870 - RNA, 19 nt, Artificial Sequence
  Description of Artificial Sequence: Synthetic oligonucleotide
  Sense strand starting at position 3126 of SEQ ID NO: 486
ugcuaagaucuacggaaag

SEQ ID NO: 40871 - RNA, 19 nt, Artificial Sequence
  Description of Artificial Sequence: Synthetic oligonucleotide
  Antisense strand to SEQ ID NO: 40870
cuuuccguagaucuuagca

SEQ ID NO: 40872 - RNA, 19 nt, Artificial Sequence
  Description of Artificial Sequence: Synthetic oligonucleotide
  Sense strand starting at position 3144 of SEQ ID NO: 486
gaaugaaucuugucaguga

SEQ ID NO: 40873 - RNA, 19 nt, Artificial Sequence
  Description of Artificial Sequence: Synthetic oligonucleotide
  Antisense strand to SEQ ID NO: 40872
ucacugacaagauucauuc

SEQ ID NO: 40874 - RNA, 19 nt, Artificial Sequence
  Description of Artificial Sequence: Synthetic oligonucleotide
  Sense strand starting at position 3147 of SEQ ID NO: 486
ugaaucuugucagugaaau

SEQ ID NO: 40875 - RNA, 19 nt, Artificial Sequence
  Description of Artificial Sequence: Synthetic oligonucleotide
  Antisense strand to SEQ ID NO: 40874
auuucacugacaagauuca

SEQ ID NO: 40876 - RNA, 19 nt, Artificial Sequence
  Description of Artificial Sequence: Synthetic oligonucleotide
  Sense strand starting at position 3148 of SEQ ID NO: 486
gaaucuugucagugaaauu

SEQ ID NO: 40877 - RNA, 19 nt, Artificial Sequence
  Description of Artificial Sequence: Synthetic oligonucleotide
  Antisense strand to SEQ ID NO: 40876
aauuucacugacaagauuc

SEQ ID NO: 40878 - RNA, 19 nt, Artificial Sequence
  Description of Artificial Sequence: Synthetic oligonucleotide
  Sense strand starting at position 3259 of SEQ ID NO: 486
gagugauacugcuuagauu

SEQ ID NO: 40879 - RNA, 19 nt, Artificial Sequence
  Description of Artificial Sequence: Synthetic oligonucleotide
  Antisense strand to SEQ ID NO: 40878
aaucuaagcaguaucacuc

SEQ ID NO: 40880 - RNA, 19 nt, Artificial Sequence
  Description of Artificial Sequence: Synthetic oligonucleotide
  Sense strand starting at position 3260 of SEQ ID NO: 486
agugauacugcuuagauua

SEQ ID NO: 40881 - RNA, 19 nt, Artificial Sequence
  Description of Artificial Sequence: Synthetic oligonucleotide
  Antisense strand to SEQ ID NO: 40880
uaaucuaagcaguaucacu

SEQ ID NO: 40882 - RNA, 19 nt, Artificial Sequence
  Description of Artificial Sequence: Synthetic oligonucleotide
  Sense strand starting at position 3331 of SEQ ID NO: 486
uguucuaugaacugaggau

SEQ ID NO: 40883 - RNA, 19 nt, Artificial Sequence
  Description of Artificial Sequence: Synthetic oligonucleotide
  Antisense strand to SEQ ID NO: 40882
auccucaguucauagaaca

SEQ ID NO: 40884 - RNA, 19 nt, Artificial Sequence
  Description of Artificial Sequence: Synthetic oligonucleotide
  Sense strand starting at position 3479 of SEQ ID NO: 486
ggcuuaagagcauggaaga

SEQ ID NO: 40885 - RNA, 19 nt, Artificial Sequence
  Description of Artificial Sequence: Synthetic oligonucleotide
  Antisense strand to SEQ ID NO: 40884
ucuuccaugcucuuaagcc

SEQ ID NO: 40886 - RNA, 19 nt, Artificial Sequence
  Description of Artificial Sequence: Synthetic oligonucleotide
  Sense strand starting at position 3516 of SEQ ID NO: 486
auucuuuagguccauuauu

SEQ ID NO: 40887 - RNA, 19 nt, Artificial Sequence
  Description of Artificial Sequence: Synthetic oligonucleotide
  Antisense strand to SEQ ID NO: 40886
aauaauggaccuaaagaau

SEQ ID NO: 40888 - RNA, 19 nt, Artificial Sequence
  Description of Artificial Sequence: Synthetic oligonucleotide
  Sense strand starting at position 3525 of SEQ ID NO: 486
guccauuauugacugauca

SEQ ID NO: 40889 - RNA, 19 nt, Artificial Sequence
  Description of Artificial Sequence: Synthetic oligonucleotide
  Antisense strand to SEQ ID NO: 40888
ugaucagucaauaauggac

SEQ ID NO: 40890 - RNA, 19 nt, Artificial Sequence
  Description of Artificial Sequence: Synthetic oligonucleotide
  Sense strand starting at position 3615 of SEQ ID NO: 486
ggcauucuugcccacaaac

SEQ ID NO: 40891 - RNA, 19 nt, Artificial Sequence
  Description of Artificial Sequence: Synthetic oligonucleotide
  Antisense strand to SEQ ID NO: 40890
guuugugggcaagaaugcc

SEQ ID NO: 40892 - RNA, 19 nt, Artificial Sequence
  Description of Artificial Sequence: Synthetic oligonucleotide
  Sense strand starting at position 71 of SEQ ID NO: 487
cuaggacuuuaccagauuu

SEQ ID NO: 40893 - RNA, 19 nt, Artificial Sequence
  Description of Artificial Sequence: Synthetic oligonucleotide
  Antisense strand to SEQ ID NO: 40892
aaaucugguaaaguccuag

SEQ ID NO: 40894 - RNA, 19 nt, Artificial Sequence
  Description of Artificial Sequence: Synthetic oligonucleotide
  Sense strand starting at position 112 of SEQ ID NO: 487
acacuuaagucaguacuua

SEQ ID NO: 40895 - RNA, 19 nt, Artificial Sequence
  Description of Artificial Sequence: Synthetic oligonucleotide
  Antisense strand to SEQ ID NO: 40894
uaaguacugacuuaagugu

SEQ ID NO: 40896 - RNA, 19 nt, Artificial Sequence
  Description of Artificial Sequence: Synthetic oligonucleotide
  Sense strand starting at position 116 of SEQ ID NO: 487
uuaagucaguacuuacaaa

SEQ ID NO: 40897 - RNA, 19 nt, Artificial Sequence
  Description of Artificial Sequence: Synthetic oligonucleotide
  Antisense strand to SEQ ID NO: 40896
uuuguaaguacugacuuaa

SEQ ID NO: 40898 - RNA, 19 nt, Artificial Sequence
  Description of Artificial Sequence: Synthetic oligonucleotide
  Sense strand starting at position 192 of SEQ ID NO: 487
aauaaucaucucgauggua

SEQ ID NO: 40899 - RNA, 19 nt, Artificial Sequence
  Description of Artificial Sequence: Synthetic oligonucleotide
  Antisense strand to SEQ ID NO: 40898
uaccaucgagaugauuauu

SEQ ID NO: 40900 - RNA, 19 nt, Artificial Sequence
  Description of Artificial Sequence: Synthetic oligonucleotide
  Sense strand starting at position 194 of SEQ ID NO: 487
uaaucaucucgaugguaaa

SEQ ID NO: 40901 - RNA, 19 nt, Artificial Sequence
  Description of Artificial Sequence: Synthetic oligonucleotide
  Antisense strand to SEQ ID NO: 40900
uuuaccaucgagaugauua

SEQ ID NO: 40902 - RNA, 19 nt, Artificial Sequence
  Description of Artificial Sequence: Synthetic oligonucleotide
  Sense strand starting at position 195 of SEQ ID NO: 487
aaucaucucgaugguaaac

SEQ ID NO: 40903 - RNA, 19 nt, Artificial Sequence
  Description of Artificial Sequence: Synthetic oligonucleotide
  Antisense strand to SEQ ID NO: 40902
guuuaccaucgagaugauu

SEQ ID NO: 40904 - RNA, 19 nt, Artificial Sequence
  Description of Artificial Sequence: Synthetic oligonucleotide
  Sense strand starting at position 318 of SEQ ID NO: 487
ucagguauaucccuacuga

SEQ ID NO: 40905 - RNA, 19 nt, Artificial Sequence
  Description of Artificial Sequence: Synthetic oligonucleotide
  Antisense strand to SEQ ID NO: 40904
ucaguagggauauaccuga

SEQ ID NO: 40906 - RNA, 19 nt, Artificial Sequence
  Description of Artificial Sequence: Synthetic oligonucleotide
  Sense strand starting at position 368 of SEQ ID NO: 487
ggauauccauuauugguua

SEQ ID NO: 40907 - RNA, 19 nt, Artificial Sequence
  Description of Artificial Sequence: Synthetic oligonucleotide
  Antisense strand to SEQ ID NO: 40906
uaaccaauaauggauaucc

SEQ ID NO: 40908 - RNA, 19 nt, Artificial Sequence
  Description of Artificial Sequence: Synthetic oligonucleotide
  Sense strand starting at position 428 of SEQ ID NO: 487
augcaauaucaagaauguu

SEQ ID NO: 40909 - RNA, 19 nt, Artificial Sequence
  Description of Artificial Sequence: Synthetic oligonucleotide
  Antisense strand to SEQ ID NO: 40908
aacauucuugauauugcau

SEQ ID NO: 40910 - RNA, 19 nt, Artificial Sequence
  Description of Artificial Sequence: Synthetic oligonucleotide
  Sense strand starting at position 437 of SEQ ID NO: 487
caagaauguuugccuuuag

SEQ ID NO: 40911 - RNA, 19 nt, Artificial Sequence
  Description of Artificial Sequence: Synthetic oligonucleotide
  Antisense strand to SEQ ID NO: 40910
cuaaaggcaaacauucuug

SEQ ID NO: 40912 - RNA, 19 nt, Artificial Sequence
  Description of Artificial Sequence: Synthetic oligonucleotide
  Sense strand starting at position 483 of SEQ ID NO: 487
uuuaguauagaguagcuua

SEQ ID NO: 40913 - RNA, 19 nt, Artificial Sequence
  Description of Artificial Sequence: Synthetic oligonucleotide
  Antisense strand to SEQ ID NO: 40912
uaagcuacucuauacuaaa

SEQ ID NO: 40914 - RNA, 19 nt, Artificial Sequence
  Description of Artificial Sequence: Synthetic oligonucleotide
  Sense strand starting at position 486 of SEQ ID NO: 487
aguauagaguagcuuauau

SEQ ID NO: 40915 - RNA, 19 nt, Artificial Sequence
  Description of Artificial Sequence: Synthetic oligonucleotide
  Antisense strand to SEQ ID NO: 40914
auauaagcuacucuauacu

SEQ ID NO: 40916 - RNA, 19 nt, Artificial Sequence
  Description of Artificial Sequence: Synthetic oligonucleotide
  Sense strand starting at position 499 of SEQ ID NO: 487
uuauaucugugggcuauaa

SEQ ID NO: 40917 - RNA, 19 nt, Artificial Sequence
  Description of Artificial Sequence: Synthetic oligonucleotide
  Antisense strand to SEQ ID NO: 40916
uuauagcccacagauauaa

SEQ ID NO: 40918 - RNA, 19 nt, Artificial Sequence
  Description of Artificial Sequence: Synthetic oligonucleotide
  Sense strand starting at position 501 of SEQ ID NO: 487
auaucugugggcuauaauu

SEQ ID NO: 40919 - RNA, 19 nt, Artificial Sequence
  Description of Artificial Sequence: Synthetic oligonucleotide
  Antisense strand to SEQ ID NO: 40918
aauuauagcccacagauau

SEQ ID NO: 40920 - RNA, 19 nt, Artificial Sequence
  Description of Artificial Sequence: Synthetic oligonucleotide
  Sense strand starting at position 509 of SEQ ID NO: 487
gggcuauaauuugaaaccu

SEQ ID NO: 40921 - RNA, 19 nt, Artificial Sequence
  Description of Artificial Sequence: Synthetic oligonucleotide
  Antisense strand to SEQ ID NO: 40920
agguuucaaauuauagccc

SEQ ID NO: 40922 - RNA, 19 nt, Artificial Sequence
  Description of Artificial Sequence: Synthetic oligonucleotide
  Sense strand starting at position 737 of SEQ ID NO: 487
ucagauauucuuugcagau

SEQ ID NO: 40923 - RNA, 19 nt, Artificial Sequence
  Description of Artificial Sequence: Synthetic oligonucleotide
  Antisense strand to SEQ ID NO: 40922
aucugcaaagaauaucuga

SEQ ID NO: 40924 - RNA, 19 nt, Artificial Sequence
  Description of Artificial Sequence: Synthetic oligonucleotide
  Sense strand starting at position 1103 of SEQ ID NO: 487
cugguucccuuucucaaga

SEQ ID NO: 40925 - RNA, 19 nt, Artificial Sequence
  Description of Artificial Sequence: Synthetic oligonucleotide
  Antisense strand to SEQ ID NO: 40924
ucuugagaaagggaaccag

SEQ ID NO: 40926 - RNA, 19 nt, Artificial Sequence
  Description of Artificial Sequence: Synthetic oligonucleotide
  Sense strand starting at position 1172 of SEQ ID NO: 487
aggugacuggaguaacgau

SEQ ID NO: 40927 - RNA, 19 nt, Artificial Sequence
  Description of Artificial Sequence: Synthetic oligonucleotide
  Antisense strand to SEQ ID NO: 40926
aucguuacuccagucaccu

SEQ ID NO: 40928 - RNA, 19 nt, Artificial Sequence
  Description of Artificial Sequence: Synthetic oligonucleotide
  Sense strand starting at position 1275 of SEQ ID NO: 487
ggucucagucuauacacaa

SEQ ID NO: 40929 - RNA, 19 nt, Artificial Sequence
  Description of Artificial Sequence: Synthetic oligonucleotide
  Antisense strand to SEQ ID NO: 40928
uuguguauagacugagacc

SEQ ID NO: 40930 - RNA, 19 nt, Artificial Sequence
  Description of Artificial Sequence: Synthetic oligonucleotide
  Sense strand starting at position 1755 of SEQ ID NO: 487
caccuagagcucuacgagu

SEQ ID NO: 40931 - RNA, 19 nt, Artificial Sequence
  Description of Artificial Sequence: Synthetic oligonucleotide
  Antisense strand to SEQ ID NO: 40930
acucguagagcucuaggug

SEQ ID NO: 40932 - RNA, 19 nt, Artificial Sequence
  Description of Artificial Sequence: Synthetic oligonucleotide
  Sense strand starting at position 2108 of SEQ ID NO: 487
gugugcugcgggaagcaau

SEQ ID NO: 40933 - RNA, 19 nt, Artificial Sequence
  Description of Artificial Sequence: Synthetic oligonucleotide
  Antisense strand to SEQ ID NO: 40932
auugcuucccgcagcacac

SEQ ID NO: 40934 - RNA, 19 nt, Artificial Sequence
  Description of Artificial Sequence: Synthetic oligonucleotide
  Sense strand starting at position 2170 of SEQ ID NO: 487
ggcuuuaggcgucucuagu

SEQ ID NO: 40935 - RNA, 19 nt, Artificial Sequence
  Description of Artificial Sequence: Synthetic oligonucleotide
  Antisense strand to SEQ ID NO: 40934
acuagagacgccuaaagcc

SEQ ID NO: 40936 - RNA, 19 nt, Artificial Sequence
  Description of Artificial Sequence: Synthetic oligonucleotide
  Sense strand starting at position 2535 of SEQ ID NO: 487
uacgaaagauauuccuguu

SEQ ID NO: 40937 - RNA, 19 nt, Artificial Sequence
  Description of Artificial Sequence: Synthetic oligonucleotide
  Antisense strand to SEQ ID NO: 40936
aacaggaauaucuuucgua

SEQ ID NO: 40938 - RNA, 19 nt, Artificial Sequence
  Description of Artificial Sequence: Synthetic oligonucleotide
  Sense strand starting at position 2550 of SEQ ID NO: 487
uguugugucagguaaucaa

SEQ ID NO: 40939 - RNA, 19 nt, Artificial Sequence
  Description of Artificial Sequence: Synthetic oligonucleotide
  Antisense strand to SEQ ID NO: 40938
uugauuaccugacacaaca

SEQ ID NO: 40940 - RNA, 19 nt, Artificial Sequence
  Description of Artificial Sequence: Synthetic oligonucleotide
  Sense strand starting at position 2553 of SEQ ID NO: 487
ugugucagguaaucaaaga

SEQ ID NO: 40941 - RNA, 19 nt, Artificial Sequence
  Description of Artificial Sequence: Synthetic oligonucleotide
  Antisense strand to SEQ ID NO: 40940
ucuuugauuaccugacaca

SEQ ID NO: 40942 - RNA, 19 nt, Artificial Sequence
  Description of Artificial Sequence: Synthetic oligonucleotide
  Sense strand starting at position 2570 of SEQ ID NO: 487
gaggguggaucaguaauua

SEQ ID NO: 40943 - RNA, 19 nt, Artificial Sequence
  Description of Artificial Sequence: Synthetic oligonucleotide
  Antisense strand to SEQ ID NO: 40942
uaauuacugauccacccuc

SEQ ID NO: 40944 - RNA, 19 nt, Artificial Sequence
  Description of Artificial Sequence: Synthetic oligonucleotide
  Sense strand starting at position 2770 of SEQ ID NO: 487
gcucucucacuugacagua

SEQ ID NO: 40945 - RNA, 19 nt, Artificial Sequence
  Description of Artificial Sequence: Synthetic oligonucleotide
  Antisense strand to SEQ ID NO: 40944
uacugucaagugagagagc

SEQ ID NO: 40946 - RNA, 19 nt, Artificial Sequence
  Description of Artificial Sequence: Synthetic oligonucleotide
  Sense strand starting at position 2871 of SEQ ID NO: 487
uguguaaccacugggaagu

SEQ ID NO: 40947 - RNA, 19 nt, Artificial Sequence
  Description of Artificial Sequence: Synthetic oligonucleotide
  Antisense strand to SEQ ID NO: 40946
acuucccagugguuacaca

SEQ ID NO: 40948 - RNA, 19 nt, Artificial Sequence
  Description of Artificial Sequence: Synthetic oligonucleotide
  Sense strand starting at position 2872 of SEQ ID NO: 487
guguaaccacugggaagua

SEQ ID NO: 40949 - RNA, 19 nt, Artificial Sequence
  Description of Artificial Sequence: Synthetic oligonucleotide
  Antisense strand to SEQ ID NO: 40948
uacuucccagugguuacac

SEQ ID NO: 40950 - RNA, 19 nt, Artificial Sequence
  Description of Artificial Sequence: Synthetic oligonucleotide
  Sense strand starting at position 2918 of SEQ ID NO: 487
acuuguccucaaggaacuu

SEQ ID NO: 40951 - RNA, 19 nt, Artificial Sequence
  Description of Artificial Sequence: Synthetic oligonucleotide
  Antisense strand to SEQ ID NO: 40950
aaguuccuugaggacaagu

SEQ ID NO: 40952 - RNA, 19 nt, Artificial Sequence
  Description of Artificial Sequence: Synthetic oligonucleotide
  Sense strand starting at position 2937 of SEQ ID NO: 487
uuagucuagcaucauugau

SEQ ID NO: 40953 - RNA, 19 nt, Artificial Sequence
  Description of Artificial Sequence: Synthetic oligonucleotide
  Antisense strand to SEQ ID NO: 40952
aucaaugaugcuagacuaa

SEQ ID NO: 40954 - RNA, 19 nt, Artificial Sequence
  Description of Artificial Sequence: Synthetic oligonucleotide
  Sense strand starting at position 2939 of SEQ ID NO: 487
agucuagcaucauugauga

SEQ ID NO: 40955 - RNA, 19 nt, Artificial Sequence
  Description of Artificial Sequence: Synthetic oligonucleotide
  Antisense strand to SEQ ID NO: 40954
ucaucaaugaugcuagacu

SEQ ID NO: 40956 - RNA, 19 nt, Artificial Sequence
  Description of Artificial Sequence: Synthetic oligonucleotide
  Sense strand starting at position 3235 of SEQ ID NO: 487
guaguaauacucuagcaca

SEQ ID NO: 40957 - RNA, 19 nt, Artificial Sequence
  Description of Artificial Sequence: Synthetic oligonucleotide
  Antisense strand to SEQ ID NO: 40956
ugugcuagaguauuacuac

SEQ ID NO: 40958 - RNA, 19 nt, Artificial Sequence
  Description of Artificial Sequence: Synthetic oligonucleotide
  Sense strand starting at position 3346 of SEQ ID NO: 487
acaguaugauaaguuguua

SEQ ID NO: 40959 - RNA, 19 nt, Artificial Sequence
  Description of Artificial Sequence: Synthetic oligonucleotide
  Antisense strand to SEQ ID NO: 40958
uaacaacuuaucauacugu

SEQ ID NO: 40960 - RNA, 19 nt, Artificial Sequence
  Description of Artificial Sequence: Synthetic oligonucleotide
  Sense strand starting at position 3358 of SEQ ID NO: 487
guuguuagaaauuggaaua

SEQ ID NO: 40961 - RNA, 19 nt, Artificial Sequence
  Description of Artificial Sequence: Synthetic oligonucleotide
  Antisense strand to SEQ ID NO: 40960
uauuccaauuucuaacaac

SEQ ID NO: 40962 - RNA, 19 nt, Artificial Sequence
  Description of Artificial Sequence: Synthetic oligonucleotide
  Sense strand starting at position 3371 of SEQ ID NO: 487
ggaauauauuucugggaaa

SEQ ID NO: 40963 - RNA, 19 nt, Artificial Sequence
  Description of Artificial Sequence: Synthetic oligonucleotide
  Antisense strand to SEQ ID NO: 40962
uuucccagaaauauauucc

SEQ ID NO: 40964 - RNA, 19 nt, Artificial Sequence
  Description of Artificial Sequence: Synthetic oligonucleotide
  Sense strand starting at position 3374 of SEQ ID NO: 487
auauauuucugggaaacua

SEQ ID NO: 40965 - RNA, 19 nt, Artificial Sequence
  Description of Artificial Sequence: Synthetic oligonucleotide
  Antisense strand to SEQ ID NO: 40964
uaguuucccagaaauauau

SEQ ID NO: 40966 - RNA, 19 nt, Artificial Sequence
  Description of Artificial Sequence: Synthetic oligonucleotide
  Sense strand starting at position 3424 of SEQ ID NO: 487
aguucacucguguugccua

SEQ ID NO: 40967 - RNA, 19 nt, Artificial Sequence
  Description of Artificial Sequence: Synthetic oligonucleotide
  Antisense strand to SEQ ID NO: 40966
uaggcaacacgagugaacu

SEQ ID NO: 40968 - RNA, 19 nt, Artificial Sequence
  Description of Artificial Sequence: Synthetic oligonucleotide
  Sense strand starting at position 3919 of SEQ ID NO: 487
uguguauucuaaucuaaug

SEQ ID NO: 40969 - RNA, 19 nt, Artificial Sequence
  Description of Artificial Sequence: Synthetic oligonucleotide
  Antisense strand to SEQ ID NO: 40968
cauuagauuagaauacaca

SEQ ID NO: 40970 - RNA, 19 nt, Artificial Sequence
  Description of Artificial Sequence: Synthetic oligonucleotide
  Sense strand starting at position 3981 of SEQ ID NO: 487
augugaaacuaauuaggua

SEQ ID NO: 40971 - RNA, 19 nt, Artificial Sequence
  Description of Artificial Sequence: Synthetic oligonucleotide
  Antisense strand to SEQ ID NO: 40970
uaccuaauuaguuucacau

SEQ ID NO: 40972 - RNA, 19 nt, Artificial Sequence
  Description of Artificial Sequence: Synthetic oligonucleotide
  Sense strand starting at position 3842 of SEQ ID NO: 488
ucacucacauggguucuaa

SEQ ID NO: 40973 - RNA, 19 nt, Artificial Sequence
  Description of Artificial Sequence: Synthetic oligonucleotide
  Antisense strand to SEQ ID NO: 40972
uuagaacccaugugaguga

SEQ ID NO: 40974 - RNA, 19 nt, Artificial Sequence
  Description of Artificial Sequence: Synthetic oligonucleotide
  Sense strand starting at position 3774 of SEQ ID NO: 488
agauaaggccugugaagua

SEQ ID NO: 40975 - RNA, 19 nt, Artificial Sequence
  Description of Artificial Sequence: Synthetic oligonucleotide
  Antisense strand to SEQ ID NO: 40974
uacuucacaggccuuaucu

SEQ ID NO: 40976 - RNA, 19 nt, Artificial Sequence
  Description of Artificial Sequence: Synthetic oligonucleotide
  Sense strand starting at position 3772 of SEQ ID NO: 488
ugagauaaggccugugaag

SEQ ID NO: 40977 - RNA, 19 nt, Artificial Sequence
  Description of Artificial Sequence: Synthetic oligonucleotide
  Antisense strand to SEQ ID NO: 40976
cuucacaggccuuaucuca

SEQ ID NO: 40978 - RNA, 19 nt, Artificial Sequence
  Description of Artificial Sequence: Synthetic oligonucleotide
  Sense strand starting at position 3753 of SEQ ID NO: 488
agguguuaugaguauugaa

SEQ ID NO: 40979 - RNA, 19 nt, Artificial Sequence
  Description of Artificial Sequence: Synthetic oligonucleotide
  Antisense strand to SEQ ID NO: 40978
uucaauacucauaacaccu

SEQ ID NO: 40980 - RNA, 19 nt, Artificial Sequence
  Description of Artificial Sequence: Synthetic oligonucleotide
  Sense strand starting at position 3742 of SEQ ID NO: 488
cucucugaccaagguguua

SEQ ID NO: 40981 - RNA, 19 nt, Artificial Sequence
  Description of Artificial Sequence: Synthetic oligonucleotide
  Antisense strand to SEQ ID NO: 40980
uaacaccuuggucagagag

SEQ ID NO: 40982 - RNA, 19 nt, Artificial Sequence
  Description of Artificial Sequence: Synthetic oligonucleotide
  Sense strand starting at position 3691 of SEQ ID NO: 488
ggacaaacuucucucaguu

SEQ ID NO: 40983 - RNA, 19 nt, Artificial Sequence
  Description of Artificial Sequence: Synthetic oligonucleotide
  Antisense strand to SEQ ID NO: 40982
aacugagagaaguuugucc

SEQ ID NO: 40984 - RNA, 19 nt, Artificial Sequence
  Description of Artificial Sequence: Synthetic oligonucleotide
  Sense strand starting at position 3690 of SEQ ID NO: 488
uggacaaacuucucucagu

SEQ ID NO: 40985 - RNA, 19 nt, Artificial Sequence
  Description of Artificial Sequence: Synthetic oligonucleotide
  Antisense strand to SEQ ID NO: 40984
acugagagaaguuugucca

SEQ ID NO: 40986 - RNA, 19 nt, Artificial Sequence
  Description of Artificial Sequence: Synthetic oligonucleotide
  Sense strand starting at position 3604 of SEQ ID NO: 488
uuuacauacccugguuuga

SEQ ID NO: 40987 - RNA, 19 nt, Artificial Sequence
  Description of Artificial Sequence: Synthetic oligonucleotide
  Antisense strand to SEQ ID NO: 40986
ucaaaccaggguauguaaa

SEQ ID NO: 40988 - RNA, 19 nt, Artificial Sequence
  Description of Artificial Sequence: Synthetic oligonucleotide
  Sense strand starting at position 3594 of SEQ ID NO: 488
acuggaguucuuuacauac

SEQ ID NO: 40989 - RNA, 19 nt, Artificial Sequence
  Description of Artificial Sequence: Synthetic oligonucleotide
  Antisense strand to SEQ ID NO: 40988
guauguaaagaacuccagu

SEQ ID NO: 40990 - RNA, 19 nt, Artificial Sequence
  Description of Artificial Sequence: Synthetic oligonucleotide
  Sense strand starting at position 3538 of SEQ ID NO: 488
ggaggaacguaaucauucu

SEQ ID NO: 40991 - RNA, 19 nt, Artificial Sequence
  Description of Artificial Sequence: Synthetic oligonucleotide
  Antisense strand to SEQ ID NO: 40990
agaaugauuacguuccucc

SEQ ID NO: 40992 - RNA, 19 nt, Artificial Sequence
  Description of Artificial Sequence: Synthetic oligonucleotide
  Sense strand starting at position 3430 of SEQ ID NO: 488
ccaacagacuuguugagaa

SEQ ID NO: 40993 - RNA, 19 nt, Artificial Sequence
  Description of Artificial Sequence: Synthetic oligonucleotide
  Antisense strand to SEQ ID NO: 40992
uucucaacaagucuguugg

SEQ ID NO: 40994 - RNA, 19 nt, Artificial Sequence
  Description of Artificial Sequence: Synthetic oligonucleotide
  Sense strand starting at position 3408 of SEQ ID NO: 488
gaaguaaccugagaaagau

SEQ ID NO: 40995 - RNA, 19 nt, Artificial Sequence
  Description of Artificial Sequence: Synthetic oligonucleotide
  Antisense strand to SEQ ID NO: 40994
aucuuucucagguuacuuc

SEQ ID NO: 40996 - RNA, 19 nt, Artificial Sequence
  Description of Artificial Sequence: Synthetic oligonucleotide
  Sense strand starting at position 3338 of SEQ ID NO: 488
gucacuguacaauaaugau

SEQ ID NO: 40997 - RNA, 19 nt, Artificial Sequence
  Description of Artificial Sequence: Synthetic oligonucleotide
  Antisense strand to SEQ ID NO: 40996
aucauuauuguacagugac

SEQ ID NO: 40998 - RNA, 19 nt, Artificial Sequence
  Description of Artificial Sequence: Synthetic oligonucleotide
  Sense strand starting at position 3335 of SEQ ID NO: 488
auggucacuguacaauaau

SEQ ID NO: 40999 - RNA, 19 nt, Artificial Sequence
  Description of Artificial Sequence: Synthetic oligonucleotide
  Antisense strand to SEQ ID NO: 40998
auuauuguacagugaccau

SEQ ID NO: 41000 - RNA, 19 nt, Artificial Sequence
  Description of Artificial Sequence: Synthetic oligonucleotide
  Sense strand starting at position 3331 of SEQ ID NO: 488
ugacauggucacuguacaa

SEQ ID NO: 41001 - RNA, 19 nt, Artificial Sequence
  Description of Artificial Sequence: Synthetic oligonucleotide
  Antisense strand to SEQ ID NO: 41000
uuguacagugaccauguca

SEQ ID NO: 41002 - RNA, 19 nt, Artificial Sequence
  Description of Artificial Sequence: Synthetic oligonucleotide
  Sense strand starting at position 3330 of SEQ ID NO: 488
augacauggucacuguaca

SEQ ID NO: 41003 - RNA, 19 nt, Artificial Sequence
  Description of Artificial Sequence: Synthetic oligonucleotide
  Antisense strand to SEQ ID NO: 41002
uguacagugaccaugucau

SEQ ID NO: 41004 - RNA, 19 nt, Artificial Sequence
  Description of Artificial Sequence: Synthetic oligonucleotide
  Sense strand starting at position 3328 of SEQ ID NO: 488
caaugacauggucacugua

SEQ ID NO: 41005 - RNA, 19 nt, Artificial Sequence
  Description of Artificial Sequence: Synthetic oligonucleotide
  Antisense strand to SEQ ID NO: 41004
uacagugaccaugucauug

SEQ ID NO: 41006 - RNA, 19 nt, Artificial Sequence
  Description of Artificial Sequence: Synthetic oligonucleotide
  Sense strand starting at position 3255 of SEQ ID NO: 488
agagaauacuuuguucuuu

SEQ ID NO: 41007 - RNA, 19 nt, Artificial Sequence
  Description of Artificial Sequence: Synthetic oligonucleotide
  Antisense strand to SEQ ID NO: 41006
aaagaacaaaguauucucu

SEQ ID NO: 41008 - RNA, 19 nt, Artificial Sequence
  Description of Artificial Sequence: Synthetic oligonucleotide
  Sense strand starting at position 3230 of SEQ ID NO: 488
gauggcugaguugaaugau

SEQ ID NO: 41009 - RNA, 19 nt, Artificial Sequence
  Description of Artificial Sequence: Synthetic oligonucleotide
  Antisense strand to SEQ ID NO: 41008
aucauucaacucagccauc

SEQ ID NO: 41010 - RNA, 19 nt, Artificial Sequence
  Description of Artificial Sequence: Synthetic oligonucleotide
  Sense strand starting at position 3227 of SEQ ID NO: 488
aaugauggcugaguugaau

SEQ ID NO: 41011 - RNA, 19 nt, Artificial Sequence
  Description of Artificial Sequence: Synthetic oligonucleotide
  Antisense strand to SEQ ID NO: 41010
auucaacucagccaucauu

SEQ ID NO: 41012 - RNA, 19 nt, Artificial Sequence
  Description of Artificial Sequence: Synthetic oligonucleotide
  Sense strand starting at position 3224 of SEQ ID NO: 488
guuaaugauggcugaguug

SEQ ID NO: 41013 - RNA, 19 nt, Artificial Sequence
  Description of Artificial Sequence: Synthetic oligonucleotide
  Antisense strand to SEQ ID NO: 41012
caacucagccaucauuaac

SEQ ID NO: 41014 - RNA, 19 nt, Artificial Sequence
  Description of Artificial Sequence: Synthetic oligonucleotide
  Sense strand starting at position 3223 of SEQ ID NO: 488
aguuaaugauggcugaguu

SEQ ID NO: 41015 - RNA, 19 nt, Artificial Sequence
  Description of Artificial Sequence: Synthetic oligonucleotide
  Antisense strand to SEQ ID NO: 41014
aacucagccaucauuaacu

SEQ ID NO: 41016 - RNA, 19 nt, Artificial Sequence
  Description of Artificial Sequence: Synthetic oligonucleotide
  Sense strand starting at position 3177 of SEQ ID NO: 488
cucagucaccucuggauca

SEQ ID NO: 41017 - RNA, 19 nt, Artificial Sequence
  Description of Artificial Sequence: Synthetic oligonucleotide
  Antisense strand to SEQ ID NO: 41016
ugauccagaggugacugag

SEQ ID NO: 41018 - RNA, 19 nt, Artificial Sequence
  Description of Artificial Sequence: Synthetic oligonucleotide
  Sense strand starting at position 3046 of SEQ ID NO: 488
caaugcuggcucugauaag

SEQ ID NO: 41019 - RNA, 19 nt, Artificial Sequence
  Description of Artificial Sequence: Synthetic oligonucleotide
  Antisense strand to SEQ ID NO: 41018
cuuaucagagccagcauug

SEQ ID NO: 41020 - RNA, 19 nt, Artificial Sequence
  Description of Artificial Sequence: Synthetic oligonucleotide
  Sense strand starting at position 3029 of SEQ ID NO: 488
ggacuuggcucauuccuca

SEQ ID NO: 41021 - RNA, 19 nt, Artificial Sequence
  Description of Artificial Sequence: Synthetic oligonucleotide
  Antisense strand to SEQ ID NO: 41020
ugaggaaugagccaagucc

SEQ ID NO: 41022 - RNA, 19 nt, Artificial Sequence
  Description of Artificial Sequence: Synthetic oligonucleotide
  Sense strand starting at position 2807 of SEQ ID NO: 488
uugucaguagcgcuacaua

SEQ ID NO: 41023 - RNA, 19 nt, Artificial Sequence
  Description of Artificial Sequence: Synthetic oligonucleotide
  Antisense strand to SEQ ID NO: 41022
uauguagcgcuacugacaa

SEQ ID NO: 41024 - RNA, 19 nt, Artificial Sequence
  Description of Artificial Sequence: Synthetic oligonucleotide
  Sense strand starting at position 2798 of SEQ ID NO: 488
aggagucucuugucaguag

SEQ ID NO: 41025 - RNA, 19 nt, Artificial Sequence
  Description of Artificial Sequence: Synthetic oligonucleotide
  Antisense strand to SEQ ID NO: 41024
cuacugacaagagacuccu

SEQ ID NO: 41026 - RNA, 19 nt, Artificial Sequence
  Description of Artificial Sequence: Synthetic oligonucleotide
  Sense strand starting at position 2729 of SEQ ID NO: 488
ucaauuccucugugagguu

SEQ ID NO: 41027 - RNA, 19 nt, Artificial Sequence
  Description of Artificial Sequence: Synthetic oligonucleotide
  Antisense strand to SEQ ID NO: 41026
aaccucacagaggaauuga

SEQ ID NO: 41028 - RNA, 19 nt, Artificial Sequence
  Description of Artificial Sequence: Synthetic oligonucleotide
  Sense strand starting at position 2663 of SEQ ID NO: 488
ugagccuaagccuauuaau

SEQ ID NO: 41029 - RNA, 19 nt, Artificial Sequence
  Description of Artificial Sequence: Synthetic oligonucleotide
  Antisense strand to SEQ ID NO: 41028
auuaauaggcuuaggcuca

SEQ ID NO: 41030 - RNA, 19 nt, Artificial Sequence
  Description of Artificial Sequence: Synthetic oligonucleotide
  Sense strand starting at position 2660 of SEQ ID NO: 488
ggaugagccuaagccuauu

SEQ ID NO: 41031 - RNA, 19 nt, Artificial Sequence
  Description of Artificial Sequence: Synthetic oligonucleotide
  Antisense strand to SEQ ID NO: 41030
aauaggcuuaggcucaucc

SEQ ID NO: 41032 - RNA, 19 nt, Artificial Sequence
  Description of Artificial Sequence: Synthetic oligonucleotide
  Sense strand starting at position 2640 of SEQ ID NO: 488
agucuaagugaggacuagu

SEQ ID NO: 41033 - RNA, 19 nt, Artificial Sequence
  Description of Artificial Sequence: Synthetic oligonucleotide
  Antisense strand to SEQ ID NO: 41032
acuaguccucacuuagacu

SEQ ID NO: 41034 - RNA, 19 nt, Artificial Sequence
  Description of Artificial Sequence: Synthetic oligonucleotide
  Sense strand starting at position 2602 of SEQ ID NO: 488
ugaggugauuaaucacguu

SEQ ID NO: 41035 - RNA, 19 nt, Artificial Sequence
  Description of Artificial Sequence: Synthetic oligonucleotide
  Antisense strand to SEQ ID NO: 41034
aacgugauuaaucaccuca

SEQ ID NO: 41036 - RNA, 19 nt, Artificial Sequence
  Description of Artificial Sequence: Synthetic oligonucleotide
  Sense strand starting at position 2468 of SEQ ID NO: 488
gcaccugacccuuagauga

SEQ ID NO: 41037 - RNA, 19 nt, Artificial Sequence
  Description of Artificial Sequence: Synthetic oligonucleotide
  Antisense strand to SEQ ID NO: 41036
ucaucuaagggucaggugc

SEQ ID NO: 41038 - RNA, 19 nt, Artificial Sequence
  Description of Artificial Sequence: Synthetic oligonucleotide
  Sense strand starting at position 2258 of SEQ ID NO: 488
aaaggaguccaguguuacu

SEQ ID NO: 41039 - RNA, 19 nt, Artificial Sequence
  Description of Artificial Sequence: Synthetic oligonucleotide
  Antisense strand to SEQ ID NO: 41038
aguaacacuggacuccuuu

SEQ ID NO: 41040 - RNA, 19 nt, Artificial Sequence
  Description of Artificial Sequence: Synthetic oligonucleotide
  Sense strand starting at position 2107 of SEQ ID NO: 488
agugcuagcgcucuaugau

SEQ ID NO: 41041 - RNA, 19 nt, Artificial Sequence
  Description of Artificial Sequence: Synthetic oligonucleotide
  Antisense strand to SEQ ID NO: 41040
aucauagagcgcuagcacu

SEQ ID NO: 41042 - RNA, 19 nt, Artificial Sequence
  Description of Artificial Sequence: Synthetic oligonucleotide
  Sense strand starting at position 2106 of SEQ ID NO: 488
cagugcuagcgcucuauga

SEQ ID NO: 41043 - RNA, 19 nt, Artificial Sequence
  Description of Artificial Sequence: Synthetic oligonucleotide
  Antisense strand to SEQ ID NO: 41042
ucauagagcgcuagcacug

SEQ ID NO: 41044 - RNA, 19 nt, Artificial Sequence
  Description of Artificial Sequence: Synthetic oligonucleotide
  Sense strand starting at position 670 of SEQ ID NO: 488
cugacuggucaugaacagu

SEQ ID NO: 41045 - RNA, 19 nt, Artificial Sequence
  Description of Artificial Sequence: Synthetic oligonucleotide
  Antisense strand to SEQ ID NO: 41044
acuguucaugaccagucag

SEQ ID NO: 41046 - RNA, 19 nt, Artificial Sequence
  Description of Artificial Sequence: Synthetic oligonucleotide
  Sense strand starting at position 666 of SEQ ID NO: 488
cccacugacuggucaugaa

SEQ ID NO: 41047 - RNA, 19 nt, Artificial Sequence
  Description of Artificial Sequence: Synthetic oligonucleotide
  Antisense strand to SEQ ID NO: 41046
uucaugaccagucaguggg

SEQ ID NO: 41048 - RNA, 19 nt, Artificial Sequence
  Description of Artificial Sequence: Synthetic oligonucleotide
  Sense strand starting at position 234 of SEQ ID NO: 488
gaaggaaucucugcugcag

SEQ ID NO: 41049 - RNA, 19 nt, Artificial Sequence
  Description of Artificial Sequence: Synthetic oligonucleotide
  Antisense strand to SEQ ID NO: 41048
cugcagcagagauuccuuc

SEQ ID NO: 41050 - RNA, 19 nt, Artificial Sequence
  Description of Artificial Sequence: Synthetic oligonucleotide
  Sense strand starting at position 45 of SEQ ID NO: 488
augagaggcugacuucgaa

SEQ ID NO: 41051 - RNA, 19 nt, Artificial Sequence
  Description of Artificial Sequence: Synthetic oligonucleotide
  Antisense strand to SEQ ID NO: 41050
uucgaagucagccucucau

SEQ ID NO: 41052 - RNA, 19 nt, Artificial Sequence
  Description of Artificial Sequence: Synthetic oligonucleotide
  Sense strand starting at position 89 of SEQ ID NO: 489
ggccgauaugcagagaggu

SEQ ID NO: 41053 - RNA, 19 nt, Artificial Sequence
  Description of Artificial Sequence: Synthetic oligonucleotide
  Antisense strand to SEQ ID NO: 41052
accucucugcauaucggcc

SEQ ID NO: 41054 - RNA, 19 nt, Artificial Sequence
  Description of Artificial Sequence: Synthetic oligonucleotide
  Sense strand starting at position 91 of SEQ ID NO: 489
ccgauaugcagagagguuu

SEQ ID NO: 41055 - RNA, 19 nt, Artificial Sequence
  Description of Artificial Sequence: Synthetic oligonucleotide
  Antisense strand to SEQ ID NO: 41054
aaaccucucugcauaucgg

SEQ ID NO: 41056 - RNA, 19 nt, Artificial Sequence
  Description of Artificial Sequence: Synthetic oligonucleotide
  Sense strand starting at position 163 of SEQ ID NO: 489
ccagcuuugugaucuugga

SEQ ID NO: 41057 - RNA, 19 nt, Artificial Sequence
  Description of Artificial Sequence: Synthetic oligonucleotide
  Antisense strand to SEQ ID NO: 41056
uccaagaucacaaagcugg

SEQ ID NO: 41058 - RNA, 19 nt, Artificial Sequence
  Description of Artificial Sequence: Synthetic oligonucleotide
  Sense strand starting at position 259 of SEQ ID NO: 489
agcguuguugugaggauga

SEQ ID NO: 41059 - RNA, 19 nt, Artificial Sequence
  Description of Artificial Sequence: Synthetic oligonucleotide
  Antisense strand to SEQ ID NO: 41058
ucauccucacaacaacgcu

SEQ ID NO: 41060 - RNA, 19 nt, Artificial Sequence
  Description of Artificial Sequence: Synthetic oligonucleotide
  Sense strand starting at position 730 of SEQ ID NO: 489
cuacucucaccucgagauu

SEQ ID NO: 41061 - RNA, 19 nt, Artificial Sequence
  Description of Artificial Sequence: Synthetic oligonucleotide
  Antisense strand to SEQ ID NO: 41060
aaucucgaggugagaguag

SEQ ID NO: 41062 - RNA, 19 nt, Artificial Sequence
  Description of Artificial Sequence: Synthetic oligonucleotide
  Sense strand starting at position 733 of SEQ ID NO: 489
cucucaccucgagauucuu

SEQ ID NO: 41063 - RNA, 19 nt, Artificial Sequence
  Description of Artificial Sequence: Synthetic oligonucleotide
  Antisense strand to SEQ ID NO: 41062
aagaaucucgaggugagag

SEQ ID NO: 41064 - RNA, 19 nt, Artificial Sequence
  Description of Artificial Sequence: Synthetic oligonucleotide
  Sense strand starting at position 743 of SEQ ID NO: 489
gagauucuuucugugggaa

SEQ ID NO: 41065 - RNA, 19 nt, Artificial Sequence
  Description of Artificial Sequence: Synthetic oligonucleotide
  Antisense strand to SEQ ID NO: 41064
uucccacagaaagaaucuc

SEQ ID NO: 41066 - RNA, 19 nt, Artificial Sequence
  Description of Artificial Sequence: Synthetic oligonucleotide
  Sense strand starting at position 744 of SEQ ID NO: 489
agauucuuucugugggaag

SEQ ID NO: 41067 - RNA, 19 nt, Artificial Sequence
  Description of Artificial Sequence: Synthetic oligonucleotide
  Antisense strand to SEQ ID NO: 41066
cuucccacagaaagaaucu

SEQ ID NO: 41068 - RNA, 19 nt, Artificial Sequence
  Description of Artificial Sequence: Synthetic oligonucleotide
  Sense strand starting at position 812 of SEQ ID NO: 489
ccagauaugcugcagauaa

SEQ ID NO: 41069 - RNA, 19 nt, Artificial Sequence
  Description of Artificial Sequence: Synthetic oligonucleotide
  Antisense strand to SEQ ID NO: 41068
uuaucugcagcauaucugg

SEQ ID NO: 41070 - RNA, 19 nt, Artificial Sequence
  Description of Artificial Sequence: Synthetic oligonucleotide
  Sense strand starting at position 1018 of SEQ ID NO: 489
gcccgggaagcgucuguua

SEQ ID NO: 41071 - RNA, 19 nt, Artificial Sequence
  Description of Artificial Sequence: Synthetic oligonucleotide
  Antisense strand to SEQ ID NO: 41070
uaacagacgcuucccgggc

SEQ ID NO: 41072 - RNA, 19 nt, Artificial Sequence
  Description of Artificial Sequence: Synthetic oligonucleotide
  Sense strand starting at position 1029 of SEQ ID NO: 489
gucuguuaccgagaguuua

SEQ ID NO: 41073 - RNA, 19 nt, Artificial Sequence
  Description of Artificial Sequence: Synthetic oligonucleotide
  Antisense strand to SEQ ID NO: 41072
uaaacucucgguaacagac

SEQ ID NO: 41074 - RNA, 19 nt, Artificial Sequence
  Description of Artificial Sequence: Synthetic oligonucleotide
  Sense strand starting at position 1062 of SEQ ID NO: 489
gcaggaaauaugcgagaca

SEQ ID NO: 41075 - RNA, 19 nt, Artificial Sequence
  Description of Artificial Sequence: Synthetic oligonucleotide
  Antisense strand to SEQ ID NO: 41074
ugucucgcauauuuccugc

SEQ ID NO: 41076 - RNA, 19 nt, Artificial Sequence
  Description of Artificial Sequence: Synthetic oligonucleotide
  Sense strand starting at position 1268 of SEQ ID NO: 489
aggagauacuuggcuguga

SEQ ID NO: 41077 - RNA, 19 nt, Artificial Sequence
  Description of Artificial Sequence: Synthetic oligonucleotide
  Antisense strand to SEQ ID NO: 41076
ucacagccaaguaucuccu

SEQ ID NO: 41078 - RNA, 19 nt, Artificial Sequence
  Description of Artificial Sequence: Synthetic oligonucleotide
  Sense strand starting at position 1270 of SEQ ID NO: 489
gagauacuuggcugugagu

SEQ ID NO: 41079 - RNA, 19 nt, Artificial Sequence
  Description of Artificial Sequence: Synthetic oligonucleotide
  Antisense strand to SEQ ID NO: 41078
acucacagccaaguaucuc

SEQ ID NO: 41080 - RNA, 19 nt, Artificial Sequence
  Description of Artificial Sequence: Synthetic oligonucleotide
  Sense strand starting at position 1272 of SEQ ID NO: 489
gauacuuggcugugaguga

SEQ ID NO: 41081 - RNA, 19 nt, Artificial Sequence
  Description of Artificial Sequence: Synthetic oligonucleotide
  Antisense strand to SEQ ID NO: 41080
ucacucacagccaaguauc

SEQ ID NO: 41082 - RNA, 19 nt, Artificial Sequence
  Description of Artificial Sequence: Synthetic oligonucleotide
  Sense strand starting at position 1536 of SEQ ID NO: 489
ucucucuucucgucaagag

SEQ ID NO: 41083 - RNA, 19 nt, Artificial Sequence
  Description of Artificial Sequence: Synthetic oligonucleotide
  Antisense strand to SEQ ID NO: 41082
cucuugacgagaagagaga

SEQ ID NO: 41084 - RNA, 19 nt, Artificial Sequence
  Description of Artificial Sequence: Synthetic oligonucleotide
  Sense strand starting at position 1537 of SEQ ID NO: 489
cucucuucucgucaagaga

SEQ ID NO: 41085 - RNA, 19 nt, Artificial Sequence
  Description of Artificial Sequence: Synthetic oligonucleotide
  Antisense strand to SEQ ID NO: 41084
ucucuugacgagaagagag

SEQ ID NO: 41086 - RNA, 19 nt, Artificial Sequence
  Description of Artificial Sequence: Synthetic oligonucleotide
  Sense strand starting at position 1540 of SEQ ID NO: 489
ucuucucgucaagagaagu

SEQ ID NO: 41087 - RNA, 19 nt, Artificial Sequence
  Description of Artificial Sequence: Synthetic oligonucleotide
  Antisense strand to SEQ ID NO: 41086
acuucucuugacgagaaga

SEQ ID NO: 41088 - RNA, 19 nt, Artificial Sequence
  Description of Artificial Sequence: Synthetic oligonucleotide
  Sense strand starting at position 1591 of SEQ ID NO: 489
ccgagcucugucguuaaug

SEQ ID NO: 41089 - RNA, 19 nt, Artificial Sequence
  Description of Artificial Sequence: Synthetic oligonucleotide
  Antisense strand to SEQ ID NO: 41088
cauuaacgacagagcucgg

SEQ ID NO: 41090 - RNA, 19 nt, Artificial Sequence
  Description of Artificial Sequence: Synthetic oligonucleotide
  Sense strand starting at position 1998 of SEQ ID NO: 489
cucagaaggguguguucca

SEQ ID NO: 41091 - RNA, 19 nt, Artificial Sequence
  Description of Artificial Sequence: Synthetic oligonucleotide
  Antisense strand to SEQ ID NO: 41090
uggaacacacccuucugag

SEQ ID NO: 41092 - RNA, 19 nt, Artificial Sequence
  Description of Artificial Sequence: Synthetic oligonucleotide
  Sense strand starting at position 2018 of SEQ ID NO: 489
guuccagggaauuguguaa

SEQ ID NO: 41093 - RNA, 19 nt, Artificial Sequence
  Description of Artificial Sequence: Synthetic oligonucleotide
  Antisense strand to SEQ ID NO: 41092
uuacacaauucccuggaac

SEQ ID NO: 41094 - RNA, 19 nt, Artificial Sequence
  Description of Artificial Sequence: Synthetic oligonucleotide
  Sense strand starting at position 2025 of SEQ ID NO: 489
ggaauuguguaacccaaua

SEQ ID NO: 41095 - RNA, 19 nt, Artificial Sequence
  Description of Artificial Sequence: Synthetic oligonucleotide
  Antisense strand to SEQ ID NO: 41094
uauuggguuacacaauucc

SEQ ID NO: 41096 - RNA, 19 nt, Artificial Sequence
  Description of Artificial Sequence: Synthetic oligonucleotide
  Sense strand starting at position 2074 of SEQ ID NO: 489
gugcauugcccauagacca

SEQ ID NO: 41097 - RNA, 19 nt, Artificial Sequence
  Description of Artificial Sequence: Synthetic oligonucleotide
  Antisense strand to SEQ ID NO: 41096
uggucuaugggcaaugcac

SEQ ID NO: 41098 - RNA, 19 nt, Artificial Sequence
  Description of Artificial Sequence: Synthetic oligonucleotide
  Sense strand starting at position 2178 of SEQ ID NO: 489
aggaauguuuacccacaau

SEQ ID NO: 41099 - RNA, 19 nt, Artificial Sequence
  Description of Artificial Sequence: Synthetic oligonucleotide
  Antisense strand to SEQ ID NO: 41098
auuguggguaaacauuccu

SEQ ID NO: 41100 - RNA, 19 nt, Artificial Sequence
  Description of Artificial Sequence: Synthetic oligonucleotide
  Sense strand starting at position 2327 of SEQ ID NO: 489
gcucauaguuuauuggauu

SEQ ID NO: 41101 - RNA, 19 nt, Artificial Sequence
  Description of Artificial Sequence: Synthetic oligonucleotide
  Antisense strand to SEQ ID NO: 41100
aauccaauaaacuaugagc

SEQ ID NO: 41102 - RNA, 19 nt, Artificial Sequence
  Description of Artificial Sequence: Synthetic oligonucleotide
  Sense strand starting at position 2379 of SEQ ID NO: 489
agcagacuguccuuaacau

SEQ ID NO: 41103 - RNA, 19 nt, Artificial Sequence
  Description of Artificial Sequence: Synthetic oligonucleotide
  Antisense strand to SEQ ID NO: 41102
auguuaaggacagucugcu

SEQ ID NO: 41104 - RNA, 19 nt, Artificial Sequence
  Description of Artificial Sequence: Synthetic oligonucleotide
  Sense strand starting at position 2380 of SEQ ID NO: 489
gcagacuguccuuaacaua

SEQ ID NO: 41105 - RNA, 19 nt, Artificial Sequence
  Description of Artificial Sequence: Synthetic oligonucleotide
  Antisense strand to SEQ ID NO: 41104
uauguuaaggacagucugc

SEQ ID NO: 41106 - RNA, 19 nt, Artificial Sequence
  Description of Artificial Sequence: Synthetic oligonucleotide
  Sense strand starting at position 2511 of SEQ ID NO: 489
ggcucugcucgcucaguga

SEQ ID NO: 41107 - RNA, 19 nt, Artificial Sequence
  Description of Artificial Sequence: Synthetic oligonucleotide
  Antisense strand to SEQ ID NO: 41106
ucacugagcgagcagagcc

SEQ ID NO: 41108 - RNA, 19 nt, Artificial Sequence
  Description of Artificial Sequence: Synthetic oligonucleotide
  Sense strand starting at position 2560 of SEQ ID NO: 489
accagaauccuggguauuc

SEQ ID NO: 41109 - RNA, 19 nt, Artificial Sequence
  Description of Artificial Sequence: Synthetic oligonucleotide
  Antisense strand to SEQ ID NO: 41108
gaauacccaggauucuggu

SEQ ID NO: 41110 - RNA, 19 nt, Artificial Sequence
  Description of Artificial Sequence: Synthetic oligonucleotide
  Sense strand starting at position 2687 of SEQ ID NO: 489
uugccuagauaaucgcaau

SEQ ID NO: 41111 - RNA, 19 nt, Artificial Sequence
  Description of Artificial Sequence: Synthetic oligonucleotide
  Antisense strand to SEQ ID NO: 41110
auugcgauuaucuaggcaa

SEQ ID NO: 41112 - RNA, 19 nt, Artificial Sequence
  Description of Artificial Sequence: Synthetic oligonucleotide
  Sense strand starting at position 2772 of SEQ ID NO: 489
cagccagugcgauaucaau

SEQ ID NO: 41113 - RNA, 19 nt, Artificial Sequence
  Description of Artificial Sequence: Synthetic oligonucleotide
  Antisense strand to SEQ ID NO: 41112
auugauaucgcacuggcug

SEQ ID NO: 41114 - RNA, 19 nt, Artificial Sequence
  Description of Artificial Sequence: Synthetic oligonucleotide
  Sense strand starting at position 2868 of SEQ ID NO: 489
cccuuuggauggucuacaa

SEQ ID NO: 41115 - RNA, 19 nt, Artificial Sequence
  Description of Artificial Sequence: Synthetic oligonucleotide
  Antisense strand to SEQ ID NO: 41114
uuguagaccauccaaaggg

SEQ ID NO: 41116 - RNA, 19 nt, Artificial Sequence
  Description of Artificial Sequence: Synthetic oligonucleotide
  Sense strand starting at position 3212 of SEQ ID NO: 489
ucugauauuggcugucuca

SEQ ID NO: 41117 - RNA, 19 nt, Artificial Sequence
  Description of Artificial Sequence: Synthetic oligonucleotide
  Antisense strand to SEQ ID NO: 41116
ugagacagccaauaucaga

SEQ ID NO: 41118 - RNA, 19 nt, Artificial Sequence
  Description of Artificial Sequence: Synthetic oligonucleotide
  Sense strand starting at position 3215 of SEQ ID NO: 489
gauauuggcugucucaauc

SEQ ID NO: 41119 - RNA, 19 nt, Artificial Sequence
  Description of Artificial Sequence: Synthetic oligonucleotide
  Antisense strand to SEQ ID NO: 41118
gauugagacagccaauauc

SEQ ID NO: 41120 - RNA, 19 nt, Artificial Sequence
  Description of Artificial Sequence: Synthetic oligonucleotide
  Sense strand starting at position 3243 of SEQ ID NO: 489
cugaaaguuccauaagagc

SEQ ID NO: 41121 - RNA, 19 nt, Artificial Sequence
  Description of Artificial Sequence: Synthetic oligonucleotide
  Antisense strand to SEQ ID NO: 41120
gcucuuauggaacuuucag

SEQ ID NO: 41122 - RNA, 19 nt, Artificial Sequence
  Description of Artificial Sequence: Synthetic oligonucleotide
  Sense strand starting at position 3249 of SEQ ID NO: 489
guuccauaagagcaacagu

SEQ ID NO: 41123 - RNA, 19 nt, Artificial Sequence
  Description of Artificial Sequence: Synthetic oligonucleotide
  Antisense strand to SEQ ID NO: 41122
acuguugcucuuauggaac

SEQ ID NO: 41124 - RNA, 19 nt, Artificial Sequence
  Description of Artificial Sequence: Synthetic oligonucleotide
  Sense strand starting at position 3411 of SEQ ID NO: 489
guaccuugucauggugaau

SEQ ID NO: 41125 - RNA, 19 nt, Artificial Sequence
  Description of Artificial Sequence: Synthetic oligonucleotide
  Antisense strand to SEQ ID NO: 41124
auucaccaugacaagguac

SEQ ID NO: 41126 - RNA, 19 nt, Artificial Sequence
  Description of Artificial Sequence: Synthetic oligonucleotide
  Sense strand starting at position 3414 of SEQ ID NO: 489
ccuugucauggugaauuaa

SEQ ID NO: 41127 - RNA, 19 nt, Artificial Sequence
  Description of Artificial Sequence: Synthetic oligonucleotide
  Antisense strand to SEQ ID NO: 41126
uuaauucaccaugacaagg

SEQ ID NO: 41128 - RNA, 19 nt, Artificial Sequence
  Description of Artificial Sequence: Synthetic oligonucleotide
  Sense strand starting at position 3475 of SEQ ID NO: 489
aggagucauuccuuacaac

SEQ ID NO: 41129 - RNA, 19 nt, Artificial Sequence
  Description of Artificial Sequence: Synthetic oligonucleotide
  Antisense strand to SEQ ID NO: 41128
guuguaaggaaugacuccu

SEQ ID NO: 41130 - RNA, 19 nt, Artificial Sequence
  Description of Artificial Sequence: Synthetic oligonucleotide
  Sense strand starting at position 3476 of SEQ ID NO: 489
ggagucauuccuuacaacc

SEQ ID NO: 41131 - RNA, 19 nt, Artificial Sequence
  Description of Artificial Sequence: Synthetic oligonucleotide
  Antisense strand to SEQ ID NO: 41130
gguuguaaggaaugacucc

SEQ ID NO: 41132 - RNA, 19 nt, Artificial Sequence
  Description of Artificial Sequence: Synthetic oligonucleotide
  Sense strand starting at position 93 of SEQ ID NO: 490
ggcuaugacucuuagcaga

SEQ ID NO: 41133 - RNA, 19 nt, Artificial Sequence
  Description of Artificial Sequence: Synthetic oligonucleotide
  Antisense strand to SEQ ID NO: 41132
ucugcuaagagucauagcc

SEQ ID NO: 41134 - RNA, 19 nt, Artificial Sequence
  Description of Artificial Sequence: Synthetic oligonucleotide
  Sense strand starting at position 95 of SEQ ID NO: 490
cuaugacucuuagcagaac

SEQ ID NO: 41135 - RNA, 19 nt, Artificial Sequence
  Description of Artificial Sequence: Synthetic oligonucleotide
  Antisense strand to SEQ ID NO: 41134
guucugcuaagagucauag

SEQ ID NO: 41136 - RNA, 19 nt, Artificial Sequence
  Description of Artificial Sequence: Synthetic oligonucleotide
  Sense strand starting at position 98 of SEQ ID NO: 490
ugacucuuagcagaaccua

SEQ ID NO: 41137 - RNA, 19 nt, Artificial Sequence
  Description of Artificial Sequence: Synthetic oligonucleotide
  Antisense strand to SEQ ID NO: 41136
uagguucugcuaagaguca

SEQ ID NO: 41138 - RNA, 19 nt, Artificial Sequence
  Description of Artificial Sequence: Synthetic oligonucleotide
  Sense strand starting at position 121 of SEQ ID NO: 490
agucccgucagcuaggaau

SEQ ID NO: 41139 - RNA, 19 nt, Artificial Sequence
  Description of Artificial Sequence: Synthetic oligonucleotide
  Antisense strand to SEQ ID NO: 41138
auuccuagcugacgggacu

SEQ ID NO: 41140 - RNA, 19 nt, Artificial Sequence
  Description of Artificial Sequence: Synthetic oligonucleotide
  Sense strand starting at position 298 of SEQ ID NO: 490
ggcgcacuuucccaagaag

SEQ ID NO: 41141 - RNA, 19 nt, Artificial Sequence
  Description of Artificial Sequence: Synthetic oligonucleotide
  Antisense strand to SEQ ID NO: 41140
cuucuugggaaagugcgcc

SEQ ID NO: 41142 - RNA, 19 nt, Artificial Sequence
  Description of Artificial Sequence: Synthetic oligonucleotide
  Sense strand starting at position 650 of SEQ ID NO: 490
ccggguucccucgaagguu

SEQ ID NO: 41143 - RNA, 19 nt, Artificial Sequence
  Description of Artificial Sequence: Synthetic oligonucleotide
  Antisense strand to SEQ ID NO: 41142
aaccuucgagggaacccgg

SEQ ID NO: 41144 - RNA, 19 nt, Artificial Sequence
  Description of Artificial Sequence: Synthetic oligonucleotide
  Sense strand starting at position 1265 of SEQ ID NO: 490
ccggaaaguuuaucgggaa

SEQ ID NO: 41145 - RNA, 19 nt, Artificial Sequence
  Description of Artificial Sequence: Synthetic oligonucleotide
  Antisense strand to SEQ ID NO: 41144
uucccgauaaacuuuccgg

SEQ ID NO: 41146 - RNA, 19 nt, Artificial Sequence
  Description of Artificial Sequence: Synthetic oligonucleotide
  Sense strand starting at position 1266 of SEQ ID NO: 490
cggaaaguuuaucgggaaa

SEQ ID NO: 41147 - RNA, 19 nt, Artificial Sequence
  Description of Artificial Sequence: Synthetic oligonucleotide
  Antisense strand to SEQ ID NO: 41146
uuucccgauaaacuuuccg

SEQ ID NO: 41148 - RNA, 19 nt, Artificial Sequence
  Description of Artificial Sequence: Synthetic oligonucleotide
  Sense strand starting at position 1882 of SEQ ID NO: 490
aggagagcucuggagcuuu

SEQ ID NO: 41149 - RNA, 19 nt, Artificial Sequence
  Description of Artificial Sequence: Synthetic oligonucleotide
  Antisense strand to SEQ ID NO: 41148
aaagcuccagagcucuccu

SEQ ID NO: 41150 - RNA, 19 nt, Artificial Sequence
  Description of Artificial Sequence: Synthetic oligonucleotide
  Sense strand starting at position 2001 of SEQ ID NO: 490
ggaaaugacucgcuccaau

SEQ ID NO: 41151 - RNA, 19 nt, Artificial Sequence
  Description of Artificial Sequence: Synthetic oligonucleotide
  Antisense strand to SEQ ID NO: 41150
auuggagcgagucauuucc

SEQ ID NO: 41152 - RNA, 19 nt, Artificial Sequence
  Description of Artificial Sequence: Synthetic oligonucleotide
  Sense strand starting at position 2068 of SEQ ID NO: 490
ccggauuaaucacuccgga

SEQ ID NO: 41153 - RNA, 19 nt, Artificial Sequence
  Description of Artificial Sequence: Synthetic oligonucleotide
  Antisense strand to SEQ ID NO: 41152
uccggagugauuaauccgg

SEQ ID NO: 41154 - RNA, 19 nt, Artificial Sequence
  Description of Artificial Sequence: Synthetic oligonucleotide
  Sense strand starting at position 2201 of SEQ ID NO: 490
caucuaaaggguuguuuau

SEQ ID NO: 41155 - RNA, 19 nt, Artificial Sequence
  Description of Artificial Sequence: Synthetic oligonucleotide
  Antisense strand to SEQ ID NO: 41154
auaaacaacccuuuagaug

SEQ ID NO: 41156 - RNA, 19 nt, Artificial Sequence
  Description of Artificial Sequence: Synthetic oligonucleotide
  Sense strand starting at position 2211 of SEQ ID NO: 490
guuguuuauccgugucugu

SEQ ID NO: 41157 - RNA, 19 nt, Artificial Sequence
  Description of Artificial Sequence: Synthetic oligonucleotide
  Antisense strand to SEQ ID NO: 41156
acagacacggauaaacaac

SEQ ID NO: 41158 - RNA, 19 nt, Artificial Sequence
  Description of Artificial Sequence: Synthetic oligonucleotide
  Sense strand starting at position 2212 of SEQ ID NO: 490
uuguuuauccgugucuguu

SEQ ID NO: 41159 - RNA, 19 nt, Artificial Sequence
  Description of Artificial Sequence: Synthetic oligonucleotide
  Antisense strand to SEQ ID NO: 41158
aacagacacggauaaacaa

SEQ ID NO: 41160 - RNA, 19 nt, Artificial Sequence
  Description of Artificial Sequence: Synthetic oligonucleotide
  Sense strand starting at position 2213 of SEQ ID NO: 490
uguuuauccgugucuguuu

SEQ ID NO: 41161 - RNA, 19 nt, Artificial Sequence
  Description of Artificial Sequence: Synthetic oligonucleotide
  Antisense strand to SEQ ID NO: 41160
aaacagacacggauaaaca

SEQ ID NO: 41162 - RNA, 19 nt, Artificial Sequence
  Description of Artificial Sequence: Synthetic oligonucleotide
  Sense strand starting at position 2392 of SEQ ID NO: 490
cucuuccacguuuggaaau

SEQ ID NO: 41163 - RNA, 19 nt, Artificial Sequence
  Description of Artificial Sequence: Synthetic oligonucleotide
  Antisense strand to SEQ ID NO: 41162
auuuccaaacguggaagag

SEQ ID NO: 41164 - RNA, 19 nt, Artificial Sequence
  Description of Artificial Sequence: Synthetic oligonucleotide
  Sense strand starting at position 2393 of SEQ ID NO: 490
ucuuccacguuuggaaauu

SEQ ID NO: 41165 - RNA, 19 nt, Artificial Sequence
  Description of Artificial Sequence: Synthetic oligonucleotide
  Antisense strand to SEQ ID NO: 41164
aauuuccaaacguggaaga

SEQ ID NO: 41166 - RNA, 19 nt, Artificial Sequence
  Description of Artificial Sequence: Synthetic oligonucleotide
  Sense strand starting at position 2410 of SEQ ID NO: 490
uuggaauccugucugggaa

SEQ ID NO: 41167 - RNA, 19 nt, Artificial Sequence
  Description of Artificial Sequence: Synthetic oligonucleotide
  Antisense strand to SEQ ID NO: 41166
uucccagacaggauuccaa

SEQ ID NO: 41168 - RNA, 19 nt, Artificial Sequence
  Description of Artificial Sequence: Synthetic oligonucleotide
  Sense strand starting at position 2411 of SEQ ID NO: 490
uggaauccugucugggaaa

SEQ ID NO: 41169 - RNA, 19 nt, Artificial Sequence
  Description of Artificial Sequence: Synthetic oligonucleotide
  Antisense strand to SEQ ID NO: 41168
uuucccagacaggauucca

SEQ ID NO: 41170 - RNA, 19 nt, Artificial Sequence
  Description of Artificial Sequence: Synthetic oligonucleotide
  Sense strand starting at position 2574 of SEQ ID NO: 490
gcgugugugcguagacaga

SEQ ID NO: 41171 - RNA, 19 nt, Artificial Sequence
  Description of Artificial Sequence: Synthetic oligonucleotide
  Antisense strand to SEQ ID NO: 41170
ucugucuacgcacacacgc

SEQ ID NO: 41172 - RNA, 19 nt, Artificial Sequence
  Description of Artificial Sequence: Synthetic oligonucleotide
  Sense strand starting at position 2773 of SEQ ID NO: 490
cggugcaagaguuacuagu

SEQ ID NO: 41173 - RNA, 19 nt, Artificial Sequence
  Description of Artificial Sequence: Synthetic oligonucleotide
  Antisense strand to SEQ ID NO: 41172
acuaguaacucuugcaccg

SEQ ID NO: 41174 - RNA, 19 nt, Artificial Sequence
  Description of Artificial Sequence: Synthetic oligonucleotide
  Sense strand starting at position 2808 of SEQ ID NO: 490
uuuaaauaaucggauccua

SEQ ID NO: 41175 - RNA, 19 nt, Artificial Sequence
  Description of Artificial Sequence: Synthetic oligonucleotide
  Antisense strand to SEQ ID NO: 41174
uaggauccgauuauuuaaa

SEQ ID NO: 41176 - RNA, 19 nt, Artificial Sequence
  Description of Artificial Sequence: Synthetic oligonucleotide
  Sense strand starting at position 2872 of SEQ ID NO: 490
gagaguucuucccaaggac

SEQ ID NO: 41177 - RNA, 19 nt, Artificial Sequence
  Description of Artificial Sequence: Synthetic oligonucleotide
  Antisense strand to SEQ ID NO: 41176
guccuugggaagaacucuc

SEQ ID NO: 41178 - RNA, 19 nt, Artificial Sequence
  Description of Artificial Sequence: Synthetic oligonucleotide
  Sense strand starting at position 3384 of SEQ ID NO: 490
gucagcguggccaggaauu

SEQ ID NO: 41179 - RNA, 19 nt, Artificial Sequence
  Description of Artificial Sequence: Synthetic oligonucleotide
  Antisense strand to SEQ ID NO: 41178
aauuccuggccacgcugac

SEQ ID NO: 41180 - RNA, 19 nt, Artificial Sequence
  Description of Artificial Sequence: Synthetic oligonucleotide
  Sense strand starting at position 3429 of SEQ ID NO: 490
ggcuguggaguugacgaua

SEQ ID NO: 41181 - RNA, 19 nt, Artificial Sequence
  Description of Artificial Sequence: Synthetic oligonucleotide
  Antisense strand to SEQ ID NO: 41180
uaucgucaacuccacagcc

SEQ ID NO: 41182 - RNA, 19 nt, Artificial Sequence
  Description of Artificial Sequence: Synthetic oligonucleotide
  Sense strand starting at position 3432 of SEQ ID NO: 490
uguggaguugacgauauga

SEQ ID NO: 41183 - RNA, 19 nt, Artificial Sequence
  Description of Artificial Sequence: Synthetic oligonucleotide
  Antisense strand to SEQ ID NO: 41182
ucauaucgucaacuccaca

SEQ ID NO: 41184 - RNA, 19 nt, Artificial Sequence
  Description of Artificial Sequence: Synthetic oligonucleotide
  Sense strand starting at position 3947 of SEQ ID NO: 490
gugggcuccuggcuucuaa

SEQ ID NO: 41185 - RNA, 19 nt, Artificial Sequence
  Description of Artificial Sequence: Synthetic oligonucleotide
  Antisense strand to SEQ ID NO: 41184
uuagaagccaggagcccac

SEQ ID NO: 41186 - RNA, 19 nt, Artificial Sequence
  Description of Artificial Sequence: Synthetic oligonucleotide
  Sense strand starting at position 3958 of SEQ ID NO: 490
gcuucuaagcuccgacuuu

SEQ ID NO: 41187 - RNA, 19 nt, Artificial Sequence
  Description of Artificial Sequence: Synthetic oligonucleotide
  Antisense strand to SEQ ID NO: 41186
aaagucggagcuuagaagc

SEQ ID NO: 41188 - RNA, 19 nt, Artificial Sequence
  Description of Artificial Sequence: Synthetic oligonucleotide
  Sense strand starting at position 3959 of SEQ ID NO: 490
cuucuaagcuccgacuuua

SEQ ID NO: 41189 - RNA, 19 nt, Artificial Sequence
  Description of Artificial Sequence: Synthetic oligonucleotide
  Antisense strand to SEQ ID NO: 41188
uaaagucggagcuuagaag

SEQ ID NO: 41190 - RNA, 19 nt, Artificial Sequence
  Description of Artificial Sequence: Synthetic oligonucleotide
  Sense strand starting at position 82 of SEQ ID NO: 491
ccggguucccucgaagguu

SEQ ID NO: 41191 - RNA, 19 nt, Artificial Sequence
  Description of Artificial Sequence: Synthetic oligonucleotide
  Antisense strand to SEQ ID NO: 41190
aaccuucgagggaacccgg

SEQ ID NO: 41192 - RNA, 19 nt, Artificial Sequence
  Description of Artificial Sequence: Synthetic oligonucleotide
  Sense strand starting at position 697 of SEQ ID NO: 491
ccggaaaguuuaucgggaa

SEQ ID NO: 41193 - RNA, 19 nt, Artificial Sequence
  Description of Artificial Sequence: Synthetic oligonucleotide
  Antisense strand to SEQ ID NO: 41192
uucccgauaaacuuuccgg

SEQ ID NO: 41194 - RNA, 19 nt, Artificial Sequence
  Description of Artificial Sequence: Synthetic oligonucleotide
  Sense strand starting at position 698 of SEQ ID NO: 491
cggaaaguuuaucgggaaa

SEQ ID NO: 41195 - RNA, 19 nt, Artificial Sequence
  Description of Artificial Sequence: Synthetic oligonucleotide
  Antisense strand to SEQ ID NO: 41194
uuucccgauaaacuuuccg

SEQ ID NO: 41196 - RNA, 19 nt, Artificial Sequence
  Description of Artificial Sequence: Synthetic oligonucleotide
  Sense strand starting at position 1314 of SEQ ID NO: 491
aggagagcucuggagcuuu

SEQ ID NO: 41197 - RNA, 19 nt, Artificial Sequence
  Description of Artificial Sequence: Synthetic oligonucleotide
  Antisense strand to SEQ ID NO: 41196
aaagcuccagagcucuccu

SEQ ID NO: 41198 - RNA, 19 nt, Artificial Sequence
  Description of Artificial Sequence: Synthetic oligonucleotide
  Sense strand starting at position 1433 of SEQ ID NO: 491
ggaaaugacucgcuccaau

SEQ ID NO: 41199 - RNA, 19 nt, Artificial Sequence
  Description of Artificial Sequence: Synthetic oligonucleotide
  Antisense strand to SEQ ID NO: 41198
auuggagcgagucauuucc

SEQ ID NO: 41200 - RNA, 19 nt, Artificial Sequence
  Description of Artificial Sequence: Synthetic oligonucleotide
  Sense strand starting at position 1500 of SEQ ID NO: 491
ccggauuaaucacuccgga

SEQ ID NO: 41201 - RNA, 19 nt, Artificial Sequence
  Description of Artificial Sequence: Synthetic oligonucleotide
  Antisense strand to SEQ ID NO: 41200
uccggagugauuaauccgg

SEQ ID NO: 41202 - RNA, 19 nt, Artificial Sequence
  Description of Artificial Sequence: Synthetic oligonucleotide
  Sense strand starting at position 1633 of SEQ ID NO: 491
caucuaaaggguuguuuau

SEQ ID NO: 41203 - RNA, 19 nt, Artificial Sequence
  Description of Artificial Sequence: Synthetic oligonucleotide
  Antisense strand to SEQ ID NO: 41202
auaaacaacccuuuagaug

SEQ ID NO: 41204 - RNA, 19 nt, Artificial Sequence
  Description of Artificial Sequence: Synthetic oligonucleotide
  Sense strand starting at position 1643 of SEQ ID NO: 491
guuguuuauccgugucugu

SEQ ID NO: 41205 - RNA, 19 nt, Artificial Sequence
  Description of Artificial Sequence: Synthetic oligonucleotide
  Antisense strand to SEQ ID NO: 41204
acagacacggauaaacaac

SEQ ID NO: 41206 - RNA, 19 nt, Artificial Sequence
  Description of Artificial Sequence: Synthetic oligonucleotide
  Sense strand starting at position 1644 of SEQ ID NO: 491
uuguuuauccgugucuguu

SEQ ID NO: 41207 - RNA, 19 nt, Artificial Sequence
  Description of Artificial Sequence: Synthetic oligonucleotide
  Antisense strand to SEQ ID NO: 41206
aacagacacggauaaacaa

SEQ ID NO: 41208 - RNA, 19 nt, Artificial Sequence
  Description of Artificial Sequence: Synthetic oligonucleotide
  Sense strand starting at position 1645 of SEQ ID NO: 491
uguuuauccgugucuguuu

SEQ ID NO: 41209 - RNA, 19 nt, Artificial Sequence
  Description of Artificial Sequence: Synthetic oligonucleotide
  Antisense strand to SEQ ID NO: 41208
aaacagacacggauaaaca

SEQ ID NO: 41210 - RNA, 19 nt, Artificial Sequence
  Description of Artificial Sequence: Synthetic oligonucleotide
  Sense strand starting at position 1824 of SEQ ID NO: 491
cucuuccacguuuggaaau

SEQ ID NO: 41211 - RNA, 19 nt, Artificial Sequence
  Description of Artificial Sequence: Synthetic oligonucleotide
  Antisense strand to SEQ ID NO: 41210
auuuccaaacguggaagag

SEQ ID NO: 41212 - RNA, 19 nt, Artificial Sequence
  Description of Artificial Sequence: Synthetic oligonucleotide
  Sense strand starting at position 1825 of SEQ ID NO: 491
ucuuccacguuuggaaauu

SEQ ID NO: 41213 - RNA, 19 nt, Artificial Sequence
  Description of Artificial Sequence: Synthetic oligonucleotide
  Antisense strand to SEQ ID NO: 41212
aauuuccaaacguggaaga

SEQ ID NO: 41214 - RNA, 19 nt, Artificial Sequence
  Description of Artificial Sequence: Synthetic oligonucleotide
  Sense strand starting at position 1842 of SEQ ID NO: 491
uuggaauccugucugggaa

SEQ ID NO: 41215 - RNA, 19 nt, Artificial Sequence
  Description of Artificial Sequence: Synthetic oligonucleotide
  Antisense strand to SEQ ID NO: 41214
uucccagacaggauuccaa

SEQ ID NO: 41216 - RNA, 19 nt, Artificial Sequence
  Description of Artificial Sequence: Synthetic oligonucleotide
  Sense strand starting at position 1843 of SEQ ID NO: 491
uggaauccugucugggaaa

SEQ ID NO: 41217 - RNA, 19 nt, Artificial Sequence
  Description of Artificial Sequence: Synthetic oligonucleotide
  Antisense strand to SEQ ID NO: 41216
uuucccagacaggauucca

SEQ ID NO: 41218 - RNA, 19 nt, Artificial Sequence
  Description of Artificial Sequence: Synthetic oligonucleotide
  Sense strand starting at position 2006 of SEQ ID NO: 491
gcgugugugcguagacaga

SEQ ID NO: 41219 - RNA, 19 nt, Artificial Sequence
  Description of Artificial Sequence: Synthetic oligonucleotide
  Antisense strand to SEQ ID NO: 41218
ucugucuacgcacacacgc

SEQ ID NO: 41220 - RNA, 19 nt, Artificial Sequence
  Description of Artificial Sequence: Synthetic oligonucleotide
  Sense strand starting at position 2205 of SEQ ID NO: 491
cggugcaagaguuacuagu

SEQ ID NO: 41221 - RNA, 19 nt, Artificial Sequence
  Description of Artificial Sequence: Synthetic oligonucleotide
  Antisense strand to SEQ ID NO: 41220
acuaguaacucuugcaccg

SEQ ID NO: 41222 - RNA, 19 nt, Artificial Sequence
  Description of Artificial Sequence: Synthetic oligonucleotide
  Sense strand starting at position 2240 of SEQ ID NO: 491
uuuaaauaaucggauccua

SEQ ID NO: 41223 - RNA, 19 nt, Artificial Sequence
  Description of Artificial Sequence: Synthetic oligonucleotide
  Antisense strand to SEQ ID NO: 41222
uaggauccgauuauuuaaa

SEQ ID NO: 41224 - RNA, 19 nt, Artificial Sequence
  Description of Artificial Sequence: Synthetic oligonucleotide
  Sense strand starting at position 2304 of SEQ ID NO: 491
gagaguucuucccaaggac

SEQ ID NO: 41225 - RNA, 19 nt, Artificial Sequence
  Description of Artificial Sequence: Synthetic oligonucleotide
  Antisense strand to SEQ ID NO: 41224
guccuugggaagaacucuc

SEQ ID NO: 41226 - RNA, 19 nt, Artificial Sequence
  Description of Artificial Sequence: Synthetic oligonucleotide
  Sense strand starting at position 2816 of SEQ ID NO: 491
gucagcguggccaggaauu

SEQ ID NO: 41227 - RNA, 19 nt, Artificial Sequence
  Description of Artificial Sequence: Synthetic oligonucleotide
  Antisense strand to SEQ ID NO: 41226
aauuccuggccacgcugac

SEQ ID NO: 41228 - RNA, 19 nt, Artificial Sequence
  Description of Artificial Sequence: Synthetic oligonucleotide
  Sense strand starting at position 2861 of SEQ ID NO: 491
ggcuguggaguugacgaua

SEQ ID NO: 41229 - RNA, 19 nt, Artificial Sequence
  Description of Artificial Sequence: Synthetic oligonucleotide
  Antisense strand to SEQ ID NO: 41228
uaucgucaacuccacagcc

SEQ ID NO: 41230 - RNA, 19 nt, Artificial Sequence
  Description of Artificial Sequence: Synthetic oligonucleotide
  Sense strand starting at position 2864 of SEQ ID NO: 491
uguggaguugacgauauga

SEQ ID NO: 41231 - RNA, 19 nt, Artificial Sequence
  Description of Artificial Sequence: Synthetic oligonucleotide
  Antisense strand to SEQ ID NO: 41230
ucauaucgucaacuccaca

SEQ ID NO: 41232 - RNA, 19 nt, Artificial Sequence
  Description of Artificial Sequence: Synthetic oligonucleotide
  Sense strand starting at position 3379 of SEQ ID NO: 491
gugggcuccuggcuucuaa

SEQ ID NO: 41233 - RNA, 19 nt, Artificial Sequence
  Description of Artificial Sequence: Synthetic oligonucleotide
  Antisense strand to SEQ ID NO: 41232
uuagaagccaggagcccac

SEQ ID NO: 41234 - RNA, 19 nt, Artificial Sequence
  Description of Artificial Sequence: Synthetic oligonucleotide
  Sense strand starting at position 3390 of SEQ ID NO: 491
gcuucuaagcuccgacuuu

SEQ ID NO: 41235 - RNA, 19 nt, Artificial Sequence
  Description of Artificial Sequence: Synthetic oligonucleotide
  Antisense strand to SEQ ID NO: 41234
aaagucggagcuuagaagc

SEQ ID NO: 41236 - RNA, 19 nt, Artificial Sequence
  Description of Artificial Sequence: Synthetic oligonucleotide
  Sense strand starting at position 3391 of SEQ ID NO: 491
cuucuaagcuccgacuuua

SEQ ID NO: 41237 - RNA, 19 nt, Artificial Sequence
  Description of Artificial Sequence: Synthetic oligonucleotide
  Antisense strand to SEQ ID NO: 41236
uaaagucggagcuuagaag

SEQ ID NO: 41238 - RNA, 19 nt, Artificial Sequence
  Description of Artificial Sequence: Synthetic oligonucleotide
  Sense strand starting at position 3504 of SEQ ID NO: 491
ugggcugcucuguaauucu

SEQ ID NO: 41239 - RNA, 19 nt, Artificial Sequence
  Description of Artificial Sequence: Synthetic oligonucleotide
  Antisense strand to SEQ ID NO: 41238
agaauuacagagcagccca

SEQ ID NO: 41240 - RNA, 19 nt, Artificial Sequence
  Description of Artificial Sequence: Synthetic oligonucleotide
  Sense strand starting at position 3611 of SEQ ID NO: 491
ccagaacuuucccgggcaa

SEQ ID NO: 41241 - RNA, 19 nt, Artificial Sequence
  Description of Artificial Sequence: Synthetic oligonucleotide
  Antisense strand to SEQ ID NO: 41240
uugcccgggaaaguucugg

SEQ ID NO: 41242 - RNA, 19 nt, Artificial Sequence
  Description of Artificial Sequence: Synthetic oligonucleotide
  Sense strand starting at position 3612 of SEQ ID NO: 491
cagaacuuucccgggcaaa

SEQ ID NO: 41243 - RNA, 19 nt, Artificial Sequence
  Description of Artificial Sequence: Synthetic oligonucleotide
  Antisense strand to SEQ ID NO: 41242
uuugcccgggaaaguucug

SEQ ID NO: 41244 - RNA, 19 nt, Artificial Sequence
  Description of Artificial Sequence: Synthetic oligonucleotide
  Sense strand starting at position 3631 of SEQ ID NO: 491
aggagcguuugucauccuu

SEQ ID NO: 41245 - RNA, 19 nt, Artificial Sequence
  Description of Artificial Sequence: Synthetic oligonucleotide
  Antisense strand to SEQ ID NO: 41244
aaggaugacaaacgcuccu

SEQ ID NO: 41246 - RNA, 19 nt, Artificial Sequence
  Description of Artificial Sequence: Synthetic oligonucleotide
  Sense strand starting at position 3633 of SEQ ID NO: 491
gagcguuugucauccuucu

SEQ ID NO: 41247 - RNA, 19 nt, Artificial Sequence
  Description of Artificial Sequence: Synthetic oligonucleotide
  Antisense strand to SEQ ID NO: 41246
agaaggaugacaaacgcuc

SEQ ID NO: 41248 - RNA, 19 nt, Artificial Sequence
  Description of Artificial Sequence: Synthetic oligonucleotide
  Sense strand starting at position 3719 of SEQ ID NO: 491
cgccauuccugcucucuga

SEQ ID NO: 41249 - RNA, 19 nt, Artificial Sequence
  Description of Artificial Sequence: Synthetic oligonucleotide
  Antisense strand to SEQ ID NO: 41248
ucagagagcaggaauggcg

SEQ ID NO: 41250 - RNA, 19 nt, Artificial Sequence
  Description of Artificial Sequence: Synthetic oligonucleotide
  Sense strand starting at position 3862 of SEQ ID NO: 491
gguggaaacccacacguaa

SEQ ID NO: 41251 - RNA, 19 nt, Artificial Sequence
  Description of Artificial Sequence: Synthetic oligonucleotide
  Antisense strand to SEQ ID NO: 41250
uuacguguggguuuccacc

SEQ ID NO: 41252 - RNA, 19 nt, Artificial Sequence
  Description of Artificial Sequence: Synthetic oligonucleotide
  Sense strand starting at position 3876 of SEQ ID NO: 491
cguaacugauaccgucaga

SEQ ID NO: 41253 - RNA, 19 nt, Artificial Sequence
  Description of Artificial Sequence: Synthetic oligonucleotide
  Antisense strand to SEQ ID NO: 41252
ucugacgguaucaguuacg

SEQ ID NO: 41254 - RNA, 19 nt, Artificial Sequence
  Description of Artificial Sequence: Synthetic oligonucleotide
  Sense strand starting at position 3886 of SEQ ID NO: 491
accgucagacagcgauaau

SEQ ID NO: 41255 - RNA, 19 nt, Artificial Sequence
  Description of Artificial Sequence: Synthetic oligonucleotide
  Antisense strand to SEQ ID NO: 41254
auuaucgcugucugacggu

SEQ ID NO: 41256 - RNA, 19 nt, Artificial Sequence
  Description of Artificial Sequence: Synthetic oligonucleotide
  Sense strand starting at position 3887 of SEQ ID NO: 491
ccgucagacagcgauaauc

SEQ ID NO: 41257 - RNA, 19 nt, Artificial Sequence
  Description of Artificial Sequence: Synthetic oligonucleotide
  Antisense strand to SEQ ID NO: 41256
gauuaucgcugucugacgg

SEQ ID NO: 41258 - RNA, 19 nt, Artificial Sequence
  Description of Artificial Sequence: Synthetic oligonucleotide
  Sense strand starting at position 3896 of SEQ ID NO: 491
agcgauaaucaccaugacu

SEQ ID NO: 41259 - RNA, 19 nt, Artificial Sequence
  Description of Artificial Sequence: Synthetic oligonucleotide
  Antisense strand to SEQ ID NO: 41258
agucauggugauuaucgcu

SEQ ID NO: 41260 - RNA, 19 nt, Artificial Sequence
  Description of Artificial Sequence: Synthetic oligonucleotide
  Sense strand starting at position 3898 of SEQ ID NO: 491
cgauaaucaccaugacuga

SEQ ID NO: 41261 - RNA, 19 nt, Artificial Sequence
  Description of Artificial Sequence: Synthetic oligonucleotide
  Antisense strand to SEQ ID NO: 41260
ucagucauggugauuaucg

SEQ ID NO: 41262 - RNA, 19 nt, Artificial Sequence
  Description of Artificial Sequence: Synthetic oligonucleotide
  Sense strand starting at position 3924 of SEQ ID NO: 491
gcaugcuaccgagaggcau

SEQ ID NO: 41263 - RNA, 19 nt, Artificial Sequence
  Description of Artificial Sequence: Synthetic oligonucleotide
  Antisense strand to SEQ ID NO: 41262
augccucucgguagcaugc

SEQ ID NO: 41264 - RNA, 19 nt, Artificial Sequence
  Description of Artificial Sequence: Synthetic oligonucleotide
  Sense strand starting at position 3942 of SEQ ID NO: 491
ugucaagacagugagcuuu

SEQ ID NO: 41265 - RNA, 19 nt, Artificial Sequence
  Description of Artificial Sequence: Synthetic oligonucleotide
  Antisense strand to SEQ ID NO: 41264
aaagcucacugucuugaca

SEQ ID NO: 41266 - RNA, 19 nt, Artificial Sequence
  Description of Artificial Sequence: Synthetic oligonucleotide
  Sense strand starting at position 3982 of SEQ ID NO: 491
aggcuaauuuaagaaggaa

SEQ ID NO: 41267 - RNA, 19 nt, Artificial Sequence
  Description of Artificial Sequence: Synthetic oligonucleotide
  Antisense strand to SEQ ID NO: 41266
uuccuucuuaaauuagccu

SEQ ID NO: 41268 - RNA, 19 nt, Artificial Sequence
  Description of Artificial Sequence: Synthetic oligonucleotide
  Sense strand starting at position 13 of SEQ ID NO: 492
gcugaucacucagucaagu

SEQ ID NO: 41269 - RNA, 19 nt, Artificial Sequence
  Description of Artificial Sequence: Synthetic oligonucleotide
  Antisense strand to SEQ ID NO: 41268
acuugacugagugaucagc

SEQ ID NO: 41270 - RNA, 19 nt, Artificial Sequence
  Description of Artificial Sequence: Synthetic oligonucleotide
  Sense strand starting at position 15 of SEQ ID NO: 492
ugaucacucagucaagugu

SEQ ID NO: 41271 - RNA, 19 nt, Artificial Sequence
  Description of Artificial Sequence: Synthetic oligonucleotide
  Antisense strand to SEQ ID NO: 41270
acacuugacugagugauca

SEQ ID NO: 41272 - RNA, 19 nt, Artificial Sequence
  Description of Artificial Sequence: Synthetic oligonucleotide
  Sense strand starting at position 24 of SEQ ID NO: 492
agucaagugucacuacacu

SEQ ID NO: 41273 - RNA, 19 nt, Artificial Sequence
  Description of Artificial Sequence: Synthetic oligonucleotide
  Antisense strand to SEQ ID NO: 41272
aguguagugacacuugacu

SEQ ID NO: 41274 - RNA, 19 nt, Artificial Sequence
  Description of Artificial Sequence: Synthetic oligonucleotide
  Sense strand starting at position 202 of SEQ ID NO: 492
aggccaauugcagaguuga

SEQ ID NO: 41275 - RNA, 19 nt, Artificial Sequence
  Description of Artificial Sequence: Synthetic oligonucleotide
  Antisense strand to SEQ ID NO: 41274
ucaacucugcaauuggccu

SEQ ID NO: 41276 - RNA, 19 nt, Artificial Sequence
  Description of Artificial Sequence: Synthetic oligonucleotide
  Sense strand starting at position 378 of SEQ ID NO: 492
ggauauccucuccaaggca

SEQ ID NO: 41277 - RNA, 19 nt, Artificial Sequence
  Description of Artificial Sequence: Synthetic oligonucleotide
  Antisense strand to SEQ ID NO: 41276
ugccuuggagaggauaucc

SEQ ID NO: 41278 - RNA, 19 nt, Artificial Sequence
  Description of Artificial Sequence: Synthetic oligonucleotide
  Sense strand starting at position 716 of SEQ ID NO: 492
agaucacuccuguguugga

SEQ ID NO: 41279 - RNA, 19 nt, Artificial Sequence
  Description of Artificial Sequence: Synthetic oligonucleotide
  Antisense strand to SEQ ID NO: 41278
uccaacacaggagugaucu

SEQ ID NO: 41280 - RNA, 19 nt, Artificial Sequence
  Description of Artificial Sequence: Synthetic oligonucleotide
  Sense strand starting at position 732 of SEQ ID NO: 492
ggagguucuguguaauaug

SEQ ID NO: 41281 - RNA, 19 nt, Artificial Sequence
  Description of Artificial Sequence: Synthetic oligonucleotide
  Antisense strand to SEQ ID NO: 41280
cauauuacacagaaccucc

SEQ ID NO: 41282 - RNA, 19 nt, Artificial Sequence
  Description of Artificial Sequence: Synthetic oligonucleotide
  Sense strand starting at position 756 of SEQ ID NO: 492
caaguagcaucccugaaag

SEQ ID NO: 41283 - RNA, 19 nt, Artificial Sequence
  Description of Artificial Sequence: Synthetic oligonucleotide
  Antisense strand to SEQ ID NO: 41282
cuuucagggaugcuacuug

SEQ ID NO: 41284 - RNA, 19 nt, Artificial Sequence
  Description of Artificial Sequence: Synthetic oligonucleotide
  Sense strand starting at position 770 of SEQ ID NO: 492
gaaagaaacugagacauug

SEQ ID NO: 41285 - RNA, 19 nt, Artificial Sequence
  Description of Artificial Sequence: Synthetic oligonucleotide
  Antisense strand to SEQ ID NO: 41284
caaugucucaguuucuuuc

SEQ ID NO: 41286 - RNA, 19 nt, Artificial Sequence
  Description of Artificial Sequence: Synthetic oligonucleotide
  Sense strand starting at position 792 of SEQ ID NO: 492
aguuaaauaguuuguccaa

SEQ ID NO: 41287 - RNA, 19 nt, Artificial Sequence
  Description of Artificial Sequence: Synthetic oligonucleotide
  Antisense strand to SEQ ID NO: 41286
uuggacaaacuauuuaacu

SEQ ID NO: 41288 - RNA, 19 nt, Artificial Sequence
  Description of Artificial Sequence: Synthetic oligonucleotide
  Sense strand starting at position 795 of SEQ ID NO: 492
uaaauaguuuguccaagga

SEQ ID NO: 41289 - RNA, 19 nt, Artificial Sequence
  Description of Artificial Sequence: Synthetic oligonucleotide
  Antisense strand to SEQ ID NO: 41288
uccuuggacaaacuauuua

SEQ ID NO: 41290 - RNA, 19 nt, Artificial Sequence
  Description of Artificial Sequence: Synthetic oligonucleotide
  Sense strand starting at position 811 of SEQ ID NO: 492
ggaaaccugcgcguuaagu

SEQ ID NO: 41291 - RNA, 19 nt, Artificial Sequence
  Description of Artificial Sequence: Synthetic oligonucleotide
  Antisense strand to SEQ ID NO: 41290
acuuaacgcgcagguuucc

SEQ ID NO: 41292 - RNA, 19 nt, Artificial Sequence
  Description of Artificial Sequence: Synthetic oligonucleotide
  Sense strand starting at position 928 of SEQ ID NO: 492
guggauuuccucggugcca

SEQ ID NO: 41293 - RNA, 19 nt, Artificial Sequence
  Description of Artificial Sequence: Synthetic oligonucleotide
  Antisense strand to SEQ ID NO: 41292
uggcaccgaggaaauccac

SEQ ID NO: 41294 - RNA, 19 nt, Artificial Sequence
  Description of Artificial Sequence: Synthetic oligonucleotide
  Sense strand starting at position 930 of SEQ ID NO: 492
ggauuuccucggugccacu

SEQ ID NO: 41295 - RNA, 19 nt, Artificial Sequence
  Description of Artificial Sequence: Synthetic oligonucleotide
  Antisense strand to SEQ ID NO: 41294
aguggcaccgaggaaaucc

SEQ ID NO: 41296 - RNA, 19 nt, Artificial Sequence
  Description of Artificial Sequence: Synthetic oligonucleotide
  Sense strand starting at position 1159 of SEQ ID NO: 492
gagggcugauuguuagcua

SEQ ID NO: 41297 - RNA, 19 nt, Artificial Sequence
  Description of Artificial Sequence: Synthetic oligonucleotide
  Antisense strand to SEQ ID NO: 41296
uagcuaacaaucagcccuc

SEQ ID NO: 41298 - RNA, 19 nt, Artificial Sequence
  Description of Artificial Sequence: Synthetic oligonucleotide
  Sense strand starting at position 1162 of SEQ ID NO: 492
ggcugauuguuagcuaaca

SEQ ID NO: 41299 - RNA, 19 nt, Artificial Sequence
  Description of Artificial Sequence: Synthetic oligonucleotide
  Antisense strand to SEQ ID NO: 41298
uguuagcuaacaaucagcc

SEQ ID NO: 41300 - RNA, 19 nt, Artificial Sequence
  Description of Artificial Sequence: Synthetic oligonucleotide
  Sense strand starting at position 1390 of SEQ ID NO: 492
aggucaggcccagauguuu

SEQ ID NO: 41301 - RNA, 19 nt, Artificial Sequence
  Description of Artificial Sequence: Synthetic oligonucleotide
  Antisense strand to SEQ ID NO: 41300
aaacaucugggccugaccu

SEQ ID NO: 41302 - RNA, 19 nt, Artificial Sequence
  Description of Artificial Sequence: Synthetic oligonucleotide
  Sense strand starting at position 1520 of SEQ ID NO: 492
ccgauuguucugcccgacu

SEQ ID NO: 41303 - RNA, 19 nt, Artificial Sequence
  Description of Artificial Sequence: Synthetic oligonucleotide
  Antisense strand to SEQ ID NO: 41302
agucgggcagaacaaucgg

SEQ ID NO: 41304 - RNA, 19 nt, Artificial Sequence
  Description of Artificial Sequence: Synthetic oligonucleotide
  Sense strand starting at position 1588 of SEQ ID NO: 492
agucaacuguguccaggaa

SEQ ID NO: 41305 - RNA, 19 nt, Artificial Sequence
  Description of Artificial Sequence: Synthetic oligonucleotide
  Antisense strand to SEQ ID NO: 41304
uuccuggacacaguugacu

SEQ ID NO: 41306 - RNA, 19 nt, Artificial Sequence
  Description of Artificial Sequence: Synthetic oligonucleotide
  Sense strand starting at position 1962 of SEQ ID NO: 492
gcugaugucauggcgcgaa

SEQ ID NO: 41307 - RNA, 19 nt, Artificial Sequence
  Description of Artificial Sequence: Synthetic oligonucleotide
  Antisense strand to SEQ ID NO: 41306
uucgcgccaugacaucagc

SEQ ID NO: 41308 - RNA, 19 nt, Artificial Sequence
  Description of Artificial Sequence: Synthetic oligonucleotide
  Sense strand starting at position 2150 of SEQ ID NO: 492
cugucugucaggugagaag

SEQ ID NO: 41309 - RNA, 19 nt, Artificial Sequence
  Description of Artificial Sequence: Synthetic oligonucleotide
  Antisense strand to SEQ ID NO: 41308
cuucucaccugacagacag

SEQ ID NO: 41310 - RNA, 19 nt, Artificial Sequence
  Description of Artificial Sequence: Synthetic oligonucleotide
  Sense strand starting at position 2218 of SEQ ID NO: 492
acgaaagggugucucgaau

SEQ ID NO: 41311 - RNA, 19 nt, Artificial Sequence
  Description of Artificial Sequence: Synthetic oligonucleotide
  Antisense strand to SEQ ID NO: 41310
auucgagacacccuuucgu

SEQ ID NO: 41312 - RNA, 19 nt, Artificial Sequence
  Description of Artificial Sequence: Synthetic oligonucleotide
  Sense strand starting at position 2365 of SEQ ID NO: 492
gguucagggucaucuguga

SEQ ID NO: 41313 - RNA, 19 nt, Artificial Sequence
  Description of Artificial Sequence: Synthetic oligonucleotide
  Antisense strand to SEQ ID NO: 41312
ucacagaugacccugaacc

SEQ ID NO: 41314 - RNA, 19 nt, Artificial Sequence
  Description of Artificial Sequence: Synthetic oligonucleotide
  Sense strand starting at position 2387 of SEQ ID NO: 492
gcguguaaucuacagggau

SEQ ID NO: 41315 - RNA, 19 nt, Artificial Sequence
  Description of Artificial Sequence: Synthetic oligonucleotide
  Antisense strand to SEQ ID NO: 41314
aucccuguagauuacacgc

SEQ ID NO: 41316 - RNA, 19 nt, Artificial Sequence
  Description of Artificial Sequence: Synthetic oligonucleotide
  Sense strand starting at position 2389 of SEQ ID NO: 492
guguaaucuacagggaugu

SEQ ID NO: 41317 - RNA, 19 nt, Artificial Sequence
  Description of Artificial Sequence: Synthetic oligonucleotide
  Antisense strand to SEQ ID NO: 41316
acaucccuguagauuacac

SEQ ID NO: 41318 - RNA, 19 nt, Artificial Sequence
  Description of Artificial Sequence: Synthetic oligonucleotide
  Sense strand starting at position 2929 of SEQ ID NO: 492
agcaucuuaugaucuagaa

SEQ ID NO: 41319 - RNA, 19 nt, Artificial Sequence
  Description of Artificial Sequence: Synthetic oligonucleotide
  Antisense strand to SEQ ID NO: 41318
uucuagaucauaagaugcu

SEQ ID NO: 41320 - RNA, 19 nt, Artificial Sequence
  Description of Artificial Sequence: Synthetic oligonucleotide
  Sense strand starting at position 3438 of SEQ ID NO: 492
cugacuaagcaauaguuaa

SEQ ID NO: 41321 - RNA, 19 nt, Artificial Sequence
  Description of Artificial Sequence: Synthetic oligonucleotide
  Antisense strand to SEQ ID NO: 41320
uuaacuauugcuuagucag

SEQ ID NO: 41322 - RNA, 19 nt, Artificial Sequence
  Description of Artificial Sequence: Synthetic oligonucleotide
  Sense strand starting at position 3501 of SEQ ID NO: 492
agggcuuccgcccaaagau

SEQ ID NO: 41323 - RNA, 19 nt, Artificial Sequence
  Description of Artificial Sequence: Synthetic oligonucleotide
  Antisense strand to SEQ ID NO: 41322
aucuuugggcggaagcccu

SEQ ID NO: 41324 - RNA, 19 nt, Artificial Sequence
  Description of Artificial Sequence: Synthetic oligonucleotide
  Sense strand starting at position 3569 of SEQ ID NO: 492
agagaugagccucggaguu

SEQ ID NO: 41325 - RNA, 19 nt, Artificial Sequence
  Description of Artificial Sequence: Synthetic oligonucleotide
  Antisense strand to SEQ ID NO: 41324
aacuccgaggcucaucucu

SEQ ID NO: 41326 - RNA, 19 nt, Artificial Sequence
  Description of Artificial Sequence: Synthetic oligonucleotide
  Sense strand starting at position 3643 of SEQ ID NO: 492
uuguccucucuggagucau

SEQ ID NO: 41327 - RNA, 19 nt, Artificial Sequence
  Description of Artificial Sequence: Synthetic oligonucleotide
  Antisense strand to SEQ ID NO: 41326
augacuccagagaggacaa

SEQ ID NO: 41328 - RNA, 19 nt, Artificial Sequence
  Description of Artificial Sequence: Synthetic oligonucleotide
  Sense strand starting at position 3651 of SEQ ID NO: 492
ucuggagucaugggacugu

SEQ ID NO: 41329 - RNA, 19 nt, Artificial Sequence
  Description of Artificial Sequence: Synthetic oligonucleotide
  Antisense strand to SEQ ID NO: 41328
acagucccaugacuccaga

SEQ ID NO: 41330 - RNA, 19 nt, Artificial Sequence
  Description of Artificial Sequence: Synthetic oligonucleotide
  Sense strand starting at position 3655 of SEQ ID NO: 492
gagucaugggacuguugau

SEQ ID NO: 41331 - RNA, 19 nt, Artificial Sequence
  Description of Artificial Sequence: Synthetic oligonucleotide
  Antisense strand to SEQ ID NO: 41330
aucaacagucccaugacuc

SEQ ID NO: 41332 - RNA, 19 nt, Artificial Sequence
  Description of Artificial Sequence: Synthetic oligonucleotide
  Sense strand starting at position 3661 of SEQ ID NO: 492
ugggacuguugauagauuu

SEQ ID NO: 41333 - RNA, 19 nt, Artificial Sequence
  Description of Artificial Sequence: Synthetic oligonucleotide
  Antisense strand to SEQ ID NO: 41332
aaaucuaucaacaguccca

SEQ ID NO: 41334 - RNA, 19 nt, Artificial Sequence
  Description of Artificial Sequence: Synthetic oligonucleotide
  Sense strand starting at position 3696 of SEQ ID NO: 492
caaccugugcugugaaaug

SEQ ID NO: 41335 - RNA, 19 nt, Artificial Sequence
  Description of Artificial Sequence: Synthetic oligonucleotide
  Antisense strand to SEQ ID NO: 41334
cauuucacagcacagguug

SEQ ID NO: 41336 - RNA, 19 nt, Artificial Sequence
  Description of Artificial Sequence: Synthetic oligonucleotide
  Sense strand starting at position 3707 of SEQ ID NO: 492
gugaaauggcuuuagggua

SEQ ID NO: 41337 - RNA, 19 nt, Artificial Sequence
  Description of Artificial Sequence: Synthetic oligonucleotide
  Antisense strand to SEQ ID NO: 41336
uacccuaaagccauuucac

SEQ ID NO: 41338 - RNA, 19 nt, Artificial Sequence
  Description of Artificial Sequence: Synthetic oligonucleotide
  Sense strand starting at position 3762 of SEQ ID NO: 492
uuggauuucucccagaucu

SEQ ID NO: 41339 - RNA, 19 nt, Artificial Sequence
  Description of Artificial Sequence: Synthetic oligonucleotide
  Antisense strand to SEQ ID NO: 41338
agaucugggagaaauccaa

SEQ ID NO: 41340 - RNA, 19 nt, Artificial Sequence
  Description of Artificial Sequence: Synthetic oligonucleotide
  Sense strand starting at position 3825 of SEQ ID NO: 492
accagaaugcuuuggauag

SEQ ID NO: 41341 - RNA, 19 nt, Artificial Sequence
  Description of Artificial Sequence: Synthetic oligonucleotide
  Antisense strand to SEQ ID NO: 41340
cuauccaaagcauucuggu

SEQ ID NO: 41342 - RNA, 19 nt, Artificial Sequence
  Description of Artificial Sequence: Synthetic oligonucleotide
  Sense strand starting at position 3835 of SEQ ID NO: 492
uuuggauaguaagugguau

SEQ ID NO: 41343 - RNA, 19 nt, Artificial Sequence
  Description of Artificial Sequence: Synthetic oligonucleotide
  Antisense strand to SEQ ID NO: 41342
auaccacuuacuauccaaa

SEQ ID NO: 41344 - RNA, 19 nt, Artificial Sequence
  Description of Artificial Sequence: Synthetic oligonucleotide
  Sense strand starting at position 3847 of SEQ ID NO: 492
gugguaugugguaguauuc

SEQ ID NO: 41345 - RNA, 19 nt, Artificial Sequence
  Description of Artificial Sequence: Synthetic oligonucleotide
  Antisense strand to SEQ ID NO: 41344
gaauacuaccacauaccac

SEQ ID NO: 41346 - RNA, 19 nt, Artificial Sequence
  Description of Artificial Sequence: Synthetic oligonucleotide
  Sense strand starting at position 3944 of SEQ ID NO: 492
caggucacuugucuuagga

SEQ ID NO: 41347 - RNA, 19 nt, Artificial Sequence
  Description of Artificial Sequence: Synthetic oligonucleotide
  Antisense strand to SEQ ID NO: 41346
uccuaagacaagugaccug

SEQ ID NO: 41348 - RNA, 19 nt, Artificial Sequence
  Description of Artificial Sequence: Synthetic oligonucleotide
  Sense strand starting at position 108 of SEQ ID NO: 494
acaauuagcugggcauauu

SEQ ID NO: 41349 - RNA, 19 nt, Artificial Sequence
  Description of Artificial Sequence: Synthetic oligonucleotide
  Antisense strand to SEQ ID NO: 41348
aauaugcccagcuaauugu

SEQ ID NO: 41350 - RNA, 19 nt, Artificial Sequence
  Description of Artificial Sequence: Synthetic oligonucleotide
  Sense strand starting at position 345 of SEQ ID NO: 494
gcuaguaacuauuugcaag

SEQ ID NO: 41351 - RNA, 19 nt, Artificial Sequence
  Description of Artificial Sequence: Synthetic oligonucleotide
  Antisense strand to SEQ ID NO: 41350
cuugcaaauaguuacuagc

SEQ ID NO: 41352 - RNA, 19 nt, Artificial Sequence
  Description of Artificial Sequence: Synthetic oligonucleotide
  Sense strand starting at position 348 of SEQ ID NO: 494
aguaacuauuugcaagguu

SEQ ID NO: 41353 - RNA, 19 nt, Artificial Sequence
  Description of Artificial Sequence: Synthetic oligonucleotide
  Antisense strand to SEQ ID NO: 41352
aaccuugcaaauaguuacu

SEQ ID NO: 41354 - RNA, 19 nt, Artificial Sequence
  Description of Artificial Sequence: Synthetic oligonucleotide
  Sense strand starting at position 368 of SEQ ID NO: 494
augaguaucccguaggcca

SEQ ID NO: 41355 - RNA, 19 nt, Artificial Sequence
  Description of Artificial Sequence: Synthetic oligonucleotide
  Antisense strand to SEQ ID NO: 41354
uggccuacgggauacucau

SEQ ID NO: 41356 - RNA, 19 nt, Artificial Sequence
  Description of Artificial Sequence: Synthetic oligonucleotide
  Sense strand starting at position 420 of SEQ ID NO: 494
ucaucaaauguuugcugau

SEQ ID NO: 41357 - RNA, 19 nt, Artificial Sequence
  Description of Artificial Sequence: Synthetic oligonucleotide
  Antisense strand to SEQ ID NO: 41356
aucagcaaacauuugauga

SEQ ID NO: 41358 - RNA, 19 nt, Artificial Sequence
  Description of Artificial Sequence: Synthetic oligonucleotide
  Sense strand starting at position 433 of SEQ ID NO: 494
gcugaucacucagucaagu

SEQ ID NO: 41359 - RNA, 19 nt, Artificial Sequence
  Description of Artificial Sequence: Synthetic oligonucleotide
  Antisense strand to SEQ ID NO: 41358
acuugacugagugaucagc

SEQ ID NO: 41360 - RNA, 19 nt, Artificial Sequence
  Description of Artificial Sequence: Synthetic oligonucleotide
  Sense strand starting at position 435 of SEQ ID NO: 494
ugaucacucagucaagugu

SEQ ID NO: 41361 - RNA, 19 nt, Artificial Sequence
  Description of Artificial Sequence: Synthetic oligonucleotide
  Antisense strand to SEQ ID NO: 41360
acacuugacugagugauca

SEQ ID NO: 41362 - RNA, 19 nt, Artificial Sequence
  Description of Artificial Sequence: Synthetic oligonucleotide
  Sense strand starting at position 444 of SEQ ID NO: 494
agucaagugucacuacacu

SEQ ID NO: 41363 - RNA, 19 nt, Artificial Sequence
  Description of Artificial Sequence: Synthetic oligonucleotide
  Antisense strand to SEQ ID NO: 41362
aguguagugacacuugacu

SEQ ID NO: 41364 - RNA, 19 nt, Artificial Sequence
  Description of Artificial Sequence: Synthetic oligonucleotide
  Sense strand starting at position 622 of SEQ ID NO: 494
aggccaauugcagaguuga

SEQ ID NO: 41365 - RNA, 19 nt, Artificial Sequence
  Description of Artificial Sequence: Synthetic oligonucleotide
  Antisense strand to SEQ ID NO: 41364
ucaacucugcaauuggccu

SEQ ID NO: 41366 - RNA, 19 nt, Artificial Sequence
  Description of Artificial Sequence: Synthetic oligonucleotide
  Sense strand starting at position 798 of SEQ ID NO: 494
ggauauccucuccaaggca

SEQ ID NO: 41367 - RNA, 19 nt, Artificial Sequence
  Description of Artificial Sequence: Synthetic oligonucleotide
  Antisense strand to SEQ ID NO: 41366
ugccuuggagaggauaucc

SEQ ID NO: 41368 - RNA, 19 nt, Artificial Sequence
  Description of Artificial Sequence: Synthetic oligonucleotide
  Sense strand starting at position 1123 of SEQ ID NO: 494
gacaguaacugagagauca

SEQ ID NO: 41369 - RNA, 19 nt, Artificial Sequence
  Description of Artificial Sequence: Synthetic oligonucleotide
  Antisense strand to SEQ ID NO: 41368
ugaucucucaguuacuguc

SEQ ID NO: 41370 - RNA, 19 nt, Artificial Sequence
  Description of Artificial Sequence: Synthetic oligonucleotide
  Sense strand starting at position 1136 of SEQ ID NO: 494
agaucacuccuguguugga

SEQ ID NO: 41371 - RNA, 19 nt, Artificial Sequence
  Description of Artificial Sequence: Synthetic oligonucleotide
  Antisense strand to SEQ ID NO: 41370
uccaacacaggagugaucu

SEQ ID NO: 41372 - RNA, 19 nt, Artificial Sequence
  Description of Artificial Sequence: Synthetic oligonucleotide
  Sense strand starting at position 1149 of SEQ ID NO: 494
guuggagguucuguguaau

SEQ ID NO: 41373 - RNA, 19 nt, Artificial Sequence
  Description of Artificial Sequence: Synthetic oligonucleotide
  Antisense strand to SEQ ID NO: 41372
auuacacagaaccuccaac

SEQ ID NO: 41374 - RNA, 19 nt, Artificial Sequence
  Description of Artificial Sequence: Synthetic oligonucleotide
  Sense strand starting at position 1152 of SEQ ID NO: 494
ggagguucuguguaauaug

SEQ ID NO: 41375 - RNA, 19 nt, Artificial Sequence
  Description of Artificial Sequence: Synthetic oligonucleotide
  Antisense strand to SEQ ID NO: 41374
cauauuacacagaaccucc

SEQ ID NO: 41376 - RNA, 19 nt, Artificial Sequence
  Description of Artificial Sequence: Synthetic oligonucleotide
  Sense strand starting at position 1176 of SEQ ID NO: 494
caaguagcaucccugaaag

SEQ ID NO: 41377 - RNA, 19 nt, Artificial Sequence
  Description of Artificial Sequence: Synthetic oligonucleotide
  Antisense strand to SEQ ID NO: 41376
cuuucagggaugcuacuug

SEQ ID NO: 41378 - RNA, 19 nt, Artificial Sequence
  Description of Artificial Sequence: Synthetic oligonucleotide
  Sense strand starting at position 1190 of SEQ ID NO: 494
gaaagaaacugagacauug

SEQ ID NO: 41379 - RNA, 19 nt, Artificial Sequence
  Description of Artificial Sequence: Synthetic oligonucleotide
  Antisense strand to SEQ ID NO: 41378
caaugucucaguuucuuuc

SEQ ID NO: 41380 - RNA, 19 nt, Artificial Sequence
  Description of Artificial Sequence: Synthetic oligonucleotide
  Sense strand starting at position 1212 of SEQ ID NO: 494
aguuaaauaguuuguccaa

SEQ ID NO: 41381 - RNA, 19 nt, Artificial Sequence
  Description of Artificial Sequence: Synthetic oligonucleotide
  Antisense strand to SEQ ID NO: 41380
uuggacaaacuauuuaacu

SEQ ID NO: 41382 - RNA, 19 nt, Artificial Sequence
  Description of Artificial Sequence: Synthetic oligonucleotide
  Sense strand starting at position 1215 of SEQ ID NO: 494
uaaauaguuuguccaagga

SEQ ID NO: 41383 - RNA, 19 nt, Artificial Sequence
  Description of Artificial Sequence: Synthetic oligonucleotide
  Antisense strand to SEQ ID NO: 41382
uccuuggacaaacuauuua

SEQ ID NO: 41384 - RNA, 19 nt, Artificial Sequence
  Description of Artificial Sequence: Synthetic oligonucleotide
  Sense strand starting at position 1229 of SEQ ID NO: 494
aaggaaaccugcgcguuaa

SEQ ID NO: 41385 - RNA, 19 nt, Artificial Sequence
  Description of Artificial Sequence: Synthetic oligonucleotide
  Antisense strand to SEQ ID NO: 41384
uuaacgcgcagguuuccuu

SEQ ID NO: 41386 - RNA, 19 nt, Artificial Sequence
  Description of Artificial Sequence: Synthetic oligonucleotide
  Sense strand starting at position 1231 of SEQ ID NO: 494
ggaaaccugcgcguuaagu

SEQ ID NO: 41387 - RNA, 19 nt, Artificial Sequence
  Description of Artificial Sequence: Synthetic oligonucleotide
  Antisense strand to SEQ ID NO: 41386
acuuaacgcgcagguuucc

SEQ ID NO: 41388 - RNA, 19 nt, Artificial Sequence
  Description of Artificial Sequence: Synthetic oligonucleotide
  Sense strand starting at position 1348 of SEQ ID NO: 494
guggauuuccucggugcca

SEQ ID NO: 41389 - RNA, 19 nt, Artificial Sequence
  Description of Artificial Sequence: Synthetic oligonucleotide
  Antisense strand to SEQ ID NO: 41388
uggcaccgaggaaauccac

SEQ ID NO: 41390 - RNA, 19 nt, Artificial Sequence
  Description of Artificial Sequence: Synthetic oligonucleotide
  Sense strand starting at position 1350 of SEQ ID NO: 494
ggauuuccucggugccacu

SEQ ID NO: 41391 - RNA, 19 nt, Artificial Sequence
  Description of Artificial Sequence: Synthetic oligonucleotide
  Antisense strand to SEQ ID NO: 41390
aguggcaccgaggaaaucc

SEQ ID NO: 41392 - RNA, 19 nt, Artificial Sequence
  Description of Artificial Sequence: Synthetic oligonucleotide
  Sense strand starting at position 1579 of SEQ ID NO: 494
gagggcugauuguuagcua

SEQ ID NO: 41393 - RNA, 19 nt, Artificial Sequence
  Description of Artificial Sequence: Synthetic oligonucleotide
  Antisense strand to SEQ ID NO: 41392
uagcuaacaaucagcccuc

SEQ ID NO: 41394 - RNA, 19 nt, Artificial Sequence
  Description of Artificial Sequence: Synthetic oligonucleotide
  Sense strand starting at position 1582 of SEQ ID NO: 494
ggcugauuguuagcuaaca

SEQ ID NO: 41395 - RNA, 19 nt, Artificial Sequence
  Description of Artificial Sequence: Synthetic oligonucleotide
  Antisense strand to SEQ ID NO: 41394
uguuagcuaacaaucagcc

SEQ ID NO: 41396 - RNA, 19 nt, Artificial Sequence
  Description of Artificial Sequence: Synthetic oligonucleotide
  Sense strand starting at position 1611 of SEQ ID NO: 494
ugcuuuaaaugugcucaau

SEQ ID NO: 41397 - RNA, 19 nt, Artificial Sequence
  Description of Artificial Sequence: Synthetic oligonucleotide
  Antisense strand to SEQ ID NO: 41396
auugagcacauuuaaagca

SEQ ID NO: 41398 - RNA, 19 nt, Artificial Sequence
  Description of Artificial Sequence: Synthetic oligonucleotide
  Sense strand starting at position 1810 of SEQ ID NO: 494
aggucaggcccagauguuu

SEQ ID NO: 41399 - RNA, 19 nt, Artificial Sequence
  Description of Artificial Sequence: Synthetic oligonucleotide
  Antisense strand to SEQ ID NO: 41398
aaacaucugggccugaccu

SEQ ID NO: 41400 - RNA, 19 nt, Artificial Sequence
  Description of Artificial Sequence: Synthetic oligonucleotide
  Sense strand starting at position 1940 of SEQ ID NO: 494
ccgauuguucugcccgacu

SEQ ID NO: 41401 - RNA, 19 nt, Artificial Sequence
  Description of Artificial Sequence: Synthetic oligonucleotide
  Antisense strand to SEQ ID NO: 41400
agucgggcagaacaaucgg

SEQ ID NO: 41402 - RNA, 19 nt, Artificial Sequence
  Description of Artificial Sequence: Synthetic oligonucleotide
  Sense strand starting at position 2008 of SEQ ID NO: 494
agucaacuguguccaggaa

SEQ ID NO: 41403 - RNA, 19 nt, Artificial Sequence
  Description of Artificial Sequence: Synthetic oligonucleotide
  Antisense strand to SEQ ID NO: 41402
uuccuggacacaguugacu

SEQ ID NO: 41404 - RNA, 19 nt, Artificial Sequence
  Description of Artificial Sequence: Synthetic oligonucleotide
  Sense strand starting at position 2382 of SEQ ID NO: 494
gcugaugucauggcgcgaa

SEQ ID NO: 41405 - RNA, 19 nt, Artificial Sequence
  Description of Artificial Sequence: Synthetic oligonucleotide
  Antisense strand to SEQ ID NO: 41404
uucgcgccaugacaucagc

SEQ ID NO: 41406 - RNA, 19 nt, Artificial Sequence
  Description of Artificial Sequence: Synthetic oligonucleotide
  Sense strand starting at position 2570 of SEQ ID NO: 494
cugucugucaggugagaag

SEQ ID NO: 41407 - RNA, 19 nt, Artificial Sequence
  Description of Artificial Sequence: Synthetic oligonucleotide
  Antisense strand to SEQ ID NO: 41406
cuucucaccugacagacag

SEQ ID NO: 41408 - RNA, 19 nt, Artificial Sequence
  Description of Artificial Sequence: Synthetic oligonucleotide
  Sense strand starting at position 2638 of SEQ ID NO: 494
acgaaagggugucucgaau

SEQ ID NO: 41409 - RNA, 19 nt, Artificial Sequence
  Description of Artificial Sequence: Synthetic oligonucleotide
  Antisense strand to SEQ ID NO: 41408
auucgagacacccuuucgu

SEQ ID NO: 41410 - RNA, 19 nt, Artificial Sequence
  Description of Artificial Sequence: Synthetic oligonucleotide
  Sense strand starting at position 2729 of SEQ ID NO: 494
gucugauucugcccaucca

SEQ ID NO: 41411 - RNA, 19 nt, Artificial Sequence
  Description of Artificial Sequence: Synthetic oligonucleotide
  Antisense strand to SEQ ID NO: 41410
uggaugggcagaaucagac

SEQ ID NO: 41412 - RNA, 19 nt, Artificial Sequence
  Description of Artificial Sequence: Synthetic oligonucleotide
  Sense strand starting at position 2785 of SEQ ID NO: 494
gguucagggucaucuguga

SEQ ID NO: 41413 - RNA, 19 nt, Artificial Sequence
  Description of Artificial Sequence: Synthetic oligonucleotide
  Antisense strand to SEQ ID NO: 41412
ucacagaugacccugaacc

SEQ ID NO: 41414 - RNA, 19 nt, Artificial Sequence
  Description of Artificial Sequence: Synthetic oligonucleotide
  Sense strand starting at position 2800 of SEQ ID NO: 494
gugaacggcguguaaucua

SEQ ID NO: 41415 - RNA, 19 nt, Artificial Sequence
  Description of Artificial Sequence: Synthetic oligonucleotide
  Antisense strand to SEQ ID NO: 41414
uagauuacacgccguucac

SEQ ID NO: 41416 - RNA, 19 nt, Artificial Sequence
  Description of Artificial Sequence: Synthetic oligonucleotide
  Sense strand starting at position 2807 of SEQ ID NO: 494
gcguguaaucuacagggau

SEQ ID NO: 41417 - RNA, 19 nt, Artificial Sequence
  Description of Artificial Sequence: Synthetic oligonucleotide
  Antisense strand to SEQ ID NO: 41416
aucccuguagauuacacgc

SEQ ID NO: 41418 - RNA, 19 nt, Artificial Sequence
  Description of Artificial Sequence: Synthetic oligonucleotide
  Sense strand starting at position 2809 of SEQ ID NO: 494
guguaaucuacagggaugu

SEQ ID NO: 41419 - RNA, 19 nt, Artificial Sequence
  Description of Artificial Sequence: Synthetic oligonucleotide
  Antisense strand to SEQ ID NO: 41418
acaucccuguagauuacac

SEQ ID NO: 41420 - RNA, 19 nt, Artificial Sequence
  Description of Artificial Sequence: Synthetic oligonucleotide
  Sense strand starting at position 3349 of SEQ ID NO: 494
agcaucuuaugaucuagaa

SEQ ID NO: 41421 - RNA, 19 nt, Artificial Sequence
  Description of Artificial Sequence: Synthetic oligonucleotide
  Antisense strand to SEQ ID NO: 41420
uucuagaucauaagaugcu

SEQ ID NO: 41422 - RNA, 19 nt, Artificial Sequence
  Description of Artificial Sequence: Synthetic oligonucleotide
  Sense strand starting at position 3833 of SEQ ID NO: 494
agaagaauuucuggucacg

SEQ ID NO: 41423 - RNA, 19 nt, Artificial Sequence
  Description of Artificial Sequence: Synthetic oligonucleotide
  Antisense strand to SEQ ID NO: 41422
cgugaccagaaauucuucu

SEQ ID NO: 41424 - RNA, 19 nt, Artificial Sequence
  Description of Artificial Sequence: Synthetic oligonucleotide
  Sense strand starting at position 3858 of SEQ ID NO: 494
cugacuaagcaauaguuaa

SEQ ID NO: 41425 - RNA, 19 nt, Artificial Sequence
  Description of Artificial Sequence: Synthetic oligonucleotide
  Antisense strand to SEQ ID NO: 41424
uuaacuauugcuuagucag

SEQ ID NO: 41426 - RNA, 19 nt, Artificial Sequence
  Description of Artificial Sequence: Synthetic oligonucleotide
  Sense strand starting at position 3921 of SEQ ID NO: 494
agggcuuccgcccaaagau

SEQ ID NO: 41427 - RNA, 19 nt, Artificial Sequence
  Description of Artificial Sequence: Synthetic oligonucleotide
  Antisense strand to SEQ ID NO: 41426
aucuuugggcggaagcccu

SEQ ID NO: 41428 - RNA, 19 nt, Artificial Sequence
  Description of Artificial Sequence: Synthetic oligonucleotide
  Sense strand starting at position 58 of SEQ ID NO: 493
gaugcaaacguccauugaa

SEQ ID NO: 41429 - RNA, 19 nt, Artificial Sequence
  Description of Artificial Sequence: Synthetic oligonucleotide
  Antisense strand to SEQ ID NO: 41428
uucaauggacguuugcauc

SEQ ID NO: 41430 - RNA, 19 nt, Artificial Sequence
  Description of Artificial Sequence: Synthetic oligonucleotide
  Sense strand starting at position 133 of SEQ ID NO: 493
cuucguguaaugcagaaca

SEQ ID NO: 41431 - RNA, 19 nt, Artificial Sequence
  Description of Artificial Sequence: Synthetic oligonucleotide
  Antisense strand to SEQ ID NO: 41430
uguucugcauuacacgaag

SEQ ID NO: 41432 - RNA, 19 nt, Artificial Sequence
  Description of Artificial Sequence: Synthetic oligonucleotide
  Sense strand starting at position 135 of SEQ ID NO: 493
ucguguaaugcagaacaga

SEQ ID NO: 41433 - RNA, 19 nt, Artificial Sequence
  Description of Artificial Sequence: Synthetic oligonucleotide
  Antisense strand to SEQ ID NO: 41432
ucuguucugcauuacacga

SEQ ID NO: 41434 - RNA, 19 nt, Artificial Sequence
  Description of Artificial Sequence: Synthetic oligonucleotide
  Sense strand starting at position 437 of SEQ ID NO: 493
cugaguaacuuguccauca

SEQ ID NO: 41435 - RNA, 19 nt, Artificial Sequence
  Description of Artificial Sequence: Synthetic oligonucleotide
  Antisense strand to SEQ ID NO: 41434
ugauggacaaguuacucag

SEQ ID NO: 41436 - RNA, 19 nt, Artificial Sequence
  Description of Artificial Sequence: Synthetic oligonucleotide
  Sense strand starting at position 438 of SEQ ID NO: 493
ugaguaacuuguccaucau

SEQ ID NO: 41437 - RNA, 19 nt, Artificial Sequence
  Description of Artificial Sequence: Synthetic oligonucleotide
  Antisense strand to SEQ ID NO: 41436
augauggacaaguuacuca

SEQ ID NO: 41438 - RNA, 19 nt, Artificial Sequence
  Description of Artificial Sequence: Synthetic oligonucleotide
  Sense strand starting at position 623 of SEQ ID NO: 493
cgccacccuggguaauaua

SEQ ID NO: 41439 - RNA, 19 nt, Artificial Sequence
  Description of Artificial Sequence: Synthetic oligonucleotide
  Antisense strand to SEQ ID NO: 41438
uauauuacccaggguggcg

SEQ ID NO: 41440 - RNA, 19 nt, Artificial Sequence
  Description of Artificial Sequence: Synthetic oligonucleotide
  Sense strand starting at position 917 of SEQ ID NO: 493
uugccacauccuggaaaca

SEQ ID NO: 41441 - RNA, 19 nt, Artificial Sequence
  Description of Artificial Sequence: Synthetic oligonucleotide
  Antisense strand to SEQ ID NO: 41440
uguuuccaggauguggcaa

SEQ ID NO: 41442 - RNA, 19 nt, Artificial Sequence
  Description of Artificial Sequence: Synthetic oligonucleotide
  Sense strand starting at position 1045 of SEQ ID NO: 493
aggcuuaugacuggagcaa

SEQ ID NO: 41443 - RNA, 19 nt, Artificial Sequence
  Description of Artificial Sequence: Synthetic oligonucleotide
  Antisense strand to SEQ ID NO: 41442
uugcuccagucauaagccu

SEQ ID NO: 41444 - RNA, 19 nt, Artificial Sequence
  Description of Artificial Sequence: Synthetic oligonucleotide
  Sense strand starting at position 1046 of SEQ ID NO: 493
ggcuuaugacuggagcaaa

SEQ ID NO: 41445 - RNA, 19 nt, Artificial Sequence
  Description of Artificial Sequence: Synthetic oligonucleotide
  Antisense strand to SEQ ID NO: 41444
uuugcuccagucauaagcc

SEQ ID NO: 41446 - RNA, 19 nt, Artificial Sequence
  Description of Artificial Sequence: Synthetic oligonucleotide
  Sense strand starting at position 1075 of SEQ ID NO: 493
gcuucuuaggaguagauau

SEQ ID NO: 41447 - RNA, 19 nt, Artificial Sequence
  Description of Artificial Sequence: Synthetic oligonucleotide
  Antisense strand to SEQ ID NO: 41446
auaucuacuccuaagaagc

SEQ ID NO: 41448 - RNA, 19 nt, Artificial Sequence
  Description of Artificial Sequence: Synthetic oligonucleotide
  Sense strand starting at position 1082 of SEQ ID NO: 493
aggaguagauaucagggaa

SEQ ID NO: 41449 - RNA, 19 nt, Artificial Sequence
  Description of Artificial Sequence: Synthetic oligonucleotide
  Antisense strand to SEQ ID NO: 41448
uucccugauaucuacuccu

SEQ ID NO: 41450 - RNA, 19 nt, Artificial Sequence
  Description of Artificial Sequence: Synthetic oligonucleotide
  Sense strand starting at position 1238 of SEQ ID NO: 493
cucuguugccuuugaacaa

SEQ ID NO: 41451 - RNA, 19 nt, Artificial Sequence
  Description of Artificial Sequence: Synthetic oligonucleotide
  Antisense strand to SEQ ID NO: 41450
uuguucaaaggcaacagag

SEQ ID NO: 41452 - RNA, 19 nt, Artificial Sequence
  Description of Artificial Sequence: Synthetic oligonucleotide
  Sense strand starting at position 1242 of SEQ ID NO: 493
guugccuuugaacaagaga

SEQ ID NO: 41453 - RNA, 19 nt, Artificial Sequence
  Description of Artificial Sequence: Synthetic oligonucleotide
  Antisense strand to SEQ ID NO: 41452
ucucuuguucaaaggcaac

SEQ ID NO: 41454 - RNA, 19 nt, Artificial Sequence
  Description of Artificial Sequence: Synthetic oligonucleotide
  Sense strand starting at position 1258 of SEQ ID NO: 493
agauaauuagggugcaaag

SEQ ID NO: 41455 - RNA, 19 nt, Artificial Sequence
  Description of Artificial Sequence: Synthetic oligonucleotide
  Antisense strand to SEQ ID NO: 41454
cuuugcacccuaauuaucu

SEQ ID NO: 41456 - RNA, 19 nt, Artificial Sequence
  Description of Artificial Sequence: Synthetic oligonucleotide
  Sense strand starting at position 1436 of SEQ ID NO: 493
gaagcuucugaacggaaca

SEQ ID NO: 41457 - RNA, 19 nt, Artificial Sequence
  Description of Artificial Sequence: Synthetic oligonucleotide
  Antisense strand to SEQ ID NO: 41456
uguuccguucagaagcuuc

SEQ ID NO: 41458 - RNA, 19 nt, Artificial Sequence
  Description of Artificial Sequence: Synthetic oligonucleotide
  Sense strand starting at position 1499 of SEQ ID NO: 493
augucaagcuguuuacauc

SEQ ID NO: 41459 - RNA, 19 nt, Artificial Sequence
  Description of Artificial Sequence: Synthetic oligonucleotide
  Antisense strand to SEQ ID NO: 41458
gauguaaacagcuugacau

SEQ ID NO: 41460 - RNA, 19 nt, Artificial Sequence
  Description of Artificial Sequence: Synthetic oligonucleotide
  Sense strand starting at position 1509 of SEQ ID NO: 493
guuuacaucccaugggauc

SEQ ID NO: 41461 - RNA, 19 nt, Artificial Sequence
  Description of Artificial Sequence: Synthetic oligonucleotide
  Antisense strand to SEQ ID NO: 41460
gaucccaugggauguaaac

SEQ ID NO: 41462 - RNA, 19 nt, Artificial Sequence
  Description of Artificial Sequence: Synthetic oligonucleotide
  Sense strand starting at position 1660 of SEQ ID NO: 493
ugaaccucuucggcaaagu

SEQ ID NO: 41463 - RNA, 19 nt, Artificial Sequence
  Description of Artificial Sequence: Synthetic oligonucleotide
  Antisense strand to SEQ ID NO: 41462
acuuugccgaagagguuca

SEQ ID NO: 41464 - RNA, 19 nt, Artificial Sequence
  Description of Artificial Sequence: Synthetic oligonucleotide
  Sense strand starting at position 1661 of SEQ ID NO: 493
gaaccucuucggcaaagua

SEQ ID NO: 41465 - RNA, 19 nt, Artificial Sequence
  Description of Artificial Sequence: Synthetic oligonucleotide
  Antisense strand to SEQ ID NO: 41464
uacuuugccgaagagguuc

SEQ ID NO: 41466 - RNA, 19 nt, Artificial Sequence
  Description of Artificial Sequence: Synthetic oligonucleotide
  Sense strand starting at position 1676 of SEQ ID NO: 493
aguaaaccgucuucugaca

SEQ ID NO: 41467 - RNA, 19 nt, Artificial Sequence
  Description of Artificial Sequence: Synthetic oligonucleotide
  Antisense strand to SEQ ID NO: 41466
ugucagaagacgguuuacu

SEQ ID NO: 41468 - RNA, 19 nt, Artificial Sequence
  Description of Artificial Sequence: Synthetic oligonucleotide
  Sense strand starting at position 1773 of SEQ ID NO: 493
auggaaacaucucagauug

SEQ ID NO: 41469 - RNA, 19 nt, Artificial Sequence
  Description of Artificial Sequence: Synthetic oligonucleotide
  Antisense strand to SEQ ID NO: 41468
caaucugagauguuuccau

SEQ ID NO: 41470 - RNA, 19 nt, Artificial Sequence
  Description of Artificial Sequence: Synthetic oligonucleotide
  Sense strand starting at position 1784 of SEQ ID NO: 493
ucagauuguccacgacaga

SEQ ID NO: 41471 - RNA, 19 nt, Artificial Sequence
  Description of Artificial Sequence: Synthetic oligonucleotide
  Antisense strand to SEQ ID NO: 41470
ucugucguggacaaucuga

SEQ ID NO: 41472 - RNA, 19 nt, Artificial Sequence
  Description of Artificial Sequence: Synthetic oligonucleotide
  Sense strand starting at position 1938 of SEQ ID NO: 493
aucaacaggucuuuacaga

SEQ ID NO: 41473 - RNA, 19 nt, Artificial Sequence
  Description of Artificial Sequence: Synthetic oligonucleotide
  Antisense strand to SEQ ID NO: 41472
ucuguaaagaccuguugau

SEQ ID NO: 41474 - RNA, 19 nt, Artificial Sequence
  Description of Artificial Sequence: Synthetic oligonucleotide
  Sense strand starting at position 2140 of SEQ ID NO: 493
caaguccauuuguaggaaa

SEQ ID NO: 41475 - RNA, 19 nt, Artificial Sequence
  Description of Artificial Sequence: Synthetic oligonucleotide
  Antisense strand to SEQ ID NO: 41474
uuuccuacaaauggacuug

SEQ ID NO: 41476 - RNA, 19 nt, Artificial Sequence
  Description of Artificial Sequence: Synthetic oligonucleotide
  Sense strand starting at position 2143 of SEQ ID NO: 493
guccauuuguaggaaauuc

SEQ ID NO: 41477 - RNA, 19 nt, Artificial Sequence
  Description of Artificial Sequence: Synthetic oligonucleotide
  Antisense strand to SEQ ID NO: 41476
gaauuuccuacaaauggac

SEQ ID NO: 41478 - RNA, 19 nt, Artificial Sequence
  Description of Artificial Sequence: Synthetic oligonucleotide
  Sense strand starting at position 2256 of SEQ ID NO: 493
uuagaagaguuaccucuaa

SEQ ID NO: 41479 - RNA, 19 nt, Artificial Sequence
  Description of Artificial Sequence: Synthetic oligonucleotide
  Antisense strand to SEQ ID NO: 41478
uuagagguaacucuucuaa

SEQ ID NO: 41480 - RNA, 19 nt, Artificial Sequence
  Description of Artificial Sequence: Synthetic oligonucleotide
  Sense strand starting at position 2346 of SEQ ID NO: 493
uucuuaacucagggugguu

SEQ ID NO: 41481 - RNA, 19 nt, Artificial Sequence
  Description of Artificial Sequence: Synthetic oligonucleotide
  Antisense strand to SEQ ID NO: 41480
aaccacccugaguuaagaa

SEQ ID NO: 41482 - RNA, 19 nt, Artificial Sequence
  Description of Artificial Sequence: Synthetic oligonucleotide
  Sense strand starting at position 2430 of SEQ ID NO: 493
guauauaagcuauagcuca

SEQ ID NO: 41483 - RNA, 19 nt, Artificial Sequence
  Description of Artificial Sequence: Synthetic oligonucleotide
  Antisense strand to SEQ ID NO: 41482
ugagcuauagcuuauauac

SEQ ID NO: 41484 - RNA, 19 nt, Artificial Sequence
  Description of Artificial Sequence: Synthetic oligonucleotide
  Sense strand starting at position 2574 of SEQ ID NO: 493
uccggaguuccagaucaga

SEQ ID NO: 41485 - RNA, 19 nt, Artificial Sequence
  Description of Artificial Sequence: Synthetic oligonucleotide
  Antisense strand to SEQ ID NO: 41484
ucugaucuggaacuccgga

SEQ ID NO: 41486 - RNA, 19 nt, Artificial Sequence
  Description of Artificial Sequence: Synthetic oligonucleotide
  Sense strand starting at position 2903 of SEQ ID NO: 493
auuauaaccucugagaaug

SEQ ID NO: 41487 - RNA, 19 nt, Artificial Sequence
  Description of Artificial Sequence: Synthetic oligonucleotide
  Antisense strand to SEQ ID NO: 41486
cauucucagagguuauaau

SEQ ID NO: 41488 - RNA, 19 nt, Artificial Sequence
  Description of Artificial Sequence: Synthetic oligonucleotide
  Sense strand starting at position 3047 of SEQ ID NO: 493
caugcagguuuggcucaau

SEQ ID NO: 41489 - RNA, 19 nt, Artificial Sequence
  Description of Artificial Sequence: Synthetic oligonucleotide
  Antisense strand to SEQ ID NO: 41488
auugagccaaaccugcaug

SEQ ID NO: 41490 - RNA, 19 nt, Artificial Sequence
  Description of Artificial Sequence: Synthetic oligonucleotide
  Sense strand starting at position 3050 of SEQ ID NO: 493
gcagguuuggcucaaucuu

SEQ ID NO: 41491 - RNA, 19 nt, Artificial Sequence
  Description of Artificial Sequence: Synthetic oligonucleotide
  Antisense strand to SEQ ID NO: 41490
aagauugagccaaaccugc

SEQ ID NO: 41492 - RNA, 19 nt, Artificial Sequence
  Description of Artificial Sequence: Synthetic oligonucleotide
  Sense strand starting at position 3099 of SEQ ID NO: 493
gggcaagauagucagucuu

SEQ ID NO: 41493 - RNA, 19 nt, Artificial Sequence
  Description of Artificial Sequence: Synthetic oligonucleotide
  Antisense strand to SEQ ID NO: 41492
aagacugacuaucuugccc

SEQ ID NO: 41494 - RNA, 19 nt, Artificial Sequence
  Description of Artificial Sequence: Synthetic oligonucleotide
  Sense strand starting at position 3101 of SEQ ID NO: 493
gcaagauagucagucuuuc

SEQ ID NO: 41495 - RNA, 19 nt, Artificial Sequence
  Description of Artificial Sequence: Synthetic oligonucleotide
  Antisense strand to SEQ ID NO: 41494
gaaagacugacuaucuugc

SEQ ID NO: 41496 - RNA, 19 nt, Artificial Sequence
  Description of Artificial Sequence: Synthetic oligonucleotide
  Sense strand starting at position 3474 of SEQ ID NO: 493
uaugucuggugauuaaaug

SEQ ID NO: 41497 - RNA, 19 nt, Artificial Sequence
  Description of Artificial Sequence: Synthetic oligonucleotide
  Antisense strand to SEQ ID NO: 41496
cauuuaaucaccagacaua

SEQ ID NO: 41498 - RNA, 19 nt, Artificial Sequence
  Description of Artificial Sequence: Synthetic oligonucleotide
  Sense strand starting at position 3482 of SEQ ID NO: 493
gugauuaaaugagauauga

SEQ ID NO: 41499 - RNA, 19 nt, Artificial Sequence
  Description of Artificial Sequence: Synthetic oligonucleotide
  Antisense strand to SEQ ID NO: 41498
ucauaucucauuuaaucac

SEQ ID NO: 41500 - RNA, 19 nt, Artificial Sequence
  Description of Artificial Sequence: Synthetic oligonucleotide
  Sense strand starting at position 3810 of SEQ ID NO: 493
agggaggugccgggaaaua

SEQ ID NO: 41501 - RNA, 19 nt, Artificial Sequence
  Description of Artificial Sequence: Synthetic oligonucleotide
  Antisense strand to SEQ ID NO: 41500
uauuucccggcaccucccu

SEQ ID NO: 41502 - RNA, 19 nt, Artificial Sequence
  Description of Artificial Sequence: Synthetic oligonucleotide
  Sense strand starting at position 3847 of SEQ ID NO: 493
gggaucuguugccucagga

SEQ ID NO: 41503 - RNA, 19 nt, Artificial Sequence
  Description of Artificial Sequence: Synthetic oligonucleotide
  Antisense strand to SEQ ID NO: 41502
uccugaggcaacagauccc

SEQ ID NO: 41504 - RNA, 19 nt, Artificial Sequence
  Description of Artificial Sequence: Synthetic oligonucleotide
  Sense strand starting at position 3901 of SEQ ID NO: 493
gucacauggaaauguugaa

SEQ ID NO: 41505 - RNA, 19 nt, Artificial Sequence
  Description of Artificial Sequence: Synthetic oligonucleotide
  Antisense strand to SEQ ID NO: 41504
uucaacauuuccaugugac

SEQ ID NO: 41506 - RNA, 19 nt, Artificial Sequence
  Description of Artificial Sequence: Synthetic oligonucleotide
  Sense strand starting at position 3982 of SEQ ID NO: 493
agucaaugucaagggcaga

SEQ ID NO: 41507 - RNA, 19 nt, Artificial Sequence
  Description of Artificial Sequence: Synthetic oligonucleotide
  Antisense strand to SEQ ID NO: 41506
ucugcccuugacauugacu

SEQ ID NO: 41508 - RNA, 19 nt, Artificial Sequence
  Description of Artificial Sequence: Synthetic oligonucleotide
  Sense strand starting at position 150 of SEQ ID NO: 495
cuaaguauuggguacuaca

SEQ ID NO: 41509 - RNA, 19 nt, Artificial Sequence
  Description of Artificial Sequence: Synthetic oligonucleotide
  Antisense strand to SEQ ID NO: 41508
uguaguacccaauacuuag

SEQ ID NO: 41510 - RNA, 19 nt, Artificial Sequence
  Description of Artificial Sequence: Synthetic oligonucleotide
  Sense strand starting at position 158 of SEQ ID NO: 495
uggguacuacaguaaaucu

SEQ ID NO: 41511 - RNA, 19 nt, Artificial Sequence
  Description of Artificial Sequence: Synthetic oligonucleotide
  Antisense strand to SEQ ID NO: 41510
agauuuacuguaguaccca

SEQ ID NO: 41512 - RNA, 19 nt, Artificial Sequence
  Description of Artificial Sequence: Synthetic oligonucleotide
  Sense strand starting at position 325 of SEQ ID NO: 495
aguaguucggauuacaugu

SEQ ID NO: 41513 - RNA, 19 nt, Artificial Sequence
  Description of Artificial Sequence: Synthetic oligonucleotide
  Antisense strand to SEQ ID NO: 41512
acauguaauccgaacuacu

SEQ ID NO: 41514 - RNA, 19 nt, Artificial Sequence
  Description of Artificial Sequence: Synthetic oligonucleotide
  Sense strand starting at position 495 of SEQ ID NO: 495
uuaagaaaugucugguuga

SEQ ID NO: 41515 - RNA, 19 nt, Artificial Sequence
  Description of Artificial Sequence: Synthetic oligonucleotide
  Antisense strand to SEQ ID NO: 41514
ucaaccagacauuucuuaa

SEQ ID NO: 41516 - RNA, 19 nt, Artificial Sequence
  Description of Artificial Sequence: Synthetic oligonucleotide
  Sense strand starting at position 498 of SEQ ID NO: 495
agaaaugucugguugaacu

SEQ ID NO: 41517 - RNA, 19 nt, Artificial Sequence
  Description of Artificial Sequence: Synthetic oligonucleotide
  Antisense strand to SEQ ID NO: 41516
aguucaaccagacauuucu

SEQ ID NO: 41518 - RNA, 19 nt, Artificial Sequence
  Description of Artificial Sequence: Synthetic oligonucleotide
  Sense strand starting at position 500 of SEQ ID NO: 495
aaaugucugguugaacuuu

SEQ ID NO: 41519 - RNA, 19 nt, Artificial Sequence
  Description of Artificial Sequence: Synthetic oligonucleotide
  Antisense strand to SEQ ID NO: 41518
aaaguucaaccagacauuu

SEQ ID NO: 41520 - RNA, 19 nt, Artificial Sequence
  Description of Artificial Sequence: Synthetic oligonucleotide
  Sense strand starting at position 620 of SEQ ID NO: 495
uggauuuccugcuuaagca

SEQ ID NO: 41521 - RNA, 19 nt, Artificial Sequence
  Description of Artificial Sequence: Synthetic oligonucleotide
  Antisense strand to SEQ ID NO: 41520
ugcuuaagcaggaaaucca

SEQ ID NO: 41522 - RNA, 19 nt, Artificial Sequence
  Description of Artificial Sequence: Synthetic oligonucleotide
  Sense strand starting at position 925 of SEQ ID NO: 495
auaagauguuagguuucca

SEQ ID NO: 41523 - RNA, 19 nt, Artificial Sequence
  Description of Artificial Sequence: Synthetic oligonucleotide
  Antisense strand to SEQ ID NO: 41522
uggaaaccuaacaucuuau

SEQ ID NO: 41524 - RNA, 19 nt, Artificial Sequence
  Description of Artificial Sequence: Synthetic oligonucleotide
  Sense strand starting at position 929 of SEQ ID NO: 495
gauguuagguuuccacacu

SEQ ID NO: 41525 - RNA, 19 nt, Artificial Sequence
  Description of Artificial Sequence: Synthetic oligonucleotide
  Antisense strand to SEQ ID NO: 41524
aguguggaaaccuaacauc

SEQ ID NO: 41526 - RNA, 19 nt, Artificial Sequence
  Description of Artificial Sequence: Synthetic oligonucleotide
  Sense strand starting at position 946 of SEQ ID NO: 495
cuaggcagguucuccauaa

SEQ ID NO: 41527 - RNA, 19 nt, Artificial Sequence
  Description of Artificial Sequence: Synthetic oligonucleotide
  Antisense strand to SEQ ID NO: 41526
uuauggagaaccugccuag

SEQ ID NO: 41528 - RNA, 19 nt, Artificial Sequence
  Description of Artificial Sequence: Synthetic oligonucleotide
  Sense strand starting at position 947 of SEQ ID NO: 495
uaggcagguucuccauaaa

SEQ ID NO: 41529 - RNA, 19 nt, Artificial Sequence
  Description of Artificial Sequence: Synthetic oligonucleotide
  Antisense strand to SEQ ID NO: 41528
uuuauggagaaccugccua

SEQ ID NO: 41530 - RNA, 19 nt, Artificial Sequence
  Description of Artificial Sequence: Synthetic oligonucleotide
  Sense strand starting at position 950 of SEQ ID NO: 495
gcagguucuccauaaacac

SEQ ID NO: 41531 - RNA, 19 nt, Artificial Sequence
  Description of Artificial Sequence: Synthetic oligonucleotide
  Antisense strand to SEQ ID NO: 41530
guguuuauggagaaccugc

SEQ ID NO: 41532 - RNA, 19 nt, Artificial Sequence
  Description of Artificial Sequence: Synthetic oligonucleotide
  Sense strand starting at position 1033 of SEQ ID NO: 495
ucugccucagauuaaugua

SEQ ID NO: 41533 - RNA, 19 nt, Artificial Sequence
  Description of Artificial Sequence: Synthetic oligonucleotide
  Antisense strand to SEQ ID NO: 41532
uacauuaaucugaggcaga

SEQ ID NO: 41534 - RNA, 19 nt, Artificial Sequence
  Description of Artificial Sequence: Synthetic oligonucleotide
  Sense strand starting at position 1090 of SEQ ID NO: 495
agaaucguucuuugaauua

SEQ ID NO: 41535 - RNA, 19 nt, Artificial Sequence
  Description of Artificial Sequence: Synthetic oligonucleotide
  Antisense strand to SEQ ID NO: 41534
uaauucaaagaacgauucu

SEQ ID NO: 41536 - RNA, 19 nt, Artificial Sequence
  Description of Artificial Sequence: Synthetic oligonucleotide
  Sense strand starting at position 1187 of SEQ ID NO: 495
uccagaagguguuugauua

SEQ ID NO: 41537 - RNA, 19 nt, Artificial Sequence
  Description of Artificial Sequence: Synthetic oligonucleotide
  Antisense strand to SEQ ID NO: 41536
uaaucaaacaccuucugga

SEQ ID NO: 41538 - RNA, 19 nt, Artificial Sequence
  Description of Artificial Sequence: Synthetic oligonucleotide
  Sense strand starting at position 1188 of SEQ ID NO: 495
ccagaagguguuugauuaa

SEQ ID NO: 41539 - RNA, 19 nt, Artificial Sequence
  Description of Artificial Sequence: Synthetic oligonucleotide
  Antisense strand to SEQ ID NO: 41538
uuaaucaaacaccuucugg

SEQ ID NO: 41540 - RNA, 19 nt, Artificial Sequence
  Description of Artificial Sequence: Synthetic oligonucleotide
  Sense strand starting at position 1191 of SEQ ID NO: 495
gaagguguuugauuaaagu

SEQ ID NO: 41541 - RNA, 19 nt, Artificial Sequence
  Description of Artificial Sequence: Synthetic oligonucleotide
  Antisense strand to SEQ ID NO: 41540
acuuuaaucaaacaccuuc

SEQ ID NO: 41542 - RNA, 19 nt, Artificial Sequence
  Description of Artificial Sequence: Synthetic oligonucleotide
  Sense strand starting at position 1200 of SEQ ID NO: 495
ugauuaaaguugccagaag

SEQ ID NO: 41543 - RNA, 19 nt, Artificial Sequence
  Description of Artificial Sequence: Synthetic oligonucleotide
  Antisense strand to SEQ ID NO: 41542
cuucuggcaacuuuaauca

SEQ ID NO: 41544 - RNA, 19 nt, Artificial Sequence
  Description of Artificial Sequence: Synthetic oligonucleotide
  Sense strand starting at position 1312 of SEQ ID NO: 495
agggcuagcagguauagaa

SEQ ID NO: 41545 - RNA, 19 nt, Artificial Sequence
  Description of Artificial Sequence: Synthetic oligonucleotide
  Antisense strand to SEQ ID NO: 41544
uucuauaccugcuagcccu

SEQ ID NO: 41546 - RNA, 19 nt, Artificial Sequence
  Description of Artificial Sequence: Synthetic oligonucleotide
  Sense strand starting at position 1398 of SEQ ID NO: 495
aauccucguuccuuggaaa

SEQ ID NO: 41547 - RNA, 19 nt, Artificial Sequence
  Description of Artificial Sequence: Synthetic oligonucleotide
  Antisense strand to SEQ ID NO: 41546
uuuccaaggaacgaggauu

SEQ ID NO: 41548 - RNA, 19 nt, Artificial Sequence
  Description of Artificial Sequence: Synthetic oligonucleotide
  Sense strand starting at position 1424 of SEQ ID NO: 495
ggauuauccuaccuuguuu

SEQ ID NO: 41549 - RNA, 19 nt, Artificial Sequence
  Description of Artificial Sequence: Synthetic oligonucleotide
  Antisense strand to SEQ ID NO: 41548
aaacaagguaggauaaucc

SEQ ID NO: 41550 - RNA, 19 nt, Artificial Sequence
  Description of Artificial Sequence: Synthetic oligonucleotide
  Sense strand starting at position 1611 of SEQ ID NO: 495
auugaaggauccguaaaca

SEQ ID NO: 41551 - RNA, 19 nt, Artificial Sequence
  Description of Artificial Sequence: Synthetic oligonucleotide
  Antisense strand to SEQ ID NO: 41550
uguuuacggauccuucaau

SEQ ID NO: 41552 - RNA, 19 nt, Artificial Sequence
  Description of Artificial Sequence: Synthetic oligonucleotide
  Sense strand starting at position 2173 of SEQ ID NO: 495
ggccguucguggacucaaa

SEQ ID NO: 41553 - RNA, 19 nt, Artificial Sequence
  Description of Artificial Sequence: Synthetic oligonucleotide
  Antisense strand to SEQ ID NO: 41552
uuugaguccacgaacggcc

SEQ ID NO: 41554 - RNA, 19 nt, Artificial Sequence
  Description of Artificial Sequence: Synthetic oligonucleotide
  Sense strand starting at position 2180 of SEQ ID NO: 495
cguggacucaaauggguau

SEQ ID NO: 41555 - RNA, 19 nt, Artificial Sequence
  Description of Artificial Sequence: Synthetic oligonucleotide
  Antisense strand to SEQ ID NO: 41554
auacccauuugaguccacg

SEQ ID NO: 41556 - RNA, 19 nt, Artificial Sequence
  Description of Artificial Sequence: Synthetic oligonucleotide
  Sense strand starting at position 2256 of SEQ ID NO: 495
cguguacuccuuguggagu

SEQ ID NO: 41557 - RNA, 19 nt, Artificial Sequence
  Description of Artificial Sequence: Synthetic oligonucleotide
  Antisense strand to SEQ ID NO: 41556
acuccacaaggaguacacg

SEQ ID NO: 41558 - RNA, 19 nt, Artificial Sequence
  Description of Artificial Sequence: Synthetic oligonucleotide
  Sense strand starting at position 2332 of SEQ ID NO: 495
ugaguaacaugguuggagu

SEQ ID NO: 41559 - RNA, 19 nt, Artificial Sequence
  Description of Artificial Sequence: Synthetic oligonucleotide
  Antisense strand to SEQ ID NO: 41558
acuccaaccauguuacuca

SEQ ID NO: 41560 - RNA, 19 nt, Artificial Sequence
  Description of Artificial Sequence: Synthetic oligonucleotide
  Sense strand starting at position 2434 of SEQ ID NO: 495
uuaagaucgugguuugaau

SEQ ID NO: 41561 - RNA, 19 nt, Artificial Sequence
  Description of Artificial Sequence: Synthetic oligonucleotide
  Antisense strand to SEQ ID NO: 41560
auucaaaccacgaucuuaa

SEQ ID NO: 41562 - RNA, 19 nt, Artificial Sequence
  Description of Artificial Sequence: Synthetic oligonucleotide
  Sense strand starting at position 2551 of SEQ ID NO: 495
agagcacaaguaugaguau

SEQ ID NO: 41563 - RNA, 19 nt, Artificial Sequence
  Description of Artificial Sequence: Synthetic oligonucleotide
  Antisense strand to SEQ ID NO: 41562
auacucauacuugugcucu

SEQ ID NO: 41564 - RNA, 19 nt, Artificial Sequence
  Description of Artificial Sequence: Synthetic oligonucleotide
  Sense strand starting at position 2613 of SEQ ID NO: 495
aaggacucugaucgcuaga

SEQ ID NO: 41565 - RNA, 19 nt, Artificial Sequence
  Description of Artificial Sequence: Synthetic oligonucleotide
  Antisense strand to SEQ ID NO: 41564
ucuagcgaucagaguccuu

SEQ ID NO: 41566 - RNA, 19 nt, Artificial Sequence
  Description of Artificial Sequence: Synthetic oligonucleotide
  Sense strand starting at position 2615 of SEQ ID NO: 495
ggacucugaucgcuagauc

SEQ ID NO: 41567 - RNA, 19 nt, Artificial Sequence
  Description of Artificial Sequence: Synthetic oligonucleotide
  Antisense strand to SEQ ID NO: 41566
gaucuagcgaucagagucc

SEQ ID NO: 41568 - RNA, 19 nt, Artificial Sequence
  Description of Artificial Sequence: Synthetic oligonucleotide
  Sense strand starting at position 2618 of SEQ ID NO: 495
cucugaucgcuagauccuu

SEQ ID NO: 41569 - RNA, 19 nt, Artificial Sequence
  Description of Artificial Sequence: Synthetic oligonucleotide
  Antisense strand to SEQ ID NO: 41568
aaggaucuagcgaucagag

SEQ ID NO: 41570 - RNA, 19 nt, Artificial Sequence
  Description of Artificial Sequence: Synthetic oligonucleotide
  Sense strand starting at position 2713 of SEQ ID NO: 495
ggauaaauucucugcugag

SEQ ID NO: 41571 - RNA, 19 nt, Artificial Sequence
  Description of Artificial Sequence: Synthetic oligonucleotide
  Antisense strand to SEQ ID NO: 41570
cucagcagagaauuuaucc

SEQ ID NO: 41572 - RNA, 19 nt, Artificial Sequence
  Description of Artificial Sequence: Synthetic oligonucleotide
  Sense strand starting at position 2714 of SEQ ID NO: 495
gauaaauucucugcugagu

SEQ ID NO: 41573 - RNA, 19 nt, Artificial Sequence
  Description of Artificial Sequence: Synthetic oligonucleotide
  Antisense strand to SEQ ID NO: 41572
acucagcagagaauuuauc

SEQ ID NO: 41574 - RNA, 19 nt, Artificial Sequence
  Description of Artificial Sequence: Synthetic oligonucleotide
  Sense strand starting at position 2750 of SEQ ID NO: 495
cggagaauaaguggcuuua

SEQ ID NO: 41575 - RNA, 19 nt, Artificial Sequence
  Description of Artificial Sequence: Synthetic oligonucleotide
  Antisense strand to SEQ ID NO: 41574
uaaagccacuuauucuccg

SEQ ID NO: 41576 - RNA, 19 nt, Artificial Sequence
  Description of Artificial Sequence: Synthetic oligonucleotide
  Sense strand starting at position 2752 of SEQ ID NO: 495
gagaauaaguggcuuuaug

SEQ ID NO: 41577 - RNA, 19 nt, Artificial Sequence
  Description of Artificial Sequence: Synthetic oligonucleotide
  Antisense strand to SEQ ID NO: 41576
cauaaagccacuuauucuc

SEQ ID NO: 41578 - RNA, 19 nt, Artificial Sequence
  Description of Artificial Sequence: Synthetic oligonucleotide
  Sense strand starting at position 2761 of SEQ ID NO: 495
uggcuuuaugccuacugaa

SEQ ID NO: 41579 - RNA, 19 nt, Artificial Sequence
  Description of Artificial Sequence: Synthetic oligonucleotide
  Antisense strand to SEQ ID NO: 41578
uucaguaggcauaaagcca

SEQ ID NO: 41580 - RNA, 19 nt, Artificial Sequence
  Description of Artificial Sequence: Synthetic oligonucleotide
  Sense strand starting at position 2792 of SEQ ID NO: 495
ucgcuaucugauuaaccua

SEQ ID NO: 41581 - RNA, 19 nt, Artificial Sequence
  Description of Artificial Sequence: Synthetic oligonucleotide
  Antisense strand to SEQ ID NO: 41580
uagguuaaucagauagcga

SEQ ID NO: 41582 - RNA, 19 nt, Artificial Sequence
  Description of Artificial Sequence: Synthetic oligonucleotide
  Sense strand starting at position 3263 of SEQ ID NO: 495
ucuuaaaggugcuugagaa

SEQ ID NO: 41583 - RNA, 19 nt, Artificial Sequence
  Description of Artificial Sequence: Synthetic oligonucleotide
  Antisense strand to SEQ ID NO: 41582
uucucaagcaccuuuaaga

SEQ ID NO: 41584 - RNA, 19 nt, Artificial Sequence
  Description of Artificial Sequence: Synthetic oligonucleotide
  Sense strand starting at position 3264 of SEQ ID NO: 495
cuuaaaggugcuugagaag

SEQ ID NO: 41585 - RNA, 19 nt, Artificial Sequence
  Description of Artificial Sequence: Synthetic oligonucleotide
  Antisense strand to SEQ ID NO: 41584
cuucucaagcaccuuuaag

SEQ ID NO: 41586 - RNA, 19 nt, Artificial Sequence
  Description of Artificial Sequence: Synthetic oligonucleotide
  Sense strand starting at position 3628 of SEQ ID NO: 495
aguaauuaucaaggcucca

SEQ ID NO: 41587 - RNA, 19 nt, Artificial Sequence
  Description of Artificial Sequence: Synthetic oligonucleotide
  Antisense strand to SEQ ID NO: 41586
uggagccuugauaauuacu

SEQ ID NO: 41588 - RNA, 19 nt, Artificial Sequence
  Description of Artificial Sequence: Synthetic oligonucleotide
  Sense strand starting at position 3938 of SEQ ID NO: 496
uucuuaauauguguacaga

SEQ ID NO: 41589 - RNA, 19 nt, Artificial Sequence
  Description of Artificial Sequence: Synthetic oligonucleotide
  Antisense strand to SEQ ID NO: 41588
ucuguacacauauuaagaa

SEQ ID NO: 41590 - RNA, 19 nt, Artificial Sequence
  Description of Artificial Sequence: Synthetic oligonucleotide
  Sense strand starting at position 3394 of SEQ ID NO: 496
cccugaguugcauaaauac

SEQ ID NO: 41591 - RNA, 19 nt, Artificial Sequence
  Description of Artificial Sequence: Synthetic oligonucleotide
  Antisense strand to SEQ ID NO: 41590
guauuuaugcaacucaggg

SEQ ID NO: 41592 - RNA, 19 nt, Artificial Sequence
  Description of Artificial Sequence: Synthetic oligonucleotide
  Sense strand starting at position 3388 of SEQ ID NO: 496
gacaaacccugaguugcau

SEQ ID NO: 41593 - RNA, 19 nt, Artificial Sequence
  Description of Artificial Sequence: Synthetic oligonucleotide
  Antisense strand to SEQ ID NO: 41592
augcaacucaggguuuguc

SEQ ID NO: 41594 - RNA, 19 nt, Artificial Sequence
  Description of Artificial Sequence: Synthetic oligonucleotide
  Sense strand starting at position 2938 of SEQ ID NO: 496
auauuucuguuguugcaaa

SEQ ID NO: 41595 - RNA, 19 nt, Artificial Sequence
  Description of Artificial Sequence: Synthetic oligonucleotide
  Antisense strand to SEQ ID NO: 41594
uuugcaacaacagaaauau

SEQ ID NO: 41596 - RNA, 19 nt, Artificial Sequence
  Description of Artificial Sequence: Synthetic oligonucleotide
  Sense strand starting at position 2914 of SEQ ID NO: 496
uuucuagcaccaggaaauu

SEQ ID NO: 41597 - RNA, 19 nt, Artificial Sequence
  Description of Artificial Sequence: Synthetic oligonucleotide
  Antisense strand to SEQ ID NO: 41596
aauuuccuggugcuagaaa

SEQ ID NO: 41598 - RNA, 19 nt, Artificial Sequence
  Description of Artificial Sequence: Synthetic oligonucleotide
  Sense strand starting at position 2774 of SEQ ID NO: 496
gcaacaucccugcaggaaa

SEQ ID NO: 41599 - RNA, 19 nt, Artificial Sequence
  Description of Artificial Sequence: Synthetic oligonucleotide
  Antisense strand to SEQ ID NO: 41598
uuuccugcagggauguugc

SEQ ID NO: 41600 - RNA, 19 nt, Artificial Sequence
  Description of Artificial Sequence: Synthetic oligonucleotide
  Sense strand starting at position 2701 of SEQ ID NO: 496
aagauaauguggcuuugaa

SEQ ID NO: 41601 - RNA, 19 nt, Artificial Sequence
  Description of Artificial Sequence: Synthetic oligonucleotide
  Antisense strand to SEQ ID NO: 41600
uucaaagccacauuaucuu

SEQ ID NO: 41602 - RNA, 19 nt, Artificial Sequence
  Description of Artificial Sequence: Synthetic oligonucleotide
  Sense strand starting at position 2628 of SEQ ID NO: 496
uuagucaaucuugagcuuu

SEQ ID NO: 41603 - RNA, 19 nt, Artificial Sequence
  Description of Artificial Sequence: Synthetic oligonucleotide
  Antisense strand to SEQ ID NO: 41602
aaagcucaagauugacuaa

SEQ ID NO: 41604 - RNA, 19 nt, Artificial Sequence
  Description of Artificial Sequence: Synthetic oligonucleotide
  Sense strand starting at position 2589 of SEQ ID NO: 496
ugaggacgucuaugcacaa

SEQ ID NO: 41605 - RNA, 19 nt, Artificial Sequence
  Description of Artificial Sequence: Synthetic oligonucleotide
  Antisense strand to SEQ ID NO: 41604
uugugcauagacguccuca

SEQ ID NO: 41606 - RNA, 19 nt, Artificial Sequence
  Description of Artificial Sequence: Synthetic oligonucleotide
  Sense strand starting at position 2564 of SEQ ID NO: 496
guaagacauaacgaagcua

SEQ ID NO: 41607 - RNA, 19 nt, Artificial Sequence
  Description of Artificial Sequence: Synthetic oligonucleotide
  Antisense strand to SEQ ID NO: 41606
uagcuucguuaugucuuac

SEQ ID NO: 41608 - RNA, 19 nt, Artificial Sequence
  Description of Artificial Sequence: Synthetic oligonucleotide
  Sense strand starting at position 2560 of SEQ ID NO: 496
guucguaagacauaacgaa

SEQ ID NO: 41609 - RNA, 19 nt, Artificial Sequence
  Description of Artificial Sequence: Synthetic oligonucleotide
  Antisense strand to SEQ ID NO: 41608
uucguuaugucuuacgaac

SEQ ID NO: 41610 - RNA, 19 nt, Artificial Sequence
  Description of Artificial Sequence: Synthetic oligonucleotide
  Sense strand starting at position 2515 of SEQ ID NO: 496
agugcuuacgaugacgaaa

SEQ ID NO: 41611 - RNA, 19 nt, Artificial Sequence
  Description of Artificial Sequence: Synthetic oligonucleotide
  Antisense strand to SEQ ID NO: 41610
uuucgucaucguaagcacu

SEQ ID NO: 41612 - RNA, 19 nt, Artificial Sequence
  Description of Artificial Sequence: Synthetic oligonucleotide
  Sense strand starting at position 2457 of SEQ ID NO: 496
cuuggauucucaucaguca

SEQ ID NO: 41613 - RNA, 19 nt, Artificial Sequence
  Description of Artificial Sequence: Synthetic oligonucleotide
  Antisense strand to SEQ ID NO: 41612
ugacugaugagaauccaag

SEQ ID NO: 41614 - RNA, 19 nt, Artificial Sequence
  Description of Artificial Sequence: Synthetic oligonucleotide
  Sense strand starting at position 2409 of SEQ ID NO: 496
cguggagggugguuaagaa

SEQ ID NO: 41615 - RNA, 19 nt, Artificial Sequence
  Description of Artificial Sequence: Synthetic oligonucleotide
  Antisense strand to SEQ ID NO: 41614
uucuuaaccacccuccacg

SEQ ID NO: 41616 - RNA, 19 nt, Artificial Sequence
  Description of Artificial Sequence: Synthetic oligonucleotide
  Sense strand starting at position 2347 of SEQ ID NO: 496
gguaguuaccucugaccac

SEQ ID NO: 41617 - RNA, 19 nt, Artificial Sequence
  Description of Artificial Sequence: Synthetic oligonucleotide
  Antisense strand to SEQ ID NO: 41616
guggucagagguaacuacc

SEQ ID NO: 41618 - RNA, 19 nt, Artificial Sequence
  Description of Artificial Sequence: Synthetic oligonucleotide
  Sense strand starting at position 2295 of SEQ ID NO: 496
guugaaaccggguaacugu

SEQ ID NO: 41619 - RNA, 19 nt, Artificial Sequence
  Description of Artificial Sequence: Synthetic oligonucleotide
  Antisense strand to SEQ ID NO: 41618
acaguuacccgguuucaac

SEQ ID NO: 41620 - RNA, 19 nt, Artificial Sequence
  Description of Artificial Sequence: Synthetic oligonucleotide
  Sense strand starting at position 2174 of SEQ ID NO: 496
ggcgaaauuccugaguacc

SEQ ID NO: 41621 - RNA, 19 nt, Artificial Sequence
  Description of Artificial Sequence: Synthetic oligonucleotide
  Antisense strand to SEQ ID NO: 41620
gguacucaggaauuucgcc

SEQ ID NO: 41622 - RNA, 19 nt, Artificial Sequence
  Description of Artificial Sequence: Synthetic oligonucleotide
  Sense strand starting at position 1519 of SEQ ID NO: 496
ucgguugccuuccuaauuu

SEQ ID NO: 41623 - RNA, 19 nt, Artificial Sequence
  Description of Artificial Sequence: Synthetic oligonucleotide
  Antisense strand to SEQ ID NO: 41622
aaauuaggaaggcaaccga

SEQ ID NO: 41624 - RNA, 19 nt, Artificial Sequence
  Description of Artificial Sequence: Synthetic oligonucleotide
  Sense strand starting at position 1493 of SEQ ID NO: 496
caagaauuacaguguagaa

SEQ ID NO: 41625 - RNA, 19 nt, Artificial Sequence
  Description of Artificial Sequence: Synthetic oligonucleotide
  Antisense strand to SEQ ID NO: 41624
uucuacacuguaauucuug

SEQ ID NO: 41626 - RNA, 19 nt, Artificial Sequence
  Description of Artificial Sequence: Synthetic oligonucleotide
  Sense strand starting at position 1481 of SEQ ID NO: 496
aaagcugugcugcaagaau

SEQ ID NO: 41627 - RNA, 19 nt, Artificial Sequence
  Description of Artificial Sequence: Synthetic oligonucleotide
  Antisense strand to SEQ ID NO: 41626
auucuugcagcacagcuuu

SEQ ID NO: 41628 - RNA, 19 nt, Artificial Sequence
  Description of Artificial Sequence: Synthetic oligonucleotide
  Sense strand starting at position 1248 of SEQ ID NO: 496
ucuuaauucuagucaaguu

SEQ ID NO: 41629 - RNA, 19 nt, Artificial Sequence
  Description of Artificial Sequence: Synthetic oligonucleotide
  Antisense strand to SEQ ID NO: 41628
aacuugacuagaauuaaga

SEQ ID NO: 41630 - RNA, 19 nt, Artificial Sequence
  Description of Artificial Sequence: Synthetic oligonucleotide
  Sense strand starting at position 1187 of SEQ ID NO: 496
cgagcacguauuuggcaua

SEQ ID NO: 41631 - RNA, 19 nt, Artificial Sequence
  Description of Artificial Sequence: Synthetic oligonucleotide
  Antisense strand to SEQ ID NO: 41630
uaugccaaauacgugcucg

SEQ ID NO: 41632 - RNA, 19 nt, Artificial Sequence
  Description of Artificial Sequence: Synthetic oligonucleotide
  Sense strand starting at position 1179 of SEQ ID NO: 496
gauauauacgagcacguau

SEQ ID NO: 41633 - RNA, 19 nt, Artificial Sequence
  Description of Artificial Sequence: Synthetic oligonucleotide
  Antisense strand to SEQ ID NO: 41632
auacgugcucguauauauc

SEQ ID NO: 41634 - RNA, 19 nt, Artificial Sequence
  Description of Artificial Sequence: Synthetic oligonucleotide
  Sense strand starting at position 1092 of SEQ ID NO: 496
ucagcuucuuuauugggaa

SEQ ID NO: 41635 - RNA, 19 nt, Artificial Sequence
  Description of Artificial Sequence: Synthetic oligonucleotide
  Antisense strand to SEQ ID NO: 41634
uucccaauaaagaagcuga

SEQ ID NO: 41636 - RNA, 19 nt, Artificial Sequence
  Description of Artificial Sequence: Synthetic oligonucleotide
  Sense strand starting at position 1024 of SEQ ID NO: 496
guuucuaaaguuugaauuc

SEQ ID NO: 41637 - RNA, 19 nt, Artificial Sequence
  Description of Artificial Sequence: Synthetic oligonucleotide
  Antisense strand to SEQ ID NO: 41636
gaauucaaacuuuagaaac

SEQ ID NO: 41638 - RNA, 19 nt, Artificial Sequence
  Description of Artificial Sequence: Synthetic oligonucleotide
  Sense strand starting at position 955 of SEQ ID NO: 496
uuacuagcauuauuagaga

SEQ ID NO: 41639 - RNA, 19 nt, Artificial Sequence
  Description of Artificial Sequence: Synthetic oligonucleotide
  Antisense strand to SEQ ID NO: 41638
ucucuaauaaugcuaguaa

SEQ ID NO: 41640 - RNA, 19 nt, Artificial Sequence
  Description of Artificial Sequence: Synthetic oligonucleotide
  Sense strand starting at position 953 of SEQ ID NO: 496
uguuacuagcauuauuaga

SEQ ID NO: 41641 - RNA, 19 nt, Artificial Sequence
  Description of Artificial Sequence: Synthetic oligonucleotide
  Antisense strand to SEQ ID NO: 41640
ucuaauaaugcuaguaaca

SEQ ID NO: 41642 - RNA, 19 nt, Artificial Sequence
  Description of Artificial Sequence: Synthetic oligonucleotide
  Sense strand starting at position 919 of SEQ ID NO: 496
agccacagugcuuaaauga

SEQ ID NO: 41643 - RNA, 19 nt, Artificial Sequence
  Description of Artificial Sequence: Synthetic oligonucleotide
  Antisense strand to SEQ ID NO: 41642
ucauuuaagcacuguggcu

SEQ ID NO: 41644 - RNA, 19 nt, Artificial Sequence
  Description of Artificial Sequence: Synthetic oligonucleotide
  Sense strand starting at position 901 of SEQ ID NO: 496
uuguguucuuaaucacuaa

SEQ ID NO: 41645 - RNA, 19 nt, Artificial Sequence
  Description of Artificial Sequence: Synthetic oligonucleotide
  Antisense strand to SEQ ID NO: 41644
uuagugauuaagaacacaa

SEQ ID NO: 41646 - RNA, 19 nt, Artificial Sequence
  Description of Artificial Sequence: Synthetic oligonucleotide
  Sense strand starting at position 574 of SEQ ID NO: 496
agccuuugacuauaagauu

SEQ ID NO: 41647 - RNA, 19 nt, Artificial Sequence
  Description of Artificial Sequence: Synthetic oligonucleotide
  Antisense strand to SEQ ID NO: 41646
aaucuuauagucaaaggcu

SEQ ID NO: 41648 - RNA, 19 nt, Artificial Sequence
  Description of Artificial Sequence: Synthetic oligonucleotide
  Sense strand starting at position 572 of SEQ ID NO: 496
cuagccuuugacuauaaga

SEQ ID NO: 41649 - RNA, 19 nt, Artificial Sequence
  Description of Artificial Sequence: Synthetic oligonucleotide
  Antisense strand to SEQ ID NO: 41648
ucuuauagucaaaggcuag

SEQ ID NO: 41650 - RNA, 19 nt, Artificial Sequence
  Description of Artificial Sequence: Synthetic oligonucleotide
  Sense strand starting at position 508 of SEQ ID NO: 496
uugauagguuaacuaacuu

SEQ ID NO: 41651 - RNA, 19 nt, Artificial Sequence
  Description of Artificial Sequence: Synthetic oligonucleotide
  Antisense strand to SEQ ID NO: 41650
aaguuaguuaaccuaucaa

SEQ ID NO: 41652 - RNA, 19 nt, Artificial Sequence
  Description of Artificial Sequence: Synthetic oligonucleotide
  Sense strand starting at position 453 of SEQ ID NO: 496
acuuaugugguagauacua

SEQ ID NO: 41653 - RNA, 19 nt, Artificial Sequence
  Description of Artificial Sequence: Synthetic oligonucleotide
  Antisense strand to SEQ ID NO: 41652
uaguaucuaccacauaagu

SEQ ID NO: 41654 - RNA, 19 nt, Artificial Sequence
  Description of Artificial Sequence: Synthetic oligonucleotide
  Sense strand starting at position 404 of SEQ ID NO: 496
accaucgaguaauuauuau

SEQ ID NO: 41655 - RNA, 19 nt, Artificial Sequence
  Description of Artificial Sequence: Synthetic oligonucleotide
  Antisense strand to SEQ ID NO: 41654
auaauaauuacucgauggu

SEQ ID NO: 41656 - RNA, 19 nt, Artificial Sequence
  Description of Artificial Sequence: Synthetic oligonucleotide
  Sense strand starting at position 401 of SEQ ID NO: 496
auuaccaucgaguaauuau

SEQ ID NO: 41657 - RNA, 19 nt, Artificial Sequence
  Description of Artificial Sequence: Synthetic oligonucleotide
  Antisense strand to SEQ ID NO: 41656
auaauuacucgaugguaau

SEQ ID NO: 41658 - RNA, 19 nt, Artificial Sequence
  Description of Artificial Sequence: Synthetic oligonucleotide
  Sense strand starting at position 397 of SEQ ID NO: 496
acaaauuaccaucgaguaa

SEQ ID NO: 41659 - RNA, 19 nt, Artificial Sequence
  Description of Artificial Sequence: Synthetic oligonucleotide
  Antisense strand to SEQ ID NO: 41658
uuacucgaugguaauuugu

SEQ ID NO: 41660 - RNA, 19 nt, Artificial Sequence
  Description of Artificial Sequence: Synthetic oligonucleotide
  Sense strand starting at position 255 of SEQ ID NO: 496
cuucguaggcuuuacagau

SEQ ID NO: 41661 - RNA, 19 nt, Artificial Sequence
  Description of Artificial Sequence: Synthetic oligonucleotide
  Antisense strand to SEQ ID NO: 41660
aucuguaaagccuacgaag

SEQ ID NO: 41662 - RNA, 19 nt, Artificial Sequence
  Description of Artificial Sequence: Synthetic oligonucleotide
  Sense strand starting at position 39 of SEQ ID NO: 496
gccuuagaacuguaucuca

SEQ ID NO: 41663 - RNA, 19 nt, Artificial Sequence
  Description of Artificial Sequence: Synthetic oligonucleotide
  Antisense strand to SEQ ID NO: 41662
ugagauacaguucuaaggc

SEQ ID NO: 41664 - RNA, 19 nt, Artificial Sequence
  Description of Artificial Sequence: Synthetic oligonucleotide
  Sense strand starting at position 26 of SEQ ID NO: 496
aguuguagaaauggccuua

SEQ ID NO: 41665 - RNA, 19 nt, Artificial Sequence
  Description of Artificial Sequence: Synthetic oligonucleotide
  Antisense strand to SEQ ID NO: 41664
uaaggccauuucuacaacu

SEQ ID NO: 41666 - RNA, 19 nt, Artificial Sequence
  Description of Artificial Sequence: Synthetic oligonucleotide
  Sense strand starting at position 6 of SEQ ID NO: 496
aguaaagaguauucuaaac

SEQ ID NO: 41667 - RNA, 19 nt, Artificial Sequence
  Description of Artificial Sequence: Synthetic oligonucleotide
  Antisense strand to SEQ ID NO: 41666
guuuagaauacucuuuacu

SEQ ID NO: 41668 - RNA, 19 nt, Artificial Sequence
  Description of Artificial Sequence: Synthetic oligonucleotide
  Sense strand starting at position 400 of SEQ ID NO: 497
ggccacagauucuuauaug

SEQ ID NO: 41669 - RNA, 19 nt, Artificial Sequence
  Description of Artificial Sequence: Synthetic oligonucleotide
  Antisense strand to SEQ ID NO: 41668
cauauaagaaucuguggcc

SEQ ID NO: 41670 - RNA, 19 nt, Artificial Sequence
  Description of Artificial Sequence: Synthetic oligonucleotide
  Sense strand starting at position 401 of SEQ ID NO: 497
gccacagauucuuauaugu

SEQ ID NO: 41671 - RNA, 19 nt, Artificial Sequence
  Description of Artificial Sequence: Synthetic oligonucleotide
  Antisense strand to SEQ ID NO: 41670
acauauaagaaucuguggc

SEQ ID NO: 41672 - RNA, 19 nt, Artificial Sequence
  Description of Artificial Sequence: Synthetic oligonucleotide
  Sense strand starting at position 477 of SEQ ID NO: 497
uuguuuguuuacucacuua

SEQ ID NO: 41673 - RNA, 19 nt, Artificial Sequence
  Description of Artificial Sequence: Synthetic oligonucleotide
  Antisense strand to SEQ ID NO: 41672
uaagugaguaaacaaacaa

SEQ ID NO: 41674 - RNA, 19 nt, Artificial Sequence
  Description of Artificial Sequence: Synthetic oligonucleotide
  Sense strand starting at position 488 of SEQ ID NO: 497
cucacuuauugucugacuu

SEQ ID NO: 41675 - RNA, 19 nt, Artificial Sequence
  Description of Artificial Sequence: Synthetic oligonucleotide
  Antisense strand to SEQ ID NO: 41674
aagucagacaauaagugag

SEQ ID NO: 41676 - RNA, 19 nt, Artificial Sequence
  Description of Artificial Sequence: Synthetic oligonucleotide
  Sense strand starting at position 489 of SEQ ID NO: 497
ucacuuauugucugacuuu

SEQ ID NO: 41677 - RNA, 19 nt, Artificial Sequence
  Description of Artificial Sequence: Synthetic oligonucleotide
  Antisense strand to SEQ ID NO: 41676
aaagucagacaauaaguga

SEQ ID NO: 41678 - RNA, 19 nt, Artificial Sequence
  Description of Artificial Sequence: Synthetic oligonucleotide
  Sense strand starting at position 600 of SEQ ID NO: 497
aguaaaugcucacuacuga

SEQ ID NO: 41679 - RNA, 19 nt, Artificial Sequence
  Description of Artificial Sequence: Synthetic oligonucleotide
  Antisense strand to SEQ ID NO: 41678
ucaguagugagcauuuacu

SEQ ID NO: 41680 - RNA, 19 nt, Artificial Sequence
  Description of Artificial Sequence: Synthetic oligonucleotide
  Sense strand starting at position 601 of SEQ ID NO: 497
guaaaugcucacuacugaa

SEQ ID NO: 41681 - RNA, 19 nt, Artificial Sequence
  Description of Artificial Sequence: Synthetic oligonucleotide
  Antisense strand to SEQ ID NO: 41680
uucaguagugagcauuuac

SEQ ID NO: 41682 - RNA, 19 nt, Artificial Sequence
  Description of Artificial Sequence: Synthetic oligonucleotide
  Sense strand starting at position 679 of SEQ ID NO: 497
cccagcaaaccgugaauga

SEQ ID NO: 41683 - RNA, 19 nt, Artificial Sequence
  Description of Artificial Sequence: Synthetic oligonucleotide
  Antisense strand to SEQ ID NO: 41682
ucauucacgguuugcuggg

SEQ ID NO: 41684 - RNA, 19 nt, Artificial Sequence
  Description of Artificial Sequence: Synthetic oligonucleotide
  Sense strand starting at position 694 of SEQ ID NO: 497
augacacauuggcauuuaa

SEQ ID NO: 41685 - RNA, 19 nt, Artificial Sequence
  Description of Artificial Sequence: Synthetic oligonucleotide
  Antisense strand to SEQ ID NO: 41684
uuaaaugccaaugugucau

SEQ ID NO: 41686 - RNA, 19 nt, Artificial Sequence
  Description of Artificial Sequence: Synthetic oligonucleotide
  Sense strand starting at position 747 of SEQ ID NO: 497
cuuuaaaucugaggaagcu

SEQ ID NO: 41687 - RNA, 19 nt, Artificial Sequence
  Description of Artificial Sequence: Synthetic oligonucleotide
  Antisense strand to SEQ ID NO: 41686
agcuuccucagauuuaaag

SEQ ID NO: 41688 - RNA, 19 nt, Artificial Sequence
  Description of Artificial Sequence: Synthetic oligonucleotide
  Sense strand starting at position 950 of SEQ ID NO: 497
ccagcaguuggccagacau

SEQ ID NO: 41689 - RNA, 19 nt, Artificial Sequence
  Description of Artificial Sequence: Synthetic oligonucleotide
  Antisense strand to SEQ ID NO: 41688
augucuggccaacugcugg

SEQ ID NO: 41690 - RNA, 19 nt, Artificial Sequence
  Description of Artificial Sequence: Synthetic oligonucleotide
  Sense strand starting at position 952 of SEQ ID NO: 497
agcaguuggccagacaugu

SEQ ID NO: 41691 - RNA, 19 nt, Artificial Sequence
  Description of Artificial Sequence: Synthetic oligonucleotide
  Antisense strand to SEQ ID NO: 41690
acaugucuggccaacugcu

SEQ ID NO: 41692 - RNA, 19 nt, Artificial Sequence
  Description of Artificial Sequence: Synthetic oligonucleotide
  Sense strand starting at position 973 of SEQ ID NO: 497
cucucaguucugugaguga

SEQ ID NO: 41693 - RNA, 19 nt, Artificial Sequence
  Description of Artificial Sequence: Synthetic oligonucleotide
  Antisense strand to SEQ ID NO: 41692
ucacucacagaacugagag

SEQ ID NO: 41694 - RNA, 19 nt, Artificial Sequence
  Description of Artificial Sequence: Synthetic oligonucleotide
  Sense strand starting at position 1024 of SEQ ID NO: 497
cugagauccucagacagga

SEQ ID NO: 41695 - RNA, 19 nt, Artificial Sequence
  Description of Artificial Sequence: Synthetic oligonucleotide
  Antisense strand to SEQ ID NO: 41694
uccugucugaggaucucag

SEQ ID NO: 41696 - RNA, 19 nt, Artificial Sequence
  Description of Artificial Sequence: Synthetic oligonucleotide
  Sense strand starting at position 1135 of SEQ ID NO: 497
aggcacugcucagacaagu

SEQ ID NO: 41697 - RNA, 19 nt, Artificial Sequence
  Description of Artificial Sequence: Synthetic oligonucleotide
  Antisense strand to SEQ ID NO: 41696
acuugucugagcagugccu

SEQ ID NO: 41698 - RNA, 19 nt, Artificial Sequence
  Description of Artificial Sequence: Synthetic oligonucleotide
  Sense strand starting at position 1211 of SEQ ID NO: 497
cugagugucucgguuacca

SEQ ID NO: 41699 - RNA, 19 nt, Artificial Sequence
  Description of Artificial Sequence: Synthetic oligonucleotide
  Antisense strand to SEQ ID NO: 41698
ugguaaccgagacacucag

SEQ ID NO: 41700 - RNA, 19 nt, Artificial Sequence
  Description of Artificial Sequence: Synthetic oligonucleotide
  Sense strand starting at position 1334 of SEQ ID NO: 497
ccgccauccaggugagaua

SEQ ID NO: 41701 - RNA, 19 nt, Artificial Sequence
  Description of Artificial Sequence: Synthetic oligonucleotide
  Antisense strand to SEQ ID NO: 41700
uaucucaccuggauggcgg

SEQ ID NO: 41702 - RNA, 19 nt, Artificial Sequence
  Description of Artificial Sequence: Synthetic oligonucleotide
  Sense strand starting at position 1335 of SEQ ID NO: 497
cgccauccaggugagauau

SEQ ID NO: 41703 - RNA, 19 nt, Artificial Sequence
  Description of Artificial Sequence: Synthetic oligonucleotide
  Antisense strand to SEQ ID NO: 41702
auaucucaccuggauggcg

SEQ ID NO: 41704 - RNA, 19 nt, Artificial Sequence
  Description of Artificial Sequence: Synthetic oligonucleotide
  Sense strand starting at position 1476 of SEQ ID NO: 497
gaguaagagucucagagug

SEQ ID NO: 41705 - RNA, 19 nt, Artificial Sequence
  Description of Artificial Sequence: Synthetic oligonucleotide
  Antisense strand to SEQ ID NO: 41704
cacucugagacucuuacuc

SEQ ID NO: 41706 - RNA, 19 nt, Artificial Sequence
  Description of Artificial Sequence: Synthetic oligonucleotide
  Sense strand starting at position 2171 of SEQ ID NO: 497
ccgcgaauugguuaacuca

SEQ ID NO: 41707 - RNA, 19 nt, Artificial Sequence
  Description of Artificial Sequence: Synthetic oligonucleotide
  Antisense strand to SEQ ID NO: 41706
ugaguuaaccaauucgcgg

SEQ ID NO: 41708 - RNA, 19 nt, Artificial Sequence
  Description of Artificial Sequence: Synthetic oligonucleotide
  Sense strand starting at position 2231 of SEQ ID NO: 497
gcgcaugugaacgcucauu

SEQ ID NO: 41709 - RNA, 19 nt, Artificial Sequence
  Description of Artificial Sequence: Synthetic oligonucleotide
  Antisense strand to SEQ ID NO: 41708
aaugagcguucacaugcgc

SEQ ID NO: 41710 - RNA, 19 nt, Artificial Sequence
  Description of Artificial Sequence: Synthetic oligonucleotide
  Sense strand starting at position 2529 of SEQ ID NO: 497
cacaccggucuguguuuaa

SEQ ID NO: 41711 - RNA, 19 nt, Artificial Sequence
  Description of Artificial Sequence: Synthetic oligonucleotide
  Antisense strand to SEQ ID NO: 41710
uuaaacacagaccggugug

SEQ ID NO: 41712 - RNA, 19 nt, Artificial Sequence
  Description of Artificial Sequence: Synthetic oligonucleotide
  Sense strand starting at position 2568 of SEQ ID NO: 497
ggcagaauccuuggugagg

SEQ ID NO: 41713 - RNA, 19 nt, Artificial Sequence
  Description of Artificial Sequence: Synthetic oligonucleotide
  Antisense strand to SEQ ID NO: 41712
ccucaccaaggauucugcc

SEQ ID NO: 41714 - RNA, 19 nt, Artificial Sequence
  Description of Artificial Sequence: Synthetic oligonucleotide
  Sense strand starting at position 2612 of SEQ ID NO: 497
uucugaaauggacgagguu

SEQ ID NO: 41715 - RNA, 19 nt, Artificial Sequence
  Description of Artificial Sequence: Synthetic oligonucleotide
  Antisense strand to SEQ ID NO: 41714
aaccucguccauuucagaa

SEQ ID NO: 41716 - RNA, 19 nt, Artificial Sequence
  Description of Artificial Sequence: Synthetic oligonucleotide
  Sense strand starting at position 2621 of SEQ ID NO: 497
ggacgagguugcagaacau

SEQ ID NO: 41717 - RNA, 19 nt, Artificial Sequence
  Description of Artificial Sequence: Synthetic oligonucleotide
  Antisense strand to SEQ ID NO: 41716
auguucugcaaccucgucc

SEQ ID NO: 41718 - RNA, 19 nt, Artificial Sequence
  Description of Artificial Sequence: Synthetic oligonucleotide
  Sense strand starting at position 2637 of SEQ ID NO: 497
cauuuagaggcguggucuu

SEQ ID NO: 41719 - RNA, 19 nt, Artificial Sequence
  Description of Artificial Sequence: Synthetic oligonucleotide
  Antisense strand to SEQ ID NO: 41718
aagaccacgccucuaaaug

SEQ ID NO: 41720 - RNA, 19 nt, Artificial Sequence
  Description of Artificial Sequence: Synthetic oligonucleotide
  Sense strand starting at position 2677 of SEQ ID NO: 497
cguugcuaccucugagcuu

SEQ ID NO: 41721 - RNA, 19 nt, Artificial Sequence
  Description of Artificial Sequence: Synthetic oligonucleotide
  Antisense strand to SEQ ID NO: 41720
aagcucagagguagcaacg

SEQ ID NO: 41722 - RNA, 19 nt, Artificial Sequence
  Description of Artificial Sequence: Synthetic oligonucleotide
  Sense strand starting at position 2697 of SEQ ID NO: 497
gggccuaaccugggauuaa

SEQ ID NO: 41723 - RNA, 19 nt, Artificial Sequence
  Description of Artificial Sequence: Synthetic oligonucleotide
  Antisense strand to SEQ ID NO: 41722
uuaaucccagguuaggccc

SEQ ID NO: 41724 - RNA, 19 nt, Artificial Sequence
  Description of Artificial Sequence: Synthetic oligonucleotide
  Sense strand starting at position 2698 of SEQ ID NO: 497
ggccuaaccugggauuaac

SEQ ID NO: 41725 - RNA, 19 nt, Artificial Sequence
  Description of Artificial Sequence: Synthetic oligonucleotide
  Antisense strand to SEQ ID NO: 41724
guuaaucccagguuaggcc

SEQ ID NO: 41726 - RNA, 19 nt, Artificial Sequence
  Description of Artificial Sequence: Synthetic oligonucleotide
  Sense strand starting at position 2753 of SEQ ID NO: 497
ccauuaaacucagaagguc

SEQ ID NO: 41727 - RNA, 19 nt, Artificial Sequence
  Description of Artificial Sequence: Synthetic oligonucleotide
  Antisense strand to SEQ ID NO: 41726
gaccuucugaguuuaaugg

SEQ ID NO: 41728 - RNA, 19 nt, Artificial Sequence
  Description of Artificial Sequence: Synthetic oligonucleotide
  Sense strand starting at position 2770 of SEQ ID NO: 497
ucguguguacugguaguga

SEQ ID NO: 41729 - RNA, 19 nt, Artificial Sequence
  Description of Artificial Sequence: Synthetic oligonucleotide
  Antisense strand to SEQ ID NO: 41728
ucacuaccaguacacacga

SEQ ID NO: 41730 - RNA, 19 nt, Artificial Sequence
  Description of Artificial Sequence: Synthetic oligonucleotide
  Sense strand starting at position 2772 of SEQ ID NO: 497
guguguacugguagugagu

SEQ ID NO: 41731 - RNA, 19 nt, Artificial Sequence
  Description of Artificial Sequence: Synthetic oligonucleotide
  Antisense strand to SEQ ID NO: 41730
acucacuaccaguacacac

SEQ ID NO: 41732 - RNA, 19 nt, Artificial Sequence
  Description of Artificial Sequence: Synthetic oligonucleotide
  Sense strand starting at position 2833 of SEQ ID NO: 497
cagaaagucuggcuguauu

SEQ ID NO: 41733 - RNA, 19 nt, Artificial Sequence
  Description of Artificial Sequence: Synthetic oligonucleotide
  Antisense strand to SEQ ID NO: 41732
aauacagccagacuuucug

SEQ ID NO: 41734 - RNA, 19 nt, Artificial Sequence
  Description of Artificial Sequence: Synthetic oligonucleotide
  Sense strand starting at position 2843 of SEQ ID NO: 497
ggcuguauuuggagagggu

SEQ ID NO: 41735 - RNA, 19 nt, Artificial Sequence
  Description of Artificial Sequence: Synthetic oligonucleotide
  Antisense strand to SEQ ID NO: 41734
acccucuccaaauacagcc

SEQ ID NO: 41736 - RNA, 19 nt, Artificial Sequence
  Description of Artificial Sequence: Synthetic oligonucleotide
  Sense strand starting at position 2928 of SEQ ID NO: 497
ggaccuguaucuuuaagug

SEQ ID NO: 41737 - RNA, 19 nt, Artificial Sequence
  Description of Artificial Sequence: Synthetic oligonucleotide
  Antisense strand to SEQ ID NO: 41736
cacuuaaagauacaggucc

SEQ ID NO: 41738 - RNA, 19 nt, Artificial Sequence
  Description of Artificial Sequence: Synthetic oligonucleotide
  Sense strand starting at position 2938 of SEQ ID NO: 497
cuuuaaguguggucucauu

SEQ ID NO: 41739 - RNA, 19 nt, Artificial Sequence
  Description of Artificial Sequence: Synthetic oligonucleotide
  Antisense strand to SEQ ID NO: 41738
aaugagaccacacuuaaag

SEQ ID NO: 41740 - RNA, 19 nt, Artificial Sequence
  Description of Artificial Sequence: Synthetic oligonucleotide
  Sense strand starting at position 2974 of SEQ ID NO: 497
ucaguuacacagugugaca

SEQ ID NO: 41741 - RNA, 19 nt, Artificial Sequence
  Description of Artificial Sequence: Synthetic oligonucleotide
  Antisense strand to SEQ ID NO: 41740
ugucacacuguguaacuga

SEQ ID NO: 41742 - RNA, 19 nt, Artificial Sequence
  Description of Artificial Sequence: Synthetic oligonucleotide
  Sense strand starting at position 3811 of SEQ ID NO: 497
guggguuucuccuacagug

SEQ ID NO: 41743 - RNA, 19 nt, Artificial Sequence
  Description of Artificial Sequence: Synthetic oligonucleotide
  Antisense strand to SEQ ID NO: 41742
cacuguaggagaaacccac

SEQ ID NO: 41744 - RNA, 19 nt, Artificial Sequence
  Description of Artificial Sequence: Synthetic oligonucleotide
  Sense strand starting at position 3933 of SEQ ID NO: 497
ccauguuguuuccaauucu

SEQ ID NO: 41745 - RNA, 19 nt, Artificial Sequence
  Description of Artificial Sequence: Synthetic oligonucleotide
  Antisense strand to SEQ ID NO: 41744
agaauuggaaacaacaugg

SEQ ID NO: 41746 - RNA, 19 nt, Artificial Sequence
  Description of Artificial Sequence: Synthetic oligonucleotide
  Sense strand starting at position 3949 of SEQ ID NO: 497
ucuaaaugguguccuuaau

SEQ ID NO: 41747 - RNA, 19 nt, Artificial Sequence
  Description of Artificial Sequence: Synthetic oligonucleotide
  Antisense strand to SEQ ID NO: 41746
auuaaggacaccauuuaga

SEQ ID NO: 41748 - RNA, 19 nt, Artificial Sequence
  Description of Artificial Sequence: Synthetic oligonucleotide
  Sense strand starting at position 3862 of SEQ ID NO: 499
uugccucacgcagaagaau

SEQ ID NO: 41749 - RNA, 19 nt, Artificial Sequence
  Description of Artificial Sequence: Synthetic oligonucleotide
  Antisense strand to SEQ ID NO: 41748
auucuucugcgugaggcaa

SEQ ID NO: 41750 - RNA, 19 nt, Artificial Sequence
  Description of Artificial Sequence: Synthetic oligonucleotide
  Sense strand starting at position 3840 of SEQ ID NO: 499
ccucaugcacaaggauauu

SEQ ID NO: 41751 - RNA, 19 nt, Artificial Sequence
  Description of Artificial Sequence: Synthetic oligonucleotide
  Antisense strand to SEQ ID NO: 41750
aauauccuugugcaugagg

SEQ ID NO: 41752 - RNA, 19 nt, Artificial Sequence
  Description of Artificial Sequence: Synthetic oligonucleotide
  Sense strand starting at position 3806 of SEQ ID NO: 499
uguuuaacuccagguuacu

SEQ ID NO: 41753 - RNA, 19 nt, Artificial Sequence
  Description of Artificial Sequence: Synthetic oligonucleotide
  Antisense strand to SEQ ID NO: 41752
aguaaccuggaguuaaaca

SEQ ID NO: 41754 - RNA, 19 nt, Artificial Sequence
  Description of Artificial Sequence: Synthetic oligonucleotide
  Sense strand starting at position 3804 of SEQ ID NO: 499
acuguuuaacuccagguua

SEQ ID NO: 41755 - RNA, 19 nt, Artificial Sequence
  Description of Artificial Sequence: Synthetic oligonucleotide
  Antisense strand to SEQ ID NO: 41754
uaaccuggaguuaaacagu

SEQ ID NO: 41756 - RNA, 19 nt, Artificial Sequence
  Description of Artificial Sequence: Synthetic oligonucleotide
  Sense strand starting at position 3793 of SEQ ID NO: 499
aggugaagauuacuguuua

SEQ ID NO: 41757 - RNA, 19 nt, Artificial Sequence
  Description of Artificial Sequence: Synthetic oligonucleotide
  Antisense strand to SEQ ID NO: 41756
uaaacaguaaucuucaccu

SEQ ID NO: 41758 - RNA, 19 nt, Artificial Sequence
  Description of Artificial Sequence: Synthetic oligonucleotide
  Sense strand starting at position 3710 of SEQ ID NO: 499
ccaugucaaugcucaaaga

SEQ ID NO: 41759 - RNA, 19 nt, Artificial Sequence
  Description of Artificial Sequence: Synthetic oligonucleotide
  Antisense strand to SEQ ID NO: 41758
ucuuugagcauugacaugg

SEQ ID NO: 41760 - RNA, 19 nt, Artificial Sequence
  Description of Artificial Sequence: Synthetic oligonucleotide
  Sense strand starting at position 3650 of SEQ ID NO: 499
ccuguuaagcuguggaaau

SEQ ID NO: 41761 - RNA, 19 nt, Artificial Sequence
  Description of Artificial Sequence: Synthetic oligonucleotide
  Antisense strand to SEQ ID NO: 41760
auuuccacagcuuaacagg

SEQ ID NO: 41762 - RNA, 19 nt, Artificial Sequence
  Description of Artificial Sequence: Synthetic oligonucleotide
  Sense strand starting at position 3604 of SEQ ID NO: 499
ggaucuuugggccaauuau

SEQ ID NO: 41763 - RNA, 19 nt, Artificial Sequence
  Description of Artificial Sequence: Synthetic oligonucleotide
  Antisense strand to SEQ ID NO: 41762
auaauuggcccaaagaucc

SEQ ID NO: 41764 - RNA, 19 nt, Artificial Sequence
  Description of Artificial Sequence: Synthetic oligonucleotide
  Sense strand starting at position 3602 of SEQ ID NO: 499
guggaucuuugggccaauu

SEQ ID NO: 41765 - RNA, 19 nt, Artificial Sequence
  Description of Artificial Sequence: Synthetic oligonucleotide
  Antisense strand to SEQ ID NO: 41764
aauuggcccaaagauccac

SEQ ID NO: 41766 - RNA, 19 nt, Artificial Sequence
  Description of Artificial Sequence: Synthetic oligonucleotide
  Sense strand starting at position 3455 of SEQ ID NO: 499
cugggacccuguuccauau

SEQ ID NO: 41767 - RNA, 19 nt, Artificial Sequence
  Description of Artificial Sequence: Synthetic oligonucleotide
  Antisense strand to SEQ ID NO: 41766
auauggaacagggucccag

SEQ ID NO: 41768 - RNA, 19 nt, Artificial Sequence
  Description of Artificial Sequence: Synthetic oligonucleotide
  Sense strand starting at position 3165 of SEQ ID NO: 499
cacucuuugccuggagaga

SEQ ID NO: 41769 - RNA, 19 nt, Artificial Sequence
  Description of Artificial Sequence: Synthetic oligonucleotide
  Antisense strand to SEQ ID NO: 41768
ucucuccaggcaaagagug

SEQ ID NO: 41770 - RNA, 19 nt, Artificial Sequence
  Description of Artificial Sequence: Synthetic oligonucleotide
  Sense strand starting at position 3163 of SEQ ID NO: 499
agcacucuuugccuggaga

SEQ ID NO: 41771 - RNA, 19 nt, Artificial Sequence
  Description of Artificial Sequence: Synthetic oligonucleotide
  Antisense strand to SEQ ID NO: 41770
ucuccaggcaaagagugcu

SEQ ID NO: 41772 - RNA, 19 nt, Artificial Sequence
  Description of Artificial Sequence: Synthetic oligonucleotide
  Sense strand starting at position 3113 of SEQ ID NO: 499
guccaucuacauugauuga

SEQ ID NO: 41773 - RNA, 19 nt, Artificial Sequence
  Description of Artificial Sequence: Synthetic oligonucleotide
  Antisense strand to SEQ ID NO: 41772
ucaaucaauguagauggac

SEQ ID NO: 41774 - RNA, 19 nt, Artificial Sequence
  Description of Artificial Sequence: Synthetic oligonucleotide
  Sense strand starting at position 2952 of SEQ ID NO: 499
ucacaugugcaggaaucau

SEQ ID NO: 41775 - RNA, 19 nt, Artificial Sequence
  Description of Artificial Sequence: Synthetic oligonucleotide
  Antisense strand to SEQ ID NO: 41774
augauuccugcacauguga

SEQ ID NO: 41776 - RNA, 19 nt, Artificial Sequence
  Description of Artificial Sequence: Synthetic oligonucleotide
  Sense strand starting at position 2915 of SEQ ID NO: 499
guuauugauggcugacuaa

SEQ ID NO: 41777 - RNA, 19 nt, Artificial Sequence
  Description of Artificial Sequence: Synthetic oligonucleotide
  Antisense strand to SEQ ID NO: 41776
uuagucagccaucaauaac

SEQ ID NO: 41778 - RNA, 19 nt, Artificial Sequence
  Description of Artificial Sequence: Synthetic oligonucleotide
  Sense strand starting at position 2914 of SEQ ID NO: 499
aguuauugauggcugacua

SEQ ID NO: 41779 - RNA, 19 nt, Artificial Sequence
  Description of Artificial Sequence: Synthetic oligonucleotide
  Antisense strand to SEQ ID NO: 41778
uagucagccaucaauaacu

SEQ ID NO: 41780 - RNA, 19 nt, Artificial Sequence
  Description of Artificial Sequence: Synthetic oligonucleotide
  Sense strand starting at position 2900 of SEQ ID NO: 499
ggaacugucuuaucaguua

SEQ ID NO: 41781 - RNA, 19 nt, Artificial Sequence
  Description of Artificial Sequence: Synthetic oligonucleotide
  Antisense strand to SEQ ID NO: 41780
uaacugauaagacaguucc

SEQ ID NO: 41782 - RNA, 19 nt, Artificial Sequence
  Description of Artificial Sequence: Synthetic oligonucleotide
  Sense strand starting at position 2751 of SEQ ID NO: 499
gugauuguaccauaaaugc

SEQ ID NO: 41783 - RNA, 19 nt, Artificial Sequence
  Description of Artificial Sequence: Synthetic oligonucleotide
  Antisense strand to SEQ ID NO: 41782
gcauuuaugguacaaucac

SEQ ID NO: 41784 - RNA, 19 nt, Artificial Sequence
  Description of Artificial Sequence: Synthetic oligonucleotide
  Sense strand starting at position 2744 of SEQ ID NO: 499
guacuaagugauuguacca

SEQ ID NO: 41785 - RNA, 19 nt, Artificial Sequence
  Description of Artificial Sequence: Synthetic oligonucleotide
  Antisense strand to SEQ ID NO: 41784
ugguacaaucacuuaguac

SEQ ID NO: 41786 - RNA, 19 nt, Artificial Sequence
  Description of Artificial Sequence: Synthetic oligonucleotide
  Sense strand starting at position 2741 of SEQ ID NO: 499
ucaguacuaagugauugua

SEQ ID NO: 41787 - RNA, 19 nt, Artificial Sequence
  Description of Artificial Sequence: Synthetic oligonucleotide
  Antisense strand to SEQ ID NO: 41786
uacaaucacuuaguacuga

SEQ ID NO: 41788 - RNA, 19 nt, Artificial Sequence
  Description of Artificial Sequence: Synthetic oligonucleotide
  Sense strand starting at position 2740 of SEQ ID NO: 499
aucaguacuaagugauugu

SEQ ID NO: 41789 - RNA, 19 nt, Artificial Sequence
  Description of Artificial Sequence: Synthetic oligonucleotide
  Antisense strand to SEQ ID NO: 41788
acaaucacuuaguacugau

SEQ ID NO: 41790 - RNA, 19 nt, Artificial Sequence
  Description of Artificial Sequence: Synthetic oligonucleotide
  Sense strand starting at position 2687 of SEQ ID NO: 499
ugcugacuugcucaagaga

SEQ ID NO: 41791 - RNA, 19 nt, Artificial Sequence
  Description of Artificial Sequence: Synthetic oligonucleotide
  Antisense strand to SEQ ID NO: 41790
ucucuugagcaagucagca

SEQ ID NO: 41792 - RNA, 19 nt, Artificial Sequence
  Description of Artificial Sequence: Synthetic oligonucleotide
  Sense strand starting at position 2658 of SEQ ID NO: 499
augcucuugccagacgaaa

SEQ ID NO: 41793 - RNA, 19 nt, Artificial Sequence
  Description of Artificial Sequence: Synthetic oligonucleotide
  Antisense strand to SEQ ID NO: 41792
uuucgucuggcaagagcau

SEQ ID NO: 41794 - RNA, 19 nt, Artificial Sequence
  Description of Artificial Sequence: Synthetic oligonucleotide
  Sense strand starting at position 2641 of SEQ ID NO: 499
agcucauucggagacgaau

SEQ ID NO: 41795 - RNA, 19 nt, Artificial Sequence
  Description of Artificial Sequence: Synthetic oligonucleotide
  Antisense strand to SEQ ID NO: 41794
auucgucuccgaaugagcu

SEQ ID NO: 41796 - RNA, 19 nt, Artificial Sequence
  Description of Artificial Sequence: Synthetic oligonucleotide
  Sense strand starting at position 2122 of SEQ ID NO: 499
ccaggaauguuaucucuau

SEQ ID NO: 41797 - RNA, 19 nt, Artificial Sequence
  Description of Artificial Sequence: Synthetic oligonucleotide
  Antisense strand to SEQ ID NO: 41796
auagagauaacauuccugg

SEQ ID NO: 41798 - RNA, 19 nt, Artificial Sequence
  Description of Artificial Sequence: Synthetic oligonucleotide
  Sense strand starting at position 1478 of SEQ ID NO: 499
cuaguuccaccauauagua

SEQ ID NO: 41799 - RNA, 19 nt, Artificial Sequence
  Description of Artificial Sequence: Synthetic oligonucleotide
  Antisense strand to SEQ ID NO: 41798
uacuauaugguggaacuag

SEQ ID NO: 41800 - RNA, 19 nt, Artificial Sequence
  Description of Artificial Sequence: Synthetic oligonucleotide
  Sense strand starting at position 1240 of SEQ ID NO: 499
gggucugagucuucugaag

SEQ ID NO: 41801 - RNA, 19 nt, Artificial Sequence
  Description of Artificial Sequence: Synthetic oligonucleotide
  Antisense strand to SEQ ID NO: 41800
cuucagaagacucagaccc

SEQ ID NO: 41802 - RNA, 19 nt, Artificial Sequence
  Description of Artificial Sequence: Synthetic oligonucleotide
  Sense strand starting at position 1212 of SEQ ID NO: 499
aacugugcacuguaggaaa

SEQ ID NO: 41803 - RNA, 19 nt, Artificial Sequence
  Description of Artificial Sequence: Synthetic oligonucleotide
  Antisense strand to SEQ ID NO: 41802
uuuccuacagugcacaguu

SEQ ID NO: 41804 - RNA, 19 nt, Artificial Sequence
  Description of Artificial Sequence: Synthetic oligonucleotide
  Sense strand starting at position 1066 of SEQ ID NO: 499
ugucaacagcguuaacauu

SEQ ID NO: 41805 - RNA, 19 nt, Artificial Sequence
  Description of Artificial Sequence: Synthetic oligonucleotide
  Antisense strand to SEQ ID NO: 41804
aauguuaacgcuguugaca

SEQ ID NO: 41806 - RNA, 19 nt, Artificial Sequence
  Description of Artificial Sequence: Synthetic oligonucleotide
  Sense strand starting at position 892 of SEQ ID NO: 499
uaggcuugucauggugaaa

SEQ ID NO: 41807 - RNA, 19 nt, Artificial Sequence
  Description of Artificial Sequence: Synthetic oligonucleotide
  Antisense strand to SEQ ID NO: 41806
uuucaccaugacaagccua

SEQ ID NO: 41808 - RNA, 19 nt, Artificial Sequence
  Description of Artificial Sequence: Synthetic oligonucleotide
  Sense strand starting at position 825 of SEQ ID NO: 499
aucagaugcuuucuccaag

SEQ ID NO: 41809 - RNA, 19 nt, Artificial Sequence
  Description of Artificial Sequence: Synthetic oligonucleotide
  Antisense strand to SEQ ID NO: 41808
cuuggagaaagcaucugau

SEQ ID NO: 41810 - RNA, 19 nt, Artificial Sequence
  Description of Artificial Sequence: Synthetic oligonucleotide
  Sense strand starting at position 777 of SEQ ID NO: 499
cucaguucccuguaaguuu

SEQ ID NO: 41811 - RNA, 19 nt, Artificial Sequence
  Description of Artificial Sequence: Synthetic oligonucleotide
  Antisense strand to SEQ ID NO: 41810
aaacuuacagggaacugag

SEQ ID NO: 41812 - RNA, 19 nt, Artificial Sequence
  Description of Artificial Sequence: Synthetic oligonucleotide
  Sense strand starting at position 680 of SEQ ID NO: 499
ggauauagcuuaucuccuu

SEQ ID NO: 41813 - RNA, 19 nt, Artificial Sequence
  Description of Artificial Sequence: Synthetic oligonucleotide
  Antisense strand to SEQ ID NO: 41812
aaggagauaagcuauaucc

SEQ ID NO: 41814 - RNA, 19 nt, Artificial Sequence
  Description of Artificial Sequence: Synthetic oligonucleotide
  Sense strand starting at position 434 of SEQ ID NO: 499
ccauuucuguguucuuauu

SEQ ID NO: 41815 - RNA, 19 nt, Artificial Sequence
  Description of Artificial Sequence: Synthetic oligonucleotide
  Antisense strand to SEQ ID NO: 41814
aauaagaacacagaaaugg

SEQ ID NO: 41816 - RNA, 19 nt, Artificial Sequence
  Description of Artificial Sequence: Synthetic oligonucleotide
  Sense strand starting at position 431 of SEQ ID NO: 499
ccuccauuucuguguucuu

SEQ ID NO: 41817 - RNA, 19 nt, Artificial Sequence
  Description of Artificial Sequence: Synthetic oligonucleotide
  Antisense strand to SEQ ID NO: 41816
aagaacacagaaauggagg

SEQ ID NO: 41818 - RNA, 19 nt, Artificial Sequence
  Description of Artificial Sequence: Synthetic oligonucleotide
  Sense strand starting at position 283 of SEQ ID NO: 499
ucuacuguucuagagcaaa

SEQ ID NO: 41819 - RNA, 19 nt, Artificial Sequence
  Description of Artificial Sequence: Synthetic oligonucleotide
  Antisense strand to SEQ ID NO: 41818
uuugcucuagaacaguaga

SEQ ID NO: 41820 - RNA, 19 nt, Artificial Sequence
  Description of Artificial Sequence: Synthetic oligonucleotide
  Sense strand starting at position 215 of SEQ ID NO: 499
uguaaaggcccugauagua

SEQ ID NO: 41821 - RNA, 19 nt, Artificial Sequence
  Description of Artificial Sequence: Synthetic oligonucleotide
  Antisense strand to SEQ ID NO: 41820
uacuaucagggccuuuaca

SEQ ID NO: 41822 - RNA, 19 nt, Artificial Sequence
  Description of Artificial Sequence: Synthetic oligonucleotide
  Sense strand starting at position 214 of SEQ ID NO: 499
cuguaaaggcccugauagu

SEQ ID NO: 41823 - RNA, 19 nt, Artificial Sequence
  Description of Artificial Sequence: Synthetic oligonucleotide
  Antisense strand to SEQ ID NO: 41822
acuaucagggccuuuacag

SEQ ID NO: 41824 - RNA, 19 nt, Artificial Sequence
  Description of Artificial Sequence: Synthetic oligonucleotide
  Sense strand starting at position 106 of SEQ ID NO: 499
ggucaucugucauccaaua

SEQ ID NO: 41825 - RNA, 19 nt, Artificial Sequence
  Description of Artificial Sequence: Synthetic oligonucleotide
  Antisense strand to SEQ ID NO: 41824
uauuggaugacagaugacc

SEQ ID NO: 41826 - RNA, 19 nt, Artificial Sequence
  Description of Artificial Sequence: Synthetic oligonucleotide
  Sense strand starting at position 87 of SEQ ID NO: 499
aauaauaugccuuggugua

SEQ ID NO: 41827 - RNA, 19 nt, Artificial Sequence
  Description of Artificial Sequence: Synthetic oligonucleotide
  Antisense strand to SEQ ID NO: 41826
uacaccaaggcauauuauu

SEQ ID NO: 41828 - RNA, 19 nt, Artificial Sequence
  Description of Artificial Sequence: Synthetic oligonucleotide
  Sense strand starting at position 3828 of SEQ ID NO: 498
ugaagaugcuaugggagau

SEQ ID NO: 41829 - RNA, 19 nt, Artificial Sequence
  Description of Artificial Sequence: Synthetic oligonucleotide
  Antisense strand to SEQ ID NO: 41828
aucucccauagcaucuuca

SEQ ID NO: 41830 - RNA, 19 nt, Artificial Sequence
  Description of Artificial Sequence: Synthetic oligonucleotide
  Sense strand starting at position 3825 of SEQ ID NO: 498
uaaugaagaugcuauggga

SEQ ID NO: 41831 - RNA, 19 nt, Artificial Sequence
  Description of Artificial Sequence: Synthetic oligonucleotide
  Antisense strand to SEQ ID NO: 41830
ucccauagcaucuucauua

SEQ ID NO: 41832 - RNA, 19 nt, Artificial Sequence
  Description of Artificial Sequence: Synthetic oligonucleotide
  Sense strand starting at position 3809 of SEQ ID NO: 498
aacauacuugcugagguaa

SEQ ID NO: 41833 - RNA, 19 nt, Artificial Sequence
  Description of Artificial Sequence: Synthetic oligonucleotide
  Antisense strand to SEQ ID NO: 41832
uuaccucagcaaguauguu

SEQ ID NO: 41834 - RNA, 19 nt, Artificial Sequence
  Description of Artificial Sequence: Synthetic oligonucleotide
  Sense strand starting at position 3808 of SEQ ID NO: 498
gaacauacuugcugaggua

SEQ ID NO: 41835 - RNA, 19 nt, Artificial Sequence
  Description of Artificial Sequence: Synthetic oligonucleotide
  Antisense strand to SEQ ID NO: 41834
uaccucagcaaguauguuc

SEQ ID NO: 41836 - RNA, 19 nt, Artificial Sequence
  Description of Artificial Sequence: Synthetic oligonucleotide
  Sense strand starting at position 3777 of SEQ ID NO: 498
aucaaagugccuggaacau

SEQ ID NO: 41837 - RNA, 19 nt, Artificial Sequence
  Description of Artificial Sequence: Synthetic oligonucleotide
  Antisense strand to SEQ ID NO: 41836
auguuccaggcacuuugau

SEQ ID NO: 41838 - RNA, 19 nt, Artificial Sequence
  Description of Artificial Sequence: Synthetic oligonucleotide
  Sense strand starting at position 3776 of SEQ ID NO: 498
uaucaaagugccuggaaca

SEQ ID NO: 41839 - RNA, 19 nt, Artificial Sequence
  Description of Artificial Sequence: Synthetic oligonucleotide
  Antisense strand to SEQ ID NO: 41838
uguuccaggcacuuugaua

SEQ ID NO: 41840 - RNA, 19 nt, Artificial Sequence
  Description of Artificial Sequence: Synthetic oligonucleotide
  Sense strand starting at position 3760 of SEQ ID NO: 498
agaagcauuugauguuuau

SEQ ID NO: 41841 - RNA, 19 nt, Artificial Sequence
  Description of Artificial Sequence: Synthetic oligonucleotide
  Antisense strand to SEQ ID NO: 41840
auaaacaucaaaugcuucu

SEQ ID NO: 41842 - RNA, 19 nt, Artificial Sequence
  Description of Artificial Sequence: Synthetic oligonucleotide
  Sense strand starting at position 3758 of SEQ ID NO: 498
caagaagcauuugauguuu

SEQ ID NO: 41843 - RNA, 19 nt, Artificial Sequence
  Description of Artificial Sequence: Synthetic oligonucleotide
  Antisense strand to SEQ ID NO: 41842
aaacaucaaaugcuucuug

SEQ ID NO: 41844 - RNA, 19 nt, Artificial Sequence
  Description of Artificial Sequence: Synthetic oligonucleotide
  Sense strand starting at position 3717 of SEQ ID NO: 498
uuggguugucuuugaaggu

SEQ ID NO: 41845 - RNA, 19 nt, Artificial Sequence
  Description of Artificial Sequence: Synthetic oligonucleotide
  Antisense strand to SEQ ID NO: 41844
accuucaaagacaacccaa

SEQ ID NO: 41846 - RNA, 19 nt, Artificial Sequence
  Description of Artificial Sequence: Synthetic oligonucleotide
  Sense strand starting at position 3713 of SEQ ID NO: 498
aaguuuggguugucuuuga

SEQ ID NO: 41847 - RNA, 19 nt, Artificial Sequence
  Description of Artificial Sequence: Synthetic oligonucleotide
  Antisense strand to SEQ ID NO: 41846
ucaaagacaacccaaacuu

SEQ ID NO: 41848 - RNA, 19 nt, Artificial Sequence
  Description of Artificial Sequence: Synthetic oligonucleotide
  Sense strand starting at position 3436 of SEQ ID NO: 498
uugugauccugacacuuug

SEQ ID NO: 41849 - RNA, 19 nt, Artificial Sequence
  Description of Artificial Sequence: Synthetic oligonucleotide
  Antisense strand to SEQ ID NO: 41848
caaagugucaggaucacaa

SEQ ID NO: 41850 - RNA, 19 nt, Artificial Sequence
  Description of Artificial Sequence: Synthetic oligonucleotide
  Sense strand starting at position 3434 of SEQ ID NO: 498
acuugugauccugacacuu

SEQ ID NO: 41851 - RNA, 19 nt, Artificial Sequence
  Description of Artificial Sequence: Synthetic oligonucleotide
  Antisense strand to SEQ ID NO: 41850
aagugucaggaucacaagu

SEQ ID NO: 41852 - RNA, 19 nt, Artificial Sequence
  Description of Artificial Sequence: Synthetic oligonucleotide
  Sense strand starting at position 3264 of SEQ ID NO: 498
gcagauggauucccagaaa

SEQ ID NO: 41853 - RNA, 19 nt, Artificial Sequence
  Description of Artificial Sequence: Synthetic oligonucleotide
  Antisense strand to SEQ ID NO: 41852
uuucugggaauccaucugc

SEQ ID NO: 41854 - RNA, 19 nt, Artificial Sequence
  Description of Artificial Sequence: Synthetic oligonucleotide
  Sense strand starting at position 3060 of SEQ ID NO: 498
ugaauauauguacaugguu

SEQ ID NO: 41855 - RNA, 19 nt, Artificial Sequence
  Description of Artificial Sequence: Synthetic oligonucleotide
  Antisense strand to SEQ ID NO: 41854
aaccauguacauauauuca

SEQ ID NO: 41856 - RNA, 19 nt, Artificial Sequence
  Description of Artificial Sequence: Synthetic oligonucleotide
  Sense strand starting at position 3048 of SEQ ID NO: 498
uccuuugaauagugaauau

SEQ ID NO: 41857 - RNA, 19 nt, Artificial Sequence
  Description of Artificial Sequence: Synthetic oligonucleotide
  Antisense strand to SEQ ID NO: 41856
auauucacuauucaaagga

SEQ ID NO: 41858 - RNA, 19 nt, Artificial Sequence
  Description of Artificial Sequence: Synthetic oligonucleotide
  Sense strand starting at position 3045 of SEQ ID NO: 498
ccuuccuuugaauagugaa

SEQ ID NO: 41859 - RNA, 19 nt, Artificial Sequence
  Description of Artificial Sequence: Synthetic oligonucleotide
  Antisense strand to SEQ ID NO: 41858
uucacuauucaaaggaagg

SEQ ID NO: 41860 - RNA, 19 nt, Artificial Sequence
  Description of Artificial Sequence: Synthetic oligonucleotide
  Sense strand starting at position 3042 of SEQ ID NO: 498
ugaccuuccuuugaauagu

SEQ ID NO: 41861 - RNA, 19 nt, Artificial Sequence
  Description of Artificial Sequence: Synthetic oligonucleotide
  Antisense strand to SEQ ID NO: 41860
acuauucaaaggaagguca

SEQ ID NO: 41862 - RNA, 19 nt, Artificial Sequence
  Description of Artificial Sequence: Synthetic oligonucleotide
  Sense strand starting at position 2992 of SEQ ID NO: 498
cucuuucuccuagggauag

SEQ ID NO: 41863 - RNA, 19 nt, Artificial Sequence
  Description of Artificial Sequence: Synthetic oligonucleotide
  Antisense strand to SEQ ID NO: 41862
cuaucccuaggagaaagag

SEQ ID NO: 41864 - RNA, 19 nt, Artificial Sequence
  Description of Artificial Sequence: Synthetic oligonucleotide
  Sense strand starting at position 2957 of SEQ ID NO: 498
uacggugaagagcauuaua

SEQ ID NO: 41865 - RNA, 19 nt, Artificial Sequence
  Description of Artificial Sequence: Synthetic oligonucleotide
  Antisense strand to SEQ ID NO: 41864
uauaaugcucuucaccgua

SEQ ID NO: 41866 - RNA, 19 nt, Artificial Sequence
  Description of Artificial Sequence: Synthetic oligonucleotide
  Sense strand starting at position 2914 of SEQ ID NO: 498
gcgagauuaacaugagauu

SEQ ID NO: 41867 - RNA, 19 nt, Artificial Sequence
  Description of Artificial Sequence: Synthetic oligonucleotide
  Antisense strand to SEQ ID NO: 41866
aaucucauguuaaucucgc

SEQ ID NO: 41868 - RNA, 19 nt, Artificial Sequence
  Description of Artificial Sequence: Synthetic oligonucleotide
  Sense strand starting at position 2912 of SEQ ID NO: 498
aagcgagauuaacaugaga

SEQ ID NO: 41869 - RNA, 19 nt, Artificial Sequence
  Description of Artificial Sequence: Synthetic oligonucleotide
  Antisense strand to SEQ ID NO: 41868
ucucauguuaaucucgcuu

SEQ ID NO: 41870 - RNA, 19 nt, Artificial Sequence
  Description of Artificial Sequence: Synthetic oligonucleotide
  Sense strand starting at position 2360 of SEQ ID NO: 498
cuaaguagacggcaaagau

SEQ ID NO: 41871 - RNA, 19 nt, Artificial Sequence
  Description of Artificial Sequence: Synthetic oligonucleotide
  Antisense strand to SEQ ID NO: 41870
aucuuugccgucuacuuag

SEQ ID NO: 41872 - RNA, 19 nt, Artificial Sequence
  Description of Artificial Sequence: Synthetic oligonucleotide
  Sense strand starting at position 2299 of SEQ ID NO: 498
gguggugauugggaauuca

SEQ ID NO: 41873 - RNA, 19 nt, Artificial Sequence
  Description of Artificial Sequence: Synthetic oligonucleotide
  Antisense strand to SEQ ID NO: 41872
ugaauucccaaucaccacc

SEQ ID NO: 41874 - RNA, 19 nt, Artificial Sequence
  Description of Artificial Sequence: Synthetic oligonucleotide
  Sense strand starting at position 2296 of SEQ ID NO: 498
uccgguggugauugggaau

SEQ ID NO: 41875 - RNA, 19 nt, Artificial Sequence
  Description of Artificial Sequence: Synthetic oligonucleotide
  Antisense strand to SEQ ID NO: 41874
auucccaaucaccaccgga

SEQ ID NO: 41876 - RNA, 19 nt, Artificial Sequence
  Description of Artificial Sequence: Synthetic oligonucleotide
  Sense strand starting at position 2233 of SEQ ID NO: 498
ggugcuugcugcagagaug

SEQ ID NO: 41877 - RNA, 19 nt, Artificial Sequence
  Description of Artificial Sequence: Synthetic oligonucleotide
  Antisense strand to SEQ ID NO: 41876
caucucugcagcaagcacc

SEQ ID NO: 41878 - RNA, 19 nt, Artificial Sequence
  Description of Artificial Sequence: Synthetic oligonucleotide
  Sense strand starting at position 2232 of SEQ ID NO: 498
gggugcuugcugcagagau

SEQ ID NO: 41879 - RNA, 19 nt, Artificial Sequence
  Description of Artificial Sequence: Synthetic oligonucleotide
  Antisense strand to SEQ ID NO: 41878
aucucugcagcaagcaccc

SEQ ID NO: 41880 - RNA, 19 nt, Artificial Sequence
  Description of Artificial Sequence: Synthetic oligonucleotide
  Sense strand starting at position 2214 of SEQ ID NO: 498
acacuuuaugguuguuaug

SEQ ID NO: 41881 - RNA, 19 nt, Artificial Sequence
  Description of Artificial Sequence: Synthetic oligonucleotide
  Antisense strand to SEQ ID NO: 41880
cauaacaaccauaaagugu

SEQ ID NO: 41882 - RNA, 19 nt, Artificial Sequence
  Description of Artificial Sequence: Synthetic oligonucleotide
  Sense strand starting at position 2066 of SEQ ID NO: 498
ggcugcuuuggauggacua

SEQ ID NO: 41883 - RNA, 19 nt, Artificial Sequence
  Description of Artificial Sequence: Synthetic oligonucleotide
  Antisense strand to SEQ ID NO: 41882
uaguccauccaaagcagcc

SEQ ID NO: 41884 - RNA, 19 nt, Artificial Sequence
  Description of Artificial Sequence: Synthetic oligonucleotide
  Sense strand starting at position 1346 of SEQ ID NO: 498
cccugauugguaggagcga

SEQ ID NO: 41885 - RNA, 19 nt, Artificial Sequence
  Description of Artificial Sequence: Synthetic oligonucleotide
  Antisense strand to SEQ ID NO: 41884
ucgcuccuaccaaucaggg

SEQ ID NO: 41886 - RNA, 19 nt, Artificial Sequence
  Description of Artificial Sequence: Synthetic oligonucleotide
  Sense strand starting at position 837 of SEQ ID NO: 498
cguggugagcucuauacac

SEQ ID NO: 41887 - RNA, 19 nt, Artificial Sequence
  Description of Artificial Sequence: Synthetic oligonucleotide
  Antisense strand to SEQ ID NO: 41886
guguauagagcucaccacg

SEQ ID NO: 41888 - RNA, 19 nt, Artificial Sequence
  Description of Artificial Sequence: Synthetic oligonucleotide
  Sense strand starting at position 687 of SEQ ID NO: 498
gugugcagaccucaaucau

SEQ ID NO: 41889 - RNA, 19 nt, Artificial Sequence
  Description of Artificial Sequence: Synthetic oligonucleotide
  Antisense strand to SEQ ID NO: 41888
augauugaggucugcacac

SEQ ID NO: 41890 - RNA, 19 nt, Artificial Sequence
  Description of Artificial Sequence: Synthetic oligonucleotide
  Sense strand starting at position 597 of SEQ ID NO: 498
caagacgcaucagagaaau

SEQ ID NO: 41891 - RNA, 19 nt, Artificial Sequence
  Description of Artificial Sequence: Synthetic oligonucleotide
  Antisense strand to SEQ ID NO: 41890
auuucucugaugcgucuug

SEQ ID NO: 41892 - RNA, 19 nt, Artificial Sequence
  Description of Artificial Sequence: Synthetic oligonucleotide
  Sense strand starting at position 588 of SEQ ID NO: 498
aacguaaaucaagacgcau

SEQ ID NO: 41893 - RNA, 19 nt, Artificial Sequence
  Description of Artificial Sequence: Synthetic oligonucleotide
  Antisense strand to SEQ ID NO: 41892
augcgucuugauuuacguu

SEQ ID NO: 41894 - RNA, 19 nt, Artificial Sequence
  Description of Artificial Sequence: Synthetic oligonucleotide
  Sense strand starting at position 533 of SEQ ID NO: 498
ugaacuuaauccugaaggu

SEQ ID NO: 41895 - RNA, 19 nt, Artificial Sequence
  Description of Artificial Sequence: Synthetic oligonucleotide
  Antisense strand to SEQ ID NO: 41894
accuucaggauuaaguuca

SEQ ID NO: 41896 - RNA, 19 nt, Artificial Sequence
  Description of Artificial Sequence: Synthetic oligonucleotide
  Sense strand starting at position 501 of SEQ ID NO: 498
gccagaucaugugcaaacu

SEQ ID NO: 41897 - RNA, 19 nt, Artificial Sequence
  Description of Artificial Sequence: Synthetic oligonucleotide
  Antisense strand to SEQ ID NO: 41896
aguuugcacaugaucuggc

SEQ ID NO: 41898 - RNA, 19 nt, Artificial Sequence
  Description of Artificial Sequence: Synthetic oligonucleotide
  Sense strand starting at position 324 of SEQ ID NO: 498
guagauaugacuugcaaug

SEQ ID NO: 41899 - RNA, 19 nt, Artificial Sequence
  Description of Artificial Sequence: Synthetic oligonucleotide
  Antisense strand to SEQ ID NO: 41898
cauugcaagucauaucuac

SEQ ID NO: 41900 - RNA, 19 nt, Artificial Sequence
  Description of Artificial Sequence: Synthetic oligonucleotide
  Sense strand starting at position 174 of SEQ ID NO: 498
ugaguaauucagugacggu

SEQ ID NO: 41901 - RNA, 19 nt, Artificial Sequence
  Description of Artificial Sequence: Synthetic oligonucleotide
  Antisense strand to SEQ ID NO: 41900
accgucacugaauuacuca

SEQ ID NO: 41902 - RNA, 19 nt, Artificial Sequence
  Description of Artificial Sequence: Synthetic oligonucleotide
  Sense strand starting at position 115 of SEQ ID NO: 498
gggcccauaucucaacuuu

SEQ ID NO: 41903 - RNA, 19 nt, Artificial Sequence
  Description of Artificial Sequence: Synthetic oligonucleotide
  Antisense strand to SEQ ID NO: 41902
aaaguugagauaugggccc

SEQ ID NO: 41904 - RNA, 19 nt, Artificial Sequence
  Description of Artificial Sequence: Synthetic oligonucleotide
  Sense strand starting at position 58 of SEQ ID NO: 498
gcuacugacuuacaugaca

SEQ ID NO: 41905 - RNA, 19 nt, Artificial Sequence
  Description of Artificial Sequence: Synthetic oligonucleotide
  Antisense strand to SEQ ID NO: 41904
ugucauguaagucaguagc

SEQ ID NO: 41906 - RNA, 19 nt, Artificial Sequence
  Description of Artificial Sequence: Synthetic oligonucleotide
  Sense strand starting at position 29 of SEQ ID NO: 498
gcgggaggcucauucauuc

SEQ ID NO: 41907 - RNA, 19 nt, Artificial Sequence
  Description of Artificial Sequence: Synthetic oligonucleotide
  Antisense strand to SEQ ID NO: 41906
gaaugaaugagccucccgc

SEQ ID NO: 41908 - RNA, 19 nt, Artificial Sequence
  Description of Artificial Sequence: Synthetic oligonucleotide
  Sense strand starting at position 3739 of SEQ ID NO: 500
gaaggaggauucuaacuua

SEQ ID NO: 41909 - RNA, 19 nt, Artificial Sequence
  Description of Artificial Sequence: Synthetic oligonucleotide
  Antisense strand to SEQ ID NO: 41908
uaaguuagaauccuccuuc

SEQ ID NO: 41910 - RNA, 19 nt, Artificial Sequence
  Description of Artificial Sequence: Synthetic oligonucleotide
  Sense strand starting at position 3669 of SEQ ID NO: 500
aggaauuccuuccugauag

SEQ ID NO: 41911 - RNA, 19 nt, Artificial Sequence
  Description of Artificial Sequence: Synthetic oligonucleotide
  Antisense strand to SEQ ID NO: 41910
cuaucaggaaggaauuccu

SEQ ID NO: 41912 - RNA, 19 nt, Artificial Sequence
  Description of Artificial Sequence: Synthetic oligonucleotide
  Sense strand starting at position 3586 of SEQ ID NO: 500
uagauucugucuuucguuu

SEQ ID NO: 41913 - RNA, 19 nt, Artificial Sequence
  Description of Artificial Sequence: Synthetic oligonucleotide
  Antisense strand to SEQ ID NO: 41912
aaacgaaagacagaaucua

SEQ ID NO: 41914 - RNA, 19 nt, Artificial Sequence
  Description of Artificial Sequence: Synthetic oligonucleotide
  Sense strand starting at position 3584 of SEQ ID NO: 500
guuagauucugucuuucgu

SEQ ID NO: 41915 - RNA, 19 nt, Artificial Sequence
  Description of Artificial Sequence: Synthetic oligonucleotide
  Antisense strand to SEQ ID NO: 41914
acgaaagacagaaucuaac

SEQ ID NO: 41916 - RNA, 19 nt, Artificial Sequence
  Description of Artificial Sequence: Synthetic oligonucleotide
  Sense strand starting at position 3582 of SEQ ID NO: 500
ugguuagauucugucuuuc

SEQ ID NO: 41917 - RNA, 19 nt, Artificial Sequence
  Description of Artificial Sequence: Synthetic oligonucleotide
  Antisense strand to SEQ ID NO: 41916
gaaagacagaaucuaacca

SEQ ID NO: 41918 - RNA, 19 nt, Artificial Sequence
  Description of Artificial Sequence: Synthetic oligonucleotide
  Sense strand starting at position 3573 of SEQ ID NO: 500
cagccugguugguuagauu

SEQ ID NO: 41919 - RNA, 19 nt, Artificial Sequence
  Description of Artificial Sequence: Synthetic oligonucleotide
  Antisense strand to SEQ ID NO: 41918
aaucuaaccaaccaggcug

SEQ ID NO: 41920 - RNA, 19 nt, Artificial Sequence
  Description of Artificial Sequence: Synthetic oligonucleotide
  Sense strand starting at position 3521 of SEQ ID NO: 500
uggccaucccuuggaacau

SEQ ID NO: 41921 - RNA, 19 nt, Artificial Sequence
  Description of Artificial Sequence: Synthetic oligonucleotide
  Antisense strand to SEQ ID NO: 41920
auguuccaagggauggcca

SEQ ID NO: 41922 - RNA, 19 nt, Artificial Sequence
  Description of Artificial Sequence: Synthetic oligonucleotide
  Sense strand starting at position 3437 of SEQ ID NO: 500
cuugaaugucaaggucagu

SEQ ID NO: 41923 - RNA, 19 nt, Artificial Sequence
  Description of Artificial Sequence: Synthetic oligonucleotide
  Antisense strand to SEQ ID NO: 41922
acugaccuugacauucaag

SEQ ID NO: 41924 - RNA, 19 nt, Artificial Sequence
  Description of Artificial Sequence: Synthetic oligonucleotide
  Sense strand starting at position 3349 of SEQ ID NO: 500
aguuguagguccucaguuu

SEQ ID NO: 41925 - RNA, 19 nt, Artificial Sequence
  Description of Artificial Sequence: Synthetic oligonucleotide
  Antisense strand to SEQ ID NO: 41924
aaacugaggaccuacaacu

SEQ ID NO: 41926 - RNA, 19 nt, Artificial Sequence
  Description of Artificial Sequence: Synthetic oligonucleotide
  Sense strand starting at position 3324 of SEQ ID NO: 500
ccagauuccuuccuggagu

SEQ ID NO: 41927 - RNA, 19 nt, Artificial Sequence
  Description of Artificial Sequence: Synthetic oligonucleotide
  Antisense strand to SEQ ID NO: 41926
acuccaggaaggaaucugg

SEQ ID NO: 41928 - RNA, 19 nt, Artificial Sequence
  Description of Artificial Sequence: Synthetic oligonucleotide
  Sense strand starting at position 3312 of SEQ ID NO: 500
gugcuuaguuggccagauu

SEQ ID NO: 41929 - RNA, 19 nt, Artificial Sequence
  Description of Artificial Sequence: Synthetic oligonucleotide
  Antisense strand to SEQ ID NO: 41928
aaucuggccaacuaagcac

SEQ ID NO: 41930 - RNA, 19 nt, Artificial Sequence
  Description of Artificial Sequence: Synthetic oligonucleotide
  Sense strand starting at position 3311 of SEQ ID NO: 500
ggugcuuaguuggccagau

SEQ ID NO: 41931 - RNA, 19 nt, Artificial Sequence
  Description of Artificial Sequence: Synthetic oligonucleotide
  Antisense strand to SEQ ID NO: 41930
aucuggccaacuaagcacc

SEQ ID NO: 41932 - RNA, 19 nt, Artificial Sequence
  Description of Artificial Sequence: Synthetic oligonucleotide
  Sense strand starting at position 3062 of SEQ ID NO: 500
gcggguaagugaccaucua

SEQ ID NO: 41933 - RNA, 19 nt, Artificial Sequence
  Description of Artificial Sequence: Synthetic oligonucleotide
  Antisense strand to SEQ ID NO: 41932
uagauggucacuuacccgc

SEQ ID NO: 41934 - RNA, 19 nt, Artificial Sequence
  Description of Artificial Sequence: Synthetic oligonucleotide
  Sense strand starting at position 2846 of SEQ ID NO: 500
gguuaucugcucugaggug

SEQ ID NO: 41935 - RNA, 19 nt, Artificial Sequence
  Description of Artificial Sequence: Synthetic oligonucleotide
  Antisense strand to SEQ ID NO: 41934
caccucagagcagauaacc

SEQ ID NO: 41936 - RNA, 19 nt, Artificial Sequence
  Description of Artificial Sequence: Synthetic oligonucleotide
  Sense strand starting at position 2833 of SEQ ID NO: 500
augaaauagacgcgguuau

SEQ ID NO: 41937 - RNA, 19 nt, Artificial Sequence
  Description of Artificial Sequence: Synthetic oligonucleotide
  Antisense strand to SEQ ID NO: 41936
auaaccgcgucuauuucau

SEQ ID NO: 41938 - RNA, 19 nt, Artificial Sequence
  Description of Artificial Sequence: Synthetic oligonucleotide
  Sense strand starting at position 2781 of SEQ ID NO: 500
aggcauugcgcucaauucu

SEQ ID NO: 41939 - RNA, 19 nt, Artificial Sequence
  Description of Artificial Sequence: Synthetic oligonucleotide
  Antisense strand to SEQ ID NO: 41938
agaauugagcgcaaugccu

SEQ ID NO: 41940 - RNA, 19 nt, Artificial Sequence
  Description of Artificial Sequence: Synthetic oligonucleotide
  Sense strand starting at position 2196 of SEQ ID NO: 500
uucugaguugcagugcuuu

SEQ ID NO: 41941 - RNA, 19 nt, Artificial Sequence
  Description of Artificial Sequence: Synthetic oligonucleotide
  Antisense strand to SEQ ID NO: 41940
aaagcacugcaacucagaa

SEQ ID NO: 41942 - RNA, 19 nt, Artificial Sequence
  Description of Artificial Sequence: Synthetic oligonucleotide
  Sense strand starting at position 2126 of SEQ ID NO: 500
cuguuuaauuugggcagga

SEQ ID NO: 41943 - RNA, 19 nt, Artificial Sequence
  Description of Artificial Sequence: Synthetic oligonucleotide
  Antisense strand to SEQ ID NO: 41942
uccugcccaaauuaaacag

SEQ ID NO: 41944 - RNA, 19 nt, Artificial Sequence
  Description of Artificial Sequence: Synthetic oligonucleotide
  Sense strand starting at position 2118 of SEQ ID NO: 500
ggugguuacuguuuaauuu

SEQ ID NO: 41945 - RNA, 19 nt, Artificial Sequence
  Description of Artificial Sequence: Synthetic oligonucleotide
  Antisense strand to SEQ ID NO: 41944
aaauuaaacaguaaccacc

SEQ ID NO: 41946 - RNA, 19 nt, Artificial Sequence
  Description of Artificial Sequence: Synthetic oligonucleotide
  Sense strand starting at position 2081 of SEQ ID NO: 500
agaaaccugcucugauaag

SEQ ID NO: 41947 - RNA, 19 nt, Artificial Sequence
  Description of Artificial Sequence: Synthetic oligonucleotide
  Antisense strand to SEQ ID NO: 41946
cuuaucagagcagguuucu

SEQ ID NO: 41948 - RNA, 19 nt, Artificial Sequence
  Description of Artificial Sequence: Synthetic oligonucleotide
  Sense strand starting at position 2079 of SEQ ID NO: 500
agagaaaccugcucugaua

SEQ ID NO: 41949 - RNA, 19 nt, Artificial Sequence
  Description of Artificial Sequence: Synthetic oligonucleotide
  Antisense strand to SEQ ID NO: 41948
uaucagagcagguuucucu

SEQ ID NO: 41950 - RNA, 19 nt, Artificial Sequence
  Description of Artificial Sequence: Synthetic oligonucleotide
  Sense strand starting at position 1832 of SEQ ID NO: 500
gugucuuaccuggagagca

SEQ ID NO: 41951 - RNA, 19 nt, Artificial Sequence
  Description of Artificial Sequence: Synthetic oligonucleotide
  Antisense strand to SEQ ID NO: 41950
ugcucuccagguaagacac

SEQ ID NO: 41952 - RNA, 19 nt, Artificial Sequence
  Description of Artificial Sequence: Synthetic oligonucleotide
  Sense strand starting at position 1830 of SEQ ID NO: 500
aagugucuuaccuggagag

SEQ ID NO: 41953 - RNA, 19 nt, Artificial Sequence
  Description of Artificial Sequence: Synthetic oligonucleotide
  Antisense strand to SEQ ID NO: 41952
cucuccagguaagacacuu

SEQ ID NO: 41954 - RNA, 19 nt, Artificial Sequence
  Description of Artificial Sequence: Synthetic oligonucleotide
  Sense strand starting at position 1547 of SEQ ID NO: 500
gggcuccuaaucugggaaa

SEQ ID NO: 41955 - RNA, 19 nt, Artificial Sequence
  Description of Artificial Sequence: Synthetic oligonucleotide
  Antisense strand to SEQ ID NO: 41954
uuucccagauuaggagccc

SEQ ID NO: 41956 - RNA, 19 nt, Artificial Sequence
  Description of Artificial Sequence: Synthetic oligonucleotide
  Sense strand starting at position 1474 of SEQ ID NO: 500
uagugagauuuagagaggu

SEQ ID NO: 41957 - RNA, 19 nt, Artificial Sequence
  Description of Artificial Sequence: Synthetic oligonucleotide
  Antisense strand to SEQ ID NO: 41956
accucucuaaaucucacua

SEQ ID NO: 41958 - RNA, 19 nt, Artificial Sequence
  Description of Artificial Sequence: Synthetic oligonucleotide
  Sense strand starting at position 1450 of SEQ ID NO: 500
agugcucuccuuugccaaa

SEQ ID NO: 41959 - RNA, 19 nt, Artificial Sequence
  Description of Artificial Sequence: Synthetic oligonucleotide
  Antisense strand to SEQ ID NO: 41958
uuuggcaaaggagagcacu

SEQ ID NO: 41960 - RNA, 19 nt, Artificial Sequence
  Description of Artificial Sequence: Synthetic oligonucleotide
  Sense strand starting at position 1367 of SEQ ID NO: 500
gcgucuggcacauaguaaa

SEQ ID NO: 41961 - RNA, 19 nt, Artificial Sequence
  Description of Artificial Sequence: Synthetic oligonucleotide
  Antisense strand to SEQ ID NO: 41960
uuuacuaugugccagacgc

SEQ ID NO: 41962 - RNA, 19 nt, Artificial Sequence
  Description of Artificial Sequence: Synthetic oligonucleotide
  Sense strand starting at position 1328 of SEQ ID NO: 500
aggauuaaauuggcuccua

SEQ ID NO: 41963 - RNA, 19 nt, Artificial Sequence
  Description of Artificial Sequence: Synthetic oligonucleotide
  Antisense strand to SEQ ID NO: 41962
uaggagccaauuuaauccu

SEQ ID NO: 41964 - RNA, 19 nt, Artificial Sequence
  Description of Artificial Sequence: Synthetic oligonucleotide
  Sense strand starting at position 906 of SEQ ID NO: 500
ugugaugucaggcaagaua

SEQ ID NO: 41965 - RNA, 19 nt, Artificial Sequence
  Description of Artificial Sequence: Synthetic oligonucleotide
  Antisense strand to SEQ ID NO: 41964
uaucuugccugacaucaca

SEQ ID NO: 41966 - RNA, 19 nt, Artificial Sequence
  Description of Artificial Sequence: Synthetic oligonucleotide
  Sense strand starting at position 850 of SEQ ID NO: 500
ugcuguuccgcgagacaga

SEQ ID NO: 41967 - RNA, 19 nt, Artificial Sequence
  Description of Artificial Sequence: Synthetic oligonucleotide
  Antisense strand to SEQ ID NO: 41966
ucugucucgcggaacagca

SEQ ID NO: 41968 - RNA, 19 nt, Artificial Sequence
  Description of Artificial Sequence: Synthetic oligonucleotide
  Sense strand starting at position 809 of SEQ ID NO: 500
cuguuauagcugggaagcu

SEQ ID NO: 41969 - RNA, 19 nt, Artificial Sequence
  Description of Artificial Sequence: Synthetic oligonucleotide
  Antisense strand to SEQ ID NO: 41968
agcuucccagcuauaacag

SEQ ID NO: 41970 - RNA, 19 nt, Artificial Sequence
  Description of Artificial Sequence: Synthetic oligonucleotide
  Sense strand starting at position 744 of SEQ ID NO: 500
uguguucuucugucuguuu

SEQ ID NO: 41971 - RNA, 19 nt, Artificial Sequence
  Description of Artificial Sequence: Synthetic oligonucleotide
  Antisense strand to SEQ ID NO: 41970
aaacagacagaagaacaca

SEQ ID NO: 41972 - RNA, 19 nt, Artificial Sequence
  Description of Artificial Sequence: Synthetic oligonucleotide
  Sense strand starting at position 351 of SEQ ID NO: 500
ugaguuugcccugagaacu

SEQ ID NO: 41973 - RNA, 19 nt, Artificial Sequence
  Description of Artificial Sequence: Synthetic oligonucleotide
  Antisense strand to SEQ ID NO: 41972
aguucucagggcaaacuca

SEQ ID NO: 41974 - RNA, 19 nt, Artificial Sequence
  Description of Artificial Sequence: Synthetic oligonucleotide
  Sense strand starting at position 350 of SEQ ID NO: 500
gugaguuugcccugagaac

SEQ ID NO: 41975 - RNA, 19 nt, Artificial Sequence
  Description of Artificial Sequence: Synthetic oligonucleotide
  Antisense strand to SEQ ID NO: 41974
guucucagggcaaacucac

SEQ ID NO: 41976 - RNA, 19 nt, Artificial Sequence
  Description of Artificial Sequence: Synthetic oligonucleotide
  Sense strand starting at position 348 of SEQ ID NO: 500
cggugaguuugcccugaga

SEQ ID NO: 41977 - RNA, 19 nt, Artificial Sequence
  Description of Artificial Sequence: Synthetic oligonucleotide
  Antisense strand to SEQ ID NO: 41976
ucucagggcaaacucaccg

SEQ ID NO: 41978 - RNA, 19 nt, Artificial Sequence
  Description of Artificial Sequence: Synthetic oligonucleotide
  Sense strand starting at position 339 of SEQ ID NO: 500
acacuaaugcggugaguuu

SEQ ID NO: 41979 - RNA, 19 nt, Artificial Sequence
  Description of Artificial Sequence: Synthetic oligonucleotide
  Antisense strand to SEQ ID NO: 41978
aaacucaccgcauuagugu

SEQ ID NO: 41980 - RNA, 19 nt, Artificial Sequence
  Description of Artificial Sequence: Synthetic oligonucleotide
  Sense strand starting at position 328 of SEQ ID NO: 500
ugugaagaaucacacuaau

SEQ ID NO: 41981 - RNA, 19 nt, Artificial Sequence
  Description of Artificial Sequence: Synthetic oligonucleotide
  Antisense strand to SEQ ID NO: 41980
auuagugugauucuucaca

SEQ ID NO: 41982 - RNA, 19 nt, Artificial Sequence
  Description of Artificial Sequence: Synthetic oligonucleotide
  Sense strand starting at position 318 of SEQ ID NO: 500
uucugugaaaugugaagaa

SEQ ID NO: 41983 - RNA, 19 nt, Artificial Sequence
  Description of Artificial Sequence: Synthetic oligonucleotide
  Antisense strand to SEQ ID NO: 41982
uucuucacauuucacagaa

SEQ ID NO: 41984 - RNA, 19 nt, Artificial Sequence
  Description of Artificial Sequence: Synthetic oligonucleotide
  Sense strand starting at position 316 of SEQ ID NO: 500
cuuucugugaaaugugaag

SEQ ID NO: 41985 - RNA, 19 nt, Artificial Sequence
  Description of Artificial Sequence: Synthetic oligonucleotide
  Antisense strand to SEQ ID NO: 41984
cuucacauuucacagaaag

SEQ ID NO: 41986 - RNA, 19 nt, Artificial Sequence
  Description of Artificial Sequence: Synthetic oligonucleotide
  Sense strand starting at position 311 of SEQ ID NO: 500
uuucccuuucugugaaaug

SEQ ID NO: 41987 - RNA, 19 nt, Artificial Sequence
  Description of Artificial Sequence: Synthetic oligonucleotide
  Antisense strand to SEQ ID NO: 41986
cauuucacagaaagggaaa

SEQ ID NO: 41988 - RNA, 19 nt, Artificial Sequence
  Description of Artificial Sequence: Synthetic oligonucleotide
  Sense strand starting at position 4 of SEQ ID NO: 501
uucugaucaguaugaaagu

SEQ ID NO: 41989 - RNA, 19 nt, Artificial Sequence
  Description of Artificial Sequence: Synthetic oligonucleotide
  Antisense strand to SEQ ID NO: 41988
acuuucauacugaucagaa

SEQ ID NO: 41990 - RNA, 19 nt, Artificial Sequence
  Description of Artificial Sequence: Synthetic oligonucleotide
  Sense strand starting at position 13 of SEQ ID NO: 501
guaugaaaguuacucucuu

SEQ ID NO: 41991 - RNA, 19 nt, Artificial Sequence
  Description of Artificial Sequence: Synthetic oligonucleotide
  Antisense strand to SEQ ID NO: 41990
aagagaguaacuuucauac

SEQ ID NO: 41992 - RNA, 19 nt, Artificial Sequence
  Description of Artificial Sequence: Synthetic oligonucleotide
  Sense strand starting at position 17 of SEQ ID NO: 501
gaaaguuacucucuuggac

SEQ ID NO: 41993 - RNA, 19 nt, Artificial Sequence
  Description of Artificial Sequence: Synthetic oligonucleotide
  Antisense strand to SEQ ID NO: 41992
guccaagagaguaacuuuc

SEQ ID NO: 41994 - RNA, 19 nt, Artificial Sequence
  Description of Artificial Sequence: Synthetic oligonucleotide
  Sense strand starting at position 290 of SEQ ID NO: 501
gccagugucgaagaugaca

SEQ ID NO: 41995 - RNA, 19 nt, Artificial Sequence
  Description of Artificial Sequence: Synthetic oligonucleotide
  Antisense strand to SEQ ID NO: 41994
ugucaucuucgacacuggc

SEQ ID NO: 41996 - RNA, 19 nt, Artificial Sequence
  Description of Artificial Sequence: Synthetic oligonucleotide
  Sense strand starting at position 298 of SEQ ID NO: 501
cgaagaugacagugaaguu

SEQ ID NO: 41997 - RNA, 19 nt, Artificial Sequence
  Description of Artificial Sequence: Synthetic oligonucleotide
  Antisense strand to SEQ ID NO: 41996
aacuucacugucaucuucg

SEQ ID NO: 41998 - RNA, 19 nt, Artificial Sequence
  Description of Artificial Sequence: Synthetic oligonucleotide
  Sense strand starting at position 335 of SEQ ID NO: 501
ggagauagugccgaaguau

SEQ ID NO: 41999 - RNA, 19 nt, Artificial Sequence
  Description of Artificial Sequence: Synthetic oligonucleotide
  Antisense strand to SEQ ID NO: 41998
auacuucggcacuaucucc

SEQ ID NO: 42000 - RNA, 19 nt, Artificial Sequence
  Description of Artificial Sequence: Synthetic oligonucleotide
  Sense strand starting at position 349 of SEQ ID NO: 501
aguauuccaucugcaagga

SEQ ID NO: 42001 - RNA, 19 nt, Artificial Sequence
  Description of Artificial Sequence: Synthetic oligonucleotide
  Antisense strand to SEQ ID NO: 42000
uccuugcagauggaauacu

SEQ ID NO: 42002 - RNA, 19 nt, Artificial Sequence
  Description of Artificial Sequence: Synthetic oligonucleotide
  Sense strand starting at position 350 of SEQ ID NO: 501
guauuccaucugcaaggaa

SEQ ID NO: 42003 - RNA, 19 nt, Artificial Sequence
  Description of Artificial Sequence: Synthetic oligonucleotide
  Antisense strand to SEQ ID NO: 42002
uuccuugcagauggaauac

SEQ ID NO: 42004 - RNA, 19 nt, Artificial Sequence
  Description of Artificial Sequence: Synthetic oligonucleotide
  Sense strand starting at position 459 of SEQ ID NO: 501
gguaauacagacuggaguu

SEQ ID NO: 42005 - RNA, 19 nt, Artificial Sequence
  Description of Artificial Sequence: Synthetic oligonucleotide
  Antisense strand to SEQ ID NO: 42004
aacuccagucuguauuacc

SEQ ID NO: 42006 - RNA, 19 nt, Artificial Sequence
  Description of Artificial Sequence: Synthetic oligonucleotide
  Sense strand starting at position 460 of SEQ ID NO: 501
guaauacagacuggaguuu

SEQ ID NO: 42007 - RNA, 19 nt, Artificial Sequence
  Description of Artificial Sequence: Synthetic oligonucleotide
  Antisense strand to SEQ ID NO: 42006
aaacuccagucuguauuac

SEQ ID NO: 42008 - RNA, 19 nt, Artificial Sequence
  Description of Artificial Sequence: Synthetic oligonucleotide
  Sense strand starting at position 607 of SEQ ID NO: 501
auaaauacauuguaggaga

SEQ ID NO: 42009 - RNA, 19 nt, Artificial Sequence
  Description of Artificial Sequence: Synthetic oligonucleotide
  Antisense strand to SEQ ID NO: 42008
ucuccuacaauguauuuau

SEQ ID NO: 42010 - RNA, 19 nt, Artificial Sequence
  Description of Artificial Sequence: Synthetic oligonucleotide
  Sense strand starting at position 743 of SEQ ID NO: 501
gccuucagugugggaugau

SEQ ID NO: 42011 - RNA, 19 nt, Artificial Sequence
  Description of Artificial Sequence: Synthetic oligonucleotide
  Antisense strand to SEQ ID NO: 42010
aucaucccacacugaaggc

SEQ ID NO: 42012 - RNA, 19 nt, Artificial Sequence
  Description of Artificial Sequence: Synthetic oligonucleotide
  Sense strand starting at position 752 of SEQ ID NO: 501
gugggaugaugcuuucacu

SEQ ID NO: 42013 - RNA, 19 nt, Artificial Sequence
  Description of Artificial Sequence: Synthetic oligonucleotide
  Antisense strand to SEQ ID NO: 42012
agugaaagcaucaucccac

SEQ ID NO: 42014 - RNA, 19 nt, Artificial Sequence
  Description of Artificial Sequence: Synthetic oligonucleotide
  Sense strand starting at position 776 of SEQ ID NO: 501
cccuuuccuucugcagaga

SEQ ID NO: 42015 - RNA, 19 nt, Artificial Sequence
  Description of Artificial Sequence: Synthetic oligonucleotide
  Antisense strand to SEQ ID NO: 42014
ucucugcagaaggaaaggg

SEQ ID NO: 42016 - RNA, 19 nt, Artificial Sequence
  Description of Artificial Sequence: Synthetic oligonucleotide
  Sense strand starting at position 777 of SEQ ID NO: 501
ccuuuccuucugcagagaa

SEQ ID NO: 42017 - RNA, 19 nt, Artificial Sequence
  Description of Artificial Sequence: Synthetic oligonucleotide
  Antisense strand to SEQ ID NO: 42016
uucucugcagaaggaaagg

SEQ ID NO: 42018 - RNA, 19 nt, Artificial Sequence
  Description of Artificial Sequence: Synthetic oligonucleotide
  Sense strand starting at position 779 of SEQ ID NO: 501
uuuccuucugcagagaacu

SEQ ID NO: 42019 - RNA, 19 nt, Artificial Sequence
  Description of Artificial Sequence: Synthetic oligonucleotide
  Antisense strand to SEQ ID NO: 42018
aguucucugcagaaggaaa

SEQ ID NO: 42020 - RNA, 19 nt, Artificial Sequence
  Description of Artificial Sequence: Synthetic oligonucleotide
  Sense strand starting at position 787 of SEQ ID NO: 501
ugcagagaacucugacauu

SEQ ID NO: 42021 - RNA, 19 nt, Artificial Sequence
  Description of Artificial Sequence: Synthetic oligonucleotide
  Antisense strand to SEQ ID NO: 42020
aaugucagaguucucugca

SEQ ID NO: 42022 - RNA, 19 nt, Artificial Sequence
  Description of Artificial Sequence: Synthetic oligonucleotide
  Sense strand starting at position 1051 of SEQ ID NO: 501
acuggaucauguccaaauu

SEQ ID NO: 42023 - RNA, 19 nt, Artificial Sequence
  Description of Artificial Sequence: Synthetic oligonucleotide
  Antisense strand to SEQ ID NO: 42022
aauuuggacaugauccagu

SEQ ID NO: 42024 - RNA, 19 nt, Artificial Sequence
  Description of Artificial Sequence: Synthetic oligonucleotide
  Sense strand starting at position 1060 of SEQ ID NO: 501
uguccaaauuaugggauuu

SEQ ID NO: 42025 - RNA, 19 nt, Artificial Sequence
  Description of Artificial Sequence: Synthetic oligonucleotide
  Antisense strand to SEQ ID NO: 42024
aaaucccauaauuuggaca

SEQ ID NO: 42026 - RNA, 19 nt, Artificial Sequence
  Description of Artificial Sequence: Synthetic oligonucleotide
  Sense strand starting at position 1383 of SEQ ID NO: 501
agcugaggucuuugagauc

SEQ ID NO: 42027 - RNA, 19 nt, Artificial Sequence
  Description of Artificial Sequence: Synthetic oligonucleotide
  Antisense strand to SEQ ID NO: 42026
gaucucaaagaccucagcu

SEQ ID NO: 42028 - RNA, 19 nt, Artificial Sequence
  Description of Artificial Sequence: Synthetic oligonucleotide
  Sense strand starting at position 1521 of SEQ ID NO: 501
ggcgcuuugagcuacaaac

SEQ ID NO: 42029 - RNA, 19 nt, Artificial Sequence
  Description of Artificial Sequence: Synthetic oligonucleotide
  Antisense strand to SEQ ID NO: 42028
guuuguagcucaaagcgcc

SEQ ID NO: 42030 - RNA, 19 nt, Artificial Sequence
  Description of Artificial Sequence: Synthetic oligonucleotide
  Sense strand starting at position 1629 of SEQ ID NO: 501
cuuguugaggacuggagau

SEQ ID NO: 42031 - RNA, 19 nt, Artificial Sequence
  Description of Artificial Sequence: Synthetic oligonucleotide
  Antisense strand to SEQ ID NO: 42030
aucuccaguccucaacaag

SEQ ID NO: 42032 - RNA, 19 nt, Artificial Sequence
  Description of Artificial Sequence: Synthetic oligonucleotide
  Sense strand starting at position 1670 of SEQ ID NO: 501
cuggaugagucucuuccau

SEQ ID NO: 42033 - RNA, 19 nt, Artificial Sequence
  Description of Artificial Sequence: Synthetic oligonucleotide
  Antisense strand to SEQ ID NO: 42032
auggaagagacucauccag

SEQ ID NO: 42034 - RNA, 19 nt, Artificial Sequence
  Description of Artificial Sequence: Synthetic oligonucleotide
  Sense strand starting at position 1676 of SEQ ID NO: 501
gagucucuuccaugcauug

SEQ ID NO: 42035 - RNA, 19 nt, Artificial Sequence
  Description of Artificial Sequence: Synthetic oligonucleotide
  Antisense strand to SEQ ID NO: 42034
caaugcauggaagagacuc

SEQ ID NO: 42036 - RNA, 19 nt, Artificial Sequence
  Description of Artificial Sequence: Synthetic oligonucleotide
  Sense strand starting at position 2017 of SEQ ID NO: 501
uagccaugcccagaguaaa

SEQ ID NO: 42037 - RNA, 19 nt, Artificial Sequence
  Description of Artificial Sequence: Synthetic oligonucleotide
  Antisense strand to SEQ ID NO: 42036
uuuacucugggcauggcua

SEQ ID NO: 42038 - RNA, 19 nt, Artificial Sequence
  Description of Artificial Sequence: Synthetic oligonucleotide
  Sense strand starting at position 2031 of SEQ ID NO: 501
guaaauacggcauguggaa

SEQ ID NO: 42039 - RNA, 19 nt, Artificial Sequence
  Description of Artificial Sequence: Synthetic oligonucleotide
  Antisense strand to SEQ ID NO: 42038
uuccacaugccguauuuac

SEQ ID NO: 42040 - RNA, 19 nt, Artificial Sequence
  Description of Artificial Sequence: Synthetic oligonucleotide
  Sense strand starting at position 2286 of SEQ ID NO: 501
ugacuugucauggguggca

SEQ ID NO: 42041 - RNA, 19 nt, Artificial Sequence
  Description of Artificial Sequence: Synthetic oligonucleotide
  Antisense strand to SEQ ID NO: 42040
ugccacccaugacaaguca

SEQ ID NO: 42042 - RNA, 19 nt, Artificial Sequence
  Description of Artificial Sequence: Synthetic oligonucleotide
  Sense strand starting at position 2590 of SEQ ID NO: 501
cccgcaugagucuacuaaa

SEQ ID NO: 42043 - RNA, 19 nt, Artificial Sequence
  Description of Artificial Sequence: Synthetic oligonucleotide
  Antisense strand to SEQ ID NO: 42042
uuuaguagacucaugcggg

SEQ ID NO: 42044 - RNA, 19 nt, Artificial Sequence
  Description of Artificial Sequence: Synthetic oligonucleotide
  Sense strand starting at position 2826 of SEQ ID NO: 501
gcuagucauauuggaguag

SEQ ID NO: 42045 - RNA, 19 nt, Artificial Sequence
  Description of Artificial Sequence: Synthetic oligonucleotide
  Antisense strand to SEQ ID NO: 42044
cuacuccaauaugacuagc

SEQ ID NO: 42046 - RNA, 19 nt, Artificial Sequence
  Description of Artificial Sequence: Synthetic oligonucleotide
  Sense strand starting at position 2973 of SEQ ID NO: 501
aacagugcucagggacaau

SEQ ID NO: 42047 - RNA, 19 nt, Artificial Sequence
  Description of Artificial Sequence: Synthetic oligonucleotide
  Antisense strand to SEQ ID NO: 42046
auugucccugagcacuguu

SEQ ID NO: 42048 - RNA, 19 nt, Artificial Sequence
  Description of Artificial Sequence: Synthetic oligonucleotide
  Sense strand starting at position 2992 of SEQ ID NO: 501
aggaucuucuaucugucaa

SEQ ID NO: 42049 - RNA, 19 nt, Artificial Sequence
  Description of Artificial Sequence: Synthetic oligonucleotide
  Sense strand starting at position 3931 of SEQ ID NO: 1249
auuguaaguaggugaauuc

SEQ ID NO: 42050 - RNA, 19 nt, Artificial Sequence
  Description of Artificial Sequence: Synthetic oligonucleotide
  Antisense strand to SEQ ID NO: 42048
uugacagauagaagauccu

SEQ ID NO: 42051 - RNA, 19 nt, Artificial Sequence
  Description of Artificial Sequence: Synthetic oligonucleotide
  Sense strand starting at position 3000 of SEQ ID NO: 501
cuaucugucaagugggacu

SEQ ID NO: 42052 - RNA, 19 nt, Artificial Sequence
  Description of Artificial Sequence: Synthetic oligonucleotide
  Sense strand starting at position 3930 of SEQ ID NO: 1249
aauuguaaguaggugaauu

SEQ ID NO: 42053 - RNA, 19 nt, Artificial Sequence
  Description of Artificial Sequence: Synthetic oligonucleotide
  Antisense strand to SEQ ID NO: 42050
agucccacuugacagauag

SEQ ID NO: 42054 - RNA, 19 nt, Artificial Sequence
  Description of Artificial Sequence: Synthetic oligonucleotide
  Sense strand starting at position 3298 of SEQ ID NO: 501
accagcuaguguucuggaa

SEQ ID NO: 42055 - RNA, 19 nt, Artificial Sequence
  Description of Artificial Sequence: Synthetic oligonucleotide
  Sense strand starting at position 3770 of SEQ ID NO: 1249
gucagauuguaucucugga

SEQ ID NO: 42056 - RNA, 19 nt, Artificial Sequence
  Description of Artificial Sequence: Synthetic oligonucleotide
  Antisense strand to SEQ ID NO: 42052
uuccagaacacuagcuggu

SEQ ID NO: 42057 - RNA, 19 nt, Artificial Sequence
  Description of Artificial Sequence: Synthetic oligonucleotide
  Sense strand starting at position 3321 of SEQ ID NO: 501
ucuuaagugcuaugggauc

SEQ ID NO: 42058 - RNA, 19 nt, Artificial Sequence
  Description of Artificial Sequence: Synthetic oligonucleotide
  Sense strand starting at position 3761 of SEQ ID NO: 1249
guuuguggagucagauugu

SEQ ID NO: 42059 - RNA, 19 nt, Artificial Sequence
  Description of Artificial Sequence: Synthetic oligonucleotide
  Antisense strand to SEQ ID NO: 42054
gaucccauagcacuuaaga

SEQ ID NO: 42060 - RNA, 19 nt, Artificial Sequence
  Description of Artificial Sequence: Synthetic oligonucleotide
  Sense strand starting at position 3560 of SEQ ID NO: 501
ggcagcuugagucagaagu

SEQ ID NO: 42061 - RNA, 19 nt, Artificial Sequence
  Description of Artificial Sequence: Synthetic oligonucleotide
  Sense strand starting at position 3419 of SEQ ID NO: 1249
cuguuuaucucccuccuga

SEQ ID NO: 42062 - RNA, 19 nt, Artificial Sequence
  Description of Artificial Sequence: Synthetic oligonucleotide
  Antisense strand to SEQ ID NO: 42056
acuucugacucaagcugcc

SEQ ID NO: 42063 - RNA, 19 nt, Artificial Sequence
  Description of Artificial Sequence: Synthetic oligonucleotide
  Sense strand starting at position 3570 of SEQ ID NO: 501
gucagaaguggcuagaagu

SEQ ID NO: 42064 - RNA, 19 nt, Artificial Sequence
  Description of Artificial Sequence: Synthetic oligonucleotide
  Sense strand starting at position 3405 of SEQ ID NO: 1249
ccaaaugugcguuucuguu

SEQ ID NO: 42065 - RNA, 19 nt, Artificial Sequence
  Description of Artificial Sequence: Synthetic oligonucleotide
  Antisense strand to SEQ ID NO: 42058
acuucuagccacuucugac

SEQ ID NO: 42066 - RNA, 19 nt, Artificial Sequence
  Description of Artificial Sequence: Synthetic oligonucleotide
  Sense strand starting at position 3939 of SEQ ID NO: 501
ggugaucuguacucaguga

SEQ ID NO: 42067 - RNA, 19 nt, Artificial Sequence
  Description of Artificial Sequence: Synthetic oligonucleotide
  Sense strand starting at position 3404 of SEQ ID NO: 1249
accaaaugugcguuucugu

SEQ ID NO: 42068 - RNA, 19 nt, Artificial Sequence
  Description of Artificial Sequence: Synthetic oligonucleotide
  Antisense strand to SEQ ID NO: 42060
ucacugaguacagaucacc

SEQ ID NO: 42069 - RNA, 19 nt, Artificial Sequence
  Description of Artificial Sequence: Synthetic oligonucleotide
  Sense strand starting at position 3940 of SEQ ID NO: 501
gugaucuguacucagugau

SEQ ID NO: 42070 - RNA, 19 nt, Artificial Sequence
  Description of Artificial Sequence: Synthetic oligonucleotide
  Sense strand starting at position 3371 of SEQ ID NO: 1249
acuugauccuccucggaaa

SEQ ID NO: 42071 - RNA, 19 nt, Artificial Sequence
  Description of Artificial Sequence: Synthetic oligonucleotide
  Antisense strand to SEQ ID NO: 42062
aucacugaguacagaucac

SEQ ID NO: 42072 - RNA, 19 nt, Artificial Sequence
  Description of Artificial Sequence: Synthetic oligonucleotide
  Sense strand starting at position 3943 of SEQ ID NO: 501
aucuguacucagugaucuu

SEQ ID NO: 42073 - RNA, 19 nt, Artificial Sequence
  Description of Artificial Sequence: Synthetic oligonucleotide
  Sense strand starting at position 3331 of SEQ ID NO: 1249
acaccuugucuguaaagga

SEQ ID NO: 42074 - RNA, 19 nt, Artificial Sequence
  Description of Artificial Sequence: Synthetic oligonucleotide
  Antisense strand to SEQ ID NO: 42064
aagaucacugaguacagau

SEQ ID NO: 42075 - RNA, 19 nt, Artificial Sequence
  Description of Artificial Sequence: Synthetic oligonucleotide
  Sense strand starting at position 3946 of SEQ ID NO: 501
uguacucagugaucuuuga

SEQ ID NO: 42076 - RNA, 19 nt, Artificial Sequence
  Description of Artificial Sequence: Synthetic oligonucleotide
  Sense strand starting at position 3328 of SEQ ID NO: 1249
gucacaccuugucuguaaa

SEQ ID NO: 42077 - RNA, 19 nt, Artificial Sequence
  Description of Artificial Sequence: Synthetic oligonucleotide
  Antisense strand to SEQ ID NO: 42066
ucaaagaucacugaguaca

SEQ ID NO: 42078 - RNA, 19 nt, Artificial Sequence
  Description of Artificial Sequence: Synthetic oligonucleotide
  Sense strand starting at position 74 of SEQ ID NO: 502
agaggaugauuugaagcau

SEQ ID NO: 42079 - RNA, 19 nt, Artificial Sequence
  Description of Artificial Sequence: Synthetic oligonucleotide
  Sense strand starting at position 3327 of SEQ ID NO: 1249
ggucacaccuugucuguaa

SEQ ID NO: 42080 - RNA, 19 nt, Artificial Sequence
  Description of Artificial Sequence: Synthetic oligonucleotide
  Antisense strand to SEQ ID NO: 42068
augcuucaaaucauccucu

SEQ ID NO: 42081 - RNA, 19 nt, Artificial Sequence
  Description of Artificial Sequence: Synthetic oligonucleotide
  Sense strand starting at position 106 of SEQ ID NO: 502
guauguuaacaugaguuag

SEQ ID NO: 42082 - RNA, 19 nt, Artificial Sequence
  Description of Artificial Sequence: Synthetic oligonucleotide
  Sense strand starting at position 3277 of SEQ ID NO: 1249
acacuuaucuguccuguuu

SEQ ID NO: 42083 - RNA, 19 nt, Artificial Sequence
  Description of Artificial Sequence: Synthetic oligonucleotide
  Antisense strand to SEQ ID NO: 42070
cuaacucauguuaacauac

SEQ ID NO: 42084 - RNA, 19 nt, Artificial Sequence
  Description of Artificial Sequence: Synthetic oligonucleotide
  Sense strand starting at position 135 of SEQ ID NO: 502
cugauuugcuuggaauaaa

SEQ ID NO: 42085 - RNA, 19 nt, Artificial Sequence
  Description of Artificial Sequence: Synthetic oligonucleotide
  Sense strand starting at position 3263 of SEQ ID NO: 1249
cuuuauuggccugaacacu

SEQ ID NO: 42086 - RNA, 19 nt, Artificial Sequence
  Description of Artificial Sequence: Synthetic oligonucleotide
  Antisense strand to SEQ ID NO: 42072
uuuauuccaagcaaaucag

SEQ ID NO: 42087 - RNA, 19 nt, Artificial Sequence
  Description of Artificial Sequence: Synthetic oligonucleotide
  Sense strand starting at position 298 of SEQ ID NO: 502
ccaguaucuccucagggua

SEQ ID NO: 42088 - RNA, 19 nt, Artificial Sequence
  Description of Artificial Sequence: Synthetic oligonucleotide
  Sense strand starting at position 3262 of SEQ ID NO: 1249
ucuuuauuggccugaacac

SEQ ID NO: 42089 - RNA, 19 nt, Artificial Sequence
  Description of Artificial Sequence: Synthetic oligonucleotide
  Antisense strand to SEQ ID NO: 42074
uacccugaggagauacugg

SEQ ID NO: 42090 - RNA, 19 nt, Artificial Sequence
  Description of Artificial Sequence: Synthetic oligonucleotide
  Sense strand starting at position 522 of SEQ ID NO: 502
uuccaaggacuuugaucua

SEQ ID NO: 42091 - RNA, 19 nt, Artificial Sequence
  Description of Artificial Sequence: Synthetic oligonucleotide
  Sense strand starting at position 3260 of SEQ ID NO: 1249
ugucuuuauuggccugaac

SEQ ID NO: 42092 - RNA, 19 nt, Artificial Sequence
  Description of Artificial Sequence: Synthetic oligonucleotide
  Antisense strand to SEQ ID NO: 42076
uagaucaaaguccuuggaa

SEQ ID NO: 42093 - RNA, 19 nt, Artificial Sequence
  Description of Artificial Sequence: Synthetic oligonucleotide
  Sense strand starting at position 773 of SEQ ID NO: 502
gacaaauagcaagguggua

SEQ ID NO: 42094 - RNA, 19 nt, Artificial Sequence
  Description of Artificial Sequence: Synthetic oligonucleotide
  Sense strand starting at position 3259 of SEQ ID NO: 1249
cugucuuuauuggccugaa

SEQ ID NO: 42095 - RNA, 19 nt, Artificial Sequence
  Description of Artificial Sequence: Synthetic oligonucleotide
  Antisense strand to SEQ ID NO: 42078
uaccaccuugcuauuuguc

SEQ ID NO: 42096 - RNA, 19 nt, Artificial Sequence
  Description of Artificial Sequence: Synthetic oligonucleotide
  Sense strand starting at position 886 of SEQ ID NO: 502
gguacuuucccagaucuug

SEQ ID NO: 42097 - RNA, 19 nt, Artificial Sequence
  Description of Artificial Sequence: Synthetic oligonucleotide
  Sense strand starting at position 3249 of SEQ ID NO: 1249
cagggaggcucugucuuua

SEQ ID NO: 42098 - RNA, 19 nt, Artificial Sequence
  Description of Artificial Sequence: Synthetic oligonucleotide
  Antisense strand to SEQ ID NO: 42080
caagaucugggaaaguacc

SEQ ID NO: 42099 - RNA, 19 nt, Artificial Sequence
  Description of Artificial Sequence: Synthetic oligonucleotide
  Sense strand starting at position 1020 of SEQ ID NO: 502
aggaaacugcccuaaucuu

SEQ ID NO: 42100 - RNA, 19 nt, Artificial Sequence
  Description of Artificial Sequence: Synthetic oligonucleotide
  Sense strand starting at position 3176 of SEQ ID NO: 1249
gcgggaguucgccaagaga

SEQ ID NO: 42101 - RNA, 19 nt, Artificial Sequence
  Description of Artificial Sequence: Synthetic oligonucleotide
  Antisense strand to SEQ ID NO: 42082
aagauuagggcaguuuccu

SEQ ID NO: 42102 - RNA, 19 nt, Artificial Sequence
  Description of Artificial Sequence: Synthetic oligonucleotide
  Sense strand starting at position 1122 of SEQ ID NO: 502
agauccaagguuuguuaga

SEQ ID NO: 42103 - RNA, 19 nt, Artificial Sequence
  Description of Artificial Sequence: Synthetic oligonucleotide
  Sense strand starting at position 3123 of SEQ ID NO: 1249
uugcaagacucagccagaa

SEQ ID NO: 42104 - RNA, 19 nt, Artificial Sequence
  Description of Artificial Sequence: Synthetic oligonucleotide
  Antisense strand to SEQ ID NO: 42084
ucuaacaaaccuuggaucu

SEQ ID NO: 42105 - RNA, 19 nt, Artificial Sequence
  Description of Artificial Sequence: Synthetic oligonucleotide
  Sense strand starting at position 1123 of SEQ ID NO: 502
gauccaagguuuguuagaa

SEQ ID NO: 42106 - RNA, 19 nt, Artificial Sequence
  Description of Artificial Sequence: Synthetic oligonucleotide
  Sense strand starting at position 3112 of SEQ ID NO: 1249
aggaguguacauugcaaga

SEQ ID NO: 42107 - RNA, 19 nt, Artificial Sequence
  Description of Artificial Sequence: Synthetic oligonucleotide
  Antisense strand to SEQ ID NO: 42086
uucuaacaaaccuuggauc

SEQ ID NO: 42108 - RNA, 19 nt, Artificial Sequence
  Description of Artificial Sequence: Synthetic oligonucleotide
  Sense strand starting at position 1124 of SEQ ID NO: 502
auccaagguuuguuagaag

SEQ ID NO: 42109 - RNA, 19 nt, Artificial Sequence
  Description of Artificial Sequence: Synthetic oligonucleotide
  Sense strand starting at position 3065 of SEQ ID NO: 1249
caaggagagucuguguuau

SEQ ID NO: 42110 - RNA, 19 nt, Artificial Sequence
  Description of Artificial Sequence: Synthetic oligonucleotide
  Antisense strand to SEQ ID NO: 42088
cuucuaacaaaccuuggau

SEQ ID NO: 42111 - RNA, 19 nt, Artificial Sequence
  Description of Artificial Sequence: Synthetic oligonucleotide
  Sense strand starting at position 1159 of SEQ ID NO: 502
agcaauguucuaugaugau

SEQ ID NO: 42112 - RNA, 19 nt, Artificial Sequence
  Description of Artificial Sequence: Synthetic oligonucleotide
  Sense strand starting at position 2936 of SEQ ID NO: 1249
uauuaaggaugggagaaua

SEQ ID NO: 42113 - RNA, 19 nt, Artificial Sequence
  Description of Artificial Sequence: Synthetic oligonucleotide
  Antisense strand to SEQ ID NO: 42090
aucaucauagaacauugcu

SEQ ID NO: 42114 - RNA, 19 nt, Artificial Sequence
  Description of Artificial Sequence: Synthetic oligonucleotide
  Sense strand starting at position 1195 of SEQ ID NO: 502
auaaguuuacucuaguuag

SEQ ID NO: 42115 - RNA, 19 nt, Artificial Sequence
  Description of Artificial Sequence: Synthetic oligonucleotide
  Sense strand starting at position 2913 of SEQ ID NO: 1249
agcagacaucaagggugau

SEQ ID NO: 42116 - RNA, 19 nt, Artificial Sequence
  Description of Artificial Sequence: Synthetic oligonucleotide
  Antisense strand to SEQ ID NO: 42092
cuaacuagaguaaacuuau

SEQ ID NO: 42117 - RNA, 19 nt, Artificial Sequence
  Description of Artificial Sequence: Synthetic oligonucleotide
  Sense strand starting at position 1377 of SEQ ID NO: 502
uguuaagggcuuugagaug

SEQ ID NO: 42118 - RNA, 19 nt, Artificial Sequence
  Description of Artificial Sequence: Synthetic oligonucleotide
  Sense strand starting at position 2825 of SEQ ID NO: 1249
uguagaggauucuugauaa

SEQ ID NO: 42119 - RNA, 19 nt, Artificial Sequence
  Description of Artificial Sequence: Synthetic oligonucleotide
  Antisense strand to SEQ ID NO: 42094
caucucaaagcccuuaaca

SEQ ID NO: 42120 - RNA, 19 nt, Artificial Sequence
  Description of Artificial Sequence: Synthetic oligonucleotide
  Sense strand starting at position 1382 of SEQ ID NO: 502
agggcuuugagaugucuca

SEQ ID NO: 42121 - RNA, 19 nt, Artificial Sequence
  Description of Artificial Sequence: Synthetic oligonucleotide
  Sense strand starting at position 2731 of SEQ ID NO: 1249
ucuguauuacagcaaagac

SEQ ID NO: 42122 - RNA, 19 nt, Artificial Sequence
  Description of Artificial Sequence: Synthetic oligonucleotide
  Antisense strand to SEQ ID NO: 42096
ugagacaucucaaagcccu

SEQ ID NO: 42123 - RNA, 19 nt, Artificial Sequence
  Description of Artificial Sequence: Synthetic oligonucleotide
  Sense strand starting at position 1389 of SEQ ID NO: 502
ugagaugucucagugaaca

SEQ ID NO: 42124 - RNA, 19 nt, Artificial Sequence
  Description of Artificial Sequence: Synthetic oligonucleotide
  Sense strand starting at position 2723 of SEQ ID NO: 1249
ggcucaacucuguauuaca

SEQ ID NO: 42125 - RNA, 19 nt, Artificial Sequence
  Description of Artificial Sequence: Synthetic oligonucleotide
  Antisense strand to SEQ ID NO: 42098
uguucacugagacaucuca

SEQ ID NO: 42126 - RNA, 19 nt, Artificial Sequence
  Description of Artificial Sequence: Synthetic oligonucleotide
  Sense strand starting at position 1474 of SEQ ID NO: 502
auccuuguuggccaaagua

SEQ ID NO: 42127 - RNA, 19 nt, Artificial Sequence
  Description of Artificial Sequence: Synthetic oligonucleotide
  Sense strand starting at position 2522 of SEQ ID NO: 1249
agucacuugucacuuccaa

SEQ ID NO: 42128 - RNA, 19 nt, Artificial Sequence
  Description of Artificial Sequence: Synthetic oligonucleotide
  Antisense strand to SEQ ID NO: 42100
uacuuuggccaacaaggau

SEQ ID NO: 42129 - RNA, 19 nt, Artificial Sequence
  Description of Artificial Sequence: Synthetic oligonucleotide
  Sense strand starting at position 1680 of SEQ ID NO: 502
aguuuauugugauccucaa

SEQ ID NO: 42130 - RNA, 19 nt, Artificial Sequence
  Description of Artificial Sequence: Synthetic oligonucleotide
  Sense strand starting at position 2488 of SEQ ID NO: 1249
gggaaagucacuugguccu

SEQ ID NO: 42131 - RNA, 19 nt, Artificial Sequence
  Description of Artificial Sequence: Synthetic oligonucleotide
  Antisense strand to SEQ ID NO: 42102
uugaggaucacaauaaacu

SEQ ID NO: 42132 - RNA, 19 nt, Artificial Sequence
  Description of Artificial Sequence: Synthetic oligonucleotide
  Sense strand starting at position 1766 of SEQ ID NO: 502
acguuaccugcugauggaa

SEQ ID NO: 42133 - RNA, 19 nt, Artificial Sequence
  Description of Artificial Sequence: Synthetic oligonucleotide
  Sense strand starting at position 2142 of SEQ ID NO: 1249
gcagccucuccugggaaua

SEQ ID NO: 42134 - RNA, 19 nt, Artificial Sequence
  Description of Artificial Sequence: Synthetic oligonucleotide
  Antisense strand to SEQ ID NO: 42104
uuccaucagcagguaacgu

SEQ ID NO: 42135 - RNA, 19 nt, Artificial Sequence
  Description of Artificial Sequence: Synthetic oligonucleotide
  Sense strand starting at position 1799 of SEQ ID NO: 502
uucguuucggcagcaaagu

SEQ ID NO: 42136 - RNA, 19 nt, Artificial Sequence
  Description of Artificial Sequence: Synthetic oligonucleotide
  Sense strand starting at position 1358 of SEQ ID NO: 1249
uucuuuguaauaggaggaa

SEQ ID NO: 42137 - RNA, 19 nt, Artificial Sequence
  Description of Artificial Sequence: Synthetic oligonucleotide
  Antisense strand to SEQ ID NO: 42106
acuuugcugccgaaacgaa

SEQ ID NO: 42138 - RNA, 19 nt, Artificial Sequence
  Description of Artificial Sequence: Synthetic oligonucleotide
  Sense strand starting at position 1836 of SEQ ID NO: 502
gugcuagauuuauuccauc

SEQ ID NO: 42139 - RNA, 19 nt, Artificial Sequence
  Description of Artificial Sequence: Synthetic oligonucleotide
  Sense strand starting at position 1352 of SEQ ID NO: 1249
cccaguuucuuuguaauag

SEQ ID NO: 42140 - RNA, 19 nt, Artificial Sequence
  Description of Artificial Sequence: Synthetic oligonucleotide
  Antisense strand to SEQ ID NO: 42108
gauggaauaaaucuagcac

SEQ ID NO: 42141 - RNA, 19 nt, Artificial Sequence
  Description of Artificial Sequence: Synthetic oligonucleotide
  Sense strand starting at position 1863 of SEQ ID NO: 502
ggaagucagcuccagugau

SEQ ID NO: 42142 - RNA, 19 nt, Artificial Sequence
  Description of Artificial Sequence: Synthetic oligonucleotide
  Sense strand starting at position 1349 of SEQ ID NO: 1249
acucccaguuucuuuguaa

SEQ ID NO: 42143 - RNA, 19 nt, Artificial Sequence
  Description of Artificial Sequence: Synthetic oligonucleotide
  Antisense strand to SEQ ID NO: 42110
aucacuggagcugacuucc

SEQ ID NO: 42144 - RNA, 19 nt, Artificial Sequence
  Description of Artificial Sequence: Synthetic oligonucleotide
  Sense strand starting at position 1963 of SEQ ID NO: 502
guggauuugcaguguuucu

SEQ ID NO: 42145 - RNA, 19 nt, Artificial Sequence
  Description of Artificial Sequence: Synthetic oligonucleotide
  Sense strand starting at position 1158 of SEQ ID NO: 1249
aaguuugcucacuggcaga

SEQ ID NO: 42146 - RNA, 19 nt, Artificial Sequence
  Description of Artificial Sequence: Synthetic oligonucleotide
  Antisense strand to SEQ ID NO: 42112
agaaacacugcaaauccac

SEQ ID NO: 42147 - RNA, 19 nt, Artificial Sequence
  Description of Artificial Sequence: Synthetic oligonucleotide
  Sense strand starting at position 2272 of SEQ ID NO: 502
ggaugcgguaaugaacaua

SEQ ID NO: 42148 - RNA, 19 nt, Artificial Sequence
  Description of Artificial Sequence: Synthetic oligonucleotide
  Sense strand starting at position 1145 of SEQ ID NO: 1249
aauggagauuaagaaguuu

SEQ ID NO: 42149 - RNA, 19 nt, Artificial Sequence
  Description of Artificial Sequence: Synthetic oligonucleotide
  Antisense strand to SEQ ID NO: 42114
uauguucauuaccgcaucc

SEQ ID NO: 42150 - RNA, 19 nt, Artificial Sequence
  Description of Artificial Sequence: Synthetic oligonucleotide
  Sense strand starting at position 2319 of SEQ ID NO: 502
agccauaggcuccagaauu

SEQ ID NO: 42151 - RNA, 19 nt, Artificial Sequence
  Description of Artificial Sequence: Synthetic oligonucleotide
  Sense strand starting at position 987 of SEQ ID NO: 1249
gaagguauucguugaacug

SEQ ID NO: 42152 - RNA, 19 nt, Artificial Sequence
  Description of Artificial Sequence: Synthetic oligonucleotide
  Antisense strand to SEQ ID NO: 42116
aauucuggagccuauggcu

SEQ ID NO: 42153 - RNA, 19 nt, Artificial Sequence
  Description of Artificial Sequence: Synthetic oligonucleotide
  Sense strand starting at position 2373 of SEQ ID NO: 502
ucauuacuuccaggcagaa

SEQ ID NO: 42154 - RNA, 19 nt, Artificial Sequence
  Description of Artificial Sequence: Synthetic oligonucleotide
  Sense strand starting at position 603 of SEQ ID NO: 1249
acaagagugcuugagagca

SEQ ID NO: 42155 - RNA, 19 nt, Artificial Sequence
  Description of Artificial Sequence: Synthetic oligonucleotide
  Antisense strand to SEQ ID NO: 42118
uucugccuggaaguaauga

SEQ ID NO: 42156 - RNA, 19 nt, Artificial Sequence
  Description of Artificial Sequence: Synthetic oligonucleotide
  Sense strand starting at position 2518 of SEQ ID NO: 502
guaaguucugauggacuca

SEQ ID NO: 42157 - RNA, 19 nt, Artificial Sequence
  Description of Artificial Sequence: Synthetic oligonucleotide
  Sense strand starting at position 601 of SEQ ID NO: 1249
ccacaagagugcuugagag

SEQ ID NO: 42158 - RNA, 19 nt, Artificial Sequence
  Description of Artificial Sequence: Synthetic oligonucleotide
  Antisense strand to SEQ ID NO: 42120
ugaguccaucagaacuuac

SEQ ID NO: 42159 - RNA, 19 nt, Artificial Sequence
  Description of Artificial Sequence: Synthetic oligonucleotide
  Sense strand starting at position 2569 of SEQ ID NO: 502
ugggaugcccgauaaacau

SEQ ID NO: 42160 - RNA, 19 nt, Artificial Sequence
  Description of Artificial Sequence: Synthetic oligonucleotide
  Sense strand starting at position 218 of SEQ ID NO: 1249
ggcuuccuuccugaagcaa

SEQ ID NO: 42161 - RNA, 19 nt, Artificial Sequence
  Description of Artificial Sequence: Synthetic oligonucleotide
  Antisense strand to SEQ ID NO: 42122
auguuuaucgggcauccca

SEQ ID NO: 42162 - RNA, 19 nt, Artificial Sequence
  Description of Artificial Sequence: Synthetic oligonucleotide
  Sense strand starting at position 2578 of SEQ ID NO: 502
cgauaaacaucaucugucu

SEQ ID NO: 42163 - RNA, 19 nt, Artificial Sequence
  Description of Artificial Sequence: Synthetic oligonucleotide
  Sense strand starting at position 199 of SEQ ID NO: 1249
uggaauauuuaggauucuu

SEQ ID NO: 42164 - RNA, 19 nt, Artificial Sequence
  Description of Artificial Sequence: Synthetic oligonucleotide
  Antisense strand to SEQ ID NO: 42124
agacagaugauguuuaucg

SEQ ID NO: 42165 - RNA, 19 nt, Artificial Sequence
  Description of Artificial Sequence: Synthetic oligonucleotide
  Sense strand starting at position 2617 of SEQ ID NO: 502
ggacaagucacaugagcuu

SEQ ID NO: 42166 - RNA, 19 nt, Artificial Sequence
  Description of Artificial Sequence: Synthetic oligonucleotide
  Sense strand starting at position 198 of SEQ ID NO: 1249
auggaauauuuaggauucu

SEQ ID NO: 42167 - RNA, 19 nt, Artificial Sequence
  Description of Artificial Sequence: Synthetic oligonucleotide
  Antisense strand to SEQ ID NO: 42126
aagcucaugugacuugucc

SEQ ID NO: 42168 - RNA, 19 nt, Artificial Sequence
  Description of Artificial Sequence: Synthetic oligonucleotide
  Sense strand starting at position 2626 of SEQ ID NO: 502
acaugagcuucuccaaaug

SEQ ID NO: 42169 - RNA, 19 nt, Artificial Sequence
  Description of Artificial Sequence: Synthetic oligonucleotide
  Sense strand starting at position 3820 of SEQ ID NO: 1250
gggcuuggagauggguaaa

SEQ ID NO: 42170 - RNA, 19 nt, Artificial Sequence
  Description of Artificial Sequence: Synthetic oligonucleotide
  Antisense strand to SEQ ID NO: 42128
cauuuggagaagcucaugu

SEQ ID NO: 42171 - RNA, 19 nt, Artificial Sequence
  Description of Artificial Sequence: Synthetic oligonucleotide
  Sense strand starting at position 2675 of SEQ ID NO: 502
auaagaaucuagcugauuc

SEQ ID NO: 42172 - RNA, 19 nt, Artificial Sequence
  Description of Artificial Sequence: Synthetic oligonucleotide
  Sense strand starting at position 3795 of SEQ ID NO: 1250
ggagcugagacuugaacau

SEQ ID NO: 42173 - RNA, 19 nt, Artificial Sequence
  Description of Artificial Sequence: Synthetic oligonucleotide
  Antisense strand to SEQ ID NO: 42130
gaaucagcuagauucuuau

SEQ ID NO: 42174 - RNA, 19 nt, Artificial Sequence
  Description of Artificial Sequence: Synthetic oligonucleotide
  Sense strand starting at position 2791 of SEQ ID NO: 502
guaauagacucaguuucua

SEQ ID NO: 42175 - RNA, 19 nt, Artificial Sequence
  Description of Artificial Sequence: Synthetic oligonucleotide
  Sense strand starting at position 3681 of SEQ ID NO: 1250
ccugcaagucuagaggaua

SEQ ID NO: 42176 - RNA, 19 nt, Artificial Sequence
  Description of Artificial Sequence: Synthetic oligonucleotide
  Antisense strand to SEQ ID NO: 42132
uagaaacugagucuauuac

SEQ ID NO: 42177 - RNA, 19 nt, Artificial Sequence
  Description of Artificial Sequence: Synthetic oligonucleotide
  Sense strand starting at position 2843 of SEQ ID NO: 502
ggcuuaugccucuggauuu

SEQ ID NO: 42178 - RNA, 19 nt, Artificial Sequence
  Description of Artificial Sequence: Synthetic oligonucleotide
  Sense strand starting at position 3528 of SEQ ID NO: 1250
gcaaaugucuuauugauua

SEQ ID NO: 42179 - RNA, 19 nt, Artificial Sequence
  Description of Artificial Sequence: Synthetic oligonucleotide
  Antisense strand to SEQ ID NO: 42134
aaauccagaggcauaagcc

SEQ ID NO: 42180 - RNA, 19 nt, Artificial Sequence
  Description of Artificial Sequence: Synthetic oligonucleotide
  Sense strand starting at position 3427 of SEQ ID NO: 502
gcugauguuacucagaaug

SEQ ID NO: 42181 - RNA, 19 nt, Artificial Sequence
  Description of Artificial Sequence: Synthetic oligonucleotide
  Sense strand starting at position 3383 of SEQ ID NO: 1250
augugauguguguacacuu

SEQ ID NO: 42182 - RNA, 19 nt, Artificial Sequence
  Description of Artificial Sequence: Synthetic oligonucleotide
  Antisense strand to SEQ ID NO: 42136
cauucugaguaacaucagc

SEQ ID NO: 42183 - RNA, 19 nt, Artificial Sequence
  Description of Artificial Sequence: Synthetic oligonucleotide
  Sense strand starting at position 3549 of SEQ ID NO: 502
augucuggagcuuaaacua

SEQ ID NO: 42184 - RNA, 19 nt, Artificial Sequence
  Description of Artificial Sequence: Synthetic oligonucleotide
  Sense strand starting at position 3076 of SEQ ID NO: 1250
ggcacaguucuaggaaagu

SEQ ID NO: 42185 - RNA, 19 nt, Artificial Sequence
  Description of Artificial Sequence: Synthetic oligonucleotide
  Antisense strand to SEQ ID NO: 42138
uaguuuaagcuccagacau

SEQ ID NO: 42186 - RNA, 19 nt, Artificial Sequence
  Description of Artificial Sequence: Synthetic oligonucleotide
  Sense strand starting at position 3564 of SEQ ID NO: 502
acuauagauuccucugguu

SEQ ID NO: 42187 - RNA, 19 nt, Artificial Sequence
  Description of Artificial Sequence: Synthetic oligonucleotide
  Sense strand starting at position 2972 of SEQ ID NO: 1250
aagcuauuggguuaacagu

SEQ ID NO: 42188 - RNA, 19 nt, Artificial Sequence
  Description of Artificial Sequence: Synthetic oligonucleotide
  Antisense strand to SEQ ID NO: 42140
aaccagaggaaucuauagu

SEQ ID NO: 42189 - RNA, 19 nt, Artificial Sequence
  Description of Artificial Sequence: Synthetic oligonucleotide
  Sense strand starting at position 3594 of SEQ ID NO: 502
uuguuuaugaacuggaaag

SEQ ID NO: 42190 - RNA, 19 nt, Artificial Sequence
  Description of Artificial Sequence: Synthetic oligonucleotide
  Sense strand starting at position 2887 of SEQ ID NO: 1250
uacuguaaguaguuacuga

SEQ ID NO: 42191 - RNA, 19 nt, Artificial Sequence
  Description of Artificial Sequence: Synthetic oligonucleotide
  Antisense strand to SEQ ID NO: 42142
cuuuccaguucauaaacaa

SEQ ID NO: 42192 - RNA, 19 nt, Artificial Sequence
  Description of Artificial Sequence: Synthetic oligonucleotide
  Sense strand starting at position 3615 of SEQ ID NO: 502
augauaaagccgcaaucaa

SEQ ID NO: 42193 - RNA, 19 nt, Artificial Sequence
  Description of Artificial Sequence: Synthetic oligonucleotide
  Sense strand starting at position 2848 of SEQ ID NO: 1250
uucugcuaugcacaaauga

SEQ ID NO: 42194 - RNA, 19 nt, Artificial Sequence
  Description of Artificial Sequence: Synthetic oligonucleotide
  Antisense strand to SEQ ID NO: 42144
uugauugcggcuuuaucau

SEQ ID NO: 42195 - RNA, 19 nt, Artificial Sequence
  Description of Artificial Sequence: Synthetic oligonucleotide
  Sense strand starting at position 3968 of SEQ ID NO: 502
auauguauacuguaagugu

SEQ ID NO: 42196 - RNA, 19 nt, Artificial Sequence
  Description of Artificial Sequence: Synthetic oligonucleotide
  Sense strand starting at position 2619 of SEQ ID NO: 1250
ucagaagugucuuucucaa

SEQ ID NO: 42197 - RNA, 19 nt, Artificial Sequence
  Description of Artificial Sequence: Synthetic oligonucleotide
  Antisense strand to SEQ ID NO: 42146
acacuuacaguauacauau

SEQ ID NO: 42198 - RNA, 19 nt, Artificial Sequence
  Description of Artificial Sequence: Synthetic oligonucleotide
  Sense strand starting at position 149 of SEQ ID NO: 503
cuacauaucugcuuguuua

SEQ ID NO: 42199 - RNA, 19 nt, Artificial Sequence
  Description of Artificial Sequence: Synthetic oligonucleotide
  Sense strand starting at position 2601 of SEQ ID NO: 1250
auauguaucgccuacaccu

SEQ ID NO: 42200 - RNA, 19 nt, Artificial Sequence
  Description of Artificial Sequence: Synthetic oligonucleotide
  Antisense strand to SEQ ID NO: 42148
uaaacaagcagauauguag

SEQ ID NO: 42201 - RNA, 19 nt, Artificial Sequence
  Description of Artificial Sequence: Synthetic oligonucleotide
  Sense strand starting at position 226 of SEQ ID NO: 503
ugauuccugcuguauggua

SEQ ID NO: 42202 - RNA, 19 nt, Artificial Sequence
  Description of Artificial Sequence: Synthetic oligonucleotide
  Sense strand starting at position 2588 of SEQ ID NO: 1250
ugcuuugagauguauaugu

SEQ ID NO: 42203 - RNA, 19 nt, Artificial Sequence
  Description of Artificial Sequence: Synthetic oligonucleotide
  Antisense strand to SEQ ID NO: 42150
uaccauacagcaggaauca

SEQ ID NO: 42204 - RNA, 19 nt, Artificial Sequence
  Description of Artificial Sequence: Synthetic oligonucleotide
  Sense strand starting at position 687 of SEQ ID NO: 503
cuuguauuguuugccauag

SEQ ID NO: 42205 - RNA, 19 nt, Artificial Sequence
  Description of Artificial Sequence: Synthetic oligonucleotide
  Sense strand starting at position 2451 of SEQ ID NO: 1250
augucuucccgagaaagcu

SEQ ID NO: 42206 - RNA, 19 nt, Artificial Sequence
  Description of Artificial Sequence: Synthetic oligonucleotide
  Antisense strand to SEQ ID NO: 42152
cuauggcaaacaauacaag

SEQ ID NO: 42207 - RNA, 19 nt, Artificial Sequence
  Description of Artificial Sequence: Synthetic oligonucleotide
  Sense strand starting at position 691 of SEQ ID NO: 503
uauuguuugccauagguuu

SEQ ID NO: 42208 - RNA, 19 nt, Artificial Sequence
  Description of Artificial Sequence: Synthetic oligonucleotide
  Sense strand starting at position 2386 of SEQ ID NO: 1250
ggcuuauaggagcaugacu

SEQ ID NO: 42209 - RNA, 19 nt, Artificial Sequence
  Description of Artificial Sequence: Synthetic oligonucleotide
  Antisense strand to SEQ ID NO: 42154
aaaccuauggcaaacaaua

SEQ ID NO: 42210 - RNA, 19 nt, Artificial Sequence
  Description of Artificial Sequence: Synthetic oligonucleotide
  Sense strand starting at position 715 of SEQ ID NO: 503
cagagaugccaguggugau

SEQ ID NO: 42211 - RNA, 19 nt, Artificial Sequence
  Description of Artificial Sequence: Synthetic oligonucleotide
  Sense strand starting at position 2320 of SEQ ID NO: 1250
gcaggacuuucugcacaca

SEQ ID NO: 42212 - RNA, 19 nt, Artificial Sequence
  Description of Artificial Sequence: Synthetic oligonucleotide
  Antisense strand to SEQ ID NO: 42156
aucaccacuggcaucucug

SEQ ID NO: 42213 - RNA, 19 nt, Artificial Sequence
  Description of Artificial Sequence: Synthetic oligonucleotide
  Sense strand starting at position 726 of SEQ ID NO: 503
guggugauccaggguagga

SEQ ID NO: 42214 - RNA, 19 nt, Artificial Sequence
  Description of Artificial Sequence: Synthetic oligonucleotide
  Sense strand starting at position 2311 of SEQ ID NO: 1250
gugagaacugcaggacuuu

SEQ ID NO: 42215 - RNA, 19 nt, Artificial Sequence
  Description of Artificial Sequence: Synthetic oligonucleotide
  Antisense strand to SEQ ID NO: 42158
uccuacccuggaucaccac

SEQ ID NO: 42216 - RNA, 19 nt, Artificial Sequence
  Description of Artificial Sequence: Synthetic oligonucleotide
  Sense strand starting at position 736 of SEQ ID NO: 503
aggguaggaucuuuaugca

SEQ ID NO: 42217 - RNA, 19 nt, Artificial Sequence
  Description of Artificial Sequence: Synthetic oligonucleotide
  Sense strand starting at position 2212 of SEQ ID NO: 1250
acgcuuagucgcucgacaa

SEQ ID NO: 42218 - RNA, 19 nt, Artificial Sequence
  Description of Artificial Sequence: Synthetic oligonucleotide
  Antisense strand to SEQ ID NO: 42160
ugcauaaagauccuacccu

SEQ ID NO: 42219 - RNA, 19 nt, Artificial Sequence
  Description of Artificial Sequence: Synthetic oligonucleotide
  Sense strand starting at position 828 of SEQ ID NO: 503
uaggaaguguugcuauuag

SEQ ID NO: 42220 - RNA, 19 nt, Artificial Sequence
  Description of Artificial Sequence: Synthetic oligonucleotide
  Sense strand starting at position 1426 of SEQ ID NO: 1250
guggcaaaccucuauaguc

SEQ ID NO: 42221 - RNA, 19 nt, Artificial Sequence
  Description of Artificial Sequence: Synthetic oligonucleotide
  Antisense strand to SEQ ID NO: 42162
cuaauagcaacacuuccua

SEQ ID NO: 42222 - RNA, 19 nt, Artificial Sequence
  Description of Artificial Sequence: Synthetic oligonucleotide
  Sense strand starting at position 851 of SEQ ID NO: 503
auauguugugaccacaugu

SEQ ID NO: 42223 - RNA, 19 nt, Artificial Sequence
  Description of Artificial Sequence: Synthetic oligonucleotide
  Sense strand starting at position 1375 of SEQ ID NO: 1250
ggccuucccagauaaacga

SEQ ID NO: 42224 - RNA, 19 nt, Artificial Sequence
  Description of Artificial Sequence: Synthetic oligonucleotide
  Antisense strand to SEQ ID NO: 42164
acauguggucacaacauau

SEQ ID NO: 42225 - RNA, 19 nt, Artificial Sequence
  Description of Artificial Sequence: Synthetic oligonucleotide
  Sense strand starting at position 907 of SEQ ID NO: 503
gggacagacuauuauaaac

SEQ ID NO: 42226 - RNA, 19 nt, Artificial Sequence
  Description of Artificial Sequence: Synthetic oligonucleotide
  Sense strand starting at position 1373 of SEQ ID NO: 1250
uuggccuucccagauaaac

SEQ ID NO: 42227 - RNA, 19 nt, Artificial Sequence
  Description of Artificial Sequence: Synthetic oligonucleotide
  Antisense strand to SEQ ID NO: 42166
guuuauaauagucuguccc

SEQ ID NO: 42228 - RNA, 19 nt, Artificial Sequence
  Description of Artificial Sequence: Synthetic oligonucleotide
  Sense strand starting at position 950 of SEQ ID NO: 503
gauauauagucacagggaa

SEQ ID NO: 42229 - RNA, 19 nt, Artificial Sequence
  Description of Artificial Sequence: Synthetic oligonucleotide
  Sense strand starting at position 1303 of SEQ ID NO: 1250
gaaucucucgucuagggaa

SEQ ID NO: 42230 - RNA, 19 nt, Artificial Sequence
  Description of Artificial Sequence: Synthetic oligonucleotide
  Antisense strand to SEQ ID NO: 42168
uucccugugacuauauauc

SEQ ID NO: 42231 - RNA, 19 nt, Artificial Sequence
  Description of Artificial Sequence: Synthetic oligonucleotide
  Sense strand starting at position 974 of SEQ ID NO: 503
gcagauuuaugucagaaau

SEQ ID NO: 42232 - RNA, 19 nt, Artificial Sequence
  Description of Artificial Sequence: Synthetic oligonucleotide
  Sense strand starting at position 1230 of SEQ ID NO: 1250
aggauagaaucacaaacuu

SEQ ID NO: 42233 - RNA, 19 nt, Artificial Sequence
  Description of Artificial Sequence: Synthetic oligonucleotide
  Antisense strand to SEQ ID NO: 42170
auuucugacauaaaucugc

SEQ ID NO: 42234 - RNA, 19 nt, Artificial Sequence
  Description of Artificial Sequence: Synthetic oligonucleotide
  Sense strand starting at position 1239 of SEQ ID NO: 503
cuguuuaaauauccacagu

SEQ ID NO: 42235 - RNA, 19 nt, Artificial Sequence
  Description of Artificial Sequence: Synthetic oligonucleotide
  Sense strand starting at position 1219 of SEQ ID NO: 1250
uuugguauacuaggauaga

SEQ ID NO: 42236 - RNA, 19 nt, Artificial Sequence
  Description of Artificial Sequence: Synthetic oligonucleotide
  Antisense strand to SEQ ID NO: 42172
acuguggauauuuaaacag

SEQ ID NO: 42237 - RNA, 19 nt, Artificial Sequence
  Description of Artificial Sequence: Synthetic oligonucleotide
  Sense strand starting at position 1300 of SEQ ID NO: 503
caucuuuagguagguaauu

SEQ ID NO: 42238 - RNA, 19 nt, Artificial Sequence
  Description of Artificial Sequence: Synthetic oligonucleotide
  Sense strand starting at position 1149 of SEQ ID NO: 1250
gccaauguccuugaacaac

SEQ ID NO: 42239 - RNA, 19 nt, Artificial Sequence
  Description of Artificial Sequence: Synthetic oligonucleotide
  Antisense strand to SEQ ID NO: 42174
aauuaccuaccuaaagaug

SEQ ID NO: 42240 - RNA, 19 nt, Artificial Sequence
  Description of Artificial Sequence: Synthetic oligonucleotide
  Sense strand starting at position 1564 of SEQ ID NO: 503
augcuuagaugcucaagca

SEQ ID NO: 42241 - RNA, 19 nt, Artificial Sequence
  Description of Artificial Sequence: Synthetic oligonucleotide
  Sense strand starting at position 1148 of SEQ ID NO: 1250
agccaauguccuugaacaa

SEQ ID NO: 42242 - RNA, 19 nt, Artificial Sequence
  Description of Artificial Sequence: Synthetic oligonucleotide
  Antisense strand to SEQ ID NO: 42176
ugcuugagcaucuaagcau

SEQ ID NO: 42243 - RNA, 19 nt, Artificial Sequence
  Description of Artificial Sequence: Synthetic oligonucleotide
  Sense strand starting at position 1683 of SEQ ID NO: 503
guuacaaacacagaguguu

SEQ ID NO: 42244 - RNA, 19 nt, Artificial Sequence
  Description of Artificial Sequence: Synthetic oligonucleotide
  Sense strand starting at position 1007 of SEQ ID NO: 1250
ggacacuauucccuuaaug

SEQ ID NO: 42245 - RNA, 19 nt, Artificial Sequence
  Description of Artificial Sequence: Synthetic oligonucleotide
  Antisense strand to SEQ ID NO: 42178
aacacucuguguuuguaac

SEQ ID NO: 42246 - RNA, 19 nt, Artificial Sequence
  Description of Artificial Sequence: Synthetic oligonucleotide
  Sense strand starting at position 1689 of SEQ ID NO: 503
aacacagaguguuugaaga

SEQ ID NO: 42247 - RNA, 19 nt, Artificial Sequence
  Description of Artificial Sequence: Synthetic oligonucleotide
  Sense strand starting at position 1006 of SEQ ID NO: 1250
gggacacuauucccuuaau

SEQ ID NO: 42248 - RNA, 19 nt, Artificial Sequence
  Description of Artificial Sequence: Synthetic oligonucleotide
  Antisense strand to SEQ ID NO: 42180
ucuucaaacacucuguguu

SEQ ID NO: 42249 - RNA, 19 nt, Artificial Sequence
  Description of Artificial Sequence: Synthetic oligonucleotide
  Sense strand starting at position 1730 of SEQ ID NO: 503
agaguacauacgugauaga

SEQ ID NO: 42250 - RNA, 19 nt, Artificial Sequence
  Description of Artificial Sequence: Synthetic oligonucleotide
  Sense strand starting at position 983 of SEQ ID NO: 1250
caacucugccuaugggaga

SEQ ID NO: 42251 - RNA, 19 nt, Artificial Sequence
  Description of Artificial Sequence: Synthetic oligonucleotide
  Antisense strand to SEQ ID NO: 42182
ucuaucacguauguacucu

SEQ ID NO: 42252 - RNA, 19 nt, Artificial Sequence
  Description of Artificial Sequence: Synthetic oligonucleotide
  Sense strand starting at position 1739 of SEQ ID NO: 503
acgugauagaaccagcagu

SEQ ID NO: 42253 - RNA, 19 nt, Artificial Sequence
  Description of Artificial Sequence: Synthetic oligonucleotide
  Sense strand starting at position 977 of SEQ ID NO: 1250
ugugaacaacucugccuau

SEQ ID NO: 42254 - RNA, 19 nt, Artificial Sequence
  Description of Artificial Sequence: Synthetic oligonucleotide
  Antisense strand to SEQ ID NO: 42184
acugcugguucuaucacgu

SEQ ID NO: 42255 - RNA, 19 nt, Artificial Sequence
  Description of Artificial Sequence: Synthetic oligonucleotide
  Sense strand starting at position 1766 of SEQ ID NO: 503
caguaagaguccuugaauu

SEQ ID NO: 42256 - RNA, 19 nt, Artificial Sequence
  Description of Artificial Sequence: Synthetic oligonucleotide
  Sense strand starting at position 932 of SEQ ID NO: 1250
augaaaugucuauguguca

SEQ ID NO: 42257 - RNA, 19 nt, Artificial Sequence
  Description of Artificial Sequence: Synthetic oligonucleotide
  Antisense strand to SEQ ID NO: 42186
aauucaaggacucuuacug

SEQ ID NO: 42258 - RNA, 19 nt, Artificial Sequence
  Description of Artificial Sequence: Synthetic oligonucleotide
  Sense strand starting at position 1935 of SEQ ID NO: 503
cuagucauuucccuauggu

SEQ ID NO: 42259 - RNA, 19 nt, Artificial Sequence
  Description of Artificial Sequence: Synthetic oligonucleotide
  Sense strand starting at position 930 of SEQ ID NO: 1250
guaugaaaugucuaugugu

SEQ ID NO: 42260 - RNA, 19 nt, Artificial Sequence
  Description of Artificial Sequence: Synthetic oligonucleotide
  Antisense strand to SEQ ID NO: 42188
accauagggaaaugacuag

SEQ ID NO: 42261 - RNA, 19 nt, Artificial Sequence
  Description of Artificial Sequence: Synthetic oligonucleotide
  Sense strand starting at position 1938 of SEQ ID NO: 503
gucauuucccuauggucuu

SEQ ID NO: 42262 - RNA, 19 nt, Artificial Sequence
  Description of Artificial Sequence: Synthetic oligonucleotide
  Sense strand starting at position 861 of SEQ ID NO: 1250
ugagcuacgaagugagauu

SEQ ID NO: 42263 - RNA, 19 nt, Artificial Sequence
  Description of Artificial Sequence: Synthetic oligonucleotide
  Antisense strand to SEQ ID NO: 42190
aagaccauagggaaaugac

SEQ ID NO: 42264 - RNA, 19 nt, Artificial Sequence
  Description of Artificial Sequence: Synthetic oligonucleotide
  Sense strand starting at position 2233 of SEQ ID NO: 503
ugauuaugccacuguguuu

SEQ ID NO: 42265 - RNA, 19 nt, Artificial Sequence
  Description of Artificial Sequence: Synthetic oligonucleotide
  Sense strand starting at position 577 of SEQ ID NO: 1250
ccaucucggccagauaaga

SEQ ID NO: 42266 - RNA, 19 nt, Artificial Sequence
  Description of Artificial Sequence: Synthetic oligonucleotide
  Antisense strand to SEQ ID NO: 42192
aaacacaguggcauaauca

SEQ ID NO: 42267 - RNA, 19 nt, Artificial Sequence
  Description of Artificial Sequence: Synthetic oligonucleotide
  Sense strand starting at position 2370 of SEQ ID NO: 503
aucccagcuccuuguauga

SEQ ID NO: 42268 - RNA, 19 nt, Artificial Sequence
  Description of Artificial Sequence: Synthetic oligonucleotide
  Sense strand starting at position 502 of SEQ ID NO: 1250
ggcucucugcuagaggaau

SEQ ID NO: 42269 - RNA, 19 nt, Artificial Sequence
  Description of Artificial Sequence: Synthetic oligonucleotide
  Antisense strand to SEQ ID NO: 42194
ucauacaaggagcugggau

SEQ ID NO: 42270 - RNA, 19 nt, Artificial Sequence
  Description of Artificial Sequence: Synthetic oligonucleotide
  Sense strand starting at position 2437 of SEQ ID NO: 503
ucugauauugucugguucu

SEQ ID NO: 42271 - RNA, 19 nt, Artificial Sequence
  Description of Artificial Sequence: Synthetic oligonucleotide
  Sense strand starting at position 386 of SEQ ID NO: 1250
cucuaagacucucugaagu

SEQ ID NO: 42272 - RNA, 19 nt, Artificial Sequence
  Description of Artificial Sequence: Synthetic oligonucleotide
  Antisense strand to SEQ ID NO: 42196
agaaccagacaauaucaga

SEQ ID NO: 42273 - RNA, 19 nt, Artificial Sequence
  Description of Artificial Sequence: Synthetic oligonucleotide
  Sense strand starting at position 2440 of SEQ ID NO: 503
gauauugucugguucucac

SEQ ID NO: 42274 - RNA, 19 nt, Artificial Sequence
  Description of Artificial Sequence: Synthetic oligonucleotide
  Sense strand starting at position 261 of SEQ ID NO: 1250
guaguccugggaugggaau

SEQ ID NO: 42275 - RNA, 19 nt, Artificial Sequence
  Description of Artificial Sequence: Synthetic oligonucleotide
  Antisense strand to SEQ ID NO: 42198
gugagaaccagacaauauc

SEQ ID NO: 42276 - RNA, 19 nt, Artificial Sequence
  Description of Artificial Sequence: Synthetic oligonucleotide
  Sense strand starting at position 2597 of SEQ ID NO: 503
auauccaauugagaaugau

SEQ ID NO: 42277 - RNA, 19 nt, Artificial Sequence
  Description of Artificial Sequence: Synthetic oligonucleotide
  Sense strand starting at position 214 of SEQ ID NO: 1250
uuaaacauucuacacgagu

SEQ ID NO: 42278 - RNA, 19 nt, Artificial Sequence
  Description of Artificial Sequence: Synthetic oligonucleotide
  Antisense strand to SEQ ID NO: 42200
aucauucucaauuggauau

SEQ ID NO: 42279 - RNA, 19 nt, Artificial Sequence
  Description of Artificial Sequence: Synthetic oligonucleotide
  Sense strand starting at position 2785 of SEQ ID NO: 503
agugauuugugggaggugu

SEQ ID NO: 42280 - RNA, 19 nt, Artificial Sequence
  Description of Artificial Sequence: Synthetic oligonucleotide
  Sense strand starting at position 87 of SEQ ID NO: 1250
aagucuuuccaguaauagg

SEQ ID NO: 42281 - RNA, 19 nt, Artificial Sequence
  Description of Artificial Sequence: Synthetic oligonucleotide
  Antisense strand to SEQ ID NO: 42202
acaccucccacaaaucacu

SEQ ID NO: 42282 - RNA, 19 nt, Artificial Sequence
  Description of Artificial Sequence: Synthetic oligonucleotide
  Sense strand starting at position 3137 of SEQ ID NO: 503
ucuggcuucuaaucuuuga

SEQ ID NO: 42283 - RNA, 19 nt, Artificial Sequence
  Description of Artificial Sequence: Synthetic oligonucleotide
  Sense strand starting at position 83 of SEQ ID NO: 1250
ccugaagucuuuccaguaa

SEQ ID NO: 42284 - RNA, 19 nt, Artificial Sequence
  Description of Artificial Sequence: Synthetic oligonucleotide
  Antisense strand to SEQ ID NO: 42204
ucaaagauuagaagccaga

SEQ ID NO: 42285 - RNA, 19 nt, Artificial Sequence
  Description of Artificial Sequence: Synthetic oligonucleotide
  Sense strand starting at position 3140 of SEQ ID NO: 503
ggcuucuaaucuuugacag

SEQ ID NO: 42286 - RNA, 19 nt, Artificial Sequence
  Description of Artificial Sequence: Synthetic oligonucleotide
  Sense strand starting at position 20 of SEQ ID NO: 1250
cuggacaugcaucgugaga

SEQ ID NO: 42287 - RNA, 19 nt, Artificial Sequence
  Description of Artificial Sequence: Synthetic oligonucleotide
  Antisense strand to SEQ ID NO: 42206
cugucaaagauuagaagcc

SEQ ID NO: 42288 - RNA, 19 nt, Artificial Sequence
  Description of Artificial Sequence: Synthetic oligonucleotide
  Sense strand starting at position 3141 of SEQ ID NO: 503
gcuucuaaucuuugacagu

SEQ ID NO: 42289 - RNA, 19 nt, Artificial Sequence
  Description of Artificial Sequence: Synthetic oligonucleotide
  Antisense strand to SEQ ID NO: 42208
acugucaaagauuagaagc

SEQ ID NO: 42290 - RNA, 19 nt, Artificial Sequence
  Description of Artificial Sequence: Synthetic oligonucleotide
  Sense strand starting at position 3223 of SEQ ID NO: 503
uuugcauaagccuaugaaa

SEQ ID NO: 42291 - RNA, 19 nt, Artificial Sequence
  Description of Artificial Sequence: Synthetic oligonucleotide
  Antisense strand to SEQ ID NO: 42210
uuucauaggcuuaugcaaa

SEQ ID NO: 42292 - RNA, 19 nt, Artificial Sequence
  Description of Artificial Sequence: Synthetic oligonucleotide
  Sense strand starting at position 3225 of SEQ ID NO: 503
ugcauaagccuaugaaauu

SEQ ID NO: 42293 - RNA, 19 nt, Artificial Sequence
  Description of Artificial Sequence: Synthetic oligonucleotide
  Antisense strand to SEQ ID NO: 42212
aauuucauaggcuuaugca

SEQ ID NO: 42294 - RNA, 19 nt, Artificial Sequence
  Description of Artificial Sequence: Synthetic oligonucleotide
  Sense strand starting at position 3244 of SEQ ID NO: 503
ccacuuguccuuuagucuu

SEQ ID NO: 42295 - RNA, 19 nt, Artificial Sequence
  Description of Artificial Sequence: Synthetic oligonucleotide
  Antisense strand to SEQ ID NO: 42214
aagacuaaaggacaagugg

SEQ ID NO: 42296 - RNA, 19 nt, Artificial Sequence
  Description of Artificial Sequence: Synthetic oligonucleotide
  Sense strand starting at position 3252 of SEQ ID NO: 503
ccuuuagucuuguuuauag

SEQ ID NO: 42297 - RNA, 19 nt, Artificial Sequence
  Description of Artificial Sequence: Synthetic oligonucleotide
  Antisense strand to SEQ ID NO: 42216
cuauaaacaagacuaaagg

SEQ ID NO: 42298 - RNA, 19 nt, Artificial Sequence
  Description of Artificial Sequence: Synthetic oligonucleotide
  Sense strand starting at position 3533 of SEQ ID NO: 503
ugauucuaccucuauugua

SEQ ID NO: 42299 - RNA, 19 nt, Artificial Sequence
  Description of Artificial Sequence: Synthetic oligonucleotide
  Antisense strand to SEQ ID NO: 42218
uacaauagagguagaauca

SEQ ID NO: 42300 - RNA, 19 nt, Artificial Sequence
  Description of Artificial Sequence: Synthetic oligonucleotide
  Sense strand starting at position 3576 of SEQ ID NO: 503
gucaguuucugagcucaug

SEQ ID NO: 42301 - RNA, 19 nt, Artificial Sequence
  Description of Artificial Sequence: Synthetic oligonucleotide
  Antisense strand to SEQ ID NO: 42220
caugagcucagaaacugac

SEQ ID NO: 42302 - RNA, 19 nt, Artificial Sequence
  Description of Artificial Sequence: Synthetic oligonucleotide
  Sense strand starting at position 3654 of SEQ ID NO: 503
uguaauaugucuccacgua

SEQ ID NO: 42303 - RNA, 19 nt, Artificial Sequence
  Description of Artificial Sequence: Synthetic oligonucleotide
  Antisense strand to SEQ ID NO: 42222
uacguggagacauauuaca

SEQ ID NO: 42304 - RNA, 19 nt, Artificial Sequence
  Description of Artificial Sequence: Synthetic oligonucleotide
  Sense strand starting at position 3655 of SEQ ID NO: 503
guaauaugucuccacguau

SEQ ID NO: 42305 - RNA, 19 nt, Artificial Sequence
  Description of Artificial Sequence: Synthetic oligonucleotide
  Antisense strand to SEQ ID NO: 42224
auacguggagacauauuac

SEQ ID NO: 42306 - RNA, 19 nt, Artificial Sequence
  Description of Artificial Sequence: Synthetic oligonucleotide
  Sense strand starting at position 3771 of SEQ ID NO: 503
ugaaucaguuuaucaaguu

SEQ ID NO: 42307 - RNA, 19 nt, Artificial Sequence
  Description of Artificial Sequence: Synthetic oligonucleotide
  Antisense strand to SEQ ID NO: 42226
aacuugauaaacugauuca

SEQ ID NO: 42308 - RNA, 19 nt, Artificial Sequence
  Description of Artificial Sequence: Synthetic oligonucleotide
  Sense strand starting at position 3915 of SEQ ID NO: 504
aguuguucuagugaaucag

SEQ ID NO: 42309 - RNA, 19 nt, Artificial Sequence
  Description of Artificial Sequence: Synthetic oligonucleotide
  Antisense strand to SEQ ID NO: 42228
cugauucacuagaacaacu

SEQ ID NO: 42310 - RNA, 19 nt, Artificial Sequence
  Description of Artificial Sequence: Synthetic oligonucleotide
  Sense strand starting at position 3843 of SEQ ID NO: 504
gccucaucgccugacaaug

SEQ ID NO: 42311 - RNA, 19 nt, Artificial Sequence
  Description of Artificial Sequence: Synthetic oligonucleotide
  Antisense strand to SEQ ID NO: 42230
cauugucaggcgaugaggc

SEQ ID NO: 42312 - RNA, 19 nt, Artificial Sequence
  Description of Artificial Sequence: Synthetic oligonucleotide
  Sense strand starting at position 3822 of SEQ ID NO: 504
auguguaugcaaugaggaa

SEQ ID NO: 42313 - RNA, 19 nt, Artificial Sequence
  Description of Artificial Sequence: Synthetic oligonucleotide
  Antisense strand to SEQ ID NO: 42232
uuccucauugcauacacau

SEQ ID NO: 42314 - RNA, 19 nt, Artificial Sequence
  Description of Artificial Sequence: Synthetic oligonucleotide
  Sense strand starting at position 3630 of SEQ ID NO: 504
gcauuaugccuuguguucu

SEQ ID NO: 42315 - RNA, 19 nt, Artificial Sequence
  Description of Artificial Sequence: Synthetic oligonucleotide
  Antisense strand to SEQ ID NO: 42234
agaacacaaggcauaaugc

SEQ ID NO: 42316 - RNA, 19 nt, Artificial Sequence
  Description of Artificial Sequence: Synthetic oligonucleotide
  Sense strand starting at position 3596 of SEQ ID NO: 504
aguaaugaugcaggguaua

SEQ ID NO: 42317 - RNA, 19 nt, Artificial Sequence
  Description of Artificial Sequence: Synthetic oligonucleotide
  Antisense strand to SEQ ID NO: 42236
uauacccugcaucauuacu

SEQ ID NO: 42318 - RNA, 19 nt, Artificial Sequence
  Description of Artificial Sequence: Synthetic oligonucleotide
  Sense strand starting at position 3594 of SEQ ID NO: 504
ggaguaaugaugcagggua

SEQ ID NO: 42319 - RNA, 19 nt, Artificial Sequence
  Description of Artificial Sequence: Synthetic oligonucleotide
  Antisense strand to SEQ ID NO: 42238
uacccugcaucauuacucc

SEQ ID NO: 42320 - RNA, 19 nt, Artificial Sequence
  Description of Artificial Sequence: Synthetic oligonucleotide
  Sense strand starting at position 3559 of SEQ ID NO: 504
gagugaaggugcucgauag

SEQ ID NO: 42321 - RNA, 19 nt, Artificial Sequence
  Description of Artificial Sequence: Synthetic oligonucleotide
  Antisense strand to SEQ ID NO: 42240
cuaucgagcaccuucacuc

SEQ ID NO: 42322 - RNA, 19 nt, Artificial Sequence
  Description of Artificial Sequence: Synthetic oligonucleotide
  Sense strand starting at position 3550 of SEQ ID NO: 504
caagacuaugagugaaggu

SEQ ID NO: 42323 - RNA, 19 nt, Artificial Sequence
  Description of Artificial Sequence: Synthetic oligonucleotide
  Antisense strand to SEQ ID NO: 42242
accuucacucauagucuug

SEQ ID NO: 42324 - RNA, 19 nt, Artificial Sequence
  Description of Artificial Sequence: Synthetic oligonucleotide
  Sense strand starting at position 3546 of SEQ ID NO: 504
auagcaagacuaugaguga

SEQ ID NO: 42325 - RNA, 19 nt, Artificial Sequence
  Description of Artificial Sequence: Synthetic oligonucleotide
  Antisense strand to SEQ ID NO: 42244
ucacucauagucuugcuau

SEQ ID NO: 42326 - RNA, 19 nt, Artificial Sequence
  Description of Artificial Sequence: Synthetic oligonucleotide
  Sense strand starting at position 3526 of SEQ ID NO: 504
gucaucucuguauaugaag

SEQ ID NO: 42327 - RNA, 19 nt, Artificial Sequence
  Description of Artificial Sequence: Synthetic oligonucleotide
  Antisense strand to SEQ ID NO: 42246
cuucauauacagagaugac

SEQ ID NO: 42328 - RNA, 19 nt, Artificial Sequence
  Description of Artificial Sequence: Synthetic oligonucleotide
  Sense strand starting at position 3524 of SEQ ID NO: 504
gggucaucucuguauauga

SEQ ID NO: 42329 - RNA, 19 nt, Artificial Sequence
  Description of Artificial Sequence: Synthetic oligonucleotide
  Antisense strand to SEQ ID NO: 42248
ucauauacagagaugaccc

SEQ ID NO: 42330 - RNA, 19 nt, Artificial Sequence
  Description of Artificial Sequence: Synthetic oligonucleotide
  Sense strand starting at position 3522 of SEQ ID NO: 504
gagggucaucucuguauau

SEQ ID NO: 42331 - RNA, 19 nt, Artificial Sequence
  Description of Artificial Sequence: Synthetic oligonucleotide
  Antisense strand to SEQ ID NO: 42250
auauacagagaugacccuc

SEQ ID NO: 42332 - RNA, 19 nt, Artificial Sequence
  Description of Artificial Sequence: Synthetic oligonucleotide
  Sense strand starting at position 3438 of SEQ ID NO: 504
uaagaaugggcguggauga

SEQ ID NO: 42333 - RNA, 19 nt, Artificial Sequence
  Description of Artificial Sequence: Synthetic oligonucleotide
  Antisense strand to SEQ ID NO: 42252
ucauccacgcccauucuua

SEQ ID NO: 42334 - RNA, 19 nt, Artificial Sequence
  Description of Artificial Sequence: Synthetic oligonucleotide
  Sense strand starting at position 3372 of SEQ ID NO: 504
aaggauguaugacuccaua

SEQ ID NO: 42335 - RNA, 19 nt, Artificial Sequence
  Description of Artificial Sequence: Synthetic oligonucleotide
  Antisense strand to SEQ ID NO: 42254
uauggagucauacauccuu

SEQ ID NO: 42336 - RNA, 19 nt, Artificial Sequence
  Description of Artificial Sequence: Synthetic oligonucleotide
  Sense strand starting at position 3342 of SEQ ID NO: 504
agagcuaguaaaugguaaa

SEQ ID NO: 42337 - RNA, 19 nt, Artificial Sequence
  Description of Artificial Sequence: Synthetic oligonucleotide
  Antisense strand to SEQ ID NO: 42256
uuuaccauuuacuagcucu

SEQ ID NO: 42338 - RNA, 19 nt, Artificial Sequence
  Description of Artificial Sequence: Synthetic oligonucleotide
  Sense strand starting at position 3288 of SEQ ID NO: 504
guguccaauuuacagauga

SEQ ID NO: 42339 - RNA, 19 nt, Artificial Sequence
  Description of Artificial Sequence: Synthetic oligonucleotide
  Antisense strand to SEQ ID NO: 42258
ucaucuguaaauuggacac

SEQ ID NO: 42340 - RNA, 19 nt, Artificial Sequence
  Description of Artificial Sequence: Synthetic oligonucleotide
  Sense strand starting at position 3278 of SEQ ID NO: 504
agacaucauuguguccaau

SEQ ID NO: 42341 - RNA, 19 nt, Artificial Sequence
  Description of Artificial Sequence: Synthetic oligonucleotide
  Antisense strand to SEQ ID NO: 42260
auuggacacaaugaugucu

SEQ ID NO: 42342 - RNA, 19 nt, Artificial Sequence
  Description of Artificial Sequence: Synthetic oligonucleotide
  Sense strand starting at position 3260 of SEQ ID NO: 504
uauccuacaguguaggaua

SEQ ID NO: 42343 - RNA, 19 nt, Artificial Sequence
  Description of Artificial Sequence: Synthetic oligonucleotide
  Antisense strand to SEQ ID NO: 42262
uauccuacacuguaggaua

SEQ ID NO: 42344 - RNA, 19 nt, Artificial Sequence
  Description of Artificial Sequence: Synthetic oligonucleotide
  Sense strand starting at position 3153 of SEQ ID NO: 504
gcgauuauagucugaaaga

SEQ ID NO: 42345 - RNA, 19 nt, Artificial Sequence
  Description of Artificial Sequence: Synthetic oligonucleotide
  Antisense strand to SEQ ID NO: 42264
ucuuucagacuauaaucgc

SEQ ID NO: 42346 - RNA, 19 nt, Artificial Sequence
  Description of Artificial Sequence: Synthetic oligonucleotide
  Sense strand starting at position 3116 of SEQ ID NO: 504
caguuuacagucugacuga

SEQ ID NO: 42347 - RNA, 19 nt, Artificial Sequence
  Description of Artificial Sequence: Synthetic oligonucleotide
  Antisense strand to SEQ ID NO: 42266
ucagucagacuguaaacug

SEQ ID NO: 42348 - RNA, 19 nt, Artificial Sequence
  Description of Artificial Sequence: Synthetic oligonucleotide
  Sense strand starting at position 2831 of SEQ ID NO: 504
auguauaacuaguuguauc

SEQ ID NO: 42349 - RNA, 19 nt, Artificial Sequence
  Description of Artificial Sequence: Synthetic oligonucleotide
  Antisense strand to SEQ ID NO: 42268
gauacaacuaguuauacau

SEQ ID NO: 42350 - RNA, 19 nt, Artificial Sequence
  Description of Artificial Sequence: Synthetic oligonucleotide
  Sense strand starting at position 2705 of SEQ ID NO: 504
ugcagugaaguugaaacaa

SEQ ID NO: 42351 - RNA, 19 nt, Artificial Sequence
  Description of Artificial Sequence: Synthetic oligonucleotide
  Antisense strand to SEQ ID NO: 42270
uuguuucaacuucacugca

SEQ ID NO: 42352 - RNA, 19 nt, Artificial Sequence
  Description of Artificial Sequence: Synthetic oligonucleotide
  Sense strand starting at position 2542 of SEQ ID NO: 504
agaagaggauacuaacuuu

SEQ ID NO: 42353 - RNA, 19 nt, Artificial Sequence
  Description of Artificial Sequence: Synthetic oligonucleotide
  Antisense strand to SEQ ID NO: 42272
aaaguuaguauccucuucu

SEQ ID NO: 42354 - RNA, 19 nt, Artificial Sequence
  Description of Artificial Sequence: Synthetic oligonucleotide
  Sense strand starting at position 2396 of SEQ ID NO: 504
gaaugaauucguuguugaa

SEQ ID NO: 42355 - RNA, 19 nt, Artificial Sequence
  Description of Artificial Sequence: Synthetic oligonucleotide
  Antisense strand to SEQ ID NO: 42274
uucaacaacgaauucauuc

SEQ ID NO: 42356 - RNA, 19 nt, Artificial Sequence
  Description of Artificial Sequence: Synthetic oligonucleotide
  Sense strand starting at position 2393 of SEQ ID NO: 504
uuagaaugaauucguuguu

SEQ ID NO: 42357 - RNA, 19 nt, Artificial Sequence
  Description of Artificial Sequence: Synthetic oligonucleotide
  Antisense strand to SEQ ID NO: 42276
aacaacgaauucauucuaa

SEQ ID NO: 42358 - RNA, 19 nt, Artificial Sequence
  Description of Artificial Sequence: Synthetic oligonucleotide
  Sense strand starting at position 2387 of SEQ ID NO: 504
ucugcauuagaaugaauuc

SEQ ID NO: 42359 - RNA, 19 nt, Artificial Sequence
  Description of Artificial Sequence: Synthetic oligonucleotide
  Antisense strand to SEQ ID NO: 42278
gaauucauucuaaugcaga

SEQ ID NO: 42360 - RNA, 19 nt, Artificial Sequence
  Description of Artificial Sequence: Synthetic oligonucleotide
  Sense strand starting at position 2382 of SEQ ID NO: 504
uggugucugcauuagaaug

SEQ ID NO: 42361 - RNA, 19 nt, Artificial Sequence
  Description of Artificial Sequence: Synthetic oligonucleotide
  Antisense strand to SEQ ID NO: 42280
cauucuaaugcagacacca

SEQ ID NO: 42362 - RNA, 19 nt, Artificial Sequence
  Description of Artificial Sequence: Synthetic oligonucleotide
  Sense strand starting at position 2331 of SEQ ID NO: 504
ggccuaaucgauugggauu

SEQ ID NO: 42363 - RNA, 19 nt, Artificial Sequence
  Description of Artificial Sequence: Synthetic oligonucleotide
  Antisense strand to SEQ ID NO: 42282
aaucccaaucgauuaggcc

SEQ ID NO: 42364 - RNA, 19 nt, Artificial Sequence
  Description of Artificial Sequence: Synthetic oligonucleotide
  Sense strand starting at position 2143 of SEQ ID NO: 504
gauugagcucgcgucacuu

SEQ ID NO: 42365 - RNA, 19 nt, Artificial Sequence
  Description of Artificial Sequence: Synthetic oligonucleotide
  Antisense strand to SEQ ID NO: 42284
aagugacgcgagcucaauc

SEQ ID NO: 42366 - RNA, 19 nt, Artificial Sequence
  Description of Artificial Sequence: Synthetic oligonucleotide
  Sense strand starting at position 1627 of SEQ ID NO: 504
ggugggaggugccuuugaa

SEQ ID NO: 42367 - RNA, 19 nt, Artificial Sequence
  Description of Artificial Sequence: Synthetic oligonucleotide
  Antisense strand to SEQ ID NO: 42286
uucaaaggcaccucccacc

SEQ ID NO: 42368 - RNA, 19 nt, Artificial Sequence
  Description of Artificial Sequence: Synthetic oligonucleotide
  Sense strand starting at position 1413 of SEQ ID NO: 504
cuaggucggucuuugauuu

SEQ ID NO: 42369 - RNA, 19 nt, Artificial Sequence
  Description of Artificial Sequence: Synthetic oligonucleotide
  Antisense strand to SEQ ID NO: 42288
aaaucaaagaccgaccuag

SEQ ID NO: 42370 - RNA, 19 nt, Artificial Sequence
  Description of Artificial Sequence: Synthetic oligonucleotide
  Sense strand starting at position 889 of SEQ ID NO: 504
ugcagucucccugagcaau

SEQ ID NO: 42371 - RNA, 19 nt, Artificial Sequence
  Description of Artificial Sequence: Synthetic oligonucleotide
  Antisense strand to SEQ ID NO: 42290
auugcucagggagacugca

SEQ ID NO: 42372 - RNA, 19 nt, Artificial Sequence
  Description of Artificial Sequence: Synthetic oligonucleotide
  Sense strand starting at position 691 of SEQ ID NO: 504
uuugauagaugaucguaaa

SEQ ID NO: 42373 - RNA, 19 nt, Artificial Sequence
  Description of Artificial Sequence: Synthetic oligonucleotide
  Antisense strand to SEQ ID NO: 42292
uuuacgaucaucuaucaaa

SEQ ID NO: 42374 - RNA, 19 nt, Artificial Sequence
  Description of Artificial Sequence: Synthetic oligonucleotide
  Sense strand starting at position 476 of SEQ ID NO: 504
gcgcuagcaauagaugauu

SEQ ID NO: 42375 - RNA, 19 nt, Artificial Sequence
  Description of Artificial Sequence: Synthetic oligonucleotide
  Antisense strand to SEQ ID NO: 42294
aaucaucuauugcuagcgc

SEQ ID NO: 42376 - RNA, 19 nt, Artificial Sequence
  Description of Artificial Sequence: Synthetic oligonucleotide
  Sense strand starting at position 387 of SEQ ID NO: 504
uuuggcuauagcugacaga

SEQ ID NO: 42377 - RNA, 19 nt, Artificial Sequence
  Description of Artificial Sequence: Synthetic oligonucleotide
  Antisense strand to SEQ ID NO: 42296
ucugucagcuauagccaaa

SEQ ID NO: 42378 - RNA, 19 nt, Artificial Sequence
  Description of Artificial Sequence: Synthetic oligonucleotide
  Sense strand starting at position 339 of SEQ ID NO: 504
acaaucacccuccgugauu

SEQ ID NO: 42379 - RNA, 19 nt, Artificial Sequence
  Description of Artificial Sequence: Synthetic oligonucleotide
  Antisense strand to SEQ ID NO: 42298
aaucacggagggugauugu

SEQ ID NO: 42380 - RNA, 19 nt, Artificial Sequence
  Description of Artificial Sequence: Synthetic oligonucleotide
  Sense strand starting at position 183 of SEQ ID NO: 504
uguacuuucuuacuggaga

SEQ ID NO: 42381 - RNA, 19 nt, Artificial Sequence
  Description of Artificial Sequence: Synthetic oligonucleotide
  Antisense strand to SEQ ID NO: 42300
ucuccaguaagaaaguaca

SEQ ID NO: 42382 - RNA, 19 nt, Artificial Sequence
  Description of Artificial Sequence: Synthetic oligonucleotide
  Sense strand starting at position 141 of SEQ ID NO: 504
gcacacauugcguuugcua

SEQ ID NO: 42383 - RNA, 19 nt, Artificial Sequence
  Description of Artificial Sequence: Synthetic oligonucleotide
  Antisense strand to SEQ ID NO: 42302
uagcaaacgcaaugugugc

SEQ ID NO: 42384 - RNA, 19 nt, Artificial Sequence
  Description of Artificial Sequence: Synthetic oligonucleotide
  Sense strand starting at position 34 of SEQ ID NO: 504
cuguucucuguugauauaa

SEQ ID NO: 42385 - RNA, 19 nt, Artificial Sequence
  Description of Artificial Sequence: Synthetic oligonucleotide
  Antisense strand to SEQ ID NO: 42304
uuauaucaacagagaacag

SEQ ID NO: 42386 - RNA, 19 nt, Artificial Sequence
  Description of Artificial Sequence: Synthetic oligonucleotide
  Sense strand starting at position 11 of SEQ ID NO: 504
agucucuuaccuuaguuua

SEQ ID NO: 42387 - RNA, 19 nt, Artificial Sequence
  Description of Artificial Sequence: Synthetic oligonucleotide
  Antisense strand to SEQ ID NO: 42306
uaaacuaagguaagagacu

SEQ ID NO: 42388 - RNA, 19 nt, Artificial Sequence
  Description of Artificial Sequence: Synthetic oligonucleotide
  Sense strand starting at position 3850 of SEQ ID NO: 506
ggagaacuugccugucacc

SEQ ID NO: 42389 - RNA, 19 nt, Artificial Sequence
  Description of Artificial Sequence: Synthetic oligonucleotide
  Antisense strand to SEQ ID NO: 42308
ggugacaggcaaguucucc

SEQ ID NO: 42390 - RNA, 19 nt, Artificial Sequence
  Description of Artificial Sequence: Synthetic oligonucleotide
  Sense strand starting at position 3743 of SEQ ID NO: 506
guaagucccuccuggcaga

SEQ ID NO: 42391 - RNA, 19 nt, Artificial Sequence
  Description of Artificial Sequence: Synthetic oligonucleotide
  Antisense strand to SEQ ID NO: 42310
ucugccaggagggacuuac

SEQ ID NO: 42392 - RNA, 19 nt, Artificial Sequence
  Description of Artificial Sequence: Synthetic oligonucleotide
  Sense strand starting at position 3695 of SEQ ID NO: 506
ugauuaggcccacaucuaa

SEQ ID NO: 42393 - RNA, 19 nt, Artificial Sequence
  Description of Artificial Sequence: Synthetic oligonucleotide
  Antisense strand to SEQ ID NO: 42312
uuagaugugggccuaauca

SEQ ID NO: 42394 - RNA, 19 nt, Artificial Sequence
  Description of Artificial Sequence: Synthetic oligonucleotide
  Sense strand starting at position 3579 of SEQ ID NO: 506
gcuaaagcuugauuuccuu

SEQ ID NO: 42395 - RNA, 19 nt, Artificial Sequence
  Description of Artificial Sequence: Synthetic oligonucleotide
  Antisense strand to SEQ ID NO: 42314
aaggaaaucaagcuuuagc

SEQ ID NO: 42396 - RNA, 19 nt, Artificial Sequence
  Description of Artificial Sequence: Synthetic oligonucleotide
  Sense strand starting at position 3555 of SEQ ID NO: 506
cagugaacugugugcacua

SEQ ID NO: 42397 - RNA, 19 nt, Artificial Sequence
  Description of Artificial Sequence: Synthetic oligonucleotide
  Antisense strand to SEQ ID NO: 42316
uagugcacacaguucacug

SEQ ID NO: 42398 - RNA, 19 nt, Artificial Sequence
  Description of Artificial Sequence: Synthetic oligonucleotide
  Sense strand starting at position 3207 of SEQ ID NO: 506
gagucuggcugccuaucau

SEQ ID NO: 42399 - RNA, 19 nt, Artificial Sequence
  Description of Artificial Sequence: Synthetic oligonucleotide
  Antisense strand to SEQ ID NO: 42318
augauaggcagccagacuc

SEQ ID NO: 42400 - RNA, 19 nt, Artificial Sequence
  Description of Artificial Sequence: Synthetic oligonucleotide
  Sense strand starting at position 3141 of SEQ ID NO: 506
augacaagaugacaauaau

SEQ ID NO: 42401 - RNA, 19 nt, Artificial Sequence
  Description of Artificial Sequence: Synthetic oligonucleotide
  Antisense strand to SEQ ID NO: 42320
auuauugucaucuugucau

SEQ ID NO: 42402 - RNA, 19 nt, Artificial Sequence
  Description of Artificial Sequence: Synthetic oligonucleotide
  Sense strand starting at position 3084 of SEQ ID NO: 506
aucauccugucuggaaaga

SEQ ID NO: 42403 - RNA, 19 nt, Artificial Sequence
  Description of Artificial Sequence: Synthetic oligonucleotide
  Antisense strand to SEQ ID NO: 42322
ucuuuccagacaggaugau

SEQ ID NO: 42404 - RNA, 19 nt, Artificial Sequence
  Description of Artificial Sequence: Synthetic oligonucleotide
  Sense strand starting at position 3083 of SEQ ID NO: 506
caucauccugucuggaaag

SEQ ID NO: 42405 - RNA, 19 nt, Artificial Sequence
  Description of Artificial Sequence: Synthetic oligonucleotide
  Antisense strand to SEQ ID NO: 42324
cuuuccagacaggaugaug

SEQ ID NO: 42406 - RNA, 19 nt, Artificial Sequence
  Description of Artificial Sequence: Synthetic oligonucleotide
  Sense strand starting at position 3082 of SEQ ID NO: 506
ucaucauccugucuggaaa

SEQ ID NO: 42407 - RNA, 19 nt, Artificial Sequence
  Description of Artificial Sequence: Synthetic oligonucleotide
  Antisense strand to SEQ ID NO: 42326
uuuccagacaggaugauga

SEQ ID NO: 42408 - RNA, 19 nt, Artificial Sequence
  Description of Artificial Sequence: Synthetic oligonucleotide
  Sense strand starting at position 3031 of SEQ ID NO: 506
cgucucuggugucaagacu

SEQ ID NO: 42409 - RNA, 19 nt, Artificial Sequence
  Description of Artificial Sequence: Synthetic oligonucleotide
  Antisense strand to SEQ ID NO: 42328
agucuugacaccagagacg

SEQ ID NO: 42410 - RNA, 19 nt, Artificial Sequence
  Description of Artificial Sequence: Synthetic oligonucleotide
  Sense strand starting at position 3001 of SEQ ID NO: 506
ucgaguuucucuucccaau

SEQ ID NO: 42411 - RNA, 19 nt, Artificial Sequence
  Description of Artificial Sequence: Synthetic oligonucleotide
  Antisense strand to SEQ ID NO: 42330
auugggaagagaaacucga

SEQ ID NO: 42412 - RNA, 19 nt, Artificial Sequence
  Description of Artificial Sequence: Synthetic oligonucleotide
  Sense strand starting at position 2959 of SEQ ID NO: 506
gggcaaggauccuagaaag

SEQ ID NO: 42413 - RNA, 19 nt, Artificial Sequence
  Description of Artificial Sequence: Synthetic oligonucleotide
  Antisense strand to SEQ ID NO: 42332
cuuucuaggauccuugccc

SEQ ID NO: 42414 - RNA, 19 nt, Artificial Sequence
  Description of Artificial Sequence: Synthetic oligonucleotide
  Sense strand starting at position 2829 of SEQ ID NO: 506
ucccuaaguggcugagaaa

SEQ ID NO: 42415 - RNA, 19 nt, Artificial Sequence
  Description of Artificial Sequence: Synthetic oligonucleotide
  Antisense strand to SEQ ID NO: 42334
uuucucagccacuuaggga

SEQ ID NO: 42416 - RNA, 19 nt, Artificial Sequence
  Description of Artificial Sequence: Synthetic oligonucleotide
  Sense strand starting at position 2643 of SEQ ID NO: 506
ccaccaguucugcaaguga

SEQ ID NO: 42417 - RNA, 19 nt, Artificial Sequence
  Description of Artificial Sequence: Synthetic oligonucleotide
  Antisense strand to SEQ ID NO: 42336
ucacuugcagaacuggugg

SEQ ID NO: 42418 - RNA, 19 nt, Artificial Sequence
  Description of Artificial Sequence: Synthetic oligonucleotide
  Sense strand starting at position 2406 of SEQ ID NO: 506
gccuaagagcaaggagaau

SEQ ID NO: 42419 - RNA, 19 nt, Artificial Sequence
  Description of Artificial Sequence: Synthetic oligonucleotide
  Antisense strand to SEQ ID NO: 42338
auucuccuugcucuuaggc

SEQ ID NO: 42420 - RNA, 19 nt, Artificial Sequence
  Description of Artificial Sequence: Synthetic oligonucleotide
  Sense strand starting at position 2320 of SEQ ID NO: 506
gauuucuaguaguacugga

SEQ ID NO: 42421 - RNA, 19 nt, Artificial Sequence
  Description of Artificial Sequence: Synthetic oligonucleotide
  Antisense strand to SEQ ID NO: 42340
uccaguacuacuagaaauc

SEQ ID NO: 42422 - RNA, 19 nt, Artificial Sequence
  Description of Artificial Sequence: Synthetic oligonucleotide
  Sense strand starting at position 2317 of SEQ ID NO: 506
gccgauuucuaguaguacu

SEQ ID NO: 42423 - RNA, 19 nt, Artificial Sequence
  Description of Artificial Sequence: Synthetic oligonucleotide
  Antisense strand to SEQ ID NO: 42342
aguacuacuagaaaucggc

SEQ ID NO: 42424 - RNA, 19 nt, Artificial Sequence
  Description of Artificial Sequence: Synthetic oligonucleotide
  Sense strand starting at position 2314 of SEQ ID NO: 506
ggagccgauuucuaguagu

SEQ ID NO: 42425 - RNA, 19 nt, Artificial Sequence
  Description of Artificial Sequence: Synthetic oligonucleotide
  Antisense strand to SEQ ID NO: 42344
acuacuagaaaucggcucc

SEQ ID NO: 42426 - RNA, 19 nt, Artificial Sequence
  Description of Artificial Sequence: Synthetic oligonucleotide
  Sense strand starting at position 2216 of SEQ ID NO: 506
caagcagccuguggaaauu

SEQ ID NO: 42427 - RNA, 19 nt, Artificial Sequence
  Description of Artificial Sequence: Synthetic oligonucleotide
  Antisense strand to SEQ ID NO: 42346
aauuuccacaggcugcuug

SEQ ID NO: 42428 - RNA, 19 nt, Artificial Sequence
  Description of Artificial Sequence: Synthetic oligonucleotide
  Sense strand starting at position 2215 of SEQ ID NO: 506
ccaagcagccuguggaaau

SEQ ID NO: 42429 - RNA, 19 nt, Artificial Sequence
  Description of Artificial Sequence: Synthetic oligonucleotide
  Antisense strand to SEQ ID NO: 42348
auuuccacaggcugcuugg

SEQ ID NO: 42430 - RNA, 19 nt, Artificial Sequence
  Description of Artificial Sequence: Synthetic oligonucleotide
  Sense strand starting at position 1569 of SEQ ID NO: 506
guaguucggucuguucaau

SEQ ID NO: 42431 - RNA, 19 nt, Artificial Sequence
  Description of Artificial Sequence: Synthetic oligonucleotide
  Antisense strand to SEQ ID NO: 42350
auugaacagaccgaacuac

SEQ ID NO: 42432 - RNA, 19 nt, Artificial Sequence
  Description of Artificial Sequence: Synthetic oligonucleotide
  Sense strand starting at position 1568 of SEQ ID NO: 506
aguaguucggucuguucaa

SEQ ID NO: 42433 - RNA, 19 nt, Artificial Sequence
  Description of Artificial Sequence: Synthetic oligonucleotide
  Antisense strand to SEQ ID NO: 42352
uugaacagaccgaacuacu

SEQ ID NO: 42434 - RNA, 19 nt, Artificial Sequence
  Description of Artificial Sequence: Synthetic oligonucleotide
  Sense strand starting at position 1565 of SEQ ID NO: 506
ggaaguaguucggucuguu

SEQ ID NO: 42435 - RNA, 19 nt, Artificial Sequence
  Description of Artificial Sequence: Synthetic oligonucleotide
  Antisense strand to SEQ ID NO: 42354
aacagaccgaacuacuucc

SEQ ID NO: 42436 - RNA, 19 nt, Artificial Sequence
  Description of Artificial Sequence: Synthetic oligonucleotide
  Sense strand starting at position 1553 of SEQ ID NO: 506
accuguuucugaggaagua

SEQ ID NO: 42437 - RNA, 19 nt, Artificial Sequence
  Description of Artificial Sequence: Synthetic oligonucleotide
  Antisense strand to SEQ ID NO: 42356
uacuuccucagaaacaggu

SEQ ID NO: 42438 - RNA, 19 nt, Artificial Sequence
  Description of Artificial Sequence: Synthetic oligonucleotide
  Sense strand starting at position 1551 of SEQ ID NO: 506
ggaccuguuucugaggaag

SEQ ID NO: 42439 - RNA, 19 nt, Artificial Sequence
  Description of Artificial Sequence: Synthetic oligonucleotide
  Antisense strand to SEQ ID NO: 42358
cuuccucagaaacaggucc

SEQ ID NO: 42440 - RNA, 19 nt, Artificial Sequence
  Description of Artificial Sequence: Synthetic oligonucleotide
  Sense strand starting at position 1550 of SEQ ID NO: 506
gggaccuguuucugaggaa

SEQ ID NO: 42441 - RNA, 19 nt, Artificial Sequence
  Description of Artificial Sequence: Synthetic oligonucleotide
  Antisense strand to SEQ ID NO: 42360
uuccucagaaacagguccc

SEQ ID NO: 42442 - RNA, 19 nt, Artificial Sequence
  Description of Artificial Sequence: Synthetic oligonucleotide
  Sense strand starting at position 837 of SEQ ID NO: 506
gugcuucccugggagaaug

SEQ ID NO: 42443 - RNA, 19 nt, Artificial Sequence
  Description of Artificial Sequence: Synthetic oligonucleotide
  Antisense strand to SEQ ID NO: 42362
cauucucccagggaagcac

SEQ ID NO: 42444 - RNA, 19 nt, Artificial Sequence
  Description of Artificial Sequence: Synthetic oligonucleotide
  Sense strand starting at position 836 of SEQ ID NO: 506
ggugcuucccugggagaau

SEQ ID NO: 42445 - RNA, 19 nt, Artificial Sequence
  Description of Artificial Sequence: Synthetic oligonucleotide
  Antisense strand to SEQ ID NO: 42364
auucucccagggaagcacc

SEQ ID NO: 42446 - RNA, 19 nt, Artificial Sequence
  Description of Artificial Sequence: Synthetic oligonucleotide
  Sense strand starting at position 835 of SEQ ID NO: 506
gggugcuucccugggagaa

SEQ ID NO: 42447 - RNA, 19 nt, Artificial Sequence
  Description of Artificial Sequence: Synthetic oligonucleotide
  Antisense strand to SEQ ID NO: 42366
uucucccagggaagcaccc

SEQ ID NO: 42448 - RNA, 19 nt, Artificial Sequence
  Description of Artificial Sequence: Synthetic oligonucleotide
  Sense strand starting at position 815 of SEQ ID NO: 506
ggcugagcuuucugaaagc

SEQ ID NO: 42449 - RNA, 19 nt, Artificial Sequence
  Description of Artificial Sequence: Synthetic oligonucleotide
  Antisense strand to SEQ ID NO: 42368
gcuuucagaaagcucagcc

SEQ ID NO: 42450 - RNA, 19 nt, Artificial Sequence
  Description of Artificial Sequence: Synthetic oligonucleotide
  Sense strand starting at position 807 of SEQ ID NO: 506
cuuagaaaggcugagcuuu

SEQ ID NO: 42451 - RNA, 19 nt, Artificial Sequence
  Description of Artificial Sequence: Synthetic oligonucleotide
  Antisense strand to SEQ ID NO: 42370
aaagcucagccuuucuaag

SEQ ID NO: 42452 - RNA, 19 nt, Artificial Sequence
  Description of Artificial Sequence: Synthetic oligonucleotide
  Sense strand starting at position 797 of SEQ ID NO: 506
cugucuuagccuuagaaag

SEQ ID NO: 42453 - RNA, 19 nt, Artificial Sequence
  Description of Artificial Sequence: Synthetic oligonucleotide
  Antisense strand to SEQ ID NO: 42372
cuuucuaaggcuaagacag

SEQ ID NO: 42454 - RNA, 19 nt, Artificial Sequence
  Description of Artificial Sequence: Synthetic oligonucleotide
  Sense strand starting at position 782 of SEQ ID NO: 506
agauguuuccuccaccugu

SEQ ID NO: 42455 - RNA, 19 nt, Artificial Sequence
  Description of Artificial Sequence: Synthetic oligonucleotide
  Antisense strand to SEQ ID NO: 42374
acagguggaggaaacaucu

SEQ ID NO: 42456 - RNA, 19 nt, Artificial Sequence
  Description of Artificial Sequence: Synthetic oligonucleotide
  Sense strand starting at position 780 of SEQ ID NO: 506
cuagauguuuccuccaccu

SEQ ID NO: 42457 - RNA, 19 nt, Artificial Sequence
  Description of Artificial Sequence: Synthetic oligonucleotide
  Antisense strand to SEQ ID NO: 42376
agguggaggaaacaucuag

SEQ ID NO: 42458 - RNA, 19 nt, Artificial Sequence
  Description of Artificial Sequence: Synthetic oligonucleotide
  Sense strand starting at position 560 of SEQ ID NO: 506
uuucuugaccaguggagua

SEQ ID NO: 42459 - RNA, 19 nt, Artificial Sequence
  Description of Artificial Sequence: Synthetic oligonucleotide
  Antisense strand to SEQ ID NO: 42378
uacuccacuggucaagaaa

SEQ ID NO: 42460 - RNA, 19 nt, Artificial Sequence
  Description of Artificial Sequence: Synthetic oligonucleotide
  Sense strand starting at position 499 of SEQ ID NO: 506
gagugcacgucuccucauu

SEQ ID NO: 42461 - RNA, 19 nt, Artificial Sequence
  Description of Artificial Sequence: Synthetic oligonucleotide
  Antisense strand to SEQ ID NO: 42380
aaugaggagacgugcacuc

SEQ ID NO: 42462 - RNA, 19 nt, Artificial Sequence
  Description of Artificial Sequence: Synthetic oligonucleotide
  Sense strand starting at position 474 of SEQ ID NO: 506
ugggaacauuugggaauca

SEQ ID NO: 42463 - RNA, 19 nt, Artificial Sequence
  Description of Artificial Sequence: Synthetic oligonucleotide
  Antisense strand to SEQ ID NO: 42382
ugauucccaaauguuccca

SEQ ID NO: 42464 - RNA, 19 nt, Artificial Sequence
  Description of Artificial Sequence: Synthetic oligonucleotide
  Sense strand starting at position 463 of SEQ ID NO: 506
cucaacauuucugggaaca

SEQ ID NO: 42465 - RNA, 19 nt, Artificial Sequence
  Description of Artificial Sequence: Synthetic oligonucleotide
  Antisense strand to SEQ ID NO: 42384
uguucccagaaauguugag

SEQ ID NO: 42466 - RNA, 19 nt, Artificial Sequence
  Description of Artificial Sequence: Synthetic oligonucleotide
  Sense strand starting at position 462 of SEQ ID NO: 506
gcucaacauuucugggaac

SEQ ID NO: 42467 - RNA, 19 nt, Artificial Sequence
  Description of Artificial Sequence: Synthetic oligonucleotide
  Antisense strand to SEQ ID NO: 42386
guucccagaaauguugagc

SEQ ID NO: 42468 - RNA, 19 nt, Artificial Sequence
  Description of Artificial Sequence: Synthetic oligonucleotide
  Sense strand starting at position 3807 of SEQ ID NO: 505
ggagaacuugccugucacc

SEQ ID NO: 42469 - RNA, 19 nt, Artificial Sequence
  Description of Artificial Sequence: Synthetic oligonucleotide
  Antisense strand to SEQ ID NO: 42388
ggugacaggcaaguucucc

SEQ ID NO: 42470 - RNA, 19 nt, Artificial Sequence
  Description of Artificial Sequence: Synthetic oligonucleotide
  Sense strand starting at position 3700 of SEQ ID NO: 505
guaagucccuccuggcaga

SEQ ID NO: 42471 - RNA, 19 nt, Artificial Sequence
  Description of Artificial Sequence: Synthetic oligonucleotide
  Antisense strand to SEQ ID NO: 42390
ucugccaggagggacuuac

SEQ ID NO: 42472 - RNA, 19 nt, Artificial Sequence
  Description of Artificial Sequence: Synthetic oligonucleotide
  Sense strand starting at position 3652 of SEQ ID NO: 505
ugauuaggcccacaucuaa

SEQ ID NO: 42473 - RNA, 19 nt, Artificial Sequence
  Description of Artificial Sequence: Synthetic oligonucleotide
  Antisense strand to SEQ ID NO: 42392
uuagaugugggccuaauca

SEQ ID NO: 42474 - RNA, 19 nt, Artificial Sequence
  Description of Artificial Sequence: Synthetic oligonucleotide
  Sense strand starting at position 3536 of SEQ ID NO: 505
gcuaaagcuugauuuccuu

SEQ ID NO: 42475 - RNA, 19 nt, Artificial Sequence
  Description of Artificial Sequence: Synthetic oligonucleotide
  Antisense strand to SEQ ID NO: 42394
aaggaaaucaagcuuuagc

SEQ ID NO: 42476 - RNA, 19 nt, Artificial Sequence
  Description of Artificial Sequence: Synthetic oligonucleotide
  Sense strand starting at position 3512 of SEQ ID NO: 505
cagugaacugugugcacua

SEQ ID NO: 42477 - RNA, 19 nt, Artificial Sequence
  Description of Artificial Sequence: Synthetic oligonucleotide
  Antisense strand to SEQ ID NO: 42396
uagugcacacaguucacug

SEQ ID NO: 42478 - RNA, 19 nt, Artificial Sequence
  Description of Artificial Sequence: Synthetic oligonucleotide
  Sense strand starting at position 3164 of SEQ ID NO: 505
gagucuggcugccuaucau

SEQ ID NO: 42479 - RNA, 19 nt, Artificial Sequence
  Description of Artificial Sequence: Synthetic oligonucleotide
  Antisense strand to SEQ ID NO: 42398
augauaggcagccagacuc

SEQ ID NO: 42480 - RNA, 19 nt, Artificial Sequence
  Description of Artificial Sequence: Synthetic oligonucleotide
  Sense strand starting at position 3098 of SEQ ID NO: 505
augacaagaugacaauaau

SEQ ID NO: 42481 - RNA, 19 nt, Artificial Sequence
  Description of Artificial Sequence: Synthetic oligonucleotide
  Antisense strand to SEQ ID NO: 42400
auuauugucaucuugucau

SEQ ID NO: 42482 - RNA, 19 nt, Artificial Sequence
  Description of Artificial Sequence: Synthetic oligonucleotide
  Sense strand starting at position 3041 of SEQ ID NO: 505
aucauccugucuggaaaga

SEQ ID NO: 42483 - RNA, 19 nt, Artificial Sequence
  Description of Artificial Sequence: Synthetic oligonucleotide
  Antisense strand to SEQ ID NO: 42402
ucuuuccagacaggaugau

SEQ ID NO: 42484 - RNA, 19 nt, Artificial Sequence
  Description of Artificial Sequence: Synthetic oligonucleotide
  Sense strand starting at position 3040 of SEQ ID NO: 505
caucauccugucuggaaag

SEQ ID NO: 42485 - RNA, 19 nt, Artificial Sequence
  Description of Artificial Sequence: Synthetic oligonucleotide
  Antisense strand to SEQ ID NO: 42404
cuuuccagacaggaugaug

SEQ ID NO: 42486 - RNA, 19 nt, Artificial Sequence
  Description of Artificial Sequence: Synthetic oligonucleotide
  Sense strand starting at position 3039 of SEQ ID NO: 505
ucaucauccugucuggaaa

SEQ ID NO: 42487 - RNA, 19 nt, Artificial Sequence
  Description of Artificial Sequence: Synthetic oligonucleotide
  Antisense strand to SEQ ID NO: 42406
uuuccagacaggaugauga

SEQ ID NO: 42488 - RNA, 19 nt, Artificial Sequence
  Description of Artificial Sequence: Synthetic oligonucleotide
  Sense strand starting at position 2988 of SEQ ID NO: 505
cgucucuggugucaagacu

SEQ ID NO: 42489 - RNA, 19 nt, Artificial Sequence
  Description of Artificial Sequence: Synthetic oligonucleotide
  Antisense strand to SEQ ID NO: 42408
agucuugacaccagagacg

SEQ ID NO: 42490 - RNA, 19 nt, Artificial Sequence
  Description of Artificial Sequence: Synthetic oligonucleotide
  Sense strand starting at position 2958 of SEQ ID NO: 505
ucgaguuucucuucccaau

SEQ ID NO: 42491 - RNA, 19 nt, Artificial Sequence
  Description of Artificial Sequence: Synthetic oligonucleotide
  Antisense strand to SEQ ID NO: 42410
auugggaagagaaacucga

SEQ ID NO: 42492 - RNA, 19 nt, Artificial Sequence
  Description of Artificial Sequence: Synthetic oligonucleotide
  Sense strand starting at position 2916 of SEQ ID NO: 505
gggcaaggauccuagaaag

SEQ ID NO: 42493 - RNA, 19 nt, Artificial Sequence
  Description of Artificial Sequence: Synthetic oligonucleotide
  Antisense strand to SEQ ID NO: 42412
cuuucuaggauccuugccc

SEQ ID NO: 42494 - RNA, 19 nt, Artificial Sequence
  Description of Artificial Sequence: Synthetic oligonucleotide
  Sense strand starting at position 2786 of SEQ ID NO: 505
ucccuaaguggcugagaaa

SEQ ID NO: 42495 - RNA, 19 nt, Artificial Sequence
  Description of Artificial Sequence: Synthetic oligonucleotide
  Antisense strand to SEQ ID NO: 42414
uuucucagccacuuaggga

SEQ ID NO: 42496 - RNA, 19 nt, Artificial Sequence
  Description of Artificial Sequence: Synthetic oligonucleotide
  Sense strand starting at position 2600 of SEQ ID NO: 505
ccaccaguucugcaaguga

SEQ ID NO: 42497 - RNA, 19 nt, Artificial Sequence
  Description of Artificial Sequence: Synthetic oligonucleotide
  Antisense strand to SEQ ID NO: 42416
ucacuugcagaacuggugg

SEQ ID NO: 42498 - RNA, 19 nt, Artificial Sequence
  Description of Artificial Sequence: Synthetic oligonucleotide
  Sense strand starting at position 2363 of SEQ ID NO: 505
gccuaagagcaaggagaau

SEQ ID NO: 42499 - RNA, 19 nt, Artificial Sequence
  Description of Artificial Sequence: Synthetic oligonucleotide
  Antisense strand to SEQ ID NO: 42418
auucuccuugcucuuaggc

SEQ ID NO: 42500 - RNA, 19 nt, Artificial Sequence
  Description of Artificial Sequence: Synthetic oligonucleotide
  Sense strand starting at position 2277 of SEQ ID NO: 505
gauuucuaguaguacugga

SEQ ID NO: 42501 - RNA, 19 nt, Artificial Sequence
  Description of Artificial Sequence: Synthetic oligonucleotide
  Antisense strand to SEQ ID NO: 42420
uccaguacuacuagaaauc

SEQ ID NO: 42502 - RNA, 19 nt, Artificial Sequence
  Description of Artificial Sequence: Synthetic oligonucleotide
  Sense strand starting at position 2274 of SEQ ID NO: 505
gccgauuucuaguaguacu

SEQ ID NO: 42503 - RNA, 19 nt, Artificial Sequence
  Description of Artificial Sequence: Synthetic oligonucleotide
  Antisense strand to SEQ ID NO: 42422
aguacuacuagaaaucggc

SEQ ID NO: 42504 - RNA, 19 nt, Artificial Sequence
  Description of Artificial Sequence: Synthetic oligonucleotide
  Sense strand starting at position 2271 of SEQ ID NO: 505
ggagccgauuucuaguagu

SEQ ID NO: 42505 - RNA, 19 nt, Artificial Sequence
  Description of Artificial Sequence: Synthetic oligonucleotide
  Antisense strand to SEQ ID NO: 42424
acuacuagaaaucggcucc

SEQ ID NO: 42506 - RNA, 19 nt, Artificial Sequence
  Description of Artificial Sequence: Synthetic oligonucleotide
  Sense strand starting at position 2173 of SEQ ID NO: 505
caagcagccuguggaaauu

SEQ ID NO: 42507 - RNA, 19 nt, Artificial Sequence
  Description of Artificial Sequence: Synthetic oligonucleotide
  Antisense strand to SEQ ID NO: 42426
aauuuccacaggcugcuug

SEQ ID NO: 42508 - RNA, 19 nt, Artificial Sequence
  Description of Artificial Sequence: Synthetic oligonucleotide
  Sense strand starting at position 2172 of SEQ ID NO: 505
ccaagcagccuguggaaau

SEQ ID NO: 42509 - RNA, 19 nt, Artificial Sequence
  Description of Artificial Sequence: Synthetic oligonucleotide
  Antisense strand to SEQ ID NO: 42428
auuuccacaggcugcuugg

SEQ ID NO: 42510 - RNA, 19 nt, Artificial Sequence
  Description of Artificial Sequence: Synthetic oligonucleotide
  Sense strand starting at position 1526 of SEQ ID NO: 505
guaguucggucuguucaau

SEQ ID NO: 42511 - RNA, 19 nt, Artificial Sequence
  Description of Artificial Sequence: Synthetic oligonucleotide
  Antisense strand to SEQ ID NO: 42430
auugaacagaccgaacuac

SEQ ID NO: 42512 - RNA, 19 nt, Artificial Sequence
  Description of Artificial Sequence: Synthetic oligonucleotide
  Sense strand starting at position 1525 of SEQ ID NO: 505
aguaguucggucuguucaa

SEQ ID NO: 42513 - RNA, 19 nt, Artificial Sequence
  Description of Artificial Sequence: Synthetic oligonucleotide
  Antisense strand to SEQ ID NO: 42432
uugaacagaccgaacuacu

SEQ ID NO: 42514 - RNA, 19 nt, Artificial Sequence
  Description of Artificial Sequence: Synthetic oligonucleotide
  Sense strand starting at position 1522 of SEQ ID NO: 505
ggaaguaguucggucuguu

SEQ ID NO: 42515 - RNA, 19 nt, Artificial Sequence
  Description of Artificial Sequence: Synthetic oligonucleotide
  Antisense strand to SEQ ID NO: 42434
aacagaccgaacuacuucc

SEQ ID NO: 42516 - RNA, 19 nt, Artificial Sequence
  Description of Artificial Sequence: Synthetic oligonucleotide
  Sense strand starting at position 1510 of SEQ ID NO: 505
accuguuucugaggaagua

SEQ ID NO: 42517 - RNA, 19 nt, Artificial Sequence
  Description of Artificial Sequence: Synthetic oligonucleotide
  Antisense strand to SEQ ID NO: 42436
uacuuccucagaaacaggu

SEQ ID NO: 42518 - RNA, 19 nt, Artificial Sequence
  Description of Artificial Sequence: Synthetic oligonucleotide
  Sense strand starting at position 1508 of SEQ ID NO: 505
ggaccuguuucugaggaag

SEQ ID NO: 42519 - RNA, 19 nt, Artificial Sequence
  Description of Artificial Sequence: Synthetic oligonucleotide
  Antisense strand to SEQ ID NO: 42438
cuuccucagaaacaggucc

SEQ ID NO: 42520 - RNA, 19 nt, Artificial Sequence
  Description of Artificial Sequence: Synthetic oligonucleotide
  Sense strand starting at position 1507 of SEQ ID NO: 505
gggaccuguuucugaggaa

SEQ ID NO: 42521 - RNA, 19 nt, Artificial Sequence
  Description of Artificial Sequence: Synthetic oligonucleotide
  Antisense strand to SEQ ID NO: 42440
uuccucagaaacagguccc

SEQ ID NO: 42522 - RNA, 19 nt, Artificial Sequence
  Description of Artificial Sequence: Synthetic oligonucleotide
  Sense strand starting at position 794 of SEQ ID NO: 505
gugcuucccugggagaaug

SEQ ID NO: 42523 - RNA, 19 nt, Artificial Sequence
  Description of Artificial Sequence: Synthetic oligonucleotide
  Antisense strand to SEQ ID NO: 42442
cauucucccagggaagcac

SEQ ID NO: 42524 - RNA, 19 nt, Artificial Sequence
  Description of Artificial Sequence: Synthetic oligonucleotide
  Sense strand starting at position 793 of SEQ ID NO: 505
ggugcuucccugggagaau

SEQ ID NO: 42525 - RNA, 19 nt, Artificial Sequence
  Description of Artificial Sequence: Synthetic oligonucleotide
  Antisense strand to SEQ ID NO: 42444
auucucccagggaagcacc

SEQ ID NO: 42526 - RNA, 19 nt, Artificial Sequence
  Description of Artificial Sequence: Synthetic oligonucleotide
  Sense strand starting at position 792 of SEQ ID NO: 505
gggugcuucccugggagaa

SEQ ID NO: 42527 - RNA, 19 nt, Artificial Sequence
  Description of Artificial Sequence: Synthetic oligonucleotide
  Antisense strand to SEQ ID NO: 42446
uucucccagggaagcaccc

SEQ ID NO: 42528 - RNA, 19 nt, Artificial Sequence
  Description of Artificial Sequence: Synthetic oligonucleotide
  Sense strand starting at position 772 of SEQ ID NO: 505
ggcugagcuuucugaaagc

SEQ ID NO: 42529 - RNA, 19 nt, Artificial Sequence
  Description of Artificial Sequence: Synthetic oligonucleotide
  Antisense strand to SEQ ID NO: 42448
gcuuucagaaagcucagcc

SEQ ID NO: 42530 - RNA, 19 nt, Artificial Sequence
  Description of Artificial Sequence: Synthetic oligonucleotide
  Sense strand starting at position 764 of SEQ ID NO: 505
cuuagaaaggcugagcuuu

SEQ ID NO: 42531 - RNA, 19 nt, Artificial Sequence
  Description of Artificial Sequence: Synthetic oligonucleotide
  Antisense strand to SEQ ID NO: 42450
aaagcucagccuuucuaag

SEQ ID NO: 42532 - RNA, 19 nt, Artificial Sequence
  Description of Artificial Sequence: Synthetic oligonucleotide
  Sense strand starting at position 754 of SEQ ID NO: 505
cugucuuagccuuagaaag

SEQ ID NO: 42533 - RNA, 19 nt, Artificial Sequence
  Description of Artificial Sequence: Synthetic oligonucleotide
  Antisense strand to SEQ ID NO: 42452
cuuucuaaggcuaagacag

SEQ ID NO: 42534 - RNA, 19 nt, Artificial Sequence
  Description of Artificial Sequence: Synthetic oligonucleotide
  Sense strand starting at position 739 of SEQ ID NO: 505
agauguuuccuccaccugu

SEQ ID NO: 42535 - RNA, 19 nt, Artificial Sequence
  Description of Artificial Sequence: Synthetic oligonucleotide
  Antisense strand to SEQ ID NO: 42454
acagguggaggaaacaucu

SEQ ID NO: 42536 - RNA, 19 nt, Artificial Sequence
  Description of Artificial Sequence: Synthetic oligonucleotide
  Sense strand starting at position 737 of SEQ ID NO: 505
cuagauguuuccuccaccu

SEQ ID NO: 42537 - RNA, 19 nt, Artificial Sequence
  Description of Artificial Sequence: Synthetic oligonucleotide
  Antisense strand to SEQ ID NO: 42456
agguggaggaaacaucuag

SEQ ID NO: 42538 - RNA, 19 nt, Artificial Sequence
  Description of Artificial Sequence: Synthetic oligonucleotide
  Sense strand starting at position 517 of SEQ ID NO: 505
uuucuugaccaguggagua

SEQ ID NO: 42539 - RNA, 19 nt, Artificial Sequence
  Description of Artificial Sequence: Synthetic oligonucleotide
  Antisense strand to SEQ ID NO: 42458
uacuccacuggucaagaaa

SEQ ID NO: 42540 - RNA, 19 nt, Artificial Sequence
  Description of Artificial Sequence: Synthetic oligonucleotide
  Sense strand starting at position 456 of SEQ ID NO: 505
gagugcacgucuccucauu

SEQ ID NO: 42541 - RNA, 19 nt, Artificial Sequence
  Description of Artificial Sequence: Synthetic oligonucleotide
  Antisense strand to SEQ ID NO: 42460
aaugaggagacgugcacuc

SEQ ID NO: 42542 - RNA, 19 nt, Artificial Sequence
  Description of Artificial Sequence: Synthetic oligonucleotide
  Sense strand starting at position 431 of SEQ ID NO: 505
ugggaacauuugggaauca

SEQ ID NO: 42543 - RNA, 19 nt, Artificial Sequence
  Description of Artificial Sequence: Synthetic oligonucleotide
  Antisense strand to SEQ ID NO: 42462
ugauucccaaauguuccca

SEQ ID NO: 42544 - RNA, 19 nt, Artificial Sequence
  Description of Artificial Sequence: Synthetic oligonucleotide
  Sense strand starting at position 420 of SEQ ID NO: 505
cucaacauuucugggaaca

SEQ ID NO: 42545 - RNA, 19 nt, Artificial Sequence
  Description of Artificial Sequence: Synthetic oligonucleotide
  Antisense strand to SEQ ID NO: 42464
uguucccagaaauguugag

SEQ ID NO: 42546 - RNA, 19 nt, Artificial Sequence
  Description of Artificial Sequence: Synthetic oligonucleotide
  Sense strand starting at position 419 of SEQ ID NO: 505
gcucaacauuucugggaac

SEQ ID NO: 42547 - RNA, 19 nt, Artificial Sequence
  Description of Artificial Sequence: Synthetic oligonucleotide
  Antisense strand to SEQ ID NO: 42466
guucccagaaauguugagc

SEQ ID NO: 42548 - RNA, 19 nt, Artificial Sequence
  Description of Artificial Sequence: Synthetic oligonucleotide
  Sense strand starting at position 79 of SEQ ID NO: 507
gaagacaggucauuaccuu

SEQ ID NO: 42549 - RNA, 19 nt, Artificial Sequence
  Description of Artificial Sequence: Synthetic oligonucleotide
  Antisense strand to SEQ ID NO: 42468
aagguaaugaccugucuuc

SEQ ID NO: 42550 - RNA, 19 nt, Artificial Sequence
  Description of Artificial Sequence: Synthetic oligonucleotide
  Sense strand starting at position 311 of SEQ ID NO: 507
agggaucagauaugugcua

SEQ ID NO: 42551 - RNA, 19 nt, Artificial Sequence
  Description of Artificial Sequence: Synthetic oligonucleotide
  Antisense strand to SEQ ID NO: 42470
uagcacauaucugaucccu

SEQ ID NO: 42552 - RNA, 19 nt, Artificial Sequence
  Description of Artificial Sequence: Synthetic oligonucleotide
  Sense strand starting at position 312 of SEQ ID NO: 507
gggaucagauaugugcuau

SEQ ID NO: 42553 - RNA, 19 nt, Artificial Sequence
  Description of Artificial Sequence: Synthetic oligonucleotide
  Antisense strand to SEQ ID NO: 42472
auagcacauaucugauccc

SEQ ID NO: 42554 - RNA, 19 nt, Artificial Sequence
  Description of Artificial Sequence: Synthetic oligonucleotide
  Sense strand starting at position 313 of SEQ ID NO: 507
ggaucagauaugugcuauc

SEQ ID NO: 42555 - RNA, 19 nt, Artificial Sequence
  Description of Artificial Sequence: Synthetic oligonucleotide
  Antisense strand to SEQ ID NO: 42474
gauagcacauaucugaucc

SEQ ID NO: 42556 - RNA, 19 nt, Artificial Sequence
  Description of Artificial Sequence: Synthetic oligonucleotide
  Sense strand starting at position 478 of SEQ ID NO: 507
uccugaguagcucauacuu

SEQ ID NO: 42557 - RNA, 19 nt, Artificial Sequence
  Description of Artificial Sequence: Synthetic oligonucleotide
  Antisense strand to SEQ ID NO: 42476
aaguaugagcuacucagga

SEQ ID NO: 42558 - RNA, 19 nt, Artificial Sequence
  Description of Artificial Sequence: Synthetic oligonucleotide
  Sense strand starting at position 685 of SEQ ID NO: 507
caucaauucggguggagag

SEQ ID NO: 42559 - RNA, 19 nt, Artificial Sequence
  Description of Artificial Sequence: Synthetic oligonucleotide
  Antisense strand to SEQ ID NO: 42478
cucuccacccgaauugaug

SEQ ID NO: 42560 - RNA, 19 nt, Artificial Sequence
  Description of Artificial Sequence: Synthetic oligonucleotide
  Sense strand starting at position 726 of SEQ ID NO: 507
cgugcagagagcuacauaa

SEQ ID NO: 42561 - RNA, 19 nt, Artificial Sequence
  Description of Artificial Sequence: Synthetic oligonucleotide
  Antisense strand to SEQ ID NO: 42480
uuauguagcucucugcacg

SEQ ID NO: 42562 - RNA, 19 nt, Artificial Sequence
  Description of Artificial Sequence: Synthetic oligonucleotide
  Sense strand starting at position 739 of SEQ ID NO: 507
acauaaggguugucuguga

SEQ ID NO: 42563 - RNA, 19 nt, Artificial Sequence
  Description of Artificial Sequence: Synthetic oligonucleotide
  Antisense strand to SEQ ID NO: 42482
ucacagacaacccuuaugu

SEQ ID NO: 42564 - RNA, 19 nt, Artificial Sequence
  Description of Artificial Sequence: Synthetic oligonucleotide
  Sense strand starting at position 795 of SEQ ID NO: 507
agaacaagaugucuugcuu

SEQ ID NO: 42565 - RNA, 19 nt, Artificial Sequence
  Description of Artificial Sequence: Synthetic oligonucleotide
  Antisense strand to SEQ ID NO: 42484
aagcaagacaucuuguucu

SEQ ID NO: 42566 - RNA, 19 nt, Artificial Sequence
  Description of Artificial Sequence: Synthetic oligonucleotide
  Sense strand starting at position 868 of SEQ ID NO: 507
ucaguuggaucucuuauaa

SEQ ID NO: 42567 - RNA, 19 nt, Artificial Sequence
  Description of Artificial Sequence: Synthetic oligonucleotide
  Antisense strand to SEQ ID NO: 42486
uuauaagagauccaacuga

SEQ ID NO: 42568 - RNA, 19 nt, Artificial Sequence
  Description of Artificial Sequence: Synthetic oligonucleotide
  Sense strand starting at position 914 of SEQ ID NO: 507
cagcguuuccugccaguua

SEQ ID NO: 42569 - RNA, 19 nt, Artificial Sequence
  Description of Artificial Sequence: Synthetic oligonucleotide
  Antisense strand to SEQ ID NO: 42488
uaacuggcaggaaacgcug

SEQ ID NO: 42570 - RNA, 19 nt, Artificial Sequence
  Description of Artificial Sequence: Synthetic oligonucleotide
  Sense strand starting at position 990 of SEQ ID NO: 507
gugcuugcucagagggagu

SEQ ID NO: 42571 - RNA, 19 nt, Artificial Sequence
  Description of Artificial Sequence: Synthetic oligonucleotide
  Antisense strand to SEQ ID NO: 42490
acucccucugagcaagcac

SEQ ID NO: 42572 - RNA, 19 nt, Artificial Sequence
  Description of Artificial Sequence: Synthetic oligonucleotide
  Sense strand starting at position 993 of SEQ ID NO: 507
cuugcucagagggaguaau

SEQ ID NO: 42573 - RNA, 19 nt, Artificial Sequence
  Description of Artificial Sequence: Synthetic oligonucleotide
  Antisense strand to SEQ ID NO: 42492
auuacucccucugagcaag

SEQ ID NO: 42574 - RNA, 19 nt, Artificial Sequence
  Description of Artificial Sequence: Synthetic oligonucleotide
  Sense strand starting at position 1012 of SEQ ID NO: 507
uagcaaauccugcagggaa

SEQ ID NO: 42575 - RNA, 19 nt, Artificial Sequence
  Description of Artificial Sequence: Synthetic oligonucleotide
  Antisense strand to SEQ ID NO: 42494
uucccugcaggauuugcua

SEQ ID NO: 42576 - RNA, 19 nt, Artificial Sequence
  Description of Artificial Sequence: Synthetic oligonucleotide
  Sense strand starting at position 1014 of SEQ ID NO: 507
gcaaauccugcagggaaga

SEQ ID NO: 42577 - RNA, 19 nt, Artificial Sequence
  Description of Artificial Sequence: Synthetic oligonucleotide
  Antisense strand to SEQ ID NO: 42496
ucuucccugcaggauuugc

SEQ ID NO: 42578 - RNA, 19 nt, Artificial Sequence
  Description of Artificial Sequence: Synthetic oligonucleotide
  Sense strand starting at position 1035 of SEQ ID NO: 507
caagacuguugaguguuaa

SEQ ID NO: 42579 - RNA, 19 nt, Artificial Sequence
  Description of Artificial Sequence: Synthetic oligonucleotide
  Antisense strand to SEQ ID NO: 42498
uuaacacucaacagucuug

SEQ ID NO: 42580 - RNA, 19 nt, Artificial Sequence
  Description of Artificial Sequence: Synthetic oligonucleotide
  Sense strand starting at position 1036 of SEQ ID NO: 507
aagacuguugaguguuaaa

SEQ ID NO: 42581 - RNA, 19 nt, Artificial Sequence
  Description of Artificial Sequence: Synthetic oligonucleotide
  Antisense strand to SEQ ID NO: 42500
uuuaacacucaacagucuu

SEQ ID NO: 42582 - RNA, 19 nt, Artificial Sequence
  Description of Artificial Sequence: Synthetic oligonucleotide
  Sense strand starting at position 1306 of SEQ ID NO: 507
ugguguuguggcucacagu

SEQ ID NO: 42583 - RNA, 19 nt, Artificial Sequence
  Description of Artificial Sequence: Synthetic oligonucleotide
  Antisense strand to SEQ ID NO: 42502
acugugagccacaacacca

SEQ ID NO: 42584 - RNA, 19 nt, Artificial Sequence
  Description of Artificial Sequence: Synthetic oligonucleotide
  Sense strand starting at position 2627 of SEQ ID NO: 507
gggaguucugccuaaggua

SEQ ID NO: 42585 - RNA, 19 nt, Artificial Sequence
  Description of Artificial Sequence: Synthetic oligonucleotide
  Antisense strand to SEQ ID NO: 42504
uaccuuaggcagaacuccc

SEQ ID NO: 42586 - RNA, 19 nt, Artificial Sequence
  Description of Artificial Sequence: Synthetic oligonucleotide
  Sense strand starting at position 2738 of SEQ ID NO: 507
agcagaagggccugaaguu

SEQ ID NO: 42587 - RNA, 19 nt, Artificial Sequence
  Description of Artificial Sequence: Synthetic oligonucleotide
  Antisense strand to SEQ ID NO: 42506
aacuucaggcccuucugcu

SEQ ID NO: 42588 - RNA, 19 nt, Artificial Sequence
  Description of Artificial Sequence: Synthetic oligonucleotide
  Sense strand starting at position 2739 of SEQ ID NO: 507
gcagaagggccugaaguua

SEQ ID NO: 42589 - RNA, 19 nt, Artificial Sequence
  Description of Artificial Sequence: Synthetic oligonucleotide
  Antisense strand to SEQ ID NO: 42508
uaacuucaggcccuucugc

SEQ ID NO: 42590 - RNA, 19 nt, Artificial Sequence
  Description of Artificial Sequence: Synthetic oligonucleotide
  Sense strand starting at position 2790 of SEQ ID NO: 507
gcugaauugcagcaagaga

SEQ ID NO: 42591 - RNA, 19 nt, Artificial Sequence
  Description of Artificial Sequence: Synthetic oligonucleotide
  Antisense strand to SEQ ID NO: 42510
ucucuugcugcaauucagc

SEQ ID NO: 42592 - RNA, 19 nt, Artificial Sequence
  Description of Artificial Sequence: Synthetic oligonucleotide
  Sense strand starting at position 2825 of SEQ ID NO: 507
gagucucuuacaggaguga

SEQ ID NO: 42593 - RNA, 19 nt, Artificial Sequence
  Description of Artificial Sequence: Synthetic oligonucleotide
  Antisense strand to SEQ ID NO: 42512
ucacuccuguaagagacuc

SEQ ID NO: 42594 - RNA, 19 nt, Artificial Sequence
  Description of Artificial Sequence: Synthetic oligonucleotide
  Sense strand starting at position 2908 of SEQ ID NO: 507
ucagccuaucaggaugauu

SEQ ID NO: 42595 - RNA, 19 nt, Artificial Sequence
  Description of Artificial Sequence: Synthetic oligonucleotide
  Antisense strand to SEQ ID NO: 42514
aaucauccugauaggcuga

SEQ ID NO: 42596 - RNA, 19 nt, Artificial Sequence
  Description of Artificial Sequence: Synthetic oligonucleotide
  Sense strand starting at position 2982 of SEQ ID NO: 507
ugcccuuagggucaaagaa

SEQ ID NO: 42597 - RNA, 19 nt, Artificial Sequence
  Description of Artificial Sequence: Synthetic oligonucleotide
  Antisense strand to SEQ ID NO: 42516
uucuuugacccuaagggca

SEQ ID NO: 42598 - RNA, 19 nt, Artificial Sequence
  Description of Artificial Sequence: Synthetic oligonucleotide
  Sense strand starting at position 3028 of SEQ ID NO: 507
auaagaaucuugccucuag

SEQ ID NO: 42599 - RNA, 19 nt, Artificial Sequence
  Description of Artificial Sequence: Synthetic oligonucleotide
  Antisense strand to SEQ ID NO: 42518
cuagaggcaagauucuuau

SEQ ID NO: 42600 - RNA, 19 nt, Artificial Sequence
  Description of Artificial Sequence: Synthetic oligonucleotide
  Sense strand starting at position 3153 of SEQ ID NO: 507
gauagauuguaucuaguuc

SEQ ID NO: 42601 - RNA, 19 nt, Artificial Sequence
  Description of Artificial Sequence: Synthetic oligonucleotide
  Antisense strand to SEQ ID NO: 42520
gaacuagauacaaucuauc

SEQ ID NO: 42602 - RNA, 19 nt, Artificial Sequence
  Description of Artificial Sequence: Synthetic oligonucleotide
  Sense strand starting at position 3444 of SEQ ID NO: 507
uuugauauaccgugaugga

SEQ ID NO: 42603 - RNA, 19 nt, Artificial Sequence
  Description of Artificial Sequence: Synthetic oligonucleotide
  Antisense strand to SEQ ID NO: 42522
uccaucacgguauaucaaa

SEQ ID NO: 42604 - RNA, 19 nt, Artificial Sequence
  Description of Artificial Sequence: Synthetic oligonucleotide
  Sense strand starting at position 3445 of SEQ ID NO: 507
uugauauaccgugauggau

SEQ ID NO: 42605 - RNA, 19 nt, Artificial Sequence
  Description of Artificial Sequence: Synthetic oligonucleotide
  Antisense strand to SEQ ID NO: 42524
auccaucacgguauaucaa

SEQ ID NO: 42606 - RNA, 19 nt, Artificial Sequence
  Description of Artificial Sequence: Synthetic oligonucleotide
  Sense strand starting at position 3451 of SEQ ID NO: 507
uaccgugauggaugagauc

SEQ ID NO: 42607 - RNA, 19 nt, Artificial Sequence
  Description of Artificial Sequence: Synthetic oligonucleotide
  Antisense strand to SEQ ID NO: 42526
gaucucauccaucacggua

SEQ ID NO: 42608 - RNA, 19 nt, Artificial Sequence
  Description of Artificial Sequence: Synthetic oligonucleotide
  Sense strand starting at position 3460 of SEQ ID NO: 507
ggaugagaucucugcagau

SEQ ID NO: 42609 - RNA, 19 nt, Artificial Sequence
  Description of Artificial Sequence: Synthetic oligonucleotide
  Antisense strand to SEQ ID NO: 42528
aucugcagagaucucaucc

SEQ ID NO: 42610 - RNA, 19 nt, Artificial Sequence
  Description of Artificial Sequence: Synthetic oligonucleotide
  Sense strand starting at position 3550 of SEQ ID NO: 507
uuuggugaacucugugaau

SEQ ID NO: 42611 - RNA, 19 nt, Artificial Sequence
  Description of Artificial Sequence: Synthetic oligonucleotide
  Antisense strand to SEQ ID NO: 42530
auucacagaguucaccaaa

SEQ ID NO: 42612 - RNA, 19 nt, Artificial Sequence
  Description of Artificial Sequence: Synthetic oligonucleotide
  Sense strand starting at position 3552 of SEQ ID NO: 507
uggugaacucugugaauga

SEQ ID NO: 42613 - RNA, 19 nt, Artificial Sequence
  Description of Artificial Sequence: Synthetic oligonucleotide
  Antisense strand to SEQ ID NO: 42532
ucauucacagaguucacca

SEQ ID NO: 42614 - RNA, 19 nt, Artificial Sequence
  Description of Artificial Sequence: Synthetic oligonucleotide
  Sense strand starting at position 3556 of SEQ ID NO: 507
gaacucugugaaugaucca

SEQ ID NO: 42615 - RNA, 19 nt, Artificial Sequence
  Description of Artificial Sequence: Synthetic oligonucleotide
  Antisense strand to SEQ ID NO: 42534
uggaucauucacagaguuc

SEQ ID NO: 42616 - RNA, 19 nt, Artificial Sequence
  Description of Artificial Sequence: Synthetic oligonucleotide
  Sense strand starting at position 3559 of SEQ ID NO: 507
cucugugaaugauccaaga

SEQ ID NO: 42617 - RNA, 19 nt, Artificial Sequence
  Description of Artificial Sequence: Synthetic oligonucleotide
  Antisense strand to SEQ ID NO: 42536
ucuuggaucauucacagag

SEQ ID NO: 42618 - RNA, 19 nt, Artificial Sequence
  Description of Artificial Sequence: Synthetic oligonucleotide
  Sense strand starting at position 3631 of SEQ ID NO: 507
aguacauguuccucugaau

SEQ ID NO: 42619 - RNA, 19 nt, Artificial Sequence
  Description of Artificial Sequence: Synthetic oligonucleotide
  Antisense strand to SEQ ID NO: 42538
auucagaggaacauguacu

SEQ ID NO: 42620 - RNA, 19 nt, Artificial Sequence
  Description of Artificial Sequence: Synthetic oligonucleotide
  Sense strand starting at position 3770 of SEQ ID NO: 507
gagagaaugaggcgauuau

SEQ ID NO: 42621 - RNA, 19 nt, Artificial Sequence
  Description of Artificial Sequence: Synthetic oligonucleotide
  Antisense strand to SEQ ID NO: 42540
auaaucgccucauucucuc

SEQ ID NO: 42622 - RNA, 19 nt, Artificial Sequence
  Description of Artificial Sequence: Synthetic oligonucleotide
  Sense strand starting at position 3774 of SEQ ID NO: 507
gaaugaggcgauuauguuc

SEQ ID NO: 42623 - RNA, 19 nt, Artificial Sequence
  Description of Artificial Sequence: Synthetic oligonucleotide
  Antisense strand to SEQ ID NO: 42542
gaacauaaucgccucauuc

SEQ ID NO: 42624 - RNA, 19 nt, Artificial Sequence
  Description of Artificial Sequence: Synthetic oligonucleotide
  Sense strand starting at position 3889 of SEQ ID NO: 507
cucccucuaguggauagau

SEQ ID NO: 42625 - RNA, 19 nt, Artificial Sequence
  Description of Artificial Sequence: Synthetic oligonucleotide
  Antisense strand to SEQ ID NO: 42544
aucuauccacuagagggag

SEQ ID NO: 42626 - RNA, 19 nt, Artificial Sequence
  Description of Artificial Sequence: Synthetic oligonucleotide
  Sense strand starting at position 3964 of SEQ ID NO: 507
ucucucagugauugcauuu

SEQ ID NO: 42627 - RNA, 19 nt, Artificial Sequence
  Description of Artificial Sequence: Synthetic oligonucleotide
  Antisense strand to SEQ ID NO: 42546
aaaugcaaucacugagaga

SEQ ID NO: 42628 - RNA, 19 nt, Artificial Sequence
  Description of Artificial Sequence: Synthetic oligonucleotide
  Sense strand starting at position 33 of SEQ ID NO: 508
uauggaagguucccuauga

SEQ ID NO: 42629 - RNA, 19 nt, Artificial Sequence
  Description of Artificial Sequence: Synthetic oligonucleotide
  Antisense strand to SEQ ID NO: 42548
ucauagggaaccuuccaua

SEQ ID NO: 42630 - RNA, 19 nt, Artificial Sequence
  Description of Artificial Sequence: Synthetic oligonucleotide
  Sense strand starting at position 69 of SEQ ID NO: 508
agauacaaucugggagcua

SEQ ID NO: 42631 - RNA, 19 nt, Artificial Sequence
  Description of Artificial Sequence: Synthetic oligonucleotide
  Antisense strand to SEQ ID NO: 42550
uagcucccagauuguaucu

SEQ ID NO: 42632 - RNA, 19 nt, Artificial Sequence
  Description of Artificial Sequence: Synthetic oligonucleotide
  Sense strand starting at position 106 of SEQ ID NO: 508
agguaaacaggucauuguu

SEQ ID NO: 42633 - RNA, 19 nt, Artificial Sequence
  Description of Artificial Sequence: Synthetic oligonucleotide
  Antisense strand to SEQ ID NO: 42552
aacaaugaccuguuuaccu

SEQ ID NO: 42634 - RNA, 19 nt, Artificial Sequence
  Description of Artificial Sequence: Synthetic oligonucleotide
  Sense strand starting at position 143 of SEQ ID NO: 508
cauagacuacaagguguua

SEQ ID NO: 42635 - RNA, 19 nt, Artificial Sequence
  Description of Artificial Sequence: Synthetic oligonucleotide
  Antisense strand to SEQ ID NO: 42554
uaacaccuuguagucuaug

SEQ ID NO: 42636 - RNA, 19 nt, Artificial Sequence
  Description of Artificial Sequence: Synthetic oligonucleotide
  Sense strand starting at position 197 of SEQ ID NO: 508
ccagguaugcauuaugagu

SEQ ID NO: 42637 - RNA, 19 nt, Artificial Sequence
  Description of Artificial Sequence: Synthetic oligonucleotide
  Antisense strand to SEQ ID NO: 42556
acucauaaugcauaccugg

SEQ ID NO: 42638 - RNA, 19 nt, Artificial Sequence
  Description of Artificial Sequence: Synthetic oligonucleotide
  Sense strand starting at position 202 of SEQ ID NO: 508
uaugcauuaugagugaaug

SEQ ID NO: 42639 - RNA, 19 nt, Artificial Sequence
  Description of Artificial Sequence: Synthetic oligonucleotide
  Antisense strand to SEQ ID NO: 42558
cauucacucauaaugcaua

SEQ ID NO: 42640 - RNA, 19 nt, Artificial Sequence
  Description of Artificial Sequence: Synthetic oligonucleotide
  Sense strand starting at position 203 of SEQ ID NO: 508
augcauuaugagugaauga

SEQ ID NO: 42641 - RNA, 19 nt, Artificial Sequence
  Description of Artificial Sequence: Synthetic oligonucleotide
  Antisense strand to SEQ ID NO: 42560
ucauucacucauaaugcau

SEQ ID NO: 42642 - RNA, 19 nt, Artificial Sequence
  Description of Artificial Sequence: Synthetic oligonucleotide
  Sense strand starting at position 837 of SEQ ID NO: 508
acaggugugaacgaugacu

SEQ ID NO: 42643 - RNA, 19 nt, Artificial Sequence
  Description of Artificial Sequence: Synthetic oligonucleotide
  Antisense strand to SEQ ID NO: 42562
agucaucguucacaccugu

SEQ ID NO: 42644 - RNA, 19 nt, Artificial Sequence
  Description of Artificial Sequence: Synthetic oligonucleotide
  Sense strand starting at position 1130 of SEQ ID NO: 508
cucuauuuguuucuguuau

SEQ ID NO: 42645 - RNA, 19 nt, Artificial Sequence
  Description of Artificial Sequence: Synthetic oligonucleotide
  Antisense strand to SEQ ID NO: 42564
auaacagaaacaaauagag

SEQ ID NO: 42646 - RNA, 19 nt, Artificial Sequence
  Description of Artificial Sequence: Synthetic oligonucleotide
  Sense strand starting at position 1132 of SEQ ID NO: 508
cuauuuguuucuguuauac

SEQ ID NO: 42647 - RNA, 19 nt, Artificial Sequence
  Description of Artificial Sequence: Synthetic oligonucleotide
  Antisense strand to SEQ ID NO: 42566
guauaacagaaacaaauag

SEQ ID NO: 42648 - RNA, 19 nt, Artificial Sequence
  Description of Artificial Sequence: Synthetic oligonucleotide
  Sense strand starting at position 1260 of SEQ ID NO: 508
gagaaacaguuauuaagca

SEQ ID NO: 42649 - RNA, 19 nt, Artificial Sequence
  Description of Artificial Sequence: Synthetic oligonucleotide
  Antisense strand to SEQ ID NO: 42568
ugcuuaauaacuguuucuc

SEQ ID NO: 42650 - RNA, 19 nt, Artificial Sequence
  Description of Artificial Sequence: Synthetic oligonucleotide
  Sense strand starting at position 1357 of SEQ ID NO: 508
guguguaucgcaguugacu

SEQ ID NO: 42651 - RNA, 19 nt, Artificial Sequence
  Description of Artificial Sequence: Synthetic oligonucleotide
  Antisense strand to SEQ ID NO: 42570
agucaacugcgauacacac

SEQ ID NO: 42652 - RNA, 19 nt, Artificial Sequence
  Description of Artificial Sequence: Synthetic oligonucleotide
  Sense strand starting at position 1358 of SEQ ID NO: 508
uguguaucgcaguugacuu

SEQ ID NO: 42653 - RNA, 19 nt, Artificial Sequence
  Description of Artificial Sequence: Synthetic oligonucleotide
  Antisense strand to SEQ ID NO: 42572
aagucaacugcgauacaca

SEQ ID NO: 42654 - RNA, 19 nt, Artificial Sequence
  Description of Artificial Sequence: Synthetic oligonucleotide
  Sense strand starting at position 1860 of SEQ ID NO: 508
ucugaaguccuggagcgau

SEQ ID NO: 42655 - RNA, 19 nt, Artificial Sequence
  Description of Artificial Sequence: Synthetic oligonucleotide
  Antisense strand to SEQ ID NO: 42574
aucgcuccaggacuucaga

SEQ ID NO: 42656 - RNA, 19 nt, Artificial Sequence
  Description of Artificial Sequence: Synthetic oligonucleotide
  Sense strand starting at position 2030 of SEQ ID NO: 508
agaauauccugacugugau

SEQ ID NO: 42657 - RNA, 19 nt, Artificial Sequence
  Description of Artificial Sequence: Synthetic oligonucleotide
  Antisense strand to SEQ ID NO: 42576
aucacagucaggauauucu

SEQ ID NO: 42658 - RNA, 19 nt, Artificial Sequence
  Description of Artificial Sequence: Synthetic oligonucleotide
  Sense strand starting at position 2031 of SEQ ID NO: 508
gaauauccugacugugauu

SEQ ID NO: 42659 - RNA, 19 nt, Artificial Sequence
  Description of Artificial Sequence: Synthetic oligonucleotide
  Antisense strand to SEQ ID NO: 42578
aaucacagucaggauauuc

SEQ ID NO: 42660 - RNA, 19 nt, Artificial Sequence
  Description of Artificial Sequence: Synthetic oligonucleotide
  Sense strand starting at position 2038 of SEQ ID NO: 508
cugacugugauugguugaa

SEQ ID NO: 42661 - RNA, 19 nt, Artificial Sequence
  Description of Artificial Sequence: Synthetic oligonucleotide
  Antisense strand to SEQ ID NO: 42580
uucaaccaaucacagucag

SEQ ID NO: 42662 - RNA, 19 nt, Artificial Sequence
  Description of Artificial Sequence: Synthetic oligonucleotide
  Sense strand starting at position 2040 of SEQ ID NO: 508
gacugugauugguugaauu

SEQ ID NO: 42663 - RNA, 19 nt, Artificial Sequence
  Description of Artificial Sequence: Synthetic oligonucleotide
  Antisense strand to SEQ ID NO: 42582
aauucaaccaaucacaguc

SEQ ID NO: 42664 - RNA, 19 nt, Artificial Sequence
  Description of Artificial Sequence: Synthetic oligonucleotide
  Sense strand starting at position 2588 of SEQ ID NO: 508
ugggcaagacauugaaacu

SEQ ID NO: 42665 - RNA, 19 nt, Artificial Sequence
  Description of Artificial Sequence: Synthetic oligonucleotide
  Antisense strand to SEQ ID NO: 42584
aguuucaaugucuugccca

SEQ ID NO: 42666 - RNA, 19 nt, Artificial Sequence
  Description of Artificial Sequence: Synthetic oligonucleotide
  Sense strand starting at position 2617 of SEQ ID NO: 508
ugguuucuucgucugcgaa

SEQ ID NO: 42667 - RNA, 19 nt, Artificial Sequence
  Description of Artificial Sequence: Synthetic oligonucleotide
  Antisense strand to SEQ ID NO: 42586
uucgcagacgaagaaacca

SEQ ID NO: 42668 - RNA, 19 nt, Artificial Sequence
  Description of Artificial Sequence: Synthetic oligonucleotide
  Sense strand starting at position 2659 of SEQ ID NO: 508
uucugaggguuguuagaau

SEQ ID NO: 42669 - RNA, 19 nt, Artificial Sequence
  Description of Artificial Sequence: Synthetic oligonucleotide
  Antisense strand to SEQ ID NO: 42588
auucuaacaacccucagaa

SEQ ID NO: 42670 - RNA, 19 nt, Artificial Sequence
  Description of Artificial Sequence: Synthetic oligonucleotide
  Sense strand starting at position 2671 of SEQ ID NO: 508
uuagaauugaguuguaagg

SEQ ID NO: 42671 - RNA, 19 nt, Artificial Sequence
  Description of Artificial Sequence: Synthetic oligonucleotide
  Antisense strand to SEQ ID NO: 42590
ccuuacaacucaauucuaa

SEQ ID NO: 42672 - RNA, 19 nt, Artificial Sequence
  Description of Artificial Sequence: Synthetic oligonucleotide
  Sense strand starting at position 2704 of SEQ ID NO: 508
gcaggaguaauagagaguu

SEQ ID NO: 42673 - RNA, 19 nt, Artificial Sequence
  Description of Artificial Sequence: Synthetic oligonucleotide
  Antisense strand to SEQ ID NO: 42592
aacucucuauuacuccugc

SEQ ID NO: 42674 - RNA, 19 nt, Artificial Sequence
  Description of Artificial Sequence: Synthetic oligonucleotide
  Sense strand starting at position 2716 of SEQ ID NO: 508
gagaguuugcgugucagca

SEQ ID NO: 42675 - RNA, 19 nt, Artificial Sequence
  Description of Artificial Sequence: Synthetic oligonucleotide
  Antisense strand to SEQ ID NO: 42594
ugcugacacgcaaacucuc

SEQ ID NO: 42676 - RNA, 19 nt, Artificial Sequence
  Description of Artificial Sequence: Synthetic oligonucleotide
  Sense strand starting at position 2717 of SEQ ID NO: 508
agaguuugcgugucagcau

SEQ ID NO: 42677 - RNA, 19 nt, Artificial Sequence
  Description of Artificial Sequence: Synthetic oligonucleotide
  Antisense strand to SEQ ID NO: 42596
augcugacacgcaaacucu

SEQ ID NO: 42678 - RNA, 19 nt, Artificial Sequence
  Description of Artificial Sequence: Synthetic oligonucleotide
  Sense strand starting at position 2775 of SEQ ID NO: 508
cuuugacuuugggcaaaug

SEQ ID NO: 42679 - RNA, 19 nt, Artificial Sequence
  Description of Artificial Sequence: Synthetic oligonucleotide
  Antisense strand to SEQ ID NO: 42598
cauuugcccaaagucaaag

SEQ ID NO: 42680 - RNA, 19 nt, Artificial Sequence
  Description of Artificial Sequence: Synthetic oligonucleotide
  Sense strand starting at position 2854 of SEQ ID NO: 508
uugaccuuuccaggucuga

SEQ ID NO: 42681 - RNA, 19 nt, Artificial Sequence
  Description of Artificial Sequence: Synthetic oligonucleotide
  Antisense strand to SEQ ID NO: 42600
ucagaccuggaaaggucaa

SEQ ID NO: 42682 - RNA, 19 nt, Artificial Sequence
  Description of Artificial Sequence: Synthetic oligonucleotide
  Sense strand starting at position 2876 of SEQ ID NO: 508
ucuggagauuaacuguaua

SEQ ID NO: 42683 - RNA, 19 nt, Artificial Sequence
  Description of Artificial Sequence: Synthetic oligonucleotide
  Antisense strand to SEQ ID NO: 42602
uauacaguuaaucuccaga

SEQ ID NO: 42684 - RNA, 19 nt, Artificial Sequence
  Description of Artificial Sequence: Synthetic oligonucleotide
  Sense strand starting at position 2902 of SEQ ID NO: 508
aguaguuggagagaguuua

SEQ ID NO: 42685 - RNA, 19 nt, Artificial Sequence
  Description of Artificial Sequence: Synthetic oligonucleotide
  Antisense strand to SEQ ID NO: 42604
uaaacucucuccaacuacu

SEQ ID NO: 42686 - RNA, 19 nt, Artificial Sequence
  Description of Artificial Sequence: Synthetic oligonucleotide
  Sense strand starting at position 2913 of SEQ ID NO: 508
agaguuuauaguggagaca

SEQ ID NO: 42687 - RNA, 19 nt, Artificial Sequence
  Description of Artificial Sequence: Synthetic oligonucleotide
  Antisense strand to SEQ ID NO: 42606
ugucuccacuauaaacucu

SEQ ID NO: 42688 - RNA, 19 nt, Artificial Sequence
  Description of Artificial Sequence: Synthetic oligonucleotide
  Sense strand starting at position 2926 of SEQ ID NO: 508
gagacagcaggauguuuaa

SEQ ID NO: 42689 - RNA, 19 nt, Artificial Sequence
  Description of Artificial Sequence: Synthetic oligonucleotide
  Antisense strand to SEQ ID NO: 42608
uuaaacauccugcugucuc

SEQ ID NO: 42690 - RNA, 19 nt, Artificial Sequence
  Description of Artificial Sequence: Synthetic oligonucleotide
  Sense strand starting at position 3031 of SEQ ID NO: 508
ccugucuaucuagaacagu

SEQ ID NO: 42691 - RNA, 19 nt, Artificial Sequence
  Description of Artificial Sequence: Synthetic oligonucleotide
  Antisense strand to SEQ ID NO: 42610
acuguucuagauagacagg

SEQ ID NO: 42692 - RNA, 19 nt, Artificial Sequence
  Description of Artificial Sequence: Synthetic oligonucleotide
  Sense strand starting at position 3247 of SEQ ID NO: 508
gaauaaauccuagguuuga

SEQ ID NO: 42693 - RNA, 19 nt, Artificial Sequence
  Description of Artificial Sequence: Synthetic oligonucleotide
  Antisense strand to SEQ ID NO: 42612
ucaaaccuaggauuuauuc

SEQ ID NO: 42694 - RNA, 19 nt, Artificial Sequence
  Description of Artificial Sequence: Synthetic oligonucleotide
  Sense strand starting at position 3248 of SEQ ID NO: 508
aauaaauccuagguuugag

SEQ ID NO: 42695 - RNA, 19 nt, Artificial Sequence
  Description of Artificial Sequence: Synthetic oligonucleotide
  Antisense strand to SEQ ID NO: 42614
cucaaaccuaggauuuauu

SEQ ID NO: 42696 - RNA, 19 nt, Artificial Sequence
  Description of Artificial Sequence: Synthetic oligonucleotide
  Sense strand starting at position 3395 of SEQ ID NO: 508
uugagugacccugguaaca

SEQ ID NO: 42697 - RNA, 19 nt, Artificial Sequence
  Description of Artificial Sequence: Synthetic oligonucleotide
  Antisense strand to SEQ ID NO: 42616
uguuaccagggucacucaa

SEQ ID NO: 42698 - RNA, 19 nt, Artificial Sequence
  Description of Artificial Sequence: Synthetic oligonucleotide
  Sense strand starting at position 3423 of SEQ ID NO: 508
ggaugaaugcauuagcagu

SEQ ID NO: 42699 - RNA, 19 nt, Artificial Sequence
  Description of Artificial Sequence: Synthetic oligonucleotide
  Antisense strand to SEQ ID NO: 42618
acugcuaaugcauucaucc

SEQ ID NO: 42700 - RNA, 19 nt, Artificial Sequence
  Description of Artificial Sequence: Synthetic oligonucleotide
  Sense strand starting at position 3523 of SEQ ID NO: 508
uucuguaggcuguaauaaa

SEQ ID NO: 42701 - RNA, 19 nt, Artificial Sequence
  Description of Artificial Sequence: Synthetic oligonucleotide
  Antisense strand to SEQ ID NO: 42620
uuuauuacagccuacagaa

SEQ ID NO: 42702 - RNA, 19 nt, Artificial Sequence
  Description of Artificial Sequence: Synthetic oligonucleotide
  Sense strand starting at position 3580 of SEQ ID NO: 508
aauggagagaggugauguu

SEQ ID NO: 42703 - RNA, 19 nt, Artificial Sequence
  Description of Artificial Sequence: Synthetic oligonucleotide
  Antisense strand to SEQ ID NO: 42622
aacaucaccucucuccauu

SEQ ID NO: 42704 - RNA, 19 nt, Artificial Sequence
  Description of Artificial Sequence: Synthetic oligonucleotide
  Sense strand starting at position 3590 of SEQ ID NO: 508
ggugauguucuuuagggua

SEQ ID NO: 42705 - RNA, 19 nt, Artificial Sequence
  Description of Artificial Sequence: Synthetic oligonucleotide
  Antisense strand to SEQ ID NO: 42624
uacccuaaagaacaucacc

SEQ ID NO: 42706 - RNA, 19 nt, Artificial Sequence
  Description of Artificial Sequence: Synthetic oligonucleotide
  Sense strand starting at position 3595 of SEQ ID NO: 508
uguucuuuaggguagacau

SEQ ID NO: 42707 - RNA, 19 nt, Artificial Sequence
  Description of Artificial Sequence: Synthetic oligonucleotide
  Antisense strand to SEQ ID NO: 42626
augucuacccuaaagaaca

SEQ ID NO: 42708 - RNA, 19 nt, Artificial Sequence
  Description of Artificial Sequence: Synthetic oligonucleotide
  Sense strand starting at position 268 of SEQ ID NO: 509
aguacaguuuaggcaaaua

SEQ ID NO: 42709 - RNA, 19 nt, Artificial Sequence
  Description of Artificial Sequence: Synthetic oligonucleotide
  Antisense strand to SEQ ID NO: 42628
uauuugccuaaacuguacu

SEQ ID NO: 42710 - RNA, 19 nt, Artificial Sequence
  Description of Artificial Sequence: Synthetic oligonucleotide
  Sense strand starting at position 643 of SEQ ID NO: 509
uggcacauuuaucaagaua

SEQ ID NO: 42711 - RNA, 19 nt, Artificial Sequence
  Description of Artificial Sequence: Synthetic oligonucleotide
  Antisense strand to SEQ ID NO: 42630
uaucuugauaaaugugcca

SEQ ID NO: 42712 - RNA, 19 nt, Artificial Sequence
  Description of Artificial Sequence: Synthetic oligonucleotide
  Sense strand starting at position 658 of SEQ ID NO: 509
gauagacuauaucuugugu

SEQ ID NO: 42713 - RNA, 19 nt, Artificial Sequence
  Description of Artificial Sequence: Synthetic oligonucleotide
  Antisense strand to SEQ ID NO: 42632
acacaagauauagucuauc

SEQ ID NO: 42714 - RNA, 19 nt, Artificial Sequence
  Description of Artificial Sequence: Synthetic oligonucleotide
  Sense strand starting at position 720 of SEQ ID NO: 509
auaguaugauguuugacca

SEQ ID NO: 42715 - RNA, 19 nt, Artificial Sequence
  Description of Artificial Sequence: Synthetic oligonucleotide
  Antisense strand to SEQ ID NO: 42634
uggucaaacaucauacuau

SEQ ID NO: 42716 - RNA, 19 nt, Artificial Sequence
  Description of Artificial Sequence: Synthetic oligonucleotide
  Sense strand starting at position 894 of SEQ ID NO: 509
ggguauuucucccauaaag

SEQ ID NO: 42717 - RNA, 19 nt, Artificial Sequence
  Description of Artificial Sequence: Synthetic oligonucleotide
  Antisense strand to SEQ ID NO: 42636
cuuuaugggagaaauaccc

SEQ ID NO: 42718 - RNA, 19 nt, Artificial Sequence
  Description of Artificial Sequence: Synthetic oligonucleotide
  Sense strand starting at position 1017 of SEQ ID NO: 509
acuauaugucaguauugac

SEQ ID NO: 42719 - RNA, 19 nt, Artificial Sequence
  Description of Artificial Sequence: Synthetic oligonucleotide
  Antisense strand to SEQ ID NO: 42638
gucaauacugacauauagu

SEQ ID NO: 42720 - RNA, 19 nt, Artificial Sequence
  Description of Artificial Sequence: Synthetic oligonucleotide
  Sense strand starting at position 1120 of SEQ ID NO: 509
caguauugguuucuugaga

SEQ ID NO: 42721 - RNA, 19 nt, Artificial Sequence
  Description of Artificial Sequence: Synthetic oligonucleotide
  Antisense strand to SEQ ID NO: 42640
ucucaagaaaccaauacug

SEQ ID NO: 42722 - RNA, 19 nt, Artificial Sequence
  Description of Artificial Sequence: Synthetic oligonucleotide
  Sense strand starting at position 1121 of SEQ ID NO: 509
aguauugguuucuugagau

SEQ ID NO: 42723 - RNA, 19 nt, Artificial Sequence
  Description of Artificial Sequence: Synthetic oligonucleotide
  Antisense strand to SEQ ID NO: 42642
aucucaagaaaccaauacu

SEQ ID NO: 42724 - RNA, 19 nt, Artificial Sequence
  Description of Artificial Sequence: Synthetic oligonucleotide
  Sense strand starting at position 1127 of SEQ ID NO: 509
gguuucuugagauaggguu

SEQ ID NO: 42725 - RNA, 19 nt, Artificial Sequence
  Description of Artificial Sequence: Synthetic oligonucleotide
  Antisense strand to SEQ ID NO: 42644
aacccuaucucaagaaacc

SEQ ID NO: 42726 - RNA, 19 nt, Artificial Sequence
  Description of Artificial Sequence: Synthetic oligonucleotide
  Sense strand starting at position 1140 of SEQ ID NO: 509
aggguuugaugucugagag

SEQ ID NO: 42727 - RNA, 19 nt, Artificial Sequence
  Description of Artificial Sequence: Synthetic oligonucleotide
  Antisense strand to SEQ ID NO: 42646
cucucagacaucaaacccu

SEQ ID NO: 42728 - RNA, 19 nt, Artificial Sequence
  Description of Artificial Sequence: Synthetic oligonucleotide
  Sense strand starting at position 1141 of SEQ ID NO: 509
ggguuugaugucugagaga

SEQ ID NO: 42729 - RNA, 19 nt, Artificial Sequence
  Description of Artificial Sequence: Synthetic oligonucleotide
  Antisense strand to SEQ ID NO: 42648
ucucucagacaucaaaccc

SEQ ID NO: 42730 - RNA, 19 nt, Artificial Sequence
  Description of Artificial Sequence: Synthetic oligonucleotide
  Sense strand starting at position 1167 of SEQ ID NO: 509
agaacuuggucaccagagu

SEQ ID NO: 42731 - RNA, 19 nt, Artificial Sequence
  Description of Artificial Sequence: Synthetic oligonucleotide
  Antisense strand to SEQ ID NO: 42650
acucuggugaccaaguucu

SEQ ID NO: 42732 - RNA, 19 nt, Artificial Sequence
  Description of Artificial Sequence: Synthetic oligonucleotide
  Sense strand starting at position 1314 of SEQ ID NO: 509
aauuauuacuuagugagag

SEQ ID NO: 42733 - RNA, 19 nt, Artificial Sequence
  Description of Artificial Sequence: Synthetic oligonucleotide
  Antisense strand to SEQ ID NO: 42652
cucucacuaaguaauaauu

SEQ ID NO: 42734 - RNA, 19 nt, Artificial Sequence
  Description of Artificial Sequence: Synthetic oligonucleotide
  Sense strand starting at position 1316 of SEQ ID NO: 509
uuauuacuuagugagagug

SEQ ID NO: 42735 - RNA, 19 nt, Artificial Sequence
  Description of Artificial Sequence: Synthetic oligonucleotide
  Antisense strand to SEQ ID NO: 42654
cacucucacuaaguaauaa

SEQ ID NO: 42736 - RNA, 19 nt, Artificial Sequence
  Description of Artificial Sequence: Synthetic oligonucleotide
  Sense strand starting at position 1358 of SEQ ID NO: 509
gcuggagggcucaguuagu

SEQ ID NO: 42737 - RNA, 19 nt, Artificial Sequence
  Description of Artificial Sequence: Synthetic oligonucleotide
  Antisense strand to SEQ ID NO: 42656
acuaacugagcccuccagc

SEQ ID NO: 42738 - RNA, 19 nt, Artificial Sequence
  Description of Artificial Sequence: Synthetic oligonucleotide
  Sense strand starting at position 1371 of SEQ ID NO: 509
guuaguguagugggaauaa

SEQ ID NO: 42739 - RNA, 19 nt, Artificial Sequence
  Description of Artificial Sequence: Synthetic oligonucleotide
  Antisense strand to SEQ ID NO: 42658
uuauucccacuacacuaac

SEQ ID NO: 42740 - RNA, 19 nt, Artificial Sequence
  Description of Artificial Sequence: Synthetic oligonucleotide
  Sense strand starting at position 1414 of SEQ ID NO: 509
gagguaguauuaucaccau

SEQ ID NO: 42741 - RNA, 19 nt, Artificial Sequence
  Description of Artificial Sequence: Synthetic oligonucleotide
  Antisense strand to SEQ ID NO: 42660
auggugauaauacuaccuc

SEQ ID NO: 42742 - RNA, 19 nt, Artificial Sequence
  Description of Artificial Sequence: Synthetic oligonucleotide
  Sense strand starting at position 1436 of SEQ ID NO: 509
auguaugggaaaugaaguu

SEQ ID NO: 42743 - RNA, 19 nt, Artificial Sequence
  Description of Artificial Sequence: Synthetic oligonucleotide
  Antisense strand to SEQ ID NO: 42662
aacuucauuucccauacau

SEQ ID NO: 42744 - RNA, 19 nt, Artificial Sequence
  Description of Artificial Sequence: Synthetic oligonucleotide
  Sense strand starting at position 1500 of SEQ ID NO: 509
agggcaagguaaucacauu

SEQ ID NO: 42745 - RNA, 19 nt, Artificial Sequence
  Description of Artificial Sequence: Synthetic oligonucleotide
  Antisense strand to SEQ ID NO: 42664
aaugugauuaccuugcccu

SEQ ID NO: 42746 - RNA, 19 nt, Artificial Sequence
  Description of Artificial Sequence: Synthetic oligonucleotide
  Sense strand starting at position 1532 of SEQ ID NO: 509
uccaguaauguuuaacaug

SEQ ID NO: 42747 - RNA, 19 nt, Artificial Sequence
  Description of Artificial Sequence: Synthetic oligonucleotide
  Antisense strand to SEQ ID NO: 42666
cauguuaaacauuacugga

SEQ ID NO: 42748 - RNA, 19 nt, Artificial Sequence
  Description of Artificial Sequence: Synthetic oligonucleotide
  Sense strand starting at position 1613 of SEQ ID NO: 509
gccaguuaauggguuagga

SEQ ID NO: 42749 - RNA, 19 nt, Artificial Sequence
  Description of Artificial Sequence: Synthetic oligonucleotide
  Antisense strand to SEQ ID NO: 42668
uccuaacccauuaacuggc

SEQ ID NO: 42750 - RNA, 19 nt, Artificial Sequence
  Description of Artificial Sequence: Synthetic oligonucleotide
  Sense strand starting at position 1726 of SEQ ID NO: 509
ccuugugcugcagaacaga

SEQ ID NO: 42751 - RNA, 19 nt, Artificial Sequence
  Description of Artificial Sequence: Synthetic oligonucleotide
  Antisense strand to SEQ ID NO: 42670
ucuguucugcagcacaagg

SEQ ID NO: 42752 - RNA, 19 nt, Artificial Sequence
  Description of Artificial Sequence: Synthetic oligonucleotide
  Sense strand starting at position 1809 of SEQ ID NO: 509
gcucgaaguccacaaggaa

SEQ ID NO: 42753 - RNA, 19 nt, Artificial Sequence
  Description of Artificial Sequence: Synthetic oligonucleotide
  Antisense strand to SEQ ID NO: 42672
uuccuuguggacuucgagc

SEQ ID NO: 42754 - RNA, 19 nt, Artificial Sequence
  Description of Artificial Sequence: Synthetic oligonucleotide
  Sense strand starting at position 2202 of SEQ ID NO: 509
uagaaagcucauggguuua

SEQ ID NO: 42755 - RNA, 19 nt, Artificial Sequence
  Description of Artificial Sequence: Synthetic oligonucleotide
  Antisense strand to SEQ ID NO: 42674
uaaacccaugagcuuucua

SEQ ID NO: 42756 - RNA, 19 nt, Artificial Sequence
  Description of Artificial Sequence: Synthetic oligonucleotide
  Sense strand starting at position 2204 of SEQ ID NO: 509
gaaagcucauggguuuacu

SEQ ID NO: 42757 - RNA, 19 nt, Artificial Sequence
  Description of Artificial Sequence: Synthetic oligonucleotide
  Antisense strand to SEQ ID NO: 42676
aguaaacccaugagcuuuc

SEQ ID NO: 42758 - RNA, 19 nt, Artificial Sequence
  Description of Artificial Sequence: Synthetic oligonucleotide
  Sense strand starting at position 2291 of SEQ ID NO: 509
cugguaaacagcgauaaca

SEQ ID NO: 42759 - RNA, 19 nt, Artificial Sequence
  Description of Artificial Sequence: Synthetic oligonucleotide
  Antisense strand to SEQ ID NO: 42678
uguuaucgcuguuuaccag

SEQ ID NO: 42760 - RNA, 19 nt, Artificial Sequence
  Description of Artificial Sequence: Synthetic oligonucleotide
  Sense strand starting at position 2522 of SEQ ID NO: 509
uuugaaagugucuggaaga

SEQ ID NO: 42761 - RNA, 19 nt, Artificial Sequence
  Description of Artificial Sequence: Synthetic oligonucleotide
  Antisense strand to SEQ ID NO: 42680
ucuuccagacacuuucaaa

SEQ ID NO: 42762 - RNA, 19 nt, Artificial Sequence
  Description of Artificial Sequence: Synthetic oligonucleotide
  Sense strand starting at position 2598 of SEQ ID NO: 509
auuaacauuuguugaagga

SEQ ID NO: 42763 - RNA, 19 nt, Artificial Sequence
  Description of Artificial Sequence: Synthetic oligonucleotide
  Antisense strand to SEQ ID NO: 42682
uccuucaacaaauguuaau

SEQ ID NO: 42764 - RNA, 19 nt, Artificial Sequence
  Description of Artificial Sequence: Synthetic oligonucleotide
  Sense strand starting at position 2613 of SEQ ID NO: 509
aggaaugucuuaguuccga

SEQ ID NO: 42765 - RNA, 19 nt, Artificial Sequence
  Description of Artificial Sequence: Synthetic oligonucleotide
  Antisense strand to SEQ ID NO: 42684
ucggaacuaagacauuccu

SEQ ID NO: 42766 - RNA, 19 nt, Artificial Sequence
  Description of Artificial Sequence: Synthetic oligonucleotide
  Sense strand starting at position 3114 of SEQ ID NO: 509
ugaaaugagaguugaaguc

SEQ ID NO: 42767 - RNA, 19 nt, Artificial Sequence
  Description of Artificial Sequence: Synthetic oligonucleotide
  Antisense strand to SEQ ID NO: 42686
gacuucaacucucauuuca

SEQ ID NO: 42768 - RNA, 19 nt, Artificial Sequence
  Description of Artificial Sequence: Synthetic oligonucleotide
  Sense strand starting at position 3158 of SEQ ID NO: 509
gagaaauacuagucagagc

SEQ ID NO: 42769 - RNA, 19 nt, Artificial Sequence
  Description of Artificial Sequence: Synthetic oligonucleotide
  Antisense strand to SEQ ID NO: 42688
gcucugacuaguauuucuc

SEQ ID NO: 42770 - RNA, 19 nt, Artificial Sequence
  Description of Artificial Sequence: Synthetic oligonucleotide
  Sense strand starting at position 3290 of SEQ ID NO: 509
aguauuauguguuugagau

SEQ ID NO: 42771 - RNA, 19 nt, Artificial Sequence
  Description of Artificial Sequence: Synthetic oligonucleotide
  Antisense strand to SEQ ID NO: 42690
aucucaaacacauaauacu

SEQ ID NO: 42772 - RNA, 19 nt, Artificial Sequence
  Description of Artificial Sequence: Synthetic oligonucleotide
  Sense strand starting at position 3319 of SEQ ID NO: 509
ugauauauguggcucuaau

SEQ ID NO: 42773 - RNA, 19 nt, Artificial Sequence
  Description of Artificial Sequence: Synthetic oligonucleotide
  Antisense strand to SEQ ID NO: 42692
auuagagccacauauauca

SEQ ID NO: 42774 - RNA, 19 nt, Artificial Sequence
  Description of Artificial Sequence: Synthetic oligonucleotide
  Sense strand starting at position 3449 of SEQ ID NO: 509
ugcauuaaagaaugaugca

SEQ ID NO: 42775 - RNA, 19 nt, Artificial Sequence
  Description of Artificial Sequence: Synthetic oligonucleotide
  Antisense strand to SEQ ID NO: 42694
ugcaucauucuuuaaugca

SEQ ID NO: 42776 - RNA, 19 nt, Artificial Sequence
  Description of Artificial Sequence: Synthetic oligonucleotide
  Sense strand starting at position 3480 of SEQ ID NO: 509
ccauaauggcagcaugaga

SEQ ID NO: 42777 - RNA, 19 nt, Artificial Sequence
  Description of Artificial Sequence: Synthetic oligonucleotide
  Antisense strand to SEQ ID NO: 42696
ucucaugcugccauuaugg

SEQ ID NO: 42778 - RNA, 19 nt, Artificial Sequence
  Description of Artificial Sequence: Synthetic oligonucleotide
  Sense strand starting at position 3584 of SEQ ID NO: 509
guucuaaaggcauacagua

SEQ ID NO: 42779 - RNA, 19 nt, Artificial Sequence
  Description of Artificial Sequence: Synthetic oligonucleotide
  Antisense strand to SEQ ID NO: 42698
uacuguaugccuuuagaac

SEQ ID NO: 42780 - RNA, 19 nt, Artificial Sequence
  Description of Artificial Sequence: Synthetic oligonucleotide
  Sense strand starting at position 3661 of SEQ ID NO: 509
uguggcauuugagccauaa

SEQ ID NO: 42781 - RNA, 19 nt, Artificial Sequence
  Description of Artificial Sequence: Synthetic oligonucleotide
  Antisense strand to SEQ ID NO: 42700
uuauggcucaaaugccaca

SEQ ID NO: 42782 - RNA, 19 nt, Artificial Sequence
  Description of Artificial Sequence: Synthetic oligonucleotide
  Sense strand starting at position 3699 of SEQ ID NO: 509
cccagaucaacgugacaga

SEQ ID NO: 42783 - RNA, 19 nt, Artificial Sequence
  Description of Artificial Sequence: Synthetic oligonucleotide
  Antisense strand to SEQ ID NO: 42702
ucugucacguugaucuggg

SEQ ID NO: 42784 - RNA, 19 nt, Artificial Sequence
  Description of Artificial Sequence: Synthetic oligonucleotide
  Sense strand starting at position 3776 of SEQ ID NO: 509
acaguaucucccugagaug

SEQ ID NO: 42785 - RNA, 19 nt, Artificial Sequence
  Description of Artificial Sequence: Synthetic oligonucleotide
  Antisense strand to SEQ ID NO: 42704
caucucagggagauacugu

SEQ ID NO: 42786 - RNA, 19 nt, Artificial Sequence
  Description of Artificial Sequence: Synthetic oligonucleotide
  Sense strand starting at position 3958 of SEQ ID NO: 509
cagcuuucucaugagauag

SEQ ID NO: 42787 - RNA, 19 nt, Artificial Sequence
  Description of Artificial Sequence: Synthetic oligonucleotide
  Antisense strand to SEQ ID NO: 42706
cuaucucaugagaaagcug

SEQ ID NO: 42788 - RNA, 19 nt, Artificial Sequence
  Description of Artificial Sequence: Synthetic oligonucleotide
  Sense strand starting at position 34 of SEQ ID NO: 510
aucauuuacugagggacua

SEQ ID NO: 42789 - RNA, 19 nt, Artificial Sequence
  Description of Artificial Sequence: Synthetic oligonucleotide
  Antisense strand to SEQ ID NO: 42708
uagucccucaguaaaugau

SEQ ID NO: 42790 - RNA, 19 nt, Artificial Sequence
  Description of Artificial Sequence: Synthetic oligonucleotide
  Sense strand starting at position 213 of SEQ ID NO: 510
ggccuucuugaaggaggua

SEQ ID NO: 42791 - RNA, 19 nt, Artificial Sequence
  Description of Artificial Sequence: Synthetic oligonucleotide
  Antisense strand to SEQ ID NO: 42710
uaccuccuucaagaaggcc

SEQ ID NO: 42792 - RNA, 19 nt, Artificial Sequence
  Description of Artificial Sequence: Synthetic oligonucleotide
  Sense strand starting at position 249 of SEQ ID NO: 510
gacagauagauaugcguga

SEQ ID NO: 42793 - RNA, 19 nt, Artificial Sequence
  Description of Artificial Sequence: Synthetic oligonucleotide
  Antisense strand to SEQ ID NO: 42712
ucacgcauaucuaucuguc

SEQ ID NO: 42794 - RNA, 19 nt, Artificial Sequence
  Description of Artificial Sequence: Synthetic oligonucleotide
  Sense strand starting at position 251 of SEQ ID NO: 510
cagauagauaugcgugaga

SEQ ID NO: 42795 - RNA, 19 nt, Artificial Sequence
  Description of Artificial Sequence: Synthetic oligonucleotide
  Antisense strand to SEQ ID NO: 42714
ucucacgcauaucuaucug

SEQ ID NO: 42796 - RNA, 19 nt, Artificial Sequence
  Description of Artificial Sequence: Synthetic oligonucleotide
  Sense strand starting at position 253 of SEQ ID NO: 510
gauagauaugcgugagaag

SEQ ID NO: 42797 - RNA, 19 nt, Artificial Sequence
  Description of Artificial Sequence: Synthetic oligonucleotide
  Antisense strand to SEQ ID NO: 42716
cuucucacgcauaucuauc

SEQ ID NO: 42798 - RNA, 19 nt, Artificial Sequence
  Description of Artificial Sequence: Synthetic oligonucleotide
  Sense strand starting at position 269 of SEQ ID NO: 510
aagauaauuccagguagca

SEQ ID NO: 42799 - RNA, 19 nt, Artificial Sequence
  Description of Artificial Sequence: Synthetic oligonucleotide
  Antisense strand to SEQ ID NO: 42718
ugcuaccuggaauuaucuu

SEQ ID NO: 42800 - RNA, 19 nt, Artificial Sequence
  Description of Artificial Sequence: Synthetic oligonucleotide
  Sense strand starting at position 288 of SEQ ID NO: 510
agcauagugugaucagaga

SEQ ID NO: 42801 - RNA, 19 nt, Artificial Sequence
  Description of Artificial Sequence: Synthetic oligonucleotide
  Antisense strand to SEQ ID NO: 42720
ucucugaucacacuaugcu

SEQ ID NO: 42802 - RNA, 19 nt, Artificial Sequence
  Description of Artificial Sequence: Synthetic oligonucleotide
  Sense strand starting at position 336 of SEQ ID NO: 510
ugagguagugaguaacaua

SEQ ID NO: 42803 - RNA, 19 nt, Artificial Sequence
  Description of Artificial Sequence: Synthetic oligonucleotide
  Antisense strand to SEQ ID NO: 42722
uauguuacucacuaccuca

SEQ ID NO: 42804 - RNA, 19 nt, Artificial Sequence
  Description of Artificial Sequence: Synthetic oligonucleotide
  Sense strand starting at position 343 of SEQ ID NO: 510
gugaguaacauaugguaaa

SEQ ID NO: 42805 - RNA, 19 nt, Artificial Sequence
  Description of Artificial Sequence: Synthetic oligonucleotide
  Antisense strand to SEQ ID NO: 42724
uuuaccauauguuacucac

SEQ ID NO: 42806 - RNA, 19 nt, Artificial Sequence
  Description of Artificial Sequence: Synthetic oligonucleotide
  Sense strand starting at position 442 of SEQ ID NO: 510
uucugcucugcugagaacu

SEQ ID NO: 42807 - RNA, 19 nt, Artificial Sequence
  Description of Artificial Sequence: Synthetic oligonucleotide
  Antisense strand to SEQ ID NO: 42726
aguucucagcagagcagaa

SEQ ID NO: 42808 - RNA, 19 nt, Artificial Sequence
  Description of Artificial Sequence: Synthetic oligonucleotide
  Sense strand starting at position 1116 of SEQ ID NO: 510
ccucauguguacccauaau

SEQ ID NO: 42809 - RNA, 19 nt, Artificial Sequence
  Description of Artificial Sequence: Synthetic oligonucleotide
  Antisense strand to SEQ ID NO: 42728
auuauggguacacaugagg

SEQ ID NO: 42810 - RNA, 19 nt, Artificial Sequence
  Description of Artificial Sequence: Synthetic oligonucleotide
  Sense strand starting at position 1167 of SEQ ID NO: 510
uggaaauuccgugagucuu

SEQ ID NO: 42811 - RNA, 19 nt, Artificial Sequence
  Description of Artificial Sequence: Synthetic oligonucleotide
  Antisense strand to SEQ ID NO: 42730
aagacucacggaauuucca

SEQ ID NO: 42812 - RNA, 19 nt, Artificial Sequence
  Description of Artificial Sequence: Synthetic oligonucleotide
  Sense strand starting at position 1224 of SEQ ID NO: 510
agaucucugccucagauau

SEQ ID NO: 42813 - RNA, 19 nt, Artificial Sequence
  Description of Artificial Sequence: Synthetic oligonucleotide
  Antisense strand to SEQ ID NO: 42732
auaucugaggcagagaucu

SEQ ID NO: 42814 - RNA, 19 nt, Artificial Sequence
  Description of Artificial Sequence: Synthetic oligonucleotide
  Sense strand starting at position 1329 of SEQ ID NO: 510
uggcauggauuccucagau

SEQ ID NO: 42815 - RNA, 19 nt, Artificial Sequence
  Description of Artificial Sequence: Synthetic oligonucleotide
  Antisense strand to SEQ ID NO: 42734
aucugaggaauccaugcca

SEQ ID NO: 42816 - RNA, 19 nt, Artificial Sequence
  Description of Artificial Sequence: Synthetic oligonucleotide
  Sense strand starting at position 1335 of SEQ ID NO: 510
ggauuccucagaugggugu

SEQ ID NO: 42817 - RNA, 19 nt, Artificial Sequence
  Description of Artificial Sequence: Synthetic oligonucleotide
  Antisense strand to SEQ ID NO: 42736
acacccaucugaggaaucc

SEQ ID NO: 42818 - RNA, 19 nt, Artificial Sequence
  Description of Artificial Sequence: Synthetic oligonucleotide
  Sense strand starting at position 1385 of SEQ ID NO: 510
gagugauggcauugaguga

SEQ ID NO: 42819 - RNA, 19 nt, Artificial Sequence
  Description of Artificial Sequence: Synthetic oligonucleotide
  Antisense strand to SEQ ID NO: 42738
ucacucaaugccaucacuc

SEQ ID NO: 42820 - RNA, 19 nt, Artificial Sequence
  Description of Artificial Sequence: Synthetic oligonucleotide
  Sense strand starting at position 1437 of SEQ ID NO: 510
gaugaaagccaaggcuuau

SEQ ID NO: 42821 - RNA, 19 nt, Artificial Sequence
  Description of Artificial Sequence: Synthetic oligonucleotide
  Antisense strand to SEQ ID NO: 42740
auaagccuuggcuuucauc

SEQ ID NO: 42822 - RNA, 19 nt, Artificial Sequence
  Description of Artificial Sequence: Synthetic oligonucleotide
  Sense strand starting at position 1457 of SEQ ID NO: 510
ggguaaucagucuggagac

SEQ ID NO: 42823 - RNA, 19 nt, Artificial Sequence
  Description of Artificial Sequence: Synthetic oligonucleotide
  Antisense strand to SEQ ID NO: 42742
gucuccagacugauuaccc

SEQ ID NO: 42824 - RNA, 19 nt, Artificial Sequence
  Description of Artificial Sequence: Synthetic oligonucleotide
  Sense strand starting at position 1584 of SEQ ID NO: 510
aagugagcuccucaugacu

SEQ ID NO: 42825 - RNA, 19 nt, Artificial Sequence
  Description of Artificial Sequence: Synthetic oligonucleotide
  Antisense strand to SEQ ID NO: 42744
agucaugaggagcucacuu

SEQ ID NO: 42826 - RNA, 19 nt, Artificial Sequence
  Description of Artificial Sequence: Synthetic oligonucleotide
  Sense strand starting at position 1590 of SEQ ID NO: 510
gcuccucaugacugggaaa

SEQ ID NO: 42827 - RNA, 19 nt, Artificial Sequence
  Description of Artificial Sequence: Synthetic oligonucleotide
  Antisense strand to SEQ ID NO: 42746
uuucccagucaugaggagc

SEQ ID NO: 42828 - RNA, 19 nt, Artificial Sequence
  Description of Artificial Sequence: Synthetic oligonucleotide
  Sense strand starting at position 1668 of SEQ ID NO: 510
aaggcuuugcucuauggau

SEQ ID NO: 42829 - RNA, 19 nt, Artificial Sequence
  Description of Artificial Sequence: Synthetic oligonucleotide
  Antisense strand to SEQ ID NO: 42748
auccauagagcaaagccuu

SEQ ID NO: 42830 - RNA, 19 nt, Artificial Sequence
  Description of Artificial Sequence: Synthetic oligonucleotide
  Sense strand starting at position 1670 of SEQ ID NO: 510
ggcuuugcucuauggauuu

SEQ ID NO: 42831 - RNA, 19 nt, Artificial Sequence
  Description of Artificial Sequence: Synthetic oligonucleotide
  Antisense strand to SEQ ID NO: 42750
aaauccauagagcaaagcc

SEQ ID NO: 42832 - RNA, 19 nt, Artificial Sequence
  Description of Artificial Sequence: Synthetic oligonucleotide
  Sense strand starting at position 1848 of SEQ ID NO: 510
ugccuugaucagcagcaga

SEQ ID NO: 42833 - RNA, 19 nt, Artificial Sequence
  Description of Artificial Sequence: Synthetic oligonucleotide
  Antisense strand to SEQ ID NO: 42752
ucugcugcugaucaaggca

SEQ ID NO: 42834 - RNA, 19 nt, Artificial Sequence
  Description of Artificial Sequence: Synthetic oligonucleotide
  Sense strand starting at position 2013 of SEQ ID NO: 510
gcucaaauccagggaggau

SEQ ID NO: 42835 - RNA, 19 nt, Artificial Sequence
  Description of Artificial Sequence: Synthetic oligonucleotide
  Antisense strand to SEQ ID NO: 42754
auccucccuggauuugagc

SEQ ID NO: 42836 - RNA, 19 nt, Artificial Sequence
  Description of Artificial Sequence: Synthetic oligonucleotide
  Sense strand starting at position 2169 of SEQ ID NO: 510
guccauguaccucacaaau

SEQ ID NO: 42837 - RNA, 19 nt, Artificial Sequence
  Description of Artificial Sequence: Synthetic oligonucleotide
  Antisense strand to SEQ ID NO: 42756
auuugugagguacauggac

SEQ ID NO: 42838 - RNA, 19 nt, Artificial Sequence
  Description of Artificial Sequence: Synthetic oligonucleotide
  Sense strand starting at position 2459 of SEQ ID NO: 510
ucuauauauugagugaaga

SEQ ID NO: 42839 - RNA, 19 nt, Artificial Sequence
  Description of Artificial Sequence: Synthetic oligonucleotide
  Antisense strand to SEQ ID NO: 42758
ucuucacucaauauauaga

SEQ ID NO: 42840 - RNA, 19 nt, Artificial Sequence
  Description of Artificial Sequence: Synthetic oligonucleotide
  Sense strand starting at position 2467 of SEQ ID NO: 510
uugagugaagagugggaau

SEQ ID NO: 42841 - RNA, 19 nt, Artificial Sequence
  Description of Artificial Sequence: Synthetic oligonucleotide
  Antisense strand to SEQ ID NO: 42760
auucccacucuucacucaa

SEQ ID NO: 42842 - RNA, 19 nt, Artificial Sequence
  Description of Artificial Sequence: Synthetic oligonucleotide
  Sense strand starting at position 2479 of SEQ ID NO: 510
ugggaauuaugucuuucua

SEQ ID NO: 42843 - RNA, 19 nt, Artificial Sequence
  Description of Artificial Sequence: Synthetic oligonucleotide
  Antisense strand to SEQ ID NO: 42762
uagaaagacauaauuccca

SEQ ID NO: 42844 - RNA, 19 nt, Artificial Sequence
  Description of Artificial Sequence: Synthetic oligonucleotide
  Sense strand starting at position 2481 of SEQ ID NO: 510
ggaauuaugucuuucuagu

SEQ ID NO: 42845 - RNA, 19 nt, Artificial Sequence
  Description of Artificial Sequence: Synthetic oligonucleotide
  Antisense strand to SEQ ID NO: 42764
acuagaaagacauaauucc

SEQ ID NO: 42846 - RNA, 19 nt, Artificial Sequence
  Description of Artificial Sequence: Synthetic oligonucleotide
  Sense strand starting at position 2495 of SEQ ID NO: 510
cuaguaacuggaugaugau

SEQ ID NO: 42847 - RNA, 19 nt, Artificial Sequence
  Description of Artificial Sequence: Synthetic oligonucleotide
  Antisense strand to SEQ ID NO: 42766
aucaucauccaguuacuag

SEQ ID NO: 42848 - RNA, 19 nt, Artificial Sequence
  Description of Artificial Sequence: Synthetic oligonucleotide
  Sense strand starting at position 2699 of SEQ ID NO: 510
gaguaaguccuagagcaau

SEQ ID NO: 42849 - RNA, 19 nt, Artificial Sequence
  Description of Artificial Sequence: Synthetic oligonucleotide
  Antisense strand to SEQ ID NO: 42768
auugcucuaggacuuacuc

SEQ ID NO: 42850 - RNA, 19 nt, Artificial Sequence
  Description of Artificial Sequence: Synthetic oligonucleotide
  Sense strand starting at position 2782 of SEQ ID NO: 510
ccuacaauaguauguaauu

SEQ ID NO: 42851 - RNA, 19 nt, Artificial Sequence
  Description of Artificial Sequence: Synthetic oligonucleotide
  Antisense strand to SEQ ID NO: 42770
aauuacauacuauuguagg

SEQ ID NO: 42852 - RNA, 19 nt, Artificial Sequence
  Description of Artificial Sequence: Synthetic oligonucleotide
  Sense strand starting at position 2831 of SEQ ID NO: 510
aguccugaccaaggacaau

SEQ ID NO: 42853 - RNA, 19 nt, Artificial Sequence
  Description of Artificial Sequence: Synthetic oligonucleotide
  Antisense strand to SEQ ID NO: 42772
auuguccuuggucaggacu

SEQ ID NO: 42854 - RNA, 19 nt, Artificial Sequence
  Description of Artificial Sequence: Synthetic oligonucleotide
  Sense strand starting at position 2898 of SEQ ID NO: 510
ucaaguaaaguagguuaaa

SEQ ID NO: 42855 - RNA, 19 nt, Artificial Sequence
  Description of Artificial Sequence: Synthetic oligonucleotide
  Antisense strand to SEQ ID NO: 42774
uuuaaccuacuuuacuuga

SEQ ID NO: 42856 - RNA, 19 nt, Artificial Sequence
  Description of Artificial Sequence: Synthetic oligonucleotide
  Sense strand starting at position 2899 of SEQ ID NO: 510
caaguaaaguagguuaaau

SEQ ID NO: 42857 - RNA, 19 nt, Artificial Sequence
  Description of Artificial Sequence: Synthetic oligonucleotide
  Antisense strand to SEQ ID NO: 42776
auuuaaccuacuuuacuug

SEQ ID NO: 42858 - RNA, 19 nt, Artificial Sequence
  Description of Artificial Sequence: Synthetic oligonucleotide
  Sense strand starting at position 2963 of SEQ ID NO: 510
auaucugugcaugagcauu

SEQ ID NO: 42859 - RNA, 19 nt, Artificial Sequence
  Description of Artificial Sequence: Synthetic oligonucleotide
  Antisense strand to SEQ ID NO: 42778
aaugcucaugcacagauau

SEQ ID NO: 42860 - RNA, 19 nt, Artificial Sequence
  Description of Artificial Sequence: Synthetic oligonucleotide
  Sense strand starting at position 3098 of SEQ ID NO: 510
ucagguagugaguauggua

SEQ ID NO: 42861 - RNA, 19 nt, Artificial Sequence
  Description of Artificial Sequence: Synthetic oligonucleotide
  Antisense strand to SEQ ID NO: 42780
uaccauacucacuaccuga

SEQ ID NO: 42862 - RNA, 19 nt, Artificial Sequence
  Description of Artificial Sequence: Synthetic oligonucleotide
  Sense strand starting at position 3105 of SEQ ID NO: 510
gugaguaugguauauauua

SEQ ID NO: 42863 - RNA, 19 nt, Artificial Sequence
  Description of Artificial Sequence: Synthetic oligonucleotide
  Antisense strand to SEQ ID NO: 42782
uaauauauaccauacucac

SEQ ID NO: 42864 - RNA, 19 nt, Artificial Sequence
  Description of Artificial Sequence: Synthetic oligonucleotide
  Sense strand starting at position 3840 of SEQ ID NO: 510
ggaaguucuggccagguaa

SEQ ID NO: 42865 - RNA, 19 nt, Artificial Sequence
  Description of Artificial Sequence: Synthetic oligonucleotide
  Antisense strand to SEQ ID NO: 42784
uuaccuggccagaacuucc

SEQ ID NO: 42866 - RNA, 19 nt, Artificial Sequence
  Description of Artificial Sequence: Synthetic oligonucleotide
  Sense strand starting at position 3842 of SEQ ID NO: 510
aaguucuggccagguaaga

SEQ ID NO: 42867 - RNA, 19 nt, Artificial Sequence
  Description of Artificial Sequence: Synthetic oligonucleotide
  Antisense strand to SEQ ID NO: 42786
ucuuaccuggccagaacuu

SEQ ID NO: 42868 - RNA, 19 nt, Artificial Sequence
  Description of Artificial Sequence: Synthetic oligonucleotide
  Sense strand starting at position 3513 of SEQ ID NO: 511
gauagcuaacauugggauu

SEQ ID NO: 42869 - RNA, 19 nt, Artificial Sequence
  Description of Artificial Sequence: Synthetic oligonucleotide
  Antisense strand to SEQ ID NO: 42788
aaucccaauguuagcuauc

SEQ ID NO: 42870 - RNA, 19 nt, Artificial Sequence
  Description of Artificial Sequence: Synthetic oligonucleotide
  Sense strand starting at position 3506 of SEQ ID NO: 511
uuggauagauagcuaacau

SEQ ID NO: 42871 - RNA, 19 nt, Artificial Sequence
  Description of Artificial Sequence: Synthetic oligonucleotide
  Antisense strand to SEQ ID NO: 42790
auguuagcuaucuauccaa

SEQ ID NO: 42872 - RNA, 19 nt, Artificial Sequence
  Description of Artificial Sequence: Synthetic oligonucleotide
  Sense strand starting at position 3200 of SEQ ID NO: 511
guccauaaguauccaacau

SEQ ID NO: 42873 - RNA, 19 nt, Artificial Sequence
  Description of Artificial Sequence: Synthetic oligonucleotide
  Antisense strand to SEQ ID NO: 42792
auguuggauacuuauggac

SEQ ID NO: 42874 - RNA, 19 nt, Artificial Sequence
  Description of Artificial Sequence: Synthetic oligonucleotide
  Sense strand starting at position 3105 of SEQ ID NO: 511
gugaguaugguauauauua

SEQ ID NO: 42875 - RNA, 19 nt, Artificial Sequence
  Description of Artificial Sequence: Synthetic oligonucleotide
  Antisense strand to SEQ ID NO: 42794
uaauauauaccauacucac

SEQ ID NO: 42876 - RNA, 19 nt, Artificial Sequence
  Description of Artificial Sequence: Synthetic oligonucleotide
  Sense strand starting at position 3098 of SEQ ID NO: 511
ucagguagugaguauggua

SEQ ID NO: 42877 - RNA, 19 nt, Artificial Sequence
  Description of Artificial Sequence: Synthetic oligonucleotide
  Antisense strand to SEQ ID NO: 42796
uaccauacucacuaccuga

SEQ ID NO: 42878 - RNA, 19 nt, Artificial Sequence
  Description of Artificial Sequence: Synthetic oligonucleotide
  Sense strand starting at position 2962 of SEQ ID NO: 511
auaucugugcaugagcauu

SEQ ID NO: 42879 - RNA, 19 nt, Artificial Sequence
  Description of Artificial Sequence: Synthetic oligonucleotide
  Antisense strand to SEQ ID NO: 42798
aaugcucaugcacagauau

SEQ ID NO: 42880 - RNA, 19 nt, Artificial Sequence
  Description of Artificial Sequence: Synthetic oligonucleotide
  Sense strand starting at position 2898 of SEQ ID NO: 511
caaguaaaguagguuaaau

SEQ ID NO: 42881 - RNA, 19 nt, Artificial Sequence
  Description of Artificial Sequence: Synthetic oligonucleotide
  Antisense strand to SEQ ID NO: 42800
auuuaaccuacuuuacuug

SEQ ID NO: 42882 - RNA, 19 nt, Artificial Sequence
  Description of Artificial Sequence: Synthetic oligonucleotide
  Sense strand starting at position 2897 of SEQ ID NO: 511
ucaaguaaaguagguuaaa

SEQ ID NO: 42883 - RNA, 19 nt, Artificial Sequence
  Description of Artificial Sequence: Synthetic oligonucleotide
  Antisense strand to SEQ ID NO: 42802
uuuaaccuacuuuacuuga

SEQ ID NO: 42884 - RNA, 19 nt, Artificial Sequence
  Description of Artificial Sequence: Synthetic oligonucleotide
  Sense strand starting at position 2781 of SEQ ID NO: 511
ccuacaauaguauguaauu

SEQ ID NO: 42885 - RNA, 19 nt, Artificial Sequence
  Description of Artificial Sequence: Synthetic oligonucleotide
  Antisense strand to SEQ ID NO: 42804
aauuacauacuauuguagg

SEQ ID NO: 42886 - RNA, 19 nt, Artificial Sequence
  Description of Artificial Sequence: Synthetic oligonucleotide
  Sense strand starting at position 2644 of SEQ ID NO: 511
acaucauguuaguuaugac

SEQ ID NO: 42887 - RNA, 19 nt, Artificial Sequence
  Description of Artificial Sequence: Synthetic oligonucleotide
  Antisense strand to SEQ ID NO: 42806
gucauaacuaacaugaugu

SEQ ID NO: 42888 - RNA, 19 nt, Artificial Sequence
  Description of Artificial Sequence: Synthetic oligonucleotide
  Sense strand starting at position 2481 of SEQ ID NO: 511
ggaauuaugucuuucuauu

SEQ ID NO: 42889 - RNA, 19 nt, Artificial Sequence
  Description of Artificial Sequence: Synthetic oligonucleotide
  Antisense strand to SEQ ID NO: 42808
aauagaaagacauaauucc

SEQ ID NO: 42890 - RNA, 19 nt, Artificial Sequence
  Description of Artificial Sequence: Synthetic oligonucleotide
  Sense strand starting at position 2479 of SEQ ID NO: 511
ugggaauuaugucuuucua

SEQ ID NO: 42891 - RNA, 19 nt, Artificial Sequence
  Description of Artificial Sequence: Synthetic oligonucleotide
  Antisense strand to SEQ ID NO: 42810
uagaaagacauaauuccca

SEQ ID NO: 42892 - RNA, 19 nt, Artificial Sequence
  Description of Artificial Sequence: Synthetic oligonucleotide
  Sense strand starting at position 2459 of SEQ ID NO: 511
ucuauauauugagugagga

SEQ ID NO: 42893 - RNA, 19 nt, Artificial Sequence
  Description of Artificial Sequence: Synthetic oligonucleotide
  Antisense strand to SEQ ID NO: 42812
uccucacucaauauauaga

SEQ ID NO: 42894 - RNA, 19 nt, Artificial Sequence
  Description of Artificial Sequence: Synthetic oligonucleotide
  Sense strand starting at position 2170 of SEQ ID NO: 511
guccauguaccucacaaau

SEQ ID NO: 42895 - RNA, 19 nt, Artificial Sequence
  Description of Artificial Sequence: Synthetic oligonucleotide
  Antisense strand to SEQ ID NO: 42814
auuugugagguacauggac

SEQ ID NO: 42896 - RNA, 19 nt, Artificial Sequence
  Description of Artificial Sequence: Synthetic oligonucleotide
  Sense strand starting at position 2095 of SEQ ID NO: 511
aucgauugacuuuggauga

SEQ ID NO: 42897 - RNA, 19 nt, Artificial Sequence
  Description of Artificial Sequence: Synthetic oligonucleotide
  Antisense strand to SEQ ID NO: 42816
ucauccaaagucaaucgau

SEQ ID NO: 42898 - RNA, 19 nt, Artificial Sequence
  Description of Artificial Sequence: Synthetic oligonucleotide
  Sense strand starting at position 2014 of SEQ ID NO: 511
gcuuaagucaugggaggau

SEQ ID NO: 42899 - RNA, 19 nt, Artificial Sequence
  Description of Artificial Sequence: Synthetic oligonucleotide
  Antisense strand to SEQ ID NO: 42818
auccucccaugacuuaagc

SEQ ID NO: 42900 - RNA, 19 nt, Artificial Sequence
  Description of Artificial Sequence: Synthetic oligonucleotide
  Sense strand starting at position 2013 of SEQ ID NO: 511
ugcuuaagucaugggagga

SEQ ID NO: 42901 - RNA, 19 nt, Artificial Sequence
  Description of Artificial Sequence: Synthetic oligonucleotide
  Antisense strand to SEQ ID NO: 42820
uccucccaugacuuaagca

SEQ ID NO: 42902 - RNA, 19 nt, Artificial Sequence
  Description of Artificial Sequence: Synthetic oligonucleotide
  Sense strand starting at position 1671 of SEQ ID NO: 511
ggcuuugcucuauggauuu

SEQ ID NO: 42903 - RNA, 19 nt, Artificial Sequence
  Description of Artificial Sequence: Synthetic oligonucleotide
  Antisense strand to SEQ ID NO: 42822
aaauccauagagcaaagcc

SEQ ID NO: 42904 - RNA, 19 nt, Artificial Sequence
  Description of Artificial Sequence: Synthetic oligonucleotide
  Sense strand starting at position 1669 of SEQ ID NO: 511
aaggcuuugcucuauggau

SEQ ID NO: 42905 - RNA, 19 nt, Artificial Sequence
  Description of Artificial Sequence: Synthetic oligonucleotide
  Antisense strand to SEQ ID NO: 42824
auccauagagcaaagccuu

SEQ ID NO: 42906 - RNA, 19 nt, Artificial Sequence
  Description of Artificial Sequence: Synthetic oligonucleotide
  Sense strand starting at position 1585 of SEQ ID NO: 511
gagugagcuccucaugacu

SEQ ID NO: 42907 - RNA, 19 nt, Artificial Sequence
  Description of Artificial Sequence: Synthetic oligonucleotide
  Antisense strand to SEQ ID NO: 42826
agucaugaggagcucacuc

SEQ ID NO: 42908 - RNA, 19 nt, Artificial Sequence
  Description of Artificial Sequence: Synthetic oligonucleotide
  Sense strand starting at position 1539 of SEQ ID NO: 511
gcaugugugauagagcuga

SEQ ID NO: 42909 - RNA, 19 nt, Artificial Sequence
  Description of Artificial Sequence: Synthetic oligonucleotide
  Antisense strand to SEQ ID NO: 42828
ucagcucuaucacacaugc

SEQ ID NO: 42910 - RNA, 19 nt, Artificial Sequence
  Description of Artificial Sequence: Synthetic oligonucleotide
  Sense strand starting at position 1534 of SEQ ID NO: 511
ggagggcaugugugauaga

SEQ ID NO: 42911 - RNA, 19 nt, Artificial Sequence
  Description of Artificial Sequence: Synthetic oligonucleotide
  Antisense strand to SEQ ID NO: 42830
ucuaucacacaugcccucc

SEQ ID NO: 42912 - RNA, 19 nt, Artificial Sequence
  Description of Artificial Sequence: Synthetic oligonucleotide
  Sense strand starting at position 1458 of SEQ ID NO: 511
ggguaaucagucuggagac

SEQ ID NO: 42913 - RNA, 19 nt, Artificial Sequence
  Description of Artificial Sequence: Synthetic oligonucleotide
  Antisense strand to SEQ ID NO: 42832
gucuccagacugauuaccc

SEQ ID NO: 42914 - RNA, 19 nt, Artificial Sequence
  Description of Artificial Sequence: Synthetic oligonucleotide
  Sense strand starting at position 1425 of SEQ ID NO: 511
agccuuguucuuugagaaa

SEQ ID NO: 42915 - RNA, 19 nt, Artificial Sequence
  Description of Artificial Sequence: Synthetic oligonucleotide
  Antisense strand to SEQ ID NO: 42834
uuucucaaagaacaaggcu

SEQ ID NO: 42916 - RNA, 19 nt, Artificial Sequence
  Description of Artificial Sequence: Synthetic oligonucleotide
  Sense strand starting at position 1424 of SEQ ID NO: 511
aagccuuguucuuugagaa

SEQ ID NO: 42917 - RNA, 19 nt, Artificial Sequence
  Description of Artificial Sequence: Synthetic oligonucleotide
  Antisense strand to SEQ ID NO: 42836
uucucaaagaacaaggcuu

SEQ ID NO: 42918 - RNA, 19 nt, Artificial Sequence
  Description of Artificial Sequence: Synthetic oligonucleotide
  Sense strand starting at position 1423 of SEQ ID NO: 511
gaagccuuguucuuugaga

SEQ ID NO: 42919 - RNA, 19 nt, Artificial Sequence
  Description of Artificial Sequence: Synthetic oligonucleotide
  Antisense strand to SEQ ID NO: 42838
ucucaaagaacaaggcuuc

SEQ ID NO: 42920 - RNA, 19 nt, Artificial Sequence
  Description of Artificial Sequence: Synthetic oligonucleotide
  Sense strand starting at position 1386 of SEQ ID NO: 511
agacaauggcauugaguga

SEQ ID NO: 42921 - RNA, 19 nt, Artificial Sequence
  Description of Artificial Sequence: Synthetic oligonucleotide
  Antisense strand to SEQ ID NO: 42840
ucacucaaugccauugucu

SEQ ID NO: 42922 - RNA, 19 nt, Artificial Sequence
  Description of Artificial Sequence: Synthetic oligonucleotide
  Sense strand starting at position 1330 of SEQ ID NO: 511
ggcacagaguccucagaug

SEQ ID NO: 42923 - RNA, 19 nt, Artificial Sequence
  Description of Artificial Sequence: Synthetic oligonucleotide
  Antisense strand to SEQ ID NO: 42842
caucugaggacucugugcc

SEQ ID NO: 42924 - RNA, 19 nt, Artificial Sequence
  Description of Artificial Sequence: Synthetic oligonucleotide
  Sense strand starting at position 1315 of SEQ ID NO: 511
ccaugaacuccucauggca

SEQ ID NO: 42925 - RNA, 19 nt, Artificial Sequence
  Description of Artificial Sequence: Synthetic oligonucleotide
  Antisense strand to SEQ ID NO: 42844
ugccaugaggaguucaugg

SEQ ID NO: 42926 - RNA, 19 nt, Artificial Sequence
  Description of Artificial Sequence: Synthetic oligonucleotide
  Sense strand starting at position 1224 of SEQ ID NO: 511
agaucucugccucagauau

SEQ ID NO: 42927 - RNA, 19 nt, Artificial Sequence
  Description of Artificial Sequence: Synthetic oligonucleotide
  Antisense strand to SEQ ID NO: 42846
auaucugaggcagagaucu

SEQ ID NO: 42928 - RNA, 19 nt, Artificial Sequence
  Description of Artificial Sequence: Synthetic oligonucleotide
  Sense strand starting at position 1222 of SEQ ID NO: 511
gcagaucucugccucagau

SEQ ID NO: 42929 - RNA, 19 nt, Artificial Sequence
  Description of Artificial Sequence: Synthetic oligonucleotide
  Antisense strand to SEQ ID NO: 42848
aucugaggcagagaucugc

SEQ ID NO: 42930 - RNA, 19 nt, Artificial Sequence
  Description of Artificial Sequence: Synthetic oligonucleotide
  Sense strand starting at position 1167 of SEQ ID NO: 511
uggaaauuccgugagccuu

SEQ ID NO: 42931 - RNA, 19 nt, Artificial Sequence
  Description of Artificial Sequence: Synthetic oligonucleotide
  Antisense strand to SEQ ID NO: 42850
aaggcucacggaauuucca

SEQ ID NO: 42932 - RNA, 19 nt, Artificial Sequence
  Description of Artificial Sequence: Synthetic oligonucleotide
  Sense strand starting at position 342 of SEQ ID NO: 511
gugaguaacauaugguaaa

SEQ ID NO: 42933 - RNA, 19 nt, Artificial Sequence
  Description of Artificial Sequence: Synthetic oligonucleotide
  Antisense strand to SEQ ID NO: 42852
uuuaccauauguuacucac

SEQ ID NO: 42934 - RNA, 19 nt, Artificial Sequence
  Description of Artificial Sequence: Synthetic oligonucleotide
  Sense strand starting at position 335 of SEQ ID NO: 511
ugagguagugaguaacaua

SEQ ID NO: 42935 - RNA, 19 nt, Artificial Sequence
  Description of Artificial Sequence: Synthetic oligonucleotide
  Antisense strand to SEQ ID NO: 42854
uauguuacucacuaccuca

SEQ ID NO: 42936 - RNA, 19 nt, Artificial Sequence
  Description of Artificial Sequence: Synthetic oligonucleotide
  Sense strand starting at position 248 of SEQ ID NO: 511
gaccgauagauaugaguga

SEQ ID NO: 42937 - RNA, 19 nt, Artificial Sequence
  Description of Artificial Sequence: Synthetic oligonucleotide
  Antisense strand to SEQ ID NO: 42856
ucacucauaucuaucgguc

SEQ ID NO: 42938 - RNA, 19 nt, Artificial Sequence
  Description of Artificial Sequence: Synthetic oligonucleotide
  Sense strand starting at position 242 of SEQ ID NO: 511
ggccuugaccgauagauau

SEQ ID NO: 42939 - RNA, 19 nt, Artificial Sequence
  Description of Artificial Sequence: Synthetic oligonucleotide
  Antisense strand to SEQ ID NO: 42858
auaucuaucggucaaggcc

SEQ ID NO: 42940 - RNA, 19 nt, Artificial Sequence
  Description of Artificial Sequence: Synthetic oligonucleotide
  Sense strand starting at position 240 of SEQ ID NO: 511
ugggccuugaccgauagau

SEQ ID NO: 42941 - RNA, 19 nt, Artificial Sequence
  Description of Artificial Sequence: Synthetic oligonucleotide
  Antisense strand to SEQ ID NO: 42860
aucuaucggucaaggccca

SEQ ID NO: 42942 - RNA, 19 nt, Artificial Sequence
  Description of Artificial Sequence: Synthetic oligonucleotide
  Sense strand starting at position 212 of SEQ ID NO: 511
ggccuucuugaagaaggua

SEQ ID NO: 42943 - RNA, 19 nt, Artificial Sequence
  Description of Artificial Sequence: Synthetic oligonucleotide
  Antisense strand to SEQ ID NO: 42862
uaccuucuucaagaaggcc

SEQ ID NO: 42944 - RNA, 19 nt, Artificial Sequence
  Description of Artificial Sequence: Synthetic oligonucleotide
  Sense strand starting at position 36 of SEQ ID NO: 511
aucauuuacugagggacua

SEQ ID NO: 42945 - RNA, 19 nt, Artificial Sequence
  Description of Artificial Sequence: Synthetic oligonucleotide
  Antisense strand to SEQ ID NO: 42864
uagucccucaguaaaugau

SEQ ID NO: 42946 - RNA, 19 nt, Artificial Sequence
  Description of Artificial Sequence: Synthetic oligonucleotide
  Sense strand starting at position 33 of SEQ ID NO: 511
gucaucauuuacugaggga

SEQ ID NO: 42947 - RNA, 19 nt, Artificial Sequence
  Description of Artificial Sequence: Synthetic oligonucleotide
  Antisense strand to SEQ ID NO: 42866
ucccucaguaaaugaugac

SEQ ID NO: 42948 - RNA, 19 nt, Artificial Sequence
  Description of Artificial Sequence: Synthetic oligonucleotide
  Sense strand starting at position 3822 of SEQ ID NO: 512
ggauauccuuguuuaacuu

SEQ ID NO: 42949 - RNA, 19 nt, Artificial Sequence
  Description of Artificial Sequence: Synthetic oligonucleotide
  Antisense strand to SEQ ID NO: 42868
aaguuaaacaaggauaucc

SEQ ID NO: 42950 - RNA, 19 nt, Artificial Sequence
  Description of Artificial Sequence: Synthetic oligonucleotide
  Sense strand starting at position 3821 of SEQ ID NO: 512
uggauauccuuguuuaacu

SEQ ID NO: 42951 - RNA, 19 nt, Artificial Sequence
  Description of Artificial Sequence: Synthetic oligonucleotide
  Antisense strand to SEQ ID NO: 42870
aguuaaacaaggauaucca

SEQ ID NO: 42952 - RNA, 19 nt, Artificial Sequence
  Description of Artificial Sequence: Synthetic oligonucleotide
  Sense strand starting at position 3819 of SEQ ID NO: 512
ccuggauauccuuguuuaa

SEQ ID NO: 42953 - RNA, 19 nt, Artificial Sequence
  Description of Artificial Sequence: Synthetic oligonucleotide
  Antisense strand to SEQ ID NO: 42872
uuaaacaaggauauccagg

SEQ ID NO: 42954 - RNA, 19 nt, Artificial Sequence
  Description of Artificial Sequence: Synthetic oligonucleotide
  Sense strand starting at position 3436 of SEQ ID NO: 512
agacauugagugcaccauu

SEQ ID NO: 42955 - RNA, 19 nt, Artificial Sequence
  Description of Artificial Sequence: Synthetic oligonucleotide
  Antisense strand to SEQ ID NO: 42874
aauggugcacucaaugucu

SEQ ID NO: 42956 - RNA, 19 nt, Artificial Sequence
  Description of Artificial Sequence: Synthetic oligonucleotide
  Sense strand starting at position 3376 of SEQ ID NO: 512
ucuccauuggucugucaca

SEQ ID NO: 42957 - RNA, 19 nt, Artificial Sequence
  Description of Artificial Sequence: Synthetic oligonucleotide
  Antisense strand to SEQ ID NO: 42876
ugugacagaccaauggaga

SEQ ID NO: 42958 - RNA, 19 nt, Artificial Sequence
  Description of Artificial Sequence: Synthetic oligonucleotide
  Sense strand starting at position 3167 of SEQ ID NO: 512
ccagcaaucagguggacuu

SEQ ID NO: 42959 - RNA, 19 nt, Artificial Sequence
  Description of Artificial Sequence: Synthetic oligonucleotide
  Antisense strand to SEQ ID NO: 42878
aaguccaccugauugcugg

SEQ ID NO: 42960 - RNA, 19 nt, Artificial Sequence
  Description of Artificial Sequence: Synthetic oligonucleotide
  Sense strand starting at position 3108 of SEQ ID NO: 512
ucagccucccagcaagaua

SEQ ID NO: 42961 - RNA, 19 nt, Artificial Sequence
  Description of Artificial Sequence: Synthetic oligonucleotide
  Antisense strand to SEQ ID NO: 42880
uaucuugcugggaggcuga

SEQ ID NO: 42962 - RNA, 19 nt, Artificial Sequence
  Description of Artificial Sequence: Synthetic oligonucleotide
  Sense strand starting at position 3090 of SEQ ID NO: 512
ggagucagucugcagaagu

SEQ ID NO: 42963 - RNA, 19 nt, Artificial Sequence
  Description of Artificial Sequence: Synthetic oligonucleotide
  Antisense strand to SEQ ID NO: 42882
acuucugcagacugacucc

SEQ ID NO: 42964 - RNA, 19 nt, Artificial Sequence
  Description of Artificial Sequence: Synthetic oligonucleotide
  Sense strand starting at position 3058 of SEQ ID NO: 512
gccaaucagaagugaaaug

SEQ ID NO: 42965 - RNA, 19 nt, Artificial Sequence
  Description of Artificial Sequence: Synthetic oligonucleotide
  Antisense strand to SEQ ID NO: 42884
cauuucacuucugauuggc

SEQ ID NO: 42966 - RNA, 19 nt, Artificial Sequence
  Description of Artificial Sequence: Synthetic oligonucleotide
  Sense strand starting at position 3034 of SEQ ID NO: 512
cuacuagugucuccaauca

SEQ ID NO: 42967 - RNA, 19 nt, Artificial Sequence
  Description of Artificial Sequence: Synthetic oligonucleotide
  Antisense strand to SEQ ID NO: 42886
ugauuggagacacuaguag

SEQ ID NO: 42968 - RNA, 19 nt, Artificial Sequence
  Description of Artificial Sequence: Synthetic oligonucleotide
  Sense strand starting at position 3032 of SEQ ID NO: 512
uccuacuagugucuccaau

SEQ ID NO: 42969 - RNA, 19 nt, Artificial Sequence
  Description of Artificial Sequence: Synthetic oligonucleotide
  Antisense strand to SEQ ID NO: 42888
auuggagacacuaguagga

SEQ ID NO: 42970 - RNA, 19 nt, Artificial Sequence
  Description of Artificial Sequence: Synthetic oligonucleotide
  Sense strand starting at position 2948 of SEQ ID NO: 512
cagcuagugcgagagaagu

SEQ ID NO: 42971 - RNA, 19 nt, Artificial Sequence
  Description of Artificial Sequence: Synthetic oligonucleotide
  Antisense strand to SEQ ID NO: 42890
acuucucucgcacuagcug

SEQ ID NO: 42972 - RNA, 19 nt, Artificial Sequence
  Description of Artificial Sequence: Synthetic oligonucleotide
  Sense strand starting at position 2743 of SEQ ID NO: 512
agaacaaguuuggcucaga

SEQ ID NO: 42973 - RNA, 19 nt, Artificial Sequence
  Description of Artificial Sequence: Synthetic oligonucleotide
  Antisense strand to SEQ ID NO: 42892
ucugagccaaacuuguucu

SEQ ID NO: 42974 - RNA, 19 nt, Artificial Sequence
  Description of Artificial Sequence: Synthetic oligonucleotide
  Sense strand starting at position 2652 of SEQ ID NO: 512
gccacuuaagcucaagaga

SEQ ID NO: 42975 - RNA, 19 nt, Artificial Sequence
  Description of Artificial Sequence: Synthetic oligonucleotide
  Antisense strand to SEQ ID NO: 42894
ucucuugagcuuaaguggc

SEQ ID NO: 42976 - RNA, 19 nt, Artificial Sequence
  Description of Artificial Sequence: Synthetic oligonucleotide
  Sense strand starting at position 2462 of SEQ ID NO: 512
gcucgcaaugcuuugaguu

SEQ ID NO: 42977 - RNA, 19 nt, Artificial Sequence
  Description of Artificial Sequence: Synthetic oligonucleotide
  Antisense strand to SEQ ID NO: 42896
aacucaaagcauugcgagc

SEQ ID NO: 42978 - RNA, 19 nt, Artificial Sequence
  Description of Artificial Sequence: Synthetic oligonucleotide
  Sense strand starting at position 2435 of SEQ ID NO: 512
ccuuaagagagcuggcauu

SEQ ID NO: 42979 - RNA, 19 nt, Artificial Sequence
  Description of Artificial Sequence: Synthetic oligonucleotide
  Antisense strand to SEQ ID NO: 42898
aaugccagcucucuuaagg

SEQ ID NO: 42980 - RNA, 19 nt, Artificial Sequence
  Description of Artificial Sequence: Synthetic oligonucleotide
  Sense strand starting at position 2392 of SEQ ID NO: 512
gcuuucucucaagaaagcu

SEQ ID NO: 42981 - RNA, 19 nt, Artificial Sequence
  Description of Artificial Sequence: Synthetic oligonucleotide
  Antisense strand to SEQ ID NO: 42900
agcuuucuugagagaaagc

SEQ ID NO: 42982 - RNA, 19 nt, Artificial Sequence
  Description of Artificial Sequence: Synthetic oligonucleotide
  Sense strand starting at position 2259 of SEQ ID NO: 512
ucauacaagcacugugaau

SEQ ID NO: 42983 - RNA, 19 nt, Artificial Sequence
  Description of Artificial Sequence: Synthetic oligonucleotide
  Antisense strand to SEQ ID NO: 42902
auucacagugcuuguauga

SEQ ID NO: 42984 - RNA, 19 nt, Artificial Sequence
  Description of Artificial Sequence: Synthetic oligonucleotide
  Sense strand starting at position 2227 of SEQ ID NO: 512
guguaaucaucagcauaau

SEQ ID NO: 42985 - RNA, 19 nt, Artificial Sequence
  Description of Artificial Sequence: Synthetic oligonucleotide
  Antisense strand to SEQ ID NO: 42904
auuaugcugaugauuacac

SEQ ID NO: 42986 - RNA, 19 nt, Artificial Sequence
  Description of Artificial Sequence: Synthetic oligonucleotide
  Sense strand starting at position 2225 of SEQ ID NO: 512
ugguguaaucaucagcaua

SEQ ID NO: 42987 - RNA, 19 nt, Artificial Sequence
  Description of Artificial Sequence: Synthetic oligonucleotide
  Antisense strand to SEQ ID NO: 42906
uaugcugaugauuacacca

SEQ ID NO: 42988 - RNA, 19 nt, Artificial Sequence
  Description of Artificial Sequence: Synthetic oligonucleotide
  Sense strand starting at position 2215 of SEQ ID NO: 512
uggcaauucuugguguaau

SEQ ID NO: 42989 - RNA, 19 nt, Artificial Sequence
  Description of Artificial Sequence: Synthetic oligonucleotide
  Antisense strand to SEQ ID NO: 42908
auuacaccaagaauugcca

SEQ ID NO: 42990 - RNA, 19 nt, Artificial Sequence
  Description of Artificial Sequence: Synthetic oligonucleotide
  Sense strand starting at position 2214 of SEQ ID NO: 512
auggcaauucuugguguaa

SEQ ID NO: 42991 - RNA, 19 nt, Artificial Sequence
  Description of Artificial Sequence: Synthetic oligonucleotide
  Antisense strand to SEQ ID NO: 42910
uuacaccaagaauugccau

SEQ ID NO: 42992 - RNA, 19 nt, Artificial Sequence
  Description of Artificial Sequence: Synthetic oligonucleotide
  Sense strand starting at position 2142 of SEQ ID NO: 512
agagaaaccuaauagugga

SEQ ID NO: 42993 - RNA, 19 nt, Artificial Sequence
  Description of Artificial Sequence: Synthetic oligonucleotide
  Antisense strand to SEQ ID NO: 42912
uccacuauuagguuucucu

SEQ ID NO: 42994 - RNA, 19 nt, Artificial Sequence
  Description of Artificial Sequence: Synthetic oligonucleotide
  Sense strand starting at position 1672 of SEQ ID NO: 512
aggccugauucucugaaag

SEQ ID NO: 42995 - RNA, 19 nt, Artificial Sequence
  Description of Artificial Sequence: Synthetic oligonucleotide
  Antisense strand to SEQ ID NO: 42914
cuuucagagaaucaggccu

SEQ ID NO: 42996 - RNA, 19 nt, Artificial Sequence
  Description of Artificial Sequence: Synthetic oligonucleotide
  Sense strand starting at position 1666 of SEQ ID NO: 512
ggaauuaggccugauucuc

SEQ ID NO: 42997 - RNA, 19 nt, Artificial Sequence
  Description of Artificial Sequence: Synthetic oligonucleotide
  Antisense strand to SEQ ID NO: 42916
gagaaucaggccuaauucc

SEQ ID NO: 42998 - RNA, 19 nt, Artificial Sequence
  Description of Artificial Sequence: Synthetic oligonucleotide
  Sense strand starting at position 1665 of SEQ ID NO: 512
gggaauuaggccugauucu

SEQ ID NO: 42999 - RNA, 19 nt, Artificial Sequence
  Description of Artificial Sequence: Synthetic oligonucleotide
  Antisense strand to SEQ ID NO: 42918
agaaucaggccuaauuccc

SEQ ID NO: 43000 - RNA, 19 nt, Artificial Sequence
  Description of Artificial Sequence: Synthetic oligonucleotide
  Sense strand starting at position 1575 of SEQ ID NO: 512
agaaauuccggugggaaag

SEQ ID NO: 43001 - RNA, 19 nt, Artificial Sequence
  Description of Artificial Sequence: Synthetic oligonucleotide
  Antisense strand to SEQ ID NO: 42920
cuuucccaccggaauuucu

SEQ ID NO: 43002 - RNA, 19 nt, Artificial Sequence
  Description of Artificial Sequence: Synthetic oligonucleotide
  Sense strand starting at position 1574 of SEQ ID NO: 512
gagaaauuccggugggaaa

SEQ ID NO: 43003 - RNA, 19 nt, Artificial Sequence
  Description of Artificial Sequence: Synthetic oligonucleotide
  Antisense strand to SEQ ID NO: 42922
uuucccaccggaauuucuc

SEQ ID NO: 43004 - RNA, 19 nt, Artificial Sequence
  Description of Artificial Sequence: Synthetic oligonucleotide
  Sense strand starting at position 1396 of SEQ ID NO: 512
auguacuauccagagguuu

SEQ ID NO: 43005 - RNA, 19 nt, Artificial Sequence
  Description of Artificial Sequence: Synthetic oligonucleotide
  Antisense strand to SEQ ID NO: 42924
aaaccucuggauaguacau

SEQ ID NO: 43006 - RNA, 19 nt, Artificial Sequence
  Description of Artificial Sequence: Synthetic oligonucleotide
  Sense strand starting at position 1068 of SEQ ID NO: 512
agaaaccucuggucuagau

SEQ ID NO: 43007 - RNA, 19 nt, Artificial Sequence
  Description of Artificial Sequence: Synthetic oligonucleotide
  Antisense strand to SEQ ID NO: 42926
aucuagaccagagguuucu

SEQ ID NO: 43008 - RNA, 19 nt, Artificial Sequence
  Description of Artificial Sequence: Synthetic oligonucleotide
  Sense strand starting at position 1065 of SEQ ID NO: 512
auuagaaaccucuggucua

SEQ ID NO: 43009 - RNA, 19 nt, Artificial Sequence
  Description of Artificial Sequence: Synthetic oligonucleotide
  Antisense strand to SEQ ID NO: 42928
uagaccagagguuucuaau

SEQ ID NO: 43010 - RNA, 19 nt, Artificial Sequence
  Description of Artificial Sequence: Synthetic oligonucleotide
  Sense strand starting at position 1054 of SEQ ID NO: 512
cccugugucuaauuagaaa

SEQ ID NO: 43011 - RNA, 19 nt, Artificial Sequence
  Description of Artificial Sequence: Synthetic oligonucleotide
  Antisense strand to SEQ ID NO: 42930
uuucuaauuagacacaggg

SEQ ID NO: 43012 - RNA, 19 nt, Artificial Sequence
  Description of Artificial Sequence: Synthetic oligonucleotide
  Sense strand starting at position 1019 of SEQ ID NO: 512
ggaauuugcuccucccagu

SEQ ID NO: 43013 - RNA, 19 nt, Artificial Sequence
  Description of Artificial Sequence: Synthetic oligonucleotide
  Antisense strand to SEQ ID NO: 42932
acugggaggagcaaauucc

SEQ ID NO: 43014 - RNA, 19 nt, Artificial Sequence
  Description of Artificial Sequence: Synthetic oligonucleotide
  Sense strand starting at position 965 of SEQ ID NO: 512
guaaacuccuaguuccaau

SEQ ID NO: 43015 - RNA, 19 nt, Artificial Sequence
  Description of Artificial Sequence: Synthetic oligonucleotide
  Antisense strand to SEQ ID NO: 42934
auuggaacuaggaguuuac

SEQ ID NO: 43016 - RNA, 19 nt, Artificial Sequence
  Description of Artificial Sequence: Synthetic oligonucleotide
  Sense strand starting at position 895 of SEQ ID NO: 512
uggcaucucuaccuggauu

SEQ ID NO: 43017 - RNA, 19 nt, Artificial Sequence
  Description of Artificial Sequence: Synthetic oligonucleotide
  Antisense strand to SEQ ID NO: 42936
aauccagguagagaugcca

SEQ ID NO: 43018 - RNA, 19 nt, Artificial Sequence
  Description of Artificial Sequence: Synthetic oligonucleotide
  Sense strand starting at position 309 of SEQ ID NO: 512
gugaguucagaagguagga

SEQ ID NO: 43019 - RNA, 19 nt, Artificial Sequence
  Description of Artificial Sequence: Synthetic oligonucleotide
  Antisense strand to SEQ ID NO: 42938
uccuaccuucugaacucac

SEQ ID NO: 43020 - RNA, 19 nt, Artificial Sequence
  Description of Artificial Sequence: Synthetic oligonucleotide
  Sense strand starting at position 209 of SEQ ID NO: 512
guuaucugucagggcaaga

SEQ ID NO: 43021 - RNA, 19 nt, Artificial Sequence
  Description of Artificial Sequence: Synthetic oligonucleotide
  Antisense strand to SEQ ID NO: 42940
ucuugcccugacagauaac

SEQ ID NO: 43022 - RNA, 19 nt, Artificial Sequence
  Description of Artificial Sequence: Synthetic oligonucleotide
  Sense strand starting at position 195 of SEQ ID NO: 512
augcauguuacaggguuau

SEQ ID NO: 43023 - RNA, 19 nt, Artificial Sequence
  Description of Artificial Sequence: Synthetic oligonucleotide
  Antisense strand to SEQ ID NO: 42942
auaacccuguaacaugcau

SEQ ID NO: 43024 - RNA, 19 nt, Artificial Sequence
  Description of Artificial Sequence: Synthetic oligonucleotide
  Sense strand starting at position 182 of SEQ ID NO: 512
ggaugucuucaggaugcau

SEQ ID NO: 43025 - RNA, 19 nt, Artificial Sequence
  Description of Artificial Sequence: Synthetic oligonucleotide
  Antisense strand to SEQ ID NO: 42944
augcauccugaagacaucc

SEQ ID NO: 43026 - RNA, 19 nt, Artificial Sequence
  Description of Artificial Sequence: Synthetic oligonucleotide
  Sense strand starting at position 179 of SEQ ID NO: 512
ccuggaugucuucaggaug

SEQ ID NO: 43027 - RNA, 19 nt, Artificial Sequence
  Description of Artificial Sequence: Synthetic oligonucleotide
  Antisense strand to SEQ ID NO: 42946
cauccugaagacauccagg

SEQ ID NO: 43028 - RNA, 19 nt, Artificial Sequence
  Description of Artificial Sequence: Synthetic oligonucleotide
  Sense strand starting at position 3945 of SEQ ID NO: 513
guugaagaggcuugaaguu

SEQ ID NO: 43029 - RNA, 19 nt, Artificial Sequence
  Description of Artificial Sequence: Synthetic oligonucleotide
  Antisense strand to SEQ ID NO: 42948
aacuucaagccucuucaac

SEQ ID NO: 43030 - RNA, 19 nt, Artificial Sequence
  Description of Artificial Sequence: Synthetic oligonucleotide
  Sense strand starting at position 3682 of SEQ ID NO: 513
aggaauaguaugugugguu

SEQ ID NO: 43031 - RNA, 19 nt, Artificial Sequence
  Description of Artificial Sequence: Synthetic oligonucleotide
  Antisense strand to SEQ ID NO: 42950
aaccacacauacuauuccu

SEQ ID NO: 43032 - RNA, 19 nt, Artificial Sequence
  Description of Artificial Sequence: Synthetic oligonucleotide
  Sense strand starting at position 3681 of SEQ ID NO: 513
gaggaauaguauguguggu

SEQ ID NO: 43033 - RNA, 19 nt, Artificial Sequence
  Description of Artificial Sequence: Synthetic oligonucleotide
  Antisense strand to SEQ ID NO: 42952
accacacauacuauuccuc

SEQ ID NO: 43034 - RNA, 19 nt, Artificial Sequence
  Description of Artificial Sequence: Synthetic oligonucleotide
  Sense strand starting at position 3554 of SEQ ID NO: 513
uaugauggcccucauauga

SEQ ID NO: 43035 - RNA, 19 nt, Artificial Sequence
  Description of Artificial Sequence: Synthetic oligonucleotide
  Antisense strand to SEQ ID NO: 42954
ucauaugagggccaucaua

SEQ ID NO: 43036 - RNA, 19 nt, Artificial Sequence
  Description of Artificial Sequence: Synthetic oligonucleotide
  Sense strand starting at position 3540 of SEQ ID NO: 513
aaucaugaugguuguauga

SEQ ID NO: 43037 - RNA, 19 nt, Artificial Sequence
  Description of Artificial Sequence: Synthetic oligonucleotide
  Antisense strand to SEQ ID NO: 42956
ucauacaaccaucaugauu

SEQ ID NO: 43038 - RNA, 19 nt, Artificial Sequence
  Description of Artificial Sequence: Synthetic oligonucleotide
  Sense strand starting at position 3539 of SEQ ID NO: 513
aaaucaugaugguuguaug

SEQ ID NO: 43039 - RNA, 19 nt, Artificial Sequence
  Description of Artificial Sequence: Synthetic oligonucleotide
  Antisense strand to SEQ ID NO: 42958
cauacaaccaucaugauuu

SEQ ID NO: 43040 - RNA, 19 nt, Artificial Sequence
  Description of Artificial Sequence: Synthetic oligonucleotide
  Sense strand starting at position 3537 of SEQ ID NO: 513
ccaaaucaugaugguugua

SEQ ID NO: 43041 - RNA, 19 nt, Artificial Sequence
  Description of Artificial Sequence: Synthetic oligonucleotide
  Antisense strand to SEQ ID NO: 42960
uacaaccaucaugauuugg

SEQ ID NO: 43042 - RNA, 19 nt, Artificial Sequence
  Description of Artificial Sequence: Synthetic oligonucleotide
  Sense strand starting at position 3472 of SEQ ID NO: 513
gcuucuucuggguaacuca

SEQ ID NO: 43043 - RNA, 19 nt, Artificial Sequence
  Description of Artificial Sequence: Synthetic oligonucleotide
  Antisense strand to SEQ ID NO: 42962
ugaguuacccagaagaagc

SEQ ID NO: 43044 - RNA, 19 nt, Artificial Sequence
  Description of Artificial Sequence: Synthetic oligonucleotide
  Sense strand starting at position 3449 of SEQ ID NO: 513
cucagaauccucuggcuua

SEQ ID NO: 43045 - RNA, 19 nt, Artificial Sequence
  Description of Artificial Sequence: Synthetic oligonucleotide
  Antisense strand to SEQ ID NO: 42964
uaagccagaggauucugag

SEQ ID NO: 43046 - RNA, 19 nt, Artificial Sequence
  Description of Artificial Sequence: Synthetic oligonucleotide
  Sense strand starting at position 3424 of SEQ ID NO: 513
acuagauguuguuauuuga

SEQ ID NO: 43047 - RNA, 19 nt, Artificial Sequence
  Description of Artificial Sequence: Synthetic oligonucleotide
  Antisense strand to SEQ ID NO: 42966
ucaaauaacaacaucuagu

SEQ ID NO: 43048 - RNA, 19 nt, Artificial Sequence
  Description of Artificial Sequence: Synthetic oligonucleotide
  Sense strand starting at position 2952 of SEQ ID NO: 513
cggguaagugauuaagaca

SEQ ID NO: 43049 - RNA, 19 nt, Artificial Sequence
  Description of Artificial Sequence: Synthetic oligonucleotide
  Antisense strand to SEQ ID NO: 42968
ugucuuaaucacuuacccg

SEQ ID NO: 43050 - RNA, 19 nt, Artificial Sequence
  Description of Artificial Sequence: Synthetic oligonucleotide
  Sense strand starting at position 2951 of SEQ ID NO: 513
gcggguaagugauuaagac

SEQ ID NO: 43051 - RNA, 19 nt, Artificial Sequence
  Description of Artificial Sequence: Synthetic oligonucleotide
  Antisense strand to SEQ ID NO: 42970
gucuuaaucacuuacccgc

SEQ ID NO: 43052 - RNA, 19 nt, Artificial Sequence
  Description of Artificial Sequence: Synthetic oligonucleotide
  Sense strand starting at position 2785 of SEQ ID NO: 513
cuaagacaggcauauguua

SEQ ID NO: 43053 - RNA, 19 nt, Artificial Sequence
  Description of Artificial Sequence: Synthetic oligonucleotide
  Antisense strand to SEQ ID NO: 42972
uaacauaugccugucuuag

SEQ ID NO: 43054 - RNA, 19 nt, Artificial Sequence
  Description of Artificial Sequence: Synthetic oligonucleotide
  Sense strand starting at position 2650 of SEQ ID NO: 513
gguggugaacuaggaucua

SEQ ID NO: 43055 - RNA, 19 nt, Artificial Sequence
  Description of Artificial Sequence: Synthetic oligonucleotide
  Antisense strand to SEQ ID NO: 42974
uagauccuaguucaccacc

SEQ ID NO: 43056 - RNA, 19 nt, Artificial Sequence
  Description of Artificial Sequence: Synthetic oligonucleotide
  Sense strand starting at position 2640 of SEQ ID NO: 513
uaacguaucagguggugaa

SEQ ID NO: 43057 - RNA, 19 nt, Artificial Sequence
  Description of Artificial Sequence: Synthetic oligonucleotide
  Antisense strand to SEQ ID NO: 42976
uucaccaccugauacguua

SEQ ID NO: 43058 - RNA, 19 nt, Artificial Sequence
  Description of Artificial Sequence: Synthetic oligonucleotide
  Sense strand starting at position 2408 of SEQ ID NO: 513
uuaugaaucucagugcaaa

SEQ ID NO: 43059 - RNA, 19 nt, Artificial Sequence
  Description of Artificial Sequence: Synthetic oligonucleotide
  Antisense strand to SEQ ID NO: 42978
uuugcacugagauucauaa

SEQ ID NO: 43060 - RNA, 19 nt, Artificial Sequence
  Description of Artificial Sequence: Synthetic oligonucleotide
  Sense strand starting at position 2239 of SEQ ID NO: 513
cgguaaaugguuuacaacu

SEQ ID NO: 43061 - RNA, 19 nt, Artificial Sequence
  Description of Artificial Sequence: Synthetic oligonucleotide
  Antisense strand to SEQ ID NO: 42980
aguuguaaaccauuuaccg

SEQ ID NO: 43062 - RNA, 19 nt, Artificial Sequence
  Description of Artificial Sequence: Synthetic oligonucleotide
  Sense strand starting at position 2237 of SEQ ID NO: 513
uccgguaaaugguuuacaa

SEQ ID NO: 43063 - RNA, 19 nt, Artificial Sequence
  Description of Artificial Sequence: Synthetic oligonucleotide
  Antisense strand to SEQ ID NO: 42982
uuguaaaccauuuaccgga

SEQ ID NO: 43064 - RNA, 19 nt, Artificial Sequence
  Description of Artificial Sequence: Synthetic oligonucleotide
  Sense strand starting at position 2230 of SEQ ID NO: 513
gugguguuccgguaaaugg

SEQ ID NO: 43065 - RNA, 19 nt, Artificial Sequence
  Description of Artificial Sequence: Synthetic oligonucleotide
  Antisense strand to SEQ ID NO: 42984
ccauuuaccggaacaccac

SEQ ID NO: 43066 - RNA, 19 nt, Artificial Sequence
  Description of Artificial Sequence: Synthetic oligonucleotide
  Sense strand starting at position 2112 of SEQ ID NO: 513
auuauaaauggcuaugcaa

SEQ ID NO: 43067 - RNA, 19 nt, Artificial Sequence
  Description of Artificial Sequence: Synthetic oligonucleotide
  Antisense strand to SEQ ID NO: 42986
uugcauagccauuuauaau

SEQ ID NO: 43068 - RNA, 19 nt, Artificial Sequence
  Description of Artificial Sequence: Synthetic oligonucleotide
  Sense strand starting at position 1395 of SEQ ID NO: 513
agcaauucuccagagcaag

SEQ ID NO: 43069 - RNA, 19 nt, Artificial Sequence
  Description of Artificial Sequence: Synthetic oligonucleotide
  Antisense strand to SEQ ID NO: 42988
cuugcucuggagaauugcu

SEQ ID NO: 43070 - RNA, 19 nt, Artificial Sequence
  Description of Artificial Sequence: Synthetic oligonucleotide
  Sense strand starting at position 1288 of SEQ ID NO: 513
uugaguuacagcucgcuuu

SEQ ID NO: 43071 - RNA, 19 nt, Artificial Sequence
  Description of Artificial Sequence: Synthetic oligonucleotide
  Antisense strand to SEQ ID NO: 42990
aaagcgagcuguaacucaa

SEQ ID NO: 43072 - RNA, 19 nt, Artificial Sequence
  Description of Artificial Sequence: Synthetic oligonucleotide
  Sense strand starting at position 1170 of SEQ ID NO: 513
ggugccaacgauugggaua

SEQ ID NO: 43073 - RNA, 19 nt, Artificial Sequence
  Description of Artificial Sequence: Synthetic oligonucleotide
  Antisense strand to SEQ ID NO: 42992
uaucccaaucguuggcacc

SEQ ID NO: 43074 - RNA, 19 nt, Artificial Sequence
  Description of Artificial Sequence: Synthetic oligonucleotide
  Sense strand starting at position 1120 of SEQ ID NO: 513
ucacaagaaucuuaggaaa

SEQ ID NO: 43075 - RNA, 19 nt, Artificial Sequence
  Description of Artificial Sequence: Synthetic oligonucleotide
  Antisense strand to SEQ ID NO: 42994
uuuccuaagauucuuguga

SEQ ID NO: 43076 - RNA, 19 nt, Artificial Sequence
  Description of Artificial Sequence: Synthetic oligonucleotide
  Sense strand starting at position 1077 of SEQ ID NO: 513
caaucaguauuucucgagu

SEQ ID NO: 43077 - RNA, 19 nt, Artificial Sequence
  Description of Artificial Sequence: Synthetic oligonucleotide
  Antisense strand to SEQ ID NO: 42996
acucgagaaauacugauug

SEQ ID NO: 43078 - RNA, 19 nt, Artificial Sequence
  Description of Artificial Sequence: Synthetic oligonucleotide
  Sense strand starting at position 975 of SEQ ID NO: 513
cucagagucgguugaauga

SEQ ID NO: 43079 - RNA, 19 nt, Artificial Sequence
  Description of Artificial Sequence: Synthetic oligonucleotide
  Antisense strand to SEQ ID NO: 42998
ucauucaaccgacucugag

SEQ ID NO: 43080 - RNA, 19 nt, Artificial Sequence
  Description of Artificial Sequence: Synthetic oligonucleotide
  Sense strand starting at position 973 of SEQ ID NO: 513
cacucagagucgguugaau

SEQ ID NO: 43081 - RNA, 19 nt, Artificial Sequence
  Description of Artificial Sequence: Synthetic oligonucleotide
  Antisense strand to SEQ ID NO: 43000
auucaaccgacucugagug

SEQ ID NO: 43082 - RNA, 19 nt, Artificial Sequence
  Description of Artificial Sequence: Synthetic oligonucleotide
  Sense strand starting at position 942 of SEQ ID NO: 513
uuuguaaucuuaguaccua

SEQ ID NO: 43083 - RNA, 19 nt, Artificial Sequence
  Description of Artificial Sequence: Synthetic oligonucleotide
  Antisense strand to SEQ ID NO: 43002
uagguacuaagauuacaaa

SEQ ID NO: 43084 - RNA, 19 nt, Artificial Sequence
  Description of Artificial Sequence: Synthetic oligonucleotide
  Sense strand starting at position 836 of SEQ ID NO: 513
ucucuaggccucuaguaaa

SEQ ID NO: 43085 - RNA, 19 nt, Artificial Sequence
  Description of Artificial Sequence: Synthetic oligonucleotide
  Antisense strand to SEQ ID NO: 43004
uuuacuagaggccuagaga

SEQ ID NO: 43086 - RNA, 19 nt, Artificial Sequence
  Description of Artificial Sequence: Synthetic oligonucleotide
  Sense strand starting at position 810 of SEQ ID NO: 513
acuuuccuccgacagauau

SEQ ID NO: 43087 - RNA, 19 nt, Artificial Sequence
  Description of Artificial Sequence: Synthetic oligonucleotide
  Antisense strand to SEQ ID NO: 43006
auaucugucggaggaaagu

SEQ ID NO: 43088 - RNA, 19 nt, Artificial Sequence
  Description of Artificial Sequence: Synthetic oligonucleotide
  Sense strand starting at position 805 of SEQ ID NO: 513
uguauacuuuccuccgaca

SEQ ID NO: 43089 - RNA, 19 nt, Artificial Sequence
  Description of Artificial Sequence: Synthetic oligonucleotide
  Antisense strand to SEQ ID NO: 43008
ugucggaggaaaguauaca

SEQ ID NO: 43090 - RNA, 19 nt, Artificial Sequence
  Description of Artificial Sequence: Synthetic oligonucleotide
  Sense strand starting at position 803 of SEQ ID NO: 513
gauguauacuuuccuccga

SEQ ID NO: 43091 - RNA, 19 nt, Artificial Sequence
  Description of Artificial Sequence: Synthetic oligonucleotide
  Antisense strand to SEQ ID NO: 43010
ucggaggaaaguauacauc

SEQ ID NO: 43092 - RNA, 19 nt, Artificial Sequence
  Description of Artificial Sequence: Synthetic oligonucleotide
  Sense strand starting at position 791 of SEQ ID NO: 513
ucucuaggcggagauguau

SEQ ID NO: 43093 - RNA, 19 nt, Artificial Sequence
  Description of Artificial Sequence: Synthetic oligonucleotide
  Antisense strand to SEQ ID NO: 43012
auacaucuccgccuagaga

SEQ ID NO: 43094 - RNA, 19 nt, Artificial Sequence
  Description of Artificial Sequence: Synthetic oligonucleotide
  Sense strand starting at position 652 of SEQ ID NO: 513
gaaagugguugcuuuauau

SEQ ID NO: 43095 - RNA, 19 nt, Artificial Sequence
  Description of Artificial Sequence: Synthetic oligonucleotide
  Antisense strand to SEQ ID NO: 43014
auauaaagcaaccacuuuc

SEQ ID NO: 43096 - RNA, 19 nt, Artificial Sequence
  Description of Artificial Sequence: Synthetic oligonucleotide
  Sense strand starting at position 617 of SEQ ID NO: 513
guauuuaaauaccagaaga

SEQ ID NO: 43097 - RNA, 19 nt, Artificial Sequence
  Description of Artificial Sequence: Synthetic oligonucleotide
  Antisense strand to SEQ ID NO: 43016
ucuucugguauuuaaauac

SEQ ID NO: 43098 - RNA, 19 nt, Artificial Sequence
  Description of Artificial Sequence: Synthetic oligonucleotide
  Sense strand starting at position 554 of SEQ ID NO: 513
acagcagaugucuaaacuu

SEQ ID NO: 43099 - RNA, 19 nt, Artificial Sequence
  Description of Artificial Sequence: Synthetic oligonucleotide
  Antisense strand to SEQ ID NO: 43018
aaguuuagacaucugcugu

SEQ ID NO: 43100 - RNA, 19 nt, Artificial Sequence
  Description of Artificial Sequence: Synthetic oligonucleotide
  Sense strand starting at position 188 of SEQ ID NO: 513
gaggauuauuuggguuaca

SEQ ID NO: 43101 - RNA, 19 nt, Artificial Sequence
  Description of Artificial Sequence: Synthetic oligonucleotide
  Antisense strand to SEQ ID NO: 43020
uguaacccaaauaauccuc

SEQ ID NO: 43102 - RNA, 19 nt, Artificial Sequence
  Description of Artificial Sequence: Synthetic oligonucleotide
  Sense strand starting at position 187 of SEQ ID NO: 513
agaggauuauuuggguuac

SEQ ID NO: 43103 - RNA, 19 nt, Artificial Sequence
  Description of Artificial Sequence: Synthetic oligonucleotide
  Antisense strand to SEQ ID NO: 43022
guaacccaaauaauccucu

SEQ ID NO: 43104 - RNA, 19 nt, Artificial Sequence
  Description of Artificial Sequence: Synthetic oligonucleotide
  Sense strand starting at position 126 of SEQ ID NO: 513
gauguugucuuaguacauu

SEQ ID NO: 43105 - RNA, 19 nt, Artificial Sequence
  Description of Artificial Sequence: Synthetic oligonucleotide
  Antisense strand to SEQ ID NO: 43024
aauguacuaagacaacauc

SEQ ID NO: 43106 - RNA, 19 nt, Artificial Sequence
  Description of Artificial Sequence: Synthetic oligonucleotide
  Sense strand starting at position 77 of SEQ ID NO: 513
uggaauaugaaguguaagu

SEQ ID NO: 43107 - RNA, 19 nt, Artificial Sequence
  Description of Artificial Sequence: Synthetic oligonucleotide
  Antisense strand to SEQ ID NO: 43026
acuuacacuucauauucca

SEQ ID NO: 43108 - RNA, 19 nt, Artificial Sequence
  Description of Artificial Sequence: Synthetic oligonucleotide
  Sense strand starting at position 3846 of SEQ ID NO: 514
uuugauuguucuuucucca

SEQ ID NO: 43109 - RNA, 19 nt, Artificial Sequence
  Description of Artificial Sequence: Synthetic oligonucleotide
  Antisense strand to SEQ ID NO: 43028
uggagaaagaacaaucaaa

SEQ ID NO: 43110 - RNA, 19 nt, Artificial Sequence
  Description of Artificial Sequence: Synthetic oligonucleotide
  Sense strand starting at position 3697 of SEQ ID NO: 514
cguuaaucucacuaauggu

SEQ ID NO: 43111 - RNA, 19 nt, Artificial Sequence
  Description of Artificial Sequence: Synthetic oligonucleotide
  Antisense strand to SEQ ID NO: 43030
accauuagugagauuaacg

SEQ ID NO: 43112 - RNA, 19 nt, Artificial Sequence
  Description of Artificial Sequence: Synthetic oligonucleotide
  Sense strand starting at position 3626 of SEQ ID NO: 514
ugguaucaguuuguaauag

SEQ ID NO: 43113 - RNA, 19 nt, Artificial Sequence
  Description of Artificial Sequence: Synthetic oligonucleotide
  Antisense strand to SEQ ID NO: 43032
cuauuacaaacugauacca

SEQ ID NO: 43114 - RNA, 19 nt, Artificial Sequence
  Description of Artificial Sequence: Synthetic oligonucleotide
  Sense strand starting at position 3625 of SEQ ID NO: 514
cugguaucaguuuguaaua

SEQ ID NO: 43115 - RNA, 19 nt, Artificial Sequence
  Description of Artificial Sequence: Synthetic oligonucleotide
  Antisense strand to SEQ ID NO: 43034
uauuacaaacugauaccag

SEQ ID NO: 43116 - RNA, 19 nt, Artificial Sequence
  Description of Artificial Sequence: Synthetic oligonucleotide
  Sense strand starting at position 3346 of SEQ ID NO: 514
guggaauagugucuauaga

SEQ ID NO: 43117 - RNA, 19 nt, Artificial Sequence
  Description of Artificial Sequence: Synthetic oligonucleotide
  Antisense strand to SEQ ID NO: 43036
ucuauagacacuauuccac

SEQ ID NO: 43118 - RNA, 19 nt, Artificial Sequence
  Description of Artificial Sequence: Synthetic oligonucleotide
  Sense strand starting at position 3282 of SEQ ID NO: 514
ucgguauuaggaugauacu

SEQ ID NO: 43119 - RNA, 19 nt, Artificial Sequence
  Description of Artificial Sequence: Synthetic oligonucleotide
  Antisense strand to SEQ ID NO: 43038
aguaucauccuaauaccga

SEQ ID NO: 43120 - RNA, 19 nt, Artificial Sequence
  Description of Artificial Sequence: Synthetic oligonucleotide
  Sense strand starting at position 3232 of SEQ ID NO: 514
caaagauguuggucuguag

SEQ ID NO: 43121 - RNA, 19 nt, Artificial Sequence
  Description of Artificial Sequence: Synthetic oligonucleotide
  Antisense strand to SEQ ID NO: 43040
cuacagaccaacaucuuug

SEQ ID NO: 43122 - RNA, 19 nt, Artificial Sequence
  Description of Artificial Sequence: Synthetic oligonucleotide
  Sense strand starting at position 3113 of SEQ ID NO: 514
ugacuuggguauguuaaau

SEQ ID NO: 43123 - RNA, 19 nt, Artificial Sequence
  Description of Artificial Sequence: Synthetic oligonucleotide
  Antisense strand to SEQ ID NO: 43042
auuuaacauacccaaguca

SEQ ID NO: 43124 - RNA, 19 nt, Artificial Sequence
  Description of Artificial Sequence: Synthetic oligonucleotide
  Sense strand starting at position 2711 of SEQ ID NO: 514
uuggaugagucuuuaggcu

SEQ ID NO: 43125 - RNA, 19 nt, Artificial Sequence
  Description of Artificial Sequence: Synthetic oligonucleotide
  Antisense strand to SEQ ID NO: 43044
agccuaaagacucauccaa

SEQ ID NO: 43126 - RNA, 19 nt, Artificial Sequence
  Description of Artificial Sequence: Synthetic oligonucleotide
  Sense strand starting at position 2666 of SEQ ID NO: 514
agcuacuuauuuguguaua

SEQ ID NO: 43127 - RNA, 19 nt, Artificial Sequence
  Description of Artificial Sequence: Synthetic oligonucleotide
  Antisense strand to SEQ ID NO: 43046
uauacacaaauaaguagcu

SEQ ID NO: 43128 - RNA, 19 nt, Artificial Sequence
  Description of Artificial Sequence: Synthetic oligonucleotide
  Sense strand starting at position 2573 of SEQ ID NO: 514
uuagguauauaccuaaguu

SEQ ID NO: 43129 - RNA, 19 nt, Artificial Sequence
  Description of Artificial Sequence: Synthetic oligonucleotide
  Antisense strand to SEQ ID NO: 43048
aacuuagguauauaccuaa

SEQ ID NO: 43130 - RNA, 19 nt, Artificial Sequence
  Description of Artificial Sequence: Synthetic oligonucleotide
  Sense strand starting at position 2515 of SEQ ID NO: 514
guauaacacuuguuacauu

SEQ ID NO: 43131 - RNA, 19 nt, Artificial Sequence
  Description of Artificial Sequence: Synthetic oligonucleotide
  Antisense strand to SEQ ID NO: 43050
aauguaacaaguguuauac

SEQ ID NO: 43132 - RNA, 19 nt, Artificial Sequence
  Description of Artificial Sequence: Synthetic oligonucleotide
  Sense strand starting at position 2400 of SEQ ID NO: 514
uuuaucuuucuagagaagu

SEQ ID NO: 43133 - RNA, 19 nt, Artificial Sequence
  Description of Artificial Sequence: Synthetic oligonucleotide
  Antisense strand to SEQ ID NO: 43052
acuucucuagaaagauaaa

SEQ ID NO: 43134 - RNA, 19 nt, Artificial Sequence
  Description of Artificial Sequence: Synthetic oligonucleotide
  Sense strand starting at position 2379 of SEQ ID NO: 514
uuguuuauguuucugauag

SEQ ID NO: 43135 - RNA, 19 nt, Artificial Sequence
  Description of Artificial Sequence: Synthetic oligonucleotide
  Antisense strand to SEQ ID NO: 43054
cuaucagaaacauaaacaa

SEQ ID NO: 43136 - RNA, 19 nt, Artificial Sequence
  Description of Artificial Sequence: Synthetic oligonucleotide
  Sense strand starting at position 2192 of SEQ ID NO: 514
agaccuggauucuagaaga

SEQ ID NO: 43137 - RNA, 19 nt, Artificial Sequence
  Description of Artificial Sequence: Synthetic oligonucleotide
  Antisense strand to SEQ ID NO: 43056
ucuucuagaauccaggucu

SEQ ID NO: 43138 - RNA, 19 nt, Artificial Sequence
  Description of Artificial Sequence: Synthetic oligonucleotide
  Sense strand starting at position 2187 of SEQ ID NO: 514
ccagcagaccuggauucua

SEQ ID NO: 43139 - RNA, 19 nt, Artificial Sequence
  Description of Artificial Sequence: Synthetic oligonucleotide
  Antisense strand to SEQ ID NO: 43058
uagaauccaggucugcugg

SEQ ID NO: 43140 - RNA, 19 nt, Artificial Sequence
  Description of Artificial Sequence: Synthetic oligonucleotide
  Sense strand starting at position 2176 of SEQ ID NO: 514
ugagauguuggccagcaga

SEQ ID NO: 43141 - RNA, 19 nt, Artificial Sequence
  Description of Artificial Sequence: Synthetic oligonucleotide
  Antisense strand to SEQ ID NO: 43060
ucugcuggccaacaucuca

SEQ ID NO: 43142 - RNA, 19 nt, Artificial Sequence
  Description of Artificial Sequence: Synthetic oligonucleotide
  Sense strand starting at position 2152 of SEQ ID NO: 514
uuaagucugcagggugaaa

SEQ ID NO: 43143 - RNA, 19 nt, Artificial Sequence
  Description of Artificial Sequence: Synthetic oligonucleotide
  Antisense strand to SEQ ID NO: 43062
uuucacccugcagacuuaa

SEQ ID NO: 43144 - RNA, 19 nt, Artificial Sequence
  Description of Artificial Sequence: Synthetic oligonucleotide
  Sense strand starting at position 2140 of SEQ ID NO: 514
gaggaagccuaauuaaguc

SEQ ID NO: 43145 - RNA, 19 nt, Artificial Sequence
  Description of Artificial Sequence: Synthetic oligonucleotide
  Antisense strand to SEQ ID NO: 43064
gacuuaauuaggcuuccuc

SEQ ID NO: 43146 - RNA, 19 nt, Artificial Sequence
  Description of Artificial Sequence: Synthetic oligonucleotide
  Sense strand starting at position 2050 of SEQ ID NO: 514
gaaugcaggucucucauaa

SEQ ID NO: 43147 - RNA, 19 nt, Artificial Sequence
  Description of Artificial Sequence: Synthetic oligonucleotide
  Antisense strand to SEQ ID NO: 43066
uuaugagagaccugcauuc

SEQ ID NO: 43148 - RNA, 19 nt, Artificial Sequence
  Description of Artificial Sequence: Synthetic oligonucleotide
  Sense strand starting at position 1700 of SEQ ID NO: 514
cacaaugagauugguguga

SEQ ID NO: 43149 - RNA, 19 nt, Artificial Sequence
  Description of Artificial Sequence: Synthetic oligonucleotide
  Antisense strand to SEQ ID NO: 43068
ucacaccaaucucauugug

SEQ ID NO: 43150 - RNA, 19 nt, Artificial Sequence
  Description of Artificial Sequence: Synthetic oligonucleotide
  Sense strand starting at position 1600 of SEQ ID NO: 514
acaggaaaguugcauuucu

SEQ ID NO: 43151 - RNA, 19 nt, Artificial Sequence
  Description of Artificial Sequence: Synthetic oligonucleotide
  Antisense strand to SEQ ID NO: 43070
agaaaugcaacuuuccugu

SEQ ID NO: 43152 - RNA, 19 nt, Artificial Sequence
  Description of Artificial Sequence: Synthetic oligonucleotide
  Sense strand starting at position 1533 of SEQ ID NO: 514
agaccuuggccuugaauca

SEQ ID NO: 43153 - RNA, 19 nt, Artificial Sequence
  Description of Artificial Sequence: Synthetic oligonucleotide
  Antisense strand to SEQ ID NO: 43072
ugauucaaggccaaggucu

SEQ ID NO: 43154 - RNA, 19 nt, Artificial Sequence
  Description of Artificial Sequence: Synthetic oligonucleotide
  Sense strand starting at position 1479 of SEQ ID NO: 514
acaauuggcuuggucuauu

SEQ ID NO: 43155 - RNA, 19 nt, Artificial Sequence
  Description of Artificial Sequence: Synthetic oligonucleotide
  Antisense strand to SEQ ID NO: 43074
aauagaccaagccaauugu

SEQ ID NO: 43156 - RNA, 19 nt, Artificial Sequence
  Description of Artificial Sequence: Synthetic oligonucleotide
  Sense strand starting at position 1478 of SEQ ID NO: 514
aacaauuggcuuggucuau

SEQ ID NO: 43157 - RNA, 19 nt, Artificial Sequence
  Description of Artificial Sequence: Synthetic oligonucleotide
  Antisense strand to SEQ ID NO: 43076
auagaccaagccaauuguu

SEQ ID NO: 43158 - RNA, 19 nt, Artificial Sequence
  Description of Artificial Sequence: Synthetic oligonucleotide
  Sense strand starting at position 1477 of SEQ ID NO: 514
uaacaauuggcuuggucua

SEQ ID NO: 43159 - RNA, 19 nt, Artificial Sequence
  Description of Artificial Sequence: Synthetic oligonucleotide
  Antisense strand to SEQ ID NO: 43078
uagaccaagccaauuguua

SEQ ID NO: 43160 - RNA, 19 nt, Artificial Sequence
  Description of Artificial Sequence: Synthetic oligonucleotide
  Sense strand starting at position 1266 of SEQ ID NO: 514
aagguaaaccguuaguaac

SEQ ID NO: 43161 - RNA, 19 nt, Artificial Sequence
  Description of Artificial Sequence: Synthetic oligonucleotide
  Antisense strand to SEQ ID NO: 43080
guuacuaacgguuuaccuu

SEQ ID NO: 43162 - RNA, 19 nt, Artificial Sequence
  Description of Artificial Sequence: Synthetic oligonucleotide
  Sense strand starting at position 1176 of SEQ ID NO: 514
uuuccucacguguauaaua

SEQ ID NO: 43163 - RNA, 19 nt, Artificial Sequence
  Description of Artificial Sequence: Synthetic oligonucleotide
  Antisense strand to SEQ ID NO: 43082
uauuauacacgugaggaaa

SEQ ID NO: 43164 - RNA, 19 nt, Artificial Sequence
  Description of Artificial Sequence: Synthetic oligonucleotide
  Sense strand starting at position 1159 of SEQ ID NO: 514
ggucaucagggccaugauu

SEQ ID NO: 43165 - RNA, 19 nt, Artificial Sequence
  Description of Artificial Sequence: Synthetic oligonucleotide
  Antisense strand to SEQ ID NO: 43084
aaucauggcccugaugacc

SEQ ID NO: 43166 - RNA, 19 nt, Artificial Sequence
  Description of Artificial Sequence: Synthetic oligonucleotide
  Sense strand starting at position 1101 of SEQ ID NO: 514
cagcgucaacuuuggagau

SEQ ID NO: 43167 - RNA, 19 nt, Artificial Sequence
  Description of Artificial Sequence: Synthetic oligonucleotide
  Antisense strand to SEQ ID NO: 43086
aucuccaaaguugacgcug

SEQ ID NO: 43168 - RNA, 19 nt, Artificial Sequence
  Description of Artificial Sequence: Synthetic oligonucleotide
  Sense strand starting at position 881 of SEQ ID NO: 514
agucaugacugguuaguaa

SEQ ID NO: 43169 - RNA, 19 nt, Artificial Sequence
  Description of Artificial Sequence: Synthetic oligonucleotide
  Antisense strand to SEQ ID NO: 43088
uuacuaaccagucaugacu

SEQ ID NO: 43170 - RNA, 19 nt, Artificial Sequence
  Description of Artificial Sequence: Synthetic oligonucleotide
  Sense strand starting at position 870 of SEQ ID NO: 514
gucauaagauaagucauga

SEQ ID NO: 43171 - RNA, 19 nt, Artificial Sequence
  Description of Artificial Sequence: Synthetic oligonucleotide
  Antisense strand to SEQ ID NO: 43090
ucaugacuuaucuuaugac

SEQ ID NO: 43172 - RNA, 19 nt, Artificial Sequence
  Description of Artificial Sequence: Synthetic oligonucleotide
  Sense strand starting at position 563 of SEQ ID NO: 514
gaguccugacuaugauguu

SEQ ID NO: 43173 - RNA, 19 nt, Artificial Sequence
  Description of Artificial Sequence: Synthetic oligonucleotide
  Antisense strand to SEQ ID NO: 43092
aacaucauagucaggacuc

SEQ ID NO: 43174 - RNA, 19 nt, Artificial Sequence
  Description of Artificial Sequence: Synthetic oligonucleotide
  Sense strand starting at position 468 of SEQ ID NO: 514
guaaaugugauggaagcau

SEQ ID NO: 43175 - RNA, 19 nt, Artificial Sequence
  Description of Artificial Sequence: Synthetic oligonucleotide
  Antisense strand to SEQ ID NO: 43094
augcuuccaucacauuuac

SEQ ID NO: 43176 - RNA, 19 nt, Artificial Sequence
  Description of Artificial Sequence: Synthetic oligonucleotide
  Sense strand starting at position 467 of SEQ ID NO: 514
aguaaaugugauggaagca

SEQ ID NO: 43177 - RNA, 19 nt, Artificial Sequence
  Description of Artificial Sequence: Synthetic oligonucleotide
  Antisense strand to SEQ ID NO: 43096
ugcuuccaucacauuuacu

SEQ ID NO: 43178 - RNA, 19 nt, Artificial Sequence
  Description of Artificial Sequence: Synthetic oligonucleotide
  Sense strand starting at position 461 of SEQ ID NO: 514
gagguaaguaaaugugaug

SEQ ID NO: 43179 - RNA, 19 nt, Artificial Sequence
  Description of Artificial Sequence: Synthetic oligonucleotide
  Antisense strand to SEQ ID NO: 43098
caucacauuuacuuaccuc

SEQ ID NO: 43180 - RNA, 19 nt, Artificial Sequence
  Description of Artificial Sequence: Synthetic oligonucleotide
  Sense strand starting at position 457 of SEQ ID NO: 514
gucugagguaaguaaaugu

SEQ ID NO: 43181 - RNA, 19 nt, Artificial Sequence
  Description of Artificial Sequence: Synthetic oligonucleotide
  Antisense strand to SEQ ID NO: 43100
acauuuacuuaccucagac

SEQ ID NO: 43182 - RNA, 19 nt, Artificial Sequence
  Description of Artificial Sequence: Synthetic oligonucleotide
  Sense strand starting at position 221 of SEQ ID NO: 514
ucugcaauuccacggaauu

SEQ ID NO: 43183 - RNA, 19 nt, Artificial Sequence
  Description of Artificial Sequence: Synthetic oligonucleotide
  Antisense strand to SEQ ID NO: 43102
aauuccguggaauugcaga

SEQ ID NO: 43184 - RNA, 19 nt, Artificial Sequence
  Description of Artificial Sequence: Synthetic oligonucleotide
  Sense strand starting at position 21 of SEQ ID NO: 514
ugcccugugaaaugagaga

SEQ ID NO: 43185 - RNA, 19 nt, Artificial Sequence
  Description of Artificial Sequence: Synthetic oligonucleotide
  Antisense strand to SEQ ID NO: 43104
ucucucauuucacagggca

SEQ ID NO: 43186 - RNA, 19 nt, Artificial Sequence
  Description of Artificial Sequence: Synthetic oligonucleotide
  Sense strand starting at position 16 of SEQ ID NO: 514
cagagugcccugugaaaug

SEQ ID NO: 43187 - RNA, 19 nt, Artificial Sequence
  Description of Artificial Sequence: Synthetic oligonucleotide
  Antisense strand to SEQ ID NO: 43106
cauuucacagggcacucug

SEQ ID NO: 43188 - RNA, 19 nt, Artificial Sequence
  Description of Artificial Sequence: Synthetic oligonucleotide
  Sense strand starting at position 3929 of SEQ ID NO: 515
gacaguacugguugaacua

SEQ ID NO: 43189 - RNA, 19 nt, Artificial Sequence
  Description of Artificial Sequence: Synthetic oligonucleotide
  Antisense strand to SEQ ID NO: 43108
uaguucaaccaguacuguc

SEQ ID NO: 43190 - RNA, 19 nt, Artificial Sequence
  Description of Artificial Sequence: Synthetic oligonucleotide
  Sense strand starting at position 3926 of SEQ ID NO: 515
agggacaguacugguugaa

SEQ ID NO: 43191 - RNA, 19 nt, Artificial Sequence
  Description of Artificial Sequence: Synthetic oligonucleotide
  Antisense strand to SEQ ID NO: 43110
uucaaccaguacugucccu

SEQ ID NO: 43192 - RNA, 19 nt, Artificial Sequence
  Description of Artificial Sequence: Synthetic oligonucleotide
  Sense strand starting at position 3757 of SEQ ID NO: 515
uggauugucagguguuaug

SEQ ID NO: 43193 - RNA, 19 nt, Artificial Sequence
  Description of Artificial Sequence: Synthetic oligonucleotide
  Antisense strand to SEQ ID NO: 43112
cauaacaccugacaaucca

SEQ ID NO: 43194 - RNA, 19 nt, Artificial Sequence
  Description of Artificial Sequence: Synthetic oligonucleotide
  Sense strand starting at position 3709 of SEQ ID NO: 515
cucuaaagcucuguuagag

SEQ ID NO: 43195 - RNA, 19 nt, Artificial Sequence
  Description of Artificial Sequence: Synthetic oligonucleotide
  Antisense strand to SEQ ID NO: 43114
cucuaacagagcuuuagag

SEQ ID NO: 43196 - RNA, 19 nt, Artificial Sequence
  Description of Artificial Sequence: Synthetic oligonucleotide
  Sense strand starting at position 3708 of SEQ ID NO: 515
ucucuaaagcucuguuaga

SEQ ID NO: 43197 - RNA, 19 nt, Artificial Sequence
  Description of Artificial Sequence: Synthetic oligonucleotide
  Antisense strand to SEQ ID NO: 43116
ucuaacagagcuuuagaga

SEQ ID NO: 43198 - RNA, 19 nt, Artificial Sequence
  Description of Artificial Sequence: Synthetic oligonucleotide
  Sense strand starting at position 3562 of SEQ ID NO: 515
gcugacuuuccugauaagc

SEQ ID NO: 43199 - RNA, 19 nt, Artificial Sequence
  Description of Artificial Sequence: Synthetic oligonucleotide
  Antisense strand to SEQ ID NO: 43118
gcuuaucaggaaagucagc

SEQ ID NO: 43200 - RNA, 19 nt, Artificial Sequence
  Description of Artificial Sequence: Synthetic oligonucleotide
  Sense strand starting at position 3526 of SEQ ID NO: 515
uuagcagucuugcuugaaa

SEQ ID NO: 43201 - RNA, 19 nt, Artificial Sequence
  Description of Artificial Sequence: Synthetic oligonucleotide
  Antisense strand to SEQ ID NO: 43120
uuucaagcaagacugcuaa

SEQ ID NO: 43202 - RNA, 19 nt, Artificial Sequence
  Description of Artificial Sequence: Synthetic oligonucleotide
  Sense strand starting at position 3470 of SEQ ID NO: 515
gcucuaggauaacuacuua

SEQ ID NO: 43203 - RNA, 19 nt, Artificial Sequence
  Description of Artificial Sequence: Synthetic oligonucleotide
  Antisense strand to SEQ ID NO: 43122
uaaguaguuauccuagagc

SEQ ID NO: 43204 - RNA, 19 nt, Artificial Sequence
  Description of Artificial Sequence: Synthetic oligonucleotide
  Sense strand starting at position 3464 of SEQ ID NO: 515
ucauaugcucuaggauaac

SEQ ID NO: 43205 - RNA, 19 nt, Artificial Sequence
  Description of Artificial Sequence: Synthetic oligonucleotide
  Antisense strand to SEQ ID NO: 43124
guuauccuagagcauauga

SEQ ID NO: 43206 - RNA, 19 nt, Artificial Sequence
  Description of Artificial Sequence: Synthetic oligonucleotide
  Sense strand starting at position 3462 of SEQ ID NO: 515
acucauaugcucuaggaua

SEQ ID NO: 43207 - RNA, 19 nt, Artificial Sequence
  Description of Artificial Sequence: Synthetic oligonucleotide
  Antisense strand to SEQ ID NO: 43126
uauccuagagcauaugagu

SEQ ID NO: 43208 - RNA, 19 nt, Artificial Sequence
  Description of Artificial Sequence: Synthetic oligonucleotide
  Sense strand starting at position 3460 of SEQ ID NO: 515
agacucauaugcucuagga

SEQ ID NO: 43209 - RNA, 19 nt, Artificial Sequence
  Description of Artificial Sequence: Synthetic oligonucleotide
  Antisense strand to SEQ ID NO: 43128
uccuagagcauaugagucu

SEQ ID NO: 43210 - RNA, 19 nt, Artificial Sequence
  Description of Artificial Sequence: Synthetic oligonucleotide
  Sense strand starting at position 3384 of SEQ ID NO: 515
ccauuagugugauugauaa

SEQ ID NO: 43211 - RNA, 19 nt, Artificial Sequence
  Description of Artificial Sequence: Synthetic oligonucleotide
  Antisense strand to SEQ ID NO: 43130
uuaucaaucacacuaaugg

SEQ ID NO: 43212 - RNA, 19 nt, Artificial Sequence
  Description of Artificial Sequence: Synthetic oligonucleotide
  Sense strand starting at position 3381 of SEQ ID NO: 515
auaccauuagugugauuga

SEQ ID NO: 43213 - RNA, 19 nt, Artificial Sequence
  Description of Artificial Sequence: Synthetic oligonucleotide
  Antisense strand to SEQ ID NO: 43132
ucaaucacacuaaugguau

SEQ ID NO: 43214 - RNA, 19 nt, Artificial Sequence
  Description of Artificial Sequence: Synthetic oligonucleotide
  Sense strand starting at position 3378 of SEQ ID NO: 515
ccaauaccauuagugugau

SEQ ID NO: 43215 - RNA, 19 nt, Artificial Sequence
  Description of Artificial Sequence: Synthetic oligonucleotide
  Antisense strand to SEQ ID NO: 43134
aucacacuaaugguauugg

SEQ ID NO: 43216 - RNA, 19 nt, Artificial Sequence
  Description of Artificial Sequence: Synthetic oligonucleotide
  Sense strand starting at position 3130 of SEQ ID NO: 515
cccuaugaaucucugggaa

SEQ ID NO: 43217 - RNA, 19 nt, Artificial Sequence
  Description of Artificial Sequence: Synthetic oligonucleotide
  Antisense strand to SEQ ID NO: 43136
uucccagagauucauaggg

SEQ ID NO: 43218 - RNA, 19 nt, Artificial Sequence
  Description of Artificial Sequence: Synthetic oligonucleotide
  Sense strand starting at position 3121 of SEQ ID NO: 515
accauugugcccuaugaau

SEQ ID NO: 43219 - RNA, 19 nt, Artificial Sequence
  Description of Artificial Sequence: Synthetic oligonucleotide
  Antisense strand to SEQ ID NO: 43138
auucauagggcacaauggu

SEQ ID NO: 43220 - RNA, 19 nt, Artificial Sequence
  Description of Artificial Sequence: Synthetic oligonucleotide
  Sense strand starting at position 3119 of SEQ ID NO: 515
ggaccauugugcccuauga

SEQ ID NO: 43221 - RNA, 19 nt, Artificial Sequence
  Description of Artificial Sequence: Synthetic oligonucleotide
  Antisense strand to SEQ ID NO: 43140
ucauagggcacaauggucc

SEQ ID NO: 43222 - RNA, 19 nt, Artificial Sequence
  Description of Artificial Sequence: Synthetic oligonucleotide
  Sense strand starting at position 2956 of SEQ ID NO: 515
cuuauacuuccucacggau

SEQ ID NO: 43223 - RNA, 19 nt, Artificial Sequence
  Description of Artificial Sequence: Synthetic oligonucleotide
  Antisense strand to SEQ ID NO: 43142
auccgugaggaaguauaag

SEQ ID NO: 43224 - RNA, 19 nt, Artificial Sequence
  Description of Artificial Sequence: Synthetic oligonucleotide
  Sense strand starting at position 2955 of SEQ ID NO: 515
acuuauacuuccucacgga

SEQ ID NO: 43225 - RNA, 19 nt, Artificial Sequence
  Description of Artificial Sequence: Synthetic oligonucleotide
  Antisense strand to SEQ ID NO: 43144
uccgugaggaaguauaagu

SEQ ID NO: 43226 - RNA, 19 nt, Artificial Sequence
  Description of Artificial Sequence: Synthetic oligonucleotide
  Sense strand starting at position 2935 of SEQ ID NO: 515
gggaguucuccgggaggcu

SEQ ID NO: 43227 - RNA, 19 nt, Artificial Sequence
  Description of Artificial Sequence: Synthetic oligonucleotide
  Antisense strand to SEQ ID NO: 43146
agccucccggagaacuccc

SEQ ID NO: 43228 - RNA, 19 nt, Artificial Sequence
  Description of Artificial Sequence: Synthetic oligonucleotide
  Sense strand starting at position 2732 of SEQ ID NO: 515
aguggcauuuaugaaugaa

SEQ ID NO: 43229 - RNA, 19 nt, Artificial Sequence
  Description of Artificial Sequence: Synthetic oligonucleotide
  Antisense strand to SEQ ID NO: 43148
uucauucauaaaugccacu

SEQ ID NO: 43230 - RNA, 19 nt, Artificial Sequence
  Description of Artificial Sequence: Synthetic oligonucleotide
  Sense strand starting at position 2687 of SEQ ID NO: 515
ugauguuuauuagcaaagu

SEQ ID NO: 43231 - RNA, 19 nt, Artificial Sequence
  Description of Artificial Sequence: Synthetic oligonucleotide
  Antisense strand to SEQ ID NO: 43150
acuuugcuaauaaacauca

SEQ ID NO: 43232 - RNA, 19 nt, Artificial Sequence
  Description of Artificial Sequence: Synthetic oligonucleotide
  Sense strand starting at position 2684 of SEQ ID NO: 515
gcaugauguuuauuagcaa

SEQ ID NO: 43233 - RNA, 19 nt, Artificial Sequence
  Description of Artificial Sequence: Synthetic oligonucleotide
  Antisense strand to SEQ ID NO: 43152
uugcuaauaaacaucaugc

SEQ ID NO: 43234 - RNA, 19 nt, Artificial Sequence
  Description of Artificial Sequence: Synthetic oligonucleotide
  Sense strand starting at position 2676 of SEQ ID NO: 515
aagcuuuggcaugauguuu

SEQ ID NO: 43235 - RNA, 19 nt, Artificial Sequence
  Description of Artificial Sequence: Synthetic oligonucleotide
  Antisense strand to SEQ ID NO: 43154
aaacaucaugccaaagcuu

SEQ ID NO: 43236 - RNA, 19 nt, Artificial Sequence
  Description of Artificial Sequence: Synthetic oligonucleotide
  Sense strand starting at position 2675 of SEQ ID NO: 515
aaagcuuuggcaugauguu

SEQ ID NO: 43237 - RNA, 19 nt, Artificial Sequence
  Description of Artificial Sequence: Synthetic oligonucleotide
  Antisense strand to SEQ ID NO: 43156
aacaucaugccaaagcuuu

SEQ ID NO: 43238 - RNA, 19 nt, Artificial Sequence
  Description of Artificial Sequence: Synthetic oligonucleotide
  Sense strand starting at position 2672 of SEQ ID NO: 515
cccaaagcuuuggcaugau

SEQ ID NO: 43239 - RNA, 19 nt, Artificial Sequence
  Description of Artificial Sequence: Synthetic oligonucleotide
  Antisense strand to SEQ ID NO: 43158
aucaugccaaagcuuuggg

SEQ ID NO: 43240 - RNA, 19 nt, Artificial Sequence
  Description of Artificial Sequence: Synthetic oligonucleotide
  Sense strand starting at position 2653 of SEQ ID NO: 515
aggcguguucggaacaagu

SEQ ID NO: 43241 - RNA, 19 nt, Artificial Sequence
  Description of Artificial Sequence: Synthetic oligonucleotide
  Antisense strand to SEQ ID NO: 43160
acuuguuccgaacacgccu

SEQ ID NO: 43242 - RNA, 19 nt, Artificial Sequence
  Description of Artificial Sequence: Synthetic oligonucleotide
  Sense strand starting at position 2629 of SEQ ID NO: 515
caggaauauuuguggacuu

SEQ ID NO: 43243 - RNA, 19 nt, Artificial Sequence
  Description of Artificial Sequence: Synthetic oligonucleotide
  Antisense strand to SEQ ID NO: 43162
aaguccacaaauauuccug

SEQ ID NO: 43244 - RNA, 19 nt, Artificial Sequence
  Description of Artificial Sequence: Synthetic oligonucleotide
  Sense strand starting at position 2617 of SEQ ID NO: 515
gugucucugagucaggaau

SEQ ID NO: 43245 - RNA, 19 nt, Artificial Sequence
  Description of Artificial Sequence: Synthetic oligonucleotide
  Antisense strand to SEQ ID NO: 43164
auuccugacucagagacac

SEQ ID NO: 43246 - RNA, 19 nt, Artificial Sequence
  Description of Artificial Sequence: Synthetic oligonucleotide
  Sense strand starting at position 2575 of SEQ ID NO: 515
aggcaaguuaucuguugaa

SEQ ID NO: 43247 - RNA, 19 nt, Artificial Sequence
  Description of Artificial Sequence: Synthetic oligonucleotide
  Antisense strand to SEQ ID NO: 43166
uucaacagauaacuugccu

SEQ ID NO: 43248 - RNA, 19 nt, Artificial Sequence
  Description of Artificial Sequence: Synthetic oligonucleotide
  Sense strand starting at position 2574 of SEQ ID NO: 515
gaggcaaguuaucuguuga

SEQ ID NO: 43249 - RNA, 19 nt, Artificial Sequence
  Description of Artificial Sequence: Synthetic oligonucleotide
  Antisense strand to SEQ ID NO: 43168
ucaacagauaacuugccuc

SEQ ID NO: 43250 - RNA, 19 nt, Artificial Sequence
  Description of Artificial Sequence: Synthetic oligonucleotide
  Sense strand starting at position 2072 of SEQ ID NO: 515
cugucugcgcguuccagaa

SEQ ID NO: 43251 - RNA, 19 nt, Artificial Sequence
  Description of Artificial Sequence: Synthetic oligonucleotide
  Antisense strand to SEQ ID NO: 43170
uucuggaacgcgcagacag

SEQ ID NO: 43252 - RNA, 19 nt, Artificial Sequence
  Description of Artificial Sequence: Synthetic oligonucleotide
  Sense strand starting at position 1409 of SEQ ID NO: 515
agaagauacgcgugagacu

SEQ ID NO: 43253 - RNA, 19 nt, Artificial Sequence
  Description of Artificial Sequence: Synthetic oligonucleotide
  Antisense strand to SEQ ID NO: 43172
agucucacgcguaucuucu

SEQ ID NO: 43254 - RNA, 19 nt, Artificial Sequence
  Description of Artificial Sequence: Synthetic oligonucleotide
  Sense strand starting at position 1407 of SEQ ID NO: 515
ggagaagauacgcgugaga

SEQ ID NO: 43255 - RNA, 19 nt, Artificial Sequence
  Description of Artificial Sequence: Synthetic oligonucleotide
  Antisense strand to SEQ ID NO: 43174
ucucacgcguaucuucucc

SEQ ID NO: 43256 - RNA, 19 nt, Artificial Sequence
  Description of Artificial Sequence: Synthetic oligonucleotide
  Sense strand starting at position 1175 of SEQ ID NO: 515
gcaucuuaccucugcagau

SEQ ID NO: 43257 - RNA, 19 nt, Artificial Sequence
  Description of Artificial Sequence: Synthetic oligonucleotide
  Antisense strand to SEQ ID NO: 43176
aucugcagagguaagaugc

SEQ ID NO: 43258 - RNA, 19 nt, Artificial Sequence
  Description of Artificial Sequence: Synthetic oligonucleotide
  Sense strand starting at position 937 of SEQ ID NO: 515
gguaaaguucccuacaauu

SEQ ID NO: 43259 - RNA, 19 nt, Artificial Sequence
  Description of Artificial Sequence: Synthetic oligonucleotide
  Antisense strand to SEQ ID NO: 43178
aauuguagggaacuuuacc

SEQ ID NO: 43260 - RNA, 19 nt, Artificial Sequence
  Description of Artificial Sequence: Synthetic oligonucleotide
  Sense strand starting at position 936 of SEQ ID NO: 515
ugguaaaguucccuacaau

SEQ ID NO: 43261 - RNA, 19 nt, Artificial Sequence
  Description of Artificial Sequence: Synthetic oligonucleotide
  Antisense strand to SEQ ID NO: 43180
auuguagggaacuuuacca

SEQ ID NO: 43262 - RNA, 19 nt, Artificial Sequence
  Description of Artificial Sequence: Synthetic oligonucleotide
  Sense strand starting at position 935 of SEQ ID NO: 515
augguaaaguucccuacaa

SEQ ID NO: 43263 - RNA, 19 nt, Artificial Sequence
  Description of Artificial Sequence: Synthetic oligonucleotide
  Antisense strand to SEQ ID NO: 43182
uuguagggaacuuuaccau

SEQ ID NO: 43264 - RNA, 19 nt, Artificial Sequence
  Description of Artificial Sequence: Synthetic oligonucleotide
  Sense strand starting at position 826 of SEQ ID NO: 515
cugacugagcugcaaagau

SEQ ID NO: 43265 - RNA, 19 nt, Artificial Sequence
  Description of Artificial Sequence: Synthetic oligonucleotide
  Antisense strand to SEQ ID NO: 43184
aucuuugcagcucagucag

SEQ ID NO: 43266 - RNA, 19 nt, Artificial Sequence
  Description of Artificial Sequence: Synthetic oligonucleotide
  Sense strand starting at position 14 of SEQ ID NO: 515
cuugcccuucuguaagaga

SEQ ID NO: 43267 - RNA, 19 nt, Artificial Sequence
  Description of Artificial Sequence: Synthetic oligonucleotide
  Antisense strand to SEQ ID NO: 43186
ucucuuacagaagggcaag

SEQ ID NO: 43268 - RNA, 19 nt, Artificial Sequence
  Description of Artificial Sequence: Synthetic oligonucleotide
  Sense strand starting at position 142 of SEQ ID NO: 516
cagggaaguguguggaaga

SEQ ID NO: 43269 - RNA, 19 nt, Artificial Sequence
  Description of Artificial Sequence: Synthetic oligonucleotide
  Antisense strand to SEQ ID NO: 43188
ucuuccacacacuucccug

SEQ ID NO: 43270 - RNA, 19 nt, Artificial Sequence
  Description of Artificial Sequence: Synthetic oligonucleotide
  Sense strand starting at position 180 of SEQ ID NO: 516
ggcucuaagcucugaagac

SEQ ID NO: 43271 - RNA, 19 nt, Artificial Sequence
  Description of Artificial Sequence: Synthetic oligonucleotide
  Antisense strand to SEQ ID NO: 43190
gucuucagagcuuagagcc

SEQ ID NO: 43272 - RNA, 19 nt, Artificial Sequence
  Description of Artificial Sequence: Synthetic oligonucleotide
  Sense strand starting at position 730 of SEQ ID NO: 516
ccagaaauucccugaucag

SEQ ID NO: 43273 - RNA, 19 nt, Artificial Sequence
  Description of Artificial Sequence: Synthetic oligonucleotide
  Antisense strand to SEQ ID NO: 43192
cugaucagggaauuucugg

SEQ ID NO: 43274 - RNA, 19 nt, Artificial Sequence
  Description of Artificial Sequence: Synthetic oligonucleotide
  Sense strand starting at position 810 of SEQ ID NO: 516
accucaucaucagugaaag

SEQ ID NO: 43275 - RNA, 19 nt, Artificial Sequence
  Description of Artificial Sequence: Synthetic oligonucleotide
  Antisense strand to SEQ ID NO: 43194
cuuucacugaugaugaggu

SEQ ID NO: 43276 - RNA, 19 nt, Artificial Sequence
  Description of Artificial Sequence: Synthetic oligonucleotide
  Sense strand starting at position 831 of SEQ ID NO: 516
cagagagccgggcauaauu

SEQ ID NO: 43277 - RNA, 19 nt, Artificial Sequence
  Description of Artificial Sequence: Synthetic oligonucleotide
  Antisense strand to SEQ ID NO: 43196
aauuaugcccggcucucug

SEQ ID NO: 43278 - RNA, 19 nt, Artificial Sequence
  Description of Artificial Sequence: Synthetic oligonucleotide
  Sense strand starting at position 856 of SEQ ID NO: 516
cuacaagguuaugccuaau

SEQ ID NO: 43279 - RNA, 19 nt, Artificial Sequence
  Description of Artificial Sequence: Synthetic oligonucleotide
  Antisense strand to SEQ ID NO: 43198
auuaggcauaaccuuguag

SEQ ID NO: 43280 - RNA, 19 nt, Artificial Sequence
  Description of Artificial Sequence: Synthetic oligonucleotide
  Sense strand starting at position 866 of SEQ ID NO: 516
augccuaauuggucacuaa

SEQ ID NO: 43281 - RNA, 19 nt, Artificial Sequence
  Description of Artificial Sequence: Synthetic oligonucleotide
  Antisense strand to SEQ ID NO: 43200
uuagugaccaauuaggcau

SEQ ID NO: 43282 - RNA, 19 nt, Artificial Sequence
  Description of Artificial Sequence: Synthetic oligonucleotide
  Sense strand starting at position 867 of SEQ ID NO: 516
ugccuaauuggucacuaau

SEQ ID NO: 43283 - RNA, 19 nt, Artificial Sequence
  Description of Artificial Sequence: Synthetic oligonucleotide
  Antisense strand to SEQ ID NO: 43202
auuagugaccaauuaggca

SEQ ID NO: 43284 - RNA, 19 nt, Artificial Sequence
  Description of Artificial Sequence: Synthetic oligonucleotide
  Sense strand starting at position 980 of SEQ ID NO: 516
aaauuacagucuuugggua

SEQ ID NO: 43285 - RNA, 19 nt, Artificial Sequence
  Description of Artificial Sequence: Synthetic oligonucleotide
  Antisense strand to SEQ ID NO: 43204
uacccaaagacuguaauuu

SEQ ID NO: 43286 - RNA, 19 nt, Artificial Sequence
  Description of Artificial Sequence: Synthetic oligonucleotide
  Sense strand starting at position 981 of SEQ ID NO: 516
aauuacagucuuuggguaa

SEQ ID NO: 43287 - RNA, 19 nt, Artificial Sequence
  Description of Artificial Sequence: Synthetic oligonucleotide
  Antisense strand to SEQ ID NO: 43206
uuacccaaagacuguaauu

SEQ ID NO: 43288 - RNA, 19 nt, Artificial Sequence
  Description of Artificial Sequence: Synthetic oligonucleotide
  Sense strand starting at position 2170 of SEQ ID NO: 516
cacagugaggucuacaacu

SEQ ID NO: 43289 - RNA, 19 nt, Artificial Sequence
  Description of Artificial Sequence: Synthetic oligonucleotide
  Antisense strand to SEQ ID NO: 43208
aguuguagaccucacugug

SEQ ID NO: 43290 - RNA, 19 nt, Artificial Sequence
  Description of Artificial Sequence: Synthetic oligonucleotide
  Sense strand starting at position 2172 of SEQ ID NO: 516
cagugaggucuacaacuug

SEQ ID NO: 43291 - RNA, 19 nt, Artificial Sequence
  Description of Artificial Sequence: Synthetic oligonucleotide
  Antisense strand to SEQ ID NO: 43210
caaguuguagaccucacug

SEQ ID NO: 43292 - RNA, 19 nt, Artificial Sequence
  Description of Artificial Sequence: Synthetic oligonucleotide
  Sense strand starting at position 2506 of SEQ ID NO: 516
cgaccaaaugauugagcuu

SEQ ID NO: 43293 - RNA, 19 nt, Artificial Sequence
  Description of Artificial Sequence: Synthetic oligonucleotide
  Antisense strand to SEQ ID NO: 43212
aagcucaaucauuuggucg

SEQ ID NO: 43294 - RNA, 19 nt, Artificial Sequence
  Description of Artificial Sequence: Synthetic oligonucleotide
  Sense strand starting at position 2509 of SEQ ID NO: 516
ccaaaugauugagcuucca

SEQ ID NO: 43295 - RNA, 19 nt, Artificial Sequence
  Description of Artificial Sequence: Synthetic oligonucleotide
  Antisense strand to SEQ ID NO: 43214
uggaagcucaaucauuugg

SEQ ID NO: 43296 - RNA, 19 nt, Artificial Sequence
  Description of Artificial Sequence: Synthetic oligonucleotide
  Sense strand starting at position 2547 of SEQ ID NO: 516
ggaaccauaugucucauau

SEQ ID NO: 43297 - RNA, 19 nt, Artificial Sequence
  Description of Artificial Sequence: Synthetic oligonucleotide
  Antisense strand to SEQ ID NO: 43216
auaugagacauaugguucc

SEQ ID NO: 43298 - RNA, 19 nt, Artificial Sequence
  Description of Artificial Sequence: Synthetic oligonucleotide
  Sense strand starting at position 2858 of SEQ ID NO: 516
uaguaauaaucgcuauuga

SEQ ID NO: 43299 - RNA, 19 nt, Artificial Sequence
  Description of Artificial Sequence: Synthetic oligonucleotide
  Antisense strand to SEQ ID NO: 43218
ucaauagcgauuauuacua

SEQ ID NO: 43300 - RNA, 19 nt, Artificial Sequence
  Description of Artificial Sequence: Synthetic oligonucleotide
  Sense strand starting at position 2859 of SEQ ID NO: 516
aguaauaaucgcuauugac

SEQ ID NO: 43301 - RNA, 19 nt, Artificial Sequence
  Description of Artificial Sequence: Synthetic oligonucleotide
  Antisense strand to SEQ ID NO: 43220
gucaauagcgauuauuacu

SEQ ID NO: 43302 - RNA, 19 nt, Artificial Sequence
  Description of Artificial Sequence: Synthetic oligonucleotide
  Sense strand starting at position 2887 of SEQ ID NO: 516
aguagauggcgacauguga

SEQ ID NO: 43303 - RNA, 19 nt, Artificial Sequence
  Description of Artificial Sequence: Synthetic oligonucleotide
  Antisense strand to SEQ ID NO: 43222
ucacaugucgccaucuacu

SEQ ID NO: 43304 - RNA, 19 nt, Artificial Sequence
  Description of Artificial Sequence: Synthetic oligonucleotide
  Sense strand starting at position 2891 of SEQ ID NO: 516
gauggcgacaugugauaga

SEQ ID NO: 43305 - RNA, 19 nt, Artificial Sequence
  Description of Artificial Sequence: Synthetic oligonucleotide
  Antisense strand to SEQ ID NO: 43224
ucuaucacaugucgccauc

SEQ ID NO: 43306 - RNA, 19 nt, Artificial Sequence
  Description of Artificial Sequence: Synthetic oligonucleotide
  Sense strand starting at position 2977 of SEQ ID NO: 516
cugagaucuguaugauaag

SEQ ID NO: 43307 - RNA, 19 nt, Artificial Sequence
  Description of Artificial Sequence: Synthetic oligonucleotide
  Antisense strand to SEQ ID NO: 43226
cuuaucauacagaucucag

SEQ ID NO: 43308 - RNA, 19 nt, Artificial Sequence
  Description of Artificial Sequence: Synthetic oligonucleotide
  Sense strand starting at position 3047 of SEQ ID NO: 516
acagguugaauguguuuga

SEQ ID NO: 43309 - RNA, 19 nt, Artificial Sequence
  Description of Artificial Sequence: Synthetic oligonucleotide
  Antisense strand to SEQ ID NO: 43228
ucaaacacauucaaccugu

SEQ ID NO: 43310 - RNA, 19 nt, Artificial Sequence
  Description of Artificial Sequence: Synthetic oligonucleotide
  Sense strand starting at position 3048 of SEQ ID NO: 516
cagguugaauguguuugaa

SEQ ID NO: 43311 - RNA, 19 nt, Artificial Sequence
  Description of Artificial Sequence: Synthetic oligonucleotide
  Antisense strand to SEQ ID NO: 43230
uucaaacacauucaaccug

SEQ ID NO: 43312 - RNA, 19 nt, Artificial Sequence
  Description of Artificial Sequence: Synthetic oligonucleotide
  Sense strand starting at position 3050 of SEQ ID NO: 516
gguugaauguguuugaaua

SEQ ID NO: 43313 - RNA, 19 nt, Artificial Sequence
  Description of Artificial Sequence: Synthetic oligonucleotide
  Antisense strand to SEQ ID NO: 43232
uauucaaacacauucaacc

SEQ ID NO: 43314 - RNA, 19 nt, Artificial Sequence
  Description of Artificial Sequence: Synthetic oligonucleotide
  Sense strand starting at position 3051 of SEQ ID NO: 516
guugaauguguuugaauag

SEQ ID NO: 43315 - RNA, 19 nt, Artificial Sequence
  Description of Artificial Sequence: Synthetic oligonucleotide
  Antisense strand to SEQ ID NO: 43234
cuauucaaacacauucaac

SEQ ID NO: 43316 - RNA, 19 nt, Artificial Sequence
  Description of Artificial Sequence: Synthetic oligonucleotide
  Sense strand starting at position 3103 of SEQ ID NO: 516
gagugaugaguuggugaca

SEQ ID NO: 43317 - RNA, 19 nt, Artificial Sequence
  Description of Artificial Sequence: Synthetic oligonucleotide
  Antisense strand to SEQ ID NO: 43236
ugucaccaacucaucacuc

SEQ ID NO: 43318 - RNA, 19 nt, Artificial Sequence
  Description of Artificial Sequence: Synthetic oligonucleotide
  Sense strand starting at position 3106 of SEQ ID NO: 516
ugaugaguuggugacacga

SEQ ID NO: 43319 - RNA, 19 nt, Artificial Sequence
  Description of Artificial Sequence: Synthetic oligonucleotide
  Antisense strand to SEQ ID NO: 43238
ucgugucaccaacucauca

SEQ ID NO: 43320 - RNA, 19 nt, Artificial Sequence
  Description of Artificial Sequence: Synthetic oligonucleotide
  Sense strand starting at position 3145 of SEQ ID NO: 516
gagggaggcuggucuuaug

SEQ ID NO: 43321 - RNA, 19 nt, Artificial Sequence
  Description of Artificial Sequence: Synthetic oligonucleotide
  Antisense strand to SEQ ID NO: 43240
cauaagaccagccucccuc

SEQ ID NO: 43322 - RNA, 19 nt, Artificial Sequence
  Description of Artificial Sequence: Synthetic oligonucleotide
  Sense strand starting at position 3153 of SEQ ID NO: 516
cuggucuuauggguaaaga

SEQ ID NO: 43323 - RNA, 19 nt, Artificial Sequence
  Description of Artificial Sequence: Synthetic oligonucleotide
  Antisense strand to SEQ ID NO: 43242
ucuuuacccauaagaccag

SEQ ID NO: 43324 - RNA, 19 nt, Artificial Sequence
  Description of Artificial Sequence: Synthetic oligonucleotide
  Sense strand starting at position 3154 of SEQ ID NO: 516
uggucuuauggguaaagau

SEQ ID NO: 43325 - RNA, 19 nt, Artificial Sequence
  Description of Artificial Sequence: Synthetic oligonucleotide
  Antisense strand to SEQ ID NO: 43244
aucuuuacccauaagacca

SEQ ID NO: 43326 - RNA, 19 nt, Artificial Sequence
  Description of Artificial Sequence: Synthetic oligonucleotide
  Sense strand starting at position 3179 of SEQ ID NO: 516
gggaaauugacuugaugcu

SEQ ID NO: 43327 - RNA, 19 nt, Artificial Sequence
  Description of Artificial Sequence: Synthetic oligonucleotide
  Antisense strand to SEQ ID NO: 43246
agcaucaagucaauuuccc

SEQ ID NO: 43328 - RNA, 19 nt, Artificial Sequence
  Description of Artificial Sequence: Synthetic oligonucleotide
  Sense strand starting at position 3214 of SEQ ID NO: 516
ggguuagagauguaacugu

SEQ ID NO: 43329 - RNA, 19 nt, Artificial Sequence
  Description of Artificial Sequence: Synthetic oligonucleotide
  Antisense strand to SEQ ID NO: 43248
acaguuacaucucuaaccc

SEQ ID NO: 43330 - RNA, 19 nt, Artificial Sequence
  Description of Artificial Sequence: Synthetic oligonucleotide
  Sense strand starting at position 3342 of SEQ ID NO: 516
ucccacagugcugaauaaa

SEQ ID NO: 43331 - RNA, 19 nt, Artificial Sequence
  Description of Artificial Sequence: Synthetic oligonucleotide
  Antisense strand to SEQ ID NO: 43250
uuuauucagcacuguggga

SEQ ID NO: 43332 - RNA, 19 nt, Artificial Sequence
  Description of Artificial Sequence: Synthetic oligonucleotide
  Sense strand starting at position 3465 of SEQ ID NO: 516
guaugaguuucuccuacca

SEQ ID NO: 43333 - RNA, 19 nt, Artificial Sequence
  Description of Artificial Sequence: Synthetic oligonucleotide
  Antisense strand to SEQ ID NO: 43252
ugguaggagaaacucauac

SEQ ID NO: 43334 - RNA, 19 nt, Artificial Sequence
  Description of Artificial Sequence: Synthetic oligonucleotide
  Sense strand starting at position 3477 of SEQ ID NO: 516
ccuaccacucucugaguau

SEQ ID NO: 43335 - RNA, 19 nt, Artificial Sequence
  Description of Artificial Sequence: Synthetic oligonucleotide
  Antisense strand to SEQ ID NO: 43254
auacucagagagugguagg

SEQ ID NO: 43336 - RNA, 19 nt, Artificial Sequence
  Description of Artificial Sequence: Synthetic oligonucleotide
  Sense strand starting at position 3557 of SEQ ID NO: 516
gaugaaaugugacaaggaa

SEQ ID NO: 43337 - RNA, 19 nt, Artificial Sequence
  Description of Artificial Sequence: Synthetic oligonucleotide
  Antisense strand to SEQ ID NO: 43256
uuccuugucacauuucauc

SEQ ID NO: 43338 - RNA, 19 nt, Artificial Sequence
  Description of Artificial Sequence: Synthetic oligonucleotide
  Sense strand starting at position 3585 of SEQ ID NO: 516
ggugcuaaaugaccauuaa

SEQ ID NO: 43339 - RNA, 19 nt, Artificial Sequence
  Description of Artificial Sequence: Synthetic oligonucleotide
  Antisense strand to SEQ ID NO: 43258
uuaauggucauuuagcacc

SEQ ID NO: 43340 - RNA, 19 nt, Artificial Sequence
  Description of Artificial Sequence: Synthetic oligonucleotide
  Sense strand starting at position 3586 of SEQ ID NO: 516
gugcuaaaugaccauuaau

SEQ ID NO: 43341 - RNA, 19 nt, Artificial Sequence
  Description of Artificial Sequence: Synthetic oligonucleotide
  Antisense strand to SEQ ID NO: 43260
auuaauggucauuuagcac

SEQ ID NO: 43342 - RNA, 19 nt, Artificial Sequence
  Description of Artificial Sequence: Synthetic oligonucleotide
  Sense strand starting at position 3702 of SEQ ID NO: 516
guuuguugaguccaugaaa

SEQ ID NO: 43343 - RNA, 19 nt, Artificial Sequence
  Description of Artificial Sequence: Synthetic oligonucleotide
  Antisense strand to SEQ ID NO: 43262
uuucauggacucaacaaac

SEQ ID NO: 43344 - RNA, 19 nt, Artificial Sequence
  Description of Artificial Sequence: Synthetic oligonucleotide
  Sense strand starting at position 3739 of SEQ ID NO: 516
ggaugcuugcauuaguaau

SEQ ID NO: 43345 - RNA, 19 nt, Artificial Sequence
  Description of Artificial Sequence: Synthetic oligonucleotide
  Antisense strand to SEQ ID NO: 43264
auuacuaaugcaagcaucc

SEQ ID NO: 43346 - RNA, 19 nt, Artificial Sequence
  Description of Artificial Sequence: Synthetic oligonucleotide
  Sense strand starting at position 3883 of SEQ ID NO: 516
aggacaucaucauauaaag

SEQ ID NO: 43347 - RNA, 19 nt, Artificial Sequence
  Description of Artificial Sequence: Synthetic oligonucleotide
  Antisense strand to SEQ ID NO: 43266
cuuuauaugaugauguccu

SEQ ID NO: 43348 - RNA, 19 nt, Artificial Sequence
  Description of Artificial Sequence: Synthetic oligonucleotide
  Sense strand starting at position 3983 of SEQ ID NO: 517
ucaguuucuuugugauacu

SEQ ID NO: 43349 - RNA, 19 nt, Artificial Sequence
  Description of Artificial Sequence: Synthetic oligonucleotide
  Antisense strand to SEQ ID NO: 43268
aguaucacaaagaaacuga

SEQ ID NO: 43350 - RNA, 19 nt, Artificial Sequence
  Description of Artificial Sequence: Synthetic oligonucleotide
  Sense strand starting at position 3900 of SEQ ID NO: 517
gcuacaaagcuguaaagaa

SEQ ID NO: 43351 - RNA, 19 nt, Artificial Sequence
  Description of Artificial Sequence: Synthetic oligonucleotide
  Antisense strand to SEQ ID NO: 43270
uucuuuacagcuuuguagc

SEQ ID NO: 43352 - RNA, 19 nt, Artificial Sequence
  Description of Artificial Sequence: Synthetic oligonucleotide
  Sense strand starting at position 3462 of SEQ ID NO: 517
cucaguguuguacguuuaa

SEQ ID NO: 43353 - RNA, 19 nt, Artificial Sequence
  Description of Artificial Sequence: Synthetic oligonucleotide
  Antisense strand to SEQ ID NO: 43272
uuaaacguacaacacugag

SEQ ID NO: 43354 - RNA, 19 nt, Artificial Sequence
  Description of Artificial Sequence: Synthetic oligonucleotide
  Sense strand starting at position 3460 of SEQ ID NO: 517
aucucaguguuguacguuu

SEQ ID NO: 43355 - RNA, 19 nt, Artificial Sequence
  Description of Artificial Sequence: Synthetic oligonucleotide
  Antisense strand to SEQ ID NO: 43274
aaacguacaacacugagau

SEQ ID NO: 43356 - RNA, 19 nt, Artificial Sequence
  Description of Artificial Sequence: Synthetic oligonucleotide
  Sense strand starting at position 2499 of SEQ ID NO: 517
aggagguucccguggguga

SEQ ID NO: 43357 - RNA, 19 nt, Artificial Sequence
  Description of Artificial Sequence: Synthetic oligonucleotide
  Antisense strand to SEQ ID NO: 43276
ucacccacgggaaccuccu

SEQ ID NO: 43358 - RNA, 19 nt, Artificial Sequence
  Description of Artificial Sequence: Synthetic oligonucleotide
  Sense strand starting at position 2160 of SEQ ID NO: 517
gagguagguugucauggga

SEQ ID NO: 43359 - RNA, 19 nt, Artificial Sequence
  Description of Artificial Sequence: Synthetic oligonucleotide
  Antisense strand to SEQ ID NO: 43278
ucccaugacaaccuaccuc

SEQ ID NO: 43360 - RNA, 19 nt, Artificial Sequence
  Description of Artificial Sequence: Synthetic oligonucleotide
  Sense strand starting at position 2012 of SEQ ID NO: 517
cgggucauccggcaggaaa

SEQ ID NO: 43361 - RNA, 19 nt, Artificial Sequence
  Description of Artificial Sequence: Synthetic oligonucleotide
  Antisense strand to SEQ ID NO: 43280
uuuccugccggaugacccg

SEQ ID NO: 43362 - RNA, 19 nt, Artificial Sequence
  Description of Artificial Sequence: Synthetic oligonucleotide
  Sense strand starting at position 1100 of SEQ ID NO: 517
cggcaauacucugcaccuu

SEQ ID NO: 43363 - RNA, 19 nt, Artificial Sequence
  Description of Artificial Sequence: Synthetic oligonucleotide
  Antisense strand to SEQ ID NO: 43282
aaggugcagaguauugccg

SEQ ID NO: 43364 - RNA, 19 nt, Artificial Sequence
  Description of Artificial Sequence: Synthetic oligonucleotide
  Sense strand starting at position 850 of SEQ ID NO: 517
aguagaagauuccacaucu

SEQ ID NO: 43365 - RNA, 19 nt, Artificial Sequence
  Description of Artificial Sequence: Synthetic oligonucleotide
  Antisense strand to SEQ ID NO: 43284
agauguggaaucuucuacu

SEQ ID NO: 43366 - RNA, 19 nt, Artificial Sequence
  Description of Artificial Sequence: Synthetic oligonucleotide
  Sense strand starting at position 828 of SEQ ID NO: 517
ucuucuuucuguuacagga

SEQ ID NO: 43367 - RNA, 19 nt, Artificial Sequence
  Description of Artificial Sequence: Synthetic oligonucleotide
  Antisense strand to SEQ ID NO: 43286
uccuguaacagaaagaaga

SEQ ID NO: 43368 - RNA, 19 nt, Artificial Sequence
  Description of Artificial Sequence: Synthetic oligonucleotide
  Sense strand starting at position 825 of SEQ ID NO: 517
augucuucuuucuguuaca

SEQ ID NO: 43369 - RNA, 19 nt, Artificial Sequence
  Description of Artificial Sequence: Synthetic oligonucleotide
  Antisense strand to SEQ ID NO: 43288
uguaacagaaagaagacau

SEQ ID NO: 43370 - RNA, 19 nt, Artificial Sequence
  Description of Artificial Sequence: Synthetic oligonucleotide
  Sense strand starting at position 595 of SEQ ID NO: 517
cgugaucucggcuaacuuu

SEQ ID NO: 43371 - RNA, 19 nt, Artificial Sequence
  Description of Artificial Sequence: Synthetic oligonucleotide
  Antisense strand to SEQ ID NO: 43290
aaaguuagccgagaucacg

SEQ ID NO: 43372 - RNA, 19 nt, Artificial Sequence
  Description of Artificial Sequence: Synthetic oligonucleotide
  Sense strand starting at position 434 of SEQ ID NO: 517
auaugaccaugguacaauu

SEQ ID NO: 43373 - RNA, 19 nt, Artificial Sequence
  Description of Artificial Sequence: Synthetic oligonucleotide
  Antisense strand to SEQ ID NO: 43292
aauuguaccauggucauau

SEQ ID NO: 43374 - RNA, 19 nt, Artificial Sequence
  Description of Artificial Sequence: Synthetic oligonucleotide
  Sense strand starting at position 408 of SEQ ID NO: 517
auuagaguuuccuuaaugu

SEQ ID NO: 43375 - RNA, 19 nt, Artificial Sequence
  Description of Artificial Sequence: Synthetic oligonucleotide
  Antisense strand to SEQ ID NO: 43294
acauuaaggaaacucuaau

SEQ ID NO: 43376 - RNA, 19 nt, Artificial Sequence
  Description of Artificial Sequence: Synthetic oligonucleotide
  Sense strand starting at position 366 of SEQ ID NO: 517
aagaguugcaaagguagua

SEQ ID NO: 43377 - RNA, 19 nt, Artificial Sequence
  Description of Artificial Sequence: Synthetic oligonucleotide
  Antisense strand to SEQ ID NO: 43296
uacuaccuuugcaacucuu

SEQ ID NO: 43378 - RNA, 19 nt, Artificial Sequence
  Description of Artificial Sequence: Synthetic oligonucleotide
  Sense strand starting at position 351 of SEQ ID NO: 517
aguguaaauuuacagaaga

SEQ ID NO: 43379 - RNA, 19 nt, Artificial Sequence
  Description of Artificial Sequence: Synthetic oligonucleotide
  Antisense strand to SEQ ID NO: 43298
ucuucuguaaauuuacacu

SEQ ID NO: 43380 - RNA, 19 nt, Artificial Sequence
  Description of Artificial Sequence: Synthetic oligonucleotide
  Sense strand starting at position 313 of SEQ ID NO: 517
cgacauagauccuaucuca

SEQ ID NO: 43381 - RNA, 19 nt, Artificial Sequence
  Description of Artificial Sequence: Synthetic oligonucleotide
  Antisense strand to SEQ ID NO: 43300
ugagauaggaucuaugucg

SEQ ID NO: 43382 - RNA, 19 nt, Artificial Sequence
  Description of Artificial Sequence: Synthetic oligonucleotide
  Sense strand starting at position 304 of SEQ ID NO: 517
cagccuuggcgacauagau

SEQ ID NO: 43383 - RNA, 19 nt, Artificial Sequence
  Description of Artificial Sequence: Synthetic oligonucleotide
  Antisense strand to SEQ ID NO: 43302
aucuaugucgccaaggcug

SEQ ID NO: 43384 - RNA, 19 nt, Artificial Sequence
  Description of Artificial Sequence: Synthetic oligonucleotide
  Sense strand starting at position 3903 of SEQ ID NO: 518
gcuacaaagcuguaaagaa

SEQ ID NO: 43385 - RNA, 19 nt, Artificial Sequence
  Description of Artificial Sequence: Synthetic oligonucleotide
  Antisense strand to SEQ ID NO: 43304
uucuuuacagcuuuguagc

SEQ ID NO: 43386 - RNA, 19 nt, Artificial Sequence
  Description of Artificial Sequence: Synthetic oligonucleotide
  Sense strand starting at position 3465 of SEQ ID NO: 518
cucaguguuguacguuuaa

SEQ ID NO: 43387 - RNA, 19 nt, Artificial Sequence
  Description of Artificial Sequence: Synthetic oligonucleotide
  Antisense strand to SEQ ID NO: 43306
uuaaacguacaacacugag

SEQ ID NO: 43388 - RNA, 19 nt, Artificial Sequence
  Description of Artificial Sequence: Synthetic oligonucleotide
  Sense strand starting at position 3463 of SEQ ID NO: 518
aucucaguguuguacguuu

SEQ ID NO: 43389 - RNA, 19 nt, Artificial Sequence
  Description of Artificial Sequence: Synthetic oligonucleotide
  Antisense strand to SEQ ID NO: 43308
aaacguacaacacugagau

SEQ ID NO: 43390 - RNA, 19 nt, Artificial Sequence
  Description of Artificial Sequence: Synthetic oligonucleotide
  Sense strand starting at position 2502 of SEQ ID NO: 518
aggagguucccguggguga

SEQ ID NO: 43391 - RNA, 19 nt, Artificial Sequence
  Description of Artificial Sequence: Synthetic oligonucleotide
  Antisense strand to SEQ ID NO: 43310
ucacccacgggaaccuccu

SEQ ID NO: 43392 - RNA, 19 nt, Artificial Sequence
  Description of Artificial Sequence: Synthetic oligonucleotide
  Sense strand starting at position 2163 of SEQ ID NO: 518
gagguagguugucauggga

SEQ ID NO: 43393 - RNA, 19 nt, Artificial Sequence
  Description of Artificial Sequence: Synthetic oligonucleotide
  Antisense strand to SEQ ID NO: 43312
ucccaugacaaccuaccuc

SEQ ID NO: 43394 - RNA, 19 nt, Artificial Sequence
  Description of Artificial Sequence: Synthetic oligonucleotide
  Sense strand starting at position 2015 of SEQ ID NO: 518
cgggucauccggcaggaaa

SEQ ID NO: 43395 - RNA, 19 nt, Artificial Sequence
  Description of Artificial Sequence: Synthetic oligonucleotide
  Antisense strand to SEQ ID NO: 43314
uuuccugccggaugacccg

SEQ ID NO: 43396 - RNA, 19 nt, Artificial Sequence
  Description of Artificial Sequence: Synthetic oligonucleotide
  Sense strand starting at position 1103 of SEQ ID NO: 518
cggcaauacucugcaccuu

SEQ ID NO: 43397 - RNA, 19 nt, Artificial Sequence
  Description of Artificial Sequence: Synthetic oligonucleotide
  Antisense strand to SEQ ID NO: 43316
aaggugcagaguauugccg

SEQ ID NO: 43398 - RNA, 19 nt, Artificial Sequence
  Description of Artificial Sequence: Synthetic oligonucleotide
  Sense strand starting at position 853 of SEQ ID NO: 518
aguagaagauuccacaucu

SEQ ID NO: 43399 - RNA, 19 nt, Artificial Sequence
  Description of Artificial Sequence: Synthetic oligonucleotide
  Antisense strand to SEQ ID NO: 43318
agauguggaaucuucuacu

SEQ ID NO: 43400 - RNA, 19 nt, Artificial Sequence
  Description of Artificial Sequence: Synthetic oligonucleotide
  Sense strand starting at position 831 of SEQ ID NO: 518
ucuucuuucuguuacagga

SEQ ID NO: 43401 - RNA, 19 nt, Artificial Sequence
  Description of Artificial Sequence: Synthetic oligonucleotide
  Antisense strand to SEQ ID NO: 43320
uccuguaacagaaagaaga

SEQ ID NO: 43402 - RNA, 19 nt, Artificial Sequence
  Description of Artificial Sequence: Synthetic oligonucleotide
  Sense strand starting at position 828 of SEQ ID NO: 518
augucuucuuucuguuaca

SEQ ID NO: 43403 - RNA, 19 nt, Artificial Sequence
  Description of Artificial Sequence: Synthetic oligonucleotide
  Antisense strand to SEQ ID NO: 43322
uguaacagaaagaagacau

SEQ ID NO: 43404 - RNA, 19 nt, Artificial Sequence
  Description of Artificial Sequence: Synthetic oligonucleotide
  Sense strand starting at position 598 of SEQ ID NO: 518
cgugaucucggcuaacuuu

SEQ ID NO: 43405 - RNA, 19 nt, Artificial Sequence
  Description of Artificial Sequence: Synthetic oligonucleotide
  Antisense strand to SEQ ID NO: 43324
aaaguuagccgagaucacg

SEQ ID NO: 43406 - RNA, 19 nt, Artificial Sequence
  Description of Artificial Sequence: Synthetic oligonucleotide
  Sense strand starting at position 437 of SEQ ID NO: 518
auaugaccaugguacaauu

SEQ ID NO: 43407 - RNA, 19 nt, Artificial Sequence
  Description of Artificial Sequence: Synthetic oligonucleotide
  Antisense strand to SEQ ID NO: 43326
aauuguaccauggucauau

SEQ ID NO: 43408 - RNA, 19 nt, Artificial Sequence
  Description of Artificial Sequence: Synthetic oligonucleotide
  Sense strand starting at position 411 of SEQ ID NO: 518
auuagaguuuccuuaaugu

SEQ ID NO: 43409 - RNA, 19 nt, Artificial Sequence
  Description of Artificial Sequence: Synthetic oligonucleotide
  Antisense strand to SEQ ID NO: 43328
acauuaaggaaacucuaau

SEQ ID NO: 43410 - RNA, 19 nt, Artificial Sequence
  Description of Artificial Sequence: Synthetic oligonucleotide
  Sense strand starting at position 369 of SEQ ID NO: 518
aagaguugcaaagguagua

SEQ ID NO: 43411 - RNA, 19 nt, Artificial Sequence
  Description of Artificial Sequence: Synthetic oligonucleotide
  Antisense strand to SEQ ID NO: 43330
uacuaccuuugcaacucuu

SEQ ID NO: 43412 - RNA, 19 nt, Artificial Sequence
  Description of Artificial Sequence: Synthetic oligonucleotide
  Sense strand starting at position 354 of SEQ ID NO: 518
aguguaaauuuacagaaga

SEQ ID NO: 43413 - RNA, 19 nt, Artificial Sequence
  Description of Artificial Sequence: Synthetic oligonucleotide
  Antisense strand to SEQ ID NO: 43332
ucuucuguaaauuuacacu

SEQ ID NO: 43414 - RNA, 19 nt, Artificial Sequence
  Description of Artificial Sequence: Synthetic oligonucleotide
  Sense strand starting at position 316 of SEQ ID NO: 518
cgacauagauccuaucuca

SEQ ID NO: 43415 - RNA, 19 nt, Artificial Sequence
  Description of Artificial Sequence: Synthetic oligonucleotide
  Antisense strand to SEQ ID NO: 43334
ugagauaggaucuaugucg

SEQ ID NO: 43416 - RNA, 19 nt, Artificial Sequence
  Description of Artificial Sequence: Synthetic oligonucleotide
  Sense strand starting at position 307 of SEQ ID NO: 518
cagccuuggcgacauagau

SEQ ID NO: 43417 - RNA, 19 nt, Artificial Sequence
  Description of Artificial Sequence: Synthetic oligonucleotide
  Antisense strand to SEQ ID NO: 43336
aucuaugucgccaaggcug

SEQ ID NO: 43418 - RNA, 19 nt, Artificial Sequence
  Description of Artificial Sequence: Synthetic oligonucleotide
  Sense strand starting at position 3919 of SEQ ID NO: 519
gugagaauuugaugauaaa

SEQ ID NO: 43419 - RNA, 19 nt, Artificial Sequence
  Description of Artificial Sequence: Synthetic oligonucleotide
  Antisense strand to SEQ ID NO: 43338
uuuaucaucaaauucucac

SEQ ID NO: 43420 - RNA, 19 nt, Artificial Sequence
  Description of Artificial Sequence: Synthetic oligonucleotide
  Sense strand starting at position 3917 of SEQ ID NO: 519
augugagaauuugaugaua

SEQ ID NO: 43421 - RNA, 19 nt, Artificial Sequence
  Description of Artificial Sequence: Synthetic oligonucleotide
  Antisense strand to SEQ ID NO: 43340
uaucaucaaauucucacau

SEQ ID NO: 43422 - RNA, 19 nt, Artificial Sequence
  Description of Artificial Sequence: Synthetic oligonucleotide
  Sense strand starting at position 3911 of SEQ ID NO: 519
agaaauaugugagaauuug

SEQ ID NO: 43423 - RNA, 19 nt, Artificial Sequence
  Description of Artificial Sequence: Synthetic oligonucleotide
  Antisense strand to SEQ ID NO: 43342
caaauucucacauauuucu

SEQ ID NO: 43424 - RNA, 19 nt, Artificial Sequence
  Description of Artificial Sequence: Synthetic oligonucleotide
  Sense strand starting at position 3587 of SEQ ID NO: 519
aggacaaguguauaucuuu

SEQ ID NO: 43425 - RNA, 19 nt, Artificial Sequence
  Description of Artificial Sequence: Synthetic oligonucleotide
  Antisense strand to SEQ ID NO: 43344
aaagauauacacuuguccu

SEQ ID NO: 43426 - RNA, 19 nt, Artificial Sequence
  Description of Artificial Sequence: Synthetic oligonucleotide
  Sense strand starting at position 3433 of SEQ ID NO: 519
cauauagaugugugggaac

SEQ ID NO: 43427 - RNA, 19 nt, Artificial Sequence
  Description of Artificial Sequence: Synthetic oligonucleotide
  Antisense strand to SEQ ID NO: 43346
guucccacacaucuauaug

SEQ ID NO: 43428 - RNA, 19 nt, Artificial Sequence
  Description of Artificial Sequence: Synthetic oligonucleotide
  Sense strand starting at position 3432 of SEQ ID NO: 519
ucauauagaugugugggaa

SEQ ID NO: 43429 - RNA, 19 nt, Artificial Sequence
  Description of Artificial Sequence: Synthetic oligonucleotide
  Antisense strand to SEQ ID NO: 43348
uucccacacaucuauauga

SEQ ID NO: 43430 - RNA, 19 nt, Artificial Sequence
  Description of Artificial Sequence: Synthetic oligonucleotide
  Sense strand starting at position 3362 of SEQ ID NO: 519
uggauaggaucagauaaua

SEQ ID NO: 43431 - RNA, 19 nt, Artificial Sequence
  Description of Artificial Sequence: Synthetic oligonucleotide
  Antisense strand to SEQ ID NO: 43350
uauuaucugauccuaucca

SEQ ID NO: 43432 - RNA, 19 nt, Artificial Sequence
  Description of Artificial Sequence: Synthetic oligonucleotide
  Sense strand starting at position 3309 of SEQ ID NO: 519
aaggcuaaugucgauggau

SEQ ID NO: 43433 - RNA, 19 nt, Artificial Sequence
  Description of Artificial Sequence: Synthetic oligonucleotide
  Antisense strand to SEQ ID NO: 43352
auccaucgacauuagccuu

SEQ ID NO: 43434 - RNA, 19 nt, Artificial Sequence
  Description of Artificial Sequence: Synthetic oligonucleotide
  Sense strand starting at position 3277 of SEQ ID NO: 519
gaggaaguguaugcagaau

SEQ ID NO: 43435 - RNA, 19 nt, Artificial Sequence
  Description of Artificial Sequence: Synthetic oligonucleotide
  Antisense strand to SEQ ID NO: 43354
auucugcauacacuuccuc

SEQ ID NO: 43436 - RNA, 19 nt, Artificial Sequence
  Description of Artificial Sequence: Synthetic oligonucleotide
  Sense strand starting at position 3276 of SEQ ID NO: 519
agaggaaguguaugcagaa

SEQ ID NO: 43437 - RNA, 19 nt, Artificial Sequence
  Description of Artificial Sequence: Synthetic oligonucleotide
  Antisense strand to SEQ ID NO: 43356
uucugcauacacuuccucu

SEQ ID NO: 43438 - RNA, 19 nt, Artificial Sequence
  Description of Artificial Sequence: Synthetic oligonucleotide
  Sense strand starting at position 3148 of SEQ ID NO: 519
ugaucaucugucuagagua

SEQ ID NO: 43439 - RNA, 19 nt, Artificial Sequence
  Description of Artificial Sequence: Synthetic oligonucleotide
  Antisense strand to SEQ ID NO: 43358
uacucuagacagaugauca

SEQ ID NO: 43440 - RNA, 19 nt, Artificial Sequence
  Description of Artificial Sequence: Synthetic oligonucleotide
  Sense strand starting at position 3147 of SEQ ID NO: 519
gugaucaucugucuagagu

SEQ ID NO: 43441 - RNA, 19 nt, Artificial Sequence
  Description of Artificial Sequence: Synthetic oligonucleotide
  Antisense strand to SEQ ID NO: 43360
acucuagacagaugaucac

SEQ ID NO: 43442 - RNA, 19 nt, Artificial Sequence
  Description of Artificial Sequence: Synthetic oligonucleotide
  Sense strand starting at position 3145 of SEQ ID NO: 519
gagugaucaucugucuaga

SEQ ID NO: 43443 - RNA, 19 nt, Artificial Sequence
  Description of Artificial Sequence: Synthetic oligonucleotide
  Antisense strand to SEQ ID NO: 43362
ucuagacagaugaucacuc

SEQ ID NO: 43444 - RNA, 19 nt, Artificial Sequence
  Description of Artificial Sequence: Synthetic oligonucleotide
  Sense strand starting at position 3136 of SEQ ID NO: 519
agaacaguagagugaucau

SEQ ID NO: 43445 - RNA, 19 nt, Artificial Sequence
  Description of Artificial Sequence: Synthetic oligonucleotide
  Antisense strand to SEQ ID NO: 43364
augaucacucuacuguucu

SEQ ID NO: 43446 - RNA, 19 nt, Artificial Sequence
  Description of Artificial Sequence: Synthetic oligonucleotide
  Sense strand starting at position 2874 of SEQ ID NO: 519
gcgguuggauuuagguauu

SEQ ID NO: 43447 - RNA, 19 nt, Artificial Sequence
  Description of Artificial Sequence: Synthetic oligonucleotide
  Antisense strand to SEQ ID NO: 43366
aauaccuaaauccaaccgc

SEQ ID NO: 43448 - RNA, 19 nt, Artificial Sequence
  Description of Artificial Sequence: Synthetic oligonucleotide
  Sense strand starting at position 2844 of SEQ ID NO: 519
gcuuaacacuggcuaagua

SEQ ID NO: 43449 - RNA, 19 nt, Artificial Sequence
  Description of Artificial Sequence: Synthetic oligonucleotide
  Antisense strand to SEQ ID NO: 43368
uacuuagccaguguuaagc

SEQ ID NO: 43450 - RNA, 19 nt, Artificial Sequence
  Description of Artificial Sequence: Synthetic oligonucleotide
  Sense strand starting at position 2835 of SEQ ID NO: 519
acacuacgugcuuaacacu

SEQ ID NO: 43451 - RNA, 19 nt, Artificial Sequence
  Description of Artificial Sequence: Synthetic oligonucleotide
  Antisense strand to SEQ ID NO: 43370
aguguuaagcacguagugu

SEQ ID NO: 43452 - RNA, 19 nt, Artificial Sequence
  Description of Artificial Sequence: Synthetic oligonucleotide
  Sense strand starting at position 2815 of SEQ ID NO: 519
gcguguugagguguguuua

SEQ ID NO: 43453 - RNA, 19 nt, Artificial Sequence
  Description of Artificial Sequence: Synthetic oligonucleotide
  Antisense strand to SEQ ID NO: 43372
uaaacacaccucaacacgc

SEQ ID NO: 43454 - RNA, 19 nt, Artificial Sequence
  Description of Artificial Sequence: Synthetic oligonucleotide
  Sense strand starting at position 2791 of SEQ ID NO: 519
uguggucauuaucuuacaa

SEQ ID NO: 43455 - RNA, 19 nt, Artificial Sequence
  Description of Artificial Sequence: Synthetic oligonucleotide
  Antisense strand to SEQ ID NO: 43374
uuguaagauaaugaccaca

SEQ ID NO: 43456 - RNA, 19 nt, Artificial Sequence
  Description of Artificial Sequence: Synthetic oligonucleotide
  Sense strand starting at position 2788 of SEQ ID NO: 519
uuguguggucauuaucuua

SEQ ID NO: 43457 - RNA, 19 nt, Artificial Sequence
  Description of Artificial Sequence: Synthetic oligonucleotide
  Antisense strand to SEQ ID NO: 43376
uaagauaaugaccacacaa

SEQ ID NO: 43458 - RNA, 19 nt, Artificial Sequence
  Description of Artificial Sequence: Synthetic oligonucleotide
  Sense strand starting at position 2733 of SEQ ID NO: 519
ugguaaagaugcuuuguau

SEQ ID NO: 43459 - RNA, 19 nt, Artificial Sequence
  Description of Artificial Sequence: Synthetic oligonucleotide
  Antisense strand to SEQ ID NO: 43378
auacaaagcaucuuuacca

SEQ ID NO: 43460 - RNA, 19 nt, Artificial Sequence
  Description of Artificial Sequence: Synthetic oligonucleotide
  Sense strand starting at position 2680 of SEQ ID NO: 519
gaagaaugauucgugaauc

SEQ ID NO: 43461 - RNA, 19 nt, Artificial Sequence
  Description of Artificial Sequence: Synthetic oligonucleotide
  Antisense strand to SEQ ID NO: 43380
gauucacgaaucauucuuc

SEQ ID NO: 43462 - RNA, 19 nt, Artificial Sequence
  Description of Artificial Sequence: Synthetic oligonucleotide
  Sense strand starting at position 2679 of SEQ ID NO: 519
ugaagaaugauucgugaau

SEQ ID NO: 43463 - RNA, 19 nt, Artificial Sequence
  Description of Artificial Sequence: Synthetic oligonucleotide
  Antisense strand to SEQ ID NO: 43382
auucacgaaucauucuuca

SEQ ID NO: 43464 - RNA, 19 nt, Artificial Sequence
  Description of Artificial Sequence: Synthetic oligonucleotide
  Sense strand starting at position 2677 of SEQ ID NO: 519
uuugaagaaugauucguga

SEQ ID NO: 43465 - RNA, 19 nt, Artificial Sequence
  Description of Artificial Sequence: Synthetic oligonucleotide
  Antisense strand to SEQ ID NO: 43384
ucacgaaucauucuucaaa

SEQ ID NO: 43466 - RNA, 19 nt, Artificial Sequence
  Description of Artificial Sequence: Synthetic oligonucleotide
  Sense strand starting at position 2160 of SEQ ID NO: 519
ucggccuugcccucaguua

SEQ ID NO: 43467 - RNA, 19 nt, Artificial Sequence
  Description of Artificial Sequence: Synthetic oligonucleotide
  Antisense strand to SEQ ID NO: 43386
uaacugagggcaaggccga

SEQ ID NO: 43468 - RNA, 19 nt, Artificial Sequence
  Description of Artificial Sequence: Synthetic oligonucleotide
  Sense strand starting at position 2139 of SEQ ID NO: 519
ugacgauagugguuaagug

SEQ ID NO: 43469 - RNA, 19 nt, Artificial Sequence
  Description of Artificial Sequence: Synthetic oligonucleotide
  Antisense strand to SEQ ID NO: 43388
cacuuaaccacuaucguca

SEQ ID NO: 43470 - RNA, 19 nt, Artificial Sequence
  Description of Artificial Sequence: Synthetic oligonucleotide
  Sense strand starting at position 2070 of SEQ ID NO: 519
gcggaaauuugagagaaag

SEQ ID NO: 43471 - RNA, 19 nt, Artificial Sequence
  Description of Artificial Sequence: Synthetic oligonucleotide
  Antisense strand to SEQ ID NO: 43390
cuuucucucaaauuuccgc

SEQ ID NO: 43472 - RNA, 19 nt, Artificial Sequence
  Description of Artificial Sequence: Synthetic oligonucleotide
  Sense strand starting at position 1281 of SEQ ID NO: 519
auagaucucuucgcuauuu

SEQ ID NO: 43473 - RNA, 19 nt, Artificial Sequence
  Description of Artificial Sequence: Synthetic oligonucleotide
  Antisense strand to SEQ ID NO: 43392
aaauagcgaagagaucuau

SEQ ID NO: 43474 - RNA, 19 nt, Artificial Sequence
  Description of Artificial Sequence: Synthetic oligonucleotide
  Sense strand starting at position 1238 of SEQ ID NO: 519
agcucuccggccguagaua

SEQ ID NO: 43475 - RNA, 19 nt, Artificial Sequence
  Description of Artificial Sequence: Synthetic oligonucleotide
  Antisense strand to SEQ ID NO: 43394
uaucuacggccggagagcu

SEQ ID NO: 43476 - RNA, 19 nt, Artificial Sequence
  Description of Artificial Sequence: Synthetic oligonucleotide
  Sense strand starting at position 860 of SEQ ID NO: 519
acauaaggcuauccaguua

SEQ ID NO: 43477 - RNA, 19 nt, Artificial Sequence
  Description of Artificial Sequence: Synthetic oligonucleotide
  Antisense strand to SEQ ID NO: 43396
uaacuggauagccuuaugu

SEQ ID NO: 43478 - RNA, 19 nt, Artificial Sequence
  Description of Artificial Sequence: Synthetic oligonucleotide
  Sense strand starting at position 841 of SEQ ID NO: 519
gagugaauuucgcuucuac

SEQ ID NO: 43479 - RNA, 19 nt, Artificial Sequence
  Description of Artificial Sequence: Synthetic oligonucleotide
  Antisense strand to SEQ ID NO: 43398
guagaagcgaaauucacuc

SEQ ID NO: 43480 - RNA, 19 nt, Artificial Sequence
  Description of Artificial Sequence: Synthetic oligonucleotide
  Sense strand starting at position 829 of SEQ ID NO: 519
ugaauauaaugagagugaa

SEQ ID NO: 43481 - RNA, 19 nt, Artificial Sequence
  Description of Artificial Sequence: Synthetic oligonucleotide
  Antisense strand to SEQ ID NO: 43400
uucacucucauuauauuca

SEQ ID NO: 43482 - RNA, 19 nt, Artificial Sequence
  Description of Artificial Sequence: Synthetic oligonucleotide
  Sense strand starting at position 358 of SEQ ID NO: 519
ugaaucuaguguuuaacag

SEQ ID NO: 43483 - RNA, 19 nt, Artificial Sequence
  Description of Artificial Sequence: Synthetic oligonucleotide
  Antisense strand to SEQ ID NO: 43402
cuguuaaacacuagauuca

SEQ ID NO: 43484 - RNA, 19 nt, Artificial Sequence
  Description of Artificial Sequence: Synthetic oligonucleotide
  Sense strand starting at position 352 of SEQ ID NO: 519
uuaguaugaaucuaguguu

SEQ ID NO: 43485 - RNA, 19 nt, Artificial Sequence
  Description of Artificial Sequence: Synthetic oligonucleotide
  Antisense strand to SEQ ID NO: 43404
aacacuagauucauacuaa

SEQ ID NO: 43486 - RNA, 19 nt, Artificial Sequence
  Description of Artificial Sequence: Synthetic oligonucleotide
  Sense strand starting at position 346 of SEQ ID NO: 519
uuagcuuuaguaugaaucu

SEQ ID NO: 43487 - RNA, 19 nt, Artificial Sequence
  Description of Artificial Sequence: Synthetic oligonucleotide
  Antisense strand to SEQ ID NO: 43406
agauucauacuaaagcuaa

SEQ ID NO: 43488 - RNA, 19 nt, Artificial Sequence
  Description of Artificial Sequence: Synthetic oligonucleotide
  Sense strand starting at position 319 of SEQ ID NO: 519
ugcagaaauggacggugua

SEQ ID NO: 43489 - RNA, 19 nt, Artificial Sequence
  Description of Artificial Sequence: Synthetic oligonucleotide
  Antisense strand to SEQ ID NO: 43408
uacaccguccauuucugca

SEQ ID NO: 43490 - RNA, 19 nt, Artificial Sequence
  Description of Artificial Sequence: Synthetic oligonucleotide
  Sense strand starting at position 188 of SEQ ID NO: 519
guaaauuucugucuugugu

SEQ ID NO: 43491 - RNA, 19 nt, Artificial Sequence
  Description of Artificial Sequence: Synthetic oligonucleotide
  Antisense strand to SEQ ID NO: 43410
acacaagacagaaauuuac

SEQ ID NO: 43492 - RNA, 19 nt, Artificial Sequence
  Description of Artificial Sequence: Synthetic oligonucleotide
  Sense strand starting at position 186 of SEQ ID NO: 519
auguaaauuucugucuugu

SEQ ID NO: 43493 - RNA, 19 nt, Artificial Sequence
  Description of Artificial Sequence: Synthetic oligonucleotide
  Antisense strand to SEQ ID NO: 43412
acaagacagaaauuuacau

SEQ ID NO: 43494 - RNA, 19 nt, Artificial Sequence
  Description of Artificial Sequence: Synthetic oligonucleotide
  Sense strand starting at position 109 of SEQ ID NO: 519
uaagucagaguauguaauu

SEQ ID NO: 43495 - RNA, 19 nt, Artificial Sequence
  Description of Artificial Sequence: Synthetic oligonucleotide
  Antisense strand to SEQ ID NO: 43414
aauuacauacucugacuua

SEQ ID NO: 43496 - RNA, 19 nt, Artificial Sequence
  Description of Artificial Sequence: Synthetic oligonucleotide
  Sense strand starting at position 69 of SEQ ID NO: 519
uagguaugucagggcuaca

SEQ ID NO: 43497 - RNA, 19 nt, Artificial Sequence
  Description of Artificial Sequence: Synthetic oligonucleotide
  Antisense strand to SEQ ID NO: 43416
uguagcccugacauaccua

SEQ ID NO: 43498 - RNA, 19 nt, Artificial Sequence
  Description of Artificial Sequence: Synthetic oligonucleotide
  Sense strand starting at position 382 of SEQ ID NO: 520
cguagcagcccucuuguau

SEQ ID NO: 43499 - RNA, 19 nt, Artificial Sequence
  Description of Artificial Sequence: Synthetic oligonucleotide
  Antisense strand to SEQ ID NO: 43418
auacaagagggcugcuacg

SEQ ID NO: 43500 - RNA, 19 nt, Artificial Sequence
  Description of Artificial Sequence: Synthetic oligonucleotide
  Sense strand starting at position 388 of SEQ ID NO: 520
agcccucuuguauacagua

SEQ ID NO: 43501 - RNA, 19 nt, Artificial Sequence
  Description of Artificial Sequence: Synthetic oligonucleotide
  Antisense strand to SEQ ID NO: 43420
uacuguauacaagagggcu

SEQ ID NO: 43502 - RNA, 19 nt, Artificial Sequence
  Description of Artificial Sequence: Synthetic oligonucleotide
  Sense strand starting at position 459 of SEQ ID NO: 520
cacuuaaugugagcugaca

SEQ ID NO: 43503 - RNA, 19 nt, Artificial Sequence
  Description of Artificial Sequence: Synthetic oligonucleotide
  Antisense strand to SEQ ID NO: 43422
ugucagcucacauuaagug

SEQ ID NO: 43504 - RNA, 19 nt, Artificial Sequence
  Description of Artificial Sequence: Synthetic oligonucleotide
  Sense strand starting at position 518 of SEQ ID NO: 520
cuauuuauugguuggguuu

SEQ ID NO: 43505 - RNA, 19 nt, Artificial Sequence
  Description of Artificial Sequence: Synthetic oligonucleotide
  Antisense strand to SEQ ID NO: 43424
aaacccaaccaauaaauag

SEQ ID NO: 43506 - RNA, 19 nt, Artificial Sequence
  Description of Artificial Sequence: Synthetic oligonucleotide
  Sense strand starting at position 572 of SEQ ID NO: 520
acuggagauuuccaggaca

SEQ ID NO: 43507 - RNA, 19 nt, Artificial Sequence
  Description of Artificial Sequence: Synthetic oligonucleotide
  Antisense strand to SEQ ID NO: 43426
uguccuggaaaucuccagu

SEQ ID NO: 43508 - RNA, 19 nt, Artificial Sequence
  Description of Artificial Sequence: Synthetic oligonucleotide
  Sense strand starting at position 595 of SEQ ID NO: 520
gauauauggguuuggagua

SEQ ID NO: 43509 - RNA, 19 nt, Artificial Sequence
  Description of Artificial Sequence: Synthetic oligonucleotide
  Antisense strand to SEQ ID NO: 43428
uacuccaaacccauauauc

SEQ ID NO: 43510 - RNA, 19 nt, Artificial Sequence
  Description of Artificial Sequence: Synthetic oligonucleotide
  Sense strand starting at position 607 of SEQ ID NO: 520
uggaguagaccugguugga

SEQ ID NO: 43511 - RNA, 19 nt, Artificial Sequence
  Description of Artificial Sequence: Synthetic oligonucleotide
  Antisense strand to SEQ ID NO: 43430
uccaaccaggucuacucca

SEQ ID NO: 43512 - RNA, 19 nt, Artificial Sequence
  Description of Artificial Sequence: Synthetic oligonucleotide
  Sense strand starting at position 640 of SEQ ID NO: 520
uaggacucaucagcauaga

SEQ ID NO: 43513 - RNA, 19 nt, Artificial Sequence
  Description of Artificial Sequence: Synthetic oligonucleotide
  Antisense strand to SEQ ID NO: 43432
ucuaugcugaugaguccua

SEQ ID NO: 43514 - RNA, 19 nt, Artificial Sequence
  Description of Artificial Sequence: Synthetic oligonucleotide
  Sense strand starting at position 866 of SEQ ID NO: 520
agaccaauauguguuaagu

SEQ ID NO: 43515 - RNA, 19 nt, Artificial Sequence
  Description of Artificial Sequence: Synthetic oligonucleotide
  Antisense strand to SEQ ID NO: 43434
acuuaacacauauuggucu

SEQ ID NO: 43516 - RNA, 19 nt, Artificial Sequence
  Description of Artificial Sequence: Synthetic oligonucleotide
  Sense strand starting at position 879 of SEQ ID NO: 520
uuaaguguugcugagaaga

SEQ ID NO: 43517 - RNA, 19 nt, Artificial Sequence
  Description of Artificial Sequence: Synthetic oligonucleotide
  Antisense strand to SEQ ID NO: 43436
ucuucucagcaacacuuaa

SEQ ID NO: 43518 - RNA, 19 nt, Artificial Sequence
  Description of Artificial Sequence: Synthetic oligonucleotide
  Sense strand starting at position 948 of SEQ ID NO: 520
uacaguauccucugggaac

SEQ ID NO: 43519 - RNA, 19 nt, Artificial Sequence
  Description of Artificial Sequence: Synthetic oligonucleotide
  Antisense strand to SEQ ID NO: 43438
guucccagaggauacugua

SEQ ID NO: 43520 - RNA, 19 nt, Artificial Sequence
  Description of Artificial Sequence: Synthetic oligonucleotide
  Sense strand starting at position 1003 of SEQ ID NO: 520
cuguguguuccuguaguuc

SEQ ID NO: 43521 - RNA, 19 nt, Artificial Sequence
  Description of Artificial Sequence: Synthetic oligonucleotide
  Antisense strand to SEQ ID NO: 43440
gaacuacaggaacacacag

SEQ ID NO: 43522 - RNA, 19 nt, Artificial Sequence
  Description of Artificial Sequence: Synthetic oligonucleotide
  Sense strand starting at position 1301 of SEQ ID NO: 520
guaugugucagugcuuggu

SEQ ID NO: 43523 - RNA, 19 nt, Artificial Sequence
  Description of Artificial Sequence: Synthetic oligonucleotide
  Antisense strand to SEQ ID NO: 43442
accaagcacugacacauac

SEQ ID NO: 43524 - RNA, 19 nt, Artificial Sequence
  Description of Artificial Sequence: Synthetic oligonucleotide
  Sense strand starting at position 1317 of SEQ ID NO: 520
ggugcuaagacugggagaa

SEQ ID NO: 43525 - RNA, 19 nt, Artificial Sequence
  Description of Artificial Sequence: Synthetic oligonucleotide
  Antisense strand to SEQ ID NO: 43444
uucucccagucuuagcacc

SEQ ID NO: 43526 - RNA, 19 nt, Artificial Sequence
  Description of Artificial Sequence: Synthetic oligonucleotide
  Sense strand starting at position 1318 of SEQ ID NO: 520
gugcuaagacugggagaaa

SEQ ID NO: 43527 - RNA, 19 nt, Artificial Sequence
  Description of Artificial Sequence: Synthetic oligonucleotide
  Antisense strand to SEQ ID NO: 43446
uuucucccagucuuagcac

SEQ ID NO: 43528 - RNA, 19 nt, Artificial Sequence
  Description of Artificial Sequence: Synthetic oligonucleotide
  Sense strand starting at position 1476 of SEQ ID NO: 520
gcugauauucuauaacuug

SEQ ID NO: 43529 - RNA, 19 nt, Artificial Sequence
  Description of Artificial Sequence: Synthetic oligonucleotide
  Antisense strand to SEQ ID NO: 43448
caaguuauagaauaucagc

SEQ ID NO: 43530 - RNA, 19 nt, Artificial Sequence
  Description of Artificial Sequence: Synthetic oligonucleotide
  Sense strand starting at position 1517 of SEQ ID NO: 520
uguagauuccuugagggua

SEQ ID NO: 43531 - RNA, 19 nt, Artificial Sequence
  Description of Artificial Sequence: Synthetic oligonucleotide
  Antisense strand to SEQ ID NO: 43450
uacccucaaggaaucuaca

SEQ ID NO: 43532 - RNA, 19 nt, Artificial Sequence
  Description of Artificial Sequence: Synthetic oligonucleotide
  Sense strand starting at position 1580 of SEQ ID NO: 520
augcuaaacgaauauaucu

SEQ ID NO: 43533 - RNA, 19 nt, Artificial Sequence
  Description of Artificial Sequence: Synthetic oligonucleotide
  Antisense strand to SEQ ID NO: 43452
agauauauucguuuagcau

SEQ ID NO: 43534 - RNA, 19 nt, Artificial Sequence
  Description of Artificial Sequence: Synthetic oligonucleotide
  Sense strand starting at position 1587 of SEQ ID NO: 520
acgaauauaucucuggauc

SEQ ID NO: 43535 - RNA, 19 nt, Artificial Sequence
  Description of Artificial Sequence: Synthetic oligonucleotide
  Antisense strand to SEQ ID NO: 43454
gauccagagauauauucgu

SEQ ID NO: 43536 - RNA, 19 nt, Artificial Sequence
  Description of Artificial Sequence: Synthetic oligonucleotide
  Sense strand starting at position 1634 of SEQ ID NO: 520
cuggaaggcgcucaauaaa

SEQ ID NO: 43537 - RNA, 19 nt, Artificial Sequence
  Description of Artificial Sequence: Synthetic oligonucleotide
  Antisense strand to SEQ ID NO: 43456
uuuauugagcgccuuccag

SEQ ID NO: 43538 - RNA, 19 nt, Artificial Sequence
  Description of Artificial Sequence: Synthetic oligonucleotide
  Sense strand starting at position 1763 of SEQ ID NO: 520
ccguucucugcccuuuauu

SEQ ID NO: 43539 - RNA, 19 nt, Artificial Sequence
  Description of Artificial Sequence: Synthetic oligonucleotide
  Antisense strand to SEQ ID NO: 43458
aauaaagggcagagaacgg

SEQ ID NO: 43540 - RNA, 19 nt, Artificial Sequence
  Description of Artificial Sequence: Synthetic oligonucleotide
  Sense strand starting at position 1857 of SEQ ID NO: 520
ccuggaugacuccggacaa

SEQ ID NO: 43541 - RNA, 19 nt, Artificial Sequence
  Description of Artificial Sequence: Synthetic oligonucleotide
  Antisense strand to SEQ ID NO: 43460
uuguccggagucauccagg

SEQ ID NO: 43542 - RNA, 19 nt, Artificial Sequence
  Description of Artificial Sequence: Synthetic oligonucleotide
  Sense strand starting at position 1892 of SEQ ID NO: 520
cucagaucugcccaaacgu

SEQ ID NO: 43543 - RNA, 19 nt, Artificial Sequence
  Description of Artificial Sequence: Synthetic oligonucleotide
  Antisense strand to SEQ ID NO: 43462
acguuugggcagaucugag

SEQ ID NO: 43544 - RNA, 19 nt, Artificial Sequence
  Description of Artificial Sequence: Synthetic oligonucleotide
  Sense strand starting at position 2408 of SEQ ID NO: 520
auuucuauacguuguagca

SEQ ID NO: 43545 - RNA, 19 nt, Artificial Sequence
  Description of Artificial Sequence: Synthetic oligonucleotide
  Antisense strand to SEQ ID NO: 43464
ugcuacaacguauagaaau

SEQ ID NO: 43546 - RNA, 19 nt, Artificial Sequence
  Description of Artificial Sequence: Synthetic oligonucleotide
  Sense strand starting at position 2657 of SEQ ID NO: 520
uugauuuaguugucucuua

SEQ ID NO: 43547 - RNA, 19 nt, Artificial Sequence
  Description of Artificial Sequence: Synthetic oligonucleotide
  Antisense strand to SEQ ID NO: 43466
uaagagacaacuaaaucaa

SEQ ID NO: 43548 - RNA, 19 nt, Artificial Sequence
  Description of Artificial Sequence: Synthetic oligonucleotide
  Sense strand starting at position 2739 of SEQ ID NO: 520
ggcaaucuuccucagagca

SEQ ID NO: 43549 - RNA, 19 nt, Artificial Sequence
  Description of Artificial Sequence: Synthetic oligonucleotide
  Antisense strand to SEQ ID NO: 43468
ugcucugaggaagauugcc

SEQ ID NO: 43550 - RNA, 19 nt, Artificial Sequence
  Description of Artificial Sequence: Synthetic oligonucleotide
  Sense strand starting at position 2778 of SEQ ID NO: 520
aaauguccaggaugacauu

SEQ ID NO: 43551 - RNA, 19 nt, Artificial Sequence
  Description of Artificial Sequence: Synthetic oligonucleotide
  Antisense strand to SEQ ID NO: 43470
aaugucauccuggacauuu

SEQ ID NO: 43552 - RNA, 19 nt, Artificial Sequence
  Description of Artificial Sequence: Synthetic oligonucleotide
  Sense strand starting at position 2787 of SEQ ID NO: 520
ggaugacauuagucuguua

SEQ ID NO: 43553 - RNA, 19 nt, Artificial Sequence
  Description of Artificial Sequence: Synthetic oligonucleotide
  Antisense strand to SEQ ID NO: 43472
uaacagacuaaugucaucc

SEQ ID NO: 43554 - RNA, 19 nt, Artificial Sequence
  Description of Artificial Sequence: Synthetic oligonucleotide
  Sense strand starting at position 2789 of SEQ ID NO: 520
augacauuagucuguuauu

SEQ ID NO: 43555 - RNA, 19 nt, Artificial Sequence
  Description of Artificial Sequence: Synthetic oligonucleotide
  Antisense strand to SEQ ID NO: 43474
aauaacagacuaaugucau

SEQ ID NO: 43556 - RNA, 19 nt, Artificial Sequence
  Description of Artificial Sequence: Synthetic oligonucleotide
  Sense strand starting at position 2800 of SEQ ID NO: 520
cuguuauugcuucuuacgu

SEQ ID NO: 43557 - RNA, 19 nt, Artificial Sequence
  Description of Artificial Sequence: Synthetic oligonucleotide
  Antisense strand to SEQ ID NO: 43476
acguaagaagcaauaacag

SEQ ID NO: 43558 - RNA, 19 nt, Artificial Sequence
  Description of Artificial Sequence: Synthetic oligonucleotide
  Sense strand starting at position 2895 of SEQ ID NO: 520
cauugaagauuagugguua

SEQ ID NO: 43559 - RNA, 19 nt, Artificial Sequence
  Description of Artificial Sequence: Synthetic oligonucleotide
  Antisense strand to SEQ ID NO: 43478
uaaccacuaaucuucaaug

SEQ ID NO: 43560 - RNA, 19 nt, Artificial Sequence
  Description of Artificial Sequence: Synthetic oligonucleotide
  Sense strand starting at position 2899 of SEQ ID NO: 520
gaagauuagugguuaugaa

SEQ ID NO: 43561 - RNA, 19 nt, Artificial Sequence
  Description of Artificial Sequence: Synthetic oligonucleotide
  Antisense strand to SEQ ID NO: 43480
uucauaaccacuaaucuuc

SEQ ID NO: 43562 - RNA, 19 nt, Artificial Sequence
  Description of Artificial Sequence: Synthetic oligonucleotide
  Sense strand starting at position 3501 of SEQ ID NO: 520
guaccugcuccucagaaga

SEQ ID NO: 43563 - RNA, 19 nt, Artificial Sequence
  Description of Artificial Sequence: Synthetic oligonucleotide
  Antisense strand to SEQ ID NO: 43482
ucuucugaggagcagguac

SEQ ID NO: 43564 - RNA, 19 nt, Artificial Sequence
  Description of Artificial Sequence: Synthetic oligonucleotide
  Sense strand starting at position 3546 of SEQ ID NO: 520
uucuuaugucaauggauuc

SEQ ID NO: 43565 - RNA, 19 nt, Artificial Sequence
  Description of Artificial Sequence: Synthetic oligonucleotide
  Antisense strand to SEQ ID NO: 43484
gaauccauugacauaagaa

SEQ ID NO: 43566 - RNA, 19 nt, Artificial Sequence
  Description of Artificial Sequence: Synthetic oligonucleotide
  Sense strand starting at position 3557 of SEQ ID NO: 520
auggauucuugcuucuaua

SEQ ID NO: 43567 - RNA, 19 nt, Artificial Sequence
  Description of Artificial Sequence: Synthetic oligonucleotide
  Antisense strand to SEQ ID NO: 43486
uauagaagcaagaauccau

SEQ ID NO: 43568 - RNA, 19 nt, Artificial Sequence
  Description of Artificial Sequence: Synthetic oligonucleotide
  Sense strand starting at position 3652 of SEQ ID NO: 520
uuuauucgaguuugaaaga

SEQ ID NO: 43569 - RNA, 19 nt, Artificial Sequence
  Description of Artificial Sequence: Synthetic oligonucleotide
  Antisense strand to SEQ ID NO: 43488
ucuuucaaacucgaauaaa

SEQ ID NO: 43570 - RNA, 19 nt, Artificial Sequence
  Description of Artificial Sequence: Synthetic oligonucleotide
  Sense strand starting at position 3868 of SEQ ID NO: 520
gugguacauccauauucug

SEQ ID NO: 43571 - RNA, 19 nt, Artificial Sequence
  Description of Artificial Sequence: Synthetic oligonucleotide
  Antisense strand to SEQ ID NO: 43490
cagaauauggauguaccac

SEQ ID NO: 43572 - RNA, 19 nt, Artificial Sequence
  Description of Artificial Sequence: Synthetic oligonucleotide
  Sense strand starting at position 3908 of SEQ ID NO: 520
augacugaauuagcgauaa

SEQ ID NO: 43573 - RNA, 19 nt, Artificial Sequence
  Description of Artificial Sequence: Synthetic oligonucleotide
  Antisense strand to SEQ ID NO: 43492
uuaucgcuaauucagucau

SEQ ID NO: 43574 - RNA, 19 nt, Artificial Sequence
  Description of Artificial Sequence: Synthetic oligonucleotide
  Sense strand starting at position 3921 of SEQ ID NO: 520
cgauaauugcuaugacaug

SEQ ID NO: 43575 - RNA, 19 nt, Artificial Sequence
  Description of Artificial Sequence: Synthetic oligonucleotide
  Antisense strand to SEQ ID NO: 43494
caugucauagcaauuaucg

SEQ ID NO: 43576 - RNA, 19 nt, Artificial Sequence
  Description of Artificial Sequence: Synthetic oligonucleotide
  Sense strand starting at position 3926 of SEQ ID NO: 520
auugcuaugacauggauga

SEQ ID NO: 43577 - RNA, 19 nt, Artificial Sequence
  Description of Artificial Sequence: Synthetic oligonucleotide
  Antisense strand to SEQ ID NO: 43496
ucauccaugucauagcaau

SEQ ID NO: 43578 - RNA, 19 nt, Artificial Sequence
  Description of Artificial Sequence: Synthetic oligonucleotide
  Sense strand starting at position 3948 of SEQ ID NO: 521
gauuuccaguuugauaaug

SEQ ID NO: 43579 - RNA, 19 nt, Artificial Sequence
  Description of Artificial Sequence: Synthetic oligonucleotide
  Antisense strand to SEQ ID NO: 43498
cauuaucaaacuggaaauc

SEQ ID NO: 43580 - RNA, 19 nt, Artificial Sequence
  Description of Artificial Sequence: Synthetic oligonucleotide
  Sense strand starting at position 3926 of SEQ ID NO: 521
gucugaacugguuacuaaa

SEQ ID NO: 43581 - RNA, 19 nt, Artificial Sequence
  Description of Artificial Sequence: Synthetic oligonucleotide
  Antisense strand to SEQ ID NO: 43500
uuuaguaaccaguucagac

SEQ ID NO: 43582 - RNA, 19 nt, Artificial Sequence
  Description of Artificial Sequence: Synthetic oligonucleotide
  Sense strand starting at position 3923 of SEQ ID NO: 521
ggagucugaacugguuacu

SEQ ID NO: 43583 - RNA, 19 nt, Artificial Sequence
  Description of Artificial Sequence: Synthetic oligonucleotide
  Antisense strand to SEQ ID NO: 43502
aguaaccaguucagacucc

SEQ ID NO: 43584 - RNA, 19 nt, Artificial Sequence
  Description of Artificial Sequence: Synthetic oligonucleotide
  Sense strand starting at position 3874 of SEQ ID NO: 521
uaggaaaguugucuaguuc

SEQ ID NO: 43585 - RNA, 19 nt, Artificial Sequence
  Description of Artificial Sequence: Synthetic oligonucleotide
  Antisense strand to SEQ ID NO: 43504
gaacuagacaacuuuccua

SEQ ID NO: 43586 - RNA, 19 nt, Artificial Sequence
  Description of Artificial Sequence: Synthetic oligonucleotide
  Sense strand starting at position 3873 of SEQ ID NO: 521
uuaggaaaguugucuaguu

SEQ ID NO: 43587 - RNA, 19 nt, Artificial Sequence
  Description of Artificial Sequence: Synthetic oligonucleotide
  Antisense strand to SEQ ID NO: 43506
aacuagacaacuuuccuaa

SEQ ID NO: 43588 - RNA, 19 nt, Artificial Sequence
  Description of Artificial Sequence: Synthetic oligonucleotide
  Sense strand starting at position 3783 of SEQ ID NO: 521
uguguuguaaauugaaaga

SEQ ID NO: 43589 - RNA, 19 nt, Artificial Sequence
  Description of Artificial Sequence: Synthetic oligonucleotide
  Antisense strand to SEQ ID NO: 43508
ucuuucaauuuacaacaca

SEQ ID NO: 43590 - RNA, 19 nt, Artificial Sequence
  Description of Artificial Sequence: Synthetic oligonucleotide
  Sense strand starting at position 3758 of SEQ ID NO: 521
gccuaagacuuggcaaacu

SEQ ID NO: 43591 - RNA, 19 nt, Artificial Sequence
  Description of Artificial Sequence: Synthetic oligonucleotide
  Antisense strand to SEQ ID NO: 43510
aguuugccaagucuuaggc

SEQ ID NO: 43592 - RNA, 19 nt, Artificial Sequence
  Description of Artificial Sequence: Synthetic oligonucleotide
  Sense strand starting at position 3686 of SEQ ID NO: 521
ucuauaaagugaguuguaa

SEQ ID NO: 43593 - RNA, 19 nt, Artificial Sequence
  Description of Artificial Sequence: Synthetic oligonucleotide
  Antisense strand to SEQ ID NO: 43512
uuacaacucacuuuauaga

SEQ ID NO: 43594 - RNA, 19 nt, Artificial Sequence
  Description of Artificial Sequence: Synthetic oligonucleotide
  Sense strand starting at position 3562 of SEQ ID NO: 521
cucaguaaacguuacaucu

SEQ ID NO: 43595 - RNA, 19 nt, Artificial Sequence
  Description of Artificial Sequence: Synthetic oligonucleotide
  Antisense strand to SEQ ID NO: 43514
agauguaacguuuacugag

SEQ ID NO: 43596 - RNA, 19 nt, Artificial Sequence
  Description of Artificial Sequence: Synthetic oligonucleotide
  Sense strand starting at position 3535 of SEQ ID NO: 521
acauaugugcuugacucuu

SEQ ID NO: 43597 - RNA, 19 nt, Artificial Sequence
  Description of Artificial Sequence: Synthetic oligonucleotide
  Antisense strand to SEQ ID NO: 43516
aagagucaagcacauaugu

SEQ ID NO: 43598 - RNA, 19 nt, Artificial Sequence
  Description of Artificial Sequence: Synthetic oligonucleotide
  Sense strand starting at position 3517 of SEQ ID NO: 521
cuaugagaaugacagauaa

SEQ ID NO: 43599 - RNA, 19 nt, Artificial Sequence
  Description of Artificial Sequence: Synthetic oligonucleotide
  Antisense strand to SEQ ID NO: 43518
uuaucugucauucucauag

SEQ ID NO: 43600 - RNA, 19 nt, Artificial Sequence
  Description of Artificial Sequence: Synthetic oligonucleotide
  Sense strand starting at position 3506 of SEQ ID NO: 521
uaauacgcggucuaugaga

SEQ ID NO: 43601 - RNA, 19 nt, Artificial Sequence
  Description of Artificial Sequence: Synthetic oligonucleotide
  Antisense strand to SEQ ID NO: 43520
ucucauagaccgcguauua

SEQ ID NO: 43602 - RNA, 19 nt, Artificial Sequence
  Description of Artificial Sequence: Synthetic oligonucleotide
  Sense strand starting at position 3503 of SEQ ID NO: 521
guguaauacgcggucuaug

SEQ ID NO: 43603 - RNA, 19 nt, Artificial Sequence
  Description of Artificial Sequence: Synthetic oligonucleotide
  Antisense strand to SEQ ID NO: 43522
cauagaccgcguauuacac

SEQ ID NO: 43604 - RNA, 19 nt, Artificial Sequence
  Description of Artificial Sequence: Synthetic oligonucleotide
  Sense strand starting at position 3428 of SEQ ID NO: 521
uguggacagaccuggauau

SEQ ID NO: 43605 - RNA, 19 nt, Artificial Sequence
  Description of Artificial Sequence: Synthetic oligonucleotide
  Antisense strand to SEQ ID NO: 43524
auauccaggucuguccaca

SEQ ID NO: 43606 - RNA, 19 nt, Artificial Sequence
  Description of Artificial Sequence: Synthetic oligonucleotide
  Sense strand starting at position 3331 of SEQ ID NO: 521
gagucagugucauuucuca

SEQ ID NO: 43607 - RNA, 19 nt, Artificial Sequence
  Description of Artificial Sequence: Synthetic oligonucleotide
  Antisense strand to SEQ ID NO: 43526
ugagaaaugacacugacuc

SEQ ID NO: 43608 - RNA, 19 nt, Artificial Sequence
  Description of Artificial Sequence: Synthetic oligonucleotide
  Sense strand starting at position 3242 of SEQ ID NO: 521
gaguaaaggucacuuucuu

SEQ ID NO: 43609 - RNA, 19 nt, Artificial Sequence
  Description of Artificial Sequence: Synthetic oligonucleotide
  Antisense strand to SEQ ID NO: 43528
aagaaagugaccuuuacuc

SEQ ID NO: 43610 - RNA, 19 nt, Artificial Sequence
  Description of Artificial Sequence: Synthetic oligonucleotide
  Sense strand starting at position 3233 of SEQ ID NO: 521
uaggguuuggaguaaaggu

SEQ ID NO: 43611 - RNA, 19 nt, Artificial Sequence
  Description of Artificial Sequence: Synthetic oligonucleotide
  Antisense strand to SEQ ID NO: 43530
accuuuacuccaaacccua

SEQ ID NO: 43612 - RNA, 19 nt, Artificial Sequence
  Description of Artificial Sequence: Synthetic oligonucleotide
  Sense strand starting at position 3228 of SEQ ID NO: 521
cacuguaggguuuggagua

SEQ ID NO: 43613 - RNA, 19 nt, Artificial Sequence
  Description of Artificial Sequence: Synthetic oligonucleotide
  Antisense strand to SEQ ID NO: 43532
uacuccaaacccuacagug

SEQ ID NO: 43614 - RNA, 19 nt, Artificial Sequence
  Description of Artificial Sequence: Synthetic oligonucleotide
  Sense strand starting at position 3175 of SEQ ID NO: 521
cgaauuguggcauauuaac

SEQ ID NO: 43615 - RNA, 19 nt, Artificial Sequence
  Description of Artificial Sequence: Synthetic oligonucleotide
  Antisense strand to SEQ ID NO: 43534
guuaauaugccacaauucg

SEQ ID NO: 43616 - RNA, 19 nt, Artificial Sequence
  Description of Artificial Sequence: Synthetic oligonucleotide
  Sense strand starting at position 2784 of SEQ ID NO: 521
gaugcugcccgagaaauug

SEQ ID NO: 43617 - RNA, 19 nt, Artificial Sequence
  Description of Artificial Sequence: Synthetic oligonucleotide
  Antisense strand to SEQ ID NO: 43536
caauuucucgggcagcauc

SEQ ID NO: 43618 - RNA, 19 nt, Artificial Sequence
  Description of Artificial Sequence: Synthetic oligonucleotide
  Sense strand starting at position 2616 of SEQ ID NO: 521
cgagucgucguggcaggaa

SEQ ID NO: 43619 - RNA, 19 nt, Artificial Sequence
  Description of Artificial Sequence: Synthetic oligonucleotide
  Antisense strand to SEQ ID NO: 43538
uuccugccacgacgacucg

SEQ ID NO: 43620 - RNA, 19 nt, Artificial Sequence
  Description of Artificial Sequence: Synthetic oligonucleotide
  Sense strand starting at position 2589 of SEQ ID NO: 521
aaggguacuccaggcgaga

SEQ ID NO: 43621 - RNA, 19 nt, Artificial Sequence
  Description of Artificial Sequence: Synthetic oligonucleotide
  Antisense strand to SEQ ID NO: 43540
ucucgccuggaguacccuu

SEQ ID NO: 43622 - RNA, 19 nt, Artificial Sequence
  Description of Artificial Sequence: Synthetic oligonucleotide
  Sense strand starting at position 2240 of SEQ ID NO: 521
gcuuaaucaaagugaaagg

SEQ ID NO: 43623 - RNA, 19 nt, Artificial Sequence
  Description of Artificial Sequence: Synthetic oligonucleotide
  Antisense strand to SEQ ID NO: 43542
ccuuucacuuugauuaagc

SEQ ID NO: 43624 - RNA, 19 nt, Artificial Sequence
  Description of Artificial Sequence: Synthetic oligonucleotide
  Sense strand starting at position 2085 of SEQ ID NO: 521
uccuuaagucgcuagggau

SEQ ID NO: 43625 - RNA, 19 nt, Artificial Sequence
  Description of Artificial Sequence: Synthetic oligonucleotide
  Antisense strand to SEQ ID NO: 43544
aucccuagcgacuuaagga

SEQ ID NO: 43626 - RNA, 19 nt, Artificial Sequence
  Description of Artificial Sequence: Synthetic oligonucleotide
  Sense strand starting at position 2043 of SEQ ID NO: 521
gcccucacccuggaagaau

SEQ ID NO: 43627 - RNA, 19 nt, Artificial Sequence
  Description of Artificial Sequence: Synthetic oligonucleotide
  Antisense strand to SEQ ID NO: 43546
auucuuccagggugagggc

SEQ ID NO: 43628 - RNA, 19 nt, Artificial Sequence
  Description of Artificial Sequence: Synthetic oligonucleotide
  Sense strand starting at position 1985 of SEQ ID NO: 521
acccuuucucgcgagauga

SEQ ID NO: 43629 - RNA, 19 nt, Artificial Sequence
  Description of Artificial Sequence: Synthetic oligonucleotide
  Antisense strand to SEQ ID NO: 43548
ucaucucgcgagaaagggu

SEQ ID NO: 43630 - RNA, 19 nt, Artificial Sequence
  Description of Artificial Sequence: Synthetic oligonucleotide
  Sense strand starting at position 1398 of SEQ ID NO: 521
cacggaauucggcaaccaa

SEQ ID NO: 43631 - RNA, 19 nt, Artificial Sequence
  Description of Artificial Sequence: Synthetic oligonucleotide
  Antisense strand to SEQ ID NO: 43550
uugguugccgaauuccgug

SEQ ID NO: 43632 - RNA, 19 nt, Artificial Sequence
  Description of Artificial Sequence: Synthetic oligonucleotide
  Sense strand starting at position 1121 of SEQ ID NO: 521
accuaaacccucuggagau

SEQ ID NO: 43633 - RNA, 19 nt, Artificial Sequence
  Description of Artificial Sequence: Synthetic oligonucleotide
  Antisense strand to SEQ ID NO: 43552
aucuccagaggguuuaggu

SEQ ID NO: 43634 - RNA, 19 nt, Artificial Sequence
  Description of Artificial Sequence: Synthetic oligonucleotide
  Sense strand starting at position 784 of SEQ ID NO: 521
gggcgugaccuagaauccu

SEQ ID NO: 43635 - RNA, 19 nt, Artificial Sequence
  Description of Artificial Sequence: Synthetic oligonucleotide
  Antisense strand to SEQ ID NO: 43554
aggauucuaggucacgccc

SEQ ID NO: 43636 - RNA, 19 nt, Artificial Sequence
  Description of Artificial Sequence: Synthetic oligonucleotide
  Sense strand starting at position 545 of SEQ ID NO: 521
agaacuguugguuguaaug

SEQ ID NO: 43637 - RNA, 19 nt, Artificial Sequence
  Description of Artificial Sequence: Synthetic oligonucleotide
  Antisense strand to SEQ ID NO: 43556
cauuacaaccaacaguucu

SEQ ID NO: 43638 - RNA, 19 nt, Artificial Sequence
  Description of Artificial Sequence: Synthetic oligonucleotide
  Sense strand starting at position 544 of SEQ ID NO: 521
cagaacuguugguuguaau

SEQ ID NO: 43639 - RNA, 19 nt, Artificial Sequence
  Description of Artificial Sequence: Synthetic oligonucleotide
  Antisense strand to SEQ ID NO: 43558
auuacaaccaacaguucug

SEQ ID NO: 43640 - RNA, 19 nt, Artificial Sequence
  Description of Artificial Sequence: Synthetic oligonucleotide
  Sense strand starting at position 543 of SEQ ID NO: 521
ccagaacuguugguuguaa

SEQ ID NO: 43641 - RNA, 19 nt, Artificial Sequence
  Description of Artificial Sequence: Synthetic oligonucleotide
  Antisense strand to SEQ ID NO: 43560
uuacaaccaacaguucugg

SEQ ID NO: 43642 - RNA, 19 nt, Artificial Sequence
  Description of Artificial Sequence: Synthetic oligonucleotide
  Sense strand starting at position 542 of SEQ ID NO: 521
accagaacuguugguugua

SEQ ID NO: 43643 - RNA, 19 nt, Artificial Sequence
  Description of Artificial Sequence: Synthetic oligonucleotide
  Antisense strand to SEQ ID NO: 43562
uacaaccaacaguucuggu

SEQ ID NO: 43644 - RNA, 19 nt, Artificial Sequence
  Description of Artificial Sequence: Synthetic oligonucleotide
  Sense strand starting at position 317 of SEQ ID NO: 521
guacauauguacuuguaag

SEQ ID NO: 43645 - RNA, 19 nt, Artificial Sequence
  Description of Artificial Sequence: Synthetic oligonucleotide
  Antisense strand to SEQ ID NO: 43564
cuuacaaguacauauguac

SEQ ID NO: 43646 - RNA, 19 nt, Artificial Sequence
  Description of Artificial Sequence: Synthetic oligonucleotide
  Sense strand starting at position 149 of SEQ ID NO: 521
guuaccuacuauguaauaa

SEQ ID NO: 43647 - RNA, 19 nt, Artificial Sequence
  Description of Artificial Sequence: Synthetic oligonucleotide
  Antisense strand to SEQ ID NO: 43566
uuauuacauaguagguaac

SEQ ID NO: 43648 - RNA, 19 nt, Artificial Sequence
  Description of Artificial Sequence: Synthetic oligonucleotide
  Sense strand starting at position 148 of SEQ ID NO: 521
uguuaccuacuauguaaua

SEQ ID NO: 43649 - RNA, 19 nt, Artificial Sequence
  Description of Artificial Sequence: Synthetic oligonucleotide
  Antisense strand to SEQ ID NO: 43568
uauuacauaguagguaaca

SEQ ID NO: 43650 - RNA, 19 nt, Artificial Sequence
  Description of Artificial Sequence: Synthetic oligonucleotide
  Sense strand starting at position 123 of SEQ ID NO: 521
uugaguacccuaugguacu

SEQ ID NO: 43651 - RNA, 19 nt, Artificial Sequence
  Description of Artificial Sequence: Synthetic oligonucleotide
  Antisense strand to SEQ ID NO: 43570
aguaccauaggguacucaa

SEQ ID NO: 43652 - RNA, 19 nt, Artificial Sequence
  Description of Artificial Sequence: Synthetic oligonucleotide
  Sense strand starting at position 121 of SEQ ID NO: 521
gguugaguacccuauggua

SEQ ID NO: 43653 - RNA, 19 nt, Artificial Sequence
  Description of Artificial Sequence: Synthetic oligonucleotide
  Antisense strand to SEQ ID NO: 43572
uaccauaggguacucaacc

SEQ ID NO: 43654 - RNA, 19 nt, Artificial Sequence
  Description of Artificial Sequence: Synthetic oligonucleotide
  Sense strand starting at position 60 of SEQ ID NO: 521
aagcuuguagaaugauguu

SEQ ID NO: 43655 - RNA, 19 nt, Artificial Sequence
  Description of Artificial Sequence: Synthetic oligonucleotide
  Antisense strand to SEQ ID NO: 43574
aacaucauucuacaagcuu

SEQ ID NO: 43656 - RNA, 19 nt, Artificial Sequence
  Description of Artificial Sequence: Synthetic oligonucleotide
  Sense strand starting at position 53 of SEQ ID NO: 521
ugcacagaagcuuguagaa

SEQ ID NO: 43657 - RNA, 19 nt, Artificial Sequence
  Description of Artificial Sequence: Synthetic oligonucleotide
  Antisense strand to SEQ ID NO: 43576
uucuacaagcuucugugca

SEQ ID NO: 43658 - RNA, 19 nt, Artificial Sequence
  Description of Artificial Sequence: Synthetic oligonucleotide
  Sense strand starting at position 13 of SEQ ID NO: 522
accugaaagccucacgaaa

SEQ ID NO: 43659 - RNA, 19 nt, Artificial Sequence
  Description of Artificial Sequence: Synthetic oligonucleotide
  Antisense strand to SEQ ID NO: 43578
uuucgugaggcuuucaggu

SEQ ID NO: 43660 - RNA, 19 nt, Artificial Sequence
  Description of Artificial Sequence: Synthetic oligonucleotide
  Sense strand starting at position 39 of SEQ ID NO: 522
uuauaaguauguucugacu

SEQ ID NO: 43661 - RNA, 19 nt, Artificial Sequence
  Description of Artificial Sequence: Synthetic oligonucleotide
  Antisense strand to SEQ ID NO: 43580
agucagaacauacuuauaa

SEQ ID NO: 43662 - RNA, 19 nt, Artificial Sequence
  Description of Artificial Sequence: Synthetic oligonucleotide
  Sense strand starting at position 82 of SEQ ID NO: 522
gcugaaugcccaggauguu

SEQ ID NO: 43663 - RNA, 19 nt, Artificial Sequence
  Description of Artificial Sequence: Synthetic oligonucleotide
  Antisense strand to SEQ ID NO: 43582
aacauccugggcauucagc

SEQ ID NO: 43664 - RNA, 19 nt, Artificial Sequence
  Description of Artificial Sequence: Synthetic oligonucleotide
  Sense strand starting at position 92 of SEQ ID NO: 522
caggauguuucuucugcua

SEQ ID NO: 43665 - RNA, 19 nt, Artificial Sequence
  Description of Artificial Sequence: Synthetic oligonucleotide
  Antisense strand to SEQ ID NO: 43584
uagcagaagaaacauccug

SEQ ID NO: 43666 - RNA, 19 nt, Artificial Sequence
  Description of Artificial Sequence: Synthetic oligonucleotide
  Sense strand starting at position 498 of SEQ ID NO: 522
uuaagucauuuggagauac

SEQ ID NO: 43667 - RNA, 19 nt, Artificial Sequence
  Description of Artificial Sequence: Synthetic oligonucleotide
  Antisense strand to SEQ ID NO: 43586
guaucuccaaaugacuuaa

SEQ ID NO: 43668 - RNA, 19 nt, Artificial Sequence
  Description of Artificial Sequence: Synthetic oligonucleotide
  Sense strand starting at position 611 of SEQ ID NO: 522
acucaagcucuuugggaaa

SEQ ID NO: 43669 - RNA, 19 nt, Artificial Sequence
  Description of Artificial Sequence: Synthetic oligonucleotide
  Antisense strand to SEQ ID NO: 43588
uuucccaaagagcuugagu

SEQ ID NO: 43670 - RNA, 19 nt, Artificial Sequence
  Description of Artificial Sequence: Synthetic oligonucleotide
  Sense strand starting at position 622 of SEQ ID NO: 522
uugggaaacugguaggaau

SEQ ID NO: 43671 - RNA, 19 nt, Artificial Sequence
  Description of Artificial Sequence: Synthetic oligonucleotide
  Antisense strand to SEQ ID NO: 43590
auuccuaccaguuucccaa

SEQ ID NO: 43672 - RNA, 19 nt, Artificial Sequence
  Description of Artificial Sequence: Synthetic oligonucleotide
  Sense strand starting at position 646 of SEQ ID NO: 522
gacuuuaguggucagcagu

SEQ ID NO: 43673 - RNA, 19 nt, Artificial Sequence
  Description of Artificial Sequence: Synthetic oligonucleotide
  Antisense strand to SEQ ID NO: 43592
acugcugaccacuaaaguc

SEQ ID NO: 43674 - RNA, 19 nt, Artificial Sequence
  Description of Artificial Sequence: Synthetic oligonucleotide
  Sense strand starting at position 672 of SEQ ID NO: 522
cagcgcagucugucuugaa

SEQ ID NO: 43675 - RNA, 19 nt, Artificial Sequence
  Description of Artificial Sequence: Synthetic oligonucleotide
  Antisense strand to SEQ ID NO: 43594
uucaagacagacugcgcug

SEQ ID NO: 43676 - RNA, 19 nt, Artificial Sequence
  Description of Artificial Sequence: Synthetic oligonucleotide
  Sense strand starting at position 676 of SEQ ID NO: 522
gcagucugucuugaacuca

SEQ ID NO: 43677 - RNA, 19 nt, Artificial Sequence
  Description of Artificial Sequence: Synthetic oligonucleotide
  Antisense strand to SEQ ID NO: 43596
ugaguucaagacagacugc

SEQ ID NO: 43678 - RNA, 19 nt, Artificial Sequence
  Description of Artificial Sequence: Synthetic oligonucleotide
  Sense strand starting at position 825 of SEQ ID NO: 522
aaaggugugucuucuacug

SEQ ID NO: 43679 - RNA, 19 nt, Artificial Sequence
  Description of Artificial Sequence: Synthetic oligonucleotide
  Antisense strand to SEQ ID NO: 43598
caguagaagacacaccuuu

SEQ ID NO: 43680 - RNA, 19 nt, Artificial Sequence
  Description of Artificial Sequence: Synthetic oligonucleotide
  Sense strand starting at position 1139 of SEQ ID NO: 522
gcuagugccgguuuguuua

SEQ ID NO: 43681 - RNA, 19 nt, Artificial Sequence
  Description of Artificial Sequence: Synthetic oligonucleotide
  Antisense strand to SEQ ID NO: 43600
uaaacaaaccggcacuagc

SEQ ID NO: 43682 - RNA, 19 nt, Artificial Sequence
  Description of Artificial Sequence: Synthetic oligonucleotide
  Sense strand starting at position 1442 of SEQ ID NO: 522
agccgugucccucaaucua

SEQ ID NO: 43683 - RNA, 19 nt, Artificial Sequence
  Description of Artificial Sequence: Synthetic oligonucleotide
  Antisense strand to SEQ ID NO: 43602
uagauugagggacacggcu

SEQ ID NO: 43684 - RNA, 19 nt, Artificial Sequence
  Description of Artificial Sequence: Synthetic oligonucleotide
  Sense strand starting at position 1969 of SEQ ID NO: 522
gacgaugugcucgagaaga

SEQ ID NO: 43685 - RNA, 19 nt, Artificial Sequence
  Description of Artificial Sequence: Synthetic oligonucleotide
  Antisense strand to SEQ ID NO: 43604
ucuucucgagcacaucguc

SEQ ID NO: 43686 - RNA, 19 nt, Artificial Sequence
  Description of Artificial Sequence: Synthetic oligonucleotide
  Sense strand starting at position 1971 of SEQ ID NO: 522
cgaugugcucgagaagacu

SEQ ID NO: 43687 - RNA, 19 nt, Artificial Sequence
  Description of Artificial Sequence: Synthetic oligonucleotide
  Antisense strand to SEQ ID NO: 43606
agucuucucgagcacaucg

SEQ ID NO: 43688 - RNA, 19 nt, Artificial Sequence
  Description of Artificial Sequence: Synthetic oligonucleotide
  Sense strand starting at position 2124 of SEQ ID NO: 522
guuucuucgggcuugcuua

SEQ ID NO: 43689 - RNA, 19 nt, Artificial Sequence
  Description of Artificial Sequence: Synthetic oligonucleotide
  Antisense strand to SEQ ID NO: 43608
uaagcaagcccgaagaaac

SEQ ID NO: 43690 - RNA, 19 nt, Artificial Sequence
  Description of Artificial Sequence: Synthetic oligonucleotide
  Sense strand starting at position 2224 of SEQ ID NO: 522
aggccacuuccuggaugau

SEQ ID NO: 43691 - RNA, 19 nt, Artificial Sequence
  Description of Artificial Sequence: Synthetic oligonucleotide
  Antisense strand to SEQ ID NO: 43610
aucauccaggaaguggccu

SEQ ID NO: 43692 - RNA, 19 nt, Artificial Sequence
  Description of Artificial Sequence: Synthetic oligonucleotide
  Sense strand starting at position 2274 of SEQ ID NO: 522
gagcaaugauugccacaag

SEQ ID NO: 43693 - RNA, 19 nt, Artificial Sequence
  Description of Artificial Sequence: Synthetic oligonucleotide
  Antisense strand to SEQ ID NO: 43612
cuuguggcaaucauugcuc

SEQ ID NO: 43694 - RNA, 19 nt, Artificial Sequence
  Description of Artificial Sequence: Synthetic oligonucleotide
  Sense strand starting at position 2421 of SEQ ID NO: 522
agguguagcuauuccagaa

SEQ ID NO: 43695 - RNA, 19 nt, Artificial Sequence
  Description of Artificial Sequence: Synthetic oligonucleotide
  Antisense strand to SEQ ID NO: 43614
uucuggaauagcuacaccu

SEQ ID NO: 43696 - RNA, 19 nt, Artificial Sequence
  Description of Artificial Sequence: Synthetic oligonucleotide
  Sense strand starting at position 2425 of SEQ ID NO: 522
guagcuauuccagaagcuc

SEQ ID NO: 43697 - RNA, 19 nt, Artificial Sequence
  Description of Artificial Sequence: Synthetic oligonucleotide
  Antisense strand to SEQ ID NO: 43616
gagcuucuggaauagcuac

SEQ ID NO: 43698 - RNA, 19 nt, Artificial Sequence
  Description of Artificial Sequence: Synthetic oligonucleotide
  Sense strand starting at position 2465 of SEQ ID NO: 522
ggguaaagguucccaagag

SEQ ID NO: 43699 - RNA, 19 nt, Artificial Sequence
  Description of Artificial Sequence: Synthetic oligonucleotide
  Antisense strand to SEQ ID NO: 43618
cucuugggaaccuuuaccc

SEQ ID NO: 43700 - RNA, 19 nt, Artificial Sequence
  Description of Artificial Sequence: Synthetic oligonucleotide
  Sense strand starting at position 2679 of SEQ ID NO: 522
uuaagacuaccgcaauaga

SEQ ID NO: 43701 - RNA, 19 nt, Artificial Sequence
  Description of Artificial Sequence: Synthetic oligonucleotide
  Antisense strand to SEQ ID NO: 43620
ucuauugcgguagucuuaa

SEQ ID NO: 43702 - RNA, 19 nt, Artificial Sequence
  Description of Artificial Sequence: Synthetic oligonucleotide
  Sense strand starting at position 2693 of SEQ ID NO: 522
auagaaacuuaccucguuu

SEQ ID NO: 43703 - RNA, 19 nt, Artificial Sequence
  Description of Artificial Sequence: Synthetic oligonucleotide
  Antisense strand to SEQ ID NO: 43622
aaacgagguaaguuucuau

SEQ ID NO: 43704 - RNA, 19 nt, Artificial Sequence
  Description of Artificial Sequence: Synthetic oligonucleotide
  Sense strand starting at position 2695 of SEQ ID NO: 522
agaaacuuaccucguuugu

SEQ ID NO: 43705 - RNA, 19 nt, Artificial Sequence
  Description of Artificial Sequence: Synthetic oligonucleotide
  Antisense strand to SEQ ID NO: 43624
acaaacgagguaaguuucu

SEQ ID NO: 43706 - RNA, 19 nt, Artificial Sequence
  Description of Artificial Sequence: Synthetic oligonucleotide
  Sense strand starting at position 2856 of SEQ ID NO: 522
gaguucgaaacucguuuga

SEQ ID NO: 43707 - RNA, 19 nt, Artificial Sequence
  Description of Artificial Sequence: Synthetic oligonucleotide
  Antisense strand to SEQ ID NO: 43626
ucaaacgaguuucgaacuc

SEQ ID NO: 43708 - RNA, 19 nt, Artificial Sequence
  Description of Artificial Sequence: Synthetic oligonucleotide
  Sense strand starting at position 2858 of SEQ ID NO: 522
guucgaaacucguuugaaa

SEQ ID NO: 43709 - RNA, 19 nt, Artificial Sequence
  Description of Artificial Sequence: Synthetic oligonucleotide
  Antisense strand to SEQ ID NO: 43628
uuucaaacgaguuucgaac

SEQ ID NO: 43710 - RNA, 19 nt, Artificial Sequence
  Description of Artificial Sequence: Synthetic oligonucleotide
  Sense strand starting at position 3158 of SEQ ID NO: 522
aaaguaugauagccuuaga

SEQ ID NO: 43711 - RNA, 19 nt, Artificial Sequence
  Description of Artificial Sequence: Synthetic oligonucleotide
  Antisense strand to SEQ ID NO: 43630
ucuaaggcuaucauacuuu

SEQ ID NO: 43712 - RNA, 19 nt, Artificial Sequence
  Description of Artificial Sequence: Synthetic oligonucleotide
  Sense strand starting at position 3161 of SEQ ID NO: 522
guaugauagccuuagaggc

SEQ ID NO: 43713 - RNA, 19 nt, Artificial Sequence
  Description of Artificial Sequence: Synthetic oligonucleotide
  Antisense strand to SEQ ID NO: 43632
gccucuaaggcuaucauac

SEQ ID NO: 43714 - RNA, 19 nt, Artificial Sequence
  Description of Artificial Sequence: Synthetic oligonucleotide
  Sense strand starting at position 3168 of SEQ ID NO: 522
agccuuagaggccaucaaa

SEQ ID NO: 43715 - RNA, 19 nt, Artificial Sequence
  Description of Artificial Sequence: Synthetic oligonucleotide
  Antisense strand to SEQ ID NO: 43634
uuugauggccucuaaggcu

SEQ ID NO: 43716 - RNA, 19 nt, Artificial Sequence
  Description of Artificial Sequence: Synthetic oligonucleotide
  Sense strand starting at position 3375 of SEQ ID NO: 522
cuagacuugaggugucuau

SEQ ID NO: 43717 - RNA, 19 nt, Artificial Sequence
  Description of Artificial Sequence: Synthetic oligonucleotide
  Antisense strand to SEQ ID NO: 43636
auagacaccucaagucuag

SEQ ID NO: 43718 - RNA, 19 nt, Artificial Sequence
  Description of Artificial Sequence: Synthetic oligonucleotide
  Sense strand starting at position 3379 of SEQ ID NO: 522
acuugaggugucuauugaa

SEQ ID NO: 43719 - RNA, 19 nt, Artificial Sequence
  Description of Artificial Sequence: Synthetic oligonucleotide
  Antisense strand to SEQ ID NO: 43638
uucaauagacaccucaagu

SEQ ID NO: 43720 - RNA, 19 nt, Artificial Sequence
  Description of Artificial Sequence: Synthetic oligonucleotide
  Sense strand starting at position 3414 of SEQ ID NO: 522
caggcagcucuugacuauu

SEQ ID NO: 43721 - RNA, 19 nt, Artificial Sequence
  Description of Artificial Sequence: Synthetic oligonucleotide
  Antisense strand to SEQ ID NO: 43640
aauagucaagagcugccug

SEQ ID NO: 43722 - RNA, 19 nt, Artificial Sequence
  Description of Artificial Sequence: Synthetic oligonucleotide
  Sense strand starting at position 3417 of SEQ ID NO: 522
gcagcucuugacuauugua

SEQ ID NO: 43723 - RNA, 19 nt, Artificial Sequence
  Description of Artificial Sequence: Synthetic oligonucleotide
  Antisense strand to SEQ ID NO: 43642
uacaauagucaagagcugc

SEQ ID NO: 43724 - RNA, 19 nt, Artificial Sequence
  Description of Artificial Sequence: Synthetic oligonucleotide
  Sense strand starting at position 3694 of SEQ ID NO: 522
uugaauuccugcucuggaa

SEQ ID NO: 43725 - RNA, 19 nt, Artificial Sequence
  Description of Artificial Sequence: Synthetic oligonucleotide
  Antisense strand to SEQ ID NO: 43644
uuccagagcaggaauucaa

SEQ ID NO: 43726 - RNA, 19 nt, Artificial Sequence
  Description of Artificial Sequence: Synthetic oligonucleotide
  Sense strand starting at position 3706 of SEQ ID NO: 522
ucuggaaggcccuguucua

SEQ ID NO: 43727 - RNA, 19 nt, Artificial Sequence
  Description of Artificial Sequence: Synthetic oligonucleotide
  Antisense strand to SEQ ID NO: 43646
uagaacagggccuuccaga

SEQ ID NO: 43728 - RNA, 19 nt, Artificial Sequence
  Description of Artificial Sequence: Synthetic oligonucleotide
  Sense strand starting at position 3733 of SEQ ID NO: 522
ggcugcaacagugaauaga

SEQ ID NO: 43729 - RNA, 19 nt, Artificial Sequence
  Description of Artificial Sequence: Synthetic oligonucleotide
  Antisense strand to SEQ ID NO: 43648
ucuauucacuguugcagcc

SEQ ID NO: 43730 - RNA, 19 nt, Artificial Sequence
  Description of Artificial Sequence: Synthetic oligonucleotide
  Sense strand starting at position 3774 of SEQ ID NO: 522
aacuuauuagugcaagggu

SEQ ID NO: 43731 - RNA, 19 nt, Artificial Sequence
  Description of Artificial Sequence: Synthetic oligonucleotide
  Antisense strand to SEQ ID NO: 43650
acccuugcacuaauaaguu

SEQ ID NO: 43732 - RNA, 19 nt, Artificial Sequence
  Description of Artificial Sequence: Synthetic oligonucleotide
  Sense strand starting at position 3832 of SEQ ID NO: 522
aguuauaaagaguacugua

SEQ ID NO: 43733 - RNA, 19 nt, Artificial Sequence
  Description of Artificial Sequence: Synthetic oligonucleotide
  Antisense strand to SEQ ID NO: 43652
uacaguacucuuuauaacu

SEQ ID NO: 43734 - RNA, 19 nt, Artificial Sequence
  Description of Artificial Sequence: Synthetic oligonucleotide
  Sense strand starting at position 3972 of SEQ ID NO: 522
agcuauacauacuugggaa

SEQ ID NO: 43735 - RNA, 19 nt, Artificial Sequence
  Description of Artificial Sequence: Synthetic oligonucleotide
  Antisense strand to SEQ ID NO: 43654
uucccaaguauguauagcu

SEQ ID NO: 43736 - RNA, 19 nt, Artificial Sequence
  Description of Artificial Sequence: Synthetic oligonucleotide
  Sense strand starting at position 3976 of SEQ ID NO: 522
auacauacuugggaaagaa

SEQ ID NO: 43737 - RNA, 19 nt, Artificial Sequence
  Description of Artificial Sequence: Synthetic oligonucleotide
  Antisense strand to SEQ ID NO: 43656
uucuuucccaaguauguau

SEQ ID NO: 43738 - RNA, 19 nt, Artificial Sequence
  Description of Artificial Sequence: Synthetic oligonucleotide
  Sense strand starting at position 3962 of SEQ ID NO: 523
agguuaguguuaccuccuu

SEQ ID NO: 43739 - RNA, 19 nt, Artificial Sequence
  Description of Artificial Sequence: Synthetic oligonucleotide
  Antisense strand to SEQ ID NO: 43658
aaggagguaacacuaaccu

SEQ ID NO: 43740 - RNA, 19 nt, Artificial Sequence
  Description of Artificial Sequence: Synthetic oligonucleotide
  Sense strand starting at position 3951 of SEQ ID NO: 523
gaaagaguuccagguuagu

SEQ ID NO: 43741 - RNA, 19 nt, Artificial Sequence
  Description of Artificial Sequence: Synthetic oligonucleotide
  Antisense strand to SEQ ID NO: 43660
acuaaccuggaacucuuuc

SEQ ID NO: 43742 - RNA, 19 nt, Artificial Sequence
  Description of Artificial Sequence: Synthetic oligonucleotide
  Sense strand starting at position 3949 of SEQ ID NO: 523
cagaaagaguuccagguua

SEQ ID NO: 43743 - RNA, 19 nt, Artificial Sequence
  Description of Artificial Sequence: Synthetic oligonucleotide
  Antisense strand to SEQ ID NO: 43662
uaaccuggaacucuuucug

SEQ ID NO: 43744 - RNA, 19 nt, Artificial Sequence
  Description of Artificial Sequence: Synthetic oligonucleotide
  Sense strand starting at position 2365 of SEQ ID NO: 523
agaaucuguccuggccaga

SEQ ID NO: 43745 - RNA, 19 nt, Artificial Sequence
  Description of Artificial Sequence: Synthetic oligonucleotide
  Antisense strand to SEQ ID NO: 43664
ucuggccaggacagauucu

SEQ ID NO: 43746 - RNA, 19 nt, Artificial Sequence
  Description of Artificial Sequence: Synthetic oligonucleotide
  Sense strand starting at position 2263 of SEQ ID NO: 523
gcuguucccuaaggaggau

SEQ ID NO: 43747 - RNA, 19 nt, Artificial Sequence
  Description of Artificial Sequence: Synthetic oligonucleotide
  Antisense strand to SEQ ID NO: 43666
auccuccuuagggaacagc

SEQ ID NO: 43748 - RNA, 19 nt, Artificial Sequence
  Description of Artificial Sequence: Synthetic oligonucleotide
  Sense strand starting at position 2260 of SEQ ID NO: 523
ggagcuguucccuaaggag

SEQ ID NO: 43749 - RNA, 19 nt, Artificial Sequence
  Description of Artificial Sequence: Synthetic oligonucleotide
  Antisense strand to SEQ ID NO: 43668
cuccuuagggaacagcucc

SEQ ID NO: 43750 - RNA, 19 nt, Artificial Sequence
  Description of Artificial Sequence: Synthetic oligonucleotide
  Sense strand starting at position 2226 of SEQ ID NO: 523
gcacaaggcugagcucaau

SEQ ID NO: 43751 - RNA, 19 nt, Artificial Sequence
  Description of Artificial Sequence: Synthetic oligonucleotide
  Antisense strand to SEQ ID NO: 43670
auugagcucagccuugugc

SEQ ID NO: 43752 - RNA, 19 nt, Artificial Sequence
  Description of Artificial Sequence: Synthetic oligonucleotide
  Sense strand starting at position 2002 of SEQ ID NO: 523
aguguauccucagucagag

SEQ ID NO: 43753 - RNA, 19 nt, Artificial Sequence
  Description of Artificial Sequence: Synthetic oligonucleotide
  Antisense strand to SEQ ID NO: 43672
cucugacugaggauacacu

SEQ ID NO: 43754 - RNA, 19 nt, Artificial Sequence
  Description of Artificial Sequence: Synthetic oligonucleotide
  Sense strand starting at position 1999 of SEQ ID NO: 523
cauaguguauccucaguca

SEQ ID NO: 43755 - RNA, 19 nt, Artificial Sequence
  Description of Artificial Sequence: Synthetic oligonucleotide
  Antisense strand to SEQ ID NO: 43674
ugacugaggauacacuaug

SEQ ID NO: 43756 - RNA, 19 nt, Artificial Sequence
  Description of Artificial Sequence: Synthetic oligonucleotide
  Sense strand starting at position 1997 of SEQ ID NO: 523
gccauaguguauccucagu

SEQ ID NO: 43757 - RNA, 19 nt, Artificial Sequence
  Description of Artificial Sequence: Synthetic oligonucleotide
  Antisense strand to SEQ ID NO: 43676
acugaggauacacuauggc

SEQ ID NO: 43758 - RNA, 19 nt, Artificial Sequence
  Description of Artificial Sequence: Synthetic oligonucleotide
  Sense strand starting at position 1641 of SEQ ID NO: 523
caguaacaugcugguacau

SEQ ID NO: 43759 - RNA, 19 nt, Artificial Sequence
  Description of Artificial Sequence: Synthetic oligonucleotide
  Antisense strand to SEQ ID NO: 43678
auguaccagcauguuacug

SEQ ID NO: 43760 - RNA, 19 nt, Artificial Sequence
  Description of Artificial Sequence: Synthetic oligonucleotide
  Sense strand starting at position 1640 of SEQ ID NO: 523
ccaguaacaugcugguaca

SEQ ID NO: 43761 - RNA, 19 nt, Artificial Sequence
  Description of Artificial Sequence: Synthetic oligonucleotide
  Antisense strand to SEQ ID NO: 43680
uguaccagcauguuacugg

SEQ ID NO: 43762 - RNA, 19 nt, Artificial Sequence
  Description of Artificial Sequence: Synthetic oligonucleotide
  Sense strand starting at position 1492 of SEQ ID NO: 523
cugugaugggcauaaacau

SEQ ID NO: 43763 - RNA, 19 nt, Artificial Sequence
  Description of Artificial Sequence: Synthetic oligonucleotide
  Antisense strand to SEQ ID NO: 43682
auguuuaugcccaucacag

SEQ ID NO: 43764 - RNA, 19 nt, Artificial Sequence
  Description of Artificial Sequence: Synthetic oligonucleotide
  Sense strand starting at position 1481 of SEQ ID NO: 523
gcugaucuuggcugugaug

SEQ ID NO: 43765 - RNA, 19 nt, Artificial Sequence
  Description of Artificial Sequence: Synthetic oligonucleotide
  Antisense strand to SEQ ID NO: 43684
caucacagccaagaucagc

SEQ ID NO: 43766 - RNA, 19 nt, Artificial Sequence
  Description of Artificial Sequence: Synthetic oligonucleotide
  Sense strand starting at position 1480 of SEQ ID NO: 523
ggcugaucuuggcugugau

SEQ ID NO: 43767 - RNA, 19 nt, Artificial Sequence
  Description of Artificial Sequence: Synthetic oligonucleotide
  Antisense strand to SEQ ID NO: 43686
aucacagccaagaucagcc

SEQ ID NO: 43768 - RNA, 19 nt, Artificial Sequence
  Description of Artificial Sequence: Synthetic oligonucleotide
  Sense strand starting at position 1397 of SEQ ID NO: 523
uagaguguucagugauagg

SEQ ID NO: 43769 - RNA, 19 nt, Artificial Sequence
  Description of Artificial Sequence: Synthetic oligonucleotide
  Antisense strand to SEQ ID NO: 43688
ccuaucacugaacacucua

SEQ ID NO: 43770 - RNA, 19 nt, Artificial Sequence
  Description of Artificial Sequence: Synthetic oligonucleotide
  Sense strand starting at position 1348 of SEQ ID NO: 523
gagagucugggaugccuau

SEQ ID NO: 43771 - RNA, 19 nt, Artificial Sequence
  Description of Artificial Sequence: Synthetic oligonucleotide
  Antisense strand to SEQ ID NO: 43690
auaggcaucccagacucuc

SEQ ID NO: 43772 - RNA, 19 nt, Artificial Sequence
  Description of Artificial Sequence: Synthetic oligonucleotide
  Sense strand starting at position 1270 of SEQ ID NO: 523
agacucagguacucaaauu

SEQ ID NO: 43773 - RNA, 19 nt, Artificial Sequence
  Description of Artificial Sequence: Synthetic oligonucleotide
  Antisense strand to SEQ ID NO: 43692
aauuugaguaccugagucu

SEQ ID NO: 43774 - RNA, 19 nt, Artificial Sequence
  Description of Artificial Sequence: Synthetic oligonucleotide
  Sense strand starting at position 1224 of SEQ ID NO: 523
ucagcugagagcuaagagu

SEQ ID NO: 43775 - RNA, 19 nt, Artificial Sequence
  Description of Artificial Sequence: Synthetic oligonucleotide
  Antisense strand to SEQ ID NO: 43694
acucuuagcucucagcuga

SEQ ID NO: 43776 - RNA, 19 nt, Artificial Sequence
  Description of Artificial Sequence: Synthetic oligonucleotide
  Sense strand starting at position 714 of SEQ ID NO: 523
ugauuauaggcacgugcua

SEQ ID NO: 43777 - RNA, 19 nt, Artificial Sequence
  Description of Artificial Sequence: Synthetic oligonucleotide
  Antisense strand to SEQ ID NO: 43696
uagcacgugccuauaauca

SEQ ID NO: 43778 - RNA, 19 nt, Artificial Sequence
  Description of Artificial Sequence: Synthetic oligonucleotide
  Sense strand starting at position 418 of SEQ ID NO: 523
gcuguaucccaagaauauu

SEQ ID NO: 43779 - RNA, 19 nt, Artificial Sequence
  Description of Artificial Sequence: Synthetic oligonucleotide
  Antisense strand to SEQ ID NO: 43698
aauauucuugggauacagc

SEQ ID NO: 43780 - RNA, 19 nt, Artificial Sequence
  Description of Artificial Sequence: Synthetic oligonucleotide
  Sense strand starting at position 415 of SEQ ID NO: 523
ccugcuguaucccaagaau

SEQ ID NO: 43781 - RNA, 19 nt, Artificial Sequence
  Description of Artificial Sequence: Synthetic oligonucleotide
  Antisense strand to SEQ ID NO: 43700
auucuugggauacagcagg

SEQ ID NO: 43782 - RNA, 19 nt, Artificial Sequence
  Description of Artificial Sequence: Synthetic oligonucleotide
  Sense strand starting at position 391 of SEQ ID NO: 523
acuagaaacuagugcauua

SEQ ID NO: 43783 - RNA, 19 nt, Artificial Sequence
  Description of Artificial Sequence: Synthetic oligonucleotide
  Antisense strand to SEQ ID NO: 43702
uaaugcacuaguuucuagu

SEQ ID NO: 43784 - RNA, 19 nt, Artificial Sequence
  Description of Artificial Sequence: Synthetic oligonucleotide
  Sense strand starting at position 53 of SEQ ID NO: 523
gggucucaguacuaaccau

SEQ ID NO: 43785 - RNA, 19 nt, Artificial Sequence
  Description of Artificial Sequence: Synthetic oligonucleotide
  Antisense strand to SEQ ID NO: 43704
augguuaguacugagaccc

SEQ ID NO: 43786 - RNA, 19 nt, Artificial Sequence
  Description of Artificial Sequence: Synthetic oligonucleotide
  Sense strand starting at position 27 of SEQ ID NO: 523
cugaguaagucuggaaauc

SEQ ID NO: 43787 - RNA, 19 nt, Artificial Sequence
  Description of Artificial Sequence: Synthetic oligonucleotide
  Antisense strand to SEQ ID NO: 43706
gauuuccagacuuacucag

SEQ ID NO: 43788 - RNA, 19 nt, Artificial Sequence
  Description of Artificial Sequence: Synthetic oligonucleotide
  Sense strand starting at position 20 of SEQ ID NO: 523
guaagugcugaguaagucu

SEQ ID NO: 43789 - RNA, 19 nt, Artificial Sequence
  Description of Artificial Sequence: Synthetic oligonucleotide
  Antisense strand to SEQ ID NO: 43708
agacuuacucagcacuuac

SEQ ID NO: 43790 - RNA, 19 nt, Artificial Sequence
  Description of Artificial Sequence: Synthetic oligonucleotide
  Sense strand starting at position 18 of SEQ ID NO: 523
ggguaagugcugaguaagu

SEQ ID NO: 43791 - RNA, 19 nt, Artificial Sequence
  Description of Artificial Sequence: Synthetic oligonucleotide
  Antisense strand to SEQ ID NO: 43710
acuuacucagcacuuaccc

SEQ ID NO: 43792 - RNA, 19 nt, Artificial Sequence
  Description of Artificial Sequence: Synthetic oligonucleotide
  Sense strand starting at position 17 of SEQ ID NO: 523
uggguaagugcugaguaag

SEQ ID NO: 43793 - RNA, 19 nt, Artificial Sequence
  Description of Artificial Sequence: Synthetic oligonucleotide
  Antisense strand to SEQ ID NO: 43712
cuuacucagcacuuaccca

SEQ ID NO: 43794 - RNA, 19 nt, Artificial Sequence
  Description of Artificial Sequence: Synthetic oligonucleotide
  Sense strand starting at position 16 of SEQ ID NO: 523
cuggguaagugcugaguaa

SEQ ID NO: 43795 - RNA, 19 nt, Artificial Sequence
  Description of Artificial Sequence: Synthetic oligonucleotide
  Antisense strand to SEQ ID NO: 43714
uuacucagcacuuacccag

SEQ ID NO: 43796 - RNA, 19 nt, Artificial Sequence
  Description of Artificial Sequence: Synthetic oligonucleotide
  Sense strand starting at position 7 of SEQ ID NO: 523
aagugcugucuggguaagu

SEQ ID NO: 43797 - RNA, 19 nt, Artificial Sequence
  Description of Artificial Sequence: Synthetic oligonucleotide
  Antisense strand to SEQ ID NO: 43716
acuuacccagacagcacuu

SEQ ID NO: 43798 - RNA, 19 nt, Artificial Sequence
  Description of Artificial Sequence: Synthetic oligonucleotide
  Sense strand starting at position 5 of SEQ ID NO: 523
ucaagugcugucuggguaa

SEQ ID NO: 43799 - RNA, 19 nt, Artificial Sequence
  Description of Artificial Sequence: Synthetic oligonucleotide
  Antisense strand to SEQ ID NO: 43718
uuacccagacagcacuuga

SEQ ID NO: 43800 - RNA, 19 nt, Artificial Sequence
  Description of Artificial Sequence: Synthetic oligonucleotide
  Sense strand starting at position 3845 of SEQ ID NO: 524
ucaagauuaugucccaaga

SEQ ID NO: 43801 - RNA, 19 nt, Artificial Sequence
  Description of Artificial Sequence: Synthetic oligonucleotide
  Antisense strand to SEQ ID NO: 43720
ucuugggacauaaucuuga

SEQ ID NO: 43802 - RNA, 19 nt, Artificial Sequence
  Description of Artificial Sequence: Synthetic oligonucleotide
  Sense strand starting at position 3813 of SEQ ID NO: 524
gaaguuccuagagguuuga

SEQ ID NO: 43803 - RNA, 19 nt, Artificial Sequence
  Description of Artificial Sequence: Synthetic oligonucleotide
  Antisense strand to SEQ ID NO: 43722
ucaaaccucuaggaacuuc

SEQ ID NO: 43804 - RNA, 19 nt, Artificial Sequence
  Description of Artificial Sequence: Synthetic oligonucleotide
  Sense strand starting at position 3809 of SEQ ID NO: 524
auuugaaguuccuagaggu

SEQ ID NO: 43805 - RNA, 19 nt, Artificial Sequence
  Description of Artificial Sequence: Synthetic oligonucleotide
  Antisense strand to SEQ ID NO: 43724
accucuaggaacuucaaau

SEQ ID NO: 43806 - RNA, 19 nt, Artificial Sequence
  Description of Artificial Sequence: Synthetic oligonucleotide
  Sense strand starting at position 3790 of SEQ ID NO: 524
ucaucuggcucauuaauag

SEQ ID NO: 43807 - RNA, 19 nt, Artificial Sequence
  Description of Artificial Sequence: Synthetic oligonucleotide
  Antisense strand to SEQ ID NO: 43726
cuauuaaugagccagauga

SEQ ID NO: 43808 - RNA, 19 nt, Artificial Sequence
  Description of Artificial Sequence: Synthetic oligonucleotide
  Sense strand starting at position 3748 of SEQ ID NO: 524
cuguuuaaguacuuaucua

SEQ ID NO: 43809 - RNA, 19 nt, Artificial Sequence
  Description of Artificial Sequence: Synthetic oligonucleotide
  Antisense strand to SEQ ID NO: 43728
uagauaaguacuuaaacag

SEQ ID NO: 43810 - RNA, 19 nt, Artificial Sequence
  Description of Artificial Sequence: Synthetic oligonucleotide
  Sense strand starting at position 3744 of SEQ ID NO: 524
acuucuguuuaaguacuua

SEQ ID NO: 43811 - RNA, 19 nt, Artificial Sequence
  Description of Artificial Sequence: Synthetic oligonucleotide
  Antisense strand to SEQ ID NO: 43730
uaaguacuuaaacagaagu

SEQ ID NO: 43812 - RNA, 19 nt, Artificial Sequence
  Description of Artificial Sequence: Synthetic oligonucleotide
  Sense strand starting at position 3666 of SEQ ID NO: 524
uuacuuccucugugaagaa

SEQ ID NO: 43813 - RNA, 19 nt, Artificial Sequence
  Description of Artificial Sequence: Synthetic oligonucleotide
  Antisense strand to SEQ ID NO: 43732
uucuucacagaggaaguaa

SEQ ID NO: 43814 - RNA, 19 nt, Artificial Sequence
  Description of Artificial Sequence: Synthetic oligonucleotide
  Sense strand starting at position 3665 of SEQ ID NO: 524
auuacuuccucugugaaga

SEQ ID NO: 43815 - RNA, 19 nt, Artificial Sequence
  Description of Artificial Sequence: Synthetic oligonucleotide
  Antisense strand to SEQ ID NO: 43734
ucuucacagaggaaguaau

SEQ ID NO: 43816 - RNA, 19 nt, Artificial Sequence
  Description of Artificial Sequence: Synthetic oligonucleotide
  Sense strand starting at position 3662 of SEQ ID NO: 524
aguauuacuuccucuguga

SEQ ID NO: 43817 - RNA, 19 nt, Artificial Sequence
  Description of Artificial Sequence: Synthetic oligonucleotide
  Antisense strand to SEQ ID NO: 43736
ucacagaggaaguaauacu

SEQ ID NO: 43818 - RNA, 19 nt, Artificial Sequence
  Description of Artificial Sequence: Synthetic oligonucleotide
  Sense strand starting at position 3588 of SEQ ID NO: 524
gucuacuuaccucauagca

SEQ ID NO: 43819 - RNA, 19 nt, Artificial Sequence
  Description of Artificial Sequence: Synthetic oligonucleotide
  Antisense strand to SEQ ID NO: 43738
ugcuaugagguaaguagac

SEQ ID NO: 43820 - RNA, 19 nt, Artificial Sequence
  Description of Artificial Sequence: Synthetic oligonucleotide
  Sense strand starting at position 3271 of SEQ ID NO: 524
ugccucauuugagacagaa

SEQ ID NO: 43821 - RNA, 19 nt, Artificial Sequence
  Description of Artificial Sequence: Synthetic oligonucleotide
  Antisense strand to SEQ ID NO: 43740
uucugucucaaaugaggca

SEQ ID NO: 43822 - RNA, 19 nt, Artificial Sequence
  Description of Artificial Sequence: Synthetic oligonucleotide
  Sense strand starting at position 3150 of SEQ ID NO: 524
uaugucagaugguuugaau

SEQ ID NO: 43823 - RNA, 19 nt, Artificial Sequence
  Description of Artificial Sequence: Synthetic oligonucleotide
  Antisense strand to SEQ ID NO: 43742
auucaaaccaucugacaua

SEQ ID NO: 43824 - RNA, 19 nt, Artificial Sequence
  Description of Artificial Sequence: Synthetic oligonucleotide
  Sense strand starting at position 3147 of SEQ ID NO: 524
ucuuaugucagaugguuug

SEQ ID NO: 43825 - RNA, 19 nt, Artificial Sequence
  Description of Artificial Sequence: Synthetic oligonucleotide
  Antisense strand to SEQ ID NO: 43744
caaaccaucugacauaaga

SEQ ID NO: 43826 - RNA, 19 nt, Artificial Sequence
  Description of Artificial Sequence: Synthetic oligonucleotide
  Sense strand starting at position 3141 of SEQ ID NO: 524
cucacuucuuaugucagau

SEQ ID NO: 43827 - RNA, 19 nt, Artificial Sequence
  Description of Artificial Sequence: Synthetic oligonucleotide
  Antisense strand to SEQ ID NO: 43746
aucugacauaagaagugag

SEQ ID NO: 43828 - RNA, 19 nt, Artificial Sequence
  Description of Artificial Sequence: Synthetic oligonucleotide
  Sense strand starting at position 3126 of SEQ ID NO: 524
gaggacaccugaucucuca

SEQ ID NO: 43829 - RNA, 19 nt, Artificial Sequence
  Description of Artificial Sequence: Synthetic oligonucleotide
  Antisense strand to SEQ ID NO: 43748
ugagagaucagguguccuc

SEQ ID NO: 43830 - RNA, 19 nt, Artificial Sequence
  Description of Artificial Sequence: Synthetic oligonucleotide
  Sense strand starting at position 2902 of SEQ ID NO: 524
gcaauuacuggugacucuu

SEQ ID NO: 43831 - RNA, 19 nt, Artificial Sequence
  Description of Artificial Sequence: Synthetic oligonucleotide
  Antisense strand to SEQ ID NO: 43750
aagagucaccaguaauugc

SEQ ID NO: 43832 - RNA, 19 nt, Artificial Sequence
  Description of Artificial Sequence: Synthetic oligonucleotide
  Sense strand starting at position 2899 of SEQ ID NO: 524
ugagcaauuacuggugacu

SEQ ID NO: 43833 - RNA, 19 nt, Artificial Sequence
  Description of Artificial Sequence: Synthetic oligonucleotide
  Antisense strand to SEQ ID NO: 43752
agucaccaguaauugcuca

SEQ ID NO: 43834 - RNA, 19 nt, Artificial Sequence
  Description of Artificial Sequence: Synthetic oligonucleotide
  Sense strand starting at position 2874 of SEQ ID NO: 524
gguaguuuccuccauauca

SEQ ID NO: 43835 - RNA, 19 nt, Artificial Sequence
  Description of Artificial Sequence: Synthetic oligonucleotide
  Antisense strand to SEQ ID NO: 43754
ugauauggaggaaacuacc

SEQ ID NO: 43836 - RNA, 19 nt, Artificial Sequence
  Description of Artificial Sequence: Synthetic oligonucleotide
  Sense strand starting at position 2759 of SEQ ID NO: 524
ucucucugaaagggugaau

SEQ ID NO: 43837 - RNA, 19 nt, Artificial Sequence
  Description of Artificial Sequence: Synthetic oligonucleotide
  Antisense strand to SEQ ID NO: 43756
auucacccuuucagagaga

SEQ ID NO: 43838 - RNA, 19 nt, Artificial Sequence
  Description of Artificial Sequence: Synthetic oligonucleotide
  Sense strand starting at position 2758 of SEQ ID NO: 524
gucucucugaaagggugaa

SEQ ID NO: 43839 - RNA, 19 nt, Artificial Sequence
  Description of Artificial Sequence: Synthetic oligonucleotide
  Antisense strand to SEQ ID NO: 43758
uucacccuuucagagagac

SEQ ID NO: 43840 - RNA, 19 nt, Artificial Sequence
  Description of Artificial Sequence: Synthetic oligonucleotide
  Sense strand starting at position 2668 of SEQ ID NO: 524
augucauccagcgagugau

SEQ ID NO: 43841 - RNA, 19 nt, Artificial Sequence
  Description of Artificial Sequence: Synthetic oligonucleotide
  Antisense strand to SEQ ID NO: 43760
aucacucgcuggaugacau

SEQ ID NO: 43842 - RNA, 19 nt, Artificial Sequence
  Description of Artificial Sequence: Synthetic oligonucleotide
  Sense strand starting at position 2615 of SEQ ID NO: 524
gaagaaggcucugugcaau

SEQ ID NO: 43843 - RNA, 19 nt, Artificial Sequence
  Description of Artificial Sequence: Synthetic oligonucleotide
  Antisense strand to SEQ ID NO: 43762
auugcacagagccuucuuc

SEQ ID NO: 43844 - RNA, 19 nt, Artificial Sequence
  Description of Artificial Sequence: Synthetic oligonucleotide
  Sense strand starting at position 2614 of SEQ ID NO: 524
ugaagaaggcucugugcaa

SEQ ID NO: 43845 - RNA, 19 nt, Artificial Sequence
  Description of Artificial Sequence: Synthetic oligonucleotide
  Antisense strand to SEQ ID NO: 43764
uugcacagagccuucuuca

SEQ ID NO: 43846 - RNA, 19 nt, Artificial Sequence
  Description of Artificial Sequence: Synthetic oligonucleotide
  Sense strand starting at position 2519 of SEQ ID NO: 524
gaaggagcccucgaguuac

SEQ ID NO: 43847 - RNA, 19 nt, Artificial Sequence
  Description of Artificial Sequence: Synthetic oligonucleotide
  Antisense strand to SEQ ID NO: 43766
guaacucgagggcuccuuc

SEQ ID NO: 43848 - RNA, 19 nt, Artificial Sequence
  Description of Artificial Sequence: Synthetic oligonucleotide
  Sense strand starting at position 2225 of SEQ ID NO: 524
gggaauuaaggcuggaacu

SEQ ID NO: 43849 - RNA, 19 nt, Artificial Sequence
  Description of Artificial Sequence: Synthetic oligonucleotide
  Antisense strand to SEQ ID NO: 43768
aguuccagccuuaauuccc

SEQ ID NO: 43850 - RNA, 19 nt, Artificial Sequence
  Description of Artificial Sequence: Synthetic oligonucleotide
  Sense strand starting at position 2170 of SEQ ID NO: 524
gggacuuccgcagaaagca

SEQ ID NO: 43851 - RNA, 19 nt, Artificial Sequence
  Description of Artificial Sequence: Synthetic oligonucleotide
  Antisense strand to SEQ ID NO: 43770
ugcuuucugcggaaguccc

SEQ ID NO: 43852 - RNA, 19 nt, Artificial Sequence
  Description of Artificial Sequence: Synthetic oligonucleotide
  Sense strand starting at position 2168 of SEQ ID NO: 524
gcgggacuuccgcagaaag

SEQ ID NO: 43853 - RNA, 19 nt, Artificial Sequence
  Description of Artificial Sequence: Synthetic oligonucleotide
  Antisense strand to SEQ ID NO: 43772
cuuucugcggaagucccgc

SEQ ID NO: 43854 - RNA, 19 nt, Artificial Sequence
  Description of Artificial Sequence: Synthetic oligonucleotide
  Sense strand starting at position 1369 of SEQ ID NO: 524
uuccuauucuggguuaaag

SEQ ID NO: 43855 - RNA, 19 nt, Artificial Sequence
  Description of Artificial Sequence: Synthetic oligonucleotide
  Antisense strand to SEQ ID NO: 43774
cuuuaacccagaauaggaa

SEQ ID NO: 43856 - RNA, 19 nt, Artificial Sequence
  Description of Artificial Sequence: Synthetic oligonucleotide
  Sense strand starting at position 1368 of SEQ ID NO: 524
guuccuauucuggguuaaa

SEQ ID NO: 43857 - RNA, 19 nt, Artificial Sequence
  Description of Artificial Sequence: Synthetic oligonucleotide
  Antisense strand to SEQ ID NO: 43776
uuuaacccagaauaggaac

SEQ ID NO: 43858 - RNA, 19 nt, Artificial Sequence
  Description of Artificial Sequence: Synthetic oligonucleotide
  Sense strand starting at position 1297 of SEQ ID NO: 524
uuuccuuggcuggauuaaa

SEQ ID NO: 43859 - RNA, 19 nt, Artificial Sequence
  Description of Artificial Sequence: Synthetic oligonucleotide
  Antisense strand to SEQ ID NO: 43778
uuuaauccagccaaggaaa

SEQ ID NO: 43860 - RNA, 19 nt, Artificial Sequence
  Description of Artificial Sequence: Synthetic oligonucleotide
  Sense strand starting at position 1292 of SEQ ID NO: 524
aauaguuuccuuggcugga

SEQ ID NO: 43861 - RNA, 19 nt, Artificial Sequence
  Description of Artificial Sequence: Synthetic oligonucleotide
  Antisense strand to SEQ ID NO: 43780
uccagccaaggaaacuauu

SEQ ID NO: 43862 - RNA, 19 nt, Artificial Sequence
  Description of Artificial Sequence: Synthetic oligonucleotide
  Sense strand starting at position 1290 of SEQ ID NO: 524
ggaauaguuuccuuggcug

SEQ ID NO: 43863 - RNA, 19 nt, Artificial Sequence
  Description of Artificial Sequence: Synthetic oligonucleotide
  Antisense strand to SEQ ID NO: 43782
cagccaaggaaacuauucc

SEQ ID NO: 43864 - RNA, 19 nt, Artificial Sequence
  Description of Artificial Sequence: Synthetic oligonucleotide
  Sense strand starting at position 1267 of SEQ ID NO: 524
ggccuagcuuacuuauaaa

SEQ ID NO: 43865 - RNA, 19 nt, Artificial Sequence
  Description of Artificial Sequence: Synthetic oligonucleotide
  Antisense strand to SEQ ID NO: 43784
uuuauaaguaagcuaggcc

SEQ ID NO: 43866 - RNA, 19 nt, Artificial Sequence
  Description of Artificial Sequence: Synthetic oligonucleotide
  Sense strand starting at position 1259 of SEQ ID NO: 524
gaaacaucggccuagcuua

SEQ ID NO: 43867 - RNA, 19 nt, Artificial Sequence
  Description of Artificial Sequence: Synthetic oligonucleotide
  Antisense strand to SEQ ID NO: 43786
uaagcuaggccgauguuuc

SEQ ID NO: 43868 - RNA, 19 nt, Artificial Sequence
  Description of Artificial Sequence: Synthetic oligonucleotide
  Sense strand starting at position 912 of SEQ ID NO: 524
ggauucuuaagaugaggca

SEQ ID NO: 43869 - RNA, 19 nt, Artificial Sequence
  Description of Artificial Sequence: Synthetic oligonucleotide
  Antisense strand to SEQ ID NO: 43788
ugccucaucuuaagaaucc

SEQ ID NO: 43870 - RNA, 19 nt, Artificial Sequence
  Description of Artificial Sequence: Synthetic oligonucleotide
  Sense strand starting at position 906 of SEQ ID NO: 524
uuagguggauucuuaagau

SEQ ID NO: 43871 - RNA, 19 nt, Artificial Sequence
  Description of Artificial Sequence: Synthetic oligonucleotide
  Antisense strand to SEQ ID NO: 43790
aucuuaagaauccaccuaa

SEQ ID NO: 43872 - RNA, 19 nt, Artificial Sequence
  Description of Artificial Sequence: Synthetic oligonucleotide
  Sense strand starting at position 845 of SEQ ID NO: 524
ucuuaaucucuuggagacu

SEQ ID NO: 43873 - RNA, 19 nt, Artificial Sequence
  Description of Artificial Sequence: Synthetic oligonucleotide
  Antisense strand to SEQ ID NO: 43792
agucuccaagagauuaaga

SEQ ID NO: 43874 - RNA, 19 nt, Artificial Sequence
  Description of Artificial Sequence: Synthetic oligonucleotide
  Sense strand starting at position 287 of SEQ ID NO: 524
uugcuuagauaccugagaa

SEQ ID NO: 43875 - RNA, 19 nt, Artificial Sequence
  Description of Artificial Sequence: Synthetic oligonucleotide
  Antisense strand to SEQ ID NO: 43794
uucucagguaucuaagcaa

SEQ ID NO: 43876 - RNA, 19 nt, Artificial Sequence
  Description of Artificial Sequence: Synthetic oligonucleotide
  Sense strand starting at position 100 of SEQ ID NO: 524
ggagaagucacugggauuc

SEQ ID NO: 43877 - RNA, 19 nt, Artificial Sequence
  Description of Artificial Sequence: Synthetic oligonucleotide
  Antisense strand to SEQ ID NO: 43796
gaaucccagugacuucucc

SEQ ID NO: 43878 - RNA, 19 nt, Artificial Sequence
  Description of Artificial Sequence: Synthetic oligonucleotide
  Sense strand starting at position 99 of SEQ ID NO: 524
uggagaagucacugggauu

SEQ ID NO: 43879 - RNA, 19 nt, Artificial Sequence
  Description of Artificial Sequence: Synthetic oligonucleotide
  Antisense strand to SEQ ID NO: 43798
aaucccagugacuucucca

SEQ ID NO: 43880 - RNA, 19 nt, Artificial Sequence
  Description of Artificial Sequence: Synthetic oligonucleotide
  Sense strand starting at position 3144 of SEQ ID NO: 525
agcacauuagcaugucuau

SEQ ID NO: 43881 - RNA, 19 nt, Artificial Sequence
  Description of Artificial Sequence: Synthetic oligonucleotide
  Antisense strand to SEQ ID NO: 43800
auagacaugcuaaugugcu

SEQ ID NO: 43882 - RNA, 19 nt, Artificial Sequence
  Description of Artificial Sequence: Synthetic oligonucleotide
  Sense strand starting at position 3102 of SEQ ID NO: 525
aguucuuucggucaaucau

SEQ ID NO: 43883 - RNA, 19 nt, Artificial Sequence
  Description of Artificial Sequence: Synthetic oligonucleotide
  Antisense strand to SEQ ID NO: 43802
augauugaccgaaagaacu

SEQ ID NO: 43884 - RNA, 19 nt, Artificial Sequence
  Description of Artificial Sequence: Synthetic oligonucleotide
  Sense strand starting at position 3100 of SEQ ID NO: 525
caaguucuuucggucaauc

SEQ ID NO: 43885 - RNA, 19 nt, Artificial Sequence
  Description of Artificial Sequence: Synthetic oligonucleotide
  Antisense strand to SEQ ID NO: 43804
gauugaccgaaagaacuug

SEQ ID NO: 43886 - RNA, 19 nt, Artificial Sequence
  Description of Artificial Sequence: Synthetic oligonucleotide
  Sense strand starting at position 3097 of SEQ ID NO: 525
ccgcaaguucuuucgguca

SEQ ID NO: 43887 - RNA, 19 nt, Artificial Sequence
  Description of Artificial Sequence: Synthetic oligonucleotide
  Antisense strand to SEQ ID NO: 43806
ugaccgaaagaacuugcgg

SEQ ID NO: 43888 - RNA, 19 nt, Artificial Sequence
  Description of Artificial Sequence: Synthetic oligonucleotide
  Sense strand starting at position 3057 of SEQ ID NO: 525
aagcuauugcccggaagac

SEQ ID NO: 43889 - RNA, 19 nt, Artificial Sequence
  Description of Artificial Sequence: Synthetic oligonucleotide
  Antisense strand to SEQ ID NO: 43808
gucuuccgggcaauagcuu

SEQ ID NO: 43890 - RNA, 19 nt, Artificial Sequence
  Description of Artificial Sequence: Synthetic oligonucleotide
  Sense strand starting at position 3056 of SEQ ID NO: 525
aaagcuauugcccggaaga

SEQ ID NO: 43891 - RNA, 19 nt, Artificial Sequence
  Description of Artificial Sequence: Synthetic oligonucleotide
  Antisense strand to SEQ ID NO: 43810
ucuuccgggcaauagcuuu

SEQ ID NO: 43892 - RNA, 19 nt, Artificial Sequence
  Description of Artificial Sequence: Synthetic oligonucleotide
  Sense strand starting at position 2699 of SEQ ID NO: 525
agcaaccucuugucaguaa

SEQ ID NO: 43893 - RNA, 19 nt, Artificial Sequence
  Description of Artificial Sequence: Synthetic oligonucleotide
  Antisense strand to SEQ ID NO: 43812
uuacugacaagagguugcu

SEQ ID NO: 43894 - RNA, 19 nt, Artificial Sequence
  Description of Artificial Sequence: Synthetic oligonucleotide
  Sense strand starting at position 2458 of SEQ ID NO: 525
gggaaauauucugaaggcu

SEQ ID NO: 43895 - RNA, 19 nt, Artificial Sequence
  Description of Artificial Sequence: Synthetic oligonucleotide
  Antisense strand to SEQ ID NO: 43814
agccuucagaauauuuccc

SEQ ID NO: 43896 - RNA, 19 nt, Artificial Sequence
  Description of Artificial Sequence: Synthetic oligonucleotide
  Sense strand starting at position 2063 of SEQ ID NO: 525
cgggcaucuccuggagaca

SEQ ID NO: 43897 - RNA, 19 nt, Artificial Sequence
  Description of Artificial Sequence: Synthetic oligonucleotide
  Antisense strand to SEQ ID NO: 43816
ugucuccaggagaugcccg

SEQ ID NO: 43898 - RNA, 19 nt, Artificial Sequence
  Description of Artificial Sequence: Synthetic oligonucleotide
  Sense strand starting at position 2035 of SEQ ID NO: 525
ugagaaauuccaggagcac

SEQ ID NO: 43899 - RNA, 19 nt, Artificial Sequence
  Description of Artificial Sequence: Synthetic oligonucleotide
  Antisense strand to SEQ ID NO: 43818
gugcuccuggaauuucuca

SEQ ID NO: 43900 - RNA, 19 nt, Artificial Sequence
  Description of Artificial Sequence: Synthetic oligonucleotide
  Sense strand starting at position 2023 of SEQ ID NO: 525
cuuagaauacggugagaaa

SEQ ID NO: 43901 - RNA, 19 nt, Artificial Sequence
  Description of Artificial Sequence: Synthetic oligonucleotide
  Antisense strand to SEQ ID NO: 43820
uuucucaccguauucuaag

SEQ ID NO: 43902 - RNA, 19 nt, Artificial Sequence
  Description of Artificial Sequence: Synthetic oligonucleotide
  Sense strand starting at position 1910 of SEQ ID NO: 525
auccuucugcuccgagaag

SEQ ID NO: 43903 - RNA, 19 nt, Artificial Sequence
  Description of Artificial Sequence: Synthetic oligonucleotide
  Antisense strand to SEQ ID NO: 43822
cuucucggagcagaaggau

SEQ ID NO: 43904 - RNA, 19 nt, Artificial Sequence
  Description of Artificial Sequence: Synthetic oligonucleotide
  Sense strand starting at position 1831 of SEQ ID NO: 525
agguucuggugagagaaga

SEQ ID NO: 43905 - RNA, 19 nt, Artificial Sequence
  Description of Artificial Sequence: Synthetic oligonucleotide
  Antisense strand to SEQ ID NO: 43824
ucuucucucaccagaaccu

SEQ ID NO: 43906 - RNA, 19 nt, Artificial Sequence
  Description of Artificial Sequence: Synthetic oligonucleotide
  Sense strand starting at position 1699 of SEQ ID NO: 525
gagugacucacugguauga

SEQ ID NO: 43907 - RNA, 19 nt, Artificial Sequence
  Description of Artificial Sequence: Synthetic oligonucleotide
  Antisense strand to SEQ ID NO: 43826
ucauaccagugagucacuc

SEQ ID NO: 43908 - RNA, 19 nt, Artificial Sequence
  Description of Artificial Sequence: Synthetic oligonucleotide
  Sense strand starting at position 1697 of SEQ ID NO: 525
cugagugacucacugguau

SEQ ID NO: 43909 - RNA, 19 nt, Artificial Sequence
  Description of Artificial Sequence: Synthetic oligonucleotide
  Antisense strand to SEQ ID NO: 43828
auaccagugagucacucag

SEQ ID NO: 43910 - RNA, 19 nt, Artificial Sequence
  Description of Artificial Sequence: Synthetic oligonucleotide
  Sense strand starting at position 1531 of SEQ ID NO: 525
gugguauggguguaaggga

SEQ ID NO: 43911 - RNA, 19 nt, Artificial Sequence
  Description of Artificial Sequence: Synthetic oligonucleotide
  Antisense strand to SEQ ID NO: 43830
ucccuuacacccauaccac

SEQ ID NO: 43912 - RNA, 19 nt, Artificial Sequence
  Description of Artificial Sequence: Synthetic oligonucleotide
  Sense strand starting at position 1527 of SEQ ID NO: 525
ggaagugguauggguguaa

SEQ ID NO: 43913 - RNA, 19 nt, Artificial Sequence
  Description of Artificial Sequence: Synthetic oligonucleotide
  Antisense strand to SEQ ID NO: 43832
uuacacccauaccacuucc

SEQ ID NO: 43914 - RNA, 19 nt, Artificial Sequence
  Description of Artificial Sequence: Synthetic oligonucleotide
  Sense strand starting at position 1464 of SEQ ID NO: 525
ggaaaccuggcaugugaaa

SEQ ID NO: 43915 - RNA, 19 nt, Artificial Sequence
  Description of Artificial Sequence: Synthetic oligonucleotide
  Antisense strand to SEQ ID NO: 43834
uuucacaugccagguuucc

SEQ ID NO: 43916 - RNA, 19 nt, Artificial Sequence
  Description of Artificial Sequence: Synthetic oligonucleotide
  Sense strand starting at position 1402 of SEQ ID NO: 525
ccacucuucugccugggau

SEQ ID NO: 43917 - RNA, 19 nt, Artificial Sequence
  Description of Artificial Sequence: Synthetic oligonucleotide
  Antisense strand to SEQ ID NO: 43836
aucccaggcagaagagugg

SEQ ID NO: 43918 - RNA, 19 nt, Artificial Sequence
  Description of Artificial Sequence: Synthetic oligonucleotide
  Sense strand starting at position 1223 of SEQ ID NO: 525
cgaacuuucugcuuccaca

SEQ ID NO: 43919 - RNA, 19 nt, Artificial Sequence
  Description of Artificial Sequence: Synthetic oligonucleotide
  Antisense strand to SEQ ID NO: 43838
uguggaagcagaaaguucg

SEQ ID NO: 43920 - RNA, 19 nt, Artificial Sequence
  Description of Artificial Sequence: Synthetic oligonucleotide
  Sense strand starting at position 895 of SEQ ID NO: 525
gugucuuccuucuuaaauu

SEQ ID NO: 43921 - RNA, 19 nt, Artificial Sequence
  Description of Artificial Sequence: Synthetic oligonucleotide
  Antisense strand to SEQ ID NO: 43840
aauuuaagaaggaagacac

SEQ ID NO: 43922 - RNA, 19 nt, Artificial Sequence
  Description of Artificial Sequence: Synthetic oligonucleotide
  Sense strand starting at position 891 of SEQ ID NO: 525
gacggugucuuccuucuua

SEQ ID NO: 43923 - RNA, 19 nt, Artificial Sequence
  Description of Artificial Sequence: Synthetic oligonucleotide
  Antisense strand to SEQ ID NO: 43842
uaagaaggaagacaccguc

SEQ ID NO: 43924 - RNA, 19 nt, Artificial Sequence
  Description of Artificial Sequence: Synthetic oligonucleotide
  Sense strand starting at position 832 of SEQ ID NO: 525
gacuauaucauguggguga

SEQ ID NO: 43925 - RNA, 19 nt, Artificial Sequence
  Description of Artificial Sequence: Synthetic oligonucleotide
  Antisense strand to SEQ ID NO: 43844
ucacccacaugauauaguc

SEQ ID NO: 43926 - RNA, 19 nt, Artificial Sequence
  Description of Artificial Sequence: Synthetic oligonucleotide
  Sense strand starting at position 807 of SEQ ID NO: 525
agaguuaugaaggguuaug

SEQ ID NO: 43927 - RNA, 19 nt, Artificial Sequence
  Description of Artificial Sequence: Synthetic oligonucleotide
  Antisense strand to SEQ ID NO: 43846
cauaacccuucauaacucu

SEQ ID NO: 43928 - RNA, 19 nt, Artificial Sequence
  Description of Artificial Sequence: Synthetic oligonucleotide
  Sense strand starting at position 806 of SEQ ID NO: 525
gagaguuaugaaggguuau

SEQ ID NO: 43929 - RNA, 19 nt, Artificial Sequence
  Description of Artificial Sequence: Synthetic oligonucleotide
  Antisense strand to SEQ ID NO: 43848
auaacccuucauaacucuc

SEQ ID NO: 43930 - RNA, 19 nt, Artificial Sequence
  Description of Artificial Sequence: Synthetic oligonucleotide
  Sense strand starting at position 756 of SEQ ID NO: 525
uuaauuucuuaggaggauc

SEQ ID NO: 43931 - RNA, 19 nt, Artificial Sequence
  Description of Artificial Sequence: Synthetic oligonucleotide
  Antisense strand to SEQ ID NO: 43850
gauccuccuaagaaauuaa

SEQ ID NO: 43932 - RNA, 19 nt, Artificial Sequence
  Description of Artificial Sequence: Synthetic oligonucleotide
  Sense strand starting at position 755 of SEQ ID NO: 525
uuuaauuucuuaggaggau

SEQ ID NO: 43933 - RNA, 19 nt, Artificial Sequence
  Description of Artificial Sequence: Synthetic oligonucleotide
  Antisense strand to SEQ ID NO: 43852
auccuccuaagaaauuaaa

SEQ ID NO: 43934 - RNA, 19 nt, Artificial Sequence
  Description of Artificial Sequence: Synthetic oligonucleotide
  Sense strand starting at position 716 of SEQ ID NO: 525
ucaguaagugcugagugaa

SEQ ID NO: 43935 - RNA, 19 nt, Artificial Sequence
  Description of Artificial Sequence: Synthetic oligonucleotide
  Antisense strand to SEQ ID NO: 43854
uucacucagcacuuacuga

SEQ ID NO: 43936 - RNA, 19 nt, Artificial Sequence
  Description of Artificial Sequence: Synthetic oligonucleotide
  Sense strand starting at position 707 of SEQ ID NO: 525
agcagauucucaguaagug

SEQ ID NO: 43937 - RNA, 19 nt, Artificial Sequence
  Description of Artificial Sequence: Synthetic oligonucleotide
  Antisense strand to SEQ ID NO: 43856
cacuuacugagaaucugcu

SEQ ID NO: 43938 - RNA, 19 nt, Artificial Sequence
  Description of Artificial Sequence: Synthetic oligonucleotide
  Sense strand starting at position 704 of SEQ ID NO: 525
cucagcagauucucaguaa

SEQ ID NO: 43939 - RNA, 19 nt, Artificial Sequence
  Description of Artificial Sequence: Synthetic oligonucleotide
  Antisense strand to SEQ ID NO: 43858
uuacugagaaucugcugag

SEQ ID NO: 43940 - RNA, 19 nt, Artificial Sequence
  Description of Artificial Sequence: Synthetic oligonucleotide
  Sense strand starting at position 696 of SEQ ID NO: 525
gcuaaauccucagcagauu

SEQ ID NO: 43941 - RNA, 19 nt, Artificial Sequence
  Description of Artificial Sequence: Synthetic oligonucleotide
  Antisense strand to SEQ ID NO: 43860
aaucugcugaggauuuagc

SEQ ID NO: 43942 - RNA, 19 nt, Artificial Sequence
  Description of Artificial Sequence: Synthetic oligonucleotide
  Sense strand starting at position 694 of SEQ ID NO: 525
cugcuaaauccucagcaga

SEQ ID NO: 43943 - RNA, 19 nt, Artificial Sequence
  Description of Artificial Sequence: Synthetic oligonucleotide
  Antisense strand to SEQ ID NO: 43862
ucugcugaggauuuagcag

SEQ ID NO: 43944 - RNA, 19 nt, Artificial Sequence
  Description of Artificial Sequence: Synthetic oligonucleotide
  Sense strand starting at position 672 of SEQ ID NO: 525
ggaugcuugucauccuugu

SEQ ID NO: 43945 - RNA, 19 nt, Artificial Sequence
  Description of Artificial Sequence: Synthetic oligonucleotide
  Antisense strand to SEQ ID NO: 43864
acaaggaugacaagcaucc

SEQ ID NO: 43946 - RNA, 19 nt, Artificial Sequence
  Description of Artificial Sequence: Synthetic oligonucleotide
  Sense strand starting at position 313 of SEQ ID NO: 525
cgaagcuacugagcuguua

SEQ ID NO: 43947 - RNA, 19 nt, Artificial Sequence
  Description of Artificial Sequence: Synthetic oligonucleotide
  Antisense strand to SEQ ID NO: 43866
uaacagcucaguagcuucg

SEQ ID NO: 43948 - RNA, 19 nt, Artificial Sequence
  Description of Artificial Sequence: Synthetic oligonucleotide
  Sense strand starting at position 302 of SEQ ID NO: 525
ugaguccuucucgaagcua

SEQ ID NO: 43949 - RNA, 19 nt, Artificial Sequence
  Description of Artificial Sequence: Synthetic oligonucleotide
  Antisense strand to SEQ ID NO: 43868
uagcuucgagaaggacuca

SEQ ID NO: 43950 - RNA, 19 nt, Artificial Sequence
  Description of Artificial Sequence: Synthetic oligonucleotide
  Sense strand starting at position 297 of SEQ ID NO: 525
gaaccugaguccuucucga

SEQ ID NO: 43951 - RNA, 19 nt, Artificial Sequence
  Description of Artificial Sequence: Synthetic oligonucleotide
  Antisense strand to SEQ ID NO: 43870
ucgagaaggacucagguuc

SEQ ID NO: 43952 - RNA, 19 nt, Artificial Sequence
  Description of Artificial Sequence: Synthetic oligonucleotide
  Sense strand starting at position 247 of SEQ ID NO: 525
ccugaagagaaguggucaa

SEQ ID NO: 43953 - RNA, 19 nt, Artificial Sequence
  Description of Artificial Sequence: Synthetic oligonucleotide
  Antisense strand to SEQ ID NO: 43872
uugaccacuucucuucagg

SEQ ID NO: 43954 - RNA, 19 nt, Artificial Sequence
  Description of Artificial Sequence: Synthetic oligonucleotide
  Sense strand starting at position 235 of SEQ ID NO: 525
gcuaucuugugaccugaag

SEQ ID NO: 43955 - RNA, 19 nt, Artificial Sequence
  Description of Artificial Sequence: Synthetic oligonucleotide
  Antisense strand to SEQ ID NO: 43874
cuucaggucacaagauagc

SEQ ID NO: 43956 - RNA, 19 nt, Artificial Sequence
  Description of Artificial Sequence: Synthetic oligonucleotide
  Sense strand starting at position 220 of SEQ ID NO: 525
gccagaguugcugcagcua

SEQ ID NO: 43957 - RNA, 19 nt, Artificial Sequence
  Description of Artificial Sequence: Synthetic oligonucleotide
  Antisense strand to SEQ ID NO: 43876
uagcugcagcaacucuggc

SEQ ID NO: 43958 - RNA, 19 nt, Artificial Sequence
  Description of Artificial Sequence: Synthetic oligonucleotide
  Sense strand starting at position 202 of SEQ ID NO: 525
auuguaugaagaugugaug

SEQ ID NO: 43959 - RNA, 19 nt, Artificial Sequence
  Description of Artificial Sequence: Synthetic oligonucleotide
  Antisense strand to SEQ ID NO: 43878
caucacaucuucauacaau

SEQ ID NO: 43960 - RNA, 19 nt, Artificial Sequence
  Description of Artificial Sequence: Synthetic oligonucleotide
  Sense strand starting at position 107 of SEQ ID NO: 526
cugugcuguguccagugaa

SEQ ID NO: 43961 - RNA, 19 nt, Artificial Sequence
  Description of Artificial Sequence: Synthetic oligonucleotide
  Antisense strand to SEQ ID NO: 43880
uucacuggacacagcacag

SEQ ID NO: 43962 - RNA, 19 nt, Artificial Sequence
  Description of Artificial Sequence: Synthetic oligonucleotide
  Sense strand starting at position 661 of SEQ ID NO: 526
agacaugugucauuacauc

SEQ ID NO: 43963 - RNA, 19 nt, Artificial Sequence
  Description of Artificial Sequence: Synthetic oligonucleotide
  Antisense strand to SEQ ID NO: 43882
gauguaaugacacaugucu

SEQ ID NO: 43964 - RNA, 19 nt, Artificial Sequence
  Description of Artificial Sequence: Synthetic oligonucleotide
  Sense strand starting at position 859 of SEQ ID NO: 526
ccgggauagacaugcuaau

SEQ ID NO: 43965 - RNA, 19 nt, Artificial Sequence
  Description of Artificial Sequence: Synthetic oligonucleotide
  Antisense strand to SEQ ID NO: 43884
auuagcaugucuaucccgg

SEQ ID NO: 43966 - RNA, 19 nt, Artificial Sequence
  Description of Artificial Sequence: Synthetic oligonucleotide
  Sense strand starting at position 870 of SEQ ID NO: 526
augcuaaugugcuuaccua

SEQ ID NO: 43967 - RNA, 19 nt, Artificial Sequence
  Description of Artificial Sequence: Synthetic oligonucleotide
  Antisense strand to SEQ ID NO: 43886
uagguaagcacauuagcau

SEQ ID NO: 43968 - RNA, 19 nt, Artificial Sequence
  Description of Artificial Sequence: Synthetic oligonucleotide
  Sense strand starting at position 871 of SEQ ID NO: 526
ugcuaaugugcuuaccuau

SEQ ID NO: 43969 - RNA, 19 nt, Artificial Sequence
  Description of Artificial Sequence: Synthetic oligonucleotide
  Antisense strand to SEQ ID NO: 43888
auagguaagcacauuagca

SEQ ID NO: 43970 - RNA, 19 nt, Artificial Sequence
  Description of Artificial Sequence: Synthetic oligonucleotide
  Sense strand starting at position 947 of SEQ ID NO: 526
uuuggucuuccgggcaaua

SEQ ID NO: 43971 - RNA, 19 nt, Artificial Sequence
  Description of Artificial Sequence: Synthetic oligonucleotide
  Antisense strand to SEQ ID NO: 43890
uauugcccggaagaccaaa

SEQ ID NO: 43972 - RNA, 19 nt, Artificial Sequence
  Description of Artificial Sequence: Synthetic oligonucleotide
  Sense strand starting at position 958 of SEQ ID NO: 526
gggcaauagcuuuaaucuu

SEQ ID NO: 43973 - RNA, 19 nt, Artificial Sequence
  Description of Artificial Sequence: Synthetic oligonucleotide
  Antisense strand to SEQ ID NO: 43892
aagauuaaagcuauugccc

SEQ ID NO: 43974 - RNA, 19 nt, Artificial Sequence
  Description of Artificial Sequence: Synthetic oligonucleotide
  Sense strand starting at position 1012 of SEQ ID NO: 526
uuuggagucuucuccucua

SEQ ID NO: 43975 - RNA, 19 nt, Artificial Sequence
  Description of Artificial Sequence: Synthetic oligonucleotide
  Antisense strand to SEQ ID NO: 43894
uagaggagaagacuccaaa

SEQ ID NO: 43976 - RNA, 19 nt, Artificial Sequence
  Description of Artificial Sequence: Synthetic oligonucleotide
  Sense strand starting at position 1116 of SEQ ID NO: 526
cugggagaucguuaaucug

SEQ ID NO: 43977 - RNA, 19 nt, Artificial Sequence
  Description of Artificial Sequence: Synthetic oligonucleotide
  Antisense strand to SEQ ID NO: 43896
cagauuaacgaucucccag

SEQ ID NO: 43978 - RNA, 19 nt, Artificial Sequence
  Description of Artificial Sequence: Synthetic oligonucleotide
  Sense strand starting at position 1119 of SEQ ID NO: 526
ggagaucguuaaucuggga

SEQ ID NO: 43979 - RNA, 19 nt, Artificial Sequence
  Description of Artificial Sequence: Synthetic oligonucleotide
  Antisense strand to SEQ ID NO: 43898
ucccagauuaacgaucucc

SEQ ID NO: 43980 - RNA, 19 nt, Artificial Sequence
  Description of Artificial Sequence: Synthetic oligonucleotide
  Sense strand starting at position 1124 of SEQ ID NO: 526
ucguuaaucugggagugga

SEQ ID NO: 43981 - RNA, 19 nt, Artificial Sequence
  Description of Artificial Sequence: Synthetic oligonucleotide
  Antisense strand to SEQ ID NO: 43900
uccacucccagauuaacga

SEQ ID NO: 43982 - RNA, 19 nt, Artificial Sequence
  Description of Artificial Sequence: Synthetic oligonucleotide
  Sense strand starting at position 1166 of SEQ ID NO: 526
ggguuuagcugugcccaga

SEQ ID NO: 43983 - RNA, 19 nt, Artificial Sequence
  Description of Artificial Sequence: Synthetic oligonucleotide
  Antisense strand to SEQ ID NO: 43902
ucugggcacagcuaaaccc

SEQ ID NO: 43984 - RNA, 19 nt, Artificial Sequence
  Description of Artificial Sequence: Synthetic oligonucleotide
  Sense strand starting at position 1197 of SEQ ID NO: 526
cccagaugcuccgcgauua

SEQ ID NO: 43985 - RNA, 19 nt, Artificial Sequence
  Description of Artificial Sequence: Synthetic oligonucleotide
  Antisense strand to SEQ ID NO: 43904
uaaucgcggagcaucuggg

SEQ ID NO: 43986 - RNA, 19 nt, Artificial Sequence
  Description of Artificial Sequence: Synthetic oligonucleotide
  Sense strand starting at position 1400 of SEQ ID NO: 526
gggugaaguugcguagagu

SEQ ID NO: 43987 - RNA, 19 nt, Artificial Sequence
  Description of Artificial Sequence: Synthetic oligonucleotide
  Antisense strand to SEQ ID NO: 43906
acucuacgcaacuucaccc

SEQ ID NO: 43988 - RNA, 19 nt, Artificial Sequence
  Description of Artificial Sequence: Synthetic oligonucleotide
  Sense strand starting at position 1488 of SEQ ID NO: 526
gggcgacagcuuuguuaga

SEQ ID NO: 43989 - RNA, 19 nt, Artificial Sequence
  Description of Artificial Sequence: Synthetic oligonucleotide
  Antisense strand to SEQ ID NO: 43908
ucuaacaaagcugucgccc

SEQ ID NO: 43990 - RNA, 19 nt, Artificial Sequence
  Description of Artificial Sequence: Synthetic oligonucleotide
  Sense strand starting at position 1489 of SEQ ID NO: 526
ggcgacagcuuuguuagaa

SEQ ID NO: 43991 - RNA, 19 nt, Artificial Sequence
  Description of Artificial Sequence: Synthetic oligonucleotide
  Antisense strand to SEQ ID NO: 43910
uucuaacaaagcugucgcc

SEQ ID NO: 43992 - RNA, 19 nt, Artificial Sequence
  Description of Artificial Sequence: Synthetic oligonucleotide
  Sense strand starting at position 1490 of SEQ ID NO: 526
gcgacagcuuuguuagaac

SEQ ID NO: 43993 - RNA, 19 nt, Artificial Sequence
  Description of Artificial Sequence: Synthetic oligonucleotide
  Antisense strand to SEQ ID NO: 43912
guucuaacaaagcugucgc

SEQ ID NO: 43994 - RNA, 19 nt, Artificial Sequence
  Description of Artificial Sequence: Synthetic oligonucleotide
  Sense strand starting at position 1493 of SEQ ID NO: 526
acagcuuuguuagaaccaa

SEQ ID NO: 43995 - RNA, 19 nt, Artificial Sequence
  Description of Artificial Sequence: Synthetic oligonucleotide
  Antisense strand to SEQ ID NO: 43914
uugguucuaacaaagcugu

SEQ ID NO: 43996 - RNA, 19 nt, Artificial Sequence
  Description of Artificial Sequence: Synthetic oligonucleotide
  Sense strand starting at position 1530 of SEQ ID NO: 526
ggcagcaagucccuuacau

SEQ ID NO: 43997 - RNA, 19 nt, Artificial Sequence
  Description of Artificial Sequence: Synthetic oligonucleotide
  Antisense strand to SEQ ID NO: 43916
auguaagggacuugcugcc

SEQ ID NO: 43998 - RNA, 19 nt, Artificial Sequence
  Description of Artificial Sequence: Synthetic oligonucleotide
  Sense strand starting at position 1641 of SEQ ID NO: 526
ugccaagcucacuggagaa

SEQ ID NO: 43999 - RNA, 19 nt, Artificial Sequence
  Description of Artificial Sequence: Synthetic oligonucleotide
  Antisense strand to SEQ ID NO: 43918
uucuccagugagcuuggca

SEQ ID NO: 44000 - RNA, 19 nt, Artificial Sequence
  Description of Artificial Sequence: Synthetic oligonucleotide
  Sense strand starting at position 1969 of SEQ ID NO: 526
uucugugcuccuggaauuu

SEQ ID NO: 44001 - RNA, 19 nt, Artificial Sequence
  Description of Artificial Sequence: Synthetic oligonucleotide
  Antisense strand to SEQ ID NO: 43920
aaauuccaggagcacagaa

SEQ ID NO: 44002 - RNA, 19 nt, Artificial Sequence
  Description of Artificial Sequence: Synthetic oligonucleotide
  Sense strand starting at position 1978 of SEQ ID NO: 526
ccuggaauuucucaccgua

SEQ ID NO: 44003 - RNA, 19 nt, Artificial Sequence
  Description of Artificial Sequence: Synthetic oligonucleotide
  Antisense strand to SEQ ID NO: 43922
uacggugagaaauuccagg

SEQ ID NO: 44004 - RNA, 19 nt, Artificial Sequence
  Description of Artificial Sequence: Synthetic oligonucleotide
  Sense strand starting at position 2019 of SEQ ID NO: 526
cacugcauaugucuuggaa

SEQ ID NO: 44005 - RNA, 19 nt, Artificial Sequence
  Description of Artificial Sequence: Synthetic oligonucleotide
  Antisense strand to SEQ ID NO: 43924
uuccaagacauaugcagug

SEQ ID NO: 44006 - RNA, 19 nt, Artificial Sequence
  Description of Artificial Sequence: Synthetic oligonucleotide
  Sense strand starting at position 2023 of SEQ ID NO: 526
gcauaugucuuggaauccu

SEQ ID NO: 44007 - RNA, 19 nt, Artificial Sequence
  Description of Artificial Sequence: Synthetic oligonucleotide
  Antisense strand to SEQ ID NO: 43926
aggauuccaagacauaugc

SEQ ID NO: 44008 - RNA, 19 nt, Artificial Sequence
  Description of Artificial Sequence: Synthetic oligonucleotide
  Sense strand starting at position 2070 of SEQ ID NO: 526
auagguaggucucuaaucu

SEQ ID NO: 44009 - RNA, 19 nt, Artificial Sequence
  Description of Artificial Sequence: Synthetic oligonucleotide
  Antisense strand to SEQ ID NO: 43928
agauuagagaccuaccuau

SEQ ID NO: 44010 - RNA, 19 nt, Artificial Sequence
  Description of Artificial Sequence: Synthetic oligonucleotide
  Sense strand starting at position 2135 of SEQ ID NO: 526
ggccuaggcuucccaugaa

SEQ ID NO: 44011 - RNA, 19 nt, Artificial Sequence
  Description of Artificial Sequence: Synthetic oligonucleotide
  Antisense strand to SEQ ID NO: 43930
uucaugggaagccuaggcc

SEQ ID NO: 44012 - RNA, 19 nt, Artificial Sequence
  Description of Artificial Sequence: Synthetic oligonucleotide
  Sense strand starting at position 2186 of SEQ ID NO: 526
accagaaccuuguguccaa

SEQ ID NO: 44013 - RNA, 19 nt, Artificial Sequence
  Description of Artificial Sequence: Synthetic oligonucleotide
  Antisense strand to SEQ ID NO: 43932
uuggacacaagguucuggu

SEQ ID NO: 44014 - RNA, 19 nt, Artificial Sequence
  Description of Artificial Sequence: Synthetic oligonucleotide
  Sense strand starting at position 2306 of SEQ ID NO: 526
gccucauaccagugaguca

SEQ ID NO: 44015 - RNA, 19 nt, Artificial Sequence
  Description of Artificial Sequence: Synthetic oligonucleotide
  Antisense strand to SEQ ID NO: 43934
ugacucacugguaugaggc

SEQ ID NO: 44016 - RNA, 19 nt, Artificial Sequence
  Description of Artificial Sequence: Synthetic oligonucleotide
  Sense strand starting at position 2317 of SEQ ID NO: 526
gugagucacucagcagaga

SEQ ID NO: 44017 - RNA, 19 nt, Artificial Sequence
  Description of Artificial Sequence: Synthetic oligonucleotide
  Antisense strand to SEQ ID NO: 43936
ucucugcugagugacucac

SEQ ID NO: 44018 - RNA, 19 nt, Artificial Sequence
  Description of Artificial Sequence: Synthetic oligonucleotide
  Sense strand starting at position 2773 of SEQ ID NO: 526
gccauaggugaguguggaa

SEQ ID NO: 44019 - RNA, 19 nt, Artificial Sequence
  Description of Artificial Sequence: Synthetic oligonucleotide
  Antisense strand to SEQ ID NO: 43938
uuccacacucaccuauggc

SEQ ID NO: 44020 - RNA, 19 nt, Artificial Sequence
  Description of Artificial Sequence: Synthetic oligonucleotide
  Sense strand starting at position 2944 of SEQ ID NO: 526
uggguuagugcugggcaaa

SEQ ID NO: 44021 - RNA, 19 nt, Artificial Sequence
  Description of Artificial Sequence: Synthetic oligonucleotide
  Antisense strand to SEQ ID NO: 43940
uuugcccagcacuaaccca

SEQ ID NO: 44022 - RNA, 19 nt, Artificial Sequence
  Description of Artificial Sequence: Synthetic oligonucleotide
  Sense strand starting at position 3025 of SEQ ID NO: 526
gggacuuguuucuucugua

SEQ ID NO: 44023 - RNA, 19 nt, Artificial Sequence
  Description of Artificial Sequence: Synthetic oligonucleotide
  Antisense strand to SEQ ID NO: 43942
uacagaagaaacaaguccc

SEQ ID NO: 44024 - RNA, 19 nt, Artificial Sequence
  Description of Artificial Sequence: Synthetic oligonucleotide
  Sense strand starting at position 3026 of SEQ ID NO: 526
ggacuuguuucuucuguac

SEQ ID NO: 44025 - RNA, 19 nt, Artificial Sequence
  Description of Artificial Sequence: Synthetic oligonucleotide
  Antisense strand to SEQ ID NO: 43944
guacagaagaaacaagucc

SEQ ID NO: 44026 - RNA, 19 nt, Artificial Sequence
  Description of Artificial Sequence: Synthetic oligonucleotide
  Sense strand starting at position 3100 of SEQ ID NO: 526
ggaagaggcugccaauuua

SEQ ID NO: 44027 - RNA, 19 nt, Artificial Sequence
  Description of Artificial Sequence: Synthetic oligonucleotide
  Antisense strand to SEQ ID NO: 43946
uaaauuggcagccucuucc

SEQ ID NO: 44028 - RNA, 19 nt, Artificial Sequence
  Description of Artificial Sequence: Synthetic oligonucleotide
  Sense strand starting at position 3108 of SEQ ID NO: 526
cugccaauuuaagaaggaa

SEQ ID NO: 44029 - RNA, 19 nt, Artificial Sequence
  Description of Artificial Sequence: Synthetic oligonucleotide
  Antisense strand to SEQ ID NO: 43948
uuccuucuuaaauuggcag

SEQ ID NO: 44030 - RNA, 19 nt, Artificial Sequence
  Description of Artificial Sequence: Synthetic oligonucleotide
  Sense strand starting at position 3296 of SEQ ID NO: 526
cucagcacuuacugagaau

SEQ ID NO: 44031 - RNA, 19 nt, Artificial Sequence
  Description of Artificial Sequence: Synthetic oligonucleotide
  Antisense strand to SEQ ID NO: 43950
auucucaguaagugcugag

SEQ ID NO: 44032 - RNA, 19 nt, Artificial Sequence
  Description of Artificial Sequence: Synthetic oligonucleotide
  Sense strand starting at position 3307 of SEQ ID NO: 526
cugagaaucugcugaggau

SEQ ID NO: 44033 - RNA, 19 nt, Artificial Sequence
  Description of Artificial Sequence: Synthetic oligonucleotide
  Antisense strand to SEQ ID NO: 43952
auccucagcagauucucag

SEQ ID NO: 44034 - RNA, 19 nt, Artificial Sequence
  Description of Artificial Sequence: Synthetic oligonucleotide
  Sense strand starting at position 3310 of SEQ ID NO: 526
agaaucugcugaggauuua

SEQ ID NO: 44035 - RNA, 19 nt, Artificial Sequence
  Description of Artificial Sequence: Synthetic oligonucleotide
  Antisense strand to SEQ ID NO: 43954
uaaauccucagcagauucu

SEQ ID NO: 44036 - RNA, 19 nt, Artificial Sequence
  Description of Artificial Sequence: Synthetic oligonucleotide
  Sense strand starting at position 3676 of SEQ ID NO: 526
cagcccaguuuggauaauu

SEQ ID NO: 44037 - RNA, 19 nt, Artificial Sequence
  Description of Artificial Sequence: Synthetic oligonucleotide
  Antisense strand to SEQ ID NO: 43956
aauuauccaaacugggcug

SEQ ID NO: 44038 - RNA, 19 nt, Artificial Sequence
  Description of Artificial Sequence: Synthetic oligonucleotide
  Sense strand starting at position 3686 of SEQ ID NO: 526
uggauaauuuaacagcuca

SEQ ID NO: 44039 - RNA, 19 nt, Artificial Sequence
  Description of Artificial Sequence: Synthetic oligonucleotide
  Antisense strand to SEQ ID NO: 43958
ugagcuguuaaauuaucca

SEQ ID NO: 44040 - RNA, 19 nt, Artificial Sequence
  Description of Artificial Sequence: Synthetic oligonucleotide
  Sense strand starting at position 50 of SEQ ID NO: 527
cggaacuucucgaggagga

SEQ ID NO: 44041 - RNA, 19 nt, Artificial Sequence
  Description of Artificial Sequence: Synthetic oligonucleotide
  Antisense strand to SEQ ID NO: 43960
uccuccucgagaaguuccg

SEQ ID NO: 44042 - RNA, 19 nt, Artificial Sequence
  Description of Artificial Sequence: Synthetic oligonucleotide
  Sense strand starting at position 704 of SEQ ID NO: 527
gccggaaaccucgauucuu

SEQ ID NO: 44043 - RNA, 19 nt, Artificial Sequence
  Description of Artificial Sequence: Synthetic oligonucleotide
  Antisense strand to SEQ ID NO: 43962
aagaaucgagguuuccggc

SEQ ID NO: 44044 - RNA, 19 nt, Artificial Sequence
  Description of Artificial Sequence: Synthetic oligonucleotide
  Sense strand starting at position 1062 of SEQ ID NO: 527
ggcuuugaagaguggaguu

SEQ ID NO: 44045 - RNA, 19 nt, Artificial Sequence
  Description of Artificial Sequence: Synthetic oligonucleotide
  Antisense strand to SEQ ID NO: 43964
aacuccacucuucaaagcc

SEQ ID NO: 44046 - RNA, 19 nt, Artificial Sequence
  Description of Artificial Sequence: Synthetic oligonucleotide
  Sense strand starting at position 1171 of SEQ ID NO: 527
gggugugaucuccggacca

SEQ ID NO: 44047 - RNA, 19 nt, Artificial Sequence
  Description of Artificial Sequence: Synthetic oligonucleotide
  Antisense strand to SEQ ID NO: 43966
ugguccggagaucacaccc

SEQ ID NO: 44048 - RNA, 19 nt, Artificial Sequence
  Description of Artificial Sequence: Synthetic oligonucleotide
  Sense strand starting at position 1339 of SEQ ID NO: 527
ucgccagauuuaccguuau

SEQ ID NO: 44049 - RNA, 19 nt, Artificial Sequence
  Description of Artificial Sequence: Synthetic oligonucleotide
  Antisense strand to SEQ ID NO: 43968
auaacgguaaaucuggcga

SEQ ID NO: 44050 - RNA, 19 nt, Artificial Sequence
  Description of Artificial Sequence: Synthetic oligonucleotide
  Sense strand starting at position 1760 of SEQ ID NO: 527
uugccuaaugucgucgauu

SEQ ID NO: 44051 - RNA, 19 nt, Artificial Sequence
  Description of Artificial Sequence: Synthetic oligonucleotide
  Antisense strand to SEQ ID NO: 43970
aaucgacgacauuaggcaa

SEQ ID NO: 44052 - RNA, 19 nt, Artificial Sequence
  Description of Artificial Sequence: Synthetic oligonucleotide
  Sense strand starting at position 1763 of SEQ ID NO: 527
ccuaaugucgucgauuacu

SEQ ID NO: 44053 - RNA, 19 nt, Artificial Sequence
  Description of Artificial Sequence: Synthetic oligonucleotide
  Antisense strand to SEQ ID NO: 43972
aguaaucgacgacauuagg

SEQ ID NO: 44054 - RNA, 19 nt, Artificial Sequence
  Description of Artificial Sequence: Synthetic oligonucleotide
  Sense strand starting at position 1925 of SEQ ID NO: 527
acgguaagguucucuaaau

SEQ ID NO: 44055 - RNA, 19 nt, Artificial Sequence
  Description of Artificial Sequence: Synthetic oligonucleotide
  Antisense strand to SEQ ID NO: 43974
auuuagagaaccuuaccgu

SEQ ID NO: 44056 - RNA, 19 nt, Artificial Sequence
  Description of Artificial Sequence: Synthetic oligonucleotide
  Sense strand starting at position 1926 of SEQ ID NO: 527
cgguaagguucucuaaauu

SEQ ID NO: 44057 - RNA, 19 nt, Artificial Sequence
  Description of Artificial Sequence: Synthetic oligonucleotide
  Antisense strand to SEQ ID NO: 43976
aauuuagagaaccuuaccg

SEQ ID NO: 44058 - RNA, 19 nt, Artificial Sequence
  Description of Artificial Sequence: Synthetic oligonucleotide
  Sense strand starting at position 2050 of SEQ ID NO: 527
ggaauggcguguguuugaa

SEQ ID NO: 44059 - RNA, 19 nt, Artificial Sequence
  Description of Artificial Sequence: Synthetic oligonucleotide
  Antisense strand to SEQ ID NO: 43978
uucaaacacacgccauucc

SEQ ID NO: 44060 - RNA, 19 nt, Artificial Sequence
  Description of Artificial Sequence: Synthetic oligonucleotide
  Sense strand starting at position 2209 of SEQ ID NO: 527
auuuccugcucugggaaga

SEQ ID NO: 44061 - RNA, 19 nt, Artificial Sequence
  Description of Artificial Sequence: Synthetic oligonucleotide
  Antisense strand to SEQ ID NO: 43980
ucuucccagagcaggaaau

SEQ ID NO: 44062 - RNA, 19 nt, Artificial Sequence
  Description of Artificial Sequence: Synthetic oligonucleotide
  Sense strand starting at position 2252 of SEQ ID NO: 527
auuugaagcugucaagaau

SEQ ID NO: 44063 - RNA, 19 nt, Artificial Sequence
  Description of Artificial Sequence: Synthetic oligonucleotide
  Antisense strand to SEQ ID NO: 43982
auucuugacagcuucaaau

SEQ ID NO: 44064 - RNA, 19 nt, Artificial Sequence
  Description of Artificial Sequence: Synthetic oligonucleotide
  Sense strand starting at position 2263 of SEQ ID NO: 527
ucaagaaugcuuugugguu

SEQ ID NO: 44065 - RNA, 19 nt, Artificial Sequence
  Description of Artificial Sequence: Synthetic oligonucleotide
  Antisense strand to SEQ ID NO: 43984
aaccacaaagcauucuuga

SEQ ID NO: 44066 - RNA, 19 nt, Artificial Sequence
  Description of Artificial Sequence: Synthetic oligonucleotide
  Sense strand starting at position 2268 of SEQ ID NO: 527
aaugcuuugugguuggaua

SEQ ID NO: 44067 - RNA, 19 nt, Artificial Sequence
  Description of Artificial Sequence: Synthetic oligonucleotide
  Antisense strand to SEQ ID NO: 43986
uauccaaccacaaagcauu

SEQ ID NO: 44068 - RNA, 19 nt, Artificial Sequence
  Description of Artificial Sequence: Synthetic oligonucleotide
  Sense strand starting at position 2269 of SEQ ID NO: 527
augcuuugugguuggauaa

SEQ ID NO: 44069 - RNA, 19 nt, Artificial Sequence
  Description of Artificial Sequence: Synthetic oligonucleotide
  Antisense strand to SEQ ID NO: 43988
uuauccaaccacaaagcau

SEQ ID NO: 44070 - RNA, 19 nt, Artificial Sequence
  Description of Artificial Sequence: Synthetic oligonucleotide
  Sense strand starting at position 2270 of SEQ ID NO: 527
ugcuuugugguuggauaac

SEQ ID NO: 44071 - RNA, 19 nt, Artificial Sequence
  Description of Artificial Sequence: Synthetic oligonucleotide
  Antisense strand to SEQ ID NO: 43990
guuauccaaccacaaagca

SEQ ID NO: 44072 - RNA, 19 nt, Artificial Sequence
  Description of Artificial Sequence: Synthetic oligonucleotide
  Sense strand starting at position 2705 of SEQ ID NO: 527
agcaaaugcugcuuccauu

SEQ ID NO: 44073 - RNA, 19 nt, Artificial Sequence
  Description of Artificial Sequence: Synthetic oligonucleotide
  Antisense strand to SEQ ID NO: 43992
aauggaagcagcauuugcu

SEQ ID NO: 44074 - RNA, 19 nt, Artificial Sequence
  Description of Artificial Sequence: Synthetic oligonucleotide
  Sense strand starting at position 2732 of SEQ ID NO: 527
ggcacuuuggaaugaauga

SEQ ID NO: 44075 - RNA, 19 nt, Artificial Sequence
  Description of Artificial Sequence: Synthetic oligonucleotide
  Antisense strand to SEQ ID NO: 43994
ucauucauuccaaagugcc

SEQ ID NO: 44076 - RNA, 19 nt, Artificial Sequence
  Description of Artificial Sequence: Synthetic oligonucleotide
  Sense strand starting at position 2803 of SEQ ID NO: 527
gacagauucucauugugcu

SEQ ID NO: 44077 - RNA, 19 nt, Artificial Sequence
  Description of Artificial Sequence: Synthetic oligonucleotide
  Antisense strand to SEQ ID NO: 43996
agcacaaugagaaucuguc

SEQ ID NO: 44078 - RNA, 19 nt, Artificial Sequence
  Description of Artificial Sequence: Synthetic oligonucleotide
  Sense strand starting at position 2816 of SEQ ID NO: 527
ugugcuuaucaggaaaguc

SEQ ID NO: 44079 - RNA, 19 nt, Artificial Sequence
  Description of Artificial Sequence: Synthetic oligonucleotide
  Antisense strand to SEQ ID NO: 43998
gacuuuccugauaagcaca

SEQ ID NO: 44080 - RNA, 19 nt, Artificial Sequence
  Description of Artificial Sequence: Synthetic oligonucleotide
  Sense strand starting at position 2828 of SEQ ID NO: 527
gaaagucagcauuagcacu

SEQ ID NO: 44081 - RNA, 19 nt, Artificial Sequence
  Description of Artificial Sequence: Synthetic oligonucleotide
  Antisense strand to SEQ ID NO: 44000
agugcuaaugcugacuuuc

SEQ ID NO: 44082 - RNA, 19 nt, Artificial Sequence
  Description of Artificial Sequence: Synthetic oligonucleotide
  Sense strand starting at position 2910 of SEQ ID NO: 527
auaaguaguuauccuagag

SEQ ID NO: 44083 - RNA, 19 nt, Artificial Sequence
  Description of Artificial Sequence: Synthetic oligonucleotide
  Antisense strand to SEQ ID NO: 44002
cucuaggauaacuacuuau

SEQ ID NO: 44084 - RNA, 19 nt, Artificial Sequence
  Description of Artificial Sequence: Synthetic oligonucleotide
  Sense strand starting at position 2914 of SEQ ID NO: 527
guaguuauccuagagcaua

SEQ ID NO: 44085 - RNA, 19 nt, Artificial Sequence
  Description of Artificial Sequence: Synthetic oligonucleotide
  Antisense strand to SEQ ID NO: 44004
uaugcucuaggauaacuac

SEQ ID NO: 44086 - RNA, 19 nt, Artificial Sequence
  Description of Artificial Sequence: Synthetic oligonucleotide
  Sense strand starting at position 2919 of SEQ ID NO: 527
uauccuagagcauaugagu

SEQ ID NO: 44087 - RNA, 19 nt, Artificial Sequence
  Description of Artificial Sequence: Synthetic oligonucleotide
  Antisense strand to SEQ ID NO: 44006
acucauaugcucuaggaua

SEQ ID NO: 44088 - RNA, 19 nt, Artificial Sequence
  Description of Artificial Sequence: Synthetic oligonucleotide
  Sense strand starting at position 2978 of SEQ ID NO: 527
ugaaacuugcagggaaagu

SEQ ID NO: 44089 - RNA, 19 nt, Artificial Sequence
  Description of Artificial Sequence: Synthetic oligonucleotide
  Antisense strand to SEQ ID NO: 44008
acuuucccugcaaguuuca

SEQ ID NO: 44090 - RNA, 19 nt, Artificial Sequence
  Description of Artificial Sequence: Synthetic oligonucleotide
  Sense strand starting at position 2989 of SEQ ID NO: 527
gggaaaguuuaucaaucac

SEQ ID NO: 44091 - RNA, 19 nt, Artificial Sequence
  Description of Artificial Sequence: Synthetic oligonucleotide
  Antisense strand to SEQ ID NO: 44010
gugauugauaaacuuuccc

SEQ ID NO: 44092 - RNA, 19 nt, Artificial Sequence
  Description of Artificial Sequence: Synthetic oligonucleotide
  Sense strand starting at position 3071 of SEQ ID NO: 527
gcaaguagaacgggaucuu

SEQ ID NO: 44093 - RNA, 19 nt, Artificial Sequence
  Description of Artificial Sequence: Synthetic oligonucleotide
  Antisense strand to SEQ ID NO: 44012
aagaucccguucuacuugc

SEQ ID NO: 44094 - RNA, 19 nt, Artificial Sequence
  Description of Artificial Sequence: Synthetic oligonucleotide
  Sense strand starting at position 3150 of SEQ ID NO: 527
agagaagggcauugcaauu

SEQ ID NO: 44095 - RNA, 19 nt, Artificial Sequence
  Description of Artificial Sequence: Synthetic oligonucleotide
  Antisense strand to SEQ ID NO: 44014
aauugcaaugcccuucucu

SEQ ID NO: 44096 - RNA, 19 nt, Artificial Sequence
  Description of Artificial Sequence: Synthetic oligonucleotide
  Sense strand starting at position 3187 of SEQ ID NO: 527
uccaguggucccuaggaaa

SEQ ID NO: 44097 - RNA, 19 nt, Artificial Sequence
  Description of Artificial Sequence: Synthetic oligonucleotide
  Antisense strand to SEQ ID NO: 44016
uuuccuagggaccacugga

SEQ ID NO: 44098 - RNA, 19 nt, Artificial Sequence
  Description of Artificial Sequence: Synthetic oligonucleotide
  Sense strand starting at position 3224 of SEQ ID NO: 527
aaauguccagcuugaagga

SEQ ID NO: 44099 - RNA, 19 nt, Artificial Sequence
  Description of Artificial Sequence: Synthetic oligonucleotide
  Antisense strand to SEQ ID NO: 44018
uccuucaagcuggacauuu

SEQ ID NO: 44100 - RNA, 19 nt, Artificial Sequence
  Description of Artificial Sequence: Synthetic oligonucleotide
  Sense strand starting at position 3270 of SEQ ID NO: 527
cacaaugguccuggaaucu

SEQ ID NO: 44101 - RNA, 19 nt, Artificial Sequence
  Description of Artificial Sequence: Synthetic oligonucleotide
  Antisense strand to SEQ ID NO: 44020
agauuccaggaccauugug

SEQ ID NO: 44102 - RNA, 19 nt, Artificial Sequence
  Description of Artificial Sequence: Synthetic oligonucleotide
  Sense strand starting at position 3302 of SEQ ID NO: 527
ggucuuugcaggugaugau

SEQ ID NO: 44103 - RNA, 19 nt, Artificial Sequence
  Description of Artificial Sequence: Synthetic oligonucleotide
  Antisense strand to SEQ ID NO: 44022
aucaucaccugcaaagacc

SEQ ID NO: 44104 - RNA, 19 nt, Artificial Sequence
  Description of Artificial Sequence: Synthetic oligonucleotide
  Sense strand starting at position 3303 of SEQ ID NO: 527
gucuuugcaggugaugauu

SEQ ID NO: 44105 - RNA, 19 nt, Artificial Sequence
  Description of Artificial Sequence: Synthetic oligonucleotide
  Antisense strand to SEQ ID NO: 44024
aaucaucaccugcaaagac

SEQ ID NO: 44106 - RNA, 19 nt, Artificial Sequence
  Description of Artificial Sequence: Synthetic oligonucleotide
  Sense strand starting at position 3468 of SEQ ID NO: 527
guucguuuccucucggacu

SEQ ID NO: 44107 - RNA, 19 nt, Artificial Sequence
  Description of Artificial Sequence: Synthetic oligonucleotide
  Antisense strand to SEQ ID NO: 44026
aguccgagaggaaacgaac

SEQ ID NO: 44108 - RNA, 19 nt, Artificial Sequence
  Description of Artificial Sequence: Synthetic oligonucleotide
  Sense strand starting at position 3581 of SEQ ID NO: 527
gagaccucugccugggaau

SEQ ID NO: 44109 - RNA, 19 nt, Artificial Sequence
  Description of Artificial Sequence: Synthetic oligonucleotide
  Antisense strand to SEQ ID NO: 44028
auucccaggcagaggucuc

SEQ ID NO: 44110 - RNA, 19 nt, Artificial Sequence
  Description of Artificial Sequence: Synthetic oligonucleotide
  Sense strand starting at position 3582 of SEQ ID NO: 527
agaccucugccugggaauu

SEQ ID NO: 44111 - RNA, 19 nt, Artificial Sequence
  Description of Artificial Sequence: Synthetic oligonucleotide
  Antisense strand to SEQ ID NO: 44030
aauucccaggcagaggucu

SEQ ID NO: 44112 - RNA, 19 nt, Artificial Sequence
  Description of Artificial Sequence: Synthetic oligonucleotide
  Sense strand starting at position 3592 of SEQ ID NO: 527
cugggaauuugccagacga

SEQ ID NO: 44113 - RNA, 19 nt, Artificial Sequence
  Description of Artificial Sequence: Synthetic oligonucleotide
  Antisense strand to SEQ ID NO: 44032
ucgucuggcaaauucccag

SEQ ID NO: 44114 - RNA, 19 nt, Artificial Sequence
  Description of Artificial Sequence: Synthetic oligonucleotide
  Sense strand starting at position 3661 of SEQ ID NO: 527
ugccacuguggguauuaau

SEQ ID NO: 44115 - RNA, 19 nt, Artificial Sequence
  Description of Artificial Sequence: Synthetic oligonucleotide
  Antisense strand to SEQ ID NO: 44034
auuaauacccacaguggca

SEQ ID NO: 44116 - RNA, 19 nt, Artificial Sequence
  Description of Artificial Sequence: Synthetic oligonucleotide
  Sense strand starting at position 3737 of SEQ ID NO: 527
gaacacgccucuuugaagu

SEQ ID NO: 44117 - RNA, 19 nt, Artificial Sequence
  Description of Artificial Sequence: Synthetic oligonucleotide
  Antisense strand to SEQ ID NO: 44036
acuucaaagaggcguguuc

SEQ ID NO: 44118 - RNA, 19 nt, Artificial Sequence
  Description of Artificial Sequence: Synthetic oligonucleotide
  Sense strand starting at position 3823 of SEQ ID NO: 527
cucucaccuucgcuguaaa

SEQ ID NO: 44119 - RNA, 19 nt, Artificial Sequence
  Description of Artificial Sequence: Synthetic oligonucleotide
  Antisense strand to SEQ ID NO: 44038
uuuacagcgaaggugagag

SEQ ID NO: 44120 - RNA, 19 nt, Artificial Sequence
  Description of Artificial Sequence: Synthetic oligonucleotide
  Sense strand starting at position 84 of SEQ ID NO: 528
gugaauaaauauggugaca

SEQ ID NO: 44121 - RNA, 19 nt, Artificial Sequence
  Description of Artificial Sequence: Synthetic oligonucleotide
  Antisense strand to SEQ ID NO: 44040
ugucaccauauuuauucac

SEQ ID NO: 44122 - RNA, 19 nt, Artificial Sequence
  Description of Artificial Sequence: Synthetic oligonucleotide
  Sense strand starting at position 95 of SEQ ID NO: 528
uggugacagucucuugaga

SEQ ID NO: 44123 - RNA, 19 nt, Artificial Sequence
  Description of Artificial Sequence: Synthetic oligonucleotide
  Antisense strand to SEQ ID NO: 44042
ucucaagagacugucacca

SEQ ID NO: 44124 - RNA, 19 nt, Artificial Sequence
  Description of Artificial Sequence: Synthetic oligonucleotide
  Sense strand starting at position 100 of SEQ ID NO: 528
acagucucuugagaagaaa

SEQ ID NO: 44125 - RNA, 19 nt, Artificial Sequence
  Description of Artificial Sequence: Synthetic oligonucleotide
  Antisense strand to SEQ ID NO: 44044
uuucuucucaagagacugu

SEQ ID NO: 44126 - RNA, 19 nt, Artificial Sequence
  Description of Artificial Sequence: Synthetic oligonucleotide
  Sense strand starting at position 198 of SEQ ID NO: 528
ucugccauuuggccuagaa

SEQ ID NO: 44127 - RNA, 19 nt, Artificial Sequence
  Description of Artificial Sequence: Synthetic oligonucleotide
  Antisense strand to SEQ ID NO: 44046
uucuaggccaaauggcaga

SEQ ID NO: 44128 - RNA, 19 nt, Artificial Sequence
  Description of Artificial Sequence: Synthetic oligonucleotide
  Sense strand starting at position 207 of SEQ ID NO: 528
uggccuagaacgcauuaga

SEQ ID NO: 44129 - RNA, 19 nt, Artificial Sequence
  Description of Artificial Sequence: Synthetic oligonucleotide
  Antisense strand to SEQ ID NO: 44048
ucuaaugcguucuaggcca

SEQ ID NO: 44130 - RNA, 19 nt, Artificial Sequence
  Description of Artificial Sequence: Synthetic oligonucleotide
  Sense strand starting at position 238 of SEQ ID NO: 528
gggauuacauuccuuauca

SEQ ID NO: 44131 - RNA, 19 nt, Artificial Sequence
  Description of Artificial Sequence: Synthetic oligonucleotide
  Antisense strand to SEQ ID NO: 44050
ugauaaggaauguaauccc

SEQ ID NO: 44132 - RNA, 19 nt, Artificial Sequence
  Description of Artificial Sequence: Synthetic oligonucleotide
  Sense strand starting at position 239 of SEQ ID NO: 528
ggauuacauuccuuaucag

SEQ ID NO: 44133 - RNA, 19 nt, Artificial Sequence
  Description of Artificial Sequence: Synthetic oligonucleotide
  Antisense strand to SEQ ID NO: 44052
cugauaaggaauguaaucc

SEQ ID NO: 44134 - RNA, 19 nt, Artificial Sequence
  Description of Artificial Sequence: Synthetic oligonucleotide
  Sense strand starting at position 290 of SEQ ID NO: 528
gauggagagguguggcaaa

SEQ ID NO: 44135 - RNA, 19 nt, Artificial Sequence
  Description of Artificial Sequence: Synthetic oligonucleotide
  Antisense strand to SEQ ID NO: 44054
uuugccacaccucuccauc

SEQ ID NO: 44136 - RNA, 19 nt, Artificial Sequence
  Description of Artificial Sequence: Synthetic oligonucleotide
  Sense strand starting at position 350 of SEQ ID NO: 528
ucuguuaauggagggugaa

SEQ ID NO: 44137 - RNA, 19 nt, Artificial Sequence
  Description of Artificial Sequence: Synthetic oligonucleotide
  Antisense strand to SEQ ID NO: 44056
uucacccuccauuaacaga

SEQ ID NO: 44138 - RNA, 19 nt, Artificial Sequence
  Description of Artificial Sequence: Synthetic oligonucleotide
  Sense strand starting at position 351 of SEQ ID NO: 528
cuguuaauggagggugaaa

SEQ ID NO: 44139 - RNA, 19 nt, Artificial Sequence
  Description of Artificial Sequence: Synthetic oligonucleotide
  Antisense strand to SEQ ID NO: 44058
uuucacccuccauuaacag

SEQ ID NO: 44140 - RNA, 19 nt, Artificial Sequence
  Description of Artificial Sequence: Synthetic oligonucleotide
  Sense strand starting at position 353 of SEQ ID NO: 528
guuaauggagggugaaaua

SEQ ID NO: 44141 - RNA, 19 nt, Artificial Sequence
  Description of Artificial Sequence: Synthetic oligonucleotide
  Antisense strand to SEQ ID NO: 44060
uauuucacccuccauuaac

SEQ ID NO: 44142 - RNA, 19 nt, Artificial Sequence
  Description of Artificial Sequence: Synthetic oligonucleotide
  Sense strand starting at position 375 of SEQ ID NO: 528
gcugauuaucucgaugaga

SEQ ID NO: 44143 - RNA, 19 nt, Artificial Sequence
  Description of Artificial Sequence: Synthetic oligonucleotide
  Antisense strand to SEQ ID NO: 44062
ucucaucgagauaaucagc

SEQ ID NO: 44144 - RNA, 19 nt, Artificial Sequence
  Description of Artificial Sequence: Synthetic oligonucleotide
  Sense strand starting at position 377 of SEQ ID NO: 528
ugauuaucucgaugagaaa

SEQ ID NO: 44145 - RNA, 19 nt, Artificial Sequence
  Description of Artificial Sequence: Synthetic oligonucleotide
  Antisense strand to SEQ ID NO: 44064
uuucucaucgagauaauca

SEQ ID NO: 44146 - RNA, 19 nt, Artificial Sequence
  Description of Artificial Sequence: Synthetic oligonucleotide
  Sense strand starting at position 380 of SEQ ID NO: 528
uuaucucgaugagaaauua

SEQ ID NO: 44147 - RNA, 19 nt, Artificial Sequence
  Description of Artificial Sequence: Synthetic oligonucleotide
  Antisense strand to SEQ ID NO: 44066
uaauuucucaucgagauaa

SEQ ID NO: 44148 - RNA, 19 nt, Artificial Sequence
  Description of Artificial Sequence: Synthetic oligonucleotide
  Sense strand starting at position 427 of SEQ ID NO: 528
guggcauuccaucaaccaa

SEQ ID NO: 44149 - RNA, 19 nt, Artificial Sequence
  Description of Artificial Sequence: Synthetic oligonucleotide
  Antisense strand to SEQ ID NO: 44068
uugguugauggaaugccac

SEQ ID NO: 44150 - RNA, 19 nt, Artificial Sequence
  Description of Artificial Sequence: Synthetic oligonucleotide
  Sense strand starting at position 454 of SEQ ID NO: 528
gcaggugaggaauaagcau

SEQ ID NO: 44151 - RNA, 19 nt, Artificial Sequence
  Description of Artificial Sequence: Synthetic oligonucleotide
  Antisense strand to SEQ ID NO: 44070
augcuuauuccucaccugc

SEQ ID NO: 44152 - RNA, 19 nt, Artificial Sequence
  Description of Artificial Sequence: Synthetic oligonucleotide
  Sense strand starting at position 479 of SEQ ID NO: 528
ucauaagcucuaugaggca

SEQ ID NO: 44153 - RNA, 19 nt, Artificial Sequence
  Description of Artificial Sequence: Synthetic oligonucleotide
  Antisense strand to SEQ ID NO: 44072
ugccucauagagcuuauga

SEQ ID NO: 44154 - RNA, 19 nt, Artificial Sequence
  Description of Artificial Sequence: Synthetic oligonucleotide
  Sense strand starting at position 757 of SEQ ID NO: 528
aguuacaacccuugagaac

SEQ ID NO: 44155 - RNA, 19 nt, Artificial Sequence
  Description of Artificial Sequence: Synthetic oligonucleotide
  Antisense strand to SEQ ID NO: 44074
guucucaaggguuguaacu

SEQ ID NO: 44156 - RNA, 19 nt, Artificial Sequence
  Description of Artificial Sequence: Synthetic oligonucleotide
  Sense strand starting at position 786 of SEQ ID NO: 528
ucuuaauugcugugaguuu

SEQ ID NO: 44157 - RNA, 19 nt, Artificial Sequence
  Description of Artificial Sequence: Synthetic oligonucleotide
  Antisense strand to SEQ ID NO: 44076
aaacucacagcaauuaaga

SEQ ID NO: 44158 - RNA, 19 nt, Artificial Sequence
  Description of Artificial Sequence: Synthetic oligonucleotide
  Sense strand starting at position 1226 of SEQ ID NO: 528
cgucgcugccguuuaauuu

SEQ ID NO: 44159 - RNA, 19 nt, Artificial Sequence
  Description of Artificial Sequence: Synthetic oligonucleotide
  Antisense strand to SEQ ID NO: 44078
aaauuaaacggcagcgacg

SEQ ID NO: 44160 - RNA, 19 nt, Artificial Sequence
  Description of Artificial Sequence: Synthetic oligonucleotide
  Sense strand starting at position 1350 of SEQ ID NO: 528
aggugugaacaaugaacuu

SEQ ID NO: 44161 - RNA, 19 nt, Artificial Sequence
  Description of Artificial Sequence: Synthetic oligonucleotide
  Antisense strand to SEQ ID NO: 44080
aaguucauuguucacaccu

SEQ ID NO: 44162 - RNA, 19 nt, Artificial Sequence
  Description of Artificial Sequence: Synthetic oligonucleotide
  Sense strand starting at position 2306 of SEQ ID NO: 528
ccuggucuuuaccugaaca

SEQ ID NO: 44163 - RNA, 19 nt, Artificial Sequence
  Description of Artificial Sequence: Synthetic oligonucleotide
  Antisense strand to SEQ ID NO: 44082
uguucagguaaagaccagg

SEQ ID NO: 44164 - RNA, 19 nt, Artificial Sequence
  Description of Artificial Sequence: Synthetic oligonucleotide
  Sense strand starting at position 2308 of SEQ ID NO: 528
uggucuuuaccugaacagu

SEQ ID NO: 44165 - RNA, 19 nt, Artificial Sequence
  Description of Artificial Sequence: Synthetic oligonucleotide
  Antisense strand to SEQ ID NO: 44084
acuguucagguaaagacca

SEQ ID NO: 44166 - RNA, 19 nt, Artificial Sequence
  Description of Artificial Sequence: Synthetic oligonucleotide
  Sense strand starting at position 2330 of SEQ ID NO: 528
aaccuugcgugcuuacaaa

SEQ ID NO: 44167 - RNA, 19 nt, Artificial Sequence
  Description of Artificial Sequence: Synthetic oligonucleotide
  Antisense strand to SEQ ID NO: 44086
uuuguaagcacgcaagguu

SEQ ID NO: 44168 - RNA, 19 nt, Artificial Sequence
  Description of Artificial Sequence: Synthetic oligonucleotide
  Sense strand starting at position 2361 of SEQ ID NO: 528
uuugaagagcuauaauggu

SEQ ID NO: 44169 - RNA, 19 nt, Artificial Sequence
  Description of Artificial Sequence: Synthetic oligonucleotide
  Antisense strand to SEQ ID NO: 44088
accauuauagcucuucaaa

SEQ ID NO: 44170 - RNA, 19 nt, Artificial Sequence
  Description of Artificial Sequence: Synthetic oligonucleotide
  Sense strand starting at position 2367 of SEQ ID NO: 528
gagcuauaaugguuuacag

SEQ ID NO: 44171 - RNA, 19 nt, Artificial Sequence
  Description of Artificial Sequence: Synthetic oligonucleotide
  Antisense strand to SEQ ID NO: 44090
cuguaaaccauuauagcuc

SEQ ID NO: 44172 - RNA, 19 nt, Artificial Sequence
  Description of Artificial Sequence: Synthetic oligonucleotide
  Sense strand starting at position 2369 of SEQ ID NO: 528
gcuauaaugguuuacagau

SEQ ID NO: 44173 - RNA, 19 nt, Artificial Sequence
  Description of Artificial Sequence: Synthetic oligonucleotide
  Antisense strand to SEQ ID NO: 44092
aucuguaaaccauuauagc

SEQ ID NO: 44174 - RNA, 19 nt, Artificial Sequence
  Description of Artificial Sequence: Synthetic oligonucleotide
  Sense strand starting at position 2636 of SEQ ID NO: 528
ucaacauucuggucagcuu

SEQ ID NO: 44175 - RNA, 19 nt, Artificial Sequence
  Description of Artificial Sequence: Synthetic oligonucleotide
  Antisense strand to SEQ ID NO: 44094
aagcugaccagaauguuga

SEQ ID NO: 44176 - RNA, 19 nt, Artificial Sequence
  Description of Artificial Sequence: Synthetic oligonucleotide
  Sense strand starting at position 2691 of SEQ ID NO: 528
aaaucauaguauccggaaa

SEQ ID NO: 44177 - RNA, 19 nt, Artificial Sequence
  Description of Artificial Sequence: Synthetic oligonucleotide
  Antisense strand to SEQ ID NO: 44096
uuuccggauacuaugauuu

SEQ ID NO: 44178 - RNA, 19 nt, Artificial Sequence
  Description of Artificial Sequence: Synthetic oligonucleotide
  Sense strand starting at position 2845 of SEQ ID NO: 528
gccuucuugccagaacucu

SEQ ID NO: 44179 - RNA, 19 nt, Artificial Sequence
  Description of Artificial Sequence: Synthetic oligonucleotide
  Antisense strand to SEQ ID NO: 44098
agaguucuggcaagaaggc

SEQ ID NO: 44180 - RNA, 19 nt, Artificial Sequence
  Description of Artificial Sequence: Synthetic oligonucleotide
  Sense strand starting at position 2907 of SEQ ID NO: 528
cucugagcauccuagaaug

SEQ ID NO: 44181 - RNA, 19 nt, Artificial Sequence
  Description of Artificial Sequence: Synthetic oligonucleotide
  Antisense strand to SEQ ID NO: 44100
cauucuaggaugcucagag

SEQ ID NO: 44182 - RNA, 19 nt, Artificial Sequence
  Description of Artificial Sequence: Synthetic oligonucleotide
  Sense strand starting at position 3340 of SEQ ID NO: 528
gcccaaauuugaggagucu

SEQ ID NO: 44183 - RNA, 19 nt, Artificial Sequence
  Description of Artificial Sequence: Synthetic oligonucleotide
  Antisense strand to SEQ ID NO: 44102
agacuccucaaauuugggc

SEQ ID NO: 44184 - RNA, 19 nt, Artificial Sequence
  Description of Artificial Sequence: Synthetic oligonucleotide
  Sense strand starting at position 3482 of SEQ ID NO: 528
ccaguuuagcgucagaaau

SEQ ID NO: 44185 - RNA, 19 nt, Artificial Sequence
  Description of Artificial Sequence: Synthetic oligonucleotide
  Antisense strand to SEQ ID NO: 44104
auuucugacgcuaaacugg

SEQ ID NO: 44186 - RNA, 19 nt, Artificial Sequence
  Description of Artificial Sequence: Synthetic oligonucleotide
  Sense strand starting at position 3502 of SEQ ID NO: 528
acuuaaugguguccucaga

SEQ ID NO: 44187 - RNA, 19 nt, Artificial Sequence
  Description of Artificial Sequence: Synthetic oligonucleotide
  Antisense strand to SEQ ID NO: 44106
ucugaggacaccauuaagu

SEQ ID NO: 44188 - RNA, 19 nt, Artificial Sequence
  Description of Artificial Sequence: Synthetic oligonucleotide
  Sense strand starting at position 3542 of SEQ ID NO: 528
acaggugaaaguugaucuu

SEQ ID NO: 44189 - RNA, 19 nt, Artificial Sequence
  Description of Artificial Sequence: Synthetic oligonucleotide
  Antisense strand to SEQ ID NO: 44108
aagaucaacuuucaccugu

SEQ ID NO: 44190 - RNA, 19 nt, Artificial Sequence
  Description of Artificial Sequence: Synthetic oligonucleotide
  Sense strand starting at position 3566 of SEQ ID NO: 528
uuaagcuugcccugguuaa

SEQ ID NO: 44191 - RNA, 19 nt, Artificial Sequence
  Description of Artificial Sequence: Synthetic oligonucleotide
  Antisense strand to SEQ ID NO: 44110
uuaaccagggcaagcuuaa

SEQ ID NO: 44192 - RNA, 19 nt, Artificial Sequence
  Description of Artificial Sequence: Synthetic oligonucleotide
  Sense strand starting at position 3567 of SEQ ID NO: 528
uaagcuugcccugguuaaa

SEQ ID NO: 44193 - RNA, 19 nt, Artificial Sequence
  Description of Artificial Sequence: Synthetic oligonucleotide
  Antisense strand to SEQ ID NO: 44112
uuuaaccagggcaagcuua

SEQ ID NO: 44194 - RNA, 19 nt, Artificial Sequence
  Description of Artificial Sequence: Synthetic oligonucleotide
  Sense strand starting at position 3570 of SEQ ID NO: 528
gcuugcccugguuaaauau

SEQ ID NO: 44195 - RNA, 19 nt, Artificial Sequence
  Description of Artificial Sequence: Synthetic oligonucleotide
  Antisense strand to SEQ ID NO: 44114
auauuuaaccagggcaagc

SEQ ID NO: 44196 - RNA, 19 nt, Artificial Sequence
  Description of Artificial Sequence: Synthetic oligonucleotide
  Sense strand starting at position 3959 of SEQ ID NO: 528
uguuuagcucccggguuaa

SEQ ID NO: 44197 - RNA, 19 nt, Artificial Sequence
  Description of Artificial Sequence: Synthetic oligonucleotide
  Antisense strand to SEQ ID NO: 44116
uuaacccgggagcuaaaca

SEQ ID NO: 44198 - RNA, 19 nt, Artificial Sequence
  Description of Artificial Sequence: Synthetic oligonucleotide
  Sense strand starting at position 3963 of SEQ ID NO: 528
uagcucccggguuaaauaa

SEQ ID NO: 44199 - RNA, 19 nt, Artificial Sequence
  Description of Artificial Sequence: Synthetic oligonucleotide
  Antisense strand to SEQ ID NO: 44118
uuauuuaacccgggagcua

SEQ ID NO: 44200 - RNA, 19 nt, Artificial Sequence
  Description of Artificial Sequence: Synthetic oligonucleotide
  Sense strand starting at position 3903 of SEQ ID NO: 529
uguuauauuuggucuagug

SEQ ID NO: 44201 - RNA, 19 nt, Artificial Sequence
  Description of Artificial Sequence: Synthetic oligonucleotide
  Antisense strand to SEQ ID NO: 44120
cacuagaccaaauauaaca

SEQ ID NO: 44202 - RNA, 19 nt, Artificial Sequence
  Description of Artificial Sequence: Synthetic oligonucleotide
  Sense strand starting at position 3902 of SEQ ID NO: 529
uuguuauauuuggucuagu

SEQ ID NO: 44203 - RNA, 19 nt, Artificial Sequence
  Description of Artificial Sequence: Synthetic oligonucleotide
  Antisense strand to SEQ ID NO: 44122
acuagaccaaauauaacaa

SEQ ID NO: 44204 - RNA, 19 nt, Artificial Sequence
  Description of Artificial Sequence: Synthetic oligonucleotide
  Sense strand starting at position 3882 of SEQ ID NO: 529
aggcuugaaucauugauua

SEQ ID NO: 44205 - RNA, 19 nt, Artificial Sequence
  Description of Artificial Sequence: Synthetic oligonucleotide
  Antisense strand to SEQ ID NO: 44124
uaaucaaugauucaagccu

SEQ ID NO: 44206 - RNA, 19 nt, Artificial Sequence
  Description of Artificial Sequence: Synthetic oligonucleotide
  Sense strand starting at position 3823 of SEQ ID NO: 529
gcaaguuuagcugagaaau

SEQ ID NO: 44207 - RNA, 19 nt, Artificial Sequence
  Description of Artificial Sequence: Synthetic oligonucleotide
  Antisense strand to SEQ ID NO: 44126
auuucucagcuaaacuugc

SEQ ID NO: 44208 - RNA, 19 nt, Artificial Sequence
  Description of Artificial Sequence: Synthetic oligonucleotide
  Sense strand starting at position 3821 of SEQ ID NO: 529
aagcaaguuuagcugagaa

SEQ ID NO: 44209 - RNA, 19 nt, Artificial Sequence
  Description of Artificial Sequence: Synthetic oligonucleotide
  Antisense strand to SEQ ID NO: 44128
uucucagcuaaacuugcuu

SEQ ID NO: 44210 - RNA, 19 nt, Artificial Sequence
  Description of Artificial Sequence: Synthetic oligonucleotide
  Sense strand starting at position 3787 of SEQ ID NO: 529
uacagugaauguuugaaau

SEQ ID NO: 44211 - RNA, 19 nt, Artificial Sequence
  Description of Artificial Sequence: Synthetic oligonucleotide
  Antisense strand to SEQ ID NO: 44130
auuucaaacauucacugua

SEQ ID NO: 44212 - RNA, 19 nt, Artificial Sequence
  Description of Artificial Sequence: Synthetic oligonucleotide
  Sense strand starting at position 3708 of SEQ ID NO: 529
uuuagcuuugccuaaagga

SEQ ID NO: 44213 - RNA, 19 nt, Artificial Sequence
  Description of Artificial Sequence: Synthetic oligonucleotide
  Antisense strand to SEQ ID NO: 44132
uccuuuaggcaaagcuaaa

SEQ ID NO: 44214 - RNA, 19 nt, Artificial Sequence
  Description of Artificial Sequence: Synthetic oligonucleotide
  Sense strand starting at position 3705 of SEQ ID NO: 529
guauuuagcuuugccuaaa

SEQ ID NO: 44215 - RNA, 19 nt, Artificial Sequence
  Description of Artificial Sequence: Synthetic oligonucleotide
  Antisense strand to SEQ ID NO: 44134
uuuaggcaaagcuaaauac

SEQ ID NO: 44216 - RNA, 19 nt, Artificial Sequence
  Description of Artificial Sequence: Synthetic oligonucleotide
  Sense strand starting at position 3704 of SEQ ID NO: 529
aguauuuagcuuugccuaa

SEQ ID NO: 44217 - RNA, 19 nt, Artificial Sequence
  Description of Artificial Sequence: Synthetic oligonucleotide
  Antisense strand to SEQ ID NO: 44136
uuaggcaaagcuaaauacu

SEQ ID NO: 44218 - RNA, 19 nt, Artificial Sequence
  Description of Artificial Sequence: Synthetic oligonucleotide
  Sense strand starting at position 3697 of SEQ ID NO: 529
gaacgcaaguauuuagcuu

SEQ ID NO: 44219 - RNA, 19 nt, Artificial Sequence
  Description of Artificial Sequence: Synthetic oligonucleotide
  Antisense strand to SEQ ID NO: 44138
aagcuaaauacuugcguuc

SEQ ID NO: 44220 - RNA, 19 nt, Artificial Sequence
  Description of Artificial Sequence: Synthetic oligonucleotide
  Sense strand starting at position 3646 of SEQ ID NO: 529
gcuuacaucucacuggaca

SEQ ID NO: 44221 - RNA, 19 nt, Artificial Sequence
  Description of Artificial Sequence: Synthetic oligonucleotide
  Antisense strand to SEQ ID NO: 44140
uguccagugagauguaagc

SEQ ID NO: 44222 - RNA, 19 nt, Artificial Sequence
  Description of Artificial Sequence: Synthetic oligonucleotide
  Sense strand starting at position 3494 of SEQ ID NO: 529
gguugaguggcucacugaa

SEQ ID NO: 44223 - RNA, 19 nt, Artificial Sequence
  Description of Artificial Sequence: Synthetic oligonucleotide
  Antisense strand to SEQ ID NO: 44142
uucagugagccacucaacc

SEQ ID NO: 44224 - RNA, 19 nt, Artificial Sequence
  Description of Artificial Sequence: Synthetic oligonucleotide
  Sense strand starting at position 3464 of SEQ ID NO: 529
gagagaaggccuggaggua

SEQ ID NO: 44225 - RNA, 19 nt, Artificial Sequence
  Description of Artificial Sequence: Synthetic oligonucleotide
  Antisense strand to SEQ ID NO: 44144
uaccuccaggccuucucuc

SEQ ID NO: 44226 - RNA, 19 nt, Artificial Sequence
  Description of Artificial Sequence: Synthetic oligonucleotide
  Sense strand starting at position 3423 of SEQ ID NO: 529
cuaucaguggcuuaaacaa

SEQ ID NO: 44227 - RNA, 19 nt, Artificial Sequence
  Description of Artificial Sequence: Synthetic oligonucleotide
  Antisense strand to SEQ ID NO: 44146
uuguuuaagccacugauag

SEQ ID NO: 44228 - RNA, 19 nt, Artificial Sequence
  Description of Artificial Sequence: Synthetic oligonucleotide
  Sense strand starting at position 3421 of SEQ ID NO: 529
gacuaucaguggcuuaaac

SEQ ID NO: 44229 - RNA, 19 nt, Artificial Sequence
  Description of Artificial Sequence: Synthetic oligonucleotide
  Antisense strand to SEQ ID NO: 44148
guuuaagccacugauaguc

SEQ ID NO: 44230 - RNA, 19 nt, Artificial Sequence
  Description of Artificial Sequence: Synthetic oligonucleotide
  Sense strand starting at position 3380 of SEQ ID NO: 529
gagugagaaugcuuauauc

SEQ ID NO: 44231 - RNA, 19 nt, Artificial Sequence
  Description of Artificial Sequence: Synthetic oligonucleotide
  Antisense strand to SEQ ID NO: 44150
gauauaagcauucucacuc

SEQ ID NO: 44232 - RNA, 19 nt, Artificial Sequence
  Description of Artificial Sequence: Synthetic oligonucleotide
  Sense strand starting at position 2863 of SEQ ID NO: 529
acuuguaauggaugccaga

SEQ ID NO: 44233 - RNA, 19 nt, Artificial Sequence
  Description of Artificial Sequence: Synthetic oligonucleotide
  Antisense strand to SEQ ID NO: 44152
ucuggcauccauuacaagu

SEQ ID NO: 44234 - RNA, 19 nt, Artificial Sequence
  Description of Artificial Sequence: Synthetic oligonucleotide
  Sense strand starting at position 2477 of SEQ ID NO: 529
cuuccugucuuagugauuu

SEQ ID NO: 44235 - RNA, 19 nt, Artificial Sequence
  Description of Artificial Sequence: Synthetic oligonucleotide
  Antisense strand to SEQ ID NO: 44154
aaaucacuaagacaggaag

SEQ ID NO: 44236 - RNA, 19 nt, Artificial Sequence
  Description of Artificial Sequence: Synthetic oligonucleotide
  Sense strand starting at position 2455 of SEQ ID NO: 529
gaggcuccgacagaguaau

SEQ ID NO: 44237 - RNA, 19 nt, Artificial Sequence
  Description of Artificial Sequence: Synthetic oligonucleotide
  Antisense strand to SEQ ID NO: 44156
auuacucugucggagccuc

SEQ ID NO: 44238 - RNA, 19 nt, Artificial Sequence
  Description of Artificial Sequence: Synthetic oligonucleotide
  Sense strand starting at position 2317 of SEQ ID NO: 529
ccgaacaggcauugauuaa

SEQ ID NO: 44239 - RNA, 19 nt, Artificial Sequence
  Description of Artificial Sequence: Synthetic oligonucleotide
  Antisense strand to SEQ ID NO: 44158
uuaaucaaugccuguucgg

SEQ ID NO: 44240 - RNA, 19 nt, Artificial Sequence
  Description of Artificial Sequence: Synthetic oligonucleotide
  Sense strand starting at position 2277 of SEQ ID NO: 529
gacagaagucuguggagga

SEQ ID NO: 44241 - RNA, 19 nt, Artificial Sequence
  Description of Artificial Sequence: Synthetic oligonucleotide
  Antisense strand to SEQ ID NO: 44160
uccuccacagacuucuguc

SEQ ID NO: 44242 - RNA, 19 nt, Artificial Sequence
  Description of Artificial Sequence: Synthetic oligonucleotide
  Sense strand starting at position 2257 of SEQ ID NO: 529
ugcugacugguugacuuaa

SEQ ID NO: 44243 - RNA, 19 nt, Artificial Sequence
  Description of Artificial Sequence: Synthetic oligonucleotide
  Antisense strand to SEQ ID NO: 44162
uuaagucaaccagucagca

SEQ ID NO: 44244 - RNA, 19 nt, Artificial Sequence
  Description of Artificial Sequence: Synthetic oligonucleotide
  Sense strand starting at position 2245 of SEQ ID NO: 529
gaaggaaaucucugcugac

SEQ ID NO: 44245 - RNA, 19 nt, Artificial Sequence
  Description of Artificial Sequence: Synthetic oligonucleotide
  Antisense strand to SEQ ID NO: 44164
gucagcagagauuuccuuc

SEQ ID NO: 44246 - RNA, 19 nt, Artificial Sequence
  Description of Artificial Sequence: Synthetic oligonucleotide
  Sense strand starting at position 1365 of SEQ ID NO: 529
ggguuagcgcugcucaaca

SEQ ID NO: 44247 - RNA, 19 nt, Artificial Sequence
  Description of Artificial Sequence: Synthetic oligonucleotide
  Antisense strand to SEQ ID NO: 44166
uguugagcagcgcuaaccc

SEQ ID NO: 44248 - RNA, 19 nt, Artificial Sequence
  Description of Artificial Sequence: Synthetic oligonucleotide
  Sense strand starting at position 1311 of SEQ ID NO: 529
uauccuacacucgggauua

SEQ ID NO: 44249 - RNA, 19 nt, Artificial Sequence
  Description of Artificial Sequence: Synthetic oligonucleotide
  Antisense strand to SEQ ID NO: 44168
uaaucccgaguguaggaua

SEQ ID NO: 44250 - RNA, 19 nt, Artificial Sequence
  Description of Artificial Sequence: Synthetic oligonucleotide
  Sense strand starting at position 1299 of SEQ ID NO: 529
gguccacaacgauauccua

SEQ ID NO: 44251 - RNA, 19 nt, Artificial Sequence
  Description of Artificial Sequence: Synthetic oligonucleotide
  Antisense strand to SEQ ID NO: 44170
uaggauaucguuguggacc

SEQ ID NO: 44252 - RNA, 19 nt, Artificial Sequence
  Description of Artificial Sequence: Synthetic oligonucleotide
  Sense strand starting at position 1293 of SEQ ID NO: 529
uucugagguccacaacgau

SEQ ID NO: 44253 - RNA, 19 nt, Artificial Sequence
  Description of Artificial Sequence: Synthetic oligonucleotide
  Antisense strand to SEQ ID NO: 44172
aucguuguggaccucagaa

SEQ ID NO: 44254 - RNA, 19 nt, Artificial Sequence
  Description of Artificial Sequence: Synthetic oligonucleotide
  Sense strand starting at position 1254 of SEQ ID NO: 529
guuugcaggauguaugaau

SEQ ID NO: 44255 - RNA, 19 nt, Artificial Sequence
  Description of Artificial Sequence: Synthetic oligonucleotide
  Antisense strand to SEQ ID NO: 44174
auucauacauccugcaaac

SEQ ID NO: 44256 - RNA, 19 nt, Artificial Sequence
  Description of Artificial Sequence: Synthetic oligonucleotide
  Sense strand starting at position 1245 of SEQ ID NO: 529
guauuucugguuugcagga

SEQ ID NO: 44257 - RNA, 19 nt, Artificial Sequence
  Description of Artificial Sequence: Synthetic oligonucleotide
  Antisense strand to SEQ ID NO: 44176
uccugcaaaccagaaauac

SEQ ID NO: 44258 - RNA, 19 nt, Artificial Sequence
  Description of Artificial Sequence: Synthetic oligonucleotide
  Sense strand starting at position 1243 of SEQ ID NO: 529
ugguauuucugguuugcag

SEQ ID NO: 44259 - RNA, 19 nt, Artificial Sequence
  Description of Artificial Sequence: Synthetic oligonucleotide
  Antisense strand to SEQ ID NO: 44178
cugcaaaccagaaauacca

SEQ ID NO: 44260 - RNA, 19 nt, Artificial Sequence
  Description of Artificial Sequence: Synthetic oligonucleotide
  Sense strand starting at position 1161 of SEQ ID NO: 529
gcguauauuuaagcagaaa

SEQ ID NO: 44261 - RNA, 19 nt, Artificial Sequence
  Description of Artificial Sequence: Synthetic oligonucleotide
  Antisense strand to SEQ ID NO: 44180
uuucugcuuaaauauacgc

SEQ ID NO: 44262 - RNA, 19 nt, Artificial Sequence
  Description of Artificial Sequence: Synthetic oligonucleotide
  Sense strand starting at position 1132 of SEQ ID NO: 529
gugcaaaucugugcauuua

SEQ ID NO: 44263 - RNA, 19 nt, Artificial Sequence
  Description of Artificial Sequence: Synthetic oligonucleotide
  Antisense strand to SEQ ID NO: 44182
uaaaugcacagauuugcac

SEQ ID NO: 44264 - RNA, 19 nt, Artificial Sequence
  Description of Artificial Sequence: Synthetic oligonucleotide
  Sense strand starting at position 1131 of SEQ ID NO: 529
agugcaaaucugugcauuu

SEQ ID NO: 44265 - RNA, 19 nt, Artificial Sequence
  Description of Artificial Sequence: Synthetic oligonucleotide
  Antisense strand to SEQ ID NO: 44184
aaaugcacagauuugcacu

SEQ ID NO: 44266 - RNA, 19 nt, Artificial Sequence
  Description of Artificial Sequence: Synthetic oligonucleotide
  Sense strand starting at position 968 of SEQ ID NO: 529
gcuuacuaccaggguagaa

SEQ ID NO: 44267 - RNA, 19 nt, Artificial Sequence
  Description of Artificial Sequence: Synthetic oligonucleotide
  Antisense strand to SEQ ID NO: 44186
uucuacccugguaguaagc

SEQ ID NO: 44268 - RNA, 19 nt, Artificial Sequence
  Description of Artificial Sequence: Synthetic oligonucleotide
  Sense strand starting at position 967 of SEQ ID NO: 529
ggcuuacuaccaggguaga

SEQ ID NO: 44269 - RNA, 19 nt, Artificial Sequence
  Description of Artificial Sequence: Synthetic oligonucleotide
  Antisense strand to SEQ ID NO: 44188
ucuacccugguaguaagcc

SEQ ID NO: 44270 - RNA, 19 nt, Artificial Sequence
  Description of Artificial Sequence: Synthetic oligonucleotide
  Sense strand starting at position 933 of SEQ ID NO: 529
ucugaacugugaccugaaa

SEQ ID NO: 44271 - RNA, 19 nt, Artificial Sequence
  Description of Artificial Sequence: Synthetic oligonucleotide
  Antisense strand to SEQ ID NO: 44190
uuucaggucacaguucaga

SEQ ID NO: 44272 - RNA, 19 nt, Artificial Sequence
  Description of Artificial Sequence: Synthetic oligonucleotide
  Sense strand starting at position 784 of SEQ ID NO: 529
ugagaauuacuuugcuuag

SEQ ID NO: 44273 - RNA, 19 nt, Artificial Sequence
  Description of Artificial Sequence: Synthetic oligonucleotide
  Antisense strand to SEQ ID NO: 44192
cuaagcaaaguaauucuca

SEQ ID NO: 44274 - RNA, 19 nt, Artificial Sequence
  Description of Artificial Sequence: Synthetic oligonucleotide
  Sense strand starting at position 615 of SEQ ID NO: 529
agauuuacuugauggagac

SEQ ID NO: 44275 - RNA, 19 nt, Artificial Sequence
  Description of Artificial Sequence: Synthetic oligonucleotide
  Antisense strand to SEQ ID NO: 44194
gucuccaucaaguaaaucu

SEQ ID NO: 44276 - RNA, 19 nt, Artificial Sequence
  Description of Artificial Sequence: Synthetic oligonucleotide
  Sense strand starting at position 533 of SEQ ID NO: 529
acguguuuaccauaagaca

SEQ ID NO: 44277 - RNA, 19 nt, Artificial Sequence
  Description of Artificial Sequence: Synthetic oligonucleotide
  Antisense strand to SEQ ID NO: 44196
ugucuuaugguaaacacgu

SEQ ID NO: 44278 - RNA, 19 nt, Artificial Sequence
  Description of Artificial Sequence: Synthetic oligonucleotide
  Sense strand starting at position 383 of SEQ ID NO: 529
uuccuaguucuccacauga

SEQ ID NO: 44279 - RNA, 19 nt, Artificial Sequence
  Description of Artificial Sequence: Synthetic oligonucleotide
  Antisense strand to SEQ ID NO: 44198
ucauguggagaacuaggaa

SEQ ID NO: 44280 - RNA, 19 nt, Artificial Sequence
  Description of Artificial Sequence: Synthetic oligonucleotide
  Sense strand starting at position 83 of SEQ ID NO: 530
gugacauccgccuaacuaa

SEQ ID NO: 44281 - RNA, 19 nt, Artificial Sequence
  Description of Artificial Sequence: Synthetic oligonucleotide
  Antisense strand to SEQ ID NO: 44200
uuaguuaggcggaugucac

SEQ ID NO: 44282 - RNA, 19 nt, Artificial Sequence
  Description of Artificial Sequence: Synthetic oligonucleotide
  Sense strand starting at position 143 of SEQ ID NO: 530
gggaguugggagugacaca

SEQ ID NO: 44283 - RNA, 19 nt, Artificial Sequence
  Description of Artificial Sequence: Synthetic oligonucleotide
  Antisense strand to SEQ ID NO: 44202
ugugucacucccaacuccc

SEQ ID NO: 44284 - RNA, 19 nt, Artificial Sequence
  Description of Artificial Sequence: Synthetic oligonucleotide
  Sense strand starting at position 192 of SEQ ID NO: 530
gagggauucgguggaacug

SEQ ID NO: 44285 - RNA, 19 nt, Artificial Sequence
  Description of Artificial Sequence: Synthetic oligonucleotide
  Antisense strand to SEQ ID NO: 44204
caguuccaccgaaucccuc

SEQ ID NO: 44286 - RNA, 19 nt, Artificial Sequence
  Description of Artificial Sequence: Synthetic oligonucleotide
  Sense strand starting at position 194 of SEQ ID NO: 530
gggauucgguggaacugaa

SEQ ID NO: 44287 - RNA, 19 nt, Artificial Sequence
  Description of Artificial Sequence: Synthetic oligonucleotide
  Antisense strand to SEQ ID NO: 44206
uucaguuccaccgaauccc

SEQ ID NO: 44288 - RNA, 19 nt, Artificial Sequence
  Description of Artificial Sequence: Synthetic oligonucleotide
  Sense strand starting at position 208 of SEQ ID NO: 530
cugaaucucgcaugaacua

SEQ ID NO: 44289 - RNA, 19 nt, Artificial Sequence
  Description of Artificial Sequence: Synthetic oligonucleotide
  Antisense strand to SEQ ID NO: 44208
uaguucaugcgagauucag

SEQ ID NO: 44290 - RNA, 19 nt, Artificial Sequence
  Description of Artificial Sequence: Synthetic oligonucleotide
  Sense strand starting at position 566 of SEQ ID NO: 530
ggauguucagucuggagga

SEQ ID NO: 44291 - RNA, 19 nt, Artificial Sequence
  Description of Artificial Sequence: Synthetic oligonucleotide
  Antisense strand to SEQ ID NO: 44210
uccuccagacugaacaucc

SEQ ID NO: 44292 - RNA, 19 nt, Artificial Sequence
  Description of Artificial Sequence: Synthetic oligonucleotide
  Sense strand starting at position 592 of SEQ ID NO: 530
ccgaauaagcugugauuau

SEQ ID NO: 44293 - RNA, 19 nt, Artificial Sequence
  Description of Artificial Sequence: Synthetic oligonucleotide
  Antisense strand to SEQ ID NO: 44212
auaaucacagcuuauucgg

SEQ ID NO: 44294 - RNA, 19 nt, Artificial Sequence
  Description of Artificial Sequence: Synthetic oligonucleotide
  Sense strand starting at position 596 of SEQ ID NO: 530
auaagcugugauuauguga

SEQ ID NO: 44295 - RNA, 19 nt, Artificial Sequence
  Description of Artificial Sequence: Synthetic oligonucleotide
  Antisense strand to SEQ ID NO: 44214
ucacauaaucacagcuuau

SEQ ID NO: 44296 - RNA, 19 nt, Artificial Sequence
  Description of Artificial Sequence: Synthetic oligonucleotide
  Sense strand starting at position 604 of SEQ ID NO: 530
ugauuaugugaaggcuaug

SEQ ID NO: 44297 - RNA, 19 nt, Artificial Sequence
  Description of Artificial Sequence: Synthetic oligonucleotide
  Antisense strand to SEQ ID NO: 44216
cauagccuucacauaauca

SEQ ID NO: 44298 - RNA, 19 nt, Artificial Sequence
  Description of Artificial Sequence: Synthetic oligonucleotide
  Sense strand starting at position 615 of SEQ ID NO: 530
aggcuaugccugcaaacaa

SEQ ID NO: 44299 - RNA, 19 nt, Artificial Sequence
  Description of Artificial Sequence: Synthetic oligonucleotide
  Antisense strand to SEQ ID NO: 44218
uuguuugcaggcauagccu

SEQ ID NO: 44300 - RNA, 19 nt, Artificial Sequence
  Description of Artificial Sequence: Synthetic oligonucleotide
  Sense strand starting at position 726 of SEQ ID NO: 530
agaauuguucaguggugga

SEQ ID NO: 44301 - RNA, 19 nt, Artificial Sequence
  Description of Artificial Sequence: Synthetic oligonucleotide
  Antisense strand to SEQ ID NO: 44220
uccaccacugaacaauucu

SEQ ID NO: 44302 - RNA, 19 nt, Artificial Sequence
  Description of Artificial Sequence: Synthetic oligonucleotide
  Sense strand starting at position 784 of SEQ ID NO: 530
uggauaaucuggccaagau

SEQ ID NO: 44303 - RNA, 19 nt, Artificial Sequence
  Description of Artificial Sequence: Synthetic oligonucleotide
  Antisense strand to SEQ ID NO: 44222
aucuuggccagauuaucca

SEQ ID NO: 44304 - RNA, 19 nt, Artificial Sequence
  Description of Artificial Sequence: Synthetic oligonucleotide
  Sense strand starting at position 880 of SEQ ID NO: 530
ggugguagauaauugcuaa

SEQ ID NO: 44305 - RNA, 19 nt, Artificial Sequence
  Description of Artificial Sequence: Synthetic oligonucleotide
  Antisense strand to SEQ ID NO: 44224
uuagcaauuaucuaccacc

SEQ ID NO: 44306 - RNA, 19 nt, Artificial Sequence
  Description of Artificial Sequence: Synthetic oligonucleotide
  Sense strand starting at position 881 of SEQ ID NO: 530
gugguagauaauugcuaag

SEQ ID NO: 44307 - RNA, 19 nt, Artificial Sequence
  Description of Artificial Sequence: Synthetic oligonucleotide
  Antisense strand to SEQ ID NO: 44226
cuuagcaauuaucuaccac

SEQ ID NO: 44308 - RNA, 19 nt, Artificial Sequence
  Description of Artificial Sequence: Synthetic oligonucleotide
  Sense strand starting at position 1175 of SEQ ID NO: 530
agggucaggucagaaauga

SEQ ID NO: 44309 - RNA, 19 nt, Artificial Sequence
  Description of Artificial Sequence: Synthetic oligonucleotide
  Antisense strand to SEQ ID NO: 44228
ucauuucugaccugacccu

SEQ ID NO: 44310 - RNA, 19 nt, Artificial Sequence
  Description of Artificial Sequence: Synthetic oligonucleotide
  Sense strand starting at position 1358 of SEQ ID NO: 530
ugaugagauugucauagag

SEQ ID NO: 44311 - RNA, 19 nt, Artificial Sequence
  Description of Artificial Sequence: Synthetic oligonucleotide
  Antisense strand to SEQ ID NO: 44230
cucuaugacaaucucauca

SEQ ID NO: 44312 - RNA, 19 nt, Artificial Sequence
  Description of Artificial Sequence: Synthetic oligonucleotide
  Sense strand starting at position 1360 of SEQ ID NO: 530
augagauugucauagagga

SEQ ID NO: 44313 - RNA, 19 nt, Artificial Sequence
  Description of Artificial Sequence: Synthetic oligonucleotide
  Antisense strand to SEQ ID NO: 44232
uccucuaugacaaucucau

SEQ ID NO: 44314 - RNA, 19 nt, Artificial Sequence
  Description of Artificial Sequence: Synthetic oligonucleotide
  Sense strand starting at position 1421 of SEQ ID NO: 530
ucuugaaugugagcucaaa

SEQ ID NO: 44315 - RNA, 19 nt, Artificial Sequence
  Description of Artificial Sequence: Synthetic oligonucleotide
  Antisense strand to SEQ ID NO: 44234
uuugagcucacauucaaga

SEQ ID NO: 44316 - RNA, 19 nt, Artificial Sequence
  Description of Artificial Sequence: Synthetic oligonucleotide
  Sense strand starting at position 1898 of SEQ ID NO: 530
cccggaagugaucgggaua

SEQ ID NO: 44317 - RNA, 19 nt, Artificial Sequence
  Description of Artificial Sequence: Synthetic oligonucleotide
  Antisense strand to SEQ ID NO: 44236
uaucccgaucacuuccggg

SEQ ID NO: 44318 - RNA, 19 nt, Artificial Sequence
  Description of Artificial Sequence: Synthetic oligonucleotide
  Sense strand starting at position 1899 of SEQ ID NO: 530
ccggaagugaucgggauac

SEQ ID NO: 44319 - RNA, 19 nt, Artificial Sequence
  Description of Artificial Sequence: Synthetic oligonucleotide
  Antisense strand to SEQ ID NO: 44238
guaucccgaucacuuccgg

SEQ ID NO: 44320 - RNA, 19 nt, Artificial Sequence
  Description of Artificial Sequence: Synthetic oligonucleotide
  Sense strand starting at position 1990 of SEQ ID NO: 530
ggagguggauuccuugaac

SEQ ID NO: 44321 - RNA, 19 nt, Artificial Sequence
  Description of Artificial Sequence: Synthetic oligonucleotide
  Antisense strand to SEQ ID NO: 44240
guucaaggaauccaccucc

SEQ ID NO: 44322 - RNA, 19 nt, Artificial Sequence
  Description of Artificial Sequence: Synthetic oligonucleotide
  Sense strand starting at position 1993 of SEQ ID NO: 530
gguggauuccuugaacccu

SEQ ID NO: 44323 - RNA, 19 nt, Artificial Sequence
  Description of Artificial Sequence: Synthetic oligonucleotide
  Antisense strand to SEQ ID NO: 44242
aggguucaaggaauccacc

SEQ ID NO: 44324 - RNA, 19 nt, Artificial Sequence
  Description of Artificial Sequence: Synthetic oligonucleotide
  Sense strand starting at position 2007 of SEQ ID NO: 530
acccuauuggugggaguga

SEQ ID NO: 44325 - RNA, 19 nt, Artificial Sequence
  Description of Artificial Sequence: Synthetic oligonucleotide
  Antisense strand to SEQ ID NO: 44244
ucacucccaccaauagggu

SEQ ID NO: 44326 - RNA, 19 nt, Artificial Sequence
  Description of Artificial Sequence: Synthetic oligonucleotide
  Sense strand starting at position 2440 of SEQ ID NO: 530
aguagacuggccuagcgau

SEQ ID NO: 44327 - RNA, 19 nt, Artificial Sequence
  Description of Artificial Sequence: Synthetic oligonucleotide
  Antisense strand to SEQ ID NO: 44246
aucgcuaggccagucuacu

SEQ ID NO: 44328 - RNA, 19 nt, Artificial Sequence
  Description of Artificial Sequence: Synthetic oligonucleotide
  Sense strand starting at position 2505 of SEQ ID NO: 530
ugcacuucucuccaggaca

SEQ ID NO: 44329 - RNA, 19 nt, Artificial Sequence
  Description of Artificial Sequence: Synthetic oligonucleotide
  Antisense strand to SEQ ID NO: 44248
uguccuggagagaagugca

SEQ ID NO: 44330 - RNA, 19 nt, Artificial Sequence
  Description of Artificial Sequence: Synthetic oligonucleotide
  Sense strand starting at position 2508 of SEQ ID NO: 530
acuucucuccaggacaguu

SEQ ID NO: 44331 - RNA, 19 nt, Artificial Sequence
  Description of Artificial Sequence: Synthetic oligonucleotide
  Antisense strand to SEQ ID NO: 44250
aacuguccuggagagaagu

SEQ ID NO: 44332 - RNA, 19 nt, Artificial Sequence
  Description of Artificial Sequence: Synthetic oligonucleotide
  Sense strand starting at position 2520 of SEQ ID NO: 530
gacaguuucccuggcugua

SEQ ID NO: 44333 - RNA, 19 nt, Artificial Sequence
  Description of Artificial Sequence: Synthetic oligonucleotide
  Antisense strand to SEQ ID NO: 44252
uacagccagggaaacuguc

SEQ ID NO: 44334 - RNA, 19 nt, Artificial Sequence
  Description of Artificial Sequence: Synthetic oligonucleotide
  Sense strand starting at position 2523 of SEQ ID NO: 530
aguuucccuggcuguaaau

SEQ ID NO: 44335 - RNA, 19 nt, Artificial Sequence
  Description of Artificial Sequence: Synthetic oligonucleotide
  Antisense strand to SEQ ID NO: 44254
auuuacagccagggaaacu

SEQ ID NO: 44336 - RNA, 19 nt, Artificial Sequence
  Description of Artificial Sequence: Synthetic oligonucleotide
  Sense strand starting at position 2572 of SEQ ID NO: 530
uuaucugugugccuuagga

SEQ ID NO: 44337 - RNA, 19 nt, Artificial Sequence
  Description of Artificial Sequence: Synthetic oligonucleotide
  Antisense strand to SEQ ID NO: 44256
uccuaaggcacacagauaa

SEQ ID NO: 44338 - RNA, 19 nt, Artificial Sequence
  Description of Artificial Sequence: Synthetic oligonucleotide
  Sense strand starting at position 2574 of SEQ ID NO: 530
aucugugugccuuaggaac

SEQ ID NO: 44339 - RNA, 19 nt, Artificial Sequence
  Description of Artificial Sequence: Synthetic oligonucleotide
  Antisense strand to SEQ ID NO: 44258
guuccuaaggcacacagau

SEQ ID NO: 44340 - RNA, 19 nt, Artificial Sequence
  Description of Artificial Sequence: Synthetic oligonucleotide
  Sense strand starting at position 2616 of SEQ ID NO: 530
gggcucuugggaggaacau

SEQ ID NO: 44341 - RNA, 19 nt, Artificial Sequence
  Description of Artificial Sequence: Synthetic oligonucleotide
  Antisense strand to SEQ ID NO: 44260
auguuccucccaagagccc

SEQ ID NO: 44342 - RNA, 19 nt, Artificial Sequence
  Description of Artificial Sequence: Synthetic oligonucleotide
  Sense strand starting at position 2859 of SEQ ID NO: 530
gguagcaguuccuuucgga

SEQ ID NO: 44343 - RNA, 19 nt, Artificial Sequence
  Description of Artificial Sequence: Synthetic oligonucleotide
  Antisense strand to SEQ ID NO: 44262
uccgaaaggaacugcuacc

SEQ ID NO: 44344 - RNA, 19 nt, Artificial Sequence
  Description of Artificial Sequence: Synthetic oligonucleotide
  Sense strand starting at position 3071 of SEQ ID NO: 530
cagagccaacaguguuaaa

SEQ ID NO: 44345 - RNA, 19 nt, Artificial Sequence
  Description of Artificial Sequence: Synthetic oligonucleotide
  Antisense strand to SEQ ID NO: 44264
uuuaacacuguuggcucug

SEQ ID NO: 44346 - RNA, 19 nt, Artificial Sequence
  Description of Artificial Sequence: Synthetic oligonucleotide
  Sense strand starting at position 3757 of SEQ ID NO: 530
gcuggauaucucuguaguu

SEQ ID NO: 44347 - RNA, 19 nt, Artificial Sequence
  Description of Artificial Sequence: Synthetic oligonucleotide
  Antisense strand to SEQ ID NO: 44266
aacuacagagauauccagc

SEQ ID NO: 44348 - RNA, 19 nt, Artificial Sequence
  Description of Artificial Sequence: Synthetic oligonucleotide
  Sense strand starting at position 3758 of SEQ ID NO: 530
cuggauaucucuguaguug

SEQ ID NO: 44349 - RNA, 19 nt, Artificial Sequence
  Description of Artificial Sequence: Synthetic oligonucleotide
  Antisense strand to SEQ ID NO: 44268
caacuacagagauauccag

SEQ ID NO: 44350 - RNA, 19 nt, Artificial Sequence
  Description of Artificial Sequence: Synthetic oligonucleotide
  Sense strand starting at position 3759 of SEQ ID NO: 530
uggauaucucuguaguugu

SEQ ID NO: 44351 - RNA, 19 nt, Artificial Sequence
  Description of Artificial Sequence: Synthetic oligonucleotide
  Antisense strand to SEQ ID NO: 44270
acaacuacagagauaucca

SEQ ID NO: 44352 - RNA, 19 nt, Artificial Sequence
  Description of Artificial Sequence: Synthetic oligonucleotide
  Sense strand starting at position 3766 of SEQ ID NO: 530
cucuguaguugucuaaaca

SEQ ID NO: 44353 - RNA, 19 nt, Artificial Sequence
  Description of Artificial Sequence: Synthetic oligonucleotide
  Antisense strand to SEQ ID NO: 44272
uguuuagacaacuacagag

SEQ ID NO: 44354 - RNA, 19 nt, Artificial Sequence
  Description of Artificial Sequence: Synthetic oligonucleotide
  Sense strand starting at position 3767 of SEQ ID NO: 530
ucuguaguugucuaaacac

SEQ ID NO: 44355 - RNA, 19 nt, Artificial Sequence
  Description of Artificial Sequence: Synthetic oligonucleotide
  Antisense strand to SEQ ID NO: 44274
guguuuagacaacuacaga

SEQ ID NO: 44356 - RNA, 19 nt, Artificial Sequence
  Description of Artificial Sequence: Synthetic oligonucleotide
  Sense strand starting at position 3941 of SEQ ID NO: 530
acauuaacccugugaggug

SEQ ID NO: 44357 - RNA, 19 nt, Artificial Sequence
  Description of Artificial Sequence: Synthetic oligonucleotide
  Antisense strand to SEQ ID NO: 44276
caccucacaggguuaaugu

SEQ ID NO: 44358 - RNA, 19 nt, Artificial Sequence
  Description of Artificial Sequence: Synthetic oligonucleotide
  Sense strand starting at position 3979 of SEQ ID NO: 530
agaugaggcucagagugaa

SEQ ID NO: 44359 - RNA, 19 nt, Artificial Sequence
  Description of Artificial Sequence: Synthetic oligonucleotide
  Antisense strand to SEQ ID NO: 44278
uucacucugagccucaucu

SEQ ID NO: 44360 - RNA, 19 nt, Artificial Sequence
  Description of Artificial Sequence: Synthetic oligonucleotide
  Sense strand starting at position 3950 of SEQ ID NO: 531
gacugagccagugauguag

SEQ ID NO: 44361 - RNA, 19 nt, Artificial Sequence
  Description of Artificial Sequence: Synthetic oligonucleotide
  Antisense strand to SEQ ID NO: 44280
cuacaucacuggcucaguc

SEQ ID NO: 44362 - RNA, 19 nt, Artificial Sequence
  Description of Artificial Sequence: Synthetic oligonucleotide
  Sense strand starting at position 3946 of SEQ ID NO: 531
ccaggacugagccagugau

SEQ ID NO: 44363 - RNA, 19 nt, Artificial Sequence
  Description of Artificial Sequence: Synthetic oligonucleotide
  Antisense strand to SEQ ID NO: 44282
aucacuggcucaguccugg

SEQ ID NO: 44364 - RNA, 19 nt, Artificial Sequence
  Description of Artificial Sequence: Synthetic oligonucleotide
  Sense strand starting at position 3937 of SEQ ID NO: 531
uuaauugagccaggacuga

SEQ ID NO: 44365 - RNA, 19 nt, Artificial Sequence
  Description of Artificial Sequence: Synthetic oligonucleotide
  Antisense strand to SEQ ID NO: 44284
ucaguccuggcucaauuaa

SEQ ID NO: 44366 - RNA, 19 nt, Artificial Sequence
  Description of Artificial Sequence: Synthetic oligonucleotide
  Sense strand starting at position 3933 of SEQ ID NO: 531
agucuuaauugagccagga

SEQ ID NO: 44367 - RNA, 19 nt, Artificial Sequence
  Description of Artificial Sequence: Synthetic oligonucleotide
  Antisense strand to SEQ ID NO: 44286
uccuggcucaauuaagacu

SEQ ID NO: 44368 - RNA, 19 nt, Artificial Sequence
  Description of Artificial Sequence: Synthetic oligonucleotide
  Sense strand starting at position 3905 of SEQ ID NO: 531
guguauguauaauuagaac

SEQ ID NO: 44369 - RNA, 19 nt, Artificial Sequence
  Description of Artificial Sequence: Synthetic oligonucleotide
  Antisense strand to SEQ ID NO: 44288
guucuaauuauacauacac

SEQ ID NO: 44370 - RNA, 19 nt, Artificial Sequence
  Description of Artificial Sequence: Synthetic oligonucleotide
  Sense strand starting at position 3871 of SEQ ID NO: 531
gguucuacuccauagguga

SEQ ID NO: 44371 - RNA, 19 nt, Artificial Sequence
  Description of Artificial Sequence: Synthetic oligonucleotide
  Antisense strand to SEQ ID NO: 44290
ucaccuauggaguagaacc

SEQ ID NO: 44372 - RNA, 19 nt, Artificial Sequence
  Description of Artificial Sequence: Synthetic oligonucleotide
  Sense strand starting at position 3802 of SEQ ID NO: 531
ccagacugagccugauaaa

SEQ ID NO: 44373 - RNA, 19 nt, Artificial Sequence
  Description of Artificial Sequence: Synthetic oligonucleotide
  Antisense strand to SEQ ID NO: 44292
uuuaucaggcucagucugg

SEQ ID NO: 44374 - RNA, 19 nt, Artificial Sequence
  Description of Artificial Sequence: Synthetic oligonucleotide
  Sense strand starting at position 3756 of SEQ ID NO: 531
gugauacuauaggucaaau

SEQ ID NO: 44375 - RNA, 19 nt, Artificial Sequence
  Description of Artificial Sequence: Synthetic oligonucleotide
  Antisense strand to SEQ ID NO: 44294
auuugaccuauaguaucac

SEQ ID NO: 44376 - RNA, 19 nt, Artificial Sequence
  Description of Artificial Sequence: Synthetic oligonucleotide
  Sense strand starting at position 3755 of SEQ ID NO: 531
ggugauacuauaggucaaa

SEQ ID NO: 44377 - RNA, 19 nt, Artificial Sequence
  Description of Artificial Sequence: Synthetic oligonucleotide
  Antisense strand to SEQ ID NO: 44296
uuugaccuauaguaucacc

SEQ ID NO: 44378 - RNA, 19 nt, Artificial Sequence
  Description of Artificial Sequence: Synthetic oligonucleotide
  Sense strand starting at position 3748 of SEQ ID NO: 531
cagauuuggugauacuaua

SEQ ID NO: 44379 - RNA, 19 nt, Artificial Sequence
  Description of Artificial Sequence: Synthetic oligonucleotide
  Antisense strand to SEQ ID NO: 44298
uauaguaucaccaaaucug

SEQ ID NO: 44380 - RNA, 19 nt, Artificial Sequence
  Description of Artificial Sequence: Synthetic oligonucleotide
  Sense strand starting at position 3637 of SEQ ID NO: 531
gggugcuugccagagacaa

SEQ ID NO: 44381 - RNA, 19 nt, Artificial Sequence
  Description of Artificial Sequence: Synthetic oligonucleotide
  Antisense strand to SEQ ID NO: 44300
uugucucuggcaagcaccc

SEQ ID NO: 44382 - RNA, 19 nt, Artificial Sequence
  Description of Artificial Sequence: Synthetic oligonucleotide
  Sense strand starting at position 3281 of SEQ ID NO: 531
gcuaguguugagucagugu

SEQ ID NO: 44383 - RNA, 19 nt, Artificial Sequence
  Description of Artificial Sequence: Synthetic oligonucleotide
  Antisense strand to SEQ ID NO: 44302
acacugacucaacacuagc

SEQ ID NO: 44384 - RNA, 19 nt, Artificial Sequence
  Description of Artificial Sequence: Synthetic oligonucleotide
  Sense strand starting at position 3271 of SEQ ID NO: 531
gaaacugagagcuaguguu

SEQ ID NO: 44385 - RNA, 19 nt, Artificial Sequence
  Description of Artificial Sequence: Synthetic oligonucleotide
  Antisense strand to SEQ ID NO: 44304
aacacuagcucucaguuuc

SEQ ID NO: 44386 - RNA, 19 nt, Artificial Sequence
  Description of Artificial Sequence: Synthetic oligonucleotide
  Sense strand starting at position 2998 of SEQ ID NO: 531
gagccagacuucuuguaaa

SEQ ID NO: 44387 - RNA, 19 nt, Artificial Sequence
  Description of Artificial Sequence: Synthetic oligonucleotide
  Antisense strand to SEQ ID NO: 44306
uuuacaagaagucuggcuc

SEQ ID NO: 44388 - RNA, 19 nt, Artificial Sequence
  Description of Artificial Sequence: Synthetic oligonucleotide
  Sense strand starting at position 2836 of SEQ ID NO: 531
gagccuggaucauuccuga

SEQ ID NO: 44389 - RNA, 19 nt, Artificial Sequence
  Description of Artificial Sequence: Synthetic oligonucleotide
  Antisense strand to SEQ ID NO: 44308
ucaggaaugauccaggcuc

SEQ ID NO: 44390 - RNA, 19 nt, Artificial Sequence
  Description of Artificial Sequence: Synthetic oligonucleotide
  Sense strand starting at position 2715 of SEQ ID NO: 531
gcuauagucagagaucaug

SEQ ID NO: 44391 - RNA, 19 nt, Artificial Sequence
  Description of Artificial Sequence: Synthetic oligonucleotide
  Antisense strand to SEQ ID NO: 44310
caugaucucugacuauagc

SEQ ID NO: 44392 - RNA, 19 nt, Artificial Sequence
  Description of Artificial Sequence: Synthetic oligonucleotide
  Sense strand starting at position 2539 of SEQ ID NO: 531
gccagaauccaggauuccu

SEQ ID NO: 44393 - RNA, 19 nt, Artificial Sequence
  Description of Artificial Sequence: Synthetic oligonucleotide
  Antisense strand to SEQ ID NO: 44312
aggaauccuggauucuggc

SEQ ID NO: 44394 - RNA, 19 nt, Artificial Sequence
  Description of Artificial Sequence: Synthetic oligonucleotide
  Sense strand starting at position 2424 of SEQ ID NO: 531
ggagcugaccuuuaguauu

SEQ ID NO: 44395 - RNA, 19 nt, Artificial Sequence
  Description of Artificial Sequence: Synthetic oligonucleotide
  Antisense strand to SEQ ID NO: 44314
aauacuaaaggucagcucc

SEQ ID NO: 44396 - RNA, 19 nt, Artificial Sequence
  Description of Artificial Sequence: Synthetic oligonucleotide
  Sense strand starting at position 2392 of SEQ ID NO: 531
ugaagcuuccaggacaguu

SEQ ID NO: 44397 - RNA, 19 nt, Artificial Sequence
  Description of Artificial Sequence: Synthetic oligonucleotide
  Antisense strand to SEQ ID NO: 44316
aacuguccuggaagcuuca

SEQ ID NO: 44398 - RNA, 19 nt, Artificial Sequence
  Description of Artificial Sequence: Synthetic oligonucleotide
  Sense strand starting at position 2366 of SEQ ID NO: 531
aaacuuaaaguuuggaguu

SEQ ID NO: 44399 - RNA, 19 nt, Artificial Sequence
  Description of Artificial Sequence: Synthetic oligonucleotide
  Antisense strand to SEQ ID NO: 44318
aacuccaaacuuuaaguuu

SEQ ID NO: 44400 - RNA, 19 nt, Artificial Sequence
  Description of Artificial Sequence: Synthetic oligonucleotide
  Sense strand starting at position 1993 of SEQ ID NO: 531
ugaggauuccugggaaagc

SEQ ID NO: 44401 - RNA, 19 nt, Artificial Sequence
  Description of Artificial Sequence: Synthetic oligonucleotide
  Antisense strand to SEQ ID NO: 44320
gcuuucccaggaauccuca

SEQ ID NO: 44402 - RNA, 19 nt, Artificial Sequence
  Description of Artificial Sequence: Synthetic oligonucleotide
  Sense strand starting at position 1059 of SEQ ID NO: 531
ucaaauggcuggucugaga

SEQ ID NO: 44403 - RNA, 19 nt, Artificial Sequence
  Description of Artificial Sequence: Synthetic oligonucleotide
  Antisense strand to SEQ ID NO: 44322
ucucagaccagccauuuga

SEQ ID NO: 44404 - RNA, 19 nt, Artificial Sequence
  Description of Artificial Sequence: Synthetic oligonucleotide
  Sense strand starting at position 988 of SEQ ID NO: 531
guuguaggaagccaaugau

SEQ ID NO: 44405 - RNA, 19 nt, Artificial Sequence
  Description of Artificial Sequence: Synthetic oligonucleotide
  Antisense strand to SEQ ID NO: 44324
aucauuggcuuccuacaac

SEQ ID NO: 44406 - RNA, 19 nt, Artificial Sequence
  Description of Artificial Sequence: Synthetic oligonucleotide
  Sense strand starting at position 764 of SEQ ID NO: 531
uugucucagccagaauaag

SEQ ID NO: 44407 - RNA, 19 nt, Artificial Sequence
  Description of Artificial Sequence: Synthetic oligonucleotide
  Antisense strand to SEQ ID NO: 44326
cuuauucuggcugagacaa

SEQ ID NO: 44408 - RNA, 19 nt, Artificial Sequence
  Description of Artificial Sequence: Synthetic oligonucleotide
  Sense strand starting at position 736 of SEQ ID NO: 531
uggugacuugcucaucaua

SEQ ID NO: 44409 - RNA, 19 nt, Artificial Sequence
  Description of Artificial Sequence: Synthetic oligonucleotide
  Antisense strand to SEQ ID NO: 44328
uaugaugagcaagucacca

SEQ ID NO: 44410 - RNA, 19 nt, Artificial Sequence
  Description of Artificial Sequence: Synthetic oligonucleotide
  Sense strand starting at position 673 of SEQ ID NO: 531
agacaucauuagcugauga

SEQ ID NO: 44411 - RNA, 19 nt, Artificial Sequence
  Description of Artificial Sequence: Synthetic oligonucleotide
  Antisense strand to SEQ ID NO: 44330
ucaucagcuaaugaugucu

SEQ ID NO: 44412 - RNA, 19 nt, Artificial Sequence
  Description of Artificial Sequence: Synthetic oligonucleotide
  Sense strand starting at position 573 of SEQ ID NO: 531
agcucugagcaugaauuau

SEQ ID NO: 44413 - RNA, 19 nt, Artificial Sequence
  Description of Artificial Sequence: Synthetic oligonucleotide
  Antisense strand to SEQ ID NO: 44332
auaauucaugcucagagcu

SEQ ID NO: 44414 - RNA, 19 nt, Artificial Sequence
  Description of Artificial Sequence: Synthetic oligonucleotide
  Sense strand starting at position 572 of SEQ ID NO: 531
gagcucugagcaugaauua

SEQ ID NO: 44415 - RNA, 19 nt, Artificial Sequence
  Description of Artificial Sequence: Synthetic oligonucleotide
  Antisense strand to SEQ ID NO: 44334
uaauucaugcucagagcuc

SEQ ID NO: 44416 - RNA, 19 nt, Artificial Sequence
  Description of Artificial Sequence: Synthetic oligonucleotide
  Sense strand starting at position 570 of SEQ ID NO: 531
aagagcucugagcaugaau

SEQ ID NO: 44417 - RNA, 19 nt, Artificial Sequence
  Description of Artificial Sequence: Synthetic oligonucleotide
  Antisense strand to SEQ ID NO: 44336
auucaugcucagagcucuu

SEQ ID NO: 44418 - RNA, 19 nt, Artificial Sequence
  Description of Artificial Sequence: Synthetic oligonucleotide
  Sense strand starting at position 566 of SEQ ID NO: 531
uaugaagagcucugagcau

SEQ ID NO: 44419 - RNA, 19 nt, Artificial Sequence
  Description of Artificial Sequence: Synthetic oligonucleotide
  Antisense strand to SEQ ID NO: 44338
augcucagagcucuucaua

SEQ ID NO: 44420 - RNA, 19 nt, Artificial Sequence
  Description of Artificial Sequence: Synthetic oligonucleotide
  Sense strand starting at position 541 of SEQ ID NO: 531
agcugugagagucaaucaa

SEQ ID NO: 44421 - RNA, 19 nt, Artificial Sequence
  Description of Artificial Sequence: Synthetic oligonucleotide
  Antisense strand to SEQ ID NO: 44340
uugauugacucucacagcu

SEQ ID NO: 44422 - RNA, 19 nt, Artificial Sequence
  Description of Artificial Sequence: Synthetic oligonucleotide
  Sense strand starting at position 507 of SEQ ID NO: 531
uccuuacauguacgauaga

SEQ ID NO: 44423 - RNA, 19 nt, Artificial Sequence
  Description of Artificial Sequence: Synthetic oligonucleotide
  Antisense strand to SEQ ID NO: 44342
ucuaucguacauguaagga

SEQ ID NO: 44424 - RNA, 19 nt, Artificial Sequence
  Description of Artificial Sequence: Synthetic oligonucleotide
  Sense strand starting at position 406 of SEQ ID NO: 531
agugauuccaagcauaggu

SEQ ID NO: 44425 - RNA, 19 nt, Artificial Sequence
  Description of Artificial Sequence: Synthetic oligonucleotide
  Antisense strand to SEQ ID NO: 44344
accuaugcuuggaaucacu

SEQ ID NO: 44426 - RNA, 19 nt, Artificial Sequence
  Description of Artificial Sequence: Synthetic oligonucleotide
  Sense strand starting at position 399 of SEQ ID NO: 531
auugaauagugauuccaag

SEQ ID NO: 44427 - RNA, 19 nt, Artificial Sequence
  Description of Artificial Sequence: Synthetic oligonucleotide
  Antisense strand to SEQ ID NO: 44346
cuuggaaucacuauucaau

SEQ ID NO: 44428 - RNA, 19 nt, Artificial Sequence
  Description of Artificial Sequence: Synthetic oligonucleotide
  Sense strand starting at position 336 of SEQ ID NO: 531
gccagugaaauauggaauu

SEQ ID NO: 44429 - RNA, 19 nt, Artificial Sequence
  Description of Artificial Sequence: Synthetic oligonucleotide
  Antisense strand to SEQ ID NO: 44348
aauuccauauuucacuggc

SEQ ID NO: 44430 - RNA, 19 nt, Artificial Sequence
  Description of Artificial Sequence: Synthetic oligonucleotide
  Sense strand starting at position 329 of SEQ ID NO: 531
cugaucagccagugaaaua

SEQ ID NO: 44431 - RNA, 19 nt, Artificial Sequence
  Description of Artificial Sequence: Synthetic oligonucleotide
  Antisense strand to SEQ ID NO: 44350
uauuucacuggcugaucag

SEQ ID NO: 44432 - RNA, 19 nt, Artificial Sequence
  Description of Artificial Sequence: Synthetic oligonucleotide
  Sense strand starting at position 272 of SEQ ID NO: 531
agaaguggccucugagaga

SEQ ID NO: 44433 - RNA, 19 nt, Artificial Sequence
  Description of Artificial Sequence: Synthetic oligonucleotide
  Antisense strand to SEQ ID NO: 44352
ucucucagaggccacuucu

SEQ ID NO: 44434 - RNA, 19 nt, Artificial Sequence
  Description of Artificial Sequence: Synthetic oligonucleotide
  Sense strand starting at position 183 of SEQ ID NO: 531
aggcucuuugcauaacaaa

SEQ ID NO: 44435 - RNA, 19 nt, Artificial Sequence
  Description of Artificial Sequence: Synthetic oligonucleotide
  Antisense strand to SEQ ID NO: 44354
uuuguuaugcaaagagccu

SEQ ID NO: 44436 - RNA, 19 nt, Artificial Sequence
  Description of Artificial Sequence: Synthetic oligonucleotide
  Sense strand starting at position 160 of SEQ ID NO: 531
ugaaucuucugacucuaag

SEQ ID NO: 44437 - RNA, 19 nt, Artificial Sequence
  Description of Artificial Sequence: Synthetic oligonucleotide
  Antisense strand to SEQ ID NO: 44356
cuuagagucagaagauuca

SEQ ID NO: 44438 - RNA, 19 nt, Artificial Sequence
  Description of Artificial Sequence: Synthetic oligonucleotide
  Sense strand starting at position 146 of SEQ ID NO: 531
gccagaacuuauccugaau

SEQ ID NO: 44439 - RNA, 19 nt, Artificial Sequence
  Description of Artificial Sequence: Synthetic oligonucleotide
  Antisense strand to SEQ ID NO: 44358
auucaggauaaguucuggc

SEQ ID NO: 44440 - RNA, 19 nt, Artificial Sequence
  Description of Artificial Sequence: Synthetic oligonucleotide
  Sense strand starting at position 3959 of SEQ ID NO: 532
acaggauuaucccaagaaa

SEQ ID NO: 44441 - RNA, 19 nt, Artificial Sequence
  Description of Artificial Sequence: Synthetic oligonucleotide
  Antisense strand to SEQ ID NO: 44360
uuucuugggauaauccugu

SEQ ID NO: 44442 - RNA, 19 nt, Artificial Sequence
  Description of Artificial Sequence: Synthetic oligonucleotide
  Sense strand starting at position 3918 of SEQ ID NO: 532
agcgguucuguagaacuca

SEQ ID NO: 44443 - RNA, 19 nt, Artificial Sequence
  Description of Artificial Sequence: Synthetic oligonucleotide
  Antisense strand to SEQ ID NO: 44362
ugaguucuacagaaccgcu

SEQ ID NO: 44444 - RNA, 19 nt, Artificial Sequence
  Description of Artificial Sequence: Synthetic oligonucleotide
  Sense strand starting at position 3786 of SEQ ID NO: 532
gcuucucaaggacaguaau

SEQ ID NO: 44445 - RNA, 19 nt, Artificial Sequence
  Description of Artificial Sequence: Synthetic oligonucleotide
  Antisense strand to SEQ ID NO: 44364
auuacuguccuugagaagc

SEQ ID NO: 44446 - RNA, 19 nt, Artificial Sequence
  Description of Artificial Sequence: Synthetic oligonucleotide
  Sense strand starting at position 3783 of SEQ ID NO: 532
ugagcuucucaaggacagu

SEQ ID NO: 44447 - RNA, 19 nt, Artificial Sequence
  Description of Artificial Sequence: Synthetic oligonucleotide
  Antisense strand to SEQ ID NO: 44366
acuguccuugagaagcuca

SEQ ID NO: 44448 - RNA, 19 nt, Artificial Sequence
  Description of Artificial Sequence: Synthetic oligonucleotide
  Sense strand starting at position 3771 of SEQ ID NO: 532
uuaaauaaacugugagcuu

SEQ ID NO: 44449 - RNA, 19 nt, Artificial Sequence
  Description of Artificial Sequence: Synthetic oligonucleotide
  Antisense strand to SEQ ID NO: 44368
aagcucacaguuuauuuaa

SEQ ID NO: 44450 - RNA, 19 nt, Artificial Sequence
  Description of Artificial Sequence: Synthetic oligonucleotide
  Sense strand starting at position 3755 of SEQ ID NO: 532
uuguaugugccucacauua

SEQ ID NO: 44451 - RNA, 19 nt, Artificial Sequence
  Description of Artificial Sequence: Synthetic oligonucleotide
  Antisense strand to SEQ ID NO: 44370
uaaugugaggcacauacaa

SEQ ID NO: 44452 - RNA, 19 nt, Artificial Sequence
  Description of Artificial Sequence: Synthetic oligonucleotide
  Sense strand starting at position 3738 of SEQ ID NO: 532
uguauuugcuugguuacuu

SEQ ID NO: 44453 - RNA, 19 nt, Artificial Sequence
  Description of Artificial Sequence: Synthetic oligonucleotide
  Antisense strand to SEQ ID NO: 44372
aaguaaccaagcaaauaca

SEQ ID NO: 44454 - RNA, 19 nt, Artificial Sequence
  Description of Artificial Sequence: Synthetic oligonucleotide
  Sense strand starting at position 3737 of SEQ ID NO: 532
uuguauuugcuugguuacu

SEQ ID NO: 44455 - RNA, 19 nt, Artificial Sequence
  Description of Artificial Sequence: Synthetic oligonucleotide
  Antisense strand to SEQ ID NO: 44374
aguaaccaagcaaauacaa

SEQ ID NO: 44456 - RNA, 19 nt, Artificial Sequence
  Description of Artificial Sequence: Synthetic oligonucleotide
  Sense strand starting at position 3736 of SEQ ID NO: 532
guuguauuugcuugguuac

SEQ ID NO: 44457 - RNA, 19 nt, Artificial Sequence
  Description of Artificial Sequence: Synthetic oligonucleotide
  Antisense strand to SEQ ID NO: 44376
guaaccaagcaaauacaac

SEQ ID NO: 44458 - RNA, 19 nt, Artificial Sequence
  Description of Artificial Sequence: Synthetic oligonucleotide
  Sense strand starting at position 3735 of SEQ ID NO: 532
uguuguauuugcuugguua

SEQ ID NO: 44459 - RNA, 19 nt, Artificial Sequence
  Description of Artificial Sequence: Synthetic oligonucleotide
  Antisense strand to SEQ ID NO: 44378
uaaccaagcaaauacaaca

SEQ ID NO: 44460 - RNA, 19 nt, Artificial Sequence
  Description of Artificial Sequence: Synthetic oligonucleotide
  Sense strand starting at position 3605 of SEQ ID NO: 532
uggauaucuuaagcuguuu

SEQ ID NO: 44461 - RNA, 19 nt, Artificial Sequence
  Description of Artificial Sequence: Synthetic oligonucleotide
  Antisense strand to SEQ ID NO: 44380
aaacagcuuaagauaucca

SEQ ID NO: 44462 - RNA, 19 nt, Artificial Sequence
  Description of Artificial Sequence: Synthetic oligonucleotide
  Sense strand starting at position 3597 of SEQ ID NO: 532
uucuuaaguggauaucuua

SEQ ID NO: 44463 - RNA, 19 nt, Artificial Sequence
  Description of Artificial Sequence: Synthetic oligonucleotide
  Antisense strand to SEQ ID NO: 44382
uaagauauccacuuaagaa

SEQ ID NO: 44464 - RNA, 19 nt, Artificial Sequence
  Description of Artificial Sequence: Synthetic oligonucleotide
  Sense strand starting at position 3592 of SEQ ID NO: 532
gaucuuucuuaaguggaua

SEQ ID NO: 44465 - RNA, 19 nt, Artificial Sequence
  Description of Artificial Sequence: Synthetic oligonucleotide
  Antisense strand to SEQ ID NO: 44384
uauccacuuaagaaagauc

SEQ ID NO: 44466 - RNA, 19 nt, Artificial Sequence
  Description of Artificial Sequence: Synthetic oligonucleotide
  Sense strand starting at position 3588 of SEQ ID NO: 532
gagugaucuuucuuaagug

SEQ ID NO: 44467 - RNA, 19 nt, Artificial Sequence
  Description of Artificial Sequence: Synthetic oligonucleotide
  Antisense strand to SEQ ID NO: 44386
cacuuaagaaagaucacuc

SEQ ID NO: 44468 - RNA, 19 nt, Artificial Sequence
  Description of Artificial Sequence: Synthetic oligonucleotide
  Sense strand starting at position 3533 of SEQ ID NO: 532
gguuucucuggccagaguu

SEQ ID NO: 44469 - RNA, 19 nt, Artificial Sequence
  Description of Artificial Sequence: Synthetic oligonucleotide
  Antisense strand to SEQ ID NO: 44388
aacucuggccagagaaacc

SEQ ID NO: 44470 - RNA, 19 nt, Artificial Sequence
  Description of Artificial Sequence: Synthetic oligonucleotide
  Sense strand starting at position 3376 of SEQ ID NO: 532
ugggaauuauucuugacuc

SEQ ID NO: 44471 - RNA, 19 nt, Artificial Sequence
  Description of Artificial Sequence: Synthetic oligonucleotide
  Antisense strand to SEQ ID NO: 44390
gagucaagaauaauuccca

SEQ ID NO: 44472 - RNA, 19 nt, Artificial Sequence
  Description of Artificial Sequence: Synthetic oligonucleotide
  Sense strand starting at position 3264 of SEQ ID NO: 532
caacuauccguuugaagga

SEQ ID NO: 44473 - RNA, 19 nt, Artificial Sequence
  Description of Artificial Sequence: Synthetic oligonucleotide
  Antisense strand to SEQ ID NO: 44392
uccuucaaacggauaguug

SEQ ID NO: 44474 - RNA, 19 nt, Artificial Sequence
  Description of Artificial Sequence: Synthetic oligonucleotide
  Sense strand starting at position 3207 of SEQ ID NO: 532
gaaggugguccugaagguu

SEQ ID NO: 44475 - RNA, 19 nt, Artificial Sequence
  Description of Artificial Sequence: Synthetic oligonucleotide
  Antisense strand to SEQ ID NO: 44394
aaccuucaggaccaccuuc

SEQ ID NO: 44476 - RNA, 19 nt, Artificial Sequence
  Description of Artificial Sequence: Synthetic oligonucleotide
  Sense strand starting at position 3187 of SEQ ID NO: 532
uugacaugguaaucccauu

SEQ ID NO: 44477 - RNA, 19 nt, Artificial Sequence
  Description of Artificial Sequence: Synthetic oligonucleotide
  Antisense strand to SEQ ID NO: 44396
aaugggauuaccaugucaa

SEQ ID NO: 44478 - RNA, 19 nt, Artificial Sequence
  Description of Artificial Sequence: Synthetic oligonucleotide
  Sense strand starting at position 3150 of SEQ ID NO: 532
agugauggucuagauucca

SEQ ID NO: 44479 - RNA, 19 nt, Artificial Sequence
  Description of Artificial Sequence: Synthetic oligonucleotide
  Antisense strand to SEQ ID NO: 44398
uggaaucuagaccaucacu

SEQ ID NO: 44480 - RNA, 19 nt, Artificial Sequence
  Description of Artificial Sequence: Synthetic oligonucleotide
  Sense strand starting at position 3106 of SEQ ID NO: 532
gauuauaaugcuggucauu

SEQ ID NO: 44481 - RNA, 19 nt, Artificial Sequence
  Description of Artificial Sequence: Synthetic oligonucleotide
  Antisense strand to SEQ ID NO: 44400
aaugaccagcauuauaauc

SEQ ID NO: 44482 - RNA, 19 nt, Artificial Sequence
  Description of Artificial Sequence: Synthetic oligonucleotide
  Sense strand starting at position 3089 of SEQ ID NO: 532
gcccaacuuuguccauaga

SEQ ID NO: 44483 - RNA, 19 nt, Artificial Sequence
  Description of Artificial Sequence: Synthetic oligonucleotide
  Antisense strand to SEQ ID NO: 44402
ucuauggacaaaguugggc

SEQ ID NO: 44484 - RNA, 19 nt, Artificial Sequence
  Description of Artificial Sequence: Synthetic oligonucleotide
  Sense strand starting at position 2842 of SEQ ID NO: 532
acucuuagucaucaugcca

SEQ ID NO: 44485 - RNA, 19 nt, Artificial Sequence
  Description of Artificial Sequence: Synthetic oligonucleotide
  Antisense strand to SEQ ID NO: 44404
uggcaugaugacuaagagu

SEQ ID NO: 44486 - RNA, 19 nt, Artificial Sequence
  Description of Artificial Sequence: Synthetic oligonucleotide
  Sense strand starting at position 2817 of SEQ ID NO: 532
ucaaaugauugagcuccua

SEQ ID NO: 44487 - RNA, 19 nt, Artificial Sequence
  Description of Artificial Sequence: Synthetic oligonucleotide
  Antisense strand to SEQ ID NO: 44406
uaggagcucaaucauuuga

SEQ ID NO: 44488 - RNA, 19 nt, Artificial Sequence
  Description of Artificial Sequence: Synthetic oligonucleotide
  Sense strand starting at position 2602 of SEQ ID NO: 532
cuaagacagcucugucauc

SEQ ID NO: 44489 - RNA, 19 nt, Artificial Sequence
  Description of Artificial Sequence: Synthetic oligonucleotide
  Antisense strand to SEQ ID NO: 44408
gaugacagagcugucuuag

SEQ ID NO: 44490 - RNA, 19 nt, Artificial Sequence
  Description of Artificial Sequence: Synthetic oligonucleotide
  Sense strand starting at position 2556 of SEQ ID NO: 532
uggucuucugcucaaauau

SEQ ID NO: 44491 - RNA, 19 nt, Artificial Sequence
  Description of Artificial Sequence: Synthetic oligonucleotide
  Antisense strand to SEQ ID NO: 44410
auauuugagcagaagacca

SEQ ID NO: 44492 - RNA, 19 nt, Artificial Sequence
  Description of Artificial Sequence: Synthetic oligonucleotide
  Sense strand starting at position 2262 of SEQ ID NO: 532
cacagugagcucugauaaa

SEQ ID NO: 44493 - RNA, 19 nt, Artificial Sequence
  Description of Artificial Sequence: Synthetic oligonucleotide
  Antisense strand to SEQ ID NO: 44412
uuuaucagagcucacugug

SEQ ID NO: 44494 - RNA, 19 nt, Artificial Sequence
  Description of Artificial Sequence: Synthetic oligonucleotide
  Sense strand starting at position 2212 of SEQ ID NO: 532
uuuaucuccggugagauaa

SEQ ID NO: 44495 - RNA, 19 nt, Artificial Sequence
  Description of Artificial Sequence: Synthetic oligonucleotide
  Antisense strand to SEQ ID NO: 44414
uuaucucaccggagauaaa

SEQ ID NO: 44496 - RNA, 19 nt, Artificial Sequence
  Description of Artificial Sequence: Synthetic oligonucleotide
  Sense strand starting at position 1140 of SEQ ID NO: 532
ggucuuaacuauccucaag

SEQ ID NO: 44497 - RNA, 19 nt, Artificial Sequence
  Description of Artificial Sequence: Synthetic oligonucleotide
  Antisense strand to SEQ ID NO: 44416
cuugaggauaguuaagacc

SEQ ID NO: 44498 - RNA, 19 nt, Artificial Sequence
  Description of Artificial Sequence: Synthetic oligonucleotide
  Sense strand starting at position 1116 of SEQ ID NO: 532
accauuugucagugcuuaa

SEQ ID NO: 44499 - RNA, 19 nt, Artificial Sequence
  Description of Artificial Sequence: Synthetic oligonucleotide
  Antisense strand to SEQ ID NO: 44418
uuaagcacugacaaauggu

SEQ ID NO: 44500 - RNA, 19 nt, Artificial Sequence
  Description of Artificial Sequence: Synthetic oligonucleotide
  Sense strand starting at position 999 of SEQ ID NO: 532
cuagaagggucuccugaga

SEQ ID NO: 44501 - RNA, 19 nt, Artificial Sequence
  Description of Artificial Sequence: Synthetic oligonucleotide
  Antisense strand to SEQ ID NO: 44420
ucucaggagacccuucuag

SEQ ID NO: 44502 - RNA, 19 nt, Artificial Sequence
  Description of Artificial Sequence: Synthetic oligonucleotide
  Sense strand starting at position 915 of SEQ ID NO: 532
caauuaaaucugcgaagga

SEQ ID NO: 44503 - RNA, 19 nt, Artificial Sequence
  Description of Artificial Sequence: Synthetic oligonucleotide
  Antisense strand to SEQ ID NO: 44422
uccuucgcagauuuaauug

SEQ ID NO: 44504 - RNA, 19 nt, Artificial Sequence
  Description of Artificial Sequence: Synthetic oligonucleotide
  Sense strand starting at position 767 of SEQ ID NO: 532
ucaucugaccugugguaaa

SEQ ID NO: 44505 - RNA, 19 nt, Artificial Sequence
  Description of Artificial Sequence: Synthetic oligonucleotide
  Antisense strand to SEQ ID NO: 44424
uuuaccacaggucagauga

SEQ ID NO: 44506 - RNA, 19 nt, Artificial Sequence
  Description of Artificial Sequence: Synthetic oligonucleotide
  Sense strand starting at position 604 of SEQ ID NO: 532
agaaucccugucuguauua

SEQ ID NO: 44507 - RNA, 19 nt, Artificial Sequence
  Description of Artificial Sequence: Synthetic oligonucleotide
  Antisense strand to SEQ ID NO: 44426
uaauacagacagggauucu

SEQ ID NO: 44508 - RNA, 19 nt, Artificial Sequence
  Description of Artificial Sequence: Synthetic oligonucleotide
  Sense strand starting at position 580 of SEQ ID NO: 532
uuaaucuagucaguaagua

SEQ ID NO: 44509 - RNA, 19 nt, Artificial Sequence
  Description of Artificial Sequence: Synthetic oligonucleotide
  Antisense strand to SEQ ID NO: 44428
uacuuacugacuagauuaa

SEQ ID NO: 44510 - RNA, 19 nt, Artificial Sequence
  Description of Artificial Sequence: Synthetic oligonucleotide
  Sense strand starting at position 577 of SEQ ID NO: 532
acauuaaucuagucaguaa

SEQ ID NO: 44511 - RNA, 19 nt, Artificial Sequence
  Description of Artificial Sequence: Synthetic oligonucleotide
  Antisense strand to SEQ ID NO: 44430
uuacugacuagauuaaugu

SEQ ID NO: 44512 - RNA, 19 nt, Artificial Sequence
  Description of Artificial Sequence: Synthetic oligonucleotide
  Sense strand starting at position 174 of SEQ ID NO: 532
ggagaucaauaugauacau

SEQ ID NO: 44513 - RNA, 19 nt, Artificial Sequence
  Description of Artificial Sequence: Synthetic oligonucleotide
  Antisense strand to SEQ ID NO: 44432
auguaucauauugaucucc

SEQ ID NO: 44514 - RNA, 19 nt, Artificial Sequence
  Description of Artificial Sequence: Synthetic oligonucleotide
  Sense strand starting at position 80 of SEQ ID NO: 532
caaaccuuuguuggagaaa

SEQ ID NO: 44515 - RNA, 19 nt, Artificial Sequence
  Description of Artificial Sequence: Synthetic oligonucleotide
  Antisense strand to SEQ ID NO: 44434
uuucuccaacaaagguuug

SEQ ID NO: 44516 - RNA, 19 nt, Artificial Sequence
  Description of Artificial Sequence: Synthetic oligonucleotide
  Sense strand starting at position 76 of SEQ ID NO: 532
ucaacaaaccuuuguugga

SEQ ID NO: 44517 - RNA, 19 nt, Artificial Sequence
  Description of Artificial Sequence: Synthetic oligonucleotide
  Antisense strand to SEQ ID NO: 44436
uccaacaaagguuuguuga

SEQ ID NO: 44518 - RNA, 19 nt, Artificial Sequence
  Description of Artificial Sequence: Synthetic oligonucleotide
  Sense strand starting at position 61 of SEQ ID NO: 532
auacguaauacggacucaa

SEQ ID NO: 44519 - RNA, 19 nt, Artificial Sequence
  Description of Artificial Sequence: Synthetic oligonucleotide
  Antisense strand to SEQ ID NO: 44438
uugaguccguauuacguau

SEQ ID NO: 44520 - RNA, 19 nt, Artificial Sequence
  Description of Artificial Sequence: Synthetic oligonucleotide
  Sense strand starting at position 778 of SEQ ID NO: 533
ucuaaagucuaucuaagag

SEQ ID NO: 44521 - RNA, 19 nt, Artificial Sequence
  Description of Artificial Sequence: Synthetic oligonucleotide
  Antisense strand to SEQ ID NO: 44440
cucuuagauagacuuuaga

SEQ ID NO: 44522 - RNA, 19 nt, Artificial Sequence
  Description of Artificial Sequence: Synthetic oligonucleotide
  Sense strand starting at position 1056 of SEQ ID NO: 533
uggccauggucacuugaau

SEQ ID NO: 44523 - RNA, 19 nt, Artificial Sequence
  Description of Artificial Sequence: Synthetic oligonucleotide
  Antisense strand to SEQ ID NO: 44442
auucaagugaccauggcca

SEQ ID NO: 44524 - RNA, 19 nt, Artificial Sequence
  Description of Artificial Sequence: Synthetic oligonucleotide
  Sense strand starting at position 1406 of SEQ ID NO: 533
ucagucuuccaauggcgaa

SEQ ID NO: 44525 - RNA, 19 nt, Artificial Sequence
  Description of Artificial Sequence: Synthetic oligonucleotide
  Antisense strand to SEQ ID NO: 44444
uucgccauuggaagacuga

SEQ ID NO: 44526 - RNA, 19 nt, Artificial Sequence
  Description of Artificial Sequence: Synthetic oligonucleotide
  Sense strand starting at position 2110 of SEQ ID NO: 533
gugguaaaucucggaacug

SEQ ID NO: 44527 - RNA, 19 nt, Artificial Sequence
  Description of Artificial Sequence: Synthetic oligonucleotide
  Antisense strand to SEQ ID NO: 44446
caguuccgagauuuaccac

SEQ ID NO: 44528 - RNA, 19 nt, Artificial Sequence
  Description of Artificial Sequence: Synthetic oligonucleotide
  Sense strand starting at position 2168 of SEQ ID NO: 533
ggaauccucuuggaagaau

SEQ ID NO: 44529 - RNA, 19 nt, Artificial Sequence
  Description of Artificial Sequence: Synthetic oligonucleotide
  Antisense strand to SEQ ID NO: 44448
auucuuccaagaggauucc

SEQ ID NO: 44530 - RNA, 19 nt, Artificial Sequence
  Description of Artificial Sequence: Synthetic oligonucleotide
  Sense strand starting at position 2281 of SEQ ID NO: 533
ugggaagugugaguguaaa

SEQ ID NO: 44531 - RNA, 19 nt, Artificial Sequence
  Description of Artificial Sequence: Synthetic oligonucleotide
  Antisense strand to SEQ ID NO: 44450
uuuacacucacacuuccca

SEQ ID NO: 44532 - RNA, 19 nt, Artificial Sequence
  Description of Artificial Sequence: Synthetic oligonucleotide
  Sense strand starting at position 2340 of SEQ ID NO: 533
ucuggcuuuagcuaguaga

SEQ ID NO: 44533 - RNA, 19 nt, Artificial Sequence
  Description of Artificial Sequence: Synthetic oligonucleotide
  Antisense strand to SEQ ID NO: 44452
ucuacuagcuaaagccaga

SEQ ID NO: 44534 - RNA, 19 nt, Artificial Sequence
  Description of Artificial Sequence: Synthetic oligonucleotide
  Sense strand starting at position 2385 of SEQ ID NO: 533
cuugauguggcauauauga

SEQ ID NO: 44535 - RNA, 19 nt, Artificial Sequence
  Description of Artificial Sequence: Synthetic oligonucleotide
  Antisense strand to SEQ ID NO: 44454
ucauauaugccacaucaag

SEQ ID NO: 44536 - RNA, 19 nt, Artificial Sequence
  Description of Artificial Sequence: Synthetic oligonucleotide
  Sense strand starting at position 2387 of SEQ ID NO: 533
ugauguggcauauaugaua

SEQ ID NO: 44537 - RNA, 19 nt, Artificial Sequence
  Description of Artificial Sequence: Synthetic oligonucleotide
  Antisense strand to SEQ ID NO: 44456
uaucauauaugccacauca

SEQ ID NO: 44538 - RNA, 19 nt, Artificial Sequence
  Description of Artificial Sequence: Synthetic oligonucleotide
  Sense strand starting at position 2398 of SEQ ID NO: 533
auaugauaagcuggauaau

SEQ ID NO: 44539 - RNA, 19 nt, Artificial Sequence
  Description of Artificial Sequence: Synthetic oligonucleotide
  Antisense strand to SEQ ID NO: 44458
auuauccagcuuaucauau

SEQ ID NO: 44540 - RNA, 19 nt, Artificial Sequence
  Description of Artificial Sequence: Synthetic oligonucleotide
  Sense strand starting at position 2488 of SEQ ID NO: 533
uuccuugugggcugacauu

SEQ ID NO: 44541 - RNA, 19 nt, Artificial Sequence
  Description of Artificial Sequence: Synthetic oligonucleotide
  Antisense strand to SEQ ID NO: 44460
aaugucagcccacaaggaa

SEQ ID NO: 44542 - RNA, 19 nt, Artificial Sequence
  Description of Artificial Sequence: Synthetic oligonucleotide
  Sense strand starting at position 2497 of SEQ ID NO: 533
ggcugacauuucccuguuu

SEQ ID NO: 44543 - RNA, 19 nt, Artificial Sequence
  Description of Artificial Sequence: Synthetic oligonucleotide
  Antisense strand to SEQ ID NO: 44462
aaacagggaaaugucagcc

SEQ ID NO: 44544 - RNA, 19 nt, Artificial Sequence
  Description of Artificial Sequence: Synthetic oligonucleotide
  Sense strand starting at position 2543 of SEQ ID NO: 533
agcagcuuguaguugagaa

SEQ ID NO: 44545 - RNA, 19 nt, Artificial Sequence
  Description of Artificial Sequence: Synthetic oligonucleotide
  Antisense strand to SEQ ID NO: 44464
uucucaacuacaagcugcu

SEQ ID NO: 44546 - RNA, 19 nt, Artificial Sequence
  Description of Artificial Sequence: Synthetic oligonucleotide
  Sense strand starting at position 2544 of SEQ ID NO: 533
gcagcuuguaguugagaag

SEQ ID NO: 44547 - RNA, 19 nt, Artificial Sequence
  Description of Artificial Sequence: Synthetic oligonucleotide
  Antisense strand to SEQ ID NO: 44466
cuucucaacuacaagcugc

SEQ ID NO: 44548 - RNA, 19 nt, Artificial Sequence
  Description of Artificial Sequence: Synthetic oligonucleotide
  Sense strand starting at position 2545 of SEQ ID NO: 533
cagcuuguaguugagaagu

SEQ ID NO: 44549 - RNA, 19 nt, Artificial Sequence
  Description of Artificial Sequence: Synthetic oligonucleotide
  Antisense strand to SEQ ID NO: 44468
acuucucaacuacaagcug

SEQ ID NO: 44550 - RNA, 19 nt, Artificial Sequence
  Description of Artificial Sequence: Synthetic oligonucleotide
  Sense strand starting at position 2647 of SEQ ID NO: 533
aguguaauagucgaugcau

SEQ ID NO: 44551 - RNA, 19 nt, Artificial Sequence
  Description of Artificial Sequence: Synthetic oligonucleotide
  Antisense strand to SEQ ID NO: 44470
augcaucgacuauuacacu

SEQ ID NO: 44552 - RNA, 19 nt, Artificial Sequence
  Description of Artificial Sequence: Synthetic oligonucleotide
  Sense strand starting at position 2731 of SEQ ID NO: 533
cguuaucaguauuuagcau

SEQ ID NO: 44553 - RNA, 19 nt, Artificial Sequence
  Description of Artificial Sequence: Synthetic oligonucleotide
  Antisense strand to SEQ ID NO: 44472
augcuaaauacugauaacg

SEQ ID NO: 44554 - RNA, 19 nt, Artificial Sequence
  Description of Artificial Sequence: Synthetic oligonucleotide
  Sense strand starting at position 2756 of SEQ ID NO: 533
augcaucuccaggauucua

SEQ ID NO: 44555 - RNA, 19 nt, Artificial Sequence
  Description of Artificial Sequence: Synthetic oligonucleotide
  Antisense strand to SEQ ID NO: 44474
uagaauccuggagaugcau

SEQ ID NO: 44556 - RNA, 19 nt, Artificial Sequence
  Description of Artificial Sequence: Synthetic oligonucleotide
  Sense strand starting at position 2840 of SEQ ID NO: 533
uuaucauauuuggaugcau

SEQ ID NO: 44557 - RNA, 19 nt, Artificial Sequence
  Description of Artificial Sequence: Synthetic oligonucleotide
  Antisense strand to SEQ ID NO: 44476
augcauccaaauaugauaa

SEQ ID NO: 44558 - RNA, 19 nt, Artificial Sequence
  Description of Artificial Sequence: Synthetic oligonucleotide
  Sense strand starting at position 2849 of SEQ ID NO: 533
uuggaugcauuccugugua

SEQ ID NO: 44559 - RNA, 19 nt, Artificial Sequence
  Description of Artificial Sequence: Synthetic oligonucleotide
  Antisense strand to SEQ ID NO: 44478
uacacaggaaugcauccaa

SEQ ID NO: 44560 - RNA, 19 nt, Artificial Sequence
  Description of Artificial Sequence: Synthetic oligonucleotide
  Sense strand starting at position 2903 of SEQ ID NO: 533
auacauauagccuggaauu

SEQ ID NO: 44561 - RNA, 19 nt, Artificial Sequence
  Description of Artificial Sequence: Synthetic oligonucleotide
  Antisense strand to SEQ ID NO: 44480
aauuccaggcuauauguau

SEQ ID NO: 44562 - RNA, 19 nt, Artificial Sequence
  Description of Artificial Sequence: Synthetic oligonucleotide
  Sense strand starting at position 2970 of SEQ ID NO: 533
cguguaguaacagaacauu

SEQ ID NO: 44563 - RNA, 19 nt, Artificial Sequence
  Description of Artificial Sequence: Synthetic oligonucleotide
  Antisense strand to SEQ ID NO: 44482
aauguucuguuacuacacg

SEQ ID NO: 44564 - RNA, 19 nt, Artificial Sequence
  Description of Artificial Sequence: Synthetic oligonucleotide
  Sense strand starting at position 2990 of SEQ ID NO: 533
auuucuuacugccuaguca

SEQ ID NO: 44565 - RNA, 19 nt, Artificial Sequence
  Description of Artificial Sequence: Synthetic oligonucleotide
  Antisense strand to SEQ ID NO: 44484
ugacuaggcaguaagaaau

SEQ ID NO: 44566 - RNA, 19 nt, Artificial Sequence
  Description of Artificial Sequence: Synthetic oligonucleotide
  Sense strand starting at position 3019 of SEQ ID NO: 533
uucuccugucaggaaugua

SEQ ID NO: 44567 - RNA, 19 nt, Artificial Sequence
  Description of Artificial Sequence: Synthetic oligonucleotide
  Antisense strand to SEQ ID NO: 44486
uacauuccugacaggagaa

SEQ ID NO: 44568 - RNA, 19 nt, Artificial Sequence
  Description of Artificial Sequence: Synthetic oligonucleotide
  Sense strand starting at position 3043 of SEQ ID NO: 533
uacuguagcggauaggauu

SEQ ID NO: 44569 - RNA, 19 nt, Artificial Sequence
  Description of Artificial Sequence: Synthetic oligonucleotide
  Antisense strand to SEQ ID NO: 44488
aauccuauccgcuacagua

SEQ ID NO: 44570 - RNA, 19 nt, Artificial Sequence
  Description of Artificial Sequence: Synthetic oligonucleotide
  Sense strand starting at position 3114 of SEQ ID NO: 533
guaucagacuucccaaguu

SEQ ID NO: 44571 - RNA, 19 nt, Artificial Sequence
  Description of Artificial Sequence: Synthetic oligonucleotide
  Antisense strand to SEQ ID NO: 44490
aacuugggaagucugauac

SEQ ID NO: 44572 - RNA, 19 nt, Artificial Sequence
  Description of Artificial Sequence: Synthetic oligonucleotide
  Sense strand starting at position 3126 of SEQ ID NO: 533
ccaaguucguaggucacau

SEQ ID NO: 44573 - RNA, 19 nt, Artificial Sequence
  Description of Artificial Sequence: Synthetic oligonucleotide
  Antisense strand to SEQ ID NO: 44492
augugaccuacgaacuugg

SEQ ID NO: 44574 - RNA, 19 nt, Artificial Sequence
  Description of Artificial Sequence: Synthetic oligonucleotide
  Sense strand starting at position 3173 of SEQ ID NO: 533
uugugacauuucuaauugu

SEQ ID NO: 44575 - RNA, 19 nt, Artificial Sequence
  Description of Artificial Sequence: Synthetic oligonucleotide
  Antisense strand to SEQ ID NO: 44494
acaauuagaaaugucacaa

SEQ ID NO: 44576 - RNA, 19 nt, Artificial Sequence
  Description of Artificial Sequence: Synthetic oligonucleotide
  Sense strand starting at position 3385 of SEQ ID NO: 533
ggacucuaauuugaaccua

SEQ ID NO: 44577 - RNA, 19 nt, Artificial Sequence
  Description of Artificial Sequence: Synthetic oligonucleotide
  Antisense strand to SEQ ID NO: 44496
uagguucaaauuagagucc

SEQ ID NO: 44578 - RNA, 19 nt, Artificial Sequence
  Description of Artificial Sequence: Synthetic oligonucleotide
  Sense strand starting at position 3556 of SEQ ID NO: 533
uugcuagucuacccagaau

SEQ ID NO: 44579 - RNA, 19 nt, Artificial Sequence
  Description of Artificial Sequence: Synthetic oligonucleotide
  Antisense strand to SEQ ID NO: 44498
auucuggguagacuagcaa

SEQ ID NO: 44580 - RNA, 19 nt, Artificial Sequence
  Description of Artificial Sequence: Synthetic oligonucleotide
  Sense strand starting at position 3599 of SEQ ID NO: 533
ugcauuccguaauuacuga

SEQ ID NO: 44581 - RNA, 19 nt, Artificial Sequence
  Description of Artificial Sequence: Synthetic oligonucleotide
  Antisense strand to SEQ ID NO: 44500
ucaguaauuacggaaugca

SEQ ID NO: 44582 - RNA, 19 nt, Artificial Sequence
  Description of Artificial Sequence: Synthetic oligonucleotide
  Sense strand starting at position 3615 of SEQ ID NO: 533
ugauaaggcugagcacuuu

SEQ ID NO: 44583 - RNA, 19 nt, Artificial Sequence
  Description of Artificial Sequence: Synthetic oligonucleotide
  Antisense strand to SEQ ID NO: 44502
aaagugcucagccuuauca

SEQ ID NO: 44584 - RNA, 19 nt, Artificial Sequence
  Description of Artificial Sequence: Synthetic oligonucleotide
  Sense strand starting at position 3621 of SEQ ID NO: 533
ggcugagcacuuugaaaua

SEQ ID NO: 44585 - RNA, 19 nt, Artificial Sequence
  Description of Artificial Sequence: Synthetic oligonucleotide
  Antisense strand to SEQ ID NO: 44504
uauuucaaagugcucagcc

SEQ ID NO: 44586 - RNA, 19 nt, Artificial Sequence
  Description of Artificial Sequence: Synthetic oligonucleotide
  Sense strand starting at position 3752 of SEQ ID NO: 533
guagguguugcagauaucu

SEQ ID NO: 44587 - RNA, 19 nt, Artificial Sequence
  Description of Artificial Sequence: Synthetic oligonucleotide
  Antisense strand to SEQ ID NO: 44506
agauaucugcaacaccuac

SEQ ID NO: 44588 - RNA, 19 nt, Artificial Sequence
  Description of Artificial Sequence: Synthetic oligonucleotide
  Sense strand starting at position 3754 of SEQ ID NO: 533
agguguugcagauaucuuc

SEQ ID NO: 44589 - RNA, 19 nt, Artificial Sequence
  Description of Artificial Sequence: Synthetic oligonucleotide
  Antisense strand to SEQ ID NO: 44508
gaagauaucugcaacaccu

SEQ ID NO: 44590 - RNA, 19 nt, Artificial Sequence
  Description of Artificial Sequence: Synthetic oligonucleotide
  Sense strand starting at position 3761 of SEQ ID NO: 533
gcagauaucuucucccugu

SEQ ID NO: 44591 - RNA, 19 nt, Artificial Sequence
  Description of Artificial Sequence: Synthetic oligonucleotide
  Antisense strand to SEQ ID NO: 44510
acagggagaagauaucugc

SEQ ID NO: 44592 - RNA, 19 nt, Artificial Sequence
  Description of Artificial Sequence: Synthetic oligonucleotide
  Sense strand starting at position 3904 of SEQ ID NO: 533
gcuauauuaguguguagga

SEQ ID NO: 44593 - RNA, 19 nt, Artificial Sequence
  Description of Artificial Sequence: Synthetic oligonucleotide
  Antisense strand to SEQ ID NO: 44512
uccuacacacuaauauagc

SEQ ID NO: 44594 - RNA, 19 nt, Artificial Sequence
  Description of Artificial Sequence: Synthetic oligonucleotide
  Sense strand starting at position 3906 of SEQ ID NO: 533
uauauuaguguguaggaga

SEQ ID NO: 44595 - RNA, 19 nt, Artificial Sequence
  Description of Artificial Sequence: Synthetic oligonucleotide
  Antisense strand to SEQ ID NO: 44514
ucuccuacacacuaauaua

SEQ ID NO: 44596 - RNA, 19 nt, Artificial Sequence
  Description of Artificial Sequence: Synthetic oligonucleotide
  Sense strand starting at position 3911 of SEQ ID NO: 533
uaguguguaggagagauua

SEQ ID NO: 44597 - RNA, 19 nt, Artificial Sequence
  Description of Artificial Sequence: Synthetic oligonucleotide
  Antisense strand to SEQ ID NO: 44516
uaaucucuccuacacacua

SEQ ID NO: 44598 - RNA, 19 nt, Artificial Sequence
  Description of Artificial Sequence: Synthetic oligonucleotide
  Sense strand starting at position 3913 of SEQ ID NO: 533
guguguaggagagauuaua

SEQ ID NO: 44599 - RNA, 19 nt, Artificial Sequence
  Description of Artificial Sequence: Synthetic oligonucleotide
  Antisense strand to SEQ ID NO: 44518
uauaaucucuccuacacac

SEQ ID NO: 44600 - RNA, 19 nt, Artificial Sequence
  Description of Artificial Sequence: Synthetic oligonucleotide
  Sense strand starting at position 82 of SEQ ID NO: 534
auucccuuccauuguuuga

SEQ ID NO: 44601 - RNA, 19 nt, Artificial Sequence
  Description of Artificial Sequence: Synthetic oligonucleotide
  Antisense strand to SEQ ID NO: 44520
ucaaacaauggaagggaau

SEQ ID NO: 44602 - RNA, 19 nt, Artificial Sequence
  Description of Artificial Sequence: Synthetic oligonucleotide
  Sense strand starting at position 119 of SEQ ID NO: 534
agacuuaccuccgcaagaa

SEQ ID NO: 44603 - RNA, 19 nt, Artificial Sequence
  Description of Artificial Sequence: Synthetic oligonucleotide
  Antisense strand to SEQ ID NO: 44522
uucuugcggagguaagucu

SEQ ID NO: 44604 - RNA, 19 nt, Artificial Sequence
  Description of Artificial Sequence: Synthetic oligonucleotide
  Sense strand starting at position 261 of SEQ ID NO: 534
uagacaaucucguugcaaa

SEQ ID NO: 44605 - RNA, 19 nt, Artificial Sequence
  Description of Artificial Sequence: Synthetic oligonucleotide
  Antisense strand to SEQ ID NO: 44524
uuugcaacgagauugucua

SEQ ID NO: 44606 - RNA, 19 nt, Artificial Sequence
  Description of Artificial Sequence: Synthetic oligonucleotide
  Sense strand starting at position 544 of SEQ ID NO: 534
gaggaaagugguuacagca

SEQ ID NO: 44607 - RNA, 19 nt, Artificial Sequence
  Description of Artificial Sequence: Synthetic oligonucleotide
  Antisense strand to SEQ ID NO: 44526
ugcuguaaccacuuuccuc

SEQ ID NO: 44608 - RNA, 19 nt, Artificial Sequence
  Description of Artificial Sequence: Synthetic oligonucleotide
  Sense strand starting at position 1085 of SEQ ID NO: 534
gggccuggcaauuagaauu

SEQ ID NO: 44609 - RNA, 19 nt, Artificial Sequence
  Description of Artificial Sequence: Synthetic oligonucleotide
  Antisense strand to SEQ ID NO: 44528
aauucuaauugccaggccc

SEQ ID NO: 44610 - RNA, 19 nt, Artificial Sequence
  Description of Artificial Sequence: Synthetic oligonucleotide
  Sense strand starting at position 1095 of SEQ ID NO: 534
auuagaauuggcugcaacu

SEQ ID NO: 44611 - RNA, 19 nt, Artificial Sequence
  Description of Artificial Sequence: Synthetic oligonucleotide
  Antisense strand to SEQ ID NO: 44530
aguugcagccaauucuaau

SEQ ID NO: 44612 - RNA, 19 nt, Artificial Sequence
  Description of Artificial Sequence: Synthetic oligonucleotide
  Sense strand starting at position 1097 of SEQ ID NO: 534
uagaauuggcugcaacuga

SEQ ID NO: 44613 - RNA, 19 nt, Artificial Sequence
  Description of Artificial Sequence: Synthetic oligonucleotide
  Antisense strand to SEQ ID NO: 44532
ucaguugcagccaauucua

SEQ ID NO: 44614 - RNA, 19 nt, Artificial Sequence
  Description of Artificial Sequence: Synthetic oligonucleotide
  Sense strand starting at position 2059 of SEQ ID NO: 534
aggccauagugagacauga

SEQ ID NO: 44615 - RNA, 19 nt, Artificial Sequence
  Description of Artificial Sequence: Synthetic oligonucleotide
  Antisense strand to SEQ ID NO: 44534
ucaugucucacuauggccu

SEQ ID NO: 44616 - RNA, 19 nt, Artificial Sequence
  Description of Artificial Sequence: Synthetic oligonucleotide
  Sense strand starting at position 2138 of SEQ ID NO: 534
gcuucacuucgggaggaga

SEQ ID NO: 44617 - RNA, 19 nt, Artificial Sequence
  Description of Artificial Sequence: Synthetic oligonucleotide
  Antisense strand to SEQ ID NO: 44536
ucuccucccgaagugaagc

SEQ ID NO: 44618 - RNA, 19 nt, Artificial Sequence
  Description of Artificial Sequence: Synthetic oligonucleotide
  Sense strand starting at position 2217 of SEQ ID NO: 534
gcugcuuagggcgguaaua

SEQ ID NO: 44619 - RNA, 19 nt, Artificial Sequence
  Description of Artificial Sequence: Synthetic oligonucleotide
  Antisense strand to SEQ ID NO: 44538
uauuaccgcccuaagcagc

SEQ ID NO: 44620 - RNA, 19 nt, Artificial Sequence
  Description of Artificial Sequence: Synthetic oligonucleotide
  Sense strand starting at position 2219 of SEQ ID NO: 534
ugcuuagggcgguaauaag

SEQ ID NO: 44621 - RNA, 19 nt, Artificial Sequence
  Description of Artificial Sequence: Synthetic oligonucleotide
  Antisense strand to SEQ ID NO: 44540
cuuauuaccgcccuaagca

SEQ ID NO: 44622 - RNA, 19 nt, Artificial Sequence
  Description of Artificial Sequence: Synthetic oligonucleotide
  Sense strand starting at position 2226 of SEQ ID NO: 534
ggcgguaauaagggaucga

SEQ ID NO: 44623 - RNA, 19 nt, Artificial Sequence
  Description of Artificial Sequence: Synthetic oligonucleotide
  Antisense strand to SEQ ID NO: 44542
ucgaucccuuauuaccgcc

SEQ ID NO: 44624 - RNA, 19 nt, Artificial Sequence
  Description of Artificial Sequence: Synthetic oligonucleotide
  Sense strand starting at position 2227 of SEQ ID NO: 534
gcgguaauaagggaucgaa

SEQ ID NO: 44625 - RNA, 19 nt, Artificial Sequence
  Description of Artificial Sequence: Synthetic oligonucleotide
  Antisense strand to SEQ ID NO: 44544
uucgaucccuuauuaccgc

SEQ ID NO: 44626 - RNA, 19 nt, Artificial Sequence
  Description of Artificial Sequence: Synthetic oligonucleotide
  Sense strand starting at position 2247 of SEQ ID NO: 534
aggauagcauucuugaaug

SEQ ID NO: 44627 - RNA, 19 nt, Artificial Sequence
  Description of Artificial Sequence: Synthetic oligonucleotide
  Antisense strand to SEQ ID NO: 44546
cauucaagaaugcuauccu

SEQ ID NO: 44628 - RNA, 19 nt, Artificial Sequence
  Description of Artificial Sequence: Synthetic oligonucleotide
  Sense strand starting at position 2252 of SEQ ID NO: 534
agcauucuugaaugggaaa

SEQ ID NO: 44629 - RNA, 19 nt, Artificial Sequence
  Description of Artificial Sequence: Synthetic oligonucleotide
  Antisense strand to SEQ ID NO: 44548
uuucccauucaagaaugcu

SEQ ID NO: 44630 - RNA, 19 nt, Artificial Sequence
  Description of Artificial Sequence: Synthetic oligonucleotide
  Sense strand starting at position 2255 of SEQ ID NO: 534
auucuugaaugggaaacau

SEQ ID NO: 44631 - RNA, 19 nt, Artificial Sequence
  Description of Artificial Sequence: Synthetic oligonucleotide
  Antisense strand to SEQ ID NO: 44550
auguuucccauucaagaau

SEQ ID NO: 44632 - RNA, 19 nt, Artificial Sequence
  Description of Artificial Sequence: Synthetic oligonucleotide
  Sense strand starting at position 2339 of SEQ ID NO: 534
gacucauaagggcggaaua

SEQ ID NO: 44633 - RNA, 19 nt, Artificial Sequence
  Description of Artificial Sequence: Synthetic oligonucleotide
  Antisense strand to SEQ ID NO: 44552
uauuccgcccuuaugaguc

SEQ ID NO: 44634 - RNA, 19 nt, Artificial Sequence
  Description of Artificial Sequence: Synthetic oligonucleotide
  Sense strand starting at position 2367 of SEQ ID NO: 534
ucgguuugucuggcgaacu

SEQ ID NO: 44635 - RNA, 19 nt, Artificial Sequence
  Description of Artificial Sequence: Synthetic oligonucleotide
  Antisense strand to SEQ ID NO: 44554
aguucgccagacaaaccga

SEQ ID NO: 44636 - RNA, 19 nt, Artificial Sequence
  Description of Artificial Sequence: Synthetic oligonucleotide
  Sense strand starting at position 2394 of SEQ ID NO: 534
gggucaagaucuggauuuc

SEQ ID NO: 44637 - RNA, 19 nt, Artificial Sequence
  Description of Artificial Sequence: Synthetic oligonucleotide
  Antisense strand to SEQ ID NO: 44556
gaaauccagaucuugaccc

SEQ ID NO: 44638 - RNA, 19 nt, Artificial Sequence
  Description of Artificial Sequence: Synthetic oligonucleotide
  Sense strand starting at position 2429 of SEQ ID NO: 534
uccugauaacccggacguu

SEQ ID NO: 44639 - RNA, 19 nt, Artificial Sequence
  Description of Artificial Sequence: Synthetic oligonucleotide
  Antisense strand to SEQ ID NO: 44558
aacguccggguuaucagga

SEQ ID NO: 44640 - RNA, 19 nt, Artificial Sequence
  Description of Artificial Sequence: Synthetic oligonucleotide
  Sense strand starting at position 2528 of SEQ ID NO: 534
gccgguuuccuguaggaag

SEQ ID NO: 44641 - RNA, 19 nt, Artificial Sequence
  Description of Artificial Sequence: Synthetic oligonucleotide
  Antisense strand to SEQ ID NO: 44560
cuuccuacaggaaaccggc

SEQ ID NO: 44642 - RNA, 19 nt, Artificial Sequence
  Description of Artificial Sequence: Synthetic oligonucleotide
  Sense strand starting at position 2542 of SEQ ID NO: 534
ggaagugucgccuagcuga

SEQ ID NO: 44643 - RNA, 19 nt, Artificial Sequence
  Description of Artificial Sequence: Synthetic oligonucleotide
  Antisense strand to SEQ ID NO: 44562
ucagcuaggcgacacuucc

SEQ ID NO: 44644 - RNA, 19 nt, Artificial Sequence
  Description of Artificial Sequence: Synthetic oligonucleotide
  Sense strand starting at position 2612 of SEQ ID NO: 534
ucugguguggcuuaagaaa

SEQ ID NO: 44645 - RNA, 19 nt, Artificial Sequence
  Description of Artificial Sequence: Synthetic oligonucleotide
  Antisense strand to SEQ ID NO: 44564
uuucuuaagccacaccaga

SEQ ID NO: 44646 - RNA, 19 nt, Artificial Sequence
  Description of Artificial Sequence: Synthetic oligonucleotide
  Sense strand starting at position 2620 of SEQ ID NO: 534
ggcuuaagaaagugguaau

SEQ ID NO: 44647 - RNA, 19 nt, Artificial Sequence
  Description of Artificial Sequence: Synthetic oligonucleotide
  Antisense strand to SEQ ID NO: 44566
auuaccacuuucuuaagcc

SEQ ID NO: 44648 - RNA, 19 nt, Artificial Sequence
  Description of Artificial Sequence: Synthetic oligonucleotide
  Sense strand starting at position 2621 of SEQ ID NO: 534
gcuuaagaaagugguaaua

SEQ ID NO: 44649 - RNA, 19 nt, Artificial Sequence
  Description of Artificial Sequence: Synthetic oligonucleotide
  Antisense strand to SEQ ID NO: 44568
uauuaccacuuucuuaagc

SEQ ID NO: 44650 - RNA, 19 nt, Artificial Sequence
  Description of Artificial Sequence: Synthetic oligonucleotide
  Sense strand starting at position 2623 of SEQ ID NO: 534
uuaagaaagugguaauaga

SEQ ID NO: 44651 - RNA, 19 nt, Artificial Sequence
  Description of Artificial Sequence: Synthetic oligonucleotide
  Antisense strand to SEQ ID NO: 44570
ucuauuaccacuuucuuaa

SEQ ID NO: 44652 - RNA, 19 nt, Artificial Sequence
  Description of Artificial Sequence: Synthetic oligonucleotide
  Sense strand starting at position 2722 of SEQ ID NO: 534
ucagcagaggugugaacaa

SEQ ID NO: 44653 - RNA, 19 nt, Artificial Sequence
  Description of Artificial Sequence: Synthetic oligonucleotide
  Antisense strand to SEQ ID NO: 44572
uuguucacaccucugcuga

SEQ ID NO: 44654 - RNA, 19 nt, Artificial Sequence
  Description of Artificial Sequence: Synthetic oligonucleotide
  Sense strand starting at position 2767 of SEQ ID NO: 534
ugcagugugaaggaugaau

SEQ ID NO: 44655 - RNA, 19 nt, Artificial Sequence
  Description of Artificial Sequence: Synthetic oligonucleotide
  Antisense strand to SEQ ID NO: 44574
auucauccuucacacugca

SEQ ID NO: 44656 - RNA, 19 nt, Artificial Sequence
  Description of Artificial Sequence: Synthetic oligonucleotide
  Sense strand starting at position 2769 of SEQ ID NO: 534
cagugugaaggaugaauga

SEQ ID NO: 44657 - RNA, 19 nt, Artificial Sequence
  Description of Artificial Sequence: Synthetic oligonucleotide
  Antisense strand to SEQ ID NO: 44576
ucauucauccuucacacug

SEQ ID NO: 44658 - RNA, 19 nt, Artificial Sequence
  Description of Artificial Sequence: Synthetic oligonucleotide
  Sense strand starting at position 2886 of SEQ ID NO: 534
auugguuuaagagguacga

SEQ ID NO: 44659 - RNA, 19 nt, Artificial Sequence
  Description of Artificial Sequence: Synthetic oligonucleotide
  Antisense strand to SEQ ID NO: 44578
ucguaccucuuaaaccaau

SEQ ID NO: 44660 - RNA, 19 nt, Artificial Sequence
  Description of Artificial Sequence: Synthetic oligonucleotide
  Sense strand starting at position 2888 of SEQ ID NO: 534
ugguuuaagagguacgaau

SEQ ID NO: 44661 - RNA, 19 nt, Artificial Sequence
  Description of Artificial Sequence: Synthetic oligonucleotide
  Antisense strand to SEQ ID NO: 44580
auucguaccucuuaaacca

SEQ ID NO: 44662 - RNA, 19 nt, Artificial Sequence
  Description of Artificial Sequence: Synthetic oligonucleotide
  Sense strand starting at position 2890 of SEQ ID NO: 534
guuuaagagguacgaaugu

SEQ ID NO: 44663 - RNA, 19 nt, Artificial Sequence
  Description of Artificial Sequence: Synthetic oligonucleotide
  Antisense strand to SEQ ID NO: 44582
acauucguaccucuuaaac

SEQ ID NO: 44664 - RNA, 19 nt, Artificial Sequence
  Description of Artificial Sequence: Synthetic oligonucleotide
  Sense strand starting at position 2939 of SEQ ID NO: 534
ccaguuucuuucucguuua

SEQ ID NO: 44665 - RNA, 19 nt, Artificial Sequence
  Description of Artificial Sequence: Synthetic oligonucleotide
  Antisense strand to SEQ ID NO: 44584
uaaacgagaaagaaacugg

SEQ ID NO: 44666 - RNA, 19 nt, Artificial Sequence
  Description of Artificial Sequence: Synthetic oligonucleotide
  Sense strand starting at position 2986 of SEQ ID NO: 534
cugggauauuagcuaaugu

SEQ ID NO: 44667 - RNA, 19 nt, Artificial Sequence
  Description of Artificial Sequence: Synthetic oligonucleotide
  Antisense strand to SEQ ID NO: 44586
acauuagcuaauaucccag

SEQ ID NO: 44668 - RNA, 19 nt, Artificial Sequence
  Description of Artificial Sequence: Synthetic oligonucleotide
  Sense strand starting at position 2987 of SEQ ID NO: 534
ugggauauuagcuaaugug

SEQ ID NO: 44669 - RNA, 19 nt, Artificial Sequence
  Description of Artificial Sequence: Synthetic oligonucleotide
  Antisense strand to SEQ ID NO: 44588
cacauuagcuaauauccca

SEQ ID NO: 44670 - RNA, 19 nt, Artificial Sequence
  Description of Artificial Sequence: Synthetic oligonucleotide
  Sense strand starting at position 3048 of SEQ ID NO: 534
gcauauagauagcuguuga

SEQ ID NO: 44671 - RNA, 19 nt, Artificial Sequence
  Description of Artificial Sequence: Synthetic oligonucleotide
  Antisense strand to SEQ ID NO: 44590
ucaacagcuaucuauaugc

SEQ ID NO: 44672 - RNA, 19 nt, Artificial Sequence
  Description of Artificial Sequence: Synthetic oligonucleotide
  Sense strand starting at position 3191 of SEQ ID NO: 534
uggugaaagcguuuagugu

SEQ ID NO: 44673 - RNA, 19 nt, Artificial Sequence
  Description of Artificial Sequence: Synthetic oligonucleotide
  Antisense strand to SEQ ID NO: 44592
acacuaaacgcuuucacca

SEQ ID NO: 44674 - RNA, 19 nt, Artificial Sequence
  Description of Artificial Sequence: Synthetic oligonucleotide
  Sense strand starting at position 3192 of SEQ ID NO: 534
ggugaaagcguuuagugua

SEQ ID NO: 44675 - RNA, 19 nt, Artificial Sequence
  Description of Artificial Sequence: Synthetic oligonucleotide
  Antisense strand to SEQ ID NO: 44594
uacacuaaacgcuuucacc

SEQ ID NO: 44676 - RNA, 19 nt, Artificial Sequence
  Description of Artificial Sequence: Synthetic oligonucleotide
  Sense strand starting at position 3197 of SEQ ID NO: 534
aagcguuuaguguaacaga

SEQ ID NO: 44677 - RNA, 19 nt, Artificial Sequence
  Description of Artificial Sequence: Synthetic oligonucleotide
  Antisense strand to SEQ ID NO: 44596
ucuguuacacuaaacgcuu

SEQ ID NO: 44678 - RNA, 19 nt, Artificial Sequence
  Description of Artificial Sequence: Synthetic oligonucleotide
  Sense strand starting at position 3862 of SEQ ID NO: 534
auguaucuaucagauauug

SEQ ID NO: 44679 - RNA, 19 nt, Artificial Sequence
  Description of Artificial Sequence: Synthetic oligonucleotide
  Antisense strand to SEQ ID NO: 44598
caauaucugauagauacau

SEQ ID NO: 44680 - RNA, 19 nt, Artificial Sequence
  Description of Artificial Sequence: Synthetic oligonucleotide
  Sense strand starting at position 21 of SEQ ID NO: 535
ggcaacauuuaguagacaa

SEQ ID NO: 44681 - RNA, 19 nt, Artificial Sequence
  Description of Artificial Sequence: Synthetic oligonucleotide
  Antisense strand to SEQ ID NO: 44600
uugucuacuaaauguugcc

SEQ ID NO: 44682 - RNA, 19 nt, Artificial Sequence
  Description of Artificial Sequence: Synthetic oligonucleotide
  Sense strand starting at position 28 of SEQ ID NO: 535
uuuaguagacaauguacua

SEQ ID NO: 44683 - RNA, 19 nt, Artificial Sequence
  Description of Artificial Sequence: Synthetic oligonucleotide
  Antisense strand to SEQ ID NO: 44602
uaguacauugucuacuaaa

SEQ ID NO: 44684 - RNA, 19 nt, Artificial Sequence
  Description of Artificial Sequence: Synthetic oligonucleotide
  Sense strand starting at position 221 of SEQ ID NO: 535
auggaugaaugauaacuca

SEQ ID NO: 44685 - RNA, 19 nt, Artificial Sequence
  Description of Artificial Sequence: Synthetic oligonucleotide
  Antisense strand to SEQ ID NO: 44604
ugaguuaucauucauccau

SEQ ID NO: 44686 - RNA, 19 nt, Artificial Sequence
  Description of Artificial Sequence: Synthetic oligonucleotide
  Sense strand starting at position 304 of SEQ ID NO: 535
auucccuuccauuguuuga

SEQ ID NO: 44687 - RNA, 19 nt, Artificial Sequence
  Description of Artificial Sequence: Synthetic oligonucleotide
  Antisense strand to SEQ ID NO: 44606
ucaaacaauggaagggaau

SEQ ID NO: 44688 - RNA, 19 nt, Artificial Sequence
  Description of Artificial Sequence: Synthetic oligonucleotide
  Sense strand starting at position 341 of SEQ ID NO: 535
agacuuaccuccgcaagaa

SEQ ID NO: 44689 - RNA, 19 nt, Artificial Sequence
  Description of Artificial Sequence: Synthetic oligonucleotide
  Antisense strand to SEQ ID NO: 44608
uucuugcggagguaagucu

SEQ ID NO: 44690 - RNA, 19 nt, Artificial Sequence
  Description of Artificial Sequence: Synthetic oligonucleotide
  Sense strand starting at position 483 of SEQ ID NO: 535
uagacaaucucguugcaaa

SEQ ID NO: 44691 - RNA, 19 nt, Artificial Sequence
  Description of Artificial Sequence: Synthetic oligonucleotide
  Antisense strand to SEQ ID NO: 44610
uuugcaacgagauugucua

SEQ ID NO: 44692 - RNA, 19 nt, Artificial Sequence
  Description of Artificial Sequence: Synthetic oligonucleotide
  Sense strand starting at position 766 of SEQ ID NO: 535
gaggaaagugguuacagca

SEQ ID NO: 44693 - RNA, 19 nt, Artificial Sequence
  Description of Artificial Sequence: Synthetic oligonucleotide
  Antisense strand to SEQ ID NO: 44612
ugcuguaaccacuuuccuc

SEQ ID NO: 44694 - RNA, 19 nt, Artificial Sequence
  Description of Artificial Sequence: Synthetic oligonucleotide
  Sense strand starting at position 1307 of SEQ ID NO: 535
gggccuggcaauuagaauu

SEQ ID NO: 44695 - RNA, 19 nt, Artificial Sequence
  Description of Artificial Sequence: Synthetic oligonucleotide
  Antisense strand to SEQ ID NO: 44614
aauucuaauugccaggccc

SEQ ID NO: 44696 - RNA, 19 nt, Artificial Sequence
  Description of Artificial Sequence: Synthetic oligonucleotide
  Sense strand starting at position 1317 of SEQ ID NO: 535
auuagaauuggcugcaacu

SEQ ID NO: 44697 - RNA, 19 nt, Artificial Sequence
  Description of Artificial Sequence: Synthetic oligonucleotide
  Antisense strand to SEQ ID NO: 44616
aguugcagccaauucuaau

SEQ ID NO: 44698 - RNA, 19 nt, Artificial Sequence
  Description of Artificial Sequence: Synthetic oligonucleotide
  Sense strand starting at position 1319 of SEQ ID NO: 535
uagaauuggcugcaacuga

SEQ ID NO: 44699 - RNA, 19 nt, Artificial Sequence
  Description of Artificial Sequence: Synthetic oligonucleotide
  Antisense strand to SEQ ID NO: 44618
ucaguugcagccaauucua

SEQ ID NO: 44700 - RNA, 19 nt, Artificial Sequence
  Description of Artificial Sequence: Synthetic oligonucleotide
  Sense strand starting at position 2360 of SEQ ID NO: 535
gcuucacuucgggaggaga

SEQ ID NO: 44701 - RNA, 19 nt, Artificial Sequence
  Description of Artificial Sequence: Synthetic oligonucleotide
  Antisense strand to SEQ ID NO: 44620
ucuccucccgaagugaagc

SEQ ID NO: 44702 - RNA, 19 nt, Artificial Sequence
  Description of Artificial Sequence: Synthetic oligonucleotide
  Sense strand starting at position 2441 of SEQ ID NO: 535
ugcuuagggcgguaauaag

SEQ ID NO: 44703 - RNA, 19 nt, Artificial Sequence
  Description of Artificial Sequence: Synthetic oligonucleotide
  Antisense strand to SEQ ID NO: 44622
cuuauuaccgcccuaagca

SEQ ID NO: 44704 - RNA, 19 nt, Artificial Sequence
  Description of Artificial Sequence: Synthetic oligonucleotide
  Sense strand starting at position 2448 of SEQ ID NO: 535
ggcgguaauaagggaucga

SEQ ID NO: 44705 - RNA, 19 nt, Artificial Sequence
  Description of Artificial Sequence: Synthetic oligonucleotide
  Antisense strand to SEQ ID NO: 44624
ucgaucccuuauuaccgcc

SEQ ID NO: 44706 - RNA, 19 nt, Artificial Sequence
  Description of Artificial Sequence: Synthetic oligonucleotide
  Sense strand starting at position 2449 of SEQ ID NO: 535
gcgguaauaagggaucgaa

SEQ ID NO: 44707 - RNA, 19 nt, Artificial Sequence
  Description of Artificial Sequence: Synthetic oligonucleotide
  Antisense strand to SEQ ID NO: 44626
uucgaucccuuauuaccgc

SEQ ID NO: 44708 - RNA, 19 nt, Artificial Sequence
  Description of Artificial Sequence: Synthetic oligonucleotide
  Sense strand starting at position 2469 of SEQ ID NO: 535
aggauagcauucuugaaug

SEQ ID NO: 44709 - RNA, 19 nt, Artificial Sequence
  Description of Artificial Sequence: Synthetic oligonucleotide
  Antisense strand to SEQ ID NO: 44628
cauucaagaaugcuauccu

SEQ ID NO: 44710 - RNA, 19 nt, Artificial Sequence
  Description of Artificial Sequence: Synthetic oligonucleotide
  Sense strand starting at position 2474 of SEQ ID NO: 535
agcauucuugaaugggaaa

SEQ ID NO: 44711 - RNA, 19 nt, Artificial Sequence
  Description of Artificial Sequence: Synthetic oligonucleotide
  Antisense strand to SEQ ID NO: 44630
uuucccauucaagaaugcu

SEQ ID NO: 44712 - RNA, 19 nt, Artificial Sequence
  Description of Artificial Sequence: Synthetic oligonucleotide
  Sense strand starting at position 2477 of SEQ ID NO: 535
auucuugaaugggaaacau

SEQ ID NO: 44713 - RNA, 19 nt, Artificial Sequence
  Description of Artificial Sequence: Synthetic oligonucleotide
  Antisense strand to SEQ ID NO: 44632
auguuucccauucaagaau

SEQ ID NO: 44714 - RNA, 19 nt, Artificial Sequence
  Description of Artificial Sequence: Synthetic oligonucleotide
  Sense strand starting at position 2561 of SEQ ID NO: 535
gacucauaagggcggaaua

SEQ ID NO: 44715 - RNA, 19 nt, Artificial Sequence
  Description of Artificial Sequence: Synthetic oligonucleotide
  Antisense strand to SEQ ID NO: 44634
uauuccgcccuuaugaguc

SEQ ID NO: 44716 - RNA, 19 nt, Artificial Sequence
  Description of Artificial Sequence: Synthetic oligonucleotide
  Sense strand starting at position 2589 of SEQ ID NO: 535
ucgguuugucuggcgaacu

SEQ ID NO: 44717 - RNA, 19 nt, Artificial Sequence
  Description of Artificial Sequence: Synthetic oligonucleotide
  Antisense strand to SEQ ID NO: 44636
aguucgccagacaaaccga

SEQ ID NO: 44718 - RNA, 19 nt, Artificial Sequence
  Description of Artificial Sequence: Synthetic oligonucleotide
  Sense strand starting at position 2616 of SEQ ID NO: 535
gggucaagaucuggauuuc

SEQ ID NO: 44719 - RNA, 19 nt, Artificial Sequence
  Description of Artificial Sequence: Synthetic oligonucleotide
  Antisense strand to SEQ ID NO: 44638
gaaauccagaucuugaccc

SEQ ID NO: 44720 - RNA, 19 nt, Artificial Sequence
  Description of Artificial Sequence: Synthetic oligonucleotide
  Sense strand starting at position 2651 of SEQ ID NO: 535
uccugauaacccggacguu

SEQ ID NO: 44721 - RNA, 19 nt, Artificial Sequence
  Description of Artificial Sequence: Synthetic oligonucleotide
  Antisense strand to SEQ ID NO: 44640
aacguccggguuaucagga

SEQ ID NO: 44722 - RNA, 19 nt, Artificial Sequence
  Description of Artificial Sequence: Synthetic oligonucleotide
  Sense strand starting at position 2750 of SEQ ID NO: 535
gccgguuuccuguaggaag

SEQ ID NO: 44723 - RNA, 19 nt, Artificial Sequence
  Description of Artificial Sequence: Synthetic oligonucleotide
  Antisense strand to SEQ ID NO: 44642
cuuccuacaggaaaccggc

SEQ ID NO: 44724 - RNA, 19 nt, Artificial Sequence
  Description of Artificial Sequence: Synthetic oligonucleotide
  Sense strand starting at position 2764 of SEQ ID NO: 535
ggaagugucgccuagcuga

SEQ ID NO: 44725 - RNA, 19 nt, Artificial Sequence
  Description of Artificial Sequence: Synthetic oligonucleotide
  Antisense strand to SEQ ID NO: 44644
ucagcuaggcgacacuucc

SEQ ID NO: 44726 - RNA, 19 nt, Artificial Sequence
  Description of Artificial Sequence: Synthetic oligonucleotide
  Sense strand starting at position 2834 of SEQ ID NO: 535
ucugguguggcuuaagaaa

SEQ ID NO: 44727 - RNA, 19 nt, Artificial Sequence
  Description of Artificial Sequence: Synthetic oligonucleotide
  Antisense strand to SEQ ID NO: 44646
uuucuuaagccacaccaga

SEQ ID NO: 44728 - RNA, 19 nt, Artificial Sequence
  Description of Artificial Sequence: Synthetic oligonucleotide
  Sense strand starting at position 2842 of SEQ ID NO: 535
ggcuuaagaaagugguaau

SEQ ID NO: 44729 - RNA, 19 nt, Artificial Sequence
  Description of Artificial Sequence: Synthetic oligonucleotide
  Antisense strand to SEQ ID NO: 44648
auuaccacuuucuuaagcc

SEQ ID NO: 44730 - RNA, 19 nt, Artificial Sequence
  Description of Artificial Sequence: Synthetic oligonucleotide
  Sense strand starting at position 2843 of SEQ ID NO: 535
gcuuaagaaagugguaaua

SEQ ID NO: 44731 - RNA, 19 nt, Artificial Sequence
  Description of Artificial Sequence: Synthetic oligonucleotide
  Antisense strand to SEQ ID NO: 44650
uauuaccacuuucuuaagc

SEQ ID NO: 44732 - RNA, 19 nt, Artificial Sequence
  Description of Artificial Sequence: Synthetic oligonucleotide
  Sense strand starting at position 2845 of SEQ ID NO: 535
uuaagaaagugguaauaga

SEQ ID NO: 44733 - RNA, 19 nt, Artificial Sequence
  Description of Artificial Sequence: Synthetic oligonucleotide
  Antisense strand to SEQ ID NO: 44652
ucuauuaccacuuucuuaa

SEQ ID NO: 44734 - RNA, 19 nt, Artificial Sequence
  Description of Artificial Sequence: Synthetic oligonucleotide
  Sense strand starting at position 2944 of SEQ ID NO: 535
ucagcagaggugugaacaa

SEQ ID NO: 44735 - RNA, 19 nt, Artificial Sequence
  Description of Artificial Sequence: Synthetic oligonucleotide
  Antisense strand to SEQ ID NO: 44654
uuguucacaccucugcuga

SEQ ID NO: 44736 - RNA, 19 nt, Artificial Sequence
  Description of Artificial Sequence: Synthetic oligonucleotide
  Sense strand starting at position 2989 of SEQ ID NO: 535
ugcagugugaaggaugaau

SEQ ID NO: 44737 - RNA, 19 nt, Artificial Sequence
  Description of Artificial Sequence: Synthetic oligonucleotide
  Antisense strand to SEQ ID NO: 44656
auucauccuucacacugca

SEQ ID NO: 44738 - RNA, 19 nt, Artificial Sequence
  Description of Artificial Sequence: Synthetic oligonucleotide
  Sense strand starting at position 2991 of SEQ ID NO: 535
cagugugaaggaugaauga

SEQ ID NO: 44739 - RNA, 19 nt, Artificial Sequence
  Description of Artificial Sequence: Synthetic oligonucleotide
  Antisense strand to SEQ ID NO: 44658
ucauucauccuucacacug

SEQ ID NO: 44740 - RNA, 19 nt, Artificial Sequence
  Description of Artificial Sequence: Synthetic oligonucleotide
  Sense strand starting at position 3108 of SEQ ID NO: 535
auugguuuaagagguacga

SEQ ID NO: 44741 - RNA, 19 nt, Artificial Sequence
  Description of Artificial Sequence: Synthetic oligonucleotide
  Antisense strand to SEQ ID NO: 44660
ucguaccucuuaaaccaau

SEQ ID NO: 44742 - RNA, 19 nt, Artificial Sequence
  Description of Artificial Sequence: Synthetic oligonucleotide
  Sense strand starting at position 3110 of SEQ ID NO: 535
ugguuuaagagguacgaau

SEQ ID NO: 44743 - RNA, 19 nt, Artificial Sequence
  Description of Artificial Sequence: Synthetic oligonucleotide
  Antisense strand to SEQ ID NO: 44662
auucguaccucuuaaacca

SEQ ID NO: 44744 - RNA, 19 nt, Artificial Sequence
  Description of Artificial Sequence: Synthetic oligonucleotide
  Sense strand starting at position 3112 of SEQ ID NO: 535
guuuaagagguacgaaugu

SEQ ID NO: 44745 - RNA, 19 nt, Artificial Sequence
  Description of Artificial Sequence: Synthetic oligonucleotide
  Antisense strand to SEQ ID NO: 44664
acauucguaccucuuaaac

SEQ ID NO: 44746 - RNA, 19 nt, Artificial Sequence
  Description of Artificial Sequence: Synthetic oligonucleotide
  Sense strand starting at position 3161 of SEQ ID NO: 535
ccaguuucuuucucguuua

SEQ ID NO: 44747 - RNA, 19 nt, Artificial Sequence
  Description of Artificial Sequence: Synthetic oligonucleotide
  Antisense strand to SEQ ID NO: 44666
uaaacgagaaagaaacugg

SEQ ID NO: 44748 - RNA, 19 nt, Artificial Sequence
  Description of Artificial Sequence: Synthetic oligonucleotide
  Sense strand starting at position 3208 of SEQ ID NO: 535
cugggauauuagcuaaugu

SEQ ID NO: 44749 - RNA, 19 nt, Artificial Sequence
  Description of Artificial Sequence: Synthetic oligonucleotide
  Antisense strand to SEQ ID NO: 44668
acauuagcuaauaucccag

SEQ ID NO: 44750 - RNA, 19 nt, Artificial Sequence
  Description of Artificial Sequence: Synthetic oligonucleotide
  Sense strand starting at position 3209 of SEQ ID NO: 535
ugggauauuagcuaaugug

SEQ ID NO: 44751 - RNA, 19 nt, Artificial Sequence
  Description of Artificial Sequence: Synthetic oligonucleotide
  Antisense strand to SEQ ID NO: 44670
cacauuagcuaauauccca

SEQ ID NO: 44752 - RNA, 19 nt, Artificial Sequence
  Description of Artificial Sequence: Synthetic oligonucleotide
  Sense strand starting at position 3270 of SEQ ID NO: 535
gcauauagauagcuguuga

SEQ ID NO: 44753 - RNA, 19 nt, Artificial Sequence
  Description of Artificial Sequence: Synthetic oligonucleotide
  Antisense strand to SEQ ID NO: 44672
ucaacagcuaucuauaugc

SEQ ID NO: 44754 - RNA, 19 nt, Artificial Sequence
  Description of Artificial Sequence: Synthetic oligonucleotide
  Sense strand starting at position 3413 of SEQ ID NO: 535
uggugaaagcguuuagugu

SEQ ID NO: 44755 - RNA, 19 nt, Artificial Sequence
  Description of Artificial Sequence: Synthetic oligonucleotide
  Antisense strand to SEQ ID NO: 44674
acacuaaacgcuuucacca

SEQ ID NO: 44756 - RNA, 19 nt, Artificial Sequence
  Description of Artificial Sequence: Synthetic oligonucleotide
  Sense strand starting at position 3414 of SEQ ID NO: 535
ggugaaagcguuuagugua

SEQ ID NO: 44757 - RNA, 19 nt, Artificial Sequence
  Description of Artificial Sequence: Synthetic oligonucleotide
  Antisense strand to SEQ ID NO: 44676
uacacuaaacgcuuucacc

SEQ ID NO: 44758 - RNA, 19 nt, Artificial Sequence
  Description of Artificial Sequence: Synthetic oligonucleotide
  Sense strand starting at position 3419 of SEQ ID NO: 535
aagcguuuaguguaacaga

SEQ ID NO: 44759 - RNA, 19 nt, Artificial Sequence
  Description of Artificial Sequence: Synthetic oligonucleotide
  Antisense strand to SEQ ID NO: 44678
ucuguuacacuaaacgcuu

SEQ ID NO: 44760 - RNA, 19 nt, Artificial Sequence
  Description of Artificial Sequence: Synthetic oligonucleotide
  Sense strand starting at position 3901 of SEQ ID NO: 536
gggucaugucugcagggca

SEQ ID NO: 44761 - RNA, 19 nt, Artificial Sequence
  Description of Artificial Sequence: Synthetic oligonucleotide
  Antisense strand to SEQ ID NO: 44680
ugcccugcagacaugaccc

SEQ ID NO: 44762 - RNA, 19 nt, Artificial Sequence
  Description of Artificial Sequence: Synthetic oligonucleotide
  Sense strand starting at position 3734 of SEQ ID NO: 536
ccaggagcauuauuaauaa

SEQ ID NO: 44763 - RNA, 19 nt, Artificial Sequence
  Description of Artificial Sequence: Synthetic oligonucleotide
  Antisense strand to SEQ ID NO: 44682
uuauuaauaaugcuccugg

SEQ ID NO: 44764 - RNA, 19 nt, Artificial Sequence
  Description of Artificial Sequence: Synthetic oligonucleotide
  Sense strand starting at position 3678 of SEQ ID NO: 536
gggcucaagugaucucaaa

SEQ ID NO: 44765 - RNA, 19 nt, Artificial Sequence
  Description of Artificial Sequence: Synthetic oligonucleotide
  Antisense strand to SEQ ID NO: 44684
uuugagaucacuugagccc

SEQ ID NO: 44766 - RNA, 19 nt, Artificial Sequence
  Description of Artificial Sequence: Synthetic oligonucleotide
  Sense strand starting at position 3530 of SEQ ID NO: 536
cagucuugaccugagcuua

SEQ ID NO: 44767 - RNA, 19 nt, Artificial Sequence
  Description of Artificial Sequence: Synthetic oligonucleotide
  Antisense strand to SEQ ID NO: 44686
uaagcucaggucaagacug

SEQ ID NO: 44768 - RNA, 19 nt, Artificial Sequence
  Description of Artificial Sequence: Synthetic oligonucleotide
  Sense strand starting at position 3436 of SEQ ID NO: 536
uaguauuaugguuauagug

SEQ ID NO: 44769 - RNA, 19 nt, Artificial Sequence
  Description of Artificial Sequence: Synthetic oligonucleotide
  Antisense strand to SEQ ID NO: 44688
cacuauaaccauaauacua

SEQ ID NO: 44770 - RNA, 19 nt, Artificial Sequence
  Description of Artificial Sequence: Synthetic oligonucleotide
  Sense strand starting at position 3383 of SEQ ID NO: 536
ucaauuggauaugugauga

SEQ ID NO: 44771 - RNA, 19 nt, Artificial Sequence
  Description of Artificial Sequence: Synthetic oligonucleotide
  Antisense strand to SEQ ID NO: 44690
ucaucacauauccaauuga

SEQ ID NO: 44772 - RNA, 19 nt, Artificial Sequence
  Description of Artificial Sequence: Synthetic oligonucleotide
  Sense strand starting at position 3322 of SEQ ID NO: 536
ucauuuagauucugauuga

SEQ ID NO: 44773 - RNA, 19 nt, Artificial Sequence
  Description of Artificial Sequence: Synthetic oligonucleotide
  Antisense strand to SEQ ID NO: 44692
ucaaucagaaucuaaauga

SEQ ID NO: 44774 - RNA, 19 nt, Artificial Sequence
  Description of Artificial Sequence: Synthetic oligonucleotide
  Sense strand starting at position 3220 of SEQ ID NO: 536
augucuggguucucuaaua

SEQ ID NO: 44775 - RNA, 19 nt, Artificial Sequence
  Description of Artificial Sequence: Synthetic oligonucleotide
  Antisense strand to SEQ ID NO: 44694
uauuagagaacccagacau

SEQ ID NO: 44776 - RNA, 19 nt, Artificial Sequence
  Description of Artificial Sequence: Synthetic oligonucleotide
  Sense strand starting at position 3144 of SEQ ID NO: 536
aggacagaggaauguguua

SEQ ID NO: 44777 - RNA, 19 nt, Artificial Sequence
  Description of Artificial Sequence: Synthetic oligonucleotide
  Antisense strand to SEQ ID NO: 44696
uaacacauuccucuguccu

SEQ ID NO: 44778 - RNA, 19 nt, Artificial Sequence
  Description of Artificial Sequence: Synthetic oligonucleotide
  Sense strand starting at position 2924 of SEQ ID NO: 536
gccugaucaggauggugaa

SEQ ID NO: 44779 - RNA, 19 nt, Artificial Sequence
  Description of Artificial Sequence: Synthetic oligonucleotide
  Antisense strand to SEQ ID NO: 44698
uucaccauccugaucaggc

SEQ ID NO: 44780 - RNA, 19 nt, Artificial Sequence
  Description of Artificial Sequence: Synthetic oligonucleotide
  Sense strand starting at position 2797 of SEQ ID NO: 536
agaucugacuguuaauuua

SEQ ID NO: 44781 - RNA, 19 nt, Artificial Sequence
  Description of Artificial Sequence: Synthetic oligonucleotide
  Antisense strand to SEQ ID NO: 44700
uaaauuaacagucagaucu

SEQ ID NO: 44782 - RNA, 19 nt, Artificial Sequence
  Description of Artificial Sequence: Synthetic oligonucleotide
  Sense strand starting at position 2794 of SEQ ID NO: 536
ccuagaucugacuguuaau

SEQ ID NO: 44783 - RNA, 19 nt, Artificial Sequence
  Description of Artificial Sequence: Synthetic oligonucleotide
  Antisense strand to SEQ ID NO: 44702
auuaacagucagaucuagg

SEQ ID NO: 44784 - RNA, 19 nt, Artificial Sequence
  Description of Artificial Sequence: Synthetic oligonucleotide
  Sense strand starting at position 2722 of SEQ ID NO: 536
ugugccuccuagucaaaga

SEQ ID NO: 44785 - RNA, 19 nt, Artificial Sequence
  Description of Artificial Sequence: Synthetic oligonucleotide
  Antisense strand to SEQ ID NO: 44704
ucuuugacuaggaggcaca

SEQ ID NO: 44786 - RNA, 19 nt, Artificial Sequence
  Description of Artificial Sequence: Synthetic oligonucleotide
  Sense strand starting at position 2580 of SEQ ID NO: 536
cuaccugucgcagaaguaa

SEQ ID NO: 44787 - RNA, 19 nt, Artificial Sequence
  Description of Artificial Sequence: Synthetic oligonucleotide
  Antisense strand to SEQ ID NO: 44706
uuacuucugcgacagguag

SEQ ID NO: 44788 - RNA, 19 nt, Artificial Sequence
  Description of Artificial Sequence: Synthetic oligonucleotide
  Sense strand starting at position 2556 of SEQ ID NO: 536
agagaugauugcucaaccu

SEQ ID NO: 44789 - RNA, 19 nt, Artificial Sequence
  Description of Artificial Sequence: Synthetic oligonucleotide
  Antisense strand to SEQ ID NO: 44708
agguugagcaaucaucucu

SEQ ID NO: 44790 - RNA, 19 nt, Artificial Sequence
  Description of Artificial Sequence: Synthetic oligonucleotide
  Sense strand starting at position 2553 of SEQ ID NO: 536
uuaagagaugauugcucaa

SEQ ID NO: 44791 - RNA, 19 nt, Artificial Sequence
  Description of Artificial Sequence: Synthetic oligonucleotide
  Antisense strand to SEQ ID NO: 44710
uugagcaaucaucucuuaa

SEQ ID NO: 44792 - RNA, 19 nt, Artificial Sequence
  Description of Artificial Sequence: Synthetic oligonucleotide
  Sense strand starting at position 2540 of SEQ ID NO: 536
gugaccacuucuguuaaga

SEQ ID NO: 44793 - RNA, 19 nt, Artificial Sequence
  Description of Artificial Sequence: Synthetic oligonucleotide
  Antisense strand to SEQ ID NO: 44712
ucuuaacagaaguggucac

SEQ ID NO: 44794 - RNA, 19 nt, Artificial Sequence
  Description of Artificial Sequence: Synthetic oligonucleotide
  Sense strand starting at position 2511 of SEQ ID NO: 536
auuuguuguugugcuugaa

SEQ ID NO: 44795 - RNA, 19 nt, Artificial Sequence
  Description of Artificial Sequence: Synthetic oligonucleotide
  Antisense strand to SEQ ID NO: 44714
uucaagcacaacaacaaau

SEQ ID NO: 44796 - RNA, 19 nt, Artificial Sequence
  Description of Artificial Sequence: Synthetic oligonucleotide
  Sense strand starting at position 2502 of SEQ ID NO: 536
ugaugugggauuuguuguu

SEQ ID NO: 44797 - RNA, 19 nt, Artificial Sequence
  Description of Artificial Sequence: Synthetic oligonucleotide
  Antisense strand to SEQ ID NO: 44716
aacaacaaaucccacauca

SEQ ID NO: 44798 - RNA, 19 nt, Artificial Sequence
  Description of Artificial Sequence: Synthetic oligonucleotide
  Sense strand starting at position 2401 of SEQ ID NO: 536
cgcugccuucuggaaauaa

SEQ ID NO: 44799 - RNA, 19 nt, Artificial Sequence
  Description of Artificial Sequence: Synthetic oligonucleotide
  Antisense strand to SEQ ID NO: 44718
uuauuuccagaaggcagcg

SEQ ID NO: 44800 - RNA, 19 nt, Artificial Sequence
  Description of Artificial Sequence: Synthetic oligonucleotide
  Sense strand starting at position 2392 of SEQ ID NO: 536
gucauauuucgcugccuuc

SEQ ID NO: 44801 - RNA, 19 nt, Artificial Sequence
  Description of Artificial Sequence: Synthetic oligonucleotide
  Antisense strand to SEQ ID NO: 44720
gaaggcagcgaaauaugac

SEQ ID NO: 44802 - RNA, 19 nt, Artificial Sequence
  Description of Artificial Sequence: Synthetic oligonucleotide
  Sense strand starting at position 2391 of SEQ ID NO: 536
agucauauuucgcugccuu

SEQ ID NO: 44803 - RNA, 19 nt, Artificial Sequence
  Description of Artificial Sequence: Synthetic oligonucleotide
  Antisense strand to SEQ ID NO: 44722
aaggcagcgaaauaugacu

SEQ ID NO: 44804 - RNA, 19 nt, Artificial Sequence
  Description of Artificial Sequence: Synthetic oligonucleotide
  Sense strand starting at position 2390 of SEQ ID NO: 536
gagucauauuucgcugccu

SEQ ID NO: 44805 - RNA, 19 nt, Artificial Sequence
  Description of Artificial Sequence: Synthetic oligonucleotide
  Antisense strand to SEQ ID NO: 44724
aggcagcgaaauaugacuc

SEQ ID NO: 44806 - RNA, 19 nt, Artificial Sequence
  Description of Artificial Sequence: Synthetic oligonucleotide
  Sense strand starting at position 2380 of SEQ ID NO: 536
auuagccauugagucauau

SEQ ID NO: 44807 - RNA, 19 nt, Artificial Sequence
  Description of Artificial Sequence: Synthetic oligonucleotide
  Antisense strand to SEQ ID NO: 44726
auaugacucaauggcuaau

SEQ ID NO: 44808 - RNA, 19 nt, Artificial Sequence
  Description of Artificial Sequence: Synthetic oligonucleotide
  Sense strand starting at position 1129 of SEQ ID NO: 536
gcuugucgugaggaucaau

SEQ ID NO: 44809 - RNA, 19 nt, Artificial Sequence
  Description of Artificial Sequence: Synthetic oligonucleotide
  Antisense strand to SEQ ID NO: 44728
auugauccucacgacaagc

SEQ ID NO: 44810 - RNA, 19 nt, Artificial Sequence
  Description of Artificial Sequence: Synthetic oligonucleotide
  Sense strand starting at position 1102 of SEQ ID NO: 536
uacgaauccgccguucuua

SEQ ID NO: 44811 - RNA, 19 nt, Artificial Sequence
  Description of Artificial Sequence: Synthetic oligonucleotide
  Antisense strand to SEQ ID NO: 44730
uaagaacggcggauucgua

SEQ ID NO: 44812 - RNA, 19 nt, Artificial Sequence
  Description of Artificial Sequence: Synthetic oligonucleotide
  Sense strand starting at position 1041 of SEQ ID NO: 536
uuuggcaagucuuccauuu

SEQ ID NO: 44813 - RNA, 19 nt, Artificial Sequence
  Description of Artificial Sequence: Synthetic oligonucleotide
  Antisense strand to SEQ ID NO: 44732
aaauggaagacuugccaaa

SEQ ID NO: 44814 - RNA, 19 nt, Artificial Sequence
  Description of Artificial Sequence: Synthetic oligonucleotide
  Sense strand starting at position 966 of SEQ ID NO: 536
ccgaauccucuggagaguu

SEQ ID NO: 44815 - RNA, 19 nt, Artificial Sequence
  Description of Artificial Sequence: Synthetic oligonucleotide
  Antisense strand to SEQ ID NO: 44734
aacucuccagaggauucgg

SEQ ID NO: 44816 - RNA, 19 nt, Artificial Sequence
  Description of Artificial Sequence: Synthetic oligonucleotide
  Sense strand starting at position 964 of SEQ ID NO: 536
gcccgaauccucuggagag

SEQ ID NO: 44817 - RNA, 19 nt, Artificial Sequence
  Description of Artificial Sequence: Synthetic oligonucleotide
  Antisense strand to SEQ ID NO: 44736
cucuccagaggauucgggc

SEQ ID NO: 44818 - RNA, 19 nt, Artificial Sequence
  Description of Artificial Sequence: Synthetic oligonucleotide
  Sense strand starting at position 937 of SEQ ID NO: 536
augagcauucucuauguaa

SEQ ID NO: 44819 - RNA, 19 nt, Artificial Sequence
  Description of Artificial Sequence: Synthetic oligonucleotide
  Antisense strand to SEQ ID NO: 44738
uuacauagagaaugcucau

SEQ ID NO: 44820 - RNA, 19 nt, Artificial Sequence
  Description of Artificial Sequence: Synthetic oligonucleotide
  Sense strand starting at position 935 of SEQ ID NO: 536
agaugagcauucucuaugu

SEQ ID NO: 44821 - RNA, 19 nt, Artificial Sequence
  Description of Artificial Sequence: Synthetic oligonucleotide
  Antisense strand to SEQ ID NO: 44740
acauagagaaugcucaucu

SEQ ID NO: 44822 - RNA, 19 nt, Artificial Sequence
  Description of Artificial Sequence: Synthetic oligonucleotide
  Sense strand starting at position 919 of SEQ ID NO: 536
aggaguagccugggagaga

SEQ ID NO: 44823 - RNA, 19 nt, Artificial Sequence
  Description of Artificial Sequence: Synthetic oligonucleotide
  Antisense strand to SEQ ID NO: 44742
ucucucccaggcuacuccu

SEQ ID NO: 44824 - RNA, 19 nt, Artificial Sequence
  Description of Artificial Sequence: Synthetic oligonucleotide
  Sense strand starting at position 875 of SEQ ID NO: 536
uuggguaauguuuguaaag

SEQ ID NO: 44825 - RNA, 19 nt, Artificial Sequence
  Description of Artificial Sequence: Synthetic oligonucleotide
  Antisense strand to SEQ ID NO: 44744
cuuuacaaacauuacccaa

SEQ ID NO: 44826 - RNA, 19 nt, Artificial Sequence
  Description of Artificial Sequence: Synthetic oligonucleotide
  Sense strand starting at position 867 of SEQ ID NO: 536
ggaugaaauuggguaaugu

SEQ ID NO: 44827 - RNA, 19 nt, Artificial Sequence
  Description of Artificial Sequence: Synthetic oligonucleotide
  Antisense strand to SEQ ID NO: 44746
acauuacccaauuucaucc

SEQ ID NO: 44828 - RNA, 19 nt, Artificial Sequence
  Description of Artificial Sequence: Synthetic oligonucleotide
  Sense strand starting at position 801 of SEQ ID NO: 536
uuagucacgcguucuuauu

SEQ ID NO: 44829 - RNA, 19 nt, Artificial Sequence
  Description of Artificial Sequence: Synthetic oligonucleotide
  Antisense strand to SEQ ID NO: 44748
aauaagaacgcgugacuaa

SEQ ID NO: 44830 - RNA, 19 nt, Artificial Sequence
  Description of Artificial Sequence: Synthetic oligonucleotide
  Sense strand starting at position 800 of SEQ ID NO: 536
uuuagucacgcguucuuau

SEQ ID NO: 44831 - RNA, 19 nt, Artificial Sequence
  Description of Artificial Sequence: Synthetic oligonucleotide
  Antisense strand to SEQ ID NO: 44750
auaagaacgcgugacuaaa

SEQ ID NO: 44832 - RNA, 19 nt, Artificial Sequence
  Description of Artificial Sequence: Synthetic oligonucleotide
  Sense strand starting at position 772 of SEQ ID NO: 536
ccgaaugcgcauuagaauc

SEQ ID NO: 44833 - RNA, 19 nt, Artificial Sequence
  Description of Artificial Sequence: Synthetic oligonucleotide
  Antisense strand to SEQ ID NO: 44752
gauucuaaugcgcauucgg

SEQ ID NO: 44834 - RNA, 19 nt, Artificial Sequence
  Description of Artificial Sequence: Synthetic oligonucleotide
  Sense strand starting at position 748 of SEQ ID NO: 536
aaacacgugcucuggaaga

SEQ ID NO: 44835 - RNA, 19 nt, Artificial Sequence
  Description of Artificial Sequence: Synthetic oligonucleotide
  Antisense strand to SEQ ID NO: 44754
ucuuccagagcacguguuu

SEQ ID NO: 44836 - RNA, 19 nt, Artificial Sequence
  Description of Artificial Sequence: Synthetic oligonucleotide
  Sense strand starting at position 156 of SEQ ID NO: 536
ggaauaauugcucauguuc

SEQ ID NO: 44837 - RNA, 19 nt, Artificial Sequence
  Description of Artificial Sequence: Synthetic oligonucleotide
  Antisense strand to SEQ ID NO: 44756
gaacaugagcaauuauucc

SEQ ID NO: 44838 - RNA, 19 nt, Artificial Sequence
  Description of Artificial Sequence: Synthetic oligonucleotide
  Sense strand starting at position 155 of SEQ ID NO: 536
aggaauaauugcucauguu

SEQ ID NO: 44839 - RNA, 19 nt, Artificial Sequence
  Description of Artificial Sequence: Synthetic oligonucleotide
  Antisense strand to SEQ ID NO: 44758
aacaugagcaauuauuccu

SEQ ID NO: 44840 - RNA, 19 nt, Artificial Sequence
  Description of Artificial Sequence: Synthetic oligonucleotide
  Sense strand starting at position 91 of SEQ ID NO: 537
auccauuaucuuuggagaa

SEQ ID NO: 44841 - RNA, 19 nt, Artificial Sequence
  Description of Artificial Sequence: Synthetic oligonucleotide
  Antisense strand to SEQ ID NO: 44760
uucuccaaagauaauggau

SEQ ID NO: 44842 - RNA, 19 nt, Artificial Sequence
  Description of Artificial Sequence: Synthetic oligonucleotide
  Sense strand starting at position 353 of SEQ ID NO: 537
guuaauaucucaguuauuc

SEQ ID NO: 44843 - RNA, 19 nt, Artificial Sequence
  Description of Artificial Sequence: Synthetic oligonucleotide
  Antisense strand to SEQ ID NO: 44762
gaauaacugagauauuaac

SEQ ID NO: 44844 - RNA, 19 nt, Artificial Sequence
  Description of Artificial Sequence: Synthetic oligonucleotide
  Sense strand starting at position 589 of SEQ ID NO: 537
gggaauaaucugggcucag

SEQ ID NO: 44845 - RNA, 19 nt, Artificial Sequence
  Description of Artificial Sequence: Synthetic oligonucleotide
  Antisense strand to SEQ ID NO: 44764
cugagcccagauuauuccc

SEQ ID NO: 44846 - RNA, 19 nt, Artificial Sequence
  Description of Artificial Sequence: Synthetic oligonucleotide
  Sense strand starting at position 636 of SEQ ID NO: 537
ugucaagaagcauacuauu

SEQ ID NO: 44847 - RNA, 19 nt, Artificial Sequence
  Description of Artificial Sequence: Synthetic oligonucleotide
  Antisense strand to SEQ ID NO: 44766
aauaguaugcuucuugaca

SEQ ID NO: 44848 - RNA, 19 nt, Artificial Sequence
  Description of Artificial Sequence: Synthetic oligonucleotide
  Sense strand starting at position 766 of SEQ ID NO: 537
guuaaauauugacucaguu

SEQ ID NO: 44849 - RNA, 19 nt, Artificial Sequence
  Description of Artificial Sequence: Synthetic oligonucleotide
  Antisense strand to SEQ ID NO: 44768
aacugagucaauauuuaac

SEQ ID NO: 44850 - RNA, 19 nt, Artificial Sequence
  Description of Artificial Sequence: Synthetic oligonucleotide
  Sense strand starting at position 862 of SEQ ID NO: 537
gauaguaaaggguggguaa

SEQ ID NO: 44851 - RNA, 19 nt, Artificial Sequence
  Description of Artificial Sequence: Synthetic oligonucleotide
  Antisense strand to SEQ ID NO: 44770
uuacccacccuuuacuauc

SEQ ID NO: 44852 - RNA, 19 nt, Artificial Sequence
  Description of Artificial Sequence: Synthetic oligonucleotide
  Sense strand starting at position 994 of SEQ ID NO: 537
cuaaucuccugagcaaagu

SEQ ID NO: 44853 - RNA, 19 nt, Artificial Sequence
  Description of Artificial Sequence: Synthetic oligonucleotide
  Antisense strand to SEQ ID NO: 44772
acuuugcucaggagauuag

SEQ ID NO: 44854 - RNA, 19 nt, Artificial Sequence
  Description of Artificial Sequence: Synthetic oligonucleotide
  Sense strand starting at position 1007 of SEQ ID NO: 537
caaaguagucguugauaaa

SEQ ID NO: 44855 - RNA, 19 nt, Artificial Sequence
  Description of Artificial Sequence: Synthetic oligonucleotide
  Antisense strand to SEQ ID NO: 44774
uuuaucaacgacuacuuug

SEQ ID NO: 44856 - RNA, 19 nt, Artificial Sequence
  Description of Artificial Sequence: Synthetic oligonucleotide
  Sense strand starting at position 1008 of SEQ ID NO: 537
aaaguagucguugauaaau

SEQ ID NO: 44857 - RNA, 19 nt, Artificial Sequence
  Description of Artificial Sequence: Synthetic oligonucleotide
  Antisense strand to SEQ ID NO: 44776
auuuaucaacgacuacuuu

SEQ ID NO: 44858 - RNA, 19 nt, Artificial Sequence
  Description of Artificial Sequence: Synthetic oligonucleotide
  Sense strand starting at position 1017 of SEQ ID NO: 537
guugauaaauacuuuagca

SEQ ID NO: 44859 - RNA, 19 nt, Artificial Sequence
  Description of Artificial Sequence: Synthetic oligonucleotide
  Antisense strand to SEQ ID NO: 44778
ugcuaaaguauuuaucaac

SEQ ID NO: 44860 - RNA, 19 nt, Artificial Sequence
  Description of Artificial Sequence: Synthetic oligonucleotide
  Sense strand starting at position 1046 of SEQ ID NO: 537
aguacccucuaauuggaua

SEQ ID NO: 44861 - RNA, 19 nt, Artificial Sequence
  Description of Artificial Sequence: Synthetic oligonucleotide
  Antisense strand to SEQ ID NO: 44780
uauccaauuagaggguacu

SEQ ID NO: 44862 - RNA, 19 nt, Artificial Sequence
  Description of Artificial Sequence: Synthetic oligonucleotide
  Sense strand starting at position 1089 of SEQ ID NO: 537
acaguugcugcauaaagaa

SEQ ID NO: 44863 - RNA, 19 nt, Artificial Sequence
  Description of Artificial Sequence: Synthetic oligonucleotide
  Antisense strand to SEQ ID NO: 44782
uucuuuaugcagcaacugu

SEQ ID NO: 44864 - RNA, 19 nt, Artificial Sequence
  Description of Artificial Sequence: Synthetic oligonucleotide
  Sense strand starting at position 1198 of SEQ ID NO: 537
auuuaaugcucagagagca

SEQ ID NO: 44865 - RNA, 19 nt, Artificial Sequence
  Description of Artificial Sequence: Synthetic oligonucleotide
  Antisense strand to SEQ ID NO: 44784
ugcucucugagcauuaaau

SEQ ID NO: 44866 - RNA, 19 nt, Artificial Sequence
  Description of Artificial Sequence: Synthetic oligonucleotide
  Sense strand starting at position 1208 of SEQ ID NO: 537
cagagagcacucggaauaa

SEQ ID NO: 44867 - RNA, 19 nt, Artificial Sequence
  Description of Artificial Sequence: Synthetic oligonucleotide
  Antisense strand to SEQ ID NO: 44786
uuauuccgagugcucucug

SEQ ID NO: 44868 - RNA, 19 nt, Artificial Sequence
  Description of Artificial Sequence: Synthetic oligonucleotide
  Sense strand starting at position 1218 of SEQ ID NO: 537
ucggaauaauaaccucuua

SEQ ID NO: 44869 - RNA, 19 nt, Artificial Sequence
  Description of Artificial Sequence: Synthetic oligonucleotide
  Antisense strand to SEQ ID NO: 44788
uaagagguuauuauuccga

SEQ ID NO: 44870 - RNA, 19 nt, Artificial Sequence
  Description of Artificial Sequence: Synthetic oligonucleotide
  Sense strand starting at position 2564 of SEQ ID NO: 537
cacagacugcagugauaac

SEQ ID NO: 44871 - RNA, 19 nt, Artificial Sequence
  Description of Artificial Sequence: Synthetic oligonucleotide
  Antisense strand to SEQ ID NO: 44790
guuaucacugcagucugug

SEQ ID NO: 44872 - RNA, 19 nt, Artificial Sequence
  Description of Artificial Sequence: Synthetic oligonucleotide
  Sense strand starting at position 2703 of SEQ ID NO: 537
gcacaugugaagcagguua

SEQ ID NO: 44873 - RNA, 19 nt, Artificial Sequence
  Description of Artificial Sequence: Synthetic oligonucleotide
  Antisense strand to SEQ ID NO: 44792
uaaccugcuucacaugugc

SEQ ID NO: 44874 - RNA, 19 nt, Artificial Sequence
  Description of Artificial Sequence: Synthetic oligonucleotide
  Sense strand starting at position 2744 of SEQ ID NO: 537
gucauaggugugugauaga

SEQ ID NO: 44875 - RNA, 19 nt, Artificial Sequence
  Description of Artificial Sequence: Synthetic oligonucleotide
  Antisense strand to SEQ ID NO: 44794
ucuaucacacaccuaugac

SEQ ID NO: 44876 - RNA, 19 nt, Artificial Sequence
  Description of Artificial Sequence: Synthetic oligonucleotide
  Sense strand starting at position 2749 of SEQ ID NO: 537
aggugugugauagauacuu

SEQ ID NO: 44877 - RNA, 19 nt, Artificial Sequence
  Description of Artificial Sequence: Synthetic oligonucleotide
  Antisense strand to SEQ ID NO: 44796
aaguaucuaucacacaccu

SEQ ID NO: 44878 - RNA, 19 nt, Artificial Sequence
  Description of Artificial Sequence: Synthetic oligonucleotide
  Sense strand starting at position 2751 of SEQ ID NO: 537
gugugugauagauacuuuc

SEQ ID NO: 44879 - RNA, 19 nt, Artificial Sequence
  Description of Artificial Sequence: Synthetic oligonucleotide
  Antisense strand to SEQ ID NO: 44798
gaaaguaucuaucacacac

SEQ ID NO: 44880 - RNA, 19 nt, Artificial Sequence
  Description of Artificial Sequence: Synthetic oligonucleotide
  Sense strand starting at position 2831 of SEQ ID NO: 537
cuaucugaugcugauuauu

SEQ ID NO: 44881 - RNA, 19 nt, Artificial Sequence
  Description of Artificial Sequence: Synthetic oligonucleotide
  Antisense strand to SEQ ID NO: 44800
aauaaucagcaucagauag

SEQ ID NO: 44882 - RNA, 19 nt, Artificial Sequence
  Description of Artificial Sequence: Synthetic oligonucleotide
  Sense strand starting at position 2898 of SEQ ID NO: 537
aggaucuacugagaagaca

SEQ ID NO: 44883 - RNA, 19 nt, Artificial Sequence
  Description of Artificial Sequence: Synthetic oligonucleotide
  Antisense strand to SEQ ID NO: 44802
ugucuucucaguagauccu

SEQ ID NO: 44884 - RNA, 19 nt, Artificial Sequence
  Description of Artificial Sequence: Synthetic oligonucleotide
  Sense strand starting at position 2924 of SEQ ID NO: 537
aagucuuaugauggacauu

SEQ ID NO: 44885 - RNA, 19 nt, Artificial Sequence
  Description of Artificial Sequence: Synthetic oligonucleotide
  Antisense strand to SEQ ID NO: 44804
aauguccaucauaagacuu

SEQ ID NO: 44886 - RNA, 19 nt, Artificial Sequence
  Description of Artificial Sequence: Synthetic oligonucleotide
  Sense strand starting at position 3021 of SEQ ID NO: 537
gacacauagccacaguguu

SEQ ID NO: 44887 - RNA, 19 nt, Artificial Sequence
  Description of Artificial Sequence: Synthetic oligonucleotide
  Antisense strand to SEQ ID NO: 44806
aacacuguggcuauguguc

SEQ ID NO: 44888 - RNA, 19 nt, Artificial Sequence
  Description of Artificial Sequence: Synthetic oligonucleotide
  Sense strand starting at position 3082 of SEQ ID NO: 537
uuaagaugaugagaggaaa

SEQ ID NO: 44889 - RNA, 19 nt, Artificial Sequence
  Description of Artificial Sequence: Synthetic oligonucleotide
  Antisense strand to SEQ ID NO: 44808
uuuccucucaucaucuuaa

SEQ ID NO: 44890 - RNA, 19 nt, Artificial Sequence
  Description of Artificial Sequence: Synthetic oligonucleotide
  Sense strand starting at position 3101 of SEQ ID NO: 537
ccaaaugugguaugaaugu

SEQ ID NO: 44891 - RNA, 19 nt, Artificial Sequence
  Description of Artificial Sequence: Synthetic oligonucleotide
  Antisense strand to SEQ ID NO: 44810
acauucauaccacauuugg

SEQ ID NO: 44892 - RNA, 19 nt, Artificial Sequence
  Description of Artificial Sequence: Synthetic oligonucleotide
  Sense strand starting at position 3112 of SEQ ID NO: 537
augaauguagugugaguca

SEQ ID NO: 44893 - RNA, 19 nt, Artificial Sequence
  Description of Artificial Sequence: Synthetic oligonucleotide
  Antisense strand to SEQ ID NO: 44812
ugacucacacuacauucau

SEQ ID NO: 44894 - RNA, 19 nt, Artificial Sequence
  Description of Artificial Sequence: Synthetic oligonucleotide
  Sense strand starting at position 3115 of SEQ ID NO: 537
aauguagugugagucauaa

SEQ ID NO: 44895 - RNA, 19 nt, Artificial Sequence
  Description of Artificial Sequence: Synthetic oligonucleotide
  Antisense strand to SEQ ID NO: 44814
uuaugacucacacuacauu

SEQ ID NO: 44896 - RNA, 19 nt, Artificial Sequence
  Description of Artificial Sequence: Synthetic oligonucleotide
  Sense strand starting at position 3117 of SEQ ID NO: 537
uguagugugagucauaaga

SEQ ID NO: 44897 - RNA, 19 nt, Artificial Sequence
  Description of Artificial Sequence: Synthetic oligonucleotide
  Antisense strand to SEQ ID NO: 44816
ucuuaugacucacacuaca

SEQ ID NO: 44898 - RNA, 19 nt, Artificial Sequence
  Description of Artificial Sequence: Synthetic oligonucleotide
  Sense strand starting at position 3235 of SEQ ID NO: 537
uuggguacuacuuggucaa

SEQ ID NO: 44899 - RNA, 19 nt, Artificial Sequence
  Description of Artificial Sequence: Synthetic oligonucleotide
  Antisense strand to SEQ ID NO: 44818
uugaccaaguaguacccaa

SEQ ID NO: 44900 - RNA, 19 nt, Artificial Sequence
  Description of Artificial Sequence: Synthetic oligonucleotide
  Sense strand starting at position 3237 of SEQ ID NO: 537
ggguacuacuuggucaaca

SEQ ID NO: 44901 - RNA, 19 nt, Artificial Sequence
  Description of Artificial Sequence: Synthetic oligonucleotide
  Antisense strand to SEQ ID NO: 44820
uguugaccaaguaguaccc

SEQ ID NO: 44902 - RNA, 19 nt, Artificial Sequence
  Description of Artificial Sequence: Synthetic oligonucleotide
  Sense strand starting at position 3261 of SEQ ID NO: 537
agaaauauuguauagccau

SEQ ID NO: 44903 - RNA, 19 nt, Artificial Sequence
  Description of Artificial Sequence: Synthetic oligonucleotide
  Antisense strand to SEQ ID NO: 44822
auggcuauacaauauuucu

SEQ ID NO: 44904 - RNA, 19 nt, Artificial Sequence
  Description of Artificial Sequence: Synthetic oligonucleotide
  Sense strand starting at position 3418 of SEQ ID NO: 537
ugggaauuauuacuuguac

SEQ ID NO: 44905 - RNA, 19 nt, Artificial Sequence
  Description of Artificial Sequence: Synthetic oligonucleotide
  Antisense strand to SEQ ID NO: 44824
guacaaguaauaauuccca

SEQ ID NO: 44906 - RNA, 19 nt, Artificial Sequence
  Description of Artificial Sequence: Synthetic oligonucleotide
  Sense strand starting at position 3419 of SEQ ID NO: 537
gggaauuauuacuuguaca

SEQ ID NO: 44907 - RNA, 19 nt, Artificial Sequence
  Description of Artificial Sequence: Synthetic oligonucleotide
  Antisense strand to SEQ ID NO: 44826
uguacaaguaauaauuccc

SEQ ID NO: 44908 - RNA, 19 nt, Artificial Sequence
  Description of Artificial Sequence: Synthetic oligonucleotide
  Sense strand starting at position 3438 of SEQ ID NO: 537
ucacaugagcagugugaug

SEQ ID NO: 44909 - RNA, 19 nt, Artificial Sequence
  Description of Artificial Sequence: Synthetic oligonucleotide
  Antisense strand to SEQ ID NO: 44828
caucacacugcucauguga

SEQ ID NO: 44910 - RNA, 19 nt, Artificial Sequence
  Description of Artificial Sequence: Synthetic oligonucleotide
  Sense strand starting at position 3494 of SEQ ID NO: 537
uugagaaauuauucuguga

SEQ ID NO: 44911 - RNA, 19 nt, Artificial Sequence
  Description of Artificial Sequence: Synthetic oligonucleotide
  Antisense strand to SEQ ID NO: 44830
ucacagaauaauuucucaa

SEQ ID NO: 44912 - RNA, 19 nt, Artificial Sequence
  Description of Artificial Sequence: Synthetic oligonucleotide
  Sense strand starting at position 3577 of SEQ ID NO: 537
cugcauaagugaccauacu

SEQ ID NO: 44913 - RNA, 19 nt, Artificial Sequence
  Description of Artificial Sequence: Synthetic oligonucleotide
  Antisense strand to SEQ ID NO: 44832
aguauggucacuuaugcag

SEQ ID NO: 44914 - RNA, 19 nt, Artificial Sequence
  Description of Artificial Sequence: Synthetic oligonucleotide
  Sense strand starting at position 3739 of SEQ ID NO: 537
uuaauuuggugugaggaga

SEQ ID NO: 44915 - RNA, 19 nt, Artificial Sequence
  Description of Artificial Sequence: Synthetic oligonucleotide
  Antisense strand to SEQ ID NO: 44834
ucuccucacaccaaauuaa

SEQ ID NO: 44916 - RNA, 19 nt, Artificial Sequence
  Description of Artificial Sequence: Synthetic oligonucleotide
  Sense strand starting at position 3810 of SEQ ID NO: 537
agucauacccuugaacagu

SEQ ID NO: 44917 - RNA, 19 nt, Artificial Sequence
  Description of Artificial Sequence: Synthetic oligonucleotide
  Antisense strand to SEQ ID NO: 44836
acuguucaaggguaugacu

SEQ ID NO: 44918 - RNA, 19 nt, Artificial Sequence
  Description of Artificial Sequence: Synthetic oligonucleotide
  Sense strand starting at position 3857 of SEQ ID NO: 537
uaaguacaucgagggaaau

SEQ ID NO: 44919 - RNA, 19 nt, Artificial Sequence
  Description of Artificial Sequence: Synthetic oligonucleotide
  Antisense strand to SEQ ID NO: 44838
auuucccucgauguacuua

SEQ ID NO: 44920 - RNA, 19 nt, Artificial Sequence
  Description of Artificial Sequence: Synthetic oligonucleotide
  Sense strand starting at position 156 of SEQ ID NO: 538
gcugaaacauguuuaagua

SEQ ID NO: 44921 - RNA, 19 nt, Artificial Sequence
  Description of Artificial Sequence: Synthetic oligonucleotide
  Antisense strand to SEQ ID NO: 44840
uacuuaaacauguuucagc

SEQ ID NO: 44922 - RNA, 19 nt, Artificial Sequence
  Description of Artificial Sequence: Synthetic oligonucleotide
  Sense strand starting at position 338 of SEQ ID NO: 538
ugcuuauugucauuaagaa

SEQ ID NO: 44923 - RNA, 19 nt, Artificial Sequence
  Description of Artificial Sequence: Synthetic oligonucleotide
  Antisense strand to SEQ ID NO: 44842
uucuuaaugacaauaagca

SEQ ID NO: 44924 - RNA, 19 nt, Artificial Sequence
  Description of Artificial Sequence: Synthetic oligonucleotide
  Sense strand starting at position 339 of SEQ ID NO: 538
gcuuauugucauuaagaaa

SEQ ID NO: 44925 - RNA, 19 nt, Artificial Sequence
  Description of Artificial Sequence: Synthetic oligonucleotide
  Antisense strand to SEQ ID NO: 44844
uuucuuaaugacaauaagc

SEQ ID NO: 44926 - RNA, 19 nt, Artificial Sequence
  Description of Artificial Sequence: Synthetic oligonucleotide
  Sense strand starting at position 632 of SEQ ID NO: 538
uauaauaaaggcuguauga

SEQ ID NO: 44927 - RNA, 19 nt, Artificial Sequence
  Description of Artificial Sequence: Synthetic oligonucleotide
  Antisense strand to SEQ ID NO: 44846
ucauacagccuuuauuaua

SEQ ID NO: 44928 - RNA, 19 nt, Artificial Sequence
  Description of Artificial Sequence: Synthetic oligonucleotide
  Sense strand starting at position 734 of SEQ ID NO: 538
agucuugauuuggaacaau

SEQ ID NO: 44929 - RNA, 19 nt, Artificial Sequence
  Description of Artificial Sequence: Synthetic oligonucleotide
  Antisense strand to SEQ ID NO: 44848
auuguuccaaaucaagacu

SEQ ID NO: 44930 - RNA, 19 nt, Artificial Sequence
  Description of Artificial Sequence: Synthetic oligonucleotide
  Sense strand starting at position 745 of SEQ ID NO: 538
ggaacaauauucccagcuu

SEQ ID NO: 44931 - RNA, 19 nt, Artificial Sequence
  Description of Artificial Sequence: Synthetic oligonucleotide
  Antisense strand to SEQ ID NO: 44850
aagcugggaauauuguucc

SEQ ID NO: 44932 - RNA, 19 nt, Artificial Sequence
  Description of Artificial Sequence: Synthetic oligonucleotide
  Sense strand starting at position 790 of SEQ ID NO: 538
cuauuuagcuaagacaaag

SEQ ID NO: 44933 - RNA, 19 nt, Artificial Sequence
  Description of Artificial Sequence: Synthetic oligonucleotide
  Antisense strand to SEQ ID NO: 44852
cuuugucuuagcuaaauag

SEQ ID NO: 44934 - RNA, 19 nt, Artificial Sequence
  Description of Artificial Sequence: Synthetic oligonucleotide
  Sense strand starting at position 816 of SEQ ID NO: 538
uuauuugauugcuacagac

SEQ ID NO: 44935 - RNA, 19 nt, Artificial Sequence
  Description of Artificial Sequence: Synthetic oligonucleotide
  Antisense strand to SEQ ID NO: 44854
gucuguagcaaucaaauaa

SEQ ID NO: 44936 - RNA, 19 nt, Artificial Sequence
  Description of Artificial Sequence: Synthetic oligonucleotide
  Sense strand starting at position 830 of SEQ ID NO: 538
cagacuucgcgguaaauga

SEQ ID NO: 44937 - RNA, 19 nt, Artificial Sequence
  Description of Artificial Sequence: Synthetic oligonucleotide
  Antisense strand to SEQ ID NO: 44856
ucauuuaccgcgaagucug

SEQ ID NO: 44938 - RNA, 19 nt, Artificial Sequence
  Description of Artificial Sequence: Synthetic oligonucleotide
  Sense strand starting at position 850 of SEQ ID NO: 538
ucagcaacaguguauagau

SEQ ID NO: 44939 - RNA, 19 nt, Artificial Sequence
  Description of Artificial Sequence: Synthetic oligonucleotide
  Antisense strand to SEQ ID NO: 44858
aucuauacacuguugcuga

SEQ ID NO: 44940 - RNA, 19 nt, Artificial Sequence
  Description of Artificial Sequence: Synthetic oligonucleotide
  Sense strand starting at position 852 of SEQ ID NO: 538
agcaacaguguauagauaa

SEQ ID NO: 44941 - RNA, 19 nt, Artificial Sequence
  Description of Artificial Sequence: Synthetic oligonucleotide
  Antisense strand to SEQ ID NO: 44860
uuaucuauacacuguugcu

SEQ ID NO: 44942 - RNA, 19 nt, Artificial Sequence
  Description of Artificial Sequence: Synthetic oligonucleotide
  Sense strand starting at position 865 of SEQ ID NO: 538
agauaacaccacugugcua

SEQ ID NO: 44943 - RNA, 19 nt, Artificial Sequence
  Description of Artificial Sequence: Synthetic oligonucleotide
  Antisense strand to SEQ ID NO: 44862
uagcacagugguguuaucu

SEQ ID NO: 44944 - RNA, 19 nt, Artificial Sequence
  Description of Artificial Sequence: Synthetic oligonucleotide
  Sense strand starting at position 972 of SEQ ID NO: 538
cacaguaagcaaggaucua

SEQ ID NO: 44945 - RNA, 19 nt, Artificial Sequence
  Description of Artificial Sequence: Synthetic oligonucleotide
  Antisense strand to SEQ ID NO: 44864
uagauccuugcuuacugug

SEQ ID NO: 44946 - RNA, 19 nt, Artificial Sequence
  Description of Artificial Sequence: Synthetic oligonucleotide
  Sense strand starting at position 1010 of SEQ ID NO: 538
gcagaagaaucacuagcuu

SEQ ID NO: 44947 - RNA, 19 nt, Artificial Sequence
  Description of Artificial Sequence: Synthetic oligonucleotide
  Antisense strand to SEQ ID NO: 44866
aagcuagugauucuucugc

SEQ ID NO: 44948 - RNA, 19 nt, Artificial Sequence
  Description of Artificial Sequence: Synthetic oligonucleotide
  Sense strand starting at position 1030 of SEQ ID NO: 538
aggguaaacguuuguaaag

SEQ ID NO: 44949 - RNA, 19 nt, Artificial Sequence
  Description of Artificial Sequence: Synthetic oligonucleotide
  Antisense strand to SEQ ID NO: 44868
cuuuacaaacguuuacccu

SEQ ID NO: 44950 - RNA, 19 nt, Artificial Sequence
  Description of Artificial Sequence: Synthetic oligonucleotide
  Sense strand starting at position 1118 of SEQ ID NO: 538
aucugacauuuguagaaua

SEQ ID NO: 44951 - RNA, 19 nt, Artificial Sequence
  Description of Artificial Sequence: Synthetic oligonucleotide
  Antisense strand to SEQ ID NO: 44870
uauucuacaaaugucagau

SEQ ID NO: 44952 - RNA, 19 nt, Artificial Sequence
  Description of Artificial Sequence: Synthetic oligonucleotide
  Sense strand starting at position 1138 of SEQ ID NO: 538
ugucacucaucugauuuga

SEQ ID NO: 44953 - RNA, 19 nt, Artificial Sequence
  Description of Artificial Sequence: Synthetic oligonucleotide
  Antisense strand to SEQ ID NO: 44872
ucaaaucagaugagugaca

SEQ ID NO: 44954 - RNA, 19 nt, Artificial Sequence
  Description of Artificial Sequence: Synthetic oligonucleotide
  Sense strand starting at position 1219 of SEQ ID NO: 538
aaguuaauuuggccgaggu

SEQ ID NO: 44955 - RNA, 19 nt, Artificial Sequence
  Description of Artificial Sequence: Synthetic oligonucleotide
  Antisense strand to SEQ ID NO: 44874
accucggccaaauuaacuu

SEQ ID NO: 44956 - RNA, 19 nt, Artificial Sequence
  Description of Artificial Sequence: Synthetic oligonucleotide
  Sense strand starting at position 1220 of SEQ ID NO: 538
aguuaauuuggccgaggua

SEQ ID NO: 44957 - RNA, 19 nt, Artificial Sequence
  Description of Artificial Sequence: Synthetic oligonucleotide
  Antisense strand to SEQ ID NO: 44876
uaccucggccaaauuaacu

SEQ ID NO: 44958 - RNA, 19 nt, Artificial Sequence
  Description of Artificial Sequence: Synthetic oligonucleotide
  Sense strand starting at position 1255 of SEQ ID NO: 538
ggguucuggcccuagacuu

SEQ ID NO: 44959 - RNA, 19 nt, Artificial Sequence
  Description of Artificial Sequence: Synthetic oligonucleotide
  Antisense strand to SEQ ID NO: 44878
aagucuagggccagaaccc

SEQ ID NO: 44960 - RNA, 19 nt, Artificial Sequence
  Description of Artificial Sequence: Synthetic oligonucleotide
  Sense strand starting at position 1306 of SEQ ID NO: 538
gcuauacagcucuaguuac

SEQ ID NO: 44961 - RNA, 19 nt, Artificial Sequence
  Description of Artificial Sequence: Synthetic oligonucleotide
  Antisense strand to SEQ ID NO: 44880
guaacuagagcuguauagc

SEQ ID NO: 44962 - RNA, 19 nt, Artificial Sequence
  Description of Artificial Sequence: Synthetic oligonucleotide
  Sense strand starting at position 1394 of SEQ ID NO: 538
ugcguauuagaugcuguua

SEQ ID NO: 44963 - RNA, 19 nt, Artificial Sequence
  Description of Artificial Sequence: Synthetic oligonucleotide
  Antisense strand to SEQ ID NO: 44882
uaacagcaucuaauacgca

SEQ ID NO: 44964 - RNA, 19 nt, Artificial Sequence
  Description of Artificial Sequence: Synthetic oligonucleotide
  Sense strand starting at position 2114 of SEQ ID NO: 538
gcuguauggccagaaccuu

SEQ ID NO: 44965 - RNA, 19 nt, Artificial Sequence
  Description of Artificial Sequence: Synthetic oligonucleotide
  Antisense strand to SEQ ID NO: 44884
aagguucuggccauacagc

SEQ ID NO: 44966 - RNA, 19 nt, Artificial Sequence
  Description of Artificial Sequence: Synthetic oligonucleotide
  Sense strand starting at position 2343 of SEQ ID NO: 538
ggcugaccucagugagcaa

SEQ ID NO: 44967 - RNA, 19 nt, Artificial Sequence
  Description of Artificial Sequence: Synthetic oligonucleotide
  Antisense strand to SEQ ID NO: 44886
uugcucacugaggucagcc

SEQ ID NO: 44968 - RNA, 19 nt, Artificial Sequence
  Description of Artificial Sequence: Synthetic oligonucleotide
  Sense strand starting at position 2758 of SEQ ID NO: 538
accagaaagagagguguuu

SEQ ID NO: 44969 - RNA, 19 nt, Artificial Sequence
  Description of Artificial Sequence: Synthetic oligonucleotide
  Antisense strand to SEQ ID NO: 44888
aaacaccucucuuucuggu

SEQ ID NO: 44970 - RNA, 19 nt, Artificial Sequence
  Description of Artificial Sequence: Synthetic oligonucleotide
  Sense strand starting at position 2764 of SEQ ID NO: 538
aagagagguguuuaguuac

SEQ ID NO: 44971 - RNA, 19 nt, Artificial Sequence
  Description of Artificial Sequence: Synthetic oligonucleotide
  Antisense strand to SEQ ID NO: 44890
guaacuaaacaccucucuu

SEQ ID NO: 44972 - RNA, 19 nt, Artificial Sequence
  Description of Artificial Sequence: Synthetic oligonucleotide
  Sense strand starting at position 2779 of SEQ ID NO: 538
uuacguaucacggaugacu

SEQ ID NO: 44973 - RNA, 19 nt, Artificial Sequence
  Description of Artificial Sequence: Synthetic oligonucleotide
  Antisense strand to SEQ ID NO: 44892
agucauccgugauacguaa

SEQ ID NO: 44974 - RNA, 19 nt, Artificial Sequence
  Description of Artificial Sequence: Synthetic oligonucleotide
  Sense strand starting at position 2836 of SEQ ID NO: 538
aucccaaaccguugugaaa

SEQ ID NO: 44975 - RNA, 19 nt, Artificial Sequence
  Description of Artificial Sequence: Synthetic oligonucleotide
  Antisense strand to SEQ ID NO: 44894
uuucacaacgguuugggau

SEQ ID NO: 44976 - RNA, 19 nt, Artificial Sequence
  Description of Artificial Sequence: Synthetic oligonucleotide
  Sense strand starting at position 2957 of SEQ ID NO: 538
uggauauuguuuguaguaa

SEQ ID NO: 44977 - RNA, 19 nt, Artificial Sequence
  Description of Artificial Sequence: Synthetic oligonucleotide
  Antisense strand to SEQ ID NO: 44896
uuacuacaaacaauaucca

SEQ ID NO: 44978 - RNA, 19 nt, Artificial Sequence
  Description of Artificial Sequence: Synthetic oligonucleotide
  Sense strand starting at position 3476 of SEQ ID NO: 538
ugcccucucauggguaaga

SEQ ID NO: 44979 - RNA, 19 nt, Artificial Sequence
  Description of Artificial Sequence: Synthetic oligonucleotide
  Antisense strand to SEQ ID NO: 44898
ucuuacccaugagagggca

SEQ ID NO: 44980 - RNA, 19 nt, Artificial Sequence
  Description of Artificial Sequence: Synthetic oligonucleotide
  Sense strand starting at position 3477 of SEQ ID NO: 538
gcccucucauggguaagau

SEQ ID NO: 44981 - RNA, 19 nt, Artificial Sequence
  Description of Artificial Sequence: Synthetic oligonucleotide
  Antisense strand to SEQ ID NO: 44900
aucuuacccaugagagggc

SEQ ID NO: 44982 - RNA, 19 nt, Artificial Sequence
  Description of Artificial Sequence: Synthetic oligonucleotide
  Sense strand starting at position 3522 of SEQ ID NO: 538
cccuuugaagucugagaau

SEQ ID NO: 44983 - RNA, 19 nt, Artificial Sequence
  Description of Artificial Sequence: Synthetic oligonucleotide
  Antisense strand to SEQ ID NO: 44902
auucucagacuucaaaggg

SEQ ID NO: 44984 - RNA, 19 nt, Artificial Sequence
  Description of Artificial Sequence: Synthetic oligonucleotide
  Sense strand starting at position 3533 of SEQ ID NO: 538
cugagaauacaguguuuaa

SEQ ID NO: 44985 - RNA, 19 nt, Artificial Sequence
  Description of Artificial Sequence: Synthetic oligonucleotide
  Antisense strand to SEQ ID NO: 44904
uuaaacacuguauucucag

SEQ ID NO: 44986 - RNA, 19 nt, Artificial Sequence
  Description of Artificial Sequence: Synthetic oligonucleotide
  Sense strand starting at position 3536 of SEQ ID NO: 538
agaauacaguguuuaaugu

SEQ ID NO: 44987 - RNA, 19 nt, Artificial Sequence
  Description of Artificial Sequence: Synthetic oligonucleotide
  Antisense strand to SEQ ID NO: 44906
acauuaaacacuguauucu

SEQ ID NO: 44988 - RNA, 19 nt, Artificial Sequence
  Description of Artificial Sequence: Synthetic oligonucleotide
  Sense strand starting at position 3537 of SEQ ID NO: 538
gaauacaguguuuaaugua

SEQ ID NO: 44989 - RNA, 19 nt, Artificial Sequence
  Description of Artificial Sequence: Synthetic oligonucleotide
  Antisense strand to SEQ ID NO: 44908
uacauuaaacacuguauuc

SEQ ID NO: 44990 - RNA, 19 nt, Artificial Sequence
  Description of Artificial Sequence: Synthetic oligonucleotide
  Sense strand starting at position 3703 of SEQ ID NO: 538
ggguuacaccuaugcuuau

SEQ ID NO: 44991 - RNA, 19 nt, Artificial Sequence
  Description of Artificial Sequence: Synthetic oligonucleotide
  Antisense strand to SEQ ID NO: 44910
auaagcauagguguaaccc

SEQ ID NO: 44992 - RNA, 19 nt, Artificial Sequence
  Description of Artificial Sequence: Synthetic oligonucleotide
  Sense strand starting at position 3723 of SEQ ID NO: 538
gcugcauguguagaauaua

SEQ ID NO: 44993 - RNA, 19 nt, Artificial Sequence
  Description of Artificial Sequence: Synthetic oligonucleotide
  Antisense strand to SEQ ID NO: 44912
uauauucuacacaugcagc

SEQ ID NO: 44994 - RNA, 19 nt, Artificial Sequence
  Description of Artificial Sequence: Synthetic oligonucleotide
  Sense strand starting at position 3726 of SEQ ID NO: 538
gcauguguagaauauagaa

SEQ ID NO: 44995 - RNA, 19 nt, Artificial Sequence
  Description of Artificial Sequence: Synthetic oligonucleotide
  Antisense strand to SEQ ID NO: 44914
uucuauauucuacacaugc

SEQ ID NO: 44996 - RNA, 19 nt, Artificial Sequence
  Description of Artificial Sequence: Synthetic oligonucleotide
  Sense strand starting at position 3738 of SEQ ID NO: 538
uauagaaacgugcagaaau

SEQ ID NO: 44997 - RNA, 19 nt, Artificial Sequence
  Description of Artificial Sequence: Synthetic oligonucleotide
  Antisense strand to SEQ ID NO: 44916
auuucugcacguuucuaua

SEQ ID NO: 44998 - RNA, 19 nt, Artificial Sequence
  Description of Artificial Sequence: Synthetic oligonucleotide
  Sense strand starting at position 3844 of SEQ ID NO: 538
cauggaucgcuugagcaua

SEQ ID NO: 44999 - RNA, 19 nt, Artificial Sequence
  Description of Artificial Sequence: Synthetic oligonucleotide
  Antisense strand to SEQ ID NO: 44918
uaugcucaagcgauccaug

SEQ ID NO: 45000 - RNA, 19 nt, Artificial Sequence
  Description of Artificial Sequence: Synthetic oligonucleotide
  Sense strand starting at position 24 of SEQ ID NO: 539
acugaagucccagaucugu

SEQ ID NO: 45001 - RNA, 19 nt, Artificial Sequence
  Description of Artificial Sequence: Synthetic oligonucleotide
  Antisense strand to SEQ ID NO: 44920
acagaucugggacuucagu

SEQ ID NO: 45002 - RNA, 19 nt, Artificial Sequence
  Description of Artificial Sequence: Synthetic oligonucleotide
  Sense strand starting at position 71 of SEQ ID NO: 539
aaccuugaucugggaagcu

SEQ ID NO: 45003 - RNA, 19 nt, Artificial Sequence
  Description of Artificial Sequence: Synthetic oligonucleotide
  Antisense strand to SEQ ID NO: 44922
agcuucccagaucaagguu

SEQ ID NO: 45004 - RNA, 19 nt, Artificial Sequence
  Description of Artificial Sequence: Synthetic oligonucleotide
  Sense strand starting at position 141 of SEQ ID NO: 539
acuccuugucaccaggaua

SEQ ID NO: 45005 - RNA, 19 nt, Artificial Sequence
  Description of Artificial Sequence: Synthetic oligonucleotide
  Antisense strand to SEQ ID NO: 44924
uauccuggugacaaggagu

SEQ ID NO: 45006 - RNA, 19 nt, Artificial Sequence
  Description of Artificial Sequence: Synthetic oligonucleotide
  Sense strand starting at position 323 of SEQ ID NO: 539
cuuacaguuccucaguauc

SEQ ID NO: 45007 - RNA, 19 nt, Artificial Sequence
  Description of Artificial Sequence: Synthetic oligonucleotide
  Antisense strand to SEQ ID NO: 44926
gauacugaggaacuguaag

SEQ ID NO: 45008 - RNA, 19 nt, Artificial Sequence
  Description of Artificial Sequence: Synthetic oligonucleotide
  Sense strand starting at position 493 of SEQ ID NO: 539
cagugcucuccagagaaga

SEQ ID NO: 45009 - RNA, 19 nt, Artificial Sequence
  Description of Artificial Sequence: Synthetic oligonucleotide
  Antisense strand to SEQ ID NO: 44928
ucuucucuggagagcacug

SEQ ID NO: 45010 - RNA, 19 nt, Artificial Sequence
  Description of Artificial Sequence: Synthetic oligonucleotide
  Sense strand starting at position 510 of SEQ ID NO: 539
gagagaaugucagccucau

SEQ ID NO: 45011 - RNA, 19 nt, Artificial Sequence
  Description of Artificial Sequence: Synthetic oligonucleotide
  Antisense strand to SEQ ID NO: 44930
augaggcugacauucucuc

SEQ ID NO: 45012 - RNA, 19 nt, Artificial Sequence
  Description of Artificial Sequence: Synthetic oligonucleotide
  Sense strand starting at position 624 of SEQ ID NO: 539
auuggagaucugugucuag

SEQ ID NO: 45013 - RNA, 19 nt, Artificial Sequence
  Description of Artificial Sequence: Synthetic oligonucleotide
  Antisense strand to SEQ ID NO: 44932
cuagacacagaucuccaau

SEQ ID NO: 45014 - RNA, 19 nt, Artificial Sequence
  Description of Artificial Sequence: Synthetic oligonucleotide
  Sense strand starting at position 627 of SEQ ID NO: 539
ggagaucugugucuagaga

SEQ ID NO: 45015 - RNA, 19 nt, Artificial Sequence
  Description of Artificial Sequence: Synthetic oligonucleotide
  Antisense strand to SEQ ID NO: 44934
ucucuagacacagaucucc

SEQ ID NO: 45016 - RNA, 19 nt, Artificial Sequence
  Description of Artificial Sequence: Synthetic oligonucleotide
  Sense strand starting at position 890 of SEQ ID NO: 539
gggcaaaguaucuaagggu

SEQ ID NO: 45017 - RNA, 19 nt, Artificial Sequence
  Description of Artificial Sequence: Synthetic oligonucleotide
  Antisense strand to SEQ ID NO: 44936
acccuuagauacuuugccc

SEQ ID NO: 45018 - RNA, 19 nt, Artificial Sequence
  Description of Artificial Sequence: Synthetic oligonucleotide
  Sense strand starting at position 936 of SEQ ID NO: 539
agugguaagccacacaaau

SEQ ID NO: 45019 - RNA, 19 nt, Artificial Sequence
  Description of Artificial Sequence: Synthetic oligonucleotide
  Antisense strand to SEQ ID NO: 44938
auuuguguggcuuaccacu

SEQ ID NO: 45020 - RNA, 19 nt, Artificial Sequence
  Description of Artificial Sequence: Synthetic oligonucleotide
  Sense strand starting at position 958 of SEQ ID NO: 539
ugccgagugaaugaauaaa

SEQ ID NO: 45021 - RNA, 19 nt, Artificial Sequence
  Description of Artificial Sequence: Synthetic oligonucleotide
  Antisense strand to SEQ ID NO: 44940
uuuauucauucacucggca

SEQ ID NO: 45022 - RNA, 19 nt, Artificial Sequence
  Description of Artificial Sequence: Synthetic oligonucleotide
  Sense strand starting at position 2103 of SEQ ID NO: 539
ggaggcuugacuuagcgaa

SEQ ID NO: 45023 - RNA, 19 nt, Artificial Sequence
  Description of Artificial Sequence: Synthetic oligonucleotide
  Antisense strand to SEQ ID NO: 44942
uucgcuaagucaagccucc

SEQ ID NO: 45024 - RNA, 19 nt, Artificial Sequence
  Description of Artificial Sequence: Synthetic oligonucleotide
  Sense strand starting at position 2141 of SEQ ID NO: 539
gcgcauguccuggcugaaa

SEQ ID NO: 45025 - RNA, 19 nt, Artificial Sequence
  Description of Artificial Sequence: Synthetic oligonucleotide
  Antisense strand to SEQ ID NO: 44944
uuucagccaggacaugcgc

SEQ ID NO: 45026 - RNA, 19 nt, Artificial Sequence
  Description of Artificial Sequence: Synthetic oligonucleotide
  Sense strand starting at position 2368 of SEQ ID NO: 539
aaacuuggccuugagcaga

SEQ ID NO: 45027 - RNA, 19 nt, Artificial Sequence
  Description of Artificial Sequence: Synthetic oligonucleotide
  Antisense strand to SEQ ID NO: 44946
ucugcucaaggccaaguuu

SEQ ID NO: 45028 - RNA, 19 nt, Artificial Sequence
  Description of Artificial Sequence: Synthetic oligonucleotide
  Sense strand starting at position 2611 of SEQ ID NO: 539
agguaucaaccaugacauu

SEQ ID NO: 45029 - RNA, 19 nt, Artificial Sequence
  Description of Artificial Sequence: Synthetic oligonucleotide
  Antisense strand to SEQ ID NO: 44948
aaugucaugguugauaccu

SEQ ID NO: 45030 - RNA, 19 nt, Artificial Sequence
  Description of Artificial Sequence: Synthetic oligonucleotide
  Sense strand starting at position 2690 of SEQ ID NO: 539
ggacauuaucuguagggcu

SEQ ID NO: 45031 - RNA, 19 nt, Artificial Sequence
  Description of Artificial Sequence: Synthetic oligonucleotide
  Antisense strand to SEQ ID NO: 44950
agcccuacagauaaugucc

SEQ ID NO: 45032 - RNA, 19 nt, Artificial Sequence
  Description of Artificial Sequence: Synthetic oligonucleotide
  Sense strand starting at position 2800 of SEQ ID NO: 539
cagaaauacgucuggaauc

SEQ ID NO: 45033 - RNA, 19 nt, Artificial Sequence
  Description of Artificial Sequence: Synthetic oligonucleotide
  Antisense strand to SEQ ID NO: 44952
gauuccagacguauuucug

SEQ ID NO: 45034 - RNA, 19 nt, Artificial Sequence
  Description of Artificial Sequence: Synthetic oligonucleotide
  Sense strand starting at position 2901 of SEQ ID NO: 539
ggaauccagcccuaguauu

SEQ ID NO: 45035 - RNA, 19 nt, Artificial Sequence
  Description of Artificial Sequence: Synthetic oligonucleotide
  Antisense strand to SEQ ID NO: 44954
aauacuagggcuggauucc

SEQ ID NO: 45036 - RNA, 19 nt, Artificial Sequence
  Description of Artificial Sequence: Synthetic oligonucleotide
  Sense strand starting at position 3018 of SEQ ID NO: 539
uguguauucccucacacaa

SEQ ID NO: 45037 - RNA, 19 nt, Artificial Sequence
  Description of Artificial Sequence: Synthetic oligonucleotide
  Antisense strand to SEQ ID NO: 44956
uugugugagggaauacaca

SEQ ID NO: 45038 - RNA, 19 nt, Artificial Sequence
  Description of Artificial Sequence: Synthetic oligonucleotide
  Sense strand starting at position 3117 of SEQ ID NO: 539
ugauaaacuuguccaauug

SEQ ID NO: 45039 - RNA, 19 nt, Artificial Sequence
  Description of Artificial Sequence: Synthetic oligonucleotide
  Antisense strand to SEQ ID NO: 44958
caauuggacaaguuuauca

SEQ ID NO: 45040 - RNA, 19 nt, Artificial Sequence
  Description of Artificial Sequence: Synthetic oligonucleotide
  Sense strand starting at position 3125 of SEQ ID NO: 539
uuguccaauugauugaaua

SEQ ID NO: 45041 - RNA, 19 nt, Artificial Sequence
  Description of Artificial Sequence: Synthetic oligonucleotide
  Antisense strand to SEQ ID NO: 44960
uauucaaucaauuggacaa

SEQ ID NO: 45042 - RNA, 19 nt, Artificial Sequence
  Description of Artificial Sequence: Synthetic oligonucleotide
  Sense strand starting at position 3126 of SEQ ID NO: 539
uguccaauugauugaauau

SEQ ID NO: 45043 - RNA, 19 nt, Artificial Sequence
  Description of Artificial Sequence: Synthetic oligonucleotide
  Antisense strand to SEQ ID NO: 44962
auauucaaucaauuggaca

SEQ ID NO: 45044 - RNA, 19 nt, Artificial Sequence
  Description of Artificial Sequence: Synthetic oligonucleotide
  Sense strand starting at position 3271 of SEQ ID NO: 539
ggagucuuauuugaaacag

SEQ ID NO: 45045 - RNA, 19 nt, Artificial Sequence
  Description of Artificial Sequence: Synthetic oligonucleotide
  Antisense strand to SEQ ID NO: 44964
cuguuucaaauaagacucc

SEQ ID NO: 45046 - RNA, 19 nt, Artificial Sequence
  Description of Artificial Sequence: Synthetic oligonucleotide
  Sense strand starting at position 3286 of SEQ ID NO: 539
acagacucacgcuggaaau

SEQ ID NO: 45047 - RNA, 19 nt, Artificial Sequence
  Description of Artificial Sequence: Synthetic oligonucleotide
  Antisense strand to SEQ ID NO: 44966
auuuccagcgugagucugu

SEQ ID NO: 45048 - RNA, 19 nt, Artificial Sequence
  Description of Artificial Sequence: Synthetic oligonucleotide
  Sense strand starting at position 3323 of SEQ ID NO: 539
auaguaaagugaguaaauc

SEQ ID NO: 45049 - RNA, 19 nt, Artificial Sequence
  Description of Artificial Sequence: Synthetic oligonucleotide
  Antisense strand to SEQ ID NO: 44968
gauuuacucacuuuacuau

SEQ ID NO: 45050 - RNA, 19 nt, Artificial Sequence
  Description of Artificial Sequence: Synthetic oligonucleotide
  Sense strand starting at position 3413 of SEQ ID NO: 539
ggcuacauugcacaaacau

SEQ ID NO: 45051 - RNA, 19 nt, Artificial Sequence
  Description of Artificial Sequence: Synthetic oligonucleotide
  Antisense strand to SEQ ID NO: 44970
auguuugugcaauguagcc

SEQ ID NO: 45052 - RNA, 19 nt, Artificial Sequence
  Description of Artificial Sequence: Synthetic oligonucleotide
  Sense strand starting at position 3507 of SEQ ID NO: 539
gaaauuaaucuaugguaug

SEQ ID NO: 45053 - RNA, 19 nt, Artificial Sequence
  Description of Artificial Sequence: Synthetic oligonucleotide
  Antisense strand to SEQ ID NO: 44972
cauaccauagauuaauuuc

SEQ ID NO: 45054 - RNA, 19 nt, Artificial Sequence
  Description of Artificial Sequence: Synthetic oligonucleotide
  Sense strand starting at position 3517 of SEQ ID NO: 539
uaugguaugagaggucaga

SEQ ID NO: 45055 - RNA, 19 nt, Artificial Sequence
  Description of Artificial Sequence: Synthetic oligonucleotide
  Antisense strand to SEQ ID NO: 44974
ucugaccucucauaccaua

SEQ ID NO: 45056 - RNA, 19 nt, Artificial Sequence
  Description of Artificial Sequence: Synthetic oligonucleotide
  Sense strand starting at position 3526 of SEQ ID NO: 539
agaggucagaaugguguua

SEQ ID NO: 45057 - RNA, 19 nt, Artificial Sequence
  Description of Artificial Sequence: Synthetic oligonucleotide
  Antisense strand to SEQ ID NO: 44976
uaacaccauucugaccucu

SEQ ID NO: 45058 - RNA, 19 nt, Artificial Sequence
  Description of Artificial Sequence: Synthetic oligonucleotide
  Sense strand starting at position 3537 of SEQ ID NO: 539
ugguguuaccuuuagggag

SEQ ID NO: 45059 - RNA, 19 nt, Artificial Sequence
  Description of Artificial Sequence: Synthetic oligonucleotide
  Antisense strand to SEQ ID NO: 44978
cucccuaaagguaacacca

SEQ ID NO: 45060 - RNA, 19 nt, Artificial Sequence
  Description of Artificial Sequence: Synthetic oligonucleotide
  Sense strand starting at position 3629 of SEQ ID NO: 539
gugauagauacauggaugu

SEQ ID NO: 45061 - RNA, 19 nt, Artificial Sequence
  Description of Artificial Sequence: Synthetic oligonucleotide
  Antisense strand to SEQ ID NO: 44980
acauccauguaucuaucac

SEQ ID NO: 45062 - RNA, 19 nt, Artificial Sequence
  Description of Artificial Sequence: Synthetic oligonucleotide
  Sense strand starting at position 3684 of SEQ ID NO: 539
agcacuucucuauauguau

SEQ ID NO: 45063 - RNA, 19 nt, Artificial Sequence
  Description of Artificial Sequence: Synthetic oligonucleotide
  Antisense strand to SEQ ID NO: 44982
auacauauagagaagugcu

SEQ ID NO: 45064 - RNA, 19 nt, Artificial Sequence
  Description of Artificial Sequence: Synthetic oligonucleotide
  Sense strand starting at position 3724 of SEQ ID NO: 539
uaaaguauucguuaggaug

SEQ ID NO: 45065 - RNA, 19 nt, Artificial Sequence
  Description of Artificial Sequence: Synthetic oligonucleotide
  Antisense strand to SEQ ID NO: 44984
cauccuaacgaauacuuua

SEQ ID NO: 45066 - RNA, 19 nt, Artificial Sequence
  Description of Artificial Sequence: Synthetic oligonucleotide
  Sense strand starting at position 3822 of SEQ ID NO: 539
aguggagcuaacuaaguau

SEQ ID NO: 45067 - RNA, 19 nt, Artificial Sequence
  Description of Artificial Sequence: Synthetic oligonucleotide
  Antisense strand to SEQ ID NO: 44986
auacuuaguuagcuccacu

SEQ ID NO: 45068 - RNA, 19 nt, Artificial Sequence
  Description of Artificial Sequence: Synthetic oligonucleotide
  Sense strand starting at position 3825 of SEQ ID NO: 539
ggagcuaacuaaguauaau

SEQ ID NO: 45069 - RNA, 19 nt, Artificial Sequence
  Description of Artificial Sequence: Synthetic oligonucleotide
  Antisense strand to SEQ ID NO: 44988
auuauacuuaguuagcucc

SEQ ID NO: 45070 - RNA, 19 nt, Artificial Sequence
  Description of Artificial Sequence: Synthetic oligonucleotide
  Sense strand starting at position 3909 of SEQ ID NO: 539
guuuaaagugauggguuaa

SEQ ID NO: 45071 - RNA, 19 nt, Artificial Sequence
  Description of Artificial Sequence: Synthetic oligonucleotide
  Antisense strand to SEQ ID NO: 44990
uuaacccaucacuuuaaac

SEQ ID NO: 45072 - RNA, 19 nt, Artificial Sequence
  Description of Artificial Sequence: Synthetic oligonucleotide
  Sense strand starting at position 3910 of SEQ ID NO: 539
uuuaaagugauggguuaag

SEQ ID NO: 45073 - RNA, 19 nt, Artificial Sequence
  Description of Artificial Sequence: Synthetic oligonucleotide
  Antisense strand to SEQ ID NO: 44992
cuuaacccaucacuuuaaa

SEQ ID NO: 45074 - RNA, 19 nt, Artificial Sequence
  Description of Artificial Sequence: Synthetic oligonucleotide
  Sense strand starting at position 3944 of SEQ ID NO: 539
gcauauuauggguauagca

SEQ ID NO: 45075 - RNA, 19 nt, Artificial Sequence
  Description of Artificial Sequence: Synthetic oligonucleotide
  Antisense strand to SEQ ID NO: 44994
ugcuauacccauaauaugc

SEQ ID NO: 45076 - RNA, 19 nt, Artificial Sequence
  Description of Artificial Sequence: Synthetic oligonucleotide
  Sense strand starting at position 3946 of SEQ ID NO: 539
auauuauggguauagcaau

SEQ ID NO: 45077 - RNA, 19 nt, Artificial Sequence
  Description of Artificial Sequence: Synthetic oligonucleotide
  Antisense strand to SEQ ID NO: 44996
auugcuauacccauaauau

SEQ ID NO: 45078 - RNA, 19 nt, Artificial Sequence
  Description of Artificial Sequence: Synthetic oligonucleotide
  Sense strand starting at position 3952 of SEQ ID NO: 539
uggguauagcaaugagaau

SEQ ID NO: 45079 - RNA, 19 nt, Artificial Sequence
  Description of Artificial Sequence: Synthetic oligonucleotide
  Antisense strand to SEQ ID NO: 44998
auucucauugcuauaccca

SEQ ID NO: 45080 - RNA, 19 nt, Artificial Sequence
  Description of Artificial Sequence: Synthetic oligonucleotide
  Sense strand starting at position 132 of SEQ ID NO: 540
uaaagcagucuaggguuaa

SEQ ID NO: 45081 - RNA, 19 nt, Artificial Sequence
  Description of Artificial Sequence: Synthetic oligonucleotide
  Antisense strand to SEQ ID NO: 45000
uuaacccuagacugcuuua

SEQ ID NO: 45082 - RNA, 19 nt, Artificial Sequence
  Description of Artificial Sequence: Synthetic oligonucleotide
  Sense strand starting at position 312 of SEQ ID NO: 540
gggacagggccauguugaa

SEQ ID NO: 45083 - RNA, 19 nt, Artificial Sequence
  Description of Artificial Sequence: Synthetic oligonucleotide
  Antisense strand to SEQ ID NO: 45002
uucaacauggcccuguccc

SEQ ID NO: 45084 - RNA, 19 nt, Artificial Sequence
  Description of Artificial Sequence: Synthetic oligonucleotide
  Sense strand starting at position 316 of SEQ ID NO: 540
cagggccauguugaauaua

SEQ ID NO: 45085 - RNA, 19 nt, Artificial Sequence
  Description of Artificial Sequence: Synthetic oligonucleotide
  Antisense strand to SEQ ID NO: 45004
uauauucaacauggcccug

SEQ ID NO: 45086 - RNA, 19 nt, Artificial Sequence
  Description of Artificial Sequence: Synthetic oligonucleotide
  Sense strand starting at position 580 of SEQ ID NO: 540
ggaguucuggcagaaggua

SEQ ID NO: 45087 - RNA, 19 nt, Artificial Sequence
  Description of Artificial Sequence: Synthetic oligonucleotide
  Antisense strand to SEQ ID NO: 45006
uaccuucugccagaacucc

SEQ ID NO: 45088 - RNA, 19 nt, Artificial Sequence
  Description of Artificial Sequence: Synthetic oligonucleotide
  Sense strand starting at position 728 of SEQ ID NO: 540
cuagauucugugggugaua

SEQ ID NO: 45089 - RNA, 19 nt, Artificial Sequence
  Description of Artificial Sequence: Synthetic oligonucleotide
  Antisense strand to SEQ ID NO: 45008
uaucacccacagaaucuag

SEQ ID NO: 45090 - RNA, 19 nt, Artificial Sequence
  Description of Artificial Sequence: Synthetic oligonucleotide
  Sense strand starting at position 729 of SEQ ID NO: 540
uagauucugugggugauaa

SEQ ID NO: 45091 - RNA, 19 nt, Artificial Sequence
  Description of Artificial Sequence: Synthetic oligonucleotide
  Antisense strand to SEQ ID NO: 45010
uuaucacccacagaaucua

SEQ ID NO: 45092 - RNA, 19 nt, Artificial Sequence
  Description of Artificial Sequence: Synthetic oligonucleotide
  Sense strand starting at position 730 of SEQ ID NO: 540
agauucugugggugauaac

SEQ ID NO: 45093 - RNA, 19 nt, Artificial Sequence
  Description of Artificial Sequence: Synthetic oligonucleotide
  Antisense strand to SEQ ID NO: 45012
guuaucacccacagaaucu

SEQ ID NO: 45094 - RNA, 19 nt, Artificial Sequence
  Description of Artificial Sequence: Synthetic oligonucleotide
  Sense strand starting at position 731 of SEQ ID NO: 540
gauucugugggugauaaca

SEQ ID NO: 45095 - RNA, 19 nt, Artificial Sequence
  Description of Artificial Sequence: Synthetic oligonucleotide
  Antisense strand to SEQ ID NO: 45014
uguuaucacccacagaauc

SEQ ID NO: 45096 - RNA, 19 nt, Artificial Sequence
  Description of Artificial Sequence: Synthetic oligonucleotide
  Sense strand starting at position 910 of SEQ ID NO: 540
caguccuuaccuugggaaa

SEQ ID NO: 45097 - RNA, 19 nt, Artificial Sequence
  Description of Artificial Sequence: Synthetic oligonucleotide
  Antisense strand to SEQ ID NO: 45016
uuucccaagguaaggacug

SEQ ID NO: 45098 - RNA, 19 nt, Artificial Sequence
  Description of Artificial Sequence: Synthetic oligonucleotide
  Sense strand starting at position 911 of SEQ ID NO: 540
aguccuuaccuugggaaau

SEQ ID NO: 45099 - RNA, 19 nt, Artificial Sequence
  Description of Artificial Sequence: Synthetic oligonucleotide
  Antisense strand to SEQ ID NO: 45018
auuucccaagguaaggacu

SEQ ID NO: 45100 - RNA, 19 nt, Artificial Sequence
  Description of Artificial Sequence: Synthetic oligonucleotide
  Sense strand starting at position 923 of SEQ ID NO: 540
gggaaauugguaggugauu

SEQ ID NO: 45101 - RNA, 19 nt, Artificial Sequence
  Description of Artificial Sequence: Synthetic oligonucleotide
  Antisense strand to SEQ ID NO: 45020
aaucaccuaccaauuuccc

SEQ ID NO: 45102 - RNA, 19 nt, Artificial Sequence
  Description of Artificial Sequence: Synthetic oligonucleotide
  Sense strand starting at position 924 of SEQ ID NO: 540
ggaaauugguaggugauua

SEQ ID NO: 45103 - RNA, 19 nt, Artificial Sequence
  Description of Artificial Sequence: Synthetic oligonucleotide
  Antisense strand to SEQ ID NO: 45022
uaaucaccuaccaauuucc

SEQ ID NO: 45104 - RNA, 19 nt, Artificial Sequence
  Description of Artificial Sequence: Synthetic oligonucleotide
  Sense strand starting at position 925 of SEQ ID NO: 540
gaaauugguaggugauuau

SEQ ID NO: 45105 - RNA, 19 nt, Artificial Sequence
  Description of Artificial Sequence: Synthetic oligonucleotide
  Antisense strand to SEQ ID NO: 45024
auaaucaccuaccaauuuc

SEQ ID NO: 45106 - RNA, 19 nt, Artificial Sequence
  Description of Artificial Sequence: Synthetic oligonucleotide
  Sense strand starting at position 1144 of SEQ ID NO: 540
uggaguggagucugugaga

SEQ ID NO: 45107 - RNA, 19 nt, Artificial Sequence
  Description of Artificial Sequence: Synthetic oligonucleotide
  Antisense strand to SEQ ID NO: 45026
ucucacagacuccacucca

SEQ ID NO: 45108 - RNA, 19 nt, Artificial Sequence
  Description of Artificial Sequence: Synthetic oligonucleotide
  Sense strand starting at position 1145 of SEQ ID NO: 540
ggaguggagucugugagaa

SEQ ID NO: 45109 - RNA, 19 nt, Artificial Sequence
  Description of Artificial Sequence: Synthetic oligonucleotide
  Antisense strand to SEQ ID NO: 45028
uucucacagacuccacucc

SEQ ID NO: 45110 - RNA, 19 nt, Artificial Sequence
  Description of Artificial Sequence: Synthetic oligonucleotide
  Sense strand starting at position 1201 of SEQ ID NO: 540
ugcugagauaccuggauac

SEQ ID NO: 45111 - RNA, 19 nt, Artificial Sequence
  Description of Artificial Sequence: Synthetic oligonucleotide
  Antisense strand to SEQ ID NO: 45030
guauccagguaucucagca

SEQ ID NO: 45112 - RNA, 19 nt, Artificial Sequence
  Description of Artificial Sequence: Synthetic oligonucleotide
  Sense strand starting at position 1416 of SEQ ID NO: 540
cuggcaguccuggaacaau

SEQ ID NO: 45113 - RNA, 19 nt, Artificial Sequence
  Description of Artificial Sequence: Synthetic oligonucleotide
  Antisense strand to SEQ ID NO: 45032
auuguuccaggacugccag

SEQ ID NO: 45114 - RNA, 19 nt, Artificial Sequence
  Description of Artificial Sequence: Synthetic oligonucleotide
  Sense strand starting at position 1429 of SEQ ID NO: 540
aacaauauggccugagagu

SEQ ID NO: 45115 - RNA, 19 nt, Artificial Sequence
  Description of Artificial Sequence: Synthetic oligonucleotide
  Antisense strand to SEQ ID NO: 45034
acucucaggccauauuguu

SEQ ID NO: 45116 - RNA, 19 nt, Artificial Sequence
  Description of Artificial Sequence: Synthetic oligonucleotide
  Sense strand starting at position 1430 of SEQ ID NO: 540
acaauauggccugagaguu

SEQ ID NO: 45117 - RNA, 19 nt, Artificial Sequence
  Description of Artificial Sequence: Synthetic oligonucleotide
  Antisense strand to SEQ ID NO: 45036
aacucucaggccauauugu

SEQ ID NO: 45118 - RNA, 19 nt, Artificial Sequence
  Description of Artificial Sequence: Synthetic oligonucleotide
  Sense strand starting at position 1580 of SEQ ID NO: 540
uguggaggccgagauauaa

SEQ ID NO: 45119 - RNA, 19 nt, Artificial Sequence
  Description of Artificial Sequence: Synthetic oligonucleotide
  Antisense strand to SEQ ID NO: 45038
uuauaucucggccuccaca

SEQ ID NO: 45120 - RNA, 19 nt, Artificial Sequence
  Description of Artificial Sequence: Synthetic oligonucleotide
  Sense strand starting at position 1642 of SEQ ID NO: 540
cuaagagggucacccuaaa

SEQ ID NO: 45121 - RNA, 19 nt, Artificial Sequence
  Description of Artificial Sequence: Synthetic oligonucleotide
  Antisense strand to SEQ ID NO: 45040
uuuagggugacccucuuag

SEQ ID NO: 45122 - RNA, 19 nt, Artificial Sequence
  Description of Artificial Sequence: Synthetic oligonucleotide
  Sense strand starting at position 1874 of SEQ ID NO: 540
acgcgcugucuuccagaga

SEQ ID NO: 45123 - RNA, 19 nt, Artificial Sequence
  Description of Artificial Sequence: Synthetic oligonucleotide
  Antisense strand to SEQ ID NO: 45042
ucucuggaagacagcgcgu

SEQ ID NO: 45124 - RNA, 19 nt, Artificial Sequence
  Description of Artificial Sequence: Synthetic oligonucleotide
  Sense strand starting at position 1919 of SEQ ID NO: 540
cccagugguugagcaagaa

SEQ ID NO: 45125 - RNA, 19 nt, Artificial Sequence
  Description of Artificial Sequence: Synthetic oligonucleotide
  Antisense strand to SEQ ID NO: 45044
uucuugcucaaccacuggg

SEQ ID NO: 45126 - RNA, 19 nt, Artificial Sequence
  Description of Artificial Sequence: Synthetic oligonucleotide
  Sense strand starting at position 1923 of SEQ ID NO: 540
gugguugagcaagaaggau

SEQ ID NO: 45127 - RNA, 19 nt, Artificial Sequence
  Description of Artificial Sequence: Synthetic oligonucleotide
  Antisense strand to SEQ ID NO: 45046
auccuucuugcucaaccac

SEQ ID NO: 45128 - RNA, 19 nt, Artificial Sequence
  Description of Artificial Sequence: Synthetic oligonucleotide
  Sense strand starting at position 2064 of SEQ ID NO: 540
aacaccucuggcugaaagu

SEQ ID NO: 45129 - RNA, 19 nt, Artificial Sequence
  Description of Artificial Sequence: Synthetic oligonucleotide
  Antisense strand to SEQ ID NO: 45048
acuuucagccagagguguu

SEQ ID NO: 45130 - RNA, 19 nt, Artificial Sequence
  Description of Artificial Sequence: Synthetic oligonucleotide
  Sense strand starting at position 2065 of SEQ ID NO: 540
acaccucuggcugaaagua

SEQ ID NO: 45131 - RNA, 19 nt, Artificial Sequence
  Description of Artificial Sequence: Synthetic oligonucleotide
  Antisense strand to SEQ ID NO: 45050
uacuuucagccagaggugu

SEQ ID NO: 45132 - RNA, 19 nt, Artificial Sequence
  Description of Artificial Sequence: Synthetic oligonucleotide
  Sense strand starting at position 2171 of SEQ ID NO: 540
uggacaaugcuugauagug

SEQ ID NO: 45133 - RNA, 19 nt, Artificial Sequence
  Description of Artificial Sequence: Synthetic oligonucleotide
  Antisense strand to SEQ ID NO: 45052
cacuaucaagcauugucca

SEQ ID NO: 45134 - RNA, 19 nt, Artificial Sequence
  Description of Artificial Sequence: Synthetic oligonucleotide
  Sense strand starting at position 2408 of SEQ ID NO: 540
auaaauagacuuggccuaa

SEQ ID NO: 45135 - RNA, 19 nt, Artificial Sequence
  Description of Artificial Sequence: Synthetic oligonucleotide
  Antisense strand to SEQ ID NO: 45054
uuaggccaagucuauuuau

SEQ ID NO: 45136 - RNA, 19 nt, Artificial Sequence
  Description of Artificial Sequence: Synthetic oligonucleotide
  Sense strand starting at position 2739 of SEQ ID NO: 540
cugggugaucuccacccaa

SEQ ID NO: 45137 - RNA, 19 nt, Artificial Sequence
  Description of Artificial Sequence: Synthetic oligonucleotide
  Antisense strand to SEQ ID NO: 45056
uuggguggagaucacccag

SEQ ID NO: 45138 - RNA, 19 nt, Artificial Sequence
  Description of Artificial Sequence: Synthetic oligonucleotide
  Sense strand starting at position 2976 of SEQ ID NO: 540
ggguuugacgccaguguuu

SEQ ID NO: 45139 - RNA, 19 nt, Artificial Sequence
  Description of Artificial Sequence: Synthetic oligonucleotide
  Antisense strand to SEQ ID NO: 45058
aaacacuggcgucaaaccc

SEQ ID NO: 45140 - RNA, 19 nt, Artificial Sequence
  Description of Artificial Sequence: Synthetic oligonucleotide
  Sense strand starting at position 3157 of SEQ ID NO: 540
ugcuguaaugggugagaag

SEQ ID NO: 45141 - RNA, 19 nt, Artificial Sequence
  Description of Artificial Sequence: Synthetic oligonucleotide
  Antisense strand to SEQ ID NO: 45060
cuucucacccauuacagca

SEQ ID NO: 45142 - RNA, 19 nt, Artificial Sequence
  Description of Artificial Sequence: Synthetic oligonucleotide
  Sense strand starting at position 3158 of SEQ ID NO: 540
gcuguaaugggugagaaga

SEQ ID NO: 45143 - RNA, 19 nt, Artificial Sequence
  Description of Artificial Sequence: Synthetic oligonucleotide
  Antisense strand to SEQ ID NO: 45062
ucuucucacccauuacagc

SEQ ID NO: 45144 - RNA, 19 nt, Artificial Sequence
  Description of Artificial Sequence: Synthetic oligonucleotide
  Sense strand starting at position 3245 of SEQ ID NO: 540
uuaccaccuguuugaggaa

SEQ ID NO: 45145 - RNA, 19 nt, Artificial Sequence
  Description of Artificial Sequence: Synthetic oligonucleotide
  Antisense strand to SEQ ID NO: 45064
uuccucaaacaggugguaa

SEQ ID NO: 45146 - RNA, 19 nt, Artificial Sequence
  Description of Artificial Sequence: Synthetic oligonucleotide
  Sense strand starting at position 3386 of SEQ ID NO: 540
ggaugcauuugacaucaaa

SEQ ID NO: 45147 - RNA, 19 nt, Artificial Sequence
  Description of Artificial Sequence: Synthetic oligonucleotide
  Antisense strand to SEQ ID NO: 45066
uuugaugucaaaugcaucc

SEQ ID NO: 45148 - RNA, 19 nt, Artificial Sequence
  Description of Artificial Sequence: Synthetic oligonucleotide
  Sense strand starting at position 3652 of SEQ ID NO: 540
guguuauccacaggagaga

SEQ ID NO: 45149 - RNA, 19 nt, Artificial Sequence
  Description of Artificial Sequence: Synthetic oligonucleotide
  Antisense strand to SEQ ID NO: 45068
ucucuccuguggauaacac

SEQ ID NO: 45150 - RNA, 19 nt, Artificial Sequence
  Description of Artificial Sequence: Synthetic oligonucleotide
  Sense strand starting at position 3738 of SEQ ID NO: 540
gugcccuagaaaggaauua

SEQ ID NO: 45151 - RNA, 19 nt, Artificial Sequence
  Description of Artificial Sequence: Synthetic oligonucleotide
  Antisense strand to SEQ ID NO: 45070
uaauuccuuucuagggcac

SEQ ID NO: 45152 - RNA, 19 nt, Artificial Sequence
  Description of Artificial Sequence: Synthetic oligonucleotide
  Sense strand starting at position 3803 of SEQ ID NO: 540
ucaggaaucugguuacacu

SEQ ID NO: 45153 - RNA, 19 nt, Artificial Sequence
  Description of Artificial Sequence: Synthetic oligonucleotide
  Antisense strand to SEQ ID NO: 45072
aguguaaccagauuccuga

SEQ ID NO: 45154 - RNA, 19 nt, Artificial Sequence
  Description of Artificial Sequence: Synthetic oligonucleotide
  Sense strand starting at position 3859 of SEQ ID NO: 540
acugaagucccagaucugu

SEQ ID NO: 45155 - RNA, 19 nt, Artificial Sequence
  Description of Artificial Sequence: Synthetic oligonucleotide
  Antisense strand to SEQ ID NO: 45074
acagaucugggacuucagu

SEQ ID NO: 45156 - RNA, 19 nt, Artificial Sequence
  Description of Artificial Sequence: Synthetic oligonucleotide
  Sense strand starting at position 3906 of SEQ ID NO: 540
aaccuugaucugggaagcu

SEQ ID NO: 45157 - RNA, 19 nt, Artificial Sequence
  Description of Artificial Sequence: Synthetic oligonucleotide
  Antisense strand to SEQ ID NO: 45076
agcuucccagaucaagguu

SEQ ID NO: 45158 - RNA, 19 nt, Artificial Sequence
  Description of Artificial Sequence: Synthetic oligonucleotide
  Sense strand starting at position 3976 of SEQ ID NO: 540
acuccuugucaccaggaua

SEQ ID NO: 45159 - RNA, 19 nt, Artificial Sequence
  Description of Artificial Sequence: Synthetic oligonucleotide
  Antisense strand to SEQ ID NO: 45078
uauccuggugacaaggagu

SEQ ID NO: 45160 - RNA, 19 nt, Artificial Sequence
  Description of Artificial Sequence: Synthetic oligonucleotide
  Sense strand starting at position 5 of SEQ ID NO: 541
uuuaaaggcucaccaguua

SEQ ID NO: 45161 - RNA, 19 nt, Artificial Sequence
  Description of Artificial Sequence: Synthetic oligonucleotide
  Antisense strand to SEQ ID NO: 45080
uaacuggugagccuuuaaa

SEQ ID NO: 45162 - RNA, 19 nt, Artificial Sequence
  Description of Artificial Sequence: Synthetic oligonucleotide
  Sense strand starting at position 20 of SEQ ID NO: 541
guuauaacaucacagagau

SEQ ID NO: 45163 - RNA, 19 nt, Artificial Sequence
  Description of Artificial Sequence: Synthetic oligonucleotide
  Antisense strand to SEQ ID NO: 45082
aucucugugauguuauaac

SEQ ID NO: 45164 - RNA, 19 nt, Artificial Sequence
  Description of Artificial Sequence: Synthetic oligonucleotide
  Sense strand starting at position 130 of SEQ ID NO: 541
uuccuacucuaguuaugac

SEQ ID NO: 45165 - RNA, 19 nt, Artificial Sequence
  Description of Artificial Sequence: Synthetic oligonucleotide
  Antisense strand to SEQ ID NO: 45084
gucauaacuagaguaggaa

SEQ ID NO: 45166 - RNA, 19 nt, Artificial Sequence
  Description of Artificial Sequence: Synthetic oligonucleotide
  Sense strand starting at position 150 of SEQ ID NO: 541
ccauaagaaccuugugauc

SEQ ID NO: 45167 - RNA, 19 nt, Artificial Sequence
  Description of Artificial Sequence: Synthetic oligonucleotide
  Antisense strand to SEQ ID NO: 45086
gaucacaagguucuuaugg

SEQ ID NO: 45168 - RNA, 19 nt, Artificial Sequence
  Description of Artificial Sequence: Synthetic oligonucleotide
  Sense strand starting at position 169 of SEQ ID NO: 541
cugccaauguucuuaaaga

SEQ ID NO: 45169 - RNA, 19 nt, Artificial Sequence
  Description of Artificial Sequence: Synthetic oligonucleotide
  Antisense strand to SEQ ID NO: 45088
ucuuuaagaacauuggcag

SEQ ID NO: 45170 - RNA, 19 nt, Artificial Sequence
  Description of Artificial Sequence: Synthetic oligonucleotide
  Sense strand starting at position 333 of SEQ ID NO: 541
ccuccaggauccuuaggua

SEQ ID NO: 45171 - RNA, 19 nt, Artificial Sequence
  Description of Artificial Sequence: Synthetic oligonucleotide
  Antisense strand to SEQ ID NO: 45090
uaccuaaggauccuggagg

SEQ ID NO: 45172 - RNA, 19 nt, Artificial Sequence
  Description of Artificial Sequence: Synthetic oligonucleotide
  Sense strand starting at position 345 of SEQ ID NO: 541
uuagguagcucguuagauc

SEQ ID NO: 45173 - RNA, 19 nt, Artificial Sequence
  Description of Artificial Sequence: Synthetic oligonucleotide
  Antisense strand to SEQ ID NO: 45092
gaucuaacgagcuaccuaa

SEQ ID NO: 45174 - RNA, 19 nt, Artificial Sequence
  Description of Artificial Sequence: Synthetic oligonucleotide
  Sense strand starting at position 352 of SEQ ID NO: 541
gcucguuagauccaaagca

SEQ ID NO: 45175 - RNA, 19 nt, Artificial Sequence
  Description of Artificial Sequence: Synthetic oligonucleotide
  Antisense strand to SEQ ID NO: 45094
ugcuuuggaucuaacgagc

SEQ ID NO: 45176 - RNA, 19 nt, Artificial Sequence
  Description of Artificial Sequence: Synthetic oligonucleotide
  Sense strand starting at position 361 of SEQ ID NO: 541
auccaaagcaguugugaga

SEQ ID NO: 45177 - RNA, 19 nt, Artificial Sequence
  Description of Artificial Sequence: Synthetic oligonucleotide
  Antisense strand to SEQ ID NO: 45096
ucucacaacugcuuuggau

SEQ ID NO: 45178 - RNA, 19 nt, Artificial Sequence
  Description of Artificial Sequence: Synthetic oligonucleotide
  Sense strand starting at position 368 of SEQ ID NO: 541
gcaguugugagagacaagu

SEQ ID NO: 45179 - RNA, 19 nt, Artificial Sequence
  Description of Artificial Sequence: Synthetic oligonucleotide
  Antisense strand to SEQ ID NO: 45098
acuugucucucacaacugc

SEQ ID NO: 45180 - RNA, 19 nt, Artificial Sequence
  Description of Artificial Sequence: Synthetic oligonucleotide
  Sense strand starting at position 594 of SEQ ID NO: 541
ggagguuacuuccugaaac

SEQ ID NO: 45181 - RNA, 19 nt, Artificial Sequence
  Description of Artificial Sequence: Synthetic oligonucleotide
  Antisense strand to SEQ ID NO: 45100
guuucaggaaguaaccucc

SEQ ID NO: 45182 - RNA, 19 nt, Artificial Sequence
  Description of Artificial Sequence: Synthetic oligonucleotide
  Sense strand starting at position 719 of SEQ ID NO: 541
guuggaaucucagacuaua

SEQ ID NO: 45183 - RNA, 19 nt, Artificial Sequence
  Description of Artificial Sequence: Synthetic oligonucleotide
  Antisense strand to SEQ ID NO: 45102
uauagucugagauuccaac

SEQ ID NO: 45184 - RNA, 19 nt, Artificial Sequence
  Description of Artificial Sequence: Synthetic oligonucleotide
  Sense strand starting at position 763 of SEQ ID NO: 541
ucagaaugguuccaggaug

SEQ ID NO: 45185 - RNA, 19 nt, Artificial Sequence
  Description of Artificial Sequence: Synthetic oligonucleotide
  Antisense strand to SEQ ID NO: 45104
cauccuggaaccauucuga

SEQ ID NO: 45186 - RNA, 19 nt, Artificial Sequence
  Description of Artificial Sequence: Synthetic oligonucleotide
  Sense strand starting at position 947 of SEQ ID NO: 541
acuccacuucugggaggua

SEQ ID NO: 45187 - RNA, 19 nt, Artificial Sequence
  Description of Artificial Sequence: Synthetic oligonucleotide
  Antisense strand to SEQ ID NO: 45106
uaccucccagaaguggagu

SEQ ID NO: 45188 - RNA, 19 nt, Artificial Sequence
  Description of Artificial Sequence: Synthetic oligonucleotide
  Sense strand starting at position 950 of SEQ ID NO: 541
ccacuucugggagguaaag

SEQ ID NO: 45189 - RNA, 19 nt, Artificial Sequence
  Description of Artificial Sequence: Synthetic oligonucleotide
  Antisense strand to SEQ ID NO: 45108
cuuuaccucccagaagugg

SEQ ID NO: 45190 - RNA, 19 nt, Artificial Sequence
  Description of Artificial Sequence: Synthetic oligonucleotide
  Sense strand starting at position 977 of SEQ ID NO: 541
cagcgucagccucuugauu

SEQ ID NO: 45191 - RNA, 19 nt, Artificial Sequence
  Description of Artificial Sequence: Synthetic oligonucleotide
  Antisense strand to SEQ ID NO: 45110
aaucaagaggcugacgcug

SEQ ID NO: 45192 - RNA, 19 nt, Artificial Sequence
  Description of Artificial Sequence: Synthetic oligonucleotide
  Sense strand starting at position 1158 of SEQ ID NO: 541
aagaguccugcagaaagca

SEQ ID NO: 45193 - RNA, 19 nt, Artificial Sequence
  Description of Artificial Sequence: Synthetic oligonucleotide
  Antisense strand to SEQ ID NO: 45112
ugcuuucugcaggacucuu

SEQ ID NO: 45194 - RNA, 19 nt, Artificial Sequence
  Description of Artificial Sequence: Synthetic oligonucleotide
  Sense strand starting at position 1176 of SEQ ID NO: 541
agcccuuucucccuaggga

SEQ ID NO: 45195 - RNA, 19 nt, Artificial Sequence
  Description of Artificial Sequence: Synthetic oligonucleotide
  Antisense strand to SEQ ID NO: 45114
ucccuagggagaaagggcu

SEQ ID NO: 45196 - RNA, 19 nt, Artificial Sequence
  Description of Artificial Sequence: Synthetic oligonucleotide
  Sense strand starting at position 1177 of SEQ ID NO: 541
gcccuuucucccuagggaa

SEQ ID NO: 45197 - RNA, 19 nt, Artificial Sequence
  Description of Artificial Sequence: Synthetic oligonucleotide
  Antisense strand to SEQ ID NO: 45116
uucccuagggagaaagggc

SEQ ID NO: 45198 - RNA, 19 nt, Artificial Sequence
  Description of Artificial Sequence: Synthetic oligonucleotide
  Sense strand starting at position 1179 of SEQ ID NO: 541
ccuuucucccuagggaaga

SEQ ID NO: 45199 - RNA, 19 nt, Artificial Sequence
  Description of Artificial Sequence: Synthetic oligonucleotide
  Antisense strand to SEQ ID NO: 45118
ucuucccuagggagaaagg

SEQ ID NO: 45200 - RNA, 19 nt, Artificial Sequence
  Description of Artificial Sequence: Synthetic oligonucleotide
  Sense strand starting at position 2292 of SEQ ID NO: 541
gggcauucccuuuggacca

SEQ ID NO: 45201 - RNA, 19 nt, Artificial Sequence
  Description of Artificial Sequence: Synthetic oligonucleotide
  Antisense strand to SEQ ID NO: 45120
ugguccaaagggaaugccc

SEQ ID NO: 45202 - RNA, 19 nt, Artificial Sequence
  Description of Artificial Sequence: Synthetic oligonucleotide
  Sense strand starting at position 2545 of SEQ ID NO: 541
acugaaggaucuguuuaau

SEQ ID NO: 45203 - RNA, 19 nt, Artificial Sequence
  Description of Artificial Sequence: Synthetic oligonucleotide
  Antisense strand to SEQ ID NO: 45122
auuaaacagauccuucagu

SEQ ID NO: 45204 - RNA, 19 nt, Artificial Sequence
  Description of Artificial Sequence: Synthetic oligonucleotide
  Sense strand starting at position 2638 of SEQ ID NO: 541
aaggcuugcuucccugaga

SEQ ID NO: 45205 - RNA, 19 nt, Artificial Sequence
  Description of Artificial Sequence: Synthetic oligonucleotide
  Antisense strand to SEQ ID NO: 45124
ucucagggaagcaagccuu

SEQ ID NO: 45206 - RNA, 19 nt, Artificial Sequence
  Description of Artificial Sequence: Synthetic oligonucleotide
  Sense strand starting at position 2641 of SEQ ID NO: 541
gcuugcuucccugagaccu

SEQ ID NO: 45207 - RNA, 19 nt, Artificial Sequence
  Description of Artificial Sequence: Synthetic oligonucleotide
  Antisense strand to SEQ ID NO: 45126
aggucucagggaagcaagc

SEQ ID NO: 45208 - RNA, 19 nt, Artificial Sequence
  Description of Artificial Sequence: Synthetic oligonucleotide
  Sense strand starting at position 2738 of SEQ ID NO: 541
aggaauaacuugucugauc

SEQ ID NO: 45209 - RNA, 19 nt, Artificial Sequence
  Description of Artificial Sequence: Synthetic oligonucleotide
  Antisense strand to SEQ ID NO: 45128
gaucagacaaguuauuccu

SEQ ID NO: 45210 - RNA, 19 nt, Artificial Sequence
  Description of Artificial Sequence: Synthetic oligonucleotide
  Sense strand starting at position 2739 of SEQ ID NO: 541
ggaauaacuugucugauca

SEQ ID NO: 45211 - RNA, 19 nt, Artificial Sequence
  Description of Artificial Sequence: Synthetic oligonucleotide
  Antisense strand to SEQ ID NO: 45130
ugaucagacaaguuauucc

SEQ ID NO: 45212 - RNA, 19 nt, Artificial Sequence
  Description of Artificial Sequence: Synthetic oligonucleotide
  Sense strand starting at position 2740 of SEQ ID NO: 541
gaauaacuugucugaucag

SEQ ID NO: 45213 - RNA, 19 nt, Artificial Sequence
  Description of Artificial Sequence: Synthetic oligonucleotide
  Antisense strand to SEQ ID NO: 45132
cugaucagacaaguuauuc

SEQ ID NO: 45214 - RNA, 19 nt, Artificial Sequence
  Description of Artificial Sequence: Synthetic oligonucleotide
  Sense strand starting at position 2746 of SEQ ID NO: 541
cuugucugaucagucaaag

SEQ ID NO: 45215 - RNA, 19 nt, Artificial Sequence
  Description of Artificial Sequence: Synthetic oligonucleotide
  Antisense strand to SEQ ID NO: 45134
cuuugacugaucagacaag

SEQ ID NO: 45216 - RNA, 19 nt, Artificial Sequence
  Description of Artificial Sequence: Synthetic oligonucleotide
  Sense strand starting at position 2987 of SEQ ID NO: 541
acaccaaggguuugauaug

SEQ ID NO: 45217 - RNA, 19 nt, Artificial Sequence
  Description of Artificial Sequence: Synthetic oligonucleotide
  Antisense strand to SEQ ID NO: 45136
cauaucaaacccuuggugu

SEQ ID NO: 45218 - RNA, 19 nt, Artificial Sequence
  Description of Artificial Sequence: Synthetic oligonucleotide
  Sense strand starting at position 2988 of SEQ ID NO: 541
caccaaggguuugauauga

SEQ ID NO: 45219 - RNA, 19 nt, Artificial Sequence
  Description of Artificial Sequence: Synthetic oligonucleotide
  Antisense strand to SEQ ID NO: 45138
ucauaucaaacccuuggug

SEQ ID NO: 45220 - RNA, 19 nt, Artificial Sequence
  Description of Artificial Sequence: Synthetic oligonucleotide
  Sense strand starting at position 3615 of SEQ ID NO: 541
gcugcaaucuccuuagaga

SEQ ID NO: 45221 - RNA, 19 nt, Artificial Sequence
  Description of Artificial Sequence: Synthetic oligonucleotide
  Antisense strand to SEQ ID NO: 45140
ucucuaaggagauugcagc

SEQ ID NO: 45222 - RNA, 19 nt, Artificial Sequence
  Description of Artificial Sequence: Synthetic oligonucleotide
  Sense strand starting at position 3616 of SEQ ID NO: 541
cugcaaucuccuuagagaa

SEQ ID NO: 45223 - RNA, 19 nt, Artificial Sequence
  Description of Artificial Sequence: Synthetic oligonucleotide
  Antisense strand to SEQ ID NO: 45142
uucucuaaggagauugcag

SEQ ID NO: 45224 - RNA, 19 nt, Artificial Sequence
  Description of Artificial Sequence: Synthetic oligonucleotide
  Sense strand starting at position 3618 of SEQ ID NO: 541
gcaaucuccuuagagaaac

SEQ ID NO: 45225 - RNA, 19 nt, Artificial Sequence
  Description of Artificial Sequence: Synthetic oligonucleotide
  Antisense strand to SEQ ID NO: 45144
guuucucuaaggagauugc

SEQ ID NO: 45226 - RNA, 19 nt, Artificial Sequence
  Description of Artificial Sequence: Synthetic oligonucleotide
  Sense strand starting at position 3712 of SEQ ID NO: 541
aucuccuacucauuaguga

SEQ ID NO: 45227 - RNA, 19 nt, Artificial Sequence
  Description of Artificial Sequence: Synthetic oligonucleotide
  Antisense strand to SEQ ID NO: 45146
ucacuaaugaguaggagau

SEQ ID NO: 45228 - RNA, 19 nt, Artificial Sequence
  Description of Artificial Sequence: Synthetic oligonucleotide
  Sense strand starting at position 3723 of SEQ ID NO: 541
auuagugaaugugucacuu

SEQ ID NO: 45229 - RNA, 19 nt, Artificial Sequence
  Description of Artificial Sequence: Synthetic oligonucleotide
  Antisense strand to SEQ ID NO: 45148
aagugacacauucacuaau

SEQ ID NO: 45230 - RNA, 19 nt, Artificial Sequence
  Description of Artificial Sequence: Synthetic oligonucleotide
  Sense strand starting at position 3778 of SEQ ID NO: 541
accugugaggaugauguua

SEQ ID NO: 45231 - RNA, 19 nt, Artificial Sequence
  Description of Artificial Sequence: Synthetic oligonucleotide
  Antisense strand to SEQ ID NO: 45150
uaacaucauccucacaggu

SEQ ID NO: 45232 - RNA, 19 nt, Artificial Sequence
  Description of Artificial Sequence: Synthetic oligonucleotide
  Sense strand starting at position 3786 of SEQ ID NO: 541
ggaugauguuaggcccuga

SEQ ID NO: 45233 - RNA, 19 nt, Artificial Sequence
  Description of Artificial Sequence: Synthetic oligonucleotide
  Antisense strand to SEQ ID NO: 45152
ucagggccuaacaucaucc

SEQ ID NO: 45234 - RNA, 19 nt, Artificial Sequence
  Description of Artificial Sequence: Synthetic oligonucleotide
  Sense strand starting at position 3790 of SEQ ID NO: 541
gauguuaggcccugagcca

SEQ ID NO: 45235 - RNA, 19 nt, Artificial Sequence
  Description of Artificial Sequence: Synthetic oligonucleotide
  Antisense strand to SEQ ID NO: 45154
uggcucagggccuaacauc

SEQ ID NO: 45236 - RNA, 19 nt, Artificial Sequence
  Description of Artificial Sequence: Synthetic oligonucleotide
  Sense strand starting at position 3825 of SEQ ID NO: 541
ucaaguucuggugguugaa

SEQ ID NO: 45237 - RNA, 19 nt, Artificial Sequence
  Description of Artificial Sequence: Synthetic oligonucleotide
  Antisense strand to SEQ ID NO: 45156
uucaaccaccagaacuuga

SEQ ID NO: 45238 - RNA, 19 nt, Artificial Sequence
  Description of Artificial Sequence: Synthetic oligonucleotide
  Sense strand starting at position 3939 of SEQ ID NO: 541
augggcucuccaugcugaa

SEQ ID NO: 45239 - RNA, 19 nt, Artificial Sequence
  Description of Artificial Sequence: Synthetic oligonucleotide
  Antisense strand to SEQ ID NO: 45158
uucagcauggagagcccau

SEQ ID NO: 45240 - RNA, 19 nt, Artificial Sequence
  Description of Artificial Sequence: Synthetic oligonucleotide
  Sense strand starting at position 42 of SEQ ID NO: 542
uuaagauccugagcuuauu

SEQ ID NO: 45241 - RNA, 19 nt, Artificial Sequence
  Description of Artificial Sequence: Synthetic oligonucleotide
  Antisense strand to SEQ ID NO: 45160
aauaagcucaggaucuuaa

SEQ ID NO: 45242 - RNA, 19 nt, Artificial Sequence
  Description of Artificial Sequence: Synthetic oligonucleotide
  Sense strand starting at position 273 of SEQ ID NO: 542
cagcuaagugaugaaccua

SEQ ID NO: 45243 - RNA, 19 nt, Artificial Sequence
  Description of Artificial Sequence: Synthetic oligonucleotide
  Antisense strand to SEQ ID NO: 45162
uagguucaucacuuagcug

SEQ ID NO: 45244 - RNA, 19 nt, Artificial Sequence
  Description of Artificial Sequence: Synthetic oligonucleotide
  Sense strand starting at position 303 of SEQ ID NO: 542
ccaggugugauugacucua

SEQ ID NO: 45245 - RNA, 19 nt, Artificial Sequence
  Description of Artificial Sequence: Synthetic oligonucleotide
  Antisense strand to SEQ ID NO: 45164
uagagucaaucacaccugg

SEQ ID NO: 45246 - RNA, 19 nt, Artificial Sequence
  Description of Artificial Sequence: Synthetic oligonucleotide
  Sense strand starting at position 305 of SEQ ID NO: 542
aggugugauugacucuaga

SEQ ID NO: 45247 - RNA, 19 nt, Artificial Sequence
  Description of Artificial Sequence: Synthetic oligonucleotide
  Antisense strand to SEQ ID NO: 45166
ucuagagucaaucacaccu

SEQ ID NO: 45248 - RNA, 19 nt, Artificial Sequence
  Description of Artificial Sequence: Synthetic oligonucleotide
  Sense strand starting at position 390 of SEQ ID NO: 542
cucuguacuaagggagauu

SEQ ID NO: 45249 - RNA, 19 nt, Artificial Sequence
  Description of Artificial Sequence: Synthetic oligonucleotide
  Antisense strand to SEQ ID NO: 45168
aaucucccuuaguacagag

SEQ ID NO: 45250 - RNA, 19 nt, Artificial Sequence
  Description of Artificial Sequence: Synthetic oligonucleotide
  Sense strand starting at position 457 of SEQ ID NO: 542
aggcucuggaguuagacua

SEQ ID NO: 45251 - RNA, 19 nt, Artificial Sequence
  Description of Artificial Sequence: Synthetic oligonucleotide
  Antisense strand to SEQ ID NO: 45170
uagucuaacuccagagccu

SEQ ID NO: 45252 - RNA, 19 nt, Artificial Sequence
  Description of Artificial Sequence: Synthetic oligonucleotide
  Sense strand starting at position 504 of SEQ ID NO: 542
gccacuauuguuuaugacu

SEQ ID NO: 45253 - RNA, 19 nt, Artificial Sequence
  Description of Artificial Sequence: Synthetic oligonucleotide
  Antisense strand to SEQ ID NO: 45172
agucauaaacaauaguggc

SEQ ID NO: 45254 - RNA, 19 nt, Artificial Sequence
  Description of Artificial Sequence: Synthetic oligonucleotide
  Sense strand starting at position 597 of SEQ ID NO: 542
ggcuuauuggaaugauaaa

SEQ ID NO: 45255 - RNA, 19 nt, Artificial Sequence
  Description of Artificial Sequence: Synthetic oligonucleotide
  Antisense strand to SEQ ID NO: 45174
uuuaucauuccaauaagcc

SEQ ID NO: 45256 - RNA, 19 nt, Artificial Sequence
  Description of Artificial Sequence: Synthetic oligonucleotide
  Sense strand starting at position 617 of SEQ ID NO: 542
ugauguaauauaugugaag

SEQ ID NO: 45257 - RNA, 19 nt, Artificial Sequence
  Description of Artificial Sequence: Synthetic oligonucleotide
  Antisense strand to SEQ ID NO: 45176
cuucacauauauuacauca

SEQ ID NO: 45258 - RNA, 19 nt, Artificial Sequence
  Description of Artificial Sequence: Synthetic oligonucleotide
  Sense strand starting at position 618 of SEQ ID NO: 542
gauguaauauaugugaagu

SEQ ID NO: 45259 - RNA, 19 nt, Artificial Sequence
  Description of Artificial Sequence: Synthetic oligonucleotide
  Antisense strand to SEQ ID NO: 45178
acuucacauauauuacauc

SEQ ID NO: 45260 - RNA, 19 nt, Artificial Sequence
  Description of Artificial Sequence: Synthetic oligonucleotide
  Sense strand starting at position 624 of SEQ ID NO: 542
auauaugugaaguacuagu

SEQ ID NO: 45261 - RNA, 19 nt, Artificial Sequence
  Description of Artificial Sequence: Synthetic oligonucleotide
  Antisense strand to SEQ ID NO: 45180
acuaguacuucacauauau

SEQ ID NO: 45262 - RNA, 19 nt, Artificial Sequence
  Description of Artificial Sequence: Synthetic oligonucleotide
  Sense strand starting at position 716 of SEQ ID NO: 542
aggacuacugauugagguu

SEQ ID NO: 45263 - RNA, 19 nt, Artificial Sequence
  Description of Artificial Sequence: Synthetic oligonucleotide
  Antisense strand to SEQ ID NO: 45182
aaccucaaucaguaguccu

SEQ ID NO: 45264 - RNA, 19 nt, Artificial Sequence
  Description of Artificial Sequence: Synthetic oligonucleotide
  Sense strand starting at position 765 of SEQ ID NO: 542
ugguaaauauagccaauaa

SEQ ID NO: 45265 - RNA, 19 nt, Artificial Sequence
  Description of Artificial Sequence: Synthetic oligonucleotide
  Antisense strand to SEQ ID NO: 45184
uuauuggcuauauuuacca

SEQ ID NO: 45266 - RNA, 19 nt, Artificial Sequence
  Description of Artificial Sequence: Synthetic oligonucleotide
  Sense strand starting at position 804 of SEQ ID NO: 542
auguaagaucgccauacca

SEQ ID NO: 45267 - RNA, 19 nt, Artificial Sequence
  Description of Artificial Sequence: Synthetic oligonucleotide
  Antisense strand to SEQ ID NO: 45186
ugguauggcgaucuuacau

SEQ ID NO: 45268 - RNA, 19 nt, Artificial Sequence
  Description of Artificial Sequence: Synthetic oligonucleotide
  Sense strand starting at position 895 of SEQ ID NO: 542
cagugugcaccugauaaag

SEQ ID NO: 45269 - RNA, 19 nt, Artificial Sequence
  Description of Artificial Sequence: Synthetic oligonucleotide
  Antisense strand to SEQ ID NO: 45188
cuuuaucaggugcacacug

SEQ ID NO: 45270 - RNA, 19 nt, Artificial Sequence
  Description of Artificial Sequence: Synthetic oligonucleotide
  Sense strand starting at position 964 of SEQ ID NO: 542
cuuguuauucugcagauca

SEQ ID NO: 45271 - RNA, 19 nt, Artificial Sequence
  Description of Artificial Sequence: Synthetic oligonucleotide
  Antisense strand to SEQ ID NO: 45190
ugaucugcagaauaacaag

SEQ ID NO: 45272 - RNA, 19 nt, Artificial Sequence
  Description of Artificial Sequence: Synthetic oligonucleotide
  Sense strand starting at position 966 of SEQ ID NO: 542
uguuauucugcagaucaca

SEQ ID NO: 45273 - RNA, 19 nt, Artificial Sequence
  Description of Artificial Sequence: Synthetic oligonucleotide
  Antisense strand to SEQ ID NO: 45192
ugugaucugcagaauaaca

SEQ ID NO: 45274 - RNA, 19 nt, Artificial Sequence
  Description of Artificial Sequence: Synthetic oligonucleotide
  Sense strand starting at position 1236 of SEQ ID NO: 542
gcuguuauccuagugcuau

SEQ ID NO: 45275 - RNA, 19 nt, Artificial Sequence
  Description of Artificial Sequence: Synthetic oligonucleotide
  Antisense strand to SEQ ID NO: 45194
auagcacuaggauaacagc

SEQ ID NO: 45276 - RNA, 19 nt, Artificial Sequence
  Description of Artificial Sequence: Synthetic oligonucleotide
  Sense strand starting at position 1257 of SEQ ID NO: 542
ggccgauacauccugcguu

SEQ ID NO: 45277 - RNA, 19 nt, Artificial Sequence
  Description of Artificial Sequence: Synthetic oligonucleotide
  Antisense strand to SEQ ID NO: 45196
aacgcaggauguaucggcc

SEQ ID NO: 45278 - RNA, 19 nt, Artificial Sequence
  Description of Artificial Sequence: Synthetic oligonucleotide
  Sense strand starting at position 1407 of SEQ ID NO: 542
gccaaaucggaauauucua

SEQ ID NO: 45279 - RNA, 19 nt, Artificial Sequence
  Description of Artificial Sequence: Synthetic oligonucleotide
  Antisense strand to SEQ ID NO: 45198
uagaauauuccgauuuggc

SEQ ID NO: 45280 - RNA, 19 nt, Artificial Sequence
  Description of Artificial Sequence: Synthetic oligonucleotide
  Sense strand starting at position 1710 of SEQ ID NO: 542
cgucuauccgagcugucuu

SEQ ID NO: 45281 - RNA, 19 nt, Artificial Sequence
  Description of Artificial Sequence: Synthetic oligonucleotide
  Antisense strand to SEQ ID NO: 45200
aagacagcucggauagacg

SEQ ID NO: 45282 - RNA, 19 nt, Artificial Sequence
  Description of Artificial Sequence: Synthetic oligonucleotide
  Sense strand starting at position 2174 of SEQ ID NO: 542
cagccuuugguuuaaggga

SEQ ID NO: 45283 - RNA, 19 nt, Artificial Sequence
  Description of Artificial Sequence: Synthetic oligonucleotide
  Antisense strand to SEQ ID NO: 45202
ucccuuaaaccaaaggcug

SEQ ID NO: 45284 - RNA, 19 nt, Artificial Sequence
  Description of Artificial Sequence: Synthetic oligonucleotide
  Sense strand starting at position 2429 of SEQ ID NO: 542
auggauuauagguagucuu

SEQ ID NO: 45285 - RNA, 19 nt, Artificial Sequence
  Description of Artificial Sequence: Synthetic oligonucleotide
  Antisense strand to SEQ ID NO: 45204
aagacuaccuauaauccau

SEQ ID NO: 45286 - RNA, 19 nt, Artificial Sequence
  Description of Artificial Sequence: Synthetic oligonucleotide
  Sense strand starting at position 2442 of SEQ ID NO: 542
agucuuucuuaaguacaua

SEQ ID NO: 45287 - RNA, 19 nt, Artificial Sequence
  Description of Artificial Sequence: Synthetic oligonucleotide
  Antisense strand to SEQ ID NO: 45206
uauguacuuaagaaagacu

SEQ ID NO: 45288 - RNA, 19 nt, Artificial Sequence
  Description of Artificial Sequence: Synthetic oligonucleotide
  Sense strand starting at position 2474 of SEQ ID NO: 542
gggaaagguuguguacaac

SEQ ID NO: 45289 - RNA, 19 nt, Artificial Sequence
  Description of Artificial Sequence: Synthetic oligonucleotide
  Antisense strand to SEQ ID NO: 45208
guuguacacaaccuuuccc

SEQ ID NO: 45290 - RNA, 19 nt, Artificial Sequence
  Description of Artificial Sequence: Synthetic oligonucleotide
  Sense strand starting at position 2527 of SEQ ID NO: 542
auaagaauguugguuaugu

SEQ ID NO: 45291 - RNA, 19 nt, Artificial Sequence
  Description of Artificial Sequence: Synthetic oligonucleotide
  Antisense strand to SEQ ID NO: 45210
acauaaccaacauucuuau

SEQ ID NO: 45292 - RNA, 19 nt, Artificial Sequence
  Description of Artificial Sequence: Synthetic oligonucleotide
  Sense strand starting at position 2545 of SEQ ID NO: 542
uuuggaucgugauuauaca

SEQ ID NO: 45293 - RNA, 19 nt, Artificial Sequence
  Description of Artificial Sequence: Synthetic oligonucleotide
  Antisense strand to SEQ ID NO: 45212
uguauaaucacgauccaaa

SEQ ID NO: 45294 - RNA, 19 nt, Artificial Sequence
  Description of Artificial Sequence: Synthetic oligonucleotide
  Sense strand starting at position 2629 of SEQ ID NO: 542
acuacauuccgagaguuga

SEQ ID NO: 45295 - RNA, 19 nt, Artificial Sequence
  Description of Artificial Sequence: Synthetic oligonucleotide
  Antisense strand to SEQ ID NO: 45214
ucaacucucggaauguagu

SEQ ID NO: 45296 - RNA, 19 nt, Artificial Sequence
  Description of Artificial Sequence: Synthetic oligonucleotide
  Sense strand starting at position 2649 of SEQ ID NO: 542
gagacuuacucagucuuag

SEQ ID NO: 45297 - RNA, 19 nt, Artificial Sequence
  Description of Artificial Sequence: Synthetic oligonucleotide
  Antisense strand to SEQ ID NO: 45216
cuaagacugaguaagucuc

SEQ ID NO: 45298 - RNA, 19 nt, Artificial Sequence
  Description of Artificial Sequence: Synthetic oligonucleotide
  Sense strand starting at position 2736 of SEQ ID NO: 542
ugcuaagaaucccuuagua

SEQ ID NO: 45299 - RNA, 19 nt, Artificial Sequence
  Description of Artificial Sequence: Synthetic oligonucleotide
  Antisense strand to SEQ ID NO: 45218
uacuaagggauucuuagca

SEQ ID NO: 45300 - RNA, 19 nt, Artificial Sequence
  Description of Artificial Sequence: Synthetic oligonucleotide
  Sense strand starting at position 2746 of SEQ ID NO: 542
cccuuaguaaagugggaga

SEQ ID NO: 45301 - RNA, 19 nt, Artificial Sequence
  Description of Artificial Sequence: Synthetic oligonucleotide
  Antisense strand to SEQ ID NO: 45220
ucucccacuuuacuaaggg

SEQ ID NO: 45302 - RNA, 19 nt, Artificial Sequence
  Description of Artificial Sequence: Synthetic oligonucleotide
  Sense strand starting at position 2748 of SEQ ID NO: 542
cuuaguaaagugggagauu

SEQ ID NO: 45303 - RNA, 19 nt, Artificial Sequence
  Description of Artificial Sequence: Synthetic oligonucleotide
  Antisense strand to SEQ ID NO: 45222
aaucucccacuuuacuaag

SEQ ID NO: 45304 - RNA, 19 nt, Artificial Sequence
  Description of Artificial Sequence: Synthetic oligonucleotide
  Sense strand starting at position 2759 of SEQ ID NO: 542
gggagauugcuugagugau

SEQ ID NO: 45305 - RNA, 19 nt, Artificial Sequence
  Description of Artificial Sequence: Synthetic oligonucleotide
  Antisense strand to SEQ ID NO: 45224
aucacucaagcaaucuccc

SEQ ID NO: 45306 - RNA, 19 nt, Artificial Sequence
  Description of Artificial Sequence: Synthetic oligonucleotide
  Sense strand starting at position 2767 of SEQ ID NO: 542
gcuugagugauuugaagcu

SEQ ID NO: 45307 - RNA, 19 nt, Artificial Sequence
  Description of Artificial Sequence: Synthetic oligonucleotide
  Antisense strand to SEQ ID NO: 45226
agcuucaaaucacucaagc

SEQ ID NO: 45308 - RNA, 19 nt, Artificial Sequence
  Description of Artificial Sequence: Synthetic oligonucleotide
  Sense strand starting at position 3052 of SEQ ID NO: 542
cuuaccuggcuuuaugaua

SEQ ID NO: 45309 - RNA, 19 nt, Artificial Sequence
  Description of Artificial Sequence: Synthetic oligonucleotide
  Antisense strand to SEQ ID NO: 45228
uaucauaaagccagguaag

SEQ ID NO: 45310 - RNA, 19 nt, Artificial Sequence
  Description of Artificial Sequence: Synthetic oligonucleotide
  Sense strand starting at position 3329 of SEQ ID NO: 542
gugaguggucugaguuucu

SEQ ID NO: 45311 - RNA, 19 nt, Artificial Sequence
  Description of Artificial Sequence: Synthetic oligonucleotide
  Antisense strand to SEQ ID NO: 45230
agaaacucagaccacucac

SEQ ID NO: 45312 - RNA, 19 nt, Artificial Sequence
  Description of Artificial Sequence: Synthetic oligonucleotide
  Sense strand starting at position 3399 of SEQ ID NO: 542
aguuuaaaucuuggaaguc

SEQ ID NO: 45313 - RNA, 19 nt, Artificial Sequence
  Description of Artificial Sequence: Synthetic oligonucleotide
  Antisense strand to SEQ ID NO: 45232
gacuuccaagauuuaaacu

SEQ ID NO: 45314 - RNA, 19 nt, Artificial Sequence
  Description of Artificial Sequence: Synthetic oligonucleotide
  Sense strand starting at position 3484 of SEQ ID NO: 542
auuagaauuucucagagug

SEQ ID NO: 45315 - RNA, 19 nt, Artificial Sequence
  Description of Artificial Sequence: Synthetic oligonucleotide
  Antisense strand to SEQ ID NO: 45234
cacucugagaaauucuaau

SEQ ID NO: 45316 - RNA, 19 nt, Artificial Sequence
  Description of Artificial Sequence: Synthetic oligonucleotide
  Sense strand starting at position 3491 of SEQ ID NO: 542
uuucucagaguggguuaaa

SEQ ID NO: 45317 - RNA, 19 nt, Artificial Sequence
  Description of Artificial Sequence: Synthetic oligonucleotide
  Antisense strand to SEQ ID NO: 45236
uuuaacccacucugagaaa

SEQ ID NO: 45318 - RNA, 19 nt, Artificial Sequence
  Description of Artificial Sequence: Synthetic oligonucleotide
  Sense strand starting at position 3645 of SEQ ID NO: 542
aggguaaauguguaggguu

SEQ ID NO: 45319 - RNA, 19 nt, Artificial Sequence
  Description of Artificial Sequence: Synthetic oligonucleotide
  Antisense strand to SEQ ID NO: 45238
aacccuacacauuuacccu

SEQ ID NO: 45320 - RNA, 19 nt, Artificial Sequence
  Description of Artificial Sequence: Synthetic oligonucleotide
  Sense strand starting at position 3791 of SEQ ID NO: 543
acuugcuaauggguuagau

SEQ ID NO: 45321 - RNA, 19 nt, Artificial Sequence
  Description of Artificial Sequence: Synthetic oligonucleotide
  Antisense strand to SEQ ID NO: 45240
aucuaacccauuagcaagu

SEQ ID NO: 45322 - RNA, 19 nt, Artificial Sequence
  Description of Artificial Sequence: Synthetic oligonucleotide
  Sense strand starting at position 3775 of SEQ ID NO: 543
gaguaaagucuguggaacu

SEQ ID NO: 45323 - RNA, 19 nt, Artificial Sequence
  Description of Artificial Sequence: Synthetic oligonucleotide
  Antisense strand to SEQ ID NO: 45242
aguuccacagacuuuacuc

SEQ ID NO: 45324 - RNA, 19 nt, Artificial Sequence
  Description of Artificial Sequence: Synthetic oligonucleotide
  Sense strand starting at position 3774 of SEQ ID NO: 543
ggaguaaagucuguggaac

SEQ ID NO: 45325 - RNA, 19 nt, Artificial Sequence
  Description of Artificial Sequence: Synthetic oligonucleotide
  Antisense strand to SEQ ID NO: 45244
guuccacagacuuuacucc

SEQ ID NO: 45326 - RNA, 19 nt, Artificial Sequence
  Description of Artificial Sequence: Synthetic oligonucleotide
  Sense strand starting at position 3773 of SEQ ID NO: 543
uggaguaaagucuguggaa

SEQ ID NO: 45327 - RNA, 19 nt, Artificial Sequence
  Description of Artificial Sequence: Synthetic oligonucleotide
  Antisense strand to SEQ ID NO: 45246
uuccacagacuuuacucca

SEQ ID NO: 45328 - RNA, 19 nt, Artificial Sequence
  Description of Artificial Sequence: Synthetic oligonucleotide
  Sense strand starting at position 3736 of SEQ ID NO: 543
agugguggagaccgaaaua

SEQ ID NO: 45329 - RNA, 19 nt, Artificial Sequence
  Description of Artificial Sequence: Synthetic oligonucleotide
  Antisense strand to SEQ ID NO: 45248
uauuucggucuccaccacu

SEQ ID NO: 45330 - RNA, 19 nt, Artificial Sequence
  Description of Artificial Sequence: Synthetic oligonucleotide
  Sense strand starting at position 3718 of SEQ ID NO: 543
ggcuucguuguggcugaua

SEQ ID NO: 45331 - RNA, 19 nt, Artificial Sequence
  Description of Artificial Sequence: Synthetic oligonucleotide
  Antisense strand to SEQ ID NO: 45250
uaucagccacaacgaagcc

SEQ ID NO: 45332 - RNA, 19 nt, Artificial Sequence
  Description of Artificial Sequence: Synthetic oligonucleotide
  Sense strand starting at position 3683 of SEQ ID NO: 543
auuggaugcuguuccagaa

SEQ ID NO: 45333 - RNA, 19 nt, Artificial Sequence
  Description of Artificial Sequence: Synthetic oligonucleotide
  Antisense strand to SEQ ID NO: 45252
uucuggaacagcauccaau

SEQ ID NO: 45334 - RNA, 19 nt, Artificial Sequence
  Description of Artificial Sequence: Synthetic oligonucleotide
  Sense strand starting at position 3455 of SEQ ID NO: 543
gugggcuagccugauggau

SEQ ID NO: 45335 - RNA, 19 nt, Artificial Sequence
  Description of Artificial Sequence: Synthetic oligonucleotide
  Antisense strand to SEQ ID NO: 45254
auccaucaggcuagcccac

SEQ ID NO: 45336 - RNA, 19 nt, Artificial Sequence
  Description of Artificial Sequence: Synthetic oligonucleotide
  Sense strand starting at position 3424 of SEQ ID NO: 543
gaguccugugaccaccauu

SEQ ID NO: 45337 - RNA, 19 nt, Artificial Sequence
  Description of Artificial Sequence: Synthetic oligonucleotide
  Antisense strand to SEQ ID NO: 45256
aaugguggucacaggacuc

SEQ ID NO: 45338 - RNA, 19 nt, Artificial Sequence
  Description of Artificial Sequence: Synthetic oligonucleotide
  Sense strand starting at position 3420 of SEQ ID NO: 543
uugggaguccugugaccac

SEQ ID NO: 45339 - RNA, 19 nt, Artificial Sequence
  Description of Artificial Sequence: Synthetic oligonucleotide
  Antisense strand to SEQ ID NO: 45258
guggucacaggacucccaa

SEQ ID NO: 45340 - RNA, 19 nt, Artificial Sequence
  Description of Artificial Sequence: Synthetic oligonucleotide
  Sense strand starting at position 3231 of SEQ ID NO: 543
gggagaugaguguggcaga

SEQ ID NO: 45341 - RNA, 19 nt, Artificial Sequence
  Description of Artificial Sequence: Synthetic oligonucleotide
  Antisense strand to SEQ ID NO: 45260
ucugccacacucaucuccc

SEQ ID NO: 45342 - RNA, 19 nt, Artificial Sequence
  Description of Artificial Sequence: Synthetic oligonucleotide
  Sense strand starting at position 3149 of SEQ ID NO: 543
augagugugcguguguuua

SEQ ID NO: 45343 - RNA, 19 nt, Artificial Sequence
  Description of Artificial Sequence: Synthetic oligonucleotide
  Antisense strand to SEQ ID NO: 45262
uaaacacacgcacacucau

SEQ ID NO: 45344 - RNA, 19 nt, Artificial Sequence
  Description of Artificial Sequence: Synthetic oligonucleotide
  Sense strand starting at position 3002 of SEQ ID NO: 543
ucacucuugcugggacaca

SEQ ID NO: 45345 - RNA, 19 nt, Artificial Sequence
  Description of Artificial Sequence: Synthetic oligonucleotide
  Antisense strand to SEQ ID NO: 45264
ugugucccagcaagaguga

SEQ ID NO: 45346 - RNA, 19 nt, Artificial Sequence
  Description of Artificial Sequence: Synthetic oligonucleotide
  Sense strand starting at position 2922 of SEQ ID NO: 543
ggaggaguauuucagucaa

SEQ ID NO: 45347 - RNA, 19 nt, Artificial Sequence
  Description of Artificial Sequence: Synthetic oligonucleotide
  Antisense strand to SEQ ID NO: 45266
uugacugaaauacuccucc

SEQ ID NO: 45348 - RNA, 19 nt, Artificial Sequence
  Description of Artificial Sequence: Synthetic oligonucleotide
  Sense strand starting at position 2855 of SEQ ID NO: 543
ggaagaucgcuguaaugag

SEQ ID NO: 45349 - RNA, 19 nt, Artificial Sequence
  Description of Artificial Sequence: Synthetic oligonucleotide
  Antisense strand to SEQ ID NO: 45268
cucauuacagcgaucuucc

SEQ ID NO: 45350 - RNA, 19 nt, Artificial Sequence
  Description of Artificial Sequence: Synthetic oligonucleotide
  Sense strand starting at position 2750 of SEQ ID NO: 543
cgggaaugccgugauaaac

SEQ ID NO: 45351 - RNA, 19 nt, Artificial Sequence
  Description of Artificial Sequence: Synthetic oligonucleotide
  Antisense strand to SEQ ID NO: 45270
guuuaucacggcauucccg

SEQ ID NO: 45352 - RNA, 19 nt, Artificial Sequence
  Description of Artificial Sequence: Synthetic oligonucleotide
  Sense strand starting at position 2706 of SEQ ID NO: 543
guuuguuaugugcuuccua

SEQ ID NO: 45353 - RNA, 19 nt, Artificial Sequence
  Description of Artificial Sequence: Synthetic oligonucleotide
  Antisense strand to SEQ ID NO: 45272
uaggaagcacauaacaaac

SEQ ID NO: 45354 - RNA, 19 nt, Artificial Sequence
  Description of Artificial Sequence: Synthetic oligonucleotide
  Sense strand starting at position 2697 of SEQ ID NO: 543
ucaacaaauguuuguuaug

SEQ ID NO: 45355 - RNA, 19 nt, Artificial Sequence
  Description of Artificial Sequence: Synthetic oligonucleotide
  Antisense strand to SEQ ID NO: 45274
cauaacaaacauuuguuga

SEQ ID NO: 45356 - RNA, 19 nt, Artificial Sequence
  Description of Artificial Sequence: Synthetic oligonucleotide
  Sense strand starting at position 2674 of SEQ ID NO: 543
guaguaugcagcucugcau

SEQ ID NO: 45357 - RNA, 19 nt, Artificial Sequence
  Description of Artificial Sequence: Synthetic oligonucleotide
  Antisense strand to SEQ ID NO: 45276
augcagagcugcauacuac

SEQ ID NO: 45358 - RNA, 19 nt, Artificial Sequence
  Description of Artificial Sequence: Synthetic oligonucleotide
  Sense strand starting at position 2583 of SEQ ID NO: 543
auuaauccucaauguggaa

SEQ ID NO: 45359 - RNA, 19 nt, Artificial Sequence
  Description of Artificial Sequence: Synthetic oligonucleotide
  Antisense strand to SEQ ID NO: 45278
uuccacauugaggauuaau

SEQ ID NO: 45360 - RNA, 19 nt, Artificial Sequence
  Description of Artificial Sequence: Synthetic oligonucleotide
  Sense strand starting at position 2546 of SEQ ID NO: 543
gaguuacuggugugggaug

SEQ ID NO: 45361 - RNA, 19 nt, Artificial Sequence
  Description of Artificial Sequence: Synthetic oligonucleotide
  Antisense strand to SEQ ID NO: 45280
caucccacaccaguaacuc

SEQ ID NO: 45362 - RNA, 19 nt, Artificial Sequence
  Description of Artificial Sequence: Synthetic oligonucleotide
  Sense strand starting at position 2468 of SEQ ID NO: 543
gagugaugacccuaaguuu

SEQ ID NO: 45363 - RNA, 19 nt, Artificial Sequence
  Description of Artificial Sequence: Synthetic oligonucleotide
  Antisense strand to SEQ ID NO: 45282
aaacuuagggucaucacuc

SEQ ID NO: 45364 - RNA, 19 nt, Artificial Sequence
  Description of Artificial Sequence: Synthetic oligonucleotide
  Sense strand starting at position 2437 of SEQ ID NO: 543
gaugaagccagcgaaaugu

SEQ ID NO: 45365 - RNA, 19 nt, Artificial Sequence
  Description of Artificial Sequence: Synthetic oligonucleotide
  Antisense strand to SEQ ID NO: 45284
acauuucgcuggcuucauc

SEQ ID NO: 45366 - RNA, 19 nt, Artificial Sequence
  Description of Artificial Sequence: Synthetic oligonucleotide
  Sense strand starting at position 2175 of SEQ ID NO: 543
ccagcaugcagugaggauu

SEQ ID NO: 45367 - RNA, 19 nt, Artificial Sequence
  Description of Artificial Sequence: Synthetic oligonucleotide
  Antisense strand to SEQ ID NO: 45286
aauccucacugcaugcugg

SEQ ID NO: 45368 - RNA, 19 nt, Artificial Sequence
  Description of Artificial Sequence: Synthetic oligonucleotide
  Sense strand starting at position 1371 of SEQ ID NO: 543
ggaagcuuugccgaaagga

SEQ ID NO: 45369 - RNA, 19 nt, Artificial Sequence
  Description of Artificial Sequence: Synthetic oligonucleotide
  Antisense strand to SEQ ID NO: 45288
uccuuucggcaaagcuucc

SEQ ID NO: 45370 - RNA, 19 nt, Artificial Sequence
  Description of Artificial Sequence: Synthetic oligonucleotide
  Sense strand starting at position 1250 of SEQ ID NO: 543
agacguagccauggagaga

SEQ ID NO: 45371 - RNA, 19 nt, Artificial Sequence
  Description of Artificial Sequence: Synthetic oligonucleotide
  Antisense strand to SEQ ID NO: 45290
ucucuccauggcuacgucu

SEQ ID NO: 45372 - RNA, 19 nt, Artificial Sequence
  Description of Artificial Sequence: Synthetic oligonucleotide
  Sense strand starting at position 1239 of SEQ ID NO: 543
ggaguuucugaagacguag

SEQ ID NO: 45373 - RNA, 19 nt, Artificial Sequence
  Description of Artificial Sequence: Synthetic oligonucleotide
  Antisense strand to SEQ ID NO: 45292
cuacgucuucagaaacucc

SEQ ID NO: 45374 - RNA, 19 nt, Artificial Sequence
  Description of Artificial Sequence: Synthetic oligonucleotide
  Sense strand starting at position 1157 of SEQ ID NO: 543
guguguuggcuccuguuca

SEQ ID NO: 45375 - RNA, 19 nt, Artificial Sequence
  Description of Artificial Sequence: Synthetic oligonucleotide
  Antisense strand to SEQ ID NO: 45294
ugaacaggagccaacacac

SEQ ID NO: 45376 - RNA, 19 nt, Artificial Sequence
  Description of Artificial Sequence: Synthetic oligonucleotide
  Sense strand starting at position 1128 of SEQ ID NO: 543
cgagguugccuuuaacaca

SEQ ID NO: 45377 - RNA, 19 nt, Artificial Sequence
  Description of Artificial Sequence: Synthetic oligonucleotide
  Antisense strand to SEQ ID NO: 45296
uguguuaaaggcaaccucg

SEQ ID NO: 45378 - RNA, 19 nt, Artificial Sequence
  Description of Artificial Sequence: Synthetic oligonucleotide
  Sense strand starting at position 1099 of SEQ ID NO: 543
gagaaauguuagccucauu

SEQ ID NO: 45379 - RNA, 19 nt, Artificial Sequence
  Description of Artificial Sequence: Synthetic oligonucleotide
  Antisense strand to SEQ ID NO: 45298
aaugaggcuaacauuucuc

SEQ ID NO: 45380 - RNA, 19 nt, Artificial Sequence
  Description of Artificial Sequence: Synthetic oligonucleotide
  Sense strand starting at position 1098 of SEQ ID NO: 543
ugagaaauguuagccucau

SEQ ID NO: 45381 - RNA, 19 nt, Artificial Sequence
  Description of Artificial Sequence: Synthetic oligonucleotide
  Antisense strand to SEQ ID NO: 45300
augaggcuaacauuucuca

SEQ ID NO: 45382 - RNA, 19 nt, Artificial Sequence
  Description of Artificial Sequence: Synthetic oligonucleotide
  Sense strand starting at position 1034 of SEQ ID NO: 543
gucuucagaguguaggaaa

SEQ ID NO: 45383 - RNA, 19 nt, Artificial Sequence
  Description of Artificial Sequence: Synthetic oligonucleotide
  Antisense strand to SEQ ID NO: 45302
uuuccuacacucugaagac

SEQ ID NO: 45384 - RNA, 19 nt, Artificial Sequence
  Description of Artificial Sequence: Synthetic oligonucleotide
  Sense strand starting at position 1027 of SEQ ID NO: 543
gaaaguggucuucagagug

SEQ ID NO: 45385 - RNA, 19 nt, Artificial Sequence
  Description of Artificial Sequence: Synthetic oligonucleotide
  Antisense strand to SEQ ID NO: 45304
cacucugaagaccacuuuc

SEQ ID NO: 45386 - RNA, 19 nt, Artificial Sequence
  Description of Artificial Sequence: Synthetic oligonucleotide
  Sense strand starting at position 1013 of SEQ ID NO: 543
uguugcaucaccuggaaag

SEQ ID NO: 45387 - RNA, 19 nt, Artificial Sequence
  Description of Artificial Sequence: Synthetic oligonucleotide
  Antisense strand to SEQ ID NO: 45306
cuuuccaggugaugcaaca

SEQ ID NO: 45388 - RNA, 19 nt, Artificial Sequence
  Description of Artificial Sequence: Synthetic oligonucleotide
  Sense strand starting at position 765 of SEQ ID NO: 543
ugcagucagagguacuaau

SEQ ID NO: 45389 - RNA, 19 nt, Artificial Sequence
  Description of Artificial Sequence: Synthetic oligonucleotide
  Antisense strand to SEQ ID NO: 45308
auuaguaccucugacugca

SEQ ID NO: 45390 - RNA, 19 nt, Artificial Sequence
  Description of Artificial Sequence: Synthetic oligonucleotide
  Sense strand starting at position 656 of SEQ ID NO: 543
auaagacucuuggccugua

SEQ ID NO: 45391 - RNA, 19 nt, Artificial Sequence
  Description of Artificial Sequence: Synthetic oligonucleotide
  Antisense strand to SEQ ID NO: 45310
uacaggccaagagucuuau

SEQ ID NO: 45392 - RNA, 19 nt, Artificial Sequence
  Description of Artificial Sequence: Synthetic oligonucleotide
  Sense strand starting at position 481 of SEQ ID NO: 543
ccaggcucacaucagaauu

SEQ ID NO: 45393 - RNA, 19 nt, Artificial Sequence
  Description of Artificial Sequence: Synthetic oligonucleotide
  Antisense strand to SEQ ID NO: 45312
aauucugaugugagccugg

SEQ ID NO: 45394 - RNA, 19 nt, Artificial Sequence
  Description of Artificial Sequence: Synthetic oligonucleotide
  Sense strand starting at position 205 of SEQ ID NO: 543
aguaauagcccucaugaau

SEQ ID NO: 45395 - RNA, 19 nt, Artificial Sequence
  Description of Artificial Sequence: Synthetic oligonucleotide
  Antisense strand to SEQ ID NO: 45314
auucaugagggcuauuacu

SEQ ID NO: 45396 - RNA, 19 nt, Artificial Sequence
  Description of Artificial Sequence: Synthetic oligonucleotide
  Sense strand starting at position 170 of SEQ ID NO: 543
cugugaucucaagagcaga

SEQ ID NO: 45397 - RNA, 19 nt, Artificial Sequence
  Description of Artificial Sequence: Synthetic oligonucleotide
  Antisense strand to SEQ ID NO: 45316
ucugcucuugagaucacag

SEQ ID NO: 45398 - RNA, 19 nt, Artificial Sequence
  Description of Artificial Sequence: Synthetic oligonucleotide
  Sense strand starting at position 164 of SEQ ID NO: 543
ggcacacugugaucucaag

SEQ ID NO: 45399 - RNA, 19 nt, Artificial Sequence
  Description of Artificial Sequence: Synthetic oligonucleotide
  Antisense strand to SEQ ID NO: 45318
cuugagaucacagugugcc

SEQ ID NO: 45400 - RNA, 19 nt, Artificial Sequence
  Description of Artificial Sequence: Synthetic oligonucleotide
  Sense strand starting at position 546 of SEQ ID NO: 544
acaguaucuuccuuagcag

SEQ ID NO: 45401 - RNA, 19 nt, Artificial Sequence
  Description of Artificial Sequence: Synthetic oligonucleotide
  Antisense strand to SEQ ID NO: 45320
cugcuaaggaagauacugu

SEQ ID NO: 45402 - RNA, 19 nt, Artificial Sequence
  Description of Artificial Sequence: Synthetic oligonucleotide
  Sense strand starting at position 626 of SEQ ID NO: 544
uaucauuaucauuggcgga

SEQ ID NO: 45403 - RNA, 19 nt, Artificial Sequence
  Description of Artificial Sequence: Synthetic oligonucleotide
  Antisense strand to SEQ ID NO: 45322
uccgccaaugauaaugaua

SEQ ID NO: 45404 - RNA, 19 nt, Artificial Sequence
  Description of Artificial Sequence: Synthetic oligonucleotide
  Sense strand starting at position 628 of SEQ ID NO: 544
ucauuaucauuggcggaga

SEQ ID NO: 45405 - RNA, 19 nt, Artificial Sequence
  Description of Artificial Sequence: Synthetic oligonucleotide
  Antisense strand to SEQ ID NO: 45324
ucuccgccaaugauaauga

SEQ ID NO: 45406 - RNA, 19 nt, Artificial Sequence
  Description of Artificial Sequence: Synthetic oligonucleotide
  Sense strand starting at position 647 of SEQ ID NO: 544
ggcuuucuccaggacaggu

SEQ ID NO: 45407 - RNA, 19 nt, Artificial Sequence
  Description of Artificial Sequence: Synthetic oligonucleotide
  Antisense strand to SEQ ID NO: 45326
accuguccuggagaaagcc

SEQ ID NO: 45408 - RNA, 19 nt, Artificial Sequence
  Description of Artificial Sequence: Synthetic oligonucleotide
  Sense strand starting at position 655 of SEQ ID NO: 544
ccaggacaggucuguacua

SEQ ID NO: 45409 - RNA, 19 nt, Artificial Sequence
  Description of Artificial Sequence: Synthetic oligonucleotide
  Antisense strand to SEQ ID NO: 45328
uaguacagaccuguccugg

SEQ ID NO: 45410 - RNA, 19 nt, Artificial Sequence
  Description of Artificial Sequence: Synthetic oligonucleotide
  Sense strand starting at position 656 of SEQ ID NO: 544
caggacaggucuguacuau

SEQ ID NO: 45411 - RNA, 19 nt, Artificial Sequence
  Description of Artificial Sequence: Synthetic oligonucleotide
  Antisense strand to SEQ ID NO: 45330
auaguacagaccuguccug

SEQ ID NO: 45412 - RNA, 19 nt, Artificial Sequence
  Description of Artificial Sequence: Synthetic oligonucleotide
  Sense strand starting at position 657 of SEQ ID NO: 544
aggacaggucuguacuauu

SEQ ID NO: 45413 - RNA, 19 nt, Artificial Sequence
  Description of Artificial Sequence: Synthetic oligonucleotide
  Antisense strand to SEQ ID NO: 45332
aauaguacagaccuguccu

SEQ ID NO: 45414 - RNA, 19 nt, Artificial Sequence
  Description of Artificial Sequence: Synthetic oligonucleotide
  Sense strand starting at position 1074 of SEQ ID NO: 544
aacuucuuuggguaagcga

SEQ ID NO: 45415 - RNA, 19 nt, Artificial Sequence
  Description of Artificial Sequence: Synthetic oligonucleotide
  Antisense strand to SEQ ID NO: 45334
ucgcuuacccaaagaaguu

SEQ ID NO: 45416 - RNA, 19 nt, Artificial Sequence
  Description of Artificial Sequence: Synthetic oligonucleotide
  Sense strand starting at position 1083 of SEQ ID NO: 544
ggguaagcgauuuguugcu

SEQ ID NO: 45417 - RNA, 19 nt, Artificial Sequence
  Description of Artificial Sequence: Synthetic oligonucleotide
  Antisense strand to SEQ ID NO: 45336
agcaacaaaucgcuuaccc

SEQ ID NO: 45418 - RNA, 19 nt, Artificial Sequence
  Description of Artificial Sequence: Synthetic oligonucleotide
  Sense strand starting at position 1115 of SEQ ID NO: 544
acuuguaagucacuuaaau

SEQ ID NO: 45419 - RNA, 19 nt, Artificial Sequence
  Description of Artificial Sequence: Synthetic oligonucleotide
  Antisense strand to SEQ ID NO: 45338
auuuaagugacuuacaagu

SEQ ID NO: 45420 - RNA, 19 nt, Artificial Sequence
  Description of Artificial Sequence: Synthetic oligonucleotide
  Sense strand starting at position 1136 of SEQ ID NO: 544
aucaucuuauuugagagaa

SEQ ID NO: 45421 - RNA, 19 nt, Artificial Sequence
  Description of Artificial Sequence: Synthetic oligonucleotide
  Antisense strand to SEQ ID NO: 45340
uucucucaaauaagaugau

SEQ ID NO: 45422 - RNA, 19 nt, Artificial Sequence
  Description of Artificial Sequence: Synthetic oligonucleotide
  Sense strand starting at position 1192 of SEQ ID NO: 544
ccaauuugcugaugagaaa

SEQ ID NO: 45423 - RNA, 19 nt, Artificial Sequence
  Description of Artificial Sequence: Synthetic oligonucleotide
  Antisense strand to SEQ ID NO: 45342
uuucucaucagcaaauugg

SEQ ID NO: 45424 - RNA, 19 nt, Artificial Sequence
  Description of Artificial Sequence: Synthetic oligonucleotide
  Sense strand starting at position 1215 of SEQ ID NO: 544
aggguugagagcugguuaa

SEQ ID NO: 45425 - RNA, 19 nt, Artificial Sequence
  Description of Artificial Sequence: Synthetic oligonucleotide
  Antisense strand to SEQ ID NO: 45344
uuaaccagcucucaacccu

SEQ ID NO: 45426 - RNA, 19 nt, Artificial Sequence
  Description of Artificial Sequence: Synthetic oligonucleotide
  Sense strand starting at position 1567 of SEQ ID NO: 544
uggagucucacacgagauu

SEQ ID NO: 45427 - RNA, 19 nt, Artificial Sequence
  Description of Artificial Sequence: Synthetic oligonucleotide
  Antisense strand to SEQ ID NO: 45346
aaucucgugugagacucca

SEQ ID NO: 45428 - RNA, 19 nt, Artificial Sequence
  Description of Artificial Sequence: Synthetic oligonucleotide
  Sense strand starting at position 1570 of SEQ ID NO: 544
agucucacacgagauuaau

SEQ ID NO: 45429 - RNA, 19 nt, Artificial Sequence
  Description of Artificial Sequence: Synthetic oligonucleotide
  Antisense strand to SEQ ID NO: 45348
auuaaucucgugugagacu

SEQ ID NO: 45430 - RNA, 19 nt, Artificial Sequence
  Description of Artificial Sequence: Synthetic oligonucleotide
  Sense strand starting at position 1580 of SEQ ID NO: 544
gagauuaauuacgcucaag

SEQ ID NO: 45431 - RNA, 19 nt, Artificial Sequence
  Description of Artificial Sequence: Synthetic oligonucleotide
  Antisense strand to SEQ ID NO: 45350
cuugagcguaauuaaucuc

SEQ ID NO: 45432 - RNA, 19 nt, Artificial Sequence
  Description of Artificial Sequence: Synthetic oligonucleotide
  Sense strand starting at position 1590 of SEQ ID NO: 544
acgcucaagcgccuuaaau

SEQ ID NO: 45433 - RNA, 19 nt, Artificial Sequence
  Description of Artificial Sequence: Synthetic oligonucleotide
  Antisense strand to SEQ ID NO: 45352
auuuaaggcgcuugagcgu

SEQ ID NO: 45434 - RNA, 19 nt, Artificial Sequence
  Description of Artificial Sequence: Synthetic oligonucleotide
  Sense strand starting at position 1591 of SEQ ID NO: 544
cgcucaagcgccuuaaauc

SEQ ID NO: 45435 - RNA, 19 nt, Artificial Sequence
  Description of Artificial Sequence: Synthetic oligonucleotide
  Antisense strand to SEQ ID NO: 45354
gauuuaaggcgcuugagcg

SEQ ID NO: 45436 - RNA, 19 nt, Artificial Sequence
  Description of Artificial Sequence: Synthetic oligonucleotide
  Sense strand starting at position 1600 of SEQ ID NO: 544
gccuuaaaucuguaaaucg

SEQ ID NO: 45437 - RNA, 19 nt, Artificial Sequence
  Description of Artificial Sequence: Synthetic oligonucleotide
  Antisense strand to SEQ ID NO: 45356
cgauuuacagauuuaaggc

SEQ ID NO: 45438 - RNA, 19 nt, Artificial Sequence
  Description of Artificial Sequence: Synthetic oligonucleotide
  Sense strand starting at position 2002 of SEQ ID NO: 544
guucguuccgcagcaaauc

SEQ ID NO: 45439 - RNA, 19 nt, Artificial Sequence
  Description of Artificial Sequence: Synthetic oligonucleotide
  Antisense strand to SEQ ID NO: 45358
gauuugcugcggaacgaac

SEQ ID NO: 45440 - RNA, 19 nt, Artificial Sequence
  Description of Artificial Sequence: Synthetic oligonucleotide
  Sense strand starting at position 2053 of SEQ ID NO: 544
guucuaguugccgcuaauc

SEQ ID NO: 45441 - RNA, 19 nt, Artificial Sequence
  Description of Artificial Sequence: Synthetic oligonucleotide
  Antisense strand to SEQ ID NO: 45360
gauuagcggcaacuagaac

SEQ ID NO: 45442 - RNA, 19 nt, Artificial Sequence
  Description of Artificial Sequence: Synthetic oligonucleotide
  Sense strand starting at position 2111 of SEQ ID NO: 544
gguuuaaagccgcuuucgu

SEQ ID NO: 45443 - RNA, 19 nt, Artificial Sequence
  Description of Artificial Sequence: Synthetic oligonucleotide
  Antisense strand to SEQ ID NO: 45362
acgaaagcggcuuuaaacc

SEQ ID NO: 45444 - RNA, 19 nt, Artificial Sequence
  Description of Artificial Sequence: Synthetic oligonucleotide
  Sense strand starting at position 2112 of SEQ ID NO: 544
guuuaaagccgcuuucguu

SEQ ID NO: 45445 - RNA, 19 nt, Artificial Sequence
  Description of Artificial Sequence: Synthetic oligonucleotide
  Antisense strand to SEQ ID NO: 45364
aacgaaagcggcuuuaaac

SEQ ID NO: 45446 - RNA, 19 nt, Artificial Sequence
  Description of Artificial Sequence: Synthetic oligonucleotide
  Sense strand starting at position 2175 of SEQ ID NO: 544
cugcauucgcgcguucaaa

SEQ ID NO: 45447 - RNA, 19 nt, Artificial Sequence
  Description of Artificial Sequence: Synthetic oligonucleotide
  Antisense strand to SEQ ID NO: 45366
uuugaacgcgcgaaugcag

SEQ ID NO: 45448 - RNA, 19 nt, Artificial Sequence
  Description of Artificial Sequence: Synthetic oligonucleotide
  Sense strand starting at position 2176 of SEQ ID NO: 544
ugcauucgcgcguucaaau

SEQ ID NO: 45449 - RNA, 19 nt, Artificial Sequence
  Description of Artificial Sequence: Synthetic oligonucleotide
  Antisense strand to SEQ ID NO: 45368
auuugaacgcgcgaaugca

SEQ ID NO: 45450 - RNA, 19 nt, Artificial Sequence
  Description of Artificial Sequence: Synthetic oligonucleotide
  Sense strand starting at position 2177 of SEQ ID NO: 544
gcauucgcgcguucaaaua

SEQ ID NO: 45451 - RNA, 19 nt, Artificial Sequence
  Description of Artificial Sequence: Synthetic oligonucleotide
  Antisense strand to SEQ ID NO: 45370
uauuugaacgcgcgaaugc

SEQ ID NO: 45452 - RNA, 19 nt, Artificial Sequence
  Description of Artificial Sequence: Synthetic oligonucleotide
  Sense strand starting at position 2235 of SEQ ID NO: 544
gcauguauacuguauugaa

SEQ ID NO: 45453 - RNA, 19 nt, Artificial Sequence
  Description of Artificial Sequence: Synthetic oligonucleotide
  Antisense strand to SEQ ID NO: 45372
uucaauacaguauacaugc

SEQ ID NO: 45454 - RNA, 19 nt, Artificial Sequence
  Description of Artificial Sequence: Synthetic oligonucleotide
  Sense strand starting at position 2265 of SEQ ID NO: 544
uuccuauucgcauaugaga

SEQ ID NO: 45455 - RNA, 19 nt, Artificial Sequence
  Description of Artificial Sequence: Synthetic oligonucleotide
  Antisense strand to SEQ ID NO: 45374
ucucauaugcgaauaggaa

SEQ ID NO: 45456 - RNA, 19 nt, Artificial Sequence
  Description of Artificial Sequence: Synthetic oligonucleotide
  Sense strand starting at position 2267 of SEQ ID NO: 544
ccuauucgcauaugagaug

SEQ ID NO: 45457 - RNA, 19 nt, Artificial Sequence
  Description of Artificial Sequence: Synthetic oligonucleotide
  Antisense strand to SEQ ID NO: 45376
caucucauaugcgaauagg

SEQ ID NO: 45458 - RNA, 19 nt, Artificial Sequence
  Description of Artificial Sequence: Synthetic oligonucleotide
  Sense strand starting at position 2272 of SEQ ID NO: 544
ucgcauaugagaugcauaa

SEQ ID NO: 45459 - RNA, 19 nt, Artificial Sequence
  Description of Artificial Sequence: Synthetic oligonucleotide
  Antisense strand to SEQ ID NO: 45378
uuaugcaucucauaugcga

SEQ ID NO: 45460 - RNA, 19 nt, Artificial Sequence
  Description of Artificial Sequence: Synthetic oligonucleotide
  Sense strand starting at position 2274 of SEQ ID NO: 544
gcauaugagaugcauaaug

SEQ ID NO: 45461 - RNA, 19 nt, Artificial Sequence
  Description of Artificial Sequence: Synthetic oligonucleotide
  Antisense strand to SEQ ID NO: 45380
cauuaugcaucucauaugc

SEQ ID NO: 45462 - RNA, 19 nt, Artificial Sequence
  Description of Artificial Sequence: Synthetic oligonucleotide
  Sense strand starting at position 2441 of SEQ ID NO: 544
ggcacuguuggagauuguu

SEQ ID NO: 45463 - RNA, 19 nt, Artificial Sequence
  Description of Artificial Sequence: Synthetic oligonucleotide
  Antisense strand to SEQ ID NO: 45382
aacaaucuccaacagugcc

SEQ ID NO: 45464 - RNA, 19 nt, Artificial Sequence
  Description of Artificial Sequence: Synthetic oligonucleotide
  Sense strand starting at position 2447 of SEQ ID NO: 544
guuggagauuguucagaug

SEQ ID NO: 45465 - RNA, 19 nt, Artificial Sequence
  Description of Artificial Sequence: Synthetic oligonucleotide
  Antisense strand to SEQ ID NO: 45384
caucugaacaaucuccaac

SEQ ID NO: 45466 - RNA, 19 nt, Artificial Sequence
  Description of Artificial Sequence: Synthetic oligonucleotide
  Sense strand starting at position 2618 of SEQ ID NO: 544
agaaguaauuaucugcuca

SEQ ID NO: 45467 - RNA, 19 nt, Artificial Sequence
  Description of Artificial Sequence: Synthetic oligonucleotide
  Antisense strand to SEQ ID NO: 45386
ugagcagauaauuacuucu

SEQ ID NO: 45468 - RNA, 19 nt, Artificial Sequence
  Description of Artificial Sequence: Synthetic oligonucleotide
  Sense strand starting at position 3191 of SEQ ID NO: 544
cagcguuuaguaggaggaa

SEQ ID NO: 45469 - RNA, 19 nt, Artificial Sequence
  Description of Artificial Sequence: Synthetic oligonucleotide
  Antisense strand to SEQ ID NO: 45388
uuccuccuacuaaacgcug

SEQ ID NO: 45470 - RNA, 19 nt, Artificial Sequence
  Description of Artificial Sequence: Synthetic oligonucleotide
  Sense strand starting at position 3194 of SEQ ID NO: 544
cguuuaguaggaggaauua

SEQ ID NO: 45471 - RNA, 19 nt, Artificial Sequence
  Description of Artificial Sequence: Synthetic oligonucleotide
  Antisense strand to SEQ ID NO: 45390
uaauuccuccuacuaaacg

SEQ ID NO: 45472 - RNA, 19 nt, Artificial Sequence
  Description of Artificial Sequence: Synthetic oligonucleotide
  Sense strand starting at position 3274 of SEQ ID NO: 544
ggcgguuaacucuaaugua

SEQ ID NO: 45473 - RNA, 19 nt, Artificial Sequence
  Description of Artificial Sequence: Synthetic oligonucleotide
  Antisense strand to SEQ ID NO: 45392
uacauuagaguuaaccgcc

SEQ ID NO: 45474 - RNA, 19 nt, Artificial Sequence
  Description of Artificial Sequence: Synthetic oligonucleotide
  Sense strand starting at position 3632 of SEQ ID NO: 544
cccauaauacuguaauugu

SEQ ID NO: 45475 - RNA, 19 nt, Artificial Sequence
  Description of Artificial Sequence: Synthetic oligonucleotide
  Antisense strand to SEQ ID NO: 45394
acaauuacaguauuauggg

SEQ ID NO: 45476 - RNA, 19 nt, Artificial Sequence
  Description of Artificial Sequence: Synthetic oligonucleotide
  Sense strand starting at position 3672 of SEQ ID NO: 544
gggaguagggauugagucu

SEQ ID NO: 45477 - RNA, 19 nt, Artificial Sequence
  Description of Artificial Sequence: Synthetic oligonucleotide
  Antisense strand to SEQ ID NO: 45396
agacucaaucccuacuccc

SEQ ID NO: 45478 - RNA, 19 nt, Artificial Sequence
  Description of Artificial Sequence: Synthetic oligonucleotide
  Sense strand starting at position 3804 of SEQ ID NO: 544
uuggcaagucccuaaaugu

SEQ ID NO: 45479 - RNA, 19 nt, Artificial Sequence
  Description of Artificial Sequence: Synthetic oligonucleotide
  Antisense strand to SEQ ID NO: 45398
acauuuagggacuugccaa

SEQ ID NO: 45480 - RNA, 19 nt, Artificial Sequence
  Description of Artificial Sequence: Synthetic oligonucleotide
  Sense strand starting at position 3782 of SEQ ID NO: 545
ugguuagguucagagacua

SEQ ID NO: 45481 - RNA, 19 nt, Artificial Sequence
  Description of Artificial Sequence: Synthetic oligonucleotide
  Antisense strand to SEQ ID NO: 45400
uagucucugaaccuaacca

SEQ ID NO: 45482 - RNA, 19 nt, Artificial Sequence
  Description of Artificial Sequence: Synthetic oligonucleotide
  Sense strand starting at position 3777 of SEQ ID NO: 545
aguguugguuagguucaga

SEQ ID NO: 45483 - RNA, 19 nt, Artificial Sequence
  Description of Artificial Sequence: Synthetic oligonucleotide
  Antisense strand to SEQ ID NO: 45402
ucugaaccuaaccaacacu

SEQ ID NO: 45484 - RNA, 19 nt, Artificial Sequence
  Description of Artificial Sequence: Synthetic oligonucleotide
  Sense strand starting at position 3772 of SEQ ID NO: 545
cagagaguguugguuaggu

SEQ ID NO: 45485 - RNA, 19 nt, Artificial Sequence
  Description of Artificial Sequence: Synthetic oligonucleotide
  Antisense strand to SEQ ID NO: 45404
accuaaccaacacucucug

SEQ ID NO: 45486 - RNA, 19 nt, Artificial Sequence
  Description of Artificial Sequence: Synthetic oligonucleotide
  Sense strand starting at position 3757 of SEQ ID NO: 545
gucuucgagccguaacaga

SEQ ID NO: 45487 - RNA, 19 nt, Artificial Sequence
  Description of Artificial Sequence: Synthetic oligonucleotide
  Antisense strand to SEQ ID NO: 45406
ucuguuacggcucgaagac

SEQ ID NO: 45488 - RNA, 19 nt, Artificial Sequence
  Description of Artificial Sequence: Synthetic oligonucleotide
  Sense strand starting at position 3755 of SEQ ID NO: 545
augucuucgagccguaaca

SEQ ID NO: 45489 - RNA, 19 nt, Artificial Sequence
  Description of Artificial Sequence: Synthetic oligonucleotide
  Antisense strand to SEQ ID NO: 45408
uguuacggcucgaagacau

SEQ ID NO: 45490 - RNA, 19 nt, Artificial Sequence
  Description of Artificial Sequence: Synthetic oligonucleotide
  Sense strand starting at position 3753 of SEQ ID NO: 545
uuaugucuucgagccguaa

SEQ ID NO: 45491 - RNA, 19 nt, Artificial Sequence
  Description of Artificial Sequence: Synthetic oligonucleotide
  Antisense strand to SEQ ID NO: 45410
uuacggcucgaagacauaa

SEQ ID NO: 45492 - RNA, 19 nt, Artificial Sequence
  Description of Artificial Sequence: Synthetic oligonucleotide
  Sense strand starting at position 3722 of SEQ ID NO: 545
acccuucuguuugacugaa

SEQ ID NO: 45493 - RNA, 19 nt, Artificial Sequence
  Description of Artificial Sequence: Synthetic oligonucleotide
  Antisense strand to SEQ ID NO: 45412
uucagucaaacagaagggu

SEQ ID NO: 45494 - RNA, 19 nt, Artificial Sequence
  Description of Artificial Sequence: Synthetic oligonucleotide
  Sense strand starting at position 3651 of SEQ ID NO: 545
ucucuuagcugguucuuaa

SEQ ID NO: 45495 - RNA, 19 nt, Artificial Sequence
  Description of Artificial Sequence: Synthetic oligonucleotide
  Antisense strand to SEQ ID NO: 45414
uuaagaaccagcuaagaga

SEQ ID NO: 45496 - RNA, 19 nt, Artificial Sequence
  Description of Artificial Sequence: Synthetic oligonucleotide
  Sense strand starting at position 3646 of SEQ ID NO: 545
gcauuucucuuagcugguu

SEQ ID NO: 45497 - RNA, 19 nt, Artificial Sequence
  Description of Artificial Sequence: Synthetic oligonucleotide
  Antisense strand to SEQ ID NO: 45416
aaccagcuaagagaaaugc

SEQ ID NO: 45498 - RNA, 19 nt, Artificial Sequence
  Description of Artificial Sequence: Synthetic oligonucleotide
  Sense strand starting at position 3605 of SEQ ID NO: 545
auaccagacugagguaaua

SEQ ID NO: 45499 - RNA, 19 nt, Artificial Sequence
  Description of Artificial Sequence: Synthetic oligonucleotide
  Antisense strand to SEQ ID NO: 45418
uauuaccucagucugguau

SEQ ID NO: 45500 - RNA, 19 nt, Artificial Sequence
  Description of Artificial Sequence: Synthetic oligonucleotide
  Sense strand starting at position 3512 of SEQ ID NO: 545
uauguaacacuugaagguu

SEQ ID NO: 45501 - RNA, 19 nt, Artificial Sequence
  Description of Artificial Sequence: Synthetic oligonucleotide
  Antisense strand to SEQ ID NO: 45420
aaccuucaaguguuacaua

SEQ ID NO: 45502 - RNA, 19 nt, Artificial Sequence
  Description of Artificial Sequence: Synthetic oligonucleotide
  Sense strand starting at position 3502 of SEQ ID NO: 545
ccaaguaucuuauguaaca

SEQ ID NO: 45503 - RNA, 19 nt, Artificial Sequence
  Description of Artificial Sequence: Synthetic oligonucleotide
  Antisense strand to SEQ ID NO: 45422
uguuacauaagauacuugg

SEQ ID NO: 45504 - RNA, 19 nt, Artificial Sequence
  Description of Artificial Sequence: Synthetic oligonucleotide
  Sense strand starting at position 3500 of SEQ ID NO: 545
uuccaaguaucuuauguaa

SEQ ID NO: 45505 - RNA, 19 nt, Artificial Sequence
  Description of Artificial Sequence: Synthetic oligonucleotide
  Antisense strand to SEQ ID NO: 45424
uuacauaagauacuuggaa

SEQ ID NO: 45506 - RNA, 19 nt, Artificial Sequence
  Description of Artificial Sequence: Synthetic oligonucleotide
  Sense strand starting at position 3384 of SEQ ID NO: 545
ucaugccucuggugaggaa

SEQ ID NO: 45507 - RNA, 19 nt, Artificial Sequence
  Description of Artificial Sequence: Synthetic oligonucleotide
  Antisense strand to SEQ ID NO: 45426
uuccucaccagaggcauga

SEQ ID NO: 45508 - RNA, 19 nt, Artificial Sequence
  Description of Artificial Sequence: Synthetic oligonucleotide
  Sense strand starting at position 3335 of SEQ ID NO: 545
uggcauuugucgggauguc

SEQ ID NO: 45509 - RNA, 19 nt, Artificial Sequence
  Description of Artificial Sequence: Synthetic oligonucleotide
  Antisense strand to SEQ ID NO: 45428
gacaucccgacaaaugcca

SEQ ID NO: 45510 - RNA, 19 nt, Artificial Sequence
  Description of Artificial Sequence: Synthetic oligonucleotide
  Sense strand starting at position 3334 of SEQ ID NO: 545
cuggcauuugucgggaugu

SEQ ID NO: 45511 - RNA, 19 nt, Artificial Sequence
  Description of Artificial Sequence: Synthetic oligonucleotide
  Antisense strand to SEQ ID NO: 45430
acaucccgacaaaugccag

SEQ ID NO: 45512 - RNA, 19 nt, Artificial Sequence
  Description of Artificial Sequence: Synthetic oligonucleotide
  Sense strand starting at position 3326 of SEQ ID NO: 545
gauguacucuggcauuugu

SEQ ID NO: 45513 - RNA, 19 nt, Artificial Sequence
  Description of Artificial Sequence: Synthetic oligonucleotide
  Antisense strand to SEQ ID NO: 45432
acaaaugccagaguacauc

SEQ ID NO: 45514 - RNA, 19 nt, Artificial Sequence
  Description of Artificial Sequence: Synthetic oligonucleotide
  Sense strand starting at position 3219 of SEQ ID NO: 545
cacugaguuuccguuuaau

SEQ ID NO: 45515 - RNA, 19 nt, Artificial Sequence
  Description of Artificial Sequence: Synthetic oligonucleotide
  Antisense strand to SEQ ID NO: 45434
auuaaacggaaacucagug

SEQ ID NO: 45516 - RNA, 19 nt, Artificial Sequence
  Description of Artificial Sequence: Synthetic oligonucleotide
  Sense strand starting at position 3217 of SEQ ID NO: 545
uacacugaguuuccguuua

SEQ ID NO: 45517 - RNA, 19 nt, Artificial Sequence
  Description of Artificial Sequence: Synthetic oligonucleotide
  Antisense strand to SEQ ID NO: 45436
uaaacggaaacucagugua

SEQ ID NO: 45518 - RNA, 19 nt, Artificial Sequence
  Description of Artificial Sequence: Synthetic oligonucleotide
  Sense strand starting at position 3187 of SEQ ID NO: 545
uuccuagucuuguaacaaa

SEQ ID NO: 45519 - RNA, 19 nt, Artificial Sequence
  Description of Artificial Sequence: Synthetic oligonucleotide
  Antisense strand to SEQ ID NO: 45438
uuuguuacaagacuaggaa

SEQ ID NO: 45520 - RNA, 19 nt, Artificial Sequence
  Description of Artificial Sequence: Synthetic oligonucleotide
  Sense strand starting at position 3182 of SEQ ID NO: 545
uuuguuuccuagucuugua

SEQ ID NO: 45521 - RNA, 19 nt, Artificial Sequence
  Description of Artificial Sequence: Synthetic oligonucleotide
  Antisense strand to SEQ ID NO: 45440
uacaagacuaggaaacaaa

SEQ ID NO: 45522 - RNA, 19 nt, Artificial Sequence
  Description of Artificial Sequence: Synthetic oligonucleotide
  Sense strand starting at position 2761 of SEQ ID NO: 545
agauuaaagucugaugguu

SEQ ID NO: 45523 - RNA, 19 nt, Artificial Sequence
  Description of Artificial Sequence: Synthetic oligonucleotide
  Antisense strand to SEQ ID NO: 45442
aaccaucagacuuuaaucu

SEQ ID NO: 45524 - RNA, 19 nt, Artificial Sequence
  Description of Artificial Sequence: Synthetic oligonucleotide
  Sense strand starting at position 2760 of SEQ ID NO: 545
gagauuaaagucugauggu

SEQ ID NO: 45525 - RNA, 19 nt, Artificial Sequence
  Description of Artificial Sequence: Synthetic oligonucleotide
  Antisense strand to SEQ ID NO: 45444
accaucagacuuuaaucuc

SEQ ID NO: 45526 - RNA, 19 nt, Artificial Sequence
  Description of Artificial Sequence: Synthetic oligonucleotide
  Sense strand starting at position 2743 of SEQ ID NO: 545
auugcucugucccuauaga

SEQ ID NO: 45527 - RNA, 19 nt, Artificial Sequence
  Description of Artificial Sequence: Synthetic oligonucleotide
  Antisense strand to SEQ ID NO: 45446
ucuauagggacagagcaau

SEQ ID NO: 45528 - RNA, 19 nt, Artificial Sequence
  Description of Artificial Sequence: Synthetic oligonucleotide
  Sense strand starting at position 2712 of SEQ ID NO: 545
auguguucugcugagcaaa

SEQ ID NO: 45529 - RNA, 19 nt, Artificial Sequence
  Description of Artificial Sequence: Synthetic oligonucleotide
  Antisense strand to SEQ ID NO: 45448
uuugcucagcagaacacau

SEQ ID NO: 45530 - RNA, 19 nt, Artificial Sequence
  Description of Artificial Sequence: Synthetic oligonucleotide
  Sense strand starting at position 2634 of SEQ ID NO: 545
cccauuuagcguggaauau

SEQ ID NO: 45531 - RNA, 19 nt, Artificial Sequence
  Description of Artificial Sequence: Synthetic oligonucleotide
  Antisense strand to SEQ ID NO: 45450
auauuccacgcuaaauggg

SEQ ID NO: 45532 - RNA, 19 nt, Artificial Sequence
  Description of Artificial Sequence: Synthetic oligonucleotide
  Sense strand starting at position 2633 of SEQ ID NO: 545
gcccauuuagcguggaaua

SEQ ID NO: 45533 - RNA, 19 nt, Artificial Sequence
  Description of Artificial Sequence: Synthetic oligonucleotide
  Antisense strand to SEQ ID NO: 45452
uauuccacgcuaaaugggc

SEQ ID NO: 45534 - RNA, 19 nt, Artificial Sequence
  Description of Artificial Sequence: Synthetic oligonucleotide
  Sense strand starting at position 2195 of SEQ ID NO: 545
cgaguuccgucugaggaag

SEQ ID NO: 45535 - RNA, 19 nt, Artificial Sequence
  Description of Artificial Sequence: Synthetic oligonucleotide
  Antisense strand to SEQ ID NO: 45454
cuuccucagacggaacucg

SEQ ID NO: 45536 - RNA, 19 nt, Artificial Sequence
  Description of Artificial Sequence: Synthetic oligonucleotide
  Sense strand starting at position 2194 of SEQ ID NO: 545
ccgaguuccgucugaggaa

SEQ ID NO: 45537 - RNA, 19 nt, Artificial Sequence
  Description of Artificial Sequence: Synthetic oligonucleotide
  Antisense strand to SEQ ID NO: 45456
uuccucagacggaacucgg

SEQ ID NO: 45538 - RNA, 19 nt, Artificial Sequence
  Description of Artificial Sequence: Synthetic oligonucleotide
  Sense strand starting at position 2066 of SEQ ID NO: 545
cuugguugucaugagagug

SEQ ID NO: 45539 - RNA, 19 nt, Artificial Sequence
  Description of Artificial Sequence: Synthetic oligonucleotide
  Antisense strand to SEQ ID NO: 45458
cacucucaugacaaccaag

SEQ ID NO: 45540 - RNA, 19 nt, Artificial Sequence
  Description of Artificial Sequence: Synthetic oligonucleotide
  Sense strand starting at position 2063 of SEQ ID NO: 545
gggcuugguugucaugaga

SEQ ID NO: 45541 - RNA, 19 nt, Artificial Sequence
  Description of Artificial Sequence: Synthetic oligonucleotide
  Antisense strand to SEQ ID NO: 45460
ucucaugacaaccaagccc

SEQ ID NO: 45542 - RNA, 19 nt, Artificial Sequence
  Description of Artificial Sequence: Synthetic oligonucleotide
  Sense strand starting at position 1125 of SEQ ID NO: 545
ccuagaauaaggugacgau

SEQ ID NO: 45543 - RNA, 19 nt, Artificial Sequence
  Description of Artificial Sequence: Synthetic oligonucleotide
  Antisense strand to SEQ ID NO: 45462
aucgucaccuuauucuagg

SEQ ID NO: 45544 - RNA, 19 nt, Artificial Sequence
  Description of Artificial Sequence: Synthetic oligonucleotide
  Sense strand starting at position 985 of SEQ ID NO: 545
cuguuaauuuguuggaguc

SEQ ID NO: 45545 - RNA, 19 nt, Artificial Sequence
  Description of Artificial Sequence: Synthetic oligonucleotide
  Antisense strand to SEQ ID NO: 45464
gacuccaacaaauuaacag

SEQ ID NO: 45546 - RNA, 19 nt, Artificial Sequence
  Description of Artificial Sequence: Synthetic oligonucleotide
  Sense strand starting at position 975 of SEQ ID NO: 545
gcacguggcacuguuaauu

SEQ ID NO: 45547 - RNA, 19 nt, Artificial Sequence
  Description of Artificial Sequence: Synthetic oligonucleotide
  Antisense strand to SEQ ID NO: 45466
aauuaacagugccacgugc

SEQ ID NO: 45548 - RNA, 19 nt, Artificial Sequence
  Description of Artificial Sequence: Synthetic oligonucleotide
  Sense strand starting at position 837 of SEQ ID NO: 545
ucaaauagagccugucuuu

SEQ ID NO: 45549 - RNA, 19 nt, Artificial Sequence
  Description of Artificial Sequence: Synthetic oligonucleotide
  Antisense strand to SEQ ID NO: 45468
aaagacaggcucuauuuga

SEQ ID NO: 45550 - RNA, 19 nt, Artificial Sequence
  Description of Artificial Sequence: Synthetic oligonucleotide
  Sense strand starting at position 633 of SEQ ID NO: 545
augagcugugcuuaaagaa

SEQ ID NO: 45551 - RNA, 19 nt, Artificial Sequence
  Description of Artificial Sequence: Synthetic oligonucleotide
  Antisense strand to SEQ ID NO: 45470
uucuuuaagcacagcucau

SEQ ID NO: 45552 - RNA, 19 nt, Artificial Sequence
  Description of Artificial Sequence: Synthetic oligonucleotide
  Sense strand starting at position 629 of SEQ ID NO: 545
cggaaugagcugugcuuaa

SEQ ID NO: 45553 - RNA, 19 nt, Artificial Sequence
  Description of Artificial Sequence: Synthetic oligonucleotide
  Antisense strand to SEQ ID NO: 45472
uuaagcacagcucauuccg

SEQ ID NO: 45554 - RNA, 19 nt, Artificial Sequence
  Description of Artificial Sequence: Synthetic oligonucleotide
  Sense strand starting at position 627 of SEQ ID NO: 545
accggaaugagcugugcuu

SEQ ID NO: 45555 - RNA, 19 nt, Artificial Sequence
  Description of Artificial Sequence: Synthetic oligonucleotide
  Antisense strand to SEQ ID NO: 45474
aagcacagcucauuccggu

SEQ ID NO: 45556 - RNA, 19 nt, Artificial Sequence
  Description of Artificial Sequence: Synthetic oligonucleotide
  Sense strand starting at position 244 of SEQ ID NO: 545
ugaggacucugccaccuaa

SEQ ID NO: 45557 - RNA, 19 nt, Artificial Sequence
  Description of Artificial Sequence: Synthetic oligonucleotide
  Antisense strand to SEQ ID NO: 45476
uuagguggcagaguccuca

SEQ ID NO: 45558 - RNA, 19 nt, Artificial Sequence
  Description of Artificial Sequence: Synthetic oligonucleotide
  Sense strand starting at position 132 of SEQ ID NO: 545
cccucugcucuugggaauu

SEQ ID NO: 45559 - RNA, 19 nt, Artificial Sequence
  Description of Artificial Sequence: Synthetic oligonucleotide
  Antisense strand to SEQ ID NO: 45478
aauucccaagagcagaggg

SEQ ID NO: 45560 - RNA, 19 nt, Artificial Sequence
  Description of Artificial Sequence: Synthetic oligonucleotide
  Sense strand starting at position 225 of SEQ ID NO: 546
ggcucugaaaucgagcuaa

SEQ ID NO: 45561 - RNA, 19 nt, Artificial Sequence
  Description of Artificial Sequence: Synthetic oligonucleotide
  Antisense strand to SEQ ID NO: 45480
uuagcucgauuucagagcc

SEQ ID NO: 45562 - RNA, 19 nt, Artificial Sequence
  Description of Artificial Sequence: Synthetic oligonucleotide
  Sense strand starting at position 236 of SEQ ID NO: 546
cgagcuaaccuagguucua

SEQ ID NO: 45563 - RNA, 19 nt, Artificial Sequence
  Description of Artificial Sequence: Synthetic oligonucleotide
  Antisense strand to SEQ ID NO: 45482
uagaaccuagguuagcucg

SEQ ID NO: 45564 - RNA, 19 nt, Artificial Sequence
  Description of Artificial Sequence: Synthetic oligonucleotide
  Sense strand starting at position 266 of SEQ ID NO: 546
ugacuagucuuccugagca

SEQ ID NO: 45565 - RNA, 19 nt, Artificial Sequence
  Description of Artificial Sequence: Synthetic oligonucleotide
  Antisense strand to SEQ ID NO: 45484
ugcucaggaagacuaguca

SEQ ID NO: 45566 - RNA, 19 nt, Artificial Sequence
  Description of Artificial Sequence: Synthetic oligonucleotide
  Sense strand starting at position 268 of SEQ ID NO: 546
acuagucuuccugagcaca

SEQ ID NO: 45567 - RNA, 19 nt, Artificial Sequence
  Description of Artificial Sequence: Synthetic oligonucleotide
  Antisense strand to SEQ ID NO: 45486
ugugcucaggaagacuagu

SEQ ID NO: 45568 - RNA, 19 nt, Artificial Sequence
  Description of Artificial Sequence: Synthetic oligonucleotide
  Sense strand starting at position 270 of SEQ ID NO: 546
uagucuuccugagcacaug

SEQ ID NO: 45569 - RNA, 19 nt, Artificial Sequence
  Description of Artificial Sequence: Synthetic oligonucleotide
  Antisense strand to SEQ ID NO: 45488
caugugcucaggaagacua

SEQ ID NO: 45570 - RNA, 19 nt, Artificial Sequence
  Description of Artificial Sequence: Synthetic oligonucleotide
  Sense strand starting at position 317 of SEQ ID NO: 546
guuuguaagauaggcacaa

SEQ ID NO: 45571 - RNA, 19 nt, Artificial Sequence
  Description of Artificial Sequence: Synthetic oligonucleotide
  Antisense strand to SEQ ID NO: 45490
uugugccuaucuuacaaac

SEQ ID NO: 45572 - RNA, 19 nt, Artificial Sequence
  Description of Artificial Sequence: Synthetic oligonucleotide
  Sense strand starting at position 430 of SEQ ID NO: 546
aaucuuguggcuuagccaa

SEQ ID NO: 45573 - RNA, 19 nt, Artificial Sequence
  Description of Artificial Sequence: Synthetic oligonucleotide
  Antisense strand to SEQ ID NO: 45492
uuggcuaagccacaagauu

SEQ ID NO: 45574 - RNA, 19 nt, Artificial Sequence
  Description of Artificial Sequence: Synthetic oligonucleotide
  Sense strand starting at position 437 of SEQ ID NO: 546
uggcuuagccaagauuaau

SEQ ID NO: 45575 - RNA, 19 nt, Artificial Sequence
  Description of Artificial Sequence: Synthetic oligonucleotide
  Antisense strand to SEQ ID NO: 45494
auuaaucuuggcuaagcca

SEQ ID NO: 45576 - RNA, 19 nt, Artificial Sequence
  Description of Artificial Sequence: Synthetic oligonucleotide
  Sense strand starting at position 498 of SEQ ID NO: 546
aggcgagucacauaacagu

SEQ ID NO: 45577 - RNA, 19 nt, Artificial Sequence
  Description of Artificial Sequence: Synthetic oligonucleotide
  Antisense strand to SEQ ID NO: 45496
acuguuaugugacucgccu

SEQ ID NO: 45578 - RNA, 19 nt, Artificial Sequence
  Description of Artificial Sequence: Synthetic oligonucleotide
  Sense strand starting at position 718 of SEQ ID NO: 546
ggucuuaugccucauggga

SEQ ID NO: 45579 - RNA, 19 nt, Artificial Sequence
  Description of Artificial Sequence: Synthetic oligonucleotide
  Antisense strand to SEQ ID NO: 45498
ucccaugaggcauaagacc

SEQ ID NO: 45580 - RNA, 19 nt, Artificial Sequence
  Description of Artificial Sequence: Synthetic oligonucleotide
  Sense strand starting at position 1000 of SEQ ID NO: 546
ugccuuugucaaggaguga

SEQ ID NO: 45581 - RNA, 19 nt, Artificial Sequence
  Description of Artificial Sequence: Synthetic oligonucleotide
  Antisense strand to SEQ ID NO: 45500
ucacuccuugacaaaggca

SEQ ID NO: 45582 - RNA, 19 nt, Artificial Sequence
  Description of Artificial Sequence: Synthetic oligonucleotide
  Sense strand starting at position 1001 of SEQ ID NO: 546
gccuuugucaaggagugag

SEQ ID NO: 45583 - RNA, 19 nt, Artificial Sequence
  Description of Artificial Sequence: Synthetic oligonucleotide
  Antisense strand to SEQ ID NO: 45502
cucacuccuugacaaaggc

SEQ ID NO: 45584 - RNA, 19 nt, Artificial Sequence
  Description of Artificial Sequence: Synthetic oligonucleotide
  Sense strand starting at position 1357 of SEQ ID NO: 546
gggugagaguuaccugagu

SEQ ID NO: 45585 - RNA, 19 nt, Artificial Sequence
  Description of Artificial Sequence: Synthetic oligonucleotide
  Antisense strand to SEQ ID NO: 45504
acucagguaacucucaccc

SEQ ID NO: 45586 - RNA, 19 nt, Artificial Sequence
  Description of Artificial Sequence: Synthetic oligonucleotide
  Sense strand starting at position 1713 of SEQ ID NO: 546
gcgcacguaguaguagaua

SEQ ID NO: 45587 - RNA, 19 nt, Artificial Sequence
  Description of Artificial Sequence: Synthetic oligonucleotide
  Antisense strand to SEQ ID NO: 45506
uaucuacuacuacgugcgc

SEQ ID NO: 45588 - RNA, 19 nt, Artificial Sequence
  Description of Artificial Sequence: Synthetic oligonucleotide
  Sense strand starting at position 1718 of SEQ ID NO: 546
cguaguaguagauaucgaa

SEQ ID NO: 45589 - RNA, 19 nt, Artificial Sequence
  Description of Artificial Sequence: Synthetic oligonucleotide
  Antisense strand to SEQ ID NO: 45508
uucgauaucuacuacuacg

SEQ ID NO: 45590 - RNA, 19 nt, Artificial Sequence
  Description of Artificial Sequence: Synthetic oligonucleotide
  Sense strand starting at position 1725 of SEQ ID NO: 546
guagauaucgaagauaagc

SEQ ID NO: 45591 - RNA, 19 nt, Artificial Sequence
  Description of Artificial Sequence: Synthetic oligonucleotide
  Antisense strand to SEQ ID NO: 45510
gcuuaucuucgauaucuac

SEQ ID NO: 45592 - RNA, 19 nt, Artificial Sequence
  Description of Artificial Sequence: Synthetic oligonucleotide
  Sense strand starting at position 2441 of SEQ ID NO: 546
gggcacuuuccacgaauuc

SEQ ID NO: 45593 - RNA, 19 nt, Artificial Sequence
  Description of Artificial Sequence: Synthetic oligonucleotide
  Antisense strand to SEQ ID NO: 45512
gaauucguggaaagugccc

SEQ ID NO: 45594 - RNA, 19 nt, Artificial Sequence
  Description of Artificial Sequence: Synthetic oligonucleotide
  Sense strand starting at position 2537 of SEQ ID NO: 546
ugaagaccuguucgugaac

SEQ ID NO: 45595 - RNA, 19 nt, Artificial Sequence
  Description of Artificial Sequence: Synthetic oligonucleotide
  Antisense strand to SEQ ID NO: 45514
guucacgaacaggucuuca

SEQ ID NO: 45596 - RNA, 19 nt, Artificial Sequence
  Description of Artificial Sequence: Synthetic oligonucleotide
  Sense strand starting at position 2538 of SEQ ID NO: 546
gaagaccuguucgugaacu

SEQ ID NO: 45597 - RNA, 19 nt, Artificial Sequence
  Description of Artificial Sequence: Synthetic oligonucleotide
  Antisense strand to SEQ ID NO: 45516
aguucacgaacaggucuuc

SEQ ID NO: 45598 - RNA, 19 nt, Artificial Sequence
  Description of Artificial Sequence: Synthetic oligonucleotide
  Sense strand starting at position 2658 of SEQ ID NO: 546
ggcauuucagcccgaguaa

SEQ ID NO: 45599 - RNA, 19 nt, Artificial Sequence
  Description of Artificial Sequence: Synthetic oligonucleotide
  Antisense strand to SEQ ID NO: 45518
uuacucgggcugaaaugcc

SEQ ID NO: 45600 - RNA, 19 nt, Artificial Sequence
  Description of Artificial Sequence: Synthetic oligonucleotide
  Sense strand starting at position 3170 of SEQ ID NO: 546
auaauugucucuuuaugug

SEQ ID NO: 45601 - RNA, 19 nt, Artificial Sequence
  Description of Artificial Sequence: Synthetic oligonucleotide
  Antisense strand to SEQ ID NO: 45520
cacauaaagagacaauuau

SEQ ID NO: 45602 - RNA, 19 nt, Artificial Sequence
  Description of Artificial Sequence: Synthetic oligonucleotide
  Sense strand starting at position 3289 of SEQ ID NO: 546
gcggcuguugaccaaugaa

SEQ ID NO: 45603 - RNA, 19 nt, Artificial Sequence
  Description of Artificial Sequence: Synthetic oligonucleotide
  Antisense strand to SEQ ID NO: 45522
uucauuggucaacagccgc

SEQ ID NO: 45604 - RNA, 19 nt, Artificial Sequence
  Description of Artificial Sequence: Synthetic oligonucleotide
  Sense strand starting at position 3292 of SEQ ID NO: 546
gcuguugaccaaugaauga

SEQ ID NO: 45605 - RNA, 19 nt, Artificial Sequence
  Description of Artificial Sequence: Synthetic oligonucleotide
  Antisense strand to SEQ ID NO: 45524
ucauucauuggucaacagc

SEQ ID NO: 45606 - RNA, 19 nt, Artificial Sequence
  Description of Artificial Sequence: Synthetic oligonucleotide
  Sense strand starting at position 3312 of SEQ ID NO: 546
ugaagauuguaggcucaaa

SEQ ID NO: 45607 - RNA, 19 nt, Artificial Sequence
  Description of Artificial Sequence: Synthetic oligonucleotide
  Antisense strand to SEQ ID NO: 45526
uuugagccuacaaucuuca

SEQ ID NO: 45608 - RNA, 19 nt, Artificial Sequence
  Description of Artificial Sequence: Synthetic oligonucleotide
  Sense strand starting at position 3356 of SEQ ID NO: 546
augagagguuguuugcacu

SEQ ID NO: 45609 - RNA, 19 nt, Artificial Sequence
  Description of Artificial Sequence: Synthetic oligonucleotide
  Antisense strand to SEQ ID NO: 45528
agugcaaacaaccucucau

SEQ ID NO: 45610 - RNA, 19 nt, Artificial Sequence
  Description of Artificial Sequence: Synthetic oligonucleotide
  Sense strand starting at position 3422 of SEQ ID NO: 546
cuaugagcuacugguaugu

SEQ ID NO: 45611 - RNA, 19 nt, Artificial Sequence
  Description of Artificial Sequence: Synthetic oligonucleotide
  Antisense strand to SEQ ID NO: 45530
acauaccaguagcucauag

SEQ ID NO: 45612 - RNA, 19 nt, Artificial Sequence
  Description of Artificial Sequence: Synthetic oligonucleotide
  Sense strand starting at position 3454 of SEQ ID NO: 546
ugaaaugcccuuuaagagu

SEQ ID NO: 45613 - RNA, 19 nt, Artificial Sequence
  Description of Artificial Sequence: Synthetic oligonucleotide
  Antisense strand to SEQ ID NO: 45532
acucuuaaagggcauuuca

SEQ ID NO: 45614 - RNA, 19 nt, Artificial Sequence
  Description of Artificial Sequence: Synthetic oligonucleotide
  Sense strand starting at position 3657 of SEQ ID NO: 546
agauuugucuuguauuaca

SEQ ID NO: 45615 - RNA, 19 nt, Artificial Sequence
  Description of Artificial Sequence: Synthetic oligonucleotide
  Antisense strand to SEQ ID NO: 45534
uguaauacaagacaaaucu

SEQ ID NO: 45616 - RNA, 19 nt, Artificial Sequence
  Description of Artificial Sequence: Synthetic oligonucleotide
  Sense strand starting at position 3667 of SEQ ID NO: 546
uguauuacaucucuagaag

SEQ ID NO: 45617 - RNA, 19 nt, Artificial Sequence
  Description of Artificial Sequence: Synthetic oligonucleotide
  Antisense strand to SEQ ID NO: 45536
cuucuagagauguaauaca

SEQ ID NO: 45618 - RNA, 19 nt, Artificial Sequence
  Description of Artificial Sequence: Synthetic oligonucleotide
  Sense strand starting at position 3668 of SEQ ID NO: 546
guauuacaucucuagaagc

SEQ ID NO: 45619 - RNA, 19 nt, Artificial Sequence
  Description of Artificial Sequence: Synthetic oligonucleotide
  Antisense strand to SEQ ID NO: 45538
gcuucuagagauguaauac

SEQ ID NO: 45620 - RNA, 19 nt, Artificial Sequence
  Description of Artificial Sequence: Synthetic oligonucleotide
  Sense strand starting at position 3753 of SEQ ID NO: 546
ucugucugacucuguuaaa

SEQ ID NO: 45621 - RNA, 19 nt, Artificial Sequence
  Description of Artificial Sequence: Synthetic oligonucleotide
  Antisense strand to SEQ ID NO: 45540
uuuaacagagucagacaga

SEQ ID NO: 45622 - RNA, 19 nt, Artificial Sequence
  Description of Artificial Sequence: Synthetic oligonucleotide
  Sense strand starting at position 3754 of SEQ ID NO: 546
cugucugacucuguuaaag

SEQ ID NO: 45623 - RNA, 19 nt, Artificial Sequence
  Description of Artificial Sequence: Synthetic oligonucleotide
  Antisense strand to SEQ ID NO: 45542
cuuuaacagagucagacag

SEQ ID NO: 45624 - RNA, 19 nt, Artificial Sequence
  Description of Artificial Sequence: Synthetic oligonucleotide
  Sense strand starting at position 3768 of SEQ ID NO: 546
uaaagagggcuuugcuuua

SEQ ID NO: 45625 - RNA, 19 nt, Artificial Sequence
  Description of Artificial Sequence: Synthetic oligonucleotide
  Antisense strand to SEQ ID NO: 45544
uaaagcaaagcccucuuua

SEQ ID NO: 45626 - RNA, 19 nt, Artificial Sequence
  Description of Artificial Sequence: Synthetic oligonucleotide
  Sense strand starting at position 3781 of SEQ ID NO: 546
gcuuuagaagcuuaaccau

SEQ ID NO: 45627 - RNA, 19 nt, Artificial Sequence
  Description of Artificial Sequence: Synthetic oligonucleotide
  Antisense strand to SEQ ID NO: 45546
augguuaagcuucuaaagc

SEQ ID NO: 45628 - RNA, 19 nt, Artificial Sequence
  Description of Artificial Sequence: Synthetic oligonucleotide
  Sense strand starting at position 3860 of SEQ ID NO: 546
aagaguguuguguaggaga

SEQ ID NO: 45629 - RNA, 19 nt, Artificial Sequence
  Description of Artificial Sequence: Synthetic oligonucleotide
  Antisense strand to SEQ ID NO: 45548
ucuccuacacaacacucuu

SEQ ID NO: 45630 - RNA, 19 nt, Artificial Sequence
  Description of Artificial Sequence: Synthetic oligonucleotide
  Sense strand starting at position 3862 of SEQ ID NO: 546
gaguguuguguaggagaaa

SEQ ID NO: 45631 - RNA, 19 nt, Artificial Sequence
  Description of Artificial Sequence: Synthetic oligonucleotide
  Antisense strand to SEQ ID NO: 45550
uuucuccuacacaacacuc

SEQ ID NO: 45632 - RNA, 19 nt, Artificial Sequence
  Description of Artificial Sequence: Synthetic oligonucleotide
  Sense strand starting at position 3883 of SEQ ID NO: 546
guggaaauuacugguuaau

SEQ ID NO: 45633 - RNA, 19 nt, Artificial Sequence
  Description of Artificial Sequence: Synthetic oligonucleotide
  Antisense strand to SEQ ID NO: 45552
auuaaccaguaauuuccac

SEQ ID NO: 45634 - RNA, 19 nt, Artificial Sequence
  Description of Artificial Sequence: Synthetic oligonucleotide
  Sense strand starting at position 3885 of SEQ ID NO: 546
ggaaauuacugguuaauca

SEQ ID NO: 45635 - RNA, 19 nt, Artificial Sequence
  Description of Artificial Sequence: Synthetic oligonucleotide
  Antisense strand to SEQ ID NO: 45554
ugauuaaccaguaauuucc

SEQ ID NO: 45636 - RNA, 19 nt, Artificial Sequence
  Description of Artificial Sequence: Synthetic oligonucleotide
  Sense strand starting at position 3889 of SEQ ID NO: 546
auuacugguuaaucagaau

SEQ ID NO: 45637 - RNA, 19 nt, Artificial Sequence
  Description of Artificial Sequence: Synthetic oligonucleotide
  Antisense strand to SEQ ID NO: 45556
auucugauuaaccaguaau

SEQ ID NO: 45638 - RNA, 19 nt, Artificial Sequence
  Description of Artificial Sequence: Synthetic oligonucleotide
  Sense strand starting at position 3956 of SEQ ID NO: 546
acugaucuuuaggaaacaa

SEQ ID NO: 45639 - RNA, 19 nt, Artificial Sequence
  Description of Artificial Sequence: Synthetic oligonucleotide
  Antisense strand to SEQ ID NO: 45558
uuguuuccuaaagaucagu

SEQ ID NO: 45640 - RNA, 19 nt, Artificial Sequence
  Description of Artificial Sequence: Synthetic oligonucleotide
  Sense strand starting at position 3964 of SEQ ID NO: 547
uugguuugccuccaaucaa

SEQ ID NO: 45641 - RNA, 19 nt, Artificial Sequence
  Description of Artificial Sequence: Synthetic oligonucleotide
  Antisense strand to SEQ ID NO: 45560
uugauuggaggcaaaccaa

SEQ ID NO: 45642 - RNA, 19 nt, Artificial Sequence
  Description of Artificial Sequence: Synthetic oligonucleotide
  Sense strand starting at position 3905 of SEQ ID NO: 547
aaugucaggcuugaggauu

SEQ ID NO: 45643 - RNA, 19 nt, Artificial Sequence
  Description of Artificial Sequence: Synthetic oligonucleotide
  Antisense strand to SEQ ID NO: 45562
aauccucaagccugacauu

SEQ ID NO: 45644 - RNA, 19 nt, Artificial Sequence
  Description of Artificial Sequence: Synthetic oligonucleotide
  Sense strand starting at position 3904 of SEQ ID NO: 547
uaaugucaggcuugaggau

SEQ ID NO: 45645 - RNA, 19 nt, Artificial Sequence
  Description of Artificial Sequence: Synthetic oligonucleotide
  Antisense strand to SEQ ID NO: 45564
auccucaagccugacauua

SEQ ID NO: 45646 - RNA, 19 nt, Artificial Sequence
  Description of Artificial Sequence: Synthetic oligonucleotide
  Sense strand starting at position 3856 of SEQ ID NO: 547
ccacaaagucccuggagua

SEQ ID NO: 45647 - RNA, 19 nt, Artificial Sequence
  Description of Artificial Sequence: Synthetic oligonucleotide
  Antisense strand to SEQ ID NO: 45566
uacuccagggacuuugugg

SEQ ID NO: 45648 - RNA, 19 nt, Artificial Sequence
  Description of Artificial Sequence: Synthetic oligonucleotide
  Sense strand starting at position 3783 of SEQ ID NO: 547
aaugaaguccacuaguagu

SEQ ID NO: 45649 - RNA, 19 nt, Artificial Sequence
  Description of Artificial Sequence: Synthetic oligonucleotide
  Antisense strand to SEQ ID NO: 45568
acuacuaguggacuucauu

SEQ ID NO: 45650 - RNA, 19 nt, Artificial Sequence
  Description of Artificial Sequence: Synthetic oligonucleotide
  Sense strand starting at position 3691 of SEQ ID NO: 547
augaauaguguugagcuuu

SEQ ID NO: 45651 - RNA, 19 nt, Artificial Sequence
  Description of Artificial Sequence: Synthetic oligonucleotide
  Antisense strand to SEQ ID NO: 45570
aaagcucaacacuauucau

SEQ ID NO: 45652 - RNA, 19 nt, Artificial Sequence
  Description of Artificial Sequence: Synthetic oligonucleotide
  Sense strand starting at position 3606 of SEQ ID NO: 547
uugauuaugucuuccacuc

SEQ ID NO: 45653 - RNA, 19 nt, Artificial Sequence
  Description of Artificial Sequence: Synthetic oligonucleotide
  Antisense strand to SEQ ID NO: 45572
gaguggaagacauaaucaa

SEQ ID NO: 45654 - RNA, 19 nt, Artificial Sequence
  Description of Artificial Sequence: Synthetic oligonucleotide
  Sense strand starting at position 3594 of SEQ ID NO: 547
ggcacuuucuaauugauua

SEQ ID NO: 45655 - RNA, 19 nt, Artificial Sequence
  Description of Artificial Sequence: Synthetic oligonucleotide
  Antisense strand to SEQ ID NO: 45574
uaaucaauuagaaagugcc

SEQ ID NO: 45656 - RNA, 19 nt, Artificial Sequence
  Description of Artificial Sequence: Synthetic oligonucleotide
  Sense strand starting at position 3379 of SEQ ID NO: 547
cguuaucugccugccuaga

SEQ ID NO: 45657 - RNA, 19 nt, Artificial Sequence
  Description of Artificial Sequence: Synthetic oligonucleotide
  Antisense strand to SEQ ID NO: 45576
ucuaggcaggcagauaacg

SEQ ID NO: 45658 - RNA, 19 nt, Artificial Sequence
  Description of Artificial Sequence: Synthetic oligonucleotide
  Sense strand starting at position 3030 of SEQ ID NO: 547
gcaagaauucuaggcucac

SEQ ID NO: 45659 - RNA, 19 nt, Artificial Sequence
  Description of Artificial Sequence: Synthetic oligonucleotide
  Antisense strand to SEQ ID NO: 45578
gugagccuagaauucuugc

SEQ ID NO: 45660 - RNA, 19 nt, Artificial Sequence
  Description of Artificial Sequence: Synthetic oligonucleotide
  Sense strand starting at position 2991 of SEQ ID NO: 547
gggcauuagcucuacugaa

SEQ ID NO: 45661 - RNA, 19 nt, Artificial Sequence
  Description of Artificial Sequence: Synthetic oligonucleotide
  Antisense strand to SEQ ID NO: 45580
uucaguagagcuaaugccc

SEQ ID NO: 45662 - RNA, 19 nt, Artificial Sequence
  Description of Artificial Sequence: Synthetic oligonucleotide
  Sense strand starting at position 2459 of SEQ ID NO: 547
uacagacgcgcagaauauu

SEQ ID NO: 45663 - RNA, 19 nt, Artificial Sequence
  Description of Artificial Sequence: Synthetic oligonucleotide
  Antisense strand to SEQ ID NO: 45582
aauauucugcgcgucugua

SEQ ID NO: 45664 - RNA, 19 nt, Artificial Sequence
  Description of Artificial Sequence: Synthetic oligonucleotide
  Sense strand starting at position 2419 of SEQ ID NO: 547
uuuaaucgucugggaagga

SEQ ID NO: 45665 - RNA, 19 nt, Artificial Sequence
  Description of Artificial Sequence: Synthetic oligonucleotide
  Antisense strand to SEQ ID NO: 45584
uccuucccagacgauuaaa

SEQ ID NO: 45666 - RNA, 19 nt, Artificial Sequence
  Description of Artificial Sequence: Synthetic oligonucleotide
  Sense strand starting at position 2388 of SEQ ID NO: 547
cucguuaccguuucguauu

SEQ ID NO: 45667 - RNA, 19 nt, Artificial Sequence
  Description of Artificial Sequence: Synthetic oligonucleotide
  Antisense strand to SEQ ID NO: 45586
aauacgaaacgguaacgag

SEQ ID NO: 45668 - RNA, 19 nt, Artificial Sequence
  Description of Artificial Sequence: Synthetic oligonucleotide
  Sense strand starting at position 2387 of SEQ ID NO: 547
ucucguuaccguuucguau

SEQ ID NO: 45669 - RNA, 19 nt, Artificial Sequence
  Description of Artificial Sequence: Synthetic oligonucleotide
  Antisense strand to SEQ ID NO: 45588
auacgaaacgguaacgaga

SEQ ID NO: 45670 - RNA, 19 nt, Artificial Sequence
  Description of Artificial Sequence: Synthetic oligonucleotide
  Sense strand starting at position 2363 of SEQ ID NO: 547
acuggugcauacucuuaaa

SEQ ID NO: 45671 - RNA, 19 nt, Artificial Sequence
  Description of Artificial Sequence: Synthetic oligonucleotide
  Antisense strand to SEQ ID NO: 45590
uuuaagaguaugcaccagu

SEQ ID NO: 45672 - RNA, 19 nt, Artificial Sequence
  Description of Artificial Sequence: Synthetic oligonucleotide
  Sense strand starting at position 1811 of SEQ ID NO: 547
ugauuauucccucagucgu

SEQ ID NO: 45673 - RNA, 19 nt, Artificial Sequence
  Description of Artificial Sequence: Synthetic oligonucleotide
  Antisense strand to SEQ ID NO: 45592
acgacugagggaauaauca

SEQ ID NO: 45674 - RNA, 19 nt, Artificial Sequence
  Description of Artificial Sequence: Synthetic oligonucleotide
  Sense strand starting at position 1809 of SEQ ID NO: 547
ccugauuauucccucaguc

SEQ ID NO: 45675 - RNA, 19 nt, Artificial Sequence
  Description of Artificial Sequence: Synthetic oligonucleotide
  Antisense strand to SEQ ID NO: 45594
gacugagggaauaaucagg

SEQ ID NO: 45676 - RNA, 19 nt, Artificial Sequence
  Description of Artificial Sequence: Synthetic oligonucleotide
  Sense strand starting at position 1808 of SEQ ID NO: 547
uccugauuauucccucagu

SEQ ID NO: 45677 - RNA, 19 nt, Artificial Sequence
  Description of Artificial Sequence: Synthetic oligonucleotide
  Antisense strand to SEQ ID NO: 45596
acugagggaauaaucagga

SEQ ID NO: 45678 - RNA, 19 nt, Artificial Sequence
  Description of Artificial Sequence: Synthetic oligonucleotide
  Sense strand starting at position 1771 of SEQ ID NO: 547
aguuaucgcacgccuagua

SEQ ID NO: 45679 - RNA, 19 nt, Artificial Sequence
  Description of Artificial Sequence: Synthetic oligonucleotide
  Antisense strand to SEQ ID NO: 45598
uacuaggcgugcgauaacu

SEQ ID NO: 45680 - RNA, 19 nt, Artificial Sequence
  Description of Artificial Sequence: Synthetic oligonucleotide
  Sense strand starting at position 1770 of SEQ ID NO: 547
caguuaucgcacgccuagu

SEQ ID NO: 45681 - RNA, 19 nt, Artificial Sequence
  Description of Artificial Sequence: Synthetic oligonucleotide
  Antisense strand to SEQ ID NO: 45600
acuaggcgugcgauaacug

SEQ ID NO: 45682 - RNA, 19 nt, Artificial Sequence
  Description of Artificial Sequence: Synthetic oligonucleotide
  Sense strand starting at position 1659 of SEQ ID NO: 547
gucgguuuccugccacauc

SEQ ID NO: 45683 - RNA, 19 nt, Artificial Sequence
  Description of Artificial Sequence: Synthetic oligonucleotide
  Antisense strand to SEQ ID NO: 45602
gauguggcaggaaaccgac

SEQ ID NO: 45684 - RNA, 19 nt, Artificial Sequence
  Description of Artificial Sequence: Synthetic oligonucleotide
  Sense strand starting at position 1633 of SEQ ID NO: 547
ugcacugacuucuucugaa

SEQ ID NO: 45685 - RNA, 19 nt, Artificial Sequence
  Description of Artificial Sequence: Synthetic oligonucleotide
  Antisense strand to SEQ ID NO: 45604
uucagaagaagucagugca

SEQ ID NO: 45686 - RNA, 19 nt, Artificial Sequence
  Description of Artificial Sequence: Synthetic oligonucleotide
  Sense strand starting at position 1509 of SEQ ID NO: 547
ggucuaagccuauaaucuu

SEQ ID NO: 45687 - RNA, 19 nt, Artificial Sequence
  Description of Artificial Sequence: Synthetic oligonucleotide
  Antisense strand to SEQ ID NO: 45606
aagauuauaggcuuagacc

SEQ ID NO: 45688 - RNA, 19 nt, Artificial Sequence
  Description of Artificial Sequence: Synthetic oligonucleotide
  Sense strand starting at position 1477 of SEQ ID NO: 547
gagagcagccagcauuaga

SEQ ID NO: 45689 - RNA, 19 nt, Artificial Sequence
  Description of Artificial Sequence: Synthetic oligonucleotide
  Antisense strand to SEQ ID NO: 45608
ucuaaugcuggcugcucuc

SEQ ID NO: 45690 - RNA, 19 nt, Artificial Sequence
  Description of Artificial Sequence: Synthetic oligonucleotide
  Sense strand starting at position 1433 of SEQ ID NO: 547
ugcgaagagcuauaacuga

SEQ ID NO: 45691 - RNA, 19 nt, Artificial Sequence
  Description of Artificial Sequence: Synthetic oligonucleotide
  Antisense strand to SEQ ID NO: 45610
ucaguuauagcucuucgca

SEQ ID NO: 45692 - RNA, 19 nt, Artificial Sequence
  Description of Artificial Sequence: Synthetic oligonucleotide
  Sense strand starting at position 1427 of SEQ ID NO: 547
aagguuugcgaagagcuau

SEQ ID NO: 45693 - RNA, 19 nt, Artificial Sequence
  Description of Artificial Sequence: Synthetic oligonucleotide
  Antisense strand to SEQ ID NO: 45612
auagcucuucgcaaaccuu

SEQ ID NO: 45694 - RNA, 19 nt, Artificial Sequence
  Description of Artificial Sequence: Synthetic oligonucleotide
  Sense strand starting at position 1384 of SEQ ID NO: 547
ccagguaaucuuggauaaa

SEQ ID NO: 45695 - RNA, 19 nt, Artificial Sequence
  Description of Artificial Sequence: Synthetic oligonucleotide
  Antisense strand to SEQ ID NO: 45614
uuuauccaagauuaccugg

SEQ ID NO: 45696 - RNA, 19 nt, Artificial Sequence
  Description of Artificial Sequence: Synthetic oligonucleotide
  Sense strand starting at position 1134 of SEQ ID NO: 547
uucuaagacucuuugguuu

SEQ ID NO: 45697 - RNA, 19 nt, Artificial Sequence
  Description of Artificial Sequence: Synthetic oligonucleotide
  Antisense strand to SEQ ID NO: 45616
aaaccaaagagucuuagaa

SEQ ID NO: 45698 - RNA, 19 nt, Artificial Sequence
  Description of Artificial Sequence: Synthetic oligonucleotide
  Sense strand starting at position 1111 of SEQ ID NO: 547
aaauguagaccuggaaguu

SEQ ID NO: 45699 - RNA, 19 nt, Artificial Sequence
  Description of Artificial Sequence: Synthetic oligonucleotide
  Antisense strand to SEQ ID NO: 45618
aacuuccaggucuacauuu

SEQ ID NO: 45700 - RNA, 19 nt, Artificial Sequence
  Description of Artificial Sequence: Synthetic oligonucleotide
  Sense strand starting at position 987 of SEQ ID NO: 547
aucaauguuccagggaaac

SEQ ID NO: 45701 - RNA, 19 nt, Artificial Sequence
  Description of Artificial Sequence: Synthetic oligonucleotide
  Antisense strand to SEQ ID NO: 45620
guuucccuggaacauugau

SEQ ID NO: 45702 - RNA, 19 nt, Artificial Sequence
  Description of Artificial Sequence: Synthetic oligonucleotide
  Sense strand starting at position 610 of SEQ ID NO: 547
gacagagucuuguucugaa

SEQ ID NO: 45703 - RNA, 19 nt, Artificial Sequence
  Description of Artificial Sequence: Synthetic oligonucleotide
  Antisense strand to SEQ ID NO: 45622
uucagaacaagacucuguc

SEQ ID NO: 45704 - RNA, 19 nt, Artificial Sequence
  Description of Artificial Sequence: Synthetic oligonucleotide
  Sense strand starting at position 456 of SEQ ID NO: 547
gcagaugaagguugcagua

SEQ ID NO: 45705 - RNA, 19 nt, Artificial Sequence
  Description of Artificial Sequence: Synthetic oligonucleotide
  Antisense strand to SEQ ID NO: 45624
uacugcaaccuucaucugc

SEQ ID NO: 45706 - RNA, 19 nt, Artificial Sequence
  Description of Artificial Sequence: Synthetic oligonucleotide
  Sense strand starting at position 214 of SEQ ID NO: 547
gucacaugauuacuaaaug

SEQ ID NO: 45707 - RNA, 19 nt, Artificial Sequence
  Description of Artificial Sequence: Synthetic oligonucleotide
  Antisense strand to SEQ ID NO: 45626
cauuuaguaaucaugugac

SEQ ID NO: 45708 - RNA, 19 nt, Artificial Sequence
  Description of Artificial Sequence: Synthetic oligonucleotide
  Sense strand starting at position 204 of SEQ ID NO: 547
aguuguuaaagucacauga

SEQ ID NO: 45709 - RNA, 19 nt, Artificial Sequence
  Description of Artificial Sequence: Synthetic oligonucleotide
  Antisense strand to SEQ ID NO: 45628
ucaugugacuuuaacaacu

SEQ ID NO: 45710 - RNA, 19 nt, Artificial Sequence
  Description of Artificial Sequence: Synthetic oligonucleotide
  Sense strand starting at position 191 of SEQ ID NO: 547
augauaauucuacaguugu

SEQ ID NO: 45711 - RNA, 19 nt, Artificial Sequence
  Description of Artificial Sequence: Synthetic oligonucleotide
  Antisense strand to SEQ ID NO: 45630
acaacuguagaauuaucau

SEQ ID NO: 45712 - RNA, 19 nt, Artificial Sequence
  Description of Artificial Sequence: Synthetic oligonucleotide
  Sense strand starting at position 144 of SEQ ID NO: 547
gcuagacauuaugcuaacu

SEQ ID NO: 45713 - RNA, 19 nt, Artificial Sequence
  Description of Artificial Sequence: Synthetic oligonucleotide
  Antisense strand to SEQ ID NO: 45632
aguuagcauaaugucuagc

SEQ ID NO: 45714 - RNA, 19 nt, Artificial Sequence
  Description of Artificial Sequence: Synthetic oligonucleotide
  Sense strand starting at position 141 of SEQ ID NO: 547
acugcuagacauuaugcua

SEQ ID NO: 45715 - RNA, 19 nt, Artificial Sequence
  Description of Artificial Sequence: Synthetic oligonucleotide
  Antisense strand to SEQ ID NO: 45634
uagcauaaugucuagcagu

SEQ ID NO: 45716 - RNA, 19 nt, Artificial Sequence
  Description of Artificial Sequence: Synthetic oligonucleotide
  Sense strand starting at position 33 of SEQ ID NO: 547
gauauaauauugcugugau

SEQ ID NO: 45717 - RNA, 19 nt, Artificial Sequence
  Description of Artificial Sequence: Synthetic oligonucleotide
  Antisense strand to SEQ ID NO: 45636
aucacagcaauauuauauc

SEQ ID NO: 45718 - RNA, 19 nt, Artificial Sequence
  Description of Artificial Sequence: Synthetic oligonucleotide
  Sense strand starting at position 21 of SEQ ID NO: 547
cugucuuaggcagauauaa

SEQ ID NO: 45719 - RNA, 19 nt, Artificial Sequence
  Description of Artificial Sequence: Synthetic oligonucleotide
  Antisense strand to SEQ ID NO: 45638
uuauaucugccuaagacag

SEQ ID NO: 45720 - RNA, 19 nt, Artificial Sequence
  Description of Artificial Sequence: Synthetic oligonucleotide
  Sense strand starting at position 64 of SEQ ID NO: 548
ugagaacaacucugacuuc

SEQ ID NO: 45721 - RNA, 19 nt, Artificial Sequence
  Description of Artificial Sequence: Synthetic oligonucleotide
  Antisense strand to SEQ ID NO: 45640
gaagucagaguuguucuca

SEQ ID NO: 45722 - RNA, 19 nt, Artificial Sequence
  Description of Artificial Sequence: Synthetic oligonucleotide
  Sense strand starting at position 83 of SEQ ID NO: 548
cccuuauucguugugucca

SEQ ID NO: 45723 - RNA, 19 nt, Artificial Sequence
  Description of Artificial Sequence: Synthetic oligonucleotide
  Antisense strand to SEQ ID NO: 45642
uggacacaacgaauaaggg

SEQ ID NO: 45724 - RNA, 19 nt, Artificial Sequence
  Description of Artificial Sequence: Synthetic oligonucleotide
  Sense strand starting at position 91 of SEQ ID NO: 548
cguuguguccaaggguuaa

SEQ ID NO: 45725 - RNA, 19 nt, Artificial Sequence
  Description of Artificial Sequence: Synthetic oligonucleotide
  Antisense strand to SEQ ID NO: 45644
uuaacccuuggacacaacg

SEQ ID NO: 45726 - RNA, 19 nt, Artificial Sequence
  Description of Artificial Sequence: Synthetic oligonucleotide
  Sense strand starting at position 255 of SEQ ID NO: 548
aucggcuuuggcugauagu

SEQ ID NO: 45727 - RNA, 19 nt, Artificial Sequence
  Description of Artificial Sequence: Synthetic oligonucleotide
  Antisense strand to SEQ ID NO: 45646
acuaucagccaaagccgau

SEQ ID NO: 45728 - RNA, 19 nt, Artificial Sequence
  Description of Artificial Sequence: Synthetic oligonucleotide
  Sense strand starting at position 256 of SEQ ID NO: 548
ucggcuuuggcugauaguu

SEQ ID NO: 45729 - RNA, 19 nt, Artificial Sequence
  Description of Artificial Sequence: Synthetic oligonucleotide
  Antisense strand to SEQ ID NO: 45648
aacuaucagccaaagccga

SEQ ID NO: 45730 - RNA, 19 nt, Artificial Sequence
  Description of Artificial Sequence: Synthetic oligonucleotide
  Sense strand starting at position 319 of SEQ ID NO: 548
uguaaaucucagggcagua

SEQ ID NO: 45731 - RNA, 19 nt, Artificial Sequence
  Description of Artificial Sequence: Synthetic oligonucleotide
  Antisense strand to SEQ ID NO: 45650
uacugcccugagauuuaca

SEQ ID NO: 45732 - RNA, 19 nt, Artificial Sequence
  Description of Artificial Sequence: Synthetic oligonucleotide
  Sense strand starting at position 883 of SEQ ID NO: 548
gccagacuacugcauacaa

SEQ ID NO: 45733 - RNA, 19 nt, Artificial Sequence
  Description of Artificial Sequence: Synthetic oligonucleotide
  Antisense strand to SEQ ID NO: 45652
uuguaugcaguagucuggc

SEQ ID NO: 45734 - RNA, 19 nt, Artificial Sequence
  Description of Artificial Sequence: Synthetic oligonucleotide
  Sense strand starting at position 1141 of SEQ ID NO: 548
gggaaauggugggucucuu

SEQ ID NO: 45735 - RNA, 19 nt, Artificial Sequence
  Description of Artificial Sequence: Synthetic oligonucleotide
  Antisense strand to SEQ ID NO: 45654
aagagacccaccauuuccc

SEQ ID NO: 45736 - RNA, 19 nt, Artificial Sequence
  Description of Artificial Sequence: Synthetic oligonucleotide
  Sense strand starting at position 1245 of SEQ ID NO: 548
guccggugcccgggaaauu

SEQ ID NO: 45737 - RNA, 19 nt, Artificial Sequence
  Description of Artificial Sequence: Synthetic oligonucleotide
  Antisense strand to SEQ ID NO: 45656
aauuucccgggcaccggac

SEQ ID NO: 45738 - RNA, 19 nt, Artificial Sequence
  Description of Artificial Sequence: Synthetic oligonucleotide
  Sense strand starting at position 1246 of SEQ ID NO: 548
uccggugcccgggaaauuu

SEQ ID NO: 45739 - RNA, 19 nt, Artificial Sequence
  Description of Artificial Sequence: Synthetic oligonucleotide
  Antisense strand to SEQ ID NO: 45658
aaauuucccgggcaccgga

SEQ ID NO: 45740 - RNA, 19 nt, Artificial Sequence
  Description of Artificial Sequence: Synthetic oligonucleotide
  Sense strand starting at position 1560 of SEQ ID NO: 548
ccagauagaucaucuguag

SEQ ID NO: 45741 - RNA, 19 nt, Artificial Sequence
  Description of Artificial Sequence: Synthetic oligonucleotide
  Antisense strand to SEQ ID NO: 45660
cuacagaugaucuaucugg

SEQ ID NO: 45742 - RNA, 19 nt, Artificial Sequence
  Description of Artificial Sequence: Synthetic oligonucleotide
  Sense strand starting at position 1735 of SEQ ID NO: 548
cuggccacucuugaaauca

SEQ ID NO: 45743 - RNA, 19 nt, Artificial Sequence
  Description of Artificial Sequence: Synthetic oligonucleotide
  Antisense strand to SEQ ID NO: 45662
ugauuucaagaguggccag

SEQ ID NO: 45744 - RNA, 19 nt, Artificial Sequence
  Description of Artificial Sequence: Synthetic oligonucleotide
  Sense strand starting at position 1885 of SEQ ID NO: 548
gguggaaaguucuaacaag

SEQ ID NO: 45745 - RNA, 19 nt, Artificial Sequence
  Description of Artificial Sequence: Synthetic oligonucleotide
  Antisense strand to SEQ ID NO: 45664
cuuguuagaacuuuccacc

SEQ ID NO: 45746 - RNA, 19 nt, Artificial Sequence
  Description of Artificial Sequence: Synthetic oligonucleotide
  Sense strand starting at position 1936 of SEQ ID NO: 548
ggaauucucagguaauguu

SEQ ID NO: 45747 - RNA, 19 nt, Artificial Sequence
  Description of Artificial Sequence: Synthetic oligonucleotide
  Antisense strand to SEQ ID NO: 45666
aacauuaccugagaauucc

SEQ ID NO: 45748 - RNA, 19 nt, Artificial Sequence
  Description of Artificial Sequence: Synthetic oligonucleotide
  Sense strand starting at position 1950 of SEQ ID NO: 548
auguuuacagacugacaga

SEQ ID NO: 45749 - RNA, 19 nt, Artificial Sequence
  Description of Artificial Sequence: Synthetic oligonucleotide
  Antisense strand to SEQ ID NO: 45668
ucugucagucuguaaacau

SEQ ID NO: 45750 - RNA, 19 nt, Artificial Sequence
  Description of Artificial Sequence: Synthetic oligonucleotide
  Sense strand starting at position 2185 of SEQ ID NO: 548
ccgcgaaagucucccgacu

SEQ ID NO: 45751 - RNA, 19 nt, Artificial Sequence
  Description of Artificial Sequence: Synthetic oligonucleotide
  Antisense strand to SEQ ID NO: 45670
agucgggagacuuucgcgg

SEQ ID NO: 45752 - RNA, 19 nt, Artificial Sequence
  Description of Artificial Sequence: Synthetic oligonucleotide
  Sense strand starting at position 2229 of SEQ ID NO: 548
uugcuuaaacgcgaucuga

SEQ ID NO: 45753 - RNA, 19 nt, Artificial Sequence
  Description of Artificial Sequence: Synthetic oligonucleotide
  Antisense strand to SEQ ID NO: 45672
ucagaucgcguuuaagcaa

SEQ ID NO: 45754 - RNA, 19 nt, Artificial Sequence
  Description of Artificial Sequence: Synthetic oligonucleotide
  Sense strand starting at position 2239 of SEQ ID NO: 548
gcgaucugauugccagcaa

SEQ ID NO: 45755 - RNA, 19 nt, Artificial Sequence
  Description of Artificial Sequence: Synthetic oligonucleotide
  Antisense strand to SEQ ID NO: 45674
uugcuggcaaucagaucgc

SEQ ID NO: 45756 - RNA, 19 nt, Artificial Sequence
  Description of Artificial Sequence: Synthetic oligonucleotide
  Sense strand starting at position 2283 of SEQ ID NO: 548
gugucaguuucuuuacgug

SEQ ID NO: 45757 - RNA, 19 nt, Artificial Sequence
  Description of Artificial Sequence: Synthetic oligonucleotide
  Antisense strand to SEQ ID NO: 45676
cacguaaagaaacugacac

SEQ ID NO: 45758 - RNA, 19 nt, Artificial Sequence
  Description of Artificial Sequence: Synthetic oligonucleotide
  Sense strand starting at position 2368 of SEQ ID NO: 548
cugggaguugccgcucgau

SEQ ID NO: 45759 - RNA, 19 nt, Artificial Sequence
  Description of Artificial Sequence: Synthetic oligonucleotide
  Antisense strand to SEQ ID NO: 45678
aucgagcggcaacucccag

SEQ ID NO: 45760 - RNA, 19 nt, Artificial Sequence
  Description of Artificial Sequence: Synthetic oligonucleotide
  Sense strand starting at position 2571 of SEQ ID NO: 548
cccauuaagucugauugac

SEQ ID NO: 45761 - RNA, 19 nt, Artificial Sequence
  Description of Artificial Sequence: Synthetic oligonucleotide
  Antisense strand to SEQ ID NO: 45680
gucaaucagacuuaauggg

SEQ ID NO: 45762 - RNA, 19 nt, Artificial Sequence
  Description of Artificial Sequence: Synthetic oligonucleotide
  Sense strand starting at position 2573 of SEQ ID NO: 548
cauuaagucugauugacag

SEQ ID NO: 45763 - RNA, 19 nt, Artificial Sequence
  Description of Artificial Sequence: Synthetic oligonucleotide
  Antisense strand to SEQ ID NO: 45682
cugucaaucagacuuaaug

SEQ ID NO: 45764 - RNA, 19 nt, Artificial Sequence
  Description of Artificial Sequence: Synthetic oligonucleotide
  Sense strand starting at position 2577 of SEQ ID NO: 548
aagucugauugacaguuaa

SEQ ID NO: 45765 - RNA, 19 nt, Artificial Sequence
  Description of Artificial Sequence: Synthetic oligonucleotide
  Antisense strand to SEQ ID NO: 45684
uuaacugucaaucagacuu

SEQ ID NO: 45766 - RNA, 19 nt, Artificial Sequence
  Description of Artificial Sequence: Synthetic oligonucleotide
  Sense strand starting at position 2901 of SEQ ID NO: 548
uugcguaugccuugaucca

SEQ ID NO: 45767 - RNA, 19 nt, Artificial Sequence
  Description of Artificial Sequence: Synthetic oligonucleotide
  Antisense strand to SEQ ID NO: 45686
uggaucaaggcauacgcaa

SEQ ID NO: 45768 - RNA, 19 nt, Artificial Sequence
  Description of Artificial Sequence: Synthetic oligonucleotide
  Sense strand starting at position 2902 of SEQ ID NO: 548
ugcguaugccuugauccaa

SEQ ID NO: 45769 - RNA, 19 nt, Artificial Sequence
  Description of Artificial Sequence: Synthetic oligonucleotide
  Antisense strand to SEQ ID NO: 45688
uuggaucaaggcauacgca

SEQ ID NO: 45770 - RNA, 19 nt, Artificial Sequence
  Description of Artificial Sequence: Synthetic oligonucleotide
  Sense strand starting at position 3112 of SEQ ID NO: 548
gggaguagucaagguaaag

SEQ ID NO: 45771 - RNA, 19 nt, Artificial Sequence
  Description of Artificial Sequence: Synthetic oligonucleotide
  Antisense strand to SEQ ID NO: 45690
cuuuaccuugacuacuccc

SEQ ID NO: 45772 - RNA, 19 nt, Artificial Sequence
  Description of Artificial Sequence: Synthetic oligonucleotide
  Sense strand starting at position 3164 of SEQ ID NO: 548
caagauuagcugggagcau

SEQ ID NO: 45773 - RNA, 19 nt, Artificial Sequence
  Description of Artificial Sequence: Synthetic oligonucleotide
  Antisense strand to SEQ ID NO: 45692
augcucccagcuaaucuug

SEQ ID NO: 45774 - RNA, 19 nt, Artificial Sequence
  Description of Artificial Sequence: Synthetic oligonucleotide
  Sense strand starting at position 3165 of SEQ ID NO: 548
aagauuagcugggagcaua

SEQ ID NO: 45775 - RNA, 19 nt, Artificial Sequence
  Description of Artificial Sequence: Synthetic oligonucleotide
  Antisense strand to SEQ ID NO: 45694
uaugcucccagcuaaucuu

SEQ ID NO: 45776 - RNA, 19 nt, Artificial Sequence
  Description of Artificial Sequence: Synthetic oligonucleotide
  Sense strand starting at position 3188 of SEQ ID NO: 548
uugcucaucugagcuagaa

SEQ ID NO: 45777 - RNA, 19 nt, Artificial Sequence
  Description of Artificial Sequence: Synthetic oligonucleotide
  Antisense strand to SEQ ID NO: 45696
uucuagcucagaugagcaa

SEQ ID NO: 45778 - RNA, 19 nt, Artificial Sequence
  Description of Artificial Sequence: Synthetic oligonucleotide
  Sense strand starting at position 3201 of SEQ ID NO: 548
cuagaauuaccuugacuga

SEQ ID NO: 45779 - RNA, 19 nt, Artificial Sequence
  Description of Artificial Sequence: Synthetic oligonucleotide
  Antisense strand to SEQ ID NO: 45698
ucagucaagguaauucuag

SEQ ID NO: 45780 - RNA, 19 nt, Artificial Sequence
  Description of Artificial Sequence: Synthetic oligonucleotide
  Sense strand starting at position 3398 of SEQ ID NO: 548
gcuauuuagaguugucugu

SEQ ID NO: 45781 - RNA, 19 nt, Artificial Sequence
  Description of Artificial Sequence: Synthetic oligonucleotide
  Antisense strand to SEQ ID NO: 45700
acagacaacucuaaauagc

SEQ ID NO: 45782 - RNA, 19 nt, Artificial Sequence
  Description of Artificial Sequence: Synthetic oligonucleotide
  Sense strand starting at position 3400 of SEQ ID NO: 548
uauuuagaguugucuguug

SEQ ID NO: 45783 - RNA, 19 nt, Artificial Sequence
  Description of Artificial Sequence: Synthetic oligonucleotide
  Antisense strand to SEQ ID NO: 45702
caacagacaacucuaaaua

SEQ ID NO: 45784 - RNA, 19 nt, Artificial Sequence
  Description of Artificial Sequence: Synthetic oligonucleotide
  Sense strand starting at position 3402 of SEQ ID NO: 548
uuuagaguugucuguugca

SEQ ID NO: 45785 - RNA, 19 nt, Artificial Sequence
  Description of Artificial Sequence: Synthetic oligonucleotide
  Antisense strand to SEQ ID NO: 45704
ugcaacagacaacucuaaa

SEQ ID NO: 45786 - RNA, 19 nt, Artificial Sequence
  Description of Artificial Sequence: Synthetic oligonucleotide
  Sense strand starting at position 3458 of SEQ ID NO: 548
guucaaagugcugauggga

SEQ ID NO: 45787 - RNA, 19 nt, Artificial Sequence
  Description of Artificial Sequence: Synthetic oligonucleotide
  Antisense strand to SEQ ID NO: 45706
ucccaucagcacuuugaac

SEQ ID NO: 45788 - RNA, 19 nt, Artificial Sequence
  Description of Artificial Sequence: Synthetic oligonucleotide
  Sense strand starting at position 3573 of SEQ ID NO: 548
acuuguucagacggcgauu

SEQ ID NO: 45789 - RNA, 19 nt, Artificial Sequence
  Description of Artificial Sequence: Synthetic oligonucleotide
  Antisense strand to SEQ ID NO: 45708
aaucgccgucugaacaagu

SEQ ID NO: 45790 - RNA, 19 nt, Artificial Sequence
  Description of Artificial Sequence: Synthetic oligonucleotide
  Sense strand starting at position 3584 of SEQ ID NO: 548
cggcgauuccugggccuca

SEQ ID NO: 45791 - RNA, 19 nt, Artificial Sequence
  Description of Artificial Sequence: Synthetic oligonucleotide
  Antisense strand to SEQ ID NO: 45710
ugaggcccaggaaucgccg

SEQ ID NO: 45792 - RNA, 19 nt, Artificial Sequence
  Description of Artificial Sequence: Synthetic oligonucleotide
  Sense strand starting at position 3639 of SEQ ID NO: 548
ugggaucgguacuuucaau

SEQ ID NO: 45793 - RNA, 19 nt, Artificial Sequence
  Description of Artificial Sequence: Synthetic oligonucleotide
  Antisense strand to SEQ ID NO: 45712
auugaaaguaccgauccca

SEQ ID NO: 45794 - RNA, 19 nt, Artificial Sequence
  Description of Artificial Sequence: Synthetic oligonucleotide
  Sense strand starting at position 3668 of SEQ ID NO: 548
gugagaaagucacuucgaa

SEQ ID NO: 45795 - RNA, 19 nt, Artificial Sequence
  Description of Artificial Sequence: Synthetic oligonucleotide
  Antisense strand to SEQ ID NO: 45714
uucgaagugacuuucucac

SEQ ID NO: 45796 - RNA, 19 nt, Artificial Sequence
  Description of Artificial Sequence: Synthetic oligonucleotide
  Sense strand starting at position 3772 of SEQ ID NO: 548
aucuuccuucugggugaaa

SEQ ID NO: 45797 - RNA, 19 nt, Artificial Sequence
  Description of Artificial Sequence: Synthetic oligonucleotide
  Antisense strand to SEQ ID NO: 45716
uuucacccagaaggaagau

SEQ ID NO: 45798 - RNA, 19 nt, Artificial Sequence
  Description of Artificial Sequence: Synthetic oligonucleotide
  Sense strand starting at position 3850 of SEQ ID NO: 548
ggccuauauucugacacag

SEQ ID NO: 45799 - RNA, 19 nt, Artificial Sequence
  Description of Artificial Sequence: Synthetic oligonucleotide
  Antisense strand to SEQ ID NO: 45718
cugugucagaauauaggcc

SEQ ID NO: 45800 - RNA, 19 nt, Artificial Sequence
  Description of Artificial Sequence: Synthetic oligonucleotide
  Sense strand starting at position 3296 of SEQ ID NO: 549
ugugauuguucuccuuaau

SEQ ID NO: 45801 - RNA, 19 nt, Artificial Sequence
  Description of Artificial Sequence: Synthetic oligonucleotide
  Antisense strand to SEQ ID NO: 45720
auuaaggagaacaaucaca

SEQ ID NO: 45802 - RNA, 19 nt, Artificial Sequence
  Description of Artificial Sequence: Synthetic oligonucleotide
  Sense strand starting at position 3295 of SEQ ID NO: 549
augugauuguucuccuuaa

SEQ ID NO: 45803 - RNA, 19 nt, Artificial Sequence
  Description of Artificial Sequence: Synthetic oligonucleotide
  Antisense strand to SEQ ID NO: 45722
uuaaggagaacaaucacau

SEQ ID NO: 45804 - RNA, 19 nt, Artificial Sequence
  Description of Artificial Sequence: Synthetic oligonucleotide
  Sense strand starting at position 3293 of SEQ ID NO: 549
ucaugugauuguucuccuu

SEQ ID NO: 45805 - RNA, 19 nt, Artificial Sequence
  Description of Artificial Sequence: Synthetic oligonucleotide
  Antisense strand to SEQ ID NO: 45724
aaggagaacaaucacauga

SEQ ID NO: 45806 - RNA, 19 nt, Artificial Sequence
  Description of Artificial Sequence: Synthetic oligonucleotide
  Sense strand starting at position 3150 of SEQ ID NO: 549
ggcucauuauaucuaugga

SEQ ID NO: 45807 - RNA, 19 nt, Artificial Sequence
  Description of Artificial Sequence: Synthetic oligonucleotide
  Antisense strand to SEQ ID NO: 45726
uccauagauauaaugagcc

SEQ ID NO: 45808 - RNA, 19 nt, Artificial Sequence
  Description of Artificial Sequence: Synthetic oligonucleotide
  Sense strand starting at position 3142 of SEQ ID NO: 549
auuaucugggcucauuaua

SEQ ID NO: 45809 - RNA, 19 nt, Artificial Sequence
  Description of Artificial Sequence: Synthetic oligonucleotide
  Antisense strand to SEQ ID NO: 45728
uauaaugagcccagauaau

SEQ ID NO: 45810 - RNA, 19 nt, Artificial Sequence
  Description of Artificial Sequence: Synthetic oligonucleotide
  Sense strand starting at position 3139 of SEQ ID NO: 549
ucaauuaucugggcucauu

SEQ ID NO: 45811 - RNA, 19 nt, Artificial Sequence
  Description of Artificial Sequence: Synthetic oligonucleotide
  Antisense strand to SEQ ID NO: 45730
aaugagcccagauaauuga

SEQ ID NO: 45812 - RNA, 19 nt, Artificial Sequence
  Description of Artificial Sequence: Synthetic oligonucleotide
  Sense strand starting at position 3138 of SEQ ID NO: 549
aucaauuaucugggcucau

SEQ ID NO: 45813 - RNA, 19 nt, Artificial Sequence
  Description of Artificial Sequence: Synthetic oligonucleotide
  Antisense strand to SEQ ID NO: 45732
augagcccagauaauugau

SEQ ID NO: 45814 - RNA, 19 nt, Artificial Sequence
  Description of Artificial Sequence: Synthetic oligonucleotide
  Sense strand starting at position 3112 of SEQ ID NO: 549
gggauuguuccagggaauc

SEQ ID NO: 45815 - RNA, 19 nt, Artificial Sequence
  Description of Artificial Sequence: Synthetic oligonucleotide
  Antisense strand to SEQ ID NO: 45734
gauucccuggaacaauccc

SEQ ID NO: 45816 - RNA, 19 nt, Artificial Sequence
  Description of Artificial Sequence: Synthetic oligonucleotide
  Sense strand starting at position 3043 of SEQ ID NO: 549
acuagucacuguuaaauuu

SEQ ID NO: 45817 - RNA, 19 nt, Artificial Sequence
  Description of Artificial Sequence: Synthetic oligonucleotide
  Antisense strand to SEQ ID NO: 45736
aaauuuaacagugacuagu

SEQ ID NO: 45818 - RNA, 19 nt, Artificial Sequence
  Description of Artificial Sequence: Synthetic oligonucleotide
  Sense strand starting at position 3039 of SEQ ID NO: 549
uuauacuagucacuguuaa

SEQ ID NO: 45819 - RNA, 19 nt, Artificial Sequence
  Description of Artificial Sequence: Synthetic oligonucleotide
  Antisense strand to SEQ ID NO: 45738
uuaacagugacuaguauaa

SEQ ID NO: 45820 - RNA, 19 nt, Artificial Sequence
  Description of Artificial Sequence: Synthetic oligonucleotide
  Sense strand starting at position 3036 of SEQ ID NO: 549
uuauuauacuagucacugu

SEQ ID NO: 45821 - RNA, 19 nt, Artificial Sequence
  Description of Artificial Sequence: Synthetic oligonucleotide
  Antisense strand to SEQ ID NO: 45740
acagugacuaguauaauaa

SEQ ID NO: 45822 - RNA, 19 nt, Artificial Sequence
  Description of Artificial Sequence: Synthetic oligonucleotide
  Sense strand starting at position 3016 of SEQ ID NO: 549
uggaauaauuguguccuua

SEQ ID NO: 45823 - RNA, 19 nt, Artificial Sequence
  Description of Artificial Sequence: Synthetic oligonucleotide
  Antisense strand to SEQ ID NO: 45742
uaaggacacaauuauucca

SEQ ID NO: 45824 - RNA, 19 nt, Artificial Sequence
  Description of Artificial Sequence: Synthetic oligonucleotide
  Sense strand starting at position 3009 of SEQ ID NO: 549
aagucuuuggaauaauugu

SEQ ID NO: 45825 - RNA, 19 nt, Artificial Sequence
  Description of Artificial Sequence: Synthetic oligonucleotide
  Antisense strand to SEQ ID NO: 45744
acaauuauuccaaagacuu

SEQ ID NO: 45826 - RNA, 19 nt, Artificial Sequence
  Description of Artificial Sequence: Synthetic oligonucleotide
  Sense strand starting at position 3004 of SEQ ID NO: 549
guuccaagucuuuggaaua

SEQ ID NO: 45827 - RNA, 19 nt, Artificial Sequence
  Description of Artificial Sequence: Synthetic oligonucleotide
  Antisense strand to SEQ ID NO: 45746
uauuccaaagacuuggaac

SEQ ID NO: 45828 - RNA, 19 nt, Artificial Sequence
  Description of Artificial Sequence: Synthetic oligonucleotide
  Sense strand starting at position 3003 of SEQ ID NO: 549
uguuccaagucuuuggaau

SEQ ID NO: 45829 - RNA, 19 nt, Artificial Sequence
  Description of Artificial Sequence: Synthetic oligonucleotide
  Antisense strand to SEQ ID NO: 45748
auuccaaagacuuggaaca

SEQ ID NO: 45830 - RNA, 19 nt, Artificial Sequence
  Description of Artificial Sequence: Synthetic oligonucleotide
  Sense strand starting at position 2978 of SEQ ID NO: 549
guuccaagucuuuggagua

SEQ ID NO: 45831 - RNA, 19 nt, Artificial Sequence
  Description of Artificial Sequence: Synthetic oligonucleotide
  Antisense strand to SEQ ID NO: 45750
uacuccaaagacuuggaac

SEQ ID NO: 45832 - RNA, 19 nt, Artificial Sequence
  Description of Artificial Sequence: Synthetic oligonucleotide
  Sense strand starting at position 2918 of SEQ ID NO: 549
acuuuaagguaggaauaaa

SEQ ID NO: 45833 - RNA, 19 nt, Artificial Sequence
  Description of Artificial Sequence: Synthetic oligonucleotide
  Antisense strand to SEQ ID NO: 45752
uuuauuccuaccuuaaagu

SEQ ID NO: 45834 - RNA, 19 nt, Artificial Sequence
  Description of Artificial Sequence: Synthetic oligonucleotide
  Sense strand starting at position 2910 of SEQ ID NO: 549
agcaaacuacuuuaaggua

SEQ ID NO: 45835 - RNA, 19 nt, Artificial Sequence
  Description of Artificial Sequence: Synthetic oligonucleotide
  Antisense strand to SEQ ID NO: 45754
uaccuuaaaguaguuugcu

SEQ ID NO: 45836 - RNA, 19 nt, Artificial Sequence
  Description of Artificial Sequence: Synthetic oligonucleotide
  Sense strand starting at position 2900 of SEQ ID NO: 549
guaagugcucagcaaacua

SEQ ID NO: 45837 - RNA, 19 nt, Artificial Sequence
  Description of Artificial Sequence: Synthetic oligonucleotide
  Antisense strand to SEQ ID NO: 45756
uaguuugcugagcacuuac

SEQ ID NO: 45838 - RNA, 19 nt, Artificial Sequence
  Description of Artificial Sequence: Synthetic oligonucleotide
  Sense strand starting at position 2897 of SEQ ID NO: 549
acuguaagugcucagcaaa

SEQ ID NO: 45839 - RNA, 19 nt, Artificial Sequence
  Description of Artificial Sequence: Synthetic oligonucleotide
  Antisense strand to SEQ ID NO: 45758
uuugcugagcacuuacagu

SEQ ID NO: 45840 - RNA, 19 nt, Artificial Sequence
  Description of Artificial Sequence: Synthetic oligonucleotide
  Sense strand starting at position 2403 of SEQ ID NO: 549
uguucagugggcguaguua

SEQ ID NO: 45841 - RNA, 19 nt, Artificial Sequence
  Description of Artificial Sequence: Synthetic oligonucleotide
  Antisense strand to SEQ ID NO: 45760
uaacuacgcccacugaaca

SEQ ID NO: 45842 - RNA, 19 nt, Artificial Sequence
  Description of Artificial Sequence: Synthetic oligonucleotide
  Sense strand starting at position 2339 of SEQ ID NO: 549
uugagauaauuacaugaga

SEQ ID NO: 45843 - RNA, 19 nt, Artificial Sequence
  Description of Artificial Sequence: Synthetic oligonucleotide
  Antisense strand to SEQ ID NO: 45762
ucucauguaauuaucucaa

SEQ ID NO: 45844 - RNA, 19 nt, Artificial Sequence
  Description of Artificial Sequence: Synthetic oligonucleotide
  Sense strand starting at position 2327 of SEQ ID NO: 549
uugguaggguuguugagau

SEQ ID NO: 45845 - RNA, 19 nt, Artificial Sequence
  Description of Artificial Sequence: Synthetic oligonucleotide
  Antisense strand to SEQ ID NO: 45764
aucucaacaacccuaccaa

SEQ ID NO: 45846 - RNA, 19 nt, Artificial Sequence
  Description of Artificial Sequence: Synthetic oligonucleotide
  Sense strand starting at position 2307 of SEQ ID NO: 549
cuggaaaccuugcugcuaa

SEQ ID NO: 45847 - RNA, 19 nt, Artificial Sequence
  Description of Artificial Sequence: Synthetic oligonucleotide
  Antisense strand to SEQ ID NO: 45766
uuagcagcaagguuuccag

SEQ ID NO: 45848 - RNA, 19 nt, Artificial Sequence
  Description of Artificial Sequence: Synthetic oligonucleotide
  Sense strand starting at position 2281 of SEQ ID NO: 549
agaggagguucccuucgaa

SEQ ID NO: 45849 - RNA, 19 nt, Artificial Sequence
  Description of Artificial Sequence: Synthetic oligonucleotide
  Antisense strand to SEQ ID NO: 45768
uucgaagggaaccuccucu

SEQ ID NO: 45850 - RNA, 19 nt, Artificial Sequence
  Description of Artificial Sequence: Synthetic oligonucleotide
  Sense strand starting at position 2256 of SEQ ID NO: 549
gggucugucauagggaucu

SEQ ID NO: 45851 - RNA, 19 nt, Artificial Sequence
  Description of Artificial Sequence: Synthetic oligonucleotide
  Antisense strand to SEQ ID NO: 45770
agaucccuaugacagaccc

SEQ ID NO: 45852 - RNA, 19 nt, Artificial Sequence
  Description of Artificial Sequence: Synthetic oligonucleotide
  Sense strand starting at position 2200 of SEQ ID NO: 549
gcgcauguuagggaguuga

SEQ ID NO: 45853 - RNA, 19 nt, Artificial Sequence
  Description of Artificial Sequence: Synthetic oligonucleotide
  Antisense strand to SEQ ID NO: 45772
ucaacucccuaacaugcgc

SEQ ID NO: 45854 - RNA, 19 nt, Artificial Sequence
  Description of Artificial Sequence: Synthetic oligonucleotide
  Sense strand starting at position 2133 of SEQ ID NO: 549
ccugcuacucuggauaauc

SEQ ID NO: 45855 - RNA, 19 nt, Artificial Sequence
  Description of Artificial Sequence: Synthetic oligonucleotide
  Antisense strand to SEQ ID NO: 45774
gauuauccagaguagcagg

SEQ ID NO: 45856 - RNA, 19 nt, Artificial Sequence
  Description of Artificial Sequence: Synthetic oligonucleotide
  Sense strand starting at position 2084 of SEQ ID NO: 549
gguuucguugcuagggaga

SEQ ID NO: 45857 - RNA, 19 nt, Artificial Sequence
  Description of Artificial Sequence: Synthetic oligonucleotide
  Antisense strand to SEQ ID NO: 45776
ucucccuagcaacgaaacc

SEQ ID NO: 45858 - RNA, 19 nt, Artificial Sequence
  Description of Artificial Sequence: Synthetic oligonucleotide
  Sense strand starting at position 1459 of SEQ ID NO: 549
cguggcuugaaugaaugaa

SEQ ID NO: 45859 - RNA, 19 nt, Artificial Sequence
  Description of Artificial Sequence: Synthetic oligonucleotide
  Antisense strand to SEQ ID NO: 45778
uucauucauucaagccacg

SEQ ID NO: 45860 - RNA, 19 nt, Artificial Sequence
  Description of Artificial Sequence: Synthetic oligonucleotide
  Sense strand starting at position 1454 of SEQ ID NO: 549
uuauucguggcuugaauga

SEQ ID NO: 45861 - RNA, 19 nt, Artificial Sequence
  Description of Artificial Sequence: Synthetic oligonucleotide
  Antisense strand to SEQ ID NO: 45780
ucauucaagccacgaauaa

SEQ ID NO: 45862 - RNA, 19 nt, Artificial Sequence
  Description of Artificial Sequence: Synthetic oligonucleotide
  Sense strand starting at position 1363 of SEQ ID NO: 549
gccuuaccucgcuauacua

SEQ ID NO: 45863 - RNA, 19 nt, Artificial Sequence
  Description of Artificial Sequence: Synthetic oligonucleotide
  Antisense strand to SEQ ID NO: 45782
uaguauagcgagguaaggc

SEQ ID NO: 45864 - RNA, 19 nt, Artificial Sequence
  Description of Artificial Sequence: Synthetic oligonucleotide
  Sense strand starting at position 1266 of SEQ ID NO: 549
gcccuuaagcgauaacuaa

SEQ ID NO: 45865 - RNA, 19 nt, Artificial Sequence
  Description of Artificial Sequence: Synthetic oligonucleotide
  Antisense strand to SEQ ID NO: 45784
uuaguuaucgcuuaagggc

SEQ ID NO: 45866 - RNA, 19 nt, Artificial Sequence
  Description of Artificial Sequence: Synthetic oligonucleotide
  Sense strand starting at position 1144 of SEQ ID NO: 549
gugaaauauuguccuacac

SEQ ID NO: 45867 - RNA, 19 nt, Artificial Sequence
  Description of Artificial Sequence: Synthetic oligonucleotide
  Antisense strand to SEQ ID NO: 45786
guguaggacaauauuucac

SEQ ID NO: 45868 - RNA, 19 nt, Artificial Sequence
  Description of Artificial Sequence: Synthetic oligonucleotide
  Sense strand starting at position 1143 of SEQ ID NO: 549
agugaaauauuguccuaca

SEQ ID NO: 45869 - RNA, 19 nt, Artificial Sequence
  Description of Artificial Sequence: Synthetic oligonucleotide
  Antisense strand to SEQ ID NO: 45788
uguaggacaauauuucacu

SEQ ID NO: 45870 - RNA, 19 nt, Artificial Sequence
  Description of Artificial Sequence: Synthetic oligonucleotide
  Sense strand starting at position 1138 of SEQ ID NO: 549
gggcuagugaaauauuguc

SEQ ID NO: 45871 - RNA, 19 nt, Artificial Sequence
  Description of Artificial Sequence: Synthetic oligonucleotide
  Antisense strand to SEQ ID NO: 45790
gacaauauuucacuagccc

SEQ ID NO: 45872 - RNA, 19 nt, Artificial Sequence
  Description of Artificial Sequence: Synthetic oligonucleotide
  Sense strand starting at position 534 of SEQ ID NO: 549
cccuuaaugugugucaaac

SEQ ID NO: 45873 - RNA, 19 nt, Artificial Sequence
  Description of Artificial Sequence: Synthetic oligonucleotide
  Antisense strand to SEQ ID NO: 45792
guuugacacacauuaaggg

SEQ ID NO: 45874 - RNA, 19 nt, Artificial Sequence
  Description of Artificial Sequence: Synthetic oligonucleotide
  Sense strand starting at position 533 of SEQ ID NO: 549
acccuuaaugugugucaaa

SEQ ID NO: 45875 - RNA, 19 nt, Artificial Sequence
  Description of Artificial Sequence: Synthetic oligonucleotide
  Antisense strand to SEQ ID NO: 45794
uuugacacacauuaagggu

SEQ ID NO: 45876 - RNA, 19 nt, Artificial Sequence
  Description of Artificial Sequence: Synthetic oligonucleotide
  Sense strand starting at position 515 of SEQ ID NO: 549
auagcuaucccuuguagaa

SEQ ID NO: 45877 - RNA, 19 nt, Artificial Sequence
  Description of Artificial Sequence: Synthetic oligonucleotide
  Antisense strand to SEQ ID NO: 45796
uucuacaagggauagcuau

SEQ ID NO: 45878 - RNA, 19 nt, Artificial Sequence
  Description of Artificial Sequence: Synthetic oligonucleotide
  Sense strand starting at position 492 of SEQ ID NO: 549
cguccacucccuuaagauu

SEQ ID NO: 45879 - RNA, 19 nt, Artificial Sequence
  Description of Artificial Sequence: Synthetic oligonucleotide
  Antisense strand to SEQ ID NO: 45798
aaucuuaagggaguggacg

SEQ ID NO: 45880 - RNA, 19 nt, Artificial Sequence
  Description of Artificial Sequence: Synthetic oligonucleotide
  Sense strand starting at position 3889 of SEQ ID NO: 550
agagaucuucuaugaaagc

SEQ ID NO: 45881 - RNA, 19 nt, Artificial Sequence
  Description of Artificial Sequence: Synthetic oligonucleotide
  Antisense strand to SEQ ID NO: 45800
gcuuucauagaagaucucu

SEQ ID NO: 45882 - RNA, 19 nt, Artificial Sequence
  Description of Artificial Sequence: Synthetic oligonucleotide
  Sense strand starting at position 3878 of SEQ ID NO: 550
gguguucuuccagagaucu

SEQ ID NO: 45883 - RNA, 19 nt, Artificial Sequence
  Description of Artificial Sequence: Synthetic oligonucleotide
  Antisense strand to SEQ ID NO: 45802
agaucucuggaagaacacc

SEQ ID NO: 45884 - RNA, 19 nt, Artificial Sequence
  Description of Artificial Sequence: Synthetic oligonucleotide
  Sense strand starting at position 3783 of SEQ ID NO: 550
auaacuuggcuauagcaau

SEQ ID NO: 45885 - RNA, 19 nt, Artificial Sequence
  Description of Artificial Sequence: Synthetic oligonucleotide
  Antisense strand to SEQ ID NO: 45804
auugcuauagccaaguuau

SEQ ID NO: 45886 - RNA, 19 nt, Artificial Sequence
  Description of Artificial Sequence: Synthetic oligonucleotide
  Sense strand starting at position 3781 of SEQ ID NO: 550
guauaacuuggcuauagca

SEQ ID NO: 45887 - RNA, 19 nt, Artificial Sequence
  Description of Artificial Sequence: Synthetic oligonucleotide
  Antisense strand to SEQ ID NO: 45806
ugcuauagccaaguuauac

SEQ ID NO: 45888 - RNA, 19 nt, Artificial Sequence
  Description of Artificial Sequence: Synthetic oligonucleotide
  Sense strand starting at position 3778 of SEQ ID NO: 550
acaguauaacuuggcuaua

SEQ ID NO: 45889 - RNA, 19 nt, Artificial Sequence
  Description of Artificial Sequence: Synthetic oligonucleotide
  Antisense strand to SEQ ID NO: 45808
uauagccaaguuauacugu

SEQ ID NO: 45890 - RNA, 19 nt, Artificial Sequence
  Description of Artificial Sequence: Synthetic oligonucleotide
  Sense strand starting at position 3767 of SEQ ID NO: 550
aggugcugaccacaguaua

SEQ ID NO: 45891 - RNA, 19 nt, Artificial Sequence
  Description of Artificial Sequence: Synthetic oligonucleotide
  Antisense strand to SEQ ID NO: 45810
uauacuguggucagcaccu

SEQ ID NO: 45892 - RNA, 19 nt, Artificial Sequence
  Description of Artificial Sequence: Synthetic oligonucleotide
  Sense strand starting at position 3744 of SEQ ID NO: 550
gcaagaugucaucauauau

SEQ ID NO: 45893 - RNA, 19 nt, Artificial Sequence
  Description of Artificial Sequence: Synthetic oligonucleotide
  Antisense strand to SEQ ID NO: 45812
auauaugaugacaucuugc

SEQ ID NO: 45894 - RNA, 19 nt, Artificial Sequence
  Description of Artificial Sequence: Synthetic oligonucleotide
  Sense strand starting at position 3711 of SEQ ID NO: 550
gguacagucacuuagguca

SEQ ID NO: 45895 - RNA, 19 nt, Artificial Sequence
  Description of Artificial Sequence: Synthetic oligonucleotide
  Antisense strand to SEQ ID NO: 45814
ugaccuaagugacuguacc

SEQ ID NO: 45896 - RNA, 19 nt, Artificial Sequence
  Description of Artificial Sequence: Synthetic oligonucleotide
  Sense strand starting at position 3677 of SEQ ID NO: 550
agccauuugucuucuaugu

SEQ ID NO: 45897 - RNA, 19 nt, Artificial Sequence
  Description of Artificial Sequence: Synthetic oligonucleotide
  Antisense strand to SEQ ID NO: 45816
acauagaagacaaauggcu

SEQ ID NO: 45898 - RNA, 19 nt, Artificial Sequence
  Description of Artificial Sequence: Synthetic oligonucleotide
  Sense strand starting at position 3675 of SEQ ID NO: 550
auagccauuugucuucuau

SEQ ID NO: 45899 - RNA, 19 nt, Artificial Sequence
  Description of Artificial Sequence: Synthetic oligonucleotide
  Antisense strand to SEQ ID NO: 45818
auagaagacaaauggcuau

SEQ ID NO: 45900 - RNA, 19 nt, Artificial Sequence
  Description of Artificial Sequence: Synthetic oligonucleotide
  Sense strand starting at position 3531 of SEQ ID NO: 550
gucaguucuagugaccauc

SEQ ID NO: 45901 - RNA, 19 nt, Artificial Sequence
  Description of Artificial Sequence: Synthetic oligonucleotide
  Antisense strand to SEQ ID NO: 45820
gauggucacuagaacugac

SEQ ID NO: 45902 - RNA, 19 nt, Artificial Sequence
  Description of Artificial Sequence: Synthetic oligonucleotide
  Sense strand starting at position 3483 of SEQ ID NO: 550
ugugucacaccauagaagu

SEQ ID NO: 45903 - RNA, 19 nt, Artificial Sequence
  Description of Artificial Sequence: Synthetic oligonucleotide
  Antisense strand to SEQ ID NO: 45822
acuucuauggugugacaca

SEQ ID NO: 45904 - RNA, 19 nt, Artificial Sequence
  Description of Artificial Sequence: Synthetic oligonucleotide
  Sense strand starting at position 3337 of SEQ ID NO: 550
gaaacagagugcuuaaauc

SEQ ID NO: 45905 - RNA, 19 nt, Artificial Sequence
  Description of Artificial Sequence: Synthetic oligonucleotide
  Antisense strand to SEQ ID NO: 45824
gauuuaagcacucuguuuc

SEQ ID NO: 45906 - RNA, 19 nt, Artificial Sequence
  Description of Artificial Sequence: Synthetic oligonucleotide
  Sense strand starting at position 3334 of SEQ ID NO: 550
auagaaacagagugcuuaa

SEQ ID NO: 45907 - RNA, 19 nt, Artificial Sequence
  Description of Artificial Sequence: Synthetic oligonucleotide
  Antisense strand to SEQ ID NO: 45826
uuaagcacucuguuucuau

SEQ ID NO: 45908 - RNA, 19 nt, Artificial Sequence
  Description of Artificial Sequence: Synthetic oligonucleotide
  Sense strand starting at position 3245 of SEQ ID NO: 550
gggauuugcaagugugcag

SEQ ID NO: 45909 - RNA, 19 nt, Artificial Sequence
  Description of Artificial Sequence: Synthetic oligonucleotide
  Antisense strand to SEQ ID NO: 45828
cugcacacuugcaaauccc

SEQ ID NO: 45910 - RNA, 19 nt, Artificial Sequence
  Description of Artificial Sequence: Synthetic oligonucleotide
  Sense strand starting at position 3145 of SEQ ID NO: 550
aguuaaacuguacaguuaa

SEQ ID NO: 45911 - RNA, 19 nt, Artificial Sequence
  Description of Artificial Sequence: Synthetic oligonucleotide
  Antisense strand to SEQ ID NO: 45830
uuaacuguacaguuuaacu

SEQ ID NO: 45912 - RNA, 19 nt, Artificial Sequence
  Description of Artificial Sequence: Synthetic oligonucleotide
  Sense strand starting at position 3028 of SEQ ID NO: 550
ccaauccagugucucauaa

SEQ ID NO: 45913 - RNA, 19 nt, Artificial Sequence
  Description of Artificial Sequence: Synthetic oligonucleotide
  Antisense strand to SEQ ID NO: 45832
uuaugagacacuggauugg

SEQ ID NO: 45914 - RNA, 19 nt, Artificial Sequence
  Description of Artificial Sequence: Synthetic oligonucleotide
  Sense strand starting at position 2971 of SEQ ID NO: 550
gagguaaagugacuuuacu

SEQ ID NO: 45915 - RNA, 19 nt, Artificial Sequence
  Description of Artificial Sequence: Synthetic oligonucleotide
  Antisense strand to SEQ ID NO: 45834
aguaaagucacuuuaccuc

SEQ ID NO: 45916 - RNA, 19 nt, Artificial Sequence
  Description of Artificial Sequence: Synthetic oligonucleotide
  Sense strand starting at position 2847 of SEQ ID NO: 550
ggcccacaagucugagauu

SEQ ID NO: 45917 - RNA, 19 nt, Artificial Sequence
  Description of Artificial Sequence: Synthetic oligonucleotide
  Antisense strand to SEQ ID NO: 45836
aaucucagacuugugggcc

SEQ ID NO: 45918 - RNA, 19 nt, Artificial Sequence
  Description of Artificial Sequence: Synthetic oligonucleotide
  Sense strand starting at position 2371 of SEQ ID NO: 550
ugguguugcagauaaggaa

SEQ ID NO: 45919 - RNA, 19 nt, Artificial Sequence
  Description of Artificial Sequence: Synthetic oligonucleotide
  Antisense strand to SEQ ID NO: 45838
uuccuuaucugcaacacca

SEQ ID NO: 45920 - RNA, 19 nt, Artificial Sequence
  Description of Artificial Sequence: Synthetic oligonucleotide
  Sense strand starting at position 2254 of SEQ ID NO: 550
gucgaaugcagugacuuua

SEQ ID NO: 45921 - RNA, 19 nt, Artificial Sequence
  Description of Artificial Sequence: Synthetic oligonucleotide
  Antisense strand to SEQ ID NO: 45840
uaaagucacugcauucgac

SEQ ID NO: 45922 - RNA, 19 nt, Artificial Sequence
  Description of Artificial Sequence: Synthetic oligonucleotide
  Sense strand starting at position 2050 of SEQ ID NO: 550
guacgacaggcuuagaaca

SEQ ID NO: 45923 - RNA, 19 nt, Artificial Sequence
  Description of Artificial Sequence: Synthetic oligonucleotide
  Antisense strand to SEQ ID NO: 45842
uguucuaagccugucguac

SEQ ID NO: 45924 - RNA, 19 nt, Artificial Sequence
  Description of Artificial Sequence: Synthetic oligonucleotide
  Sense strand starting at position 1750 of SEQ ID NO: 550
gaggauacaucucuggcga

SEQ ID NO: 45925 - RNA, 19 nt, Artificial Sequence
  Description of Artificial Sequence: Synthetic oligonucleotide
  Antisense strand to SEQ ID NO: 45844
ucgccagagauguauccuc

SEQ ID NO: 45926 - RNA, 19 nt, Artificial Sequence
  Description of Artificial Sequence: Synthetic oligonucleotide
  Sense strand starting at position 1589 of SEQ ID NO: 550
gccucuuagcaggaaauua

SEQ ID NO: 45927 - RNA, 19 nt, Artificial Sequence
  Description of Artificial Sequence: Synthetic oligonucleotide
  Antisense strand to SEQ ID NO: 45846
uaauuuccugcuaagaggc

SEQ ID NO: 45928 - RNA, 19 nt, Artificial Sequence
  Description of Artificial Sequence: Synthetic oligonucleotide
  Sense strand starting at position 1206 of SEQ ID NO: 550
auauaugugugucuacaaa

SEQ ID NO: 45929 - RNA, 19 nt, Artificial Sequence
  Description of Artificial Sequence: Synthetic oligonucleotide
  Antisense strand to SEQ ID NO: 45848
uuuguagacacacauauau

SEQ ID NO: 45930 - RNA, 19 nt, Artificial Sequence
  Description of Artificial Sequence: Synthetic oligonucleotide
  Sense strand starting at position 809 of SEQ ID NO: 550
guacauguauuguuaucaa

SEQ ID NO: 45931 - RNA, 19 nt, Artificial Sequence
  Description of Artificial Sequence: Synthetic oligonucleotide
  Antisense strand to SEQ ID NO: 45850
uugauaacaauacauguac

SEQ ID NO: 45932 - RNA, 19 nt, Artificial Sequence
  Description of Artificial Sequence: Synthetic oligonucleotide
  Sense strand starting at position 743 of SEQ ID NO: 550
acgcaaagaauugauguuu

SEQ ID NO: 45933 - RNA, 19 nt, Artificial Sequence
  Description of Artificial Sequence: Synthetic oligonucleotide
  Antisense strand to SEQ ID NO: 45852
aaacaucaauucuuugcgu

SEQ ID NO: 45934 - RNA, 19 nt, Artificial Sequence
  Description of Artificial Sequence: Synthetic oligonucleotide
  Sense strand starting at position 621 of SEQ ID NO: 550
ugcaaagaucaaugauguc

SEQ ID NO: 45935 - RNA, 19 nt, Artificial Sequence
  Description of Artificial Sequence: Synthetic oligonucleotide
  Antisense strand to SEQ ID NO: 45854
gacaucauugaucuuugca

SEQ ID NO: 45936 - RNA, 19 nt, Artificial Sequence
  Description of Artificial Sequence: Synthetic oligonucleotide
  Sense strand starting at position 565 of SEQ ID NO: 550
ccuagacauuucuagagaa

SEQ ID NO: 45937 - RNA, 19 nt, Artificial Sequence
  Description of Artificial Sequence: Synthetic oligonucleotide
  Antisense strand to SEQ ID NO: 45856
uucucuagaaaugucuagg

SEQ ID NO: 45938 - RNA, 19 nt, Artificial Sequence
  Description of Artificial Sequence: Synthetic oligonucleotide
  Sense strand starting at position 537 of SEQ ID NO: 550
ugggaugagcauugagauc

SEQ ID NO: 45939 - RNA, 19 nt, Artificial Sequence
  Description of Artificial Sequence: Synthetic oligonucleotide
  Antisense strand to SEQ ID NO: 45858
gaucucaaugcucauccca

SEQ ID NO: 45940 - RNA, 19 nt, Artificial Sequence
  Description of Artificial Sequence: Synthetic oligonucleotide
  Sense strand starting at position 530 of SEQ ID NO: 550
aaaguagugggaugagcau

SEQ ID NO: 45941 - RNA, 19 nt, Artificial Sequence
  Description of Artificial Sequence: Synthetic oligonucleotide
  Antisense strand to SEQ ID NO: 45860
augcucaucccacuacuuu

SEQ ID NO: 45942 - RNA, 19 nt, Artificial Sequence
  Description of Artificial Sequence: Synthetic oligonucleotide
  Sense strand starting at position 500 of SEQ ID NO: 550
gaaugucccuaacugauga

SEQ ID NO: 45943 - RNA, 19 nt, Artificial Sequence
  Description of Artificial Sequence: Synthetic oligonucleotide
  Antisense strand to SEQ ID NO: 45862
ucaucaguuagggacauuc

SEQ ID NO: 45944 - RNA, 19 nt, Artificial Sequence
  Description of Artificial Sequence: Synthetic oligonucleotide
  Sense strand starting at position 322 of SEQ ID NO: 550
cccggaguuguguugugca

SEQ ID NO: 45945 - RNA, 19 nt, Artificial Sequence
  Description of Artificial Sequence: Synthetic oligonucleotide
  Antisense strand to SEQ ID NO: 45864
ugcacaacacaacuccggg

SEQ ID NO: 45946 - RNA, 19 nt, Artificial Sequence
  Description of Artificial Sequence: Synthetic oligonucleotide
  Sense strand starting at position 193 of SEQ ID NO: 550
gguggcucauaucuggaau

SEQ ID NO: 45947 - RNA, 19 nt, Artificial Sequence
  Description of Artificial Sequence: Synthetic oligonucleotide
  Antisense strand to SEQ ID NO: 45866
auuccagauaugagccacc

SEQ ID NO: 45948 - RNA, 19 nt, Artificial Sequence
  Description of Artificial Sequence: Synthetic oligonucleotide
  Sense strand starting at position 166 of SEQ ID NO: 550
auuagaaugucccucuaag

SEQ ID NO: 45949 - RNA, 19 nt, Artificial Sequence
  Description of Artificial Sequence: Synthetic oligonucleotide
  Antisense strand to SEQ ID NO: 45868
cuuagagggacauucuaau

SEQ ID NO: 45950 - RNA, 19 nt, Artificial Sequence
  Description of Artificial Sequence: Synthetic oligonucleotide
  Sense strand starting at position 107 of SEQ ID NO: 550
ggauacaacuuggcuaaau

SEQ ID NO: 45951 - RNA, 19 nt, Artificial Sequence
  Description of Artificial Sequence: Synthetic oligonucleotide
  Antisense strand to SEQ ID NO: 45870
auuuagccaaguuguaucc

SEQ ID NO: 45952 - RNA, 19 nt, Artificial Sequence
  Description of Artificial Sequence: Synthetic oligonucleotide
  Sense strand starting at position 106 of SEQ ID NO: 550
aggauacaacuuggcuaaa

SEQ ID NO: 45953 - RNA, 19 nt, Artificial Sequence
  Description of Artificial Sequence: Synthetic oligonucleotide
  Antisense strand to SEQ ID NO: 45872
uuuagccaaguuguauccu

SEQ ID NO: 45954 - RNA, 19 nt, Artificial Sequence
  Description of Artificial Sequence: Synthetic oligonucleotide
  Sense strand starting at position 47 of SEQ ID NO: 550
aaaguuuaaggaggucaca

SEQ ID NO: 45955 - RNA, 19 nt, Artificial Sequence
  Description of Artificial Sequence: Synthetic oligonucleotide
  Antisense strand to SEQ ID NO: 45874
ugugaccuccuuaaacuuu

SEQ ID NO: 45956 - RNA, 19 nt, Artificial Sequence
  Description of Artificial Sequence: Synthetic oligonucleotide
  Sense strand starting at position 17 of SEQ ID NO: 550
gcaagaauaugguuaauaa

SEQ ID NO: 45957 - RNA, 19 nt, Artificial Sequence
  Description of Artificial Sequence: Synthetic oligonucleotide
  Antisense strand to SEQ ID NO: 45876
uuauuaaccauauucuugc

SEQ ID NO: 45958 - RNA, 19 nt, Artificial Sequence
  Description of Artificial Sequence: Synthetic oligonucleotide
  Sense strand starting at position 14 of SEQ ID NO: 550
cuggcaagaauaugguuaa

SEQ ID NO: 45959 - RNA, 19 nt, Artificial Sequence
  Description of Artificial Sequence: Synthetic oligonucleotide
  Antisense strand to SEQ ID NO: 45878
uuaaccauauucuugccag

SEQ ID NO: 45960 - RNA, 19 nt, Artificial Sequence
  Description of Artificial Sequence: Synthetic oligonucleotide
  Sense strand starting at position 3975 of SEQ ID NO: 551
guggaacuguaacuggaau

SEQ ID NO: 45961 - RNA, 19 nt, Artificial Sequence
  Description of Artificial Sequence: Synthetic oligonucleotide
  Antisense strand to SEQ ID NO: 45880
auuccaguuacaguuccac

SEQ ID NO: 45962 - RNA, 19 nt, Artificial Sequence
  Description of Artificial Sequence: Synthetic oligonucleotide
  Sense strand starting at position 3918 of SEQ ID NO: 551
ggugcagugguaugagaag

SEQ ID NO: 45963 - RNA, 19 nt, Artificial Sequence
  Description of Artificial Sequence: Synthetic oligonucleotide
  Antisense strand to SEQ ID NO: 45882
cuucucauaccacugcacc

SEQ ID NO: 45964 - RNA, 19 nt, Artificial Sequence
  Description of Artificial Sequence: Synthetic oligonucleotide
  Sense strand starting at position 3209 of SEQ ID NO: 551
aaucauagagcucagaguu

SEQ ID NO: 45965 - RNA, 19 nt, Artificial Sequence
  Description of Artificial Sequence: Synthetic oligonucleotide
  Antisense strand to SEQ ID NO: 45884
aacucugagcucuaugauu

SEQ ID NO: 45966 - RNA, 19 nt, Artificial Sequence
  Description of Artificial Sequence: Synthetic oligonucleotide
  Sense strand starting at position 3178 of SEQ ID NO: 551
cagcauggcucauuggaga

SEQ ID NO: 45967 - RNA, 19 nt, Artificial Sequence
  Description of Artificial Sequence: Synthetic oligonucleotide
  Antisense strand to SEQ ID NO: 45886
ucuccaaugagccaugcug

SEQ ID NO: 45968 - RNA, 19 nt, Artificial Sequence
  Description of Artificial Sequence: Synthetic oligonucleotide
  Sense strand starting at position 3029 of SEQ ID NO: 551
gcuaauucugguuagagaa

SEQ ID NO: 45969 - RNA, 19 nt, Artificial Sequence
  Description of Artificial Sequence: Synthetic oligonucleotide
  Antisense strand to SEQ ID NO: 45888
uucucuaaccagaauuagc

SEQ ID NO: 45970 - RNA, 19 nt, Artificial Sequence
  Description of Artificial Sequence: Synthetic oligonucleotide
  Sense strand starting at position 3028 of SEQ ID NO: 551
agcuaauucugguuagaga

SEQ ID NO: 45971 - RNA, 19 nt, Artificial Sequence
  Description of Artificial Sequence: Synthetic oligonucleotide
  Antisense strand to SEQ ID NO: 45890
ucucuaaccagaauuagcu

SEQ ID NO: 45972 - RNA, 19 nt, Artificial Sequence
  Description of Artificial Sequence: Synthetic oligonucleotide
  Sense strand starting at position 2830 of SEQ ID NO: 551
ugggaccauuucuaacaaa

SEQ ID NO: 45973 - RNA, 19 nt, Artificial Sequence
  Description of Artificial Sequence: Synthetic oligonucleotide
  Antisense strand to SEQ ID NO: 45892
uuuguuagaaaugguccca

SEQ ID NO: 45974 - RNA, 19 nt, Artificial Sequence
  Description of Artificial Sequence: Synthetic oligonucleotide
  Sense strand starting at position 2757 of SEQ ID NO: 551
gguugacuauuucuguagu

SEQ ID NO: 45975 - RNA, 19 nt, Artificial Sequence
  Description of Artificial Sequence: Synthetic oligonucleotide
  Antisense strand to SEQ ID NO: 45894
acuacagaaauagucaacc

SEQ ID NO: 45976 - RNA, 19 nt, Artificial Sequence
  Description of Artificial Sequence: Synthetic oligonucleotide
  Sense strand starting at position 2755 of SEQ ID NO: 551
gugguugacuauuucugua

SEQ ID NO: 45977 - RNA, 19 nt, Artificial Sequence
  Description of Artificial Sequence: Synthetic oligonucleotide
  Antisense strand to SEQ ID NO: 45896
uacagaaauagucaaccac

SEQ ID NO: 45978 - RNA, 19 nt, Artificial Sequence
  Description of Artificial Sequence: Synthetic oligonucleotide
  Sense strand starting at position 2318 of SEQ ID NO: 551
ucucacaagucaguagauu

SEQ ID NO: 45979 - RNA, 19 nt, Artificial Sequence
  Description of Artificial Sequence: Synthetic oligonucleotide
  Antisense strand to SEQ ID NO: 45898
aaucuacugacuugugaga

SEQ ID NO: 45980 - RNA, 19 nt, Artificial Sequence
  Description of Artificial Sequence: Synthetic oligonucleotide
  Sense strand starting at position 2307 of SEQ ID NO: 551
guuagaugcucucucacaa

SEQ ID NO: 45981 - RNA, 19 nt, Artificial Sequence
  Description of Artificial Sequence: Synthetic oligonucleotide
  Antisense strand to SEQ ID NO: 45900
uugugagagagcaucuaac

SEQ ID NO: 45982 - RNA, 19 nt, Artificial Sequence
  Description of Artificial Sequence: Synthetic oligonucleotide
  Sense strand starting at position 2213 of SEQ ID NO: 551
auucuuggauugguagauu

SEQ ID NO: 45983 - RNA, 19 nt, Artificial Sequence
  Description of Artificial Sequence: Synthetic oligonucleotide
  Antisense strand to SEQ ID NO: 45902
aaucuaccaauccaagaau

SEQ ID NO: 45984 - RNA, 19 nt, Artificial Sequence
  Description of Artificial Sequence: Synthetic oligonucleotide
  Sense strand starting at position 2211 of SEQ ID NO: 551
agauucuuggauugguaga

SEQ ID NO: 45985 - RNA, 19 nt, Artificial Sequence
  Description of Artificial Sequence: Synthetic oligonucleotide
  Antisense strand to SEQ ID NO: 45904
ucuaccaauccaagaaucu

SEQ ID NO: 45986 - RNA, 19 nt, Artificial Sequence
  Description of Artificial Sequence: Synthetic oligonucleotide
  Sense strand starting at position 2119 of SEQ ID NO: 551
ccuuucugucaugagauag

SEQ ID NO: 45987 - RNA, 19 nt, Artificial Sequence
  Description of Artificial Sequence: Synthetic oligonucleotide
  Antisense strand to SEQ ID NO: 45906
cuaucucaugacagaaagg

SEQ ID NO: 45988 - RNA, 19 nt, Artificial Sequence
  Description of Artificial Sequence: Synthetic oligonucleotide
  Sense strand starting at position 2107 of SEQ ID NO: 551
agaagauguuugccuuucu

SEQ ID NO: 45989 - RNA, 19 nt, Artificial Sequence
  Description of Artificial Sequence: Synthetic oligonucleotide
  Antisense strand to SEQ ID NO: 45908
agaaaggcaaacaucuucu

SEQ ID NO: 45990 - RNA, 19 nt, Artificial Sequence
  Description of Artificial Sequence: Synthetic oligonucleotide
  Sense strand starting at position 2105 of SEQ ID NO: 551
ucagaagauguuugccuuu

SEQ ID NO: 45991 - RNA, 19 nt, Artificial Sequence
  Description of Artificial Sequence: Synthetic oligonucleotide
  Antisense strand to SEQ ID NO: 45910
aaaggcaaacaucuucuga

SEQ ID NO: 45992 - RNA, 19 nt, Artificial Sequence
  Description of Artificial Sequence: Synthetic oligonucleotide
  Sense strand starting at position 2002 of SEQ ID NO: 551
ugaguucuaugggcagaga

SEQ ID NO: 45993 - RNA, 19 nt, Artificial Sequence
  Description of Artificial Sequence: Synthetic oligonucleotide
  Antisense strand to SEQ ID NO: 45912
ucucugcccauagaacuca

SEQ ID NO: 45994 - RNA, 19 nt, Artificial Sequence
  Description of Artificial Sequence: Synthetic oligonucleotide
  Sense strand starting at position 1999 of SEQ ID NO: 551
cucugaguucuaugggcag

SEQ ID NO: 45995 - RNA, 19 nt, Artificial Sequence
  Description of Artificial Sequence: Synthetic oligonucleotide
  Antisense strand to SEQ ID NO: 45914
cugcccauagaacucagag

SEQ ID NO: 45996 - RNA, 19 nt, Artificial Sequence
  Description of Artificial Sequence: Synthetic oligonucleotide
  Sense strand starting at position 1990 of SEQ ID NO: 551
cagaguaagcucugaguuc

SEQ ID NO: 45997 - RNA, 19 nt, Artificial Sequence
  Description of Artificial Sequence: Synthetic oligonucleotide
  Antisense strand to SEQ ID NO: 45916
gaacucagagcuuacucug

SEQ ID NO: 45998 - RNA, 19 nt, Artificial Sequence
  Description of Artificial Sequence: Synthetic oligonucleotide
  Sense strand starting at position 1458 of SEQ ID NO: 551
uggugauguuacuuagaga

SEQ ID NO: 45999 - RNA, 19 nt, Artificial Sequence
  Description of Artificial Sequence: Synthetic oligonucleotide
  Antisense strand to SEQ ID NO: 45918
ucucuaaguaacaucacca

SEQ ID NO: 46000 - RNA, 19 nt, Artificial Sequence
  Description of Artificial Sequence: Synthetic oligonucleotide
  Sense strand starting at position 1375 of SEQ ID NO: 551
cagaucagccuguacagua

SEQ ID NO: 46001 - RNA, 19 nt, Artificial Sequence
  Description of Artificial Sequence: Synthetic oligonucleotide
  Antisense strand to SEQ ID NO: 45920
uacuguacaggcugaucug

SEQ ID NO: 46002 - RNA, 19 nt, Artificial Sequence
  Description of Artificial Sequence: Synthetic oligonucleotide
  Sense strand starting at position 1309 of SEQ ID NO: 551
ugagcaacagucugaagau

SEQ ID NO: 46003 - RNA, 19 nt, Artificial Sequence
  Description of Artificial Sequence: Synthetic oligonucleotide
  Antisense strand to SEQ ID NO: 45922
aucuucagacuguugcuca

SEQ ID NO: 46004 - RNA, 19 nt, Artificial Sequence
  Description of Artificial Sequence: Synthetic oligonucleotide
  Sense strand starting at position 1296 of SEQ ID NO: 551
aaagaagcgucauugagca

SEQ ID NO: 46005 - RNA, 19 nt, Artificial Sequence
  Description of Artificial Sequence: Synthetic oligonucleotide
  Antisense strand to SEQ ID NO: 45924
ugcucaaugacgcuucuuu

SEQ ID NO: 46006 - RNA, 19 nt, Artificial Sequence
  Description of Artificial Sequence: Synthetic oligonucleotide
  Sense strand starting at position 1233 of SEQ ID NO: 551
ggauguuaagcaggcagau

SEQ ID NO: 46007 - RNA, 19 nt, Artificial Sequence
  Description of Artificial Sequence: Synthetic oligonucleotide
  Antisense strand to SEQ ID NO: 45926
aucugccugcuuaacaucc

SEQ ID NO: 46008 - RNA, 19 nt, Artificial Sequence
  Description of Artificial Sequence: Synthetic oligonucleotide
  Sense strand starting at position 1204 of SEQ ID NO: 551
ccgcgacagguguaauaaa

SEQ ID NO: 46009 - RNA, 19 nt, Artificial Sequence
  Description of Artificial Sequence: Synthetic oligonucleotide
  Antisense strand to SEQ ID NO: 45928
uuuauuacaccugucgcgg

SEQ ID NO: 46010 - RNA, 19 nt, Artificial Sequence
  Description of Artificial Sequence: Synthetic oligonucleotide
  Sense strand starting at position 1185 of SEQ ID NO: 551
agccguacauaauuacaaa

SEQ ID NO: 46011 - RNA, 19 nt, Artificial Sequence
  Description of Artificial Sequence: Synthetic oligonucleotide
  Antisense strand to SEQ ID NO: 45930
uuuguaauuauguacggcu

SEQ ID NO: 46012 - RNA, 19 nt, Artificial Sequence
  Description of Artificial Sequence: Synthetic oligonucleotide
  Sense strand starting at position 1104 of SEQ ID NO: 551
guguaauagugggugagag

SEQ ID NO: 46013 - RNA, 19 nt, Artificial Sequence
  Description of Artificial Sequence: Synthetic oligonucleotide
  Antisense strand to SEQ ID NO: 45932
cucucacccacuauuacac

SEQ ID NO: 46014 - RNA, 19 nt, Artificial Sequence
  Description of Artificial Sequence: Synthetic oligonucleotide
  Sense strand starting at position 1103 of SEQ ID NO: 551
gguguaauagugggugaga

SEQ ID NO: 46015 - RNA, 19 nt, Artificial Sequence
  Description of Artificial Sequence: Synthetic oligonucleotide
  Antisense strand to SEQ ID NO: 45934
ucucacccacuauuacacc

SEQ ID NO: 46016 - RNA, 19 nt, Artificial Sequence
  Description of Artificial Sequence: Synthetic oligonucleotide
  Sense strand starting at position 1095 of SEQ ID NO: 551
caggcauggguguaauagu

SEQ ID NO: 46017 - RNA, 19 nt, Artificial Sequence
  Description of Artificial Sequence: Synthetic oligonucleotide
  Antisense strand to SEQ ID NO: 45936
acuauuacacccaugccug

SEQ ID NO: 46018 - RNA, 19 nt, Artificial Sequence
  Description of Artificial Sequence: Synthetic oligonucleotide
  Sense strand starting at position 1091 of SEQ ID NO: 551
ccaucaggcauggguguaa

SEQ ID NO: 46019 - RNA, 19 nt, Artificial Sequence
  Description of Artificial Sequence: Synthetic oligonucleotide
  Antisense strand to SEQ ID NO: 45938
uuacacccaugccugaugg

SEQ ID NO: 46020 - RNA, 19 nt, Artificial Sequence
  Description of Artificial Sequence: Synthetic oligonucleotide
  Sense strand starting at position 1045 of SEQ ID NO: 551
ccgagagcucuuuaacaag

SEQ ID NO: 46021 - RNA, 19 nt, Artificial Sequence
  Description of Artificial Sequence: Synthetic oligonucleotide
  Antisense strand to SEQ ID NO: 45940
cuuguuaaagagcucucgg

SEQ ID NO: 46022 - RNA, 19 nt, Artificial Sequence
  Description of Artificial Sequence: Synthetic oligonucleotide
  Sense strand starting at position 627 of SEQ ID NO: 551
gaaguucuggcaggaagag

SEQ ID NO: 46023 - RNA, 19 nt, Artificial Sequence
  Description of Artificial Sequence: Synthetic oligonucleotide
  Antisense strand to SEQ ID NO: 45942
cucuuccugccagaacuuc

SEQ ID NO: 46024 - RNA, 19 nt, Artificial Sequence
  Description of Artificial Sequence: Synthetic oligonucleotide
  Sense strand starting at position 549 of SEQ ID NO: 551
gcugguauguacucagaga

SEQ ID NO: 46025 - RNA, 19 nt, Artificial Sequence
  Description of Artificial Sequence: Synthetic oligonucleotide
  Antisense strand to SEQ ID NO: 45944
ucucugaguacauaccagc

SEQ ID NO: 46026 - RNA, 19 nt, Artificial Sequence
  Description of Artificial Sequence: Synthetic oligonucleotide
  Sense strand starting at position 537 of SEQ ID NO: 551
gaaagugguugagcuggua

SEQ ID NO: 46027 - RNA, 19 nt, Artificial Sequence
  Description of Artificial Sequence: Synthetic oligonucleotide
  Antisense strand to SEQ ID NO: 45946
uaccagcucaaccacuuuc

SEQ ID NO: 46028 - RNA, 19 nt, Artificial Sequence
  Description of Artificial Sequence: Synthetic oligonucleotide
  Sense strand starting at position 408 of SEQ ID NO: 551
guccgaaagaaaugagugu

SEQ ID NO: 46029 - RNA, 19 nt, Artificial Sequence
  Description of Artificial Sequence: Synthetic oligonucleotide
  Antisense strand to SEQ ID NO: 45948
acacucauuucuuucggac

SEQ ID NO: 46030 - RNA, 19 nt, Artificial Sequence
  Description of Artificial Sequence: Synthetic oligonucleotide
  Sense strand starting at position 404 of SEQ ID NO: 551
guuuguccgaaagaaauga

SEQ ID NO: 46031 - RNA, 19 nt, Artificial Sequence
  Description of Artificial Sequence: Synthetic oligonucleotide
  Antisense strand to SEQ ID NO: 45950
ucauuucuuucggacaaac

SEQ ID NO: 46032 - RNA, 19 nt, Artificial Sequence
  Description of Artificial Sequence: Synthetic oligonucleotide
  Sense strand starting at position 398 of SEQ ID NO: 551
ccaacaguuuguccgaaag

SEQ ID NO: 46033 - RNA, 19 nt, Artificial Sequence
  Description of Artificial Sequence: Synthetic oligonucleotide
  Antisense strand to SEQ ID NO: 45952
cuuucggacaaacuguugg

SEQ ID NO: 46034 - RNA, 19 nt, Artificial Sequence
  Description of Artificial Sequence: Synthetic oligonucleotide
  Sense strand starting at position 397 of SEQ ID NO: 551
cccaacaguuuguccgaaa

SEQ ID NO: 46035 - RNA, 19 nt, Artificial Sequence
  Description of Artificial Sequence: Synthetic oligonucleotide
  Antisense strand to SEQ ID NO: 45954
uuucggacaaacuguuggg

SEQ ID NO: 46036 - RNA, 19 nt, Artificial Sequence
  Description of Artificial Sequence: Synthetic oligonucleotide
  Sense strand starting at position 133 of SEQ ID NO: 551
uaagacuugugcuuaggua

SEQ ID NO: 46037 - RNA, 19 nt, Artificial Sequence
  Description of Artificial Sequence: Synthetic oligonucleotide
  Antisense strand to SEQ ID NO: 45956
uaccuaagcacaagucuua

SEQ ID NO: 46038 - RNA, 19 nt, Artificial Sequence
  Description of Artificial Sequence: Synthetic oligonucleotide
  Sense strand starting at position 128 of SEQ ID NO: 551
ggaaauaagacuugugcuu

SEQ ID NO: 46039 - RNA, 19 nt, Artificial Sequence
  Description of Artificial Sequence: Synthetic oligonucleotide
  Antisense strand to SEQ ID NO: 45958
aagcacaagucuuauuucc

SEQ ID NO: 46040 - RNA, 19 nt, Artificial Sequence
  Description of Artificial Sequence: Synthetic oligonucleotide
  Sense strand starting at position 17 of SEQ ID NO: 552
cagucaugcgaucaugacu

SEQ ID NO: 46041 - RNA, 19 nt, Artificial Sequence
  Description of Artificial Sequence: Synthetic oligonucleotide
  Antisense strand to SEQ ID NO: 45960
agucaugaucgcaugacug

SEQ ID NO: 46042 - RNA, 19 nt, Artificial Sequence
  Description of Artificial Sequence: Synthetic oligonucleotide
  Sense strand starting at position 365 of SEQ ID NO: 552
ugauucuaagaguguucua

SEQ ID NO: 46043 - RNA, 19 nt, Artificial Sequence
  Description of Artificial Sequence: Synthetic oligonucleotide
  Antisense strand to SEQ ID NO: 45962
uagaacacucuuagaauca

SEQ ID NO: 46044 - RNA, 19 nt, Artificial Sequence
  Description of Artificial Sequence: Synthetic oligonucleotide
  Sense strand starting at position 368 of SEQ ID NO: 552
uucuaagaguguucuaaac

SEQ ID NO: 46045 - RNA, 19 nt, Artificial Sequence
  Description of Artificial Sequence: Synthetic oligonucleotide
  Antisense strand to SEQ ID NO: 45964
guuuagaacacucuuagaa

SEQ ID NO: 46046 - RNA, 19 nt, Artificial Sequence
  Description of Artificial Sequence: Synthetic oligonucleotide
  Sense strand starting at position 538 of SEQ ID NO: 552
uuuauuccagucuaugaga

SEQ ID NO: 46047 - RNA, 19 nt, Artificial Sequence
  Description of Artificial Sequence: Synthetic oligonucleotide
  Antisense strand to SEQ ID NO: 45966
ucucauagacuggaauaaa

SEQ ID NO: 46048 - RNA, 19 nt, Artificial Sequence
  Description of Artificial Sequence: Synthetic oligonucleotide
  Sense strand starting at position 547 of SEQ ID NO: 552
gucuaugagaugugguuag

SEQ ID NO: 46049 - RNA, 19 nt, Artificial Sequence
  Description of Artificial Sequence: Synthetic oligonucleotide
  Antisense strand to SEQ ID NO: 45968
cuaaccacaucucauagac

SEQ ID NO: 46050 - RNA, 19 nt, Artificial Sequence
  Description of Artificial Sequence: Synthetic oligonucleotide
  Sense strand starting at position 551 of SEQ ID NO: 552
augagaugugguuaguuga

SEQ ID NO: 46051 - RNA, 19 nt, Artificial Sequence
  Description of Artificial Sequence: Synthetic oligonucleotide
  Antisense strand to SEQ ID NO: 45970
ucaacuaaccacaucucau

SEQ ID NO: 46052 - RNA, 19 nt, Artificial Sequence
  Description of Artificial Sequence: Synthetic oligonucleotide
  Sense strand starting at position 554 of SEQ ID NO: 552
agaugugguuaguugauau

SEQ ID NO: 46053 - RNA, 19 nt, Artificial Sequence
  Description of Artificial Sequence: Synthetic oligonucleotide
  Antisense strand to SEQ ID NO: 45972
auaucaacuaaccacaucu

SEQ ID NO: 46054 - RNA, 19 nt, Artificial Sequence
  Description of Artificial Sequence: Synthetic oligonucleotide
  Sense strand starting at position 602 of SEQ ID NO: 552
uccaaauccugggcacaau

SEQ ID NO: 46055 - RNA, 19 nt, Artificial Sequence
  Description of Artificial Sequence: Synthetic oligonucleotide
  Antisense strand to SEQ ID NO: 45974
auugugcccaggauuugga

SEQ ID NO: 46056 - RNA, 19 nt, Artificial Sequence
  Description of Artificial Sequence: Synthetic oligonucleotide
  Sense strand starting at position 603 of SEQ ID NO: 552
ccaaauccugggcacaauu

SEQ ID NO: 46057 - RNA, 19 nt, Artificial Sequence
  Description of Artificial Sequence: Synthetic oligonucleotide
  Antisense strand to SEQ ID NO: 45976
aauugugcccaggauuugg

SEQ ID NO: 46058 - RNA, 19 nt, Artificial Sequence
  Description of Artificial Sequence: Synthetic oligonucleotide
  Sense strand starting at position 612 of SEQ ID NO: 552
gggcacaauuccuuuagca

SEQ ID NO: 46059 - RNA, 19 nt, Artificial Sequence
  Description of Artificial Sequence: Synthetic oligonucleotide
  Antisense strand to SEQ ID NO: 45978
ugcuaaaggaauugugccc

SEQ ID NO: 46060 - RNA, 19 nt, Artificial Sequence
  Description of Artificial Sequence: Synthetic oligonucleotide
  Sense strand starting at position 753 of SEQ ID NO: 552
cuaagaguucucuagucac

SEQ ID NO: 46061 - RNA, 19 nt, Artificial Sequence
  Description of Artificial Sequence: Synthetic oligonucleotide
  Antisense strand to SEQ ID NO: 45980
gugacuagagaacucuuag

SEQ ID NO: 46062 - RNA, 19 nt, Artificial Sequence
  Description of Artificial Sequence: Synthetic oligonucleotide
  Sense strand starting at position 756 of SEQ ID NO: 552
agaguucucuagucacaga

SEQ ID NO: 46063 - RNA, 19 nt, Artificial Sequence
  Description of Artificial Sequence: Synthetic oligonucleotide
  Antisense strand to SEQ ID NO: 45982
ucugugacuagagaacucu

SEQ ID NO: 46064 - RNA, 19 nt, Artificial Sequence
  Description of Artificial Sequence: Synthetic oligonucleotide
  Sense strand starting at position 807 of SEQ ID NO: 552
uuauaaacuccauguuagu

SEQ ID NO: 46065 - RNA, 19 nt, Artificial Sequence
  Description of Artificial Sequence: Synthetic oligonucleotide
  Antisense strand to SEQ ID NO: 45984
acuaacauggaguuuauaa

SEQ ID NO: 46066 - RNA, 19 nt, Artificial Sequence
  Description of Artificial Sequence: Synthetic oligonucleotide
  Sense strand starting at position 877 of SEQ ID NO: 552
uuaggaaaugugcauuacu

SEQ ID NO: 46067 - RNA, 19 nt, Artificial Sequence
  Description of Artificial Sequence: Synthetic oligonucleotide
  Antisense strand to SEQ ID NO: 45986
aguaaugcacauuuccuaa

SEQ ID NO: 46068 - RNA, 19 nt, Artificial Sequence
  Description of Artificial Sequence: Synthetic oligonucleotide
  Sense strand starting at position 1127 of SEQ ID NO: 552
acacgugauaacugaaguu

SEQ ID NO: 46069 - RNA, 19 nt, Artificial Sequence
  Description of Artificial Sequence: Synthetic oligonucleotide
  Antisense strand to SEQ ID NO: 45988
aacuucaguuaucacgugu

SEQ ID NO: 46070 - RNA, 19 nt, Artificial Sequence
  Description of Artificial Sequence: Synthetic oligonucleotide
  Sense strand starting at position 1251 of SEQ ID NO: 552
aggugaaaguuuccaggaa

SEQ ID NO: 46071 - RNA, 19 nt, Artificial Sequence
  Description of Artificial Sequence: Synthetic oligonucleotide
  Antisense strand to SEQ ID NO: 45990
uuccuggaaacuuucaccu

SEQ ID NO: 46072 - RNA, 19 nt, Artificial Sequence
  Description of Artificial Sequence: Synthetic oligonucleotide
  Sense strand starting at position 1620 of SEQ ID NO: 552
cgggugguucuugcguaau

SEQ ID NO: 46073 - RNA, 19 nt, Artificial Sequence
  Description of Artificial Sequence: Synthetic oligonucleotide
  Antisense strand to SEQ ID NO: 45992
auuacgcaagaaccacccg

SEQ ID NO: 46074 - RNA, 19 nt, Artificial Sequence
  Description of Artificial Sequence: Synthetic oligonucleotide
  Sense strand starting at position 1630 of SEQ ID NO: 552
uugcguaaucgcgccaaga

SEQ ID NO: 46075 - RNA, 19 nt, Artificial Sequence
  Description of Artificial Sequence: Synthetic oligonucleotide
  Antisense strand to SEQ ID NO: 45994
ucuuggcgcgauuacgcaa

SEQ ID NO: 46076 - RNA, 19 nt, Artificial Sequence
  Description of Artificial Sequence: Synthetic oligonucleotide
  Sense strand starting at position 1631 of SEQ ID NO: 552
ugcguaaucgcgccaagaa

SEQ ID NO: 46077 - RNA, 19 nt, Artificial Sequence
  Description of Artificial Sequence: Synthetic oligonucleotide
  Antisense strand to SEQ ID NO: 45996
uucuuggcgcgauuacgca

SEQ ID NO: 46078 - RNA, 19 nt, Artificial Sequence
  Description of Artificial Sequence: Synthetic oligonucleotide
  Sense strand starting at position 1668 of SEQ ID NO: 552
agggacaacucgcccauaa

SEQ ID NO: 46079 - RNA, 19 nt, Artificial Sequence
  Description of Artificial Sequence: Synthetic oligonucleotide
  Antisense strand to SEQ ID NO: 45998
uuaugggcgaguugucccu

SEQ ID NO: 46080 - RNA, 19 nt, Artificial Sequence
  Description of Artificial Sequence: Synthetic oligonucleotide
  Sense strand starting at position 1670 of SEQ ID NO: 552
ggacaacucgcccauaaac

SEQ ID NO: 46081 - RNA, 19 nt, Artificial Sequence
  Description of Artificial Sequence: Synthetic oligonucleotide
  Antisense strand to SEQ ID NO: 46000
guuuaugggcgaguugucc

SEQ ID NO: 46082 - RNA, 19 nt, Artificial Sequence
  Description of Artificial Sequence: Synthetic oligonucleotide
  Sense strand starting at position 1924 of SEQ ID NO: 552
guggguaacaggcauagau

SEQ ID NO: 46083 - RNA, 19 nt, Artificial Sequence
  Description of Artificial Sequence: Synthetic oligonucleotide
  Antisense strand to SEQ ID NO: 46002
aucuaugccuguuacccac

SEQ ID NO: 46084 - RNA, 19 nt, Artificial Sequence
  Description of Artificial Sequence: Synthetic oligonucleotide
  Sense strand starting at position 1936 of SEQ ID NO: 552
cauagauuccgcuugcgca

SEQ ID NO: 46085 - RNA, 19 nt, Artificial Sequence
  Description of Artificial Sequence: Synthetic oligonucleotide
  Antisense strand to SEQ ID NO: 46004
ugcgcaagcggaaucuaug

SEQ ID NO: 46086 - RNA, 19 nt, Artificial Sequence
  Description of Artificial Sequence: Synthetic oligonucleotide
  Sense strand starting at position 1938 of SEQ ID NO: 552
uagauuccgcuugcgcaau

SEQ ID NO: 46087 - RNA, 19 nt, Artificial Sequence
  Description of Artificial Sequence: Synthetic oligonucleotide
  Antisense strand to SEQ ID NO: 46006
auugcgcaagcggaaucua

SEQ ID NO: 46088 - RNA, 19 nt, Artificial Sequence
  Description of Artificial Sequence: Synthetic oligonucleotide
  Sense strand starting at position 2080 of SEQ ID NO: 552
acuguuaaacuguggacuu

SEQ ID NO: 46089 - RNA, 19 nt, Artificial Sequence
  Description of Artificial Sequence: Synthetic oligonucleotide
  Antisense strand to SEQ ID NO: 46008
aaguccacaguuuaacagu

SEQ ID NO: 46090 - RNA, 19 nt, Artificial Sequence
  Description of Artificial Sequence: Synthetic oligonucleotide
  Sense strand starting at position 2100 of SEQ ID NO: 552
uucucaccuguuggaauaa

SEQ ID NO: 46091 - RNA, 19 nt, Artificial Sequence
  Description of Artificial Sequence: Synthetic oligonucleotide
  Antisense strand to SEQ ID NO: 46010
uuauuccaacaggugagaa

SEQ ID NO: 46092 - RNA, 19 nt, Artificial Sequence
  Description of Artificial Sequence: Synthetic oligonucleotide
  Sense strand starting at position 2179 of SEQ ID NO: 552
agcaguuuaaugcaggaca

SEQ ID NO: 46093 - RNA, 19 nt, Artificial Sequence
  Description of Artificial Sequence: Synthetic oligonucleotide
  Antisense strand to SEQ ID NO: 46012
uguccugcauuaaacugcu

SEQ ID NO: 46094 - RNA, 19 nt, Artificial Sequence
  Description of Artificial Sequence: Synthetic oligonucleotide
  Sense strand starting at position 2288 of SEQ ID NO: 552
uagauauaacugugacgag

SEQ ID NO: 46095 - RNA, 19 nt, Artificial Sequence
  Description of Artificial Sequence: Synthetic oligonucleotide
  Antisense strand to SEQ ID NO: 46014
cucgucacaguuauaucua

SEQ ID NO: 46096 - RNA, 19 nt, Artificial Sequence
  Description of Artificial Sequence: Synthetic oligonucleotide
  Sense strand starting at position 2292 of SEQ ID NO: 552
uauaacugugacgaguaaa

SEQ ID NO: 46097 - RNA, 19 nt, Artificial Sequence
  Description of Artificial Sequence: Synthetic oligonucleotide
  Antisense strand to SEQ ID NO: 46016
uuuacucgucacaguuaua

SEQ ID NO: 46098 - RNA, 19 nt, Artificial Sequence
  Description of Artificial Sequence: Synthetic oligonucleotide
  Sense strand starting at position 2655 of SEQ ID NO: 552
gucauuagccauuagagaa

SEQ ID NO: 46099 - RNA, 19 nt, Artificial Sequence
  Description of Artificial Sequence: Synthetic oligonucleotide
  Antisense strand to SEQ ID NO: 46018
uucucuaauggcuaaugac

SEQ ID NO: 46100 - RNA, 19 nt, Artificial Sequence
  Description of Artificial Sequence: Synthetic oligonucleotide
  Sense strand starting at position 3194 of SEQ ID NO: 552
ugcguagaagucuaaagac

SEQ ID NO: 46101 - RNA, 19 nt, Artificial Sequence
  Description of Artificial Sequence: Synthetic oligonucleotide
  Antisense strand to SEQ ID NO: 46020
gucuuuagacuucuacgca

SEQ ID NO: 46102 - RNA, 19 nt, Artificial Sequence
  Description of Artificial Sequence: Synthetic oligonucleotide
  Sense strand starting at position 3531 of SEQ ID NO: 552
agcccuaagggcgaucaaa

SEQ ID NO: 46103 - RNA, 19 nt, Artificial Sequence
  Description of Artificial Sequence: Synthetic oligonucleotide
  Antisense strand to SEQ ID NO: 46022
uuugaucgcccuuagggcu

SEQ ID NO: 46104 - RNA, 19 nt, Artificial Sequence
  Description of Artificial Sequence: Synthetic oligonucleotide
  Sense strand starting at position 3622 of SEQ ID NO: 552
auuuguguucuguggacaa

SEQ ID NO: 46105 - RNA, 19 nt, Artificial Sequence
  Description of Artificial Sequence: Synthetic oligonucleotide
  Antisense strand to SEQ ID NO: 46024
uuguccacagaacacaaau

SEQ ID NO: 46106 - RNA, 19 nt, Artificial Sequence
  Description of Artificial Sequence: Synthetic oligonucleotide
  Sense strand starting at position 3624 of SEQ ID NO: 552
uuguguucuguggacaauc

SEQ ID NO: 46107 - RNA, 19 nt, Artificial Sequence
  Description of Artificial Sequence: Synthetic oligonucleotide
  Antisense strand to SEQ ID NO: 46026
gauuguccacagaacacaa

SEQ ID NO: 46108 - RNA, 19 nt, Artificial Sequence
  Description of Artificial Sequence: Synthetic oligonucleotide
  Sense strand starting at position 3660 of SEQ ID NO: 552
cuuucucugauccgggaga

SEQ ID NO: 46109 - RNA, 19 nt, Artificial Sequence
  Description of Artificial Sequence: Synthetic oligonucleotide
  Antisense strand to SEQ ID NO: 46028
ucucccggaucagagaaag

SEQ ID NO: 46110 - RNA, 19 nt, Artificial Sequence
  Description of Artificial Sequence: Synthetic oligonucleotide
  Sense strand starting at position 3662 of SEQ ID NO: 552
uucucugauccgggagaga

SEQ ID NO: 46111 - RNA, 19 nt, Artificial Sequence
  Description of Artificial Sequence: Synthetic oligonucleotide
  Antisense strand to SEQ ID NO: 46030
ucucucccggaucagagaa

SEQ ID NO: 46112 - RNA, 19 nt, Artificial Sequence
  Description of Artificial Sequence: Synthetic oligonucleotide
  Sense strand starting at position 3689 of SEQ ID NO: 552
agagucugacaccguuuaa

SEQ ID NO: 46113 - RNA, 19 nt, Artificial Sequence
  Description of Artificial Sequence: Synthetic oligonucleotide
  Antisense strand to SEQ ID NO: 46032
uuaaacggugucagacucu

SEQ ID NO: 46114 - RNA, 19 nt, Artificial Sequence
  Description of Artificial Sequence: Synthetic oligonucleotide
  Sense strand starting at position 3701 of SEQ ID NO: 552
cguuuaaggucauuuaccu

SEQ ID NO: 46115 - RNA, 19 nt, Artificial Sequence
  Description of Artificial Sequence: Synthetic oligonucleotide
  Antisense strand to SEQ ID NO: 46034
agguaaaugaccuuaaacg

SEQ ID NO: 46116 - RNA, 19 nt, Artificial Sequence
  Description of Artificial Sequence: Synthetic oligonucleotide
  Sense strand starting at position 3857 of SEQ ID NO: 552
aggucaaaccaauguauac

SEQ ID NO: 46117 - RNA, 19 nt, Artificial Sequence
  Description of Artificial Sequence: Synthetic oligonucleotide
  Antisense strand to SEQ ID NO: 46036
guauacauugguuugaccu

SEQ ID NO: 46118 - RNA, 19 nt, Artificial Sequence
  Description of Artificial Sequence: Synthetic oligonucleotide
  Sense strand starting at position 3879 of SEQ ID NO: 552
acauauauugacugauguu

SEQ ID NO: 46119 - RNA, 19 nt, Artificial Sequence
  Description of Artificial Sequence: Synthetic oligonucleotide
  Antisense strand to SEQ ID NO: 46038
aacaucagucaauauaugu

SEQ ID NO: 46120 - RNA, 19 nt, Artificial Sequence
  Description of Artificial Sequence: Synthetic oligonucleotide
  Sense strand starting at position 3963 of SEQ ID NO: 553
gcauuuaucugauaaucag

SEQ ID NO: 46121 - RNA, 19 nt, Artificial Sequence
  Description of Artificial Sequence: Synthetic oligonucleotide
  Antisense strand to SEQ ID NO: 46040
cugauuaucagauaaaugc

SEQ ID NO: 46122 - RNA, 19 nt, Artificial Sequence
  Description of Artificial Sequence: Synthetic oligonucleotide
  Sense strand starting at position 3929 of SEQ ID NO: 553
gguguuaggugguauuuca

SEQ ID NO: 46123 - RNA, 19 nt, Artificial Sequence
  Description of Artificial Sequence: Synthetic oligonucleotide
  Antisense strand to SEQ ID NO: 46042
ugaaauaccaccuaacacc

SEQ ID NO: 46124 - RNA, 19 nt, Artificial Sequence
  Description of Artificial Sequence: Synthetic oligonucleotide
  Sense strand starting at position 3926 of SEQ ID NO: 553
accgguguuaggugguauu

SEQ ID NO: 46125 - RNA, 19 nt, Artificial Sequence
  Description of Artificial Sequence: Synthetic oligonucleotide
  Antisense strand to SEQ ID NO: 46044
aauaccaccuaacaccggu

SEQ ID NO: 46126 - RNA, 19 nt, Artificial Sequence
  Description of Artificial Sequence: Synthetic oligonucleotide
  Sense strand starting at position 3917 of SEQ ID NO: 553
cccauucugaccgguguua

SEQ ID NO: 46127 - RNA, 19 nt, Artificial Sequence
  Description of Artificial Sequence: Synthetic oligonucleotide
  Antisense strand to SEQ ID NO: 46046
uaacaccggucagaauggg

SEQ ID NO: 46128 - RNA, 19 nt, Artificial Sequence
  Description of Artificial Sequence: Synthetic oligonucleotide
  Sense strand starting at position 3751 of SEQ ID NO: 553
uacgauuguugggucaaac

SEQ ID NO: 46129 - RNA, 19 nt, Artificial Sequence
  Description of Artificial Sequence: Synthetic oligonucleotide
  Antisense strand to SEQ ID NO: 46048
guuugacccaacaaucgua

SEQ ID NO: 46130 - RNA, 19 nt, Artificial Sequence
  Description of Artificial Sequence: Synthetic oligonucleotide
  Sense strand starting at position 3655 of SEQ ID NO: 553
uauauuugccguugugaau

SEQ ID NO: 46131 - RNA, 19 nt, Artificial Sequence
  Description of Artificial Sequence: Synthetic oligonucleotide
  Antisense strand to SEQ ID NO: 46050
auucacaacggcaaauaua

SEQ ID NO: 46132 - RNA, 19 nt, Artificial Sequence
  Description of Artificial Sequence: Synthetic oligonucleotide
  Sense strand starting at position 3338 of SEQ ID NO: 553
ccuagugcucauuaguugu

SEQ ID NO: 46133 - RNA, 19 nt, Artificial Sequence
  Description of Artificial Sequence: Synthetic oligonucleotide
  Antisense strand to SEQ ID NO: 46052
acaacuaaugagcacuagg

SEQ ID NO: 46134 - RNA, 19 nt, Artificial Sequence
  Description of Artificial Sequence: Synthetic oligonucleotide
  Sense strand starting at position 3297 of SEQ ID NO: 553
gguguuuguuguacagagu

SEQ ID NO: 46135 - RNA, 19 nt, Artificial Sequence
  Description of Artificial Sequence: Synthetic oligonucleotide
  Antisense strand to SEQ ID NO: 46054
acucuguacaacaaacacc

SEQ ID NO: 46136 - RNA, 19 nt, Artificial Sequence
  Description of Artificial Sequence: Synthetic oligonucleotide
  Sense strand starting at position 3181 of SEQ ID NO: 553
gguggaaguucacuugagu

SEQ ID NO: 46137 - RNA, 19 nt, Artificial Sequence
  Description of Artificial Sequence: Synthetic oligonucleotide
  Antisense strand to SEQ ID NO: 46056
acucaagugaacuuccacc

SEQ ID NO: 46138 - RNA, 19 nt, Artificial Sequence
  Description of Artificial Sequence: Synthetic oligonucleotide
  Sense strand starting at position 2917 of SEQ ID NO: 553
ugaagaucuuaagacugaa

SEQ ID NO: 46139 - RNA, 19 nt, Artificial Sequence
  Description of Artificial Sequence: Synthetic oligonucleotide
  Antisense strand to SEQ ID NO: 46058
uucagucuuaagaucuuca

SEQ ID NO: 46140 - RNA, 19 nt, Artificial Sequence
  Description of Artificial Sequence: Synthetic oligonucleotide
  Sense strand starting at position 2914 of SEQ ID NO: 553
agcugaagaucuuaagacu

SEQ ID NO: 46141 - RNA, 19 nt, Artificial Sequence
  Description of Artificial Sequence: Synthetic oligonucleotide
  Antisense strand to SEQ ID NO: 46060
agucuuaagaucuucagcu

SEQ ID NO: 46142 - RNA, 19 nt, Artificial Sequence
  Description of Artificial Sequence: Synthetic oligonucleotide
  Sense strand starting at position 2866 of SEQ ID NO: 553
cuuagaacgagaggaguua

SEQ ID NO: 46143 - RNA, 19 nt, Artificial Sequence
  Description of Artificial Sequence: Synthetic oligonucleotide
  Antisense strand to SEQ ID NO: 46062
uaacuccucucguucuaag

SEQ ID NO: 46144 - RNA, 19 nt, Artificial Sequence
  Description of Artificial Sequence: Synthetic oligonucleotide
  Sense strand starting at position 2785 of SEQ ID NO: 553
cuugcaaugguucagggau

SEQ ID NO: 46145 - RNA, 19 nt, Artificial Sequence
  Description of Artificial Sequence: Synthetic oligonucleotide
  Antisense strand to SEQ ID NO: 46064
aucccugaaccauugcaag

SEQ ID NO: 46146 - RNA, 19 nt, Artificial Sequence
  Description of Artificial Sequence: Synthetic oligonucleotide
  Sense strand starting at position 2762 of SEQ ID NO: 553
gccagaggcuuggcacaaa

SEQ ID NO: 46147 - RNA, 19 nt, Artificial Sequence
  Description of Artificial Sequence: Synthetic oligonucleotide
  Antisense strand to SEQ ID NO: 46066
uuugugccaagccucuggc

SEQ ID NO: 46148 - RNA, 19 nt, Artificial Sequence
  Description of Artificial Sequence: Synthetic oligonucleotide
  Sense strand starting at position 2749 of SEQ ID NO: 553
gaaugugccaugugccaga

SEQ ID NO: 46149 - RNA, 19 nt, Artificial Sequence
  Description of Artificial Sequence: Synthetic oligonucleotide
  Antisense strand to SEQ ID NO: 46068
ucuggcacauggcacauuc

SEQ ID NO: 46150 - RNA, 19 nt, Artificial Sequence
  Description of Artificial Sequence: Synthetic oligonucleotide
  Sense strand starting at position 2461 of SEQ ID NO: 553
agcagauguuuagaaauga

SEQ ID NO: 46151 - RNA, 19 nt, Artificial Sequence
  Description of Artificial Sequence: Synthetic oligonucleotide
  Antisense strand to SEQ ID NO: 46070
ucauuucuaaacaucugcu

SEQ ID NO: 46152 - RNA, 19 nt, Artificial Sequence
  Description of Artificial Sequence: Synthetic oligonucleotide
  Sense strand starting at position 2324 of SEQ ID NO: 553
gccuuccagacgcaugauu

SEQ ID NO: 46153 - RNA, 19 nt, Artificial Sequence
  Description of Artificial Sequence: Synthetic oligonucleotide
  Antisense strand to SEQ ID NO: 46072
aaucaugcgucuggaaggc

SEQ ID NO: 46154 - RNA, 19 nt, Artificial Sequence
  Description of Artificial Sequence: Synthetic oligonucleotide
  Sense strand starting at position 2258 of SEQ ID NO: 553
ugacucauuucuggaagaa

SEQ ID NO: 46155 - RNA, 19 nt, Artificial Sequence
  Description of Artificial Sequence: Synthetic oligonucleotide
  Antisense strand to SEQ ID NO: 46074
uucuuccagaaaugaguca

SEQ ID NO: 46156 - RNA, 19 nt, Artificial Sequence
  Description of Artificial Sequence: Synthetic oligonucleotide
  Sense strand starting at position 2257 of SEQ ID NO: 553
cugacucauuucuggaaga

SEQ ID NO: 46157 - RNA, 19 nt, Artificial Sequence
  Description of Artificial Sequence: Synthetic oligonucleotide
  Antisense strand to SEQ ID NO: 46076
ucuuccagaaaugagucag

SEQ ID NO: 46158 - RNA, 19 nt, Artificial Sequence
  Description of Artificial Sequence: Synthetic oligonucleotide
  Sense strand starting at position 2102 of SEQ ID NO: 553
cgcuguuuccuuuccagca

SEQ ID NO: 46159 - RNA, 19 nt, Artificial Sequence
  Description of Artificial Sequence: Synthetic oligonucleotide
  Antisense strand to SEQ ID NO: 46078
ugcuggaaaggaaacagcg

SEQ ID NO: 46160 - RNA, 19 nt, Artificial Sequence
  Description of Artificial Sequence: Synthetic oligonucleotide
  Sense strand starting at position 2080 of SEQ ID NO: 553
ccuuucuucuccucagcga

SEQ ID NO: 46161 - RNA, 19 nt, Artificial Sequence
  Description of Artificial Sequence: Synthetic oligonucleotide
  Antisense strand to SEQ ID NO: 46080
ucgcugaggagaagaaagg

SEQ ID NO: 46162 - RNA, 19 nt, Artificial Sequence
  Description of Artificial Sequence: Synthetic oligonucleotide
  Sense strand starting at position 1180 of SEQ ID NO: 553
aaguccugucauuguugaa

SEQ ID NO: 46163 - RNA, 19 nt, Artificial Sequence
  Description of Artificial Sequence: Synthetic oligonucleotide
  Antisense strand to SEQ ID NO: 46082
uucaacaaugacaggacuu

SEQ ID NO: 46164 - RNA, 19 nt, Artificial Sequence
  Description of Artificial Sequence: Synthetic oligonucleotide
  Sense strand starting at position 1179 of SEQ ID NO: 553
gaaguccugucauuguuga

SEQ ID NO: 46165 - RNA, 19 nt, Artificial Sequence
  Description of Artificial Sequence: Synthetic oligonucleotide
  Antisense strand to SEQ ID NO: 46084
ucaacaaugacaggacuuc

SEQ ID NO: 46166 - RNA, 19 nt, Artificial Sequence
  Description of Artificial Sequence: Synthetic oligonucleotide
  Sense strand starting at position 1021 of SEQ ID NO: 553
cuaugaguguucuccuuua

SEQ ID NO: 46167 - RNA, 19 nt, Artificial Sequence
  Description of Artificial Sequence: Synthetic oligonucleotide
  Antisense strand to SEQ ID NO: 46086
uaaaggagaacacucauag

SEQ ID NO: 46168 - RNA, 19 nt, Artificial Sequence
  Description of Artificial Sequence: Synthetic oligonucleotide
  Sense strand starting at position 1019 of SEQ ID NO: 553
ggcuaugaguguucuccuu

SEQ ID NO: 46169 - RNA, 19 nt, Artificial Sequence
  Description of Artificial Sequence: Synthetic oligonucleotide
  Antisense strand to SEQ ID NO: 46088
aaggagaacacucauagcc

SEQ ID NO: 46170 - RNA, 19 nt, Artificial Sequence
  Description of Artificial Sequence: Synthetic oligonucleotide
  Sense strand starting at position 950 of SEQ ID NO: 553
uguccaguugaugauaaca

SEQ ID NO: 46171 - RNA, 19 nt, Artificial Sequence
  Description of Artificial Sequence: Synthetic oligonucleotide
  Antisense strand to SEQ ID NO: 46090
uguuaucaucaacuggaca

SEQ ID NO: 46172 - RNA, 19 nt, Artificial Sequence
  Description of Artificial Sequence: Synthetic oligonucleotide
  Sense strand starting at position 857 of SEQ ID NO: 553
cugucauagucuccugcau

SEQ ID NO: 46173 - RNA, 19 nt, Artificial Sequence
  Description of Artificial Sequence: Synthetic oligonucleotide
  Antisense strand to SEQ ID NO: 46092
augcaggagacuaugacag

SEQ ID NO: 46174 - RNA, 19 nt, Artificial Sequence
  Description of Artificial Sequence: Synthetic oligonucleotide
  Sense strand starting at position 821 of SEQ ID NO: 553
acaguuaaaccgcauaaca

SEQ ID NO: 46175 - RNA, 19 nt, Artificial Sequence
  Description of Artificial Sequence: Synthetic oligonucleotide
  Antisense strand to SEQ ID NO: 46094
uguuaugcgguuuaacugu

SEQ ID NO: 46176 - RNA, 19 nt, Artificial Sequence
  Description of Artificial Sequence: Synthetic oligonucleotide
  Sense strand starting at position 766 of SEQ ID NO: 553
uugagagugcacuggguau

SEQ ID NO: 46177 - RNA, 19 nt, Artificial Sequence
  Description of Artificial Sequence: Synthetic oligonucleotide
  Antisense strand to SEQ ID NO: 46096
auacccagugcacucucaa

SEQ ID NO: 46178 - RNA, 19 nt, Artificial Sequence
  Description of Artificial Sequence: Synthetic oligonucleotide
  Sense strand starting at position 645 of SEQ ID NO: 553
aggagaacuacauguguuu

SEQ ID NO: 46179 - RNA, 19 nt, Artificial Sequence
  Description of Artificial Sequence: Synthetic oligonucleotide
  Antisense strand to SEQ ID NO: 46098
aaacacauguaguucuccu

SEQ ID NO: 46180 - RNA, 19 nt, Artificial Sequence
  Description of Artificial Sequence: Synthetic oligonucleotide
  Sense strand starting at position 460 of SEQ ID NO: 553
aggcaaugcgaucaguaca

SEQ ID NO: 46181 - RNA, 19 nt, Artificial Sequence
  Description of Artificial Sequence: Synthetic oligonucleotide
  Antisense strand to SEQ ID NO: 46100
uguacugaucgcauugccu

SEQ ID NO: 46182 - RNA, 19 nt, Artificial Sequence
  Description of Artificial Sequence: Synthetic oligonucleotide
  Sense strand starting at position 449 of SEQ ID NO: 553
auuuaauccucaggcaaug

SEQ ID NO: 46183 - RNA, 19 nt, Artificial Sequence
  Description of Artificial Sequence: Synthetic oligonucleotide
  Antisense strand to SEQ ID NO: 46102
cauugccugaggauuaaau

SEQ ID NO: 46184 - RNA, 19 nt, Artificial Sequence
  Description of Artificial Sequence: Synthetic oligonucleotide
  Sense strand starting at position 394 of SEQ ID NO: 553
cuuauaugugcauagugac

SEQ ID NO: 46185 - RNA, 19 nt, Artificial Sequence
  Description of Artificial Sequence: Synthetic oligonucleotide
  Antisense strand to SEQ ID NO: 46104
gucacuaugcacauauaag

SEQ ID NO: 46186 - RNA, 19 nt, Artificial Sequence
  Description of Artificial Sequence: Synthetic oligonucleotide
  Sense strand starting at position 392 of SEQ ID NO: 553
gucuuauaugugcauagug

SEQ ID NO: 46187 - RNA, 19 nt, Artificial Sequence
  Description of Artificial Sequence: Synthetic oligonucleotide
  Antisense strand to SEQ ID NO: 46106
cacuaugcacauauaagac

SEQ ID NO: 46188 - RNA, 19 nt, Artificial Sequence
  Description of Artificial Sequence: Synthetic oligonucleotide
  Sense strand starting at position 391 of SEQ ID NO: 553
ugucuuauaugugcauagu

SEQ ID NO: 46189 - RNA, 19 nt, Artificial Sequence
  Description of Artificial Sequence: Synthetic oligonucleotide
  Antisense strand to SEQ ID NO: 46108
acuaugcacauauaagaca

SEQ ID NO: 46190 - RNA, 19 nt, Artificial Sequence
  Description of Artificial Sequence: Synthetic oligonucleotide
  Sense strand starting at position 382 of SEQ ID NO: 553
guacuaucaugucuuauau

SEQ ID NO: 46191 - RNA, 19 nt, Artificial Sequence
  Description of Artificial Sequence: Synthetic oligonucleotide
  Antisense strand to SEQ ID NO: 46110
auauaagacaugauaguac

SEQ ID NO: 46192 - RNA, 19 nt, Artificial Sequence
  Description of Artificial Sequence: Synthetic oligonucleotide
  Sense strand starting at position 334 of SEQ ID NO: 553
ggcacauuguaaguucuaa

SEQ ID NO: 46193 - RNA, 19 nt, Artificial Sequence
  Description of Artificial Sequence: Synthetic oligonucleotide
  Antisense strand to SEQ ID NO: 46112
uuagaacuuacaaugugcc

SEQ ID NO: 46194 - RNA, 19 nt, Artificial Sequence
  Description of Artificial Sequence: Synthetic oligonucleotide
  Sense strand starting at position 245 of SEQ ID NO: 553
agcuuugucauagggaaau

SEQ ID NO: 46195 - RNA, 19 nt, Artificial Sequence
  Description of Artificial Sequence: Synthetic oligonucleotide
  Antisense strand to SEQ ID NO: 46114
auuucccuaugacaaagcu

SEQ ID NO: 46196 - RNA, 19 nt, Artificial Sequence
  Description of Artificial Sequence: Synthetic oligonucleotide
  Sense strand starting at position 197 of SEQ ID NO: 553
uuaagagcucugugagcuu

SEQ ID NO: 46197 - RNA, 19 nt, Artificial Sequence
  Description of Artificial Sequence: Synthetic oligonucleotide
  Antisense strand to SEQ ID NO: 46116
aagcucacagagcucuuaa

SEQ ID NO: 46198 - RNA, 19 nt, Artificial Sequence
  Description of Artificial Sequence: Synthetic oligonucleotide
  Sense strand starting at position 84 of SEQ ID NO: 553
uaauauaggucuguucuga

SEQ ID NO: 46199 - RNA, 19 nt, Artificial Sequence
  Description of Artificial Sequence: Synthetic oligonucleotide
  Antisense strand to SEQ ID NO: 46118
ucagaacagaccuauauua

SEQ ID NO: 46200 - RNA, 19 nt, Artificial Sequence
  Description of Artificial Sequence: Synthetic oligonucleotide
  Sense strand starting at position 3778 of SEQ ID NO: 554
gugaaauguuuccuuauag

SEQ ID NO: 46201 - RNA, 19 nt, Artificial Sequence
  Description of Artificial Sequence: Synthetic oligonucleotide
  Antisense strand to SEQ ID NO: 46120
cuauaaggaaacauuucac

SEQ ID NO: 46202 - RNA, 19 nt, Artificial Sequence
  Description of Artificial Sequence: Synthetic oligonucleotide
  Sense strand starting at position 3767 of SEQ ID NO: 554
auagacacucugugaaaug

SEQ ID NO: 46203 - RNA, 19 nt, Artificial Sequence
  Description of Artificial Sequence: Synthetic oligonucleotide
  Antisense strand to SEQ ID NO: 46122
cauuucacagagugucuau

SEQ ID NO: 46204 - RNA, 19 nt, Artificial Sequence
  Description of Artificial Sequence: Synthetic oligonucleotide
  Sense strand starting at position 3668 of SEQ ID NO: 554
gaaagaagagaguguguau

SEQ ID NO: 46205 - RNA, 19 nt, Artificial Sequence
  Description of Artificial Sequence: Synthetic oligonucleotide
  Antisense strand to SEQ ID NO: 46124
auacacacucucuucuuuc

SEQ ID NO: 46206 - RNA, 19 nt, Artificial Sequence
  Description of Artificial Sequence: Synthetic oligonucleotide
  Sense strand starting at position 3609 of SEQ ID NO: 554
uguggugauacuugaaaua

SEQ ID NO: 46207 - RNA, 19 nt, Artificial Sequence
  Description of Artificial Sequence: Synthetic oligonucleotide
  Antisense strand to SEQ ID NO: 46126
uauuucaaguaucaccaca

SEQ ID NO: 46208 - RNA, 19 nt, Artificial Sequence
  Description of Artificial Sequence: Synthetic oligonucleotide
  Sense strand starting at position 3519 of SEQ ID NO: 554
ucuguacuuagagggcaua

SEQ ID NO: 46209 - RNA, 19 nt, Artificial Sequence
  Description of Artificial Sequence: Synthetic oligonucleotide
  Antisense strand to SEQ ID NO: 46128
uaugcccucuaaguacaga

SEQ ID NO: 46210 - RNA, 19 nt, Artificial Sequence
  Description of Artificial Sequence: Synthetic oligonucleotide
  Sense strand starting at position 3502 of SEQ ID NO: 554
ggauaucguguagaaaguc

SEQ ID NO: 46211 - RNA, 19 nt, Artificial Sequence
  Description of Artificial Sequence: Synthetic oligonucleotide
  Antisense strand to SEQ ID NO: 46130
gacuuucuacacgauaucc

SEQ ID NO: 46212 - RNA, 19 nt, Artificial Sequence
  Description of Artificial Sequence: Synthetic oligonucleotide
  Sense strand starting at position 3500 of SEQ ID NO: 554
auggauaucguguagaaag

SEQ ID NO: 46213 - RNA, 19 nt, Artificial Sequence
  Description of Artificial Sequence: Synthetic oligonucleotide
  Antisense strand to SEQ ID NO: 46132
cuuucuacacgauauccau

SEQ ID NO: 46214 - RNA, 19 nt, Artificial Sequence
  Description of Artificial Sequence: Synthetic oligonucleotide
  Sense strand starting at position 3336 of SEQ ID NO: 554
gcuaccaguguuuaauaaa

SEQ ID NO: 46215 - RNA, 19 nt, Artificial Sequence
  Description of Artificial Sequence: Synthetic oligonucleotide
  Antisense strand to SEQ ID NO: 46134
uuuauuaaacacugguagc

SEQ ID NO: 46216 - RNA, 19 nt, Artificial Sequence
  Description of Artificial Sequence: Synthetic oligonucleotide
  Sense strand starting at position 3227 of SEQ ID NO: 554
cugagaugcuaacugaagu

SEQ ID NO: 46217 - RNA, 19 nt, Artificial Sequence
  Description of Artificial Sequence: Synthetic oligonucleotide
  Antisense strand to SEQ ID NO: 46136
acuucaguuagcaucucag

SEQ ID NO: 46218 - RNA, 19 nt, Artificial Sequence
  Description of Artificial Sequence: Synthetic oligonucleotide
  Sense strand starting at position 3116 of SEQ ID NO: 554
cugccauacccagauguaa

SEQ ID NO: 46219 - RNA, 19 nt, Artificial Sequence
  Description of Artificial Sequence: Synthetic oligonucleotide
  Antisense strand to SEQ ID NO: 46138
uuacaucuggguauggcag

SEQ ID NO: 46220 - RNA, 19 nt, Artificial Sequence
  Description of Artificial Sequence: Synthetic oligonucleotide
  Sense strand starting at position 3046 of SEQ ID NO: 554
uguccuagucaucaaagaa

SEQ ID NO: 46221 - RNA, 19 nt, Artificial Sequence
  Description of Artificial Sequence: Synthetic oligonucleotide
  Antisense strand to SEQ ID NO: 46140
uucuuugaugacuaggaca

SEQ ID NO: 46222 - RNA, 19 nt, Artificial Sequence
  Description of Artificial Sequence: Synthetic oligonucleotide
  Sense strand starting at position 3045 of SEQ ID NO: 554
uuguccuagucaucaaaga

SEQ ID NO: 46223 - RNA, 19 nt, Artificial Sequence
  Description of Artificial Sequence: Synthetic oligonucleotide
  Antisense strand to SEQ ID NO: 46142
ucuuugaugacuaggacaa

SEQ ID NO: 46224 - RNA, 19 nt, Artificial Sequence
  Description of Artificial Sequence: Synthetic oligonucleotide
  Sense strand starting at position 2867 of SEQ ID NO: 554
caaagugucagauggcaga

SEQ ID NO: 46225 - RNA, 19 nt, Artificial Sequence
  Description of Artificial Sequence: Synthetic oligonucleotide
  Antisense strand to SEQ ID NO: 46144
ucugccaucugacacuuug

SEQ ID NO: 46226 - RNA, 19 nt, Artificial Sequence
  Description of Artificial Sequence: Synthetic oligonucleotide
  Sense strand starting at position 2608 of SEQ ID NO: 554
gaggcuuaugcacagaaac

SEQ ID NO: 46227 - RNA, 19 nt, Artificial Sequence
  Description of Artificial Sequence: Synthetic oligonucleotide
  Antisense strand to SEQ ID NO: 46146
guuucugugcauaagccuc

SEQ ID NO: 46228 - RNA, 19 nt, Artificial Sequence
  Description of Artificial Sequence: Synthetic oligonucleotide
  Sense strand starting at position 2469 of SEQ ID NO: 554
uauauaggccugugaacaa

SEQ ID NO: 46229 - RNA, 19 nt, Artificial Sequence
  Description of Artificial Sequence: Synthetic oligonucleotide
  Antisense strand to SEQ ID NO: 46148
uuguucacaggccuauaua

SEQ ID NO: 46230 - RNA, 19 nt, Artificial Sequence
  Description of Artificial Sequence: Synthetic oligonucleotide
  Sense strand starting at position 2410 of SEQ ID NO: 554
aguaaaucacgccacaaga

SEQ ID NO: 46231 - RNA, 19 nt, Artificial Sequence
  Description of Artificial Sequence: Synthetic oligonucleotide
  Antisense strand to SEQ ID NO: 46150
ucuuguggcgugauuuacu

SEQ ID NO: 46232 - RNA, 19 nt, Artificial Sequence
  Description of Artificial Sequence: Synthetic oligonucleotide
  Sense strand starting at position 1702 of SEQ ID NO: 554
acuuuccuccgagaugcaa

SEQ ID NO: 46233 - RNA, 19 nt, Artificial Sequence
  Description of Artificial Sequence: Synthetic oligonucleotide
  Antisense strand to SEQ ID NO: 46152
uugcaucucggaggaaagu

SEQ ID NO: 46234 - RNA, 19 nt, Artificial Sequence
  Description of Artificial Sequence: Synthetic oligonucleotide
  Sense strand starting at position 1699 of SEQ ID NO: 554
acuacuuuccuccgagaug

SEQ ID NO: 46235 - RNA, 19 nt, Artificial Sequence
  Description of Artificial Sequence: Synthetic oligonucleotide
  Antisense strand to SEQ ID NO: 46154
caucucggaggaaaguagu

SEQ ID NO: 46236 - RNA, 19 nt, Artificial Sequence
  Description of Artificial Sequence: Synthetic oligonucleotide
  Sense strand starting at position 1697 of SEQ ID NO: 554
ugacuacuuuccuccgaga

SEQ ID NO: 46237 - RNA, 19 nt, Artificial Sequence
  Description of Artificial Sequence: Synthetic oligonucleotide
  Antisense strand to SEQ ID NO: 46156
ucucggaggaaaguaguca

SEQ ID NO: 46238 - RNA, 19 nt, Artificial Sequence
  Description of Artificial Sequence: Synthetic oligonucleotide
  Sense strand starting at position 1549 of SEQ ID NO: 554
guucguuaggucaagacgu

SEQ ID NO: 46239 - RNA, 19 nt, Artificial Sequence
  Description of Artificial Sequence: Synthetic oligonucleotide
  Antisense strand to SEQ ID NO: 46158
acgucuugaccuaacgaac

SEQ ID NO: 46240 - RNA, 19 nt, Artificial Sequence
  Description of Artificial Sequence: Synthetic oligonucleotide
  Sense strand starting at position 1448 of SEQ ID NO: 554
cgcggagcgggauauauuu

SEQ ID NO: 46241 - RNA, 19 nt, Artificial Sequence
  Description of Artificial Sequence: Synthetic oligonucleotide
  Antisense strand to SEQ ID NO: 46160
aaauauaucccgcuccgcg

SEQ ID NO: 46242 - RNA, 19 nt, Artificial Sequence
  Description of Artificial Sequence: Synthetic oligonucleotide
  Sense strand starting at position 1325 of SEQ ID NO: 554
ugucuuccuugggugaaga

SEQ ID NO: 46243 - RNA, 19 nt, Artificial Sequence
  Description of Artificial Sequence: Synthetic oligonucleotide
  Antisense strand to SEQ ID NO: 46162
ucuucacccaaggaagaca

SEQ ID NO: 46244 - RNA, 19 nt, Artificial Sequence
  Description of Artificial Sequence: Synthetic oligonucleotide
  Sense strand starting at position 1278 of SEQ ID NO: 554
agcuaaacucugcagggua

SEQ ID NO: 46245 - RNA, 19 nt, Artificial Sequence
  Description of Artificial Sequence: Synthetic oligonucleotide
  Antisense strand to SEQ ID NO: 46164
uacccugcagaguuuagcu

SEQ ID NO: 46246 - RNA, 19 nt, Artificial Sequence
  Description of Artificial Sequence: Synthetic oligonucleotide
  Sense strand starting at position 1095 of SEQ ID NO: 554
gccuuuauugguuaaacua

SEQ ID NO: 46247 - RNA, 19 nt, Artificial Sequence
  Description of Artificial Sequence: Synthetic oligonucleotide
  Antisense strand to SEQ ID NO: 46166
uaguuuaaccaauaaaggc

SEQ ID NO: 46248 - RNA, 19 nt, Artificial Sequence
  Description of Artificial Sequence: Synthetic oligonucleotide
  Sense strand starting at position 938 of SEQ ID NO: 554
gaucuuggguuaucaauau

SEQ ID NO: 46249 - RNA, 19 nt, Artificial Sequence
  Description of Artificial Sequence: Synthetic oligonucleotide
  Antisense strand to SEQ ID NO: 46168
auauugauaacccaagauc

SEQ ID NO: 46250 - RNA, 19 nt, Artificial Sequence
  Description of Artificial Sequence: Synthetic oligonucleotide
  Sense strand starting at position 934 of SEQ ID NO: 554
aacagaucuuggguuauca

SEQ ID NO: 46251 - RNA, 19 nt, Artificial Sequence
  Description of Artificial Sequence: Synthetic oligonucleotide
  Antisense strand to SEQ ID NO: 46170
ugauaacccaagaucuguu

SEQ ID NO: 46252 - RNA, 19 nt, Artificial Sequence
  Description of Artificial Sequence: Synthetic oligonucleotide
  Sense strand starting at position 932 of SEQ ID NO: 554
acaacagaucuuggguuau

SEQ ID NO: 46253 - RNA, 19 nt, Artificial Sequence
  Description of Artificial Sequence: Synthetic oligonucleotide
  Antisense strand to SEQ ID NO: 46172
auaacccaagaucuguugu

SEQ ID NO: 46254 - RNA, 19 nt, Artificial Sequence
  Description of Artificial Sequence: Synthetic oligonucleotide
  Sense strand starting at position 917 of SEQ ID NO: 554
gcuaaugugcguguaacaa

SEQ ID NO: 46255 - RNA, 19 nt, Artificial Sequence
  Description of Artificial Sequence: Synthetic oligonucleotide
  Antisense strand to SEQ ID NO: 46174
uuguuacacgcacauuagc

SEQ ID NO: 46256 - RNA, 19 nt, Artificial Sequence
  Description of Artificial Sequence: Synthetic oligonucleotide
  Sense strand starting at position 818 of SEQ ID NO: 554
acauaaaugcaagguaaau

SEQ ID NO: 46257 - RNA, 19 nt, Artificial Sequence
  Description of Artificial Sequence: Synthetic oligonucleotide
  Antisense strand to SEQ ID NO: 46176
auuuaccuugcauuuaugu

SEQ ID NO: 46258 - RNA, 19 nt, Artificial Sequence
  Description of Artificial Sequence: Synthetic oligonucleotide
  Sense strand starting at position 749 of SEQ ID NO: 554
uuguaauuacacugaguga

SEQ ID NO: 46259 - RNA, 19 nt, Artificial Sequence
  Description of Artificial Sequence: Synthetic oligonucleotide
  Antisense strand to SEQ ID NO: 46178
ucacucaguguaauuacaa

SEQ ID NO: 46260 - RNA, 19 nt, Artificial Sequence
  Description of Artificial Sequence: Synthetic oligonucleotide
  Sense strand starting at position 739 of SEQ ID NO: 554
aggagaaucuuuguaauua

SEQ ID NO: 46261 - RNA, 19 nt, Artificial Sequence
  Description of Artificial Sequence: Synthetic oligonucleotide
  Antisense strand to SEQ ID NO: 46180
uaauuacaaagauucuccu

SEQ ID NO: 46262 - RNA, 19 nt, Artificial Sequence
  Description of Artificial Sequence: Synthetic oligonucleotide
  Sense strand starting at position 737 of SEQ ID NO: 554
cuaggagaaucuuuguaau

SEQ ID NO: 46263 - RNA, 19 nt, Artificial Sequence
  Description of Artificial Sequence: Synthetic oligonucleotide
  Antisense strand to SEQ ID NO: 46182
auuacaaagauucuccuag

SEQ ID NO: 46264 - RNA, 19 nt, Artificial Sequence
  Description of Artificial Sequence: Synthetic oligonucleotide
  Sense strand starting at position 472 of SEQ ID NO: 554
aagauaucgcaguaccaau

SEQ ID NO: 46265 - RNA, 19 nt, Artificial Sequence
  Description of Artificial Sequence: Synthetic oligonucleotide
  Antisense strand to SEQ ID NO: 46184
auugguacugcgauaucuu

SEQ ID NO: 46266 - RNA, 19 nt, Artificial Sequence
  Description of Artificial Sequence: Synthetic oligonucleotide
  Sense strand starting at position 408 of SEQ ID NO: 554
cguuauaacuguguauuuc

SEQ ID NO: 46267 - RNA, 19 nt, Artificial Sequence
  Description of Artificial Sequence: Synthetic oligonucleotide
  Antisense strand to SEQ ID NO: 46186
gaaauacacaguuauaacg

SEQ ID NO: 46268 - RNA, 19 nt, Artificial Sequence
  Description of Artificial Sequence: Synthetic oligonucleotide
  Sense strand starting at position 407 of SEQ ID NO: 554
acguuauaacuguguauuu

SEQ ID NO: 46269 - RNA, 19 nt, Artificial Sequence
  Description of Artificial Sequence: Synthetic oligonucleotide
  Antisense strand to SEQ ID NO: 46188
aaauacacaguuauaacgu

SEQ ID NO: 46270 - RNA, 19 nt, Artificial Sequence
  Description of Artificial Sequence: Synthetic oligonucleotide
  Sense strand starting at position 396 of SEQ ID NO: 554
uaaacauaaggacguuaua

SEQ ID NO: 46271 - RNA, 19 nt, Artificial Sequence
  Description of Artificial Sequence: Synthetic oligonucleotide
  Antisense strand to SEQ ID NO: 46190
uauaacguccuuauguuua

SEQ ID NO: 46272 - RNA, 19 nt, Artificial Sequence
  Description of Artificial Sequence: Synthetic oligonucleotide
  Sense strand starting at position 272 of SEQ ID NO: 554
uuuagagaucaguguuauc

SEQ ID NO: 46273 - RNA, 19 nt, Artificial Sequence
  Description of Artificial Sequence: Synthetic oligonucleotide
  Antisense strand to SEQ ID NO: 46192
gauaacacugaucucuaaa

SEQ ID NO: 46274 - RNA, 19 nt, Artificial Sequence
  Description of Artificial Sequence: Synthetic oligonucleotide
  Sense strand starting at position 269 of SEQ ID NO: 554
uacuuuagagaucaguguu

SEQ ID NO: 46275 - RNA, 19 nt, Artificial Sequence
  Description of Artificial Sequence: Synthetic oligonucleotide
  Antisense strand to SEQ ID NO: 46194
aacacugaucucuaaagua

SEQ ID NO: 46276 - RNA, 19 nt, Artificial Sequence
  Description of Artificial Sequence: Synthetic oligonucleotide
  Sense strand starting at position 242 of SEQ ID NO: 554
agaaauuaacauggcaguu

SEQ ID NO: 46277 - RNA, 19 nt, Artificial Sequence
  Description of Artificial Sequence: Synthetic oligonucleotide
  Antisense strand to SEQ ID NO: 46196
aacugccauguuaauuucu

SEQ ID NO: 46278 - RNA, 19 nt, Artificial Sequence
  Description of Artificial Sequence: Synthetic oligonucleotide
  Sense strand starting at position 50 of SEQ ID NO: 554
gggcaagugcucuuguguu

SEQ ID NO: 46279 - RNA, 19 nt, Artificial Sequence
  Description of Artificial Sequence: Synthetic oligonucleotide
  Antisense strand to SEQ ID NO: 46198
aacacaagagcacuugccc

SEQ ID NO: 46280 - RNA, 19 nt, Artificial Sequence
  Description of Artificial Sequence: Synthetic oligonucleotide
  Sense strand starting at position 257 of SEQ ID NO: 555
cccaguucuuugggucacu

SEQ ID NO: 46281 - RNA, 19 nt, Artificial Sequence
  Description of Artificial Sequence: Synthetic oligonucleotide
  Antisense strand to SEQ ID NO: 46200
agugacccaaagaacuggg

SEQ ID NO: 46282 - RNA, 19 nt, Artificial Sequence
  Description of Artificial Sequence: Synthetic oligonucleotide
  Sense strand starting at position 260 of SEQ ID NO: 555
aguucuuugggucacugaa

SEQ ID NO: 46283 - RNA, 19 nt, Artificial Sequence
  Description of Artificial Sequence: Synthetic oligonucleotide
  Antisense strand to SEQ ID NO: 46202
uucagugacccaaagaacu

SEQ ID NO: 46284 - RNA, 19 nt, Artificial Sequence
  Description of Artificial Sequence: Synthetic oligonucleotide
  Sense strand starting at position 290 of SEQ ID NO: 555
gaggucuuucuguaccacu

SEQ ID NO: 46285 - RNA, 19 nt, Artificial Sequence
  Description of Artificial Sequence: Synthetic oligonucleotide
  Antisense strand to SEQ ID NO: 46204
agugguacagaaagaccuc

SEQ ID NO: 46286 - RNA, 19 nt, Artificial Sequence
  Description of Artificial Sequence: Synthetic oligonucleotide
  Sense strand starting at position 314 of SEQ ID NO: 555
gcagugugugguuguggaa

SEQ ID NO: 46287 - RNA, 19 nt, Artificial Sequence
  Description of Artificial Sequence: Synthetic oligonucleotide
  Antisense strand to SEQ ID NO: 46206
uuccacaaccacacacugc

SEQ ID NO: 46288 - RNA, 19 nt, Artificial Sequence
  Description of Artificial Sequence: Synthetic oligonucleotide
  Sense strand starting at position 366 of SEQ ID NO: 555
aucuguaaaucggcauuau

SEQ ID NO: 46289 - RNA, 19 nt, Artificial Sequence
  Description of Artificial Sequence: Synthetic oligonucleotide
  Antisense strand to SEQ ID NO: 46208
auaaugccgauuuacagau

SEQ ID NO: 46290 - RNA, 19 nt, Artificial Sequence
  Description of Artificial Sequence: Synthetic oligonucleotide
  Sense strand starting at position 367 of SEQ ID NO: 555
ucuguaaaucggcauuaua

SEQ ID NO: 46291 - RNA, 19 nt, Artificial Sequence
  Description of Artificial Sequence: Synthetic oligonucleotide
  Antisense strand to SEQ ID NO: 46210
uauaaugccgauuuacaga

SEQ ID NO: 46292 - RNA, 19 nt, Artificial Sequence
  Description of Artificial Sequence: Synthetic oligonucleotide
  Sense strand starting at position 376 of SEQ ID NO: 555
cggcauuauauuugguuga

SEQ ID NO: 46293 - RNA, 19 nt, Artificial Sequence
  Description of Artificial Sequence: Synthetic oligonucleotide
  Antisense strand to SEQ ID NO: 46212
ucaaccaaauauaaugccg

SEQ ID NO: 46294 - RNA, 19 nt, Artificial Sequence
  Description of Artificial Sequence: Synthetic oligonucleotide
  Sense strand starting at position 377 of SEQ ID NO: 555
ggcauuauauuugguugaa

SEQ ID NO: 46295 - RNA, 19 nt, Artificial Sequence
  Description of Artificial Sequence: Synthetic oligonucleotide
  Antisense strand to SEQ ID NO: 46214
uucaaccaaauauaaugcc

SEQ ID NO: 46296 - RNA, 19 nt, Artificial Sequence
  Description of Artificial Sequence: Synthetic oligonucleotide
  Sense strand starting at position 448 of SEQ ID NO: 555
guugcauauggcuuaacgu

SEQ ID NO: 46297 - RNA, 19 nt, Artificial Sequence
  Description of Artificial Sequence: Synthetic oligonucleotide
  Antisense strand to SEQ ID NO: 46216
acguuaagccauaugcaac

SEQ ID NO: 46298 - RNA, 19 nt, Artificial Sequence
  Description of Artificial Sequence: Synthetic oligonucleotide
  Sense strand starting at position 457 of SEQ ID NO: 555
ggcuuaacgugauaccugu

SEQ ID NO: 46299 - RNA, 19 nt, Artificial Sequence
  Description of Artificial Sequence: Synthetic oligonucleotide
  Antisense strand to SEQ ID NO: 46218
acagguaucacguuaagcc

SEQ ID NO: 46300 - RNA, 19 nt, Artificial Sequence
  Description of Artificial Sequence: Synthetic oligonucleotide
  Sense strand starting at position 543 of SEQ ID NO: 555
gaacuaauaugagggcauu

SEQ ID NO: 46301 - RNA, 19 nt, Artificial Sequence
  Description of Artificial Sequence: Synthetic oligonucleotide
  Antisense strand to SEQ ID NO: 46220
aaugcccucauauuaguuc

SEQ ID NO: 46302 - RNA, 19 nt, Artificial Sequence
  Description of Artificial Sequence: Synthetic oligonucleotide
  Sense strand starting at position 641 of SEQ ID NO: 555
agguuugggacuuggaagu

SEQ ID NO: 46303 - RNA, 19 nt, Artificial Sequence
  Description of Artificial Sequence: Synthetic oligonucleotide
  Antisense strand to SEQ ID NO: 46222
acuuccaagucccaaaccu

SEQ ID NO: 46304 - RNA, 19 nt, Artificial Sequence
  Description of Artificial Sequence: Synthetic oligonucleotide
  Sense strand starting at position 745 of SEQ ID NO: 555
gugaaacauuauugagaug

SEQ ID NO: 46305 - RNA, 19 nt, Artificial Sequence
  Description of Artificial Sequence: Synthetic oligonucleotide
  Antisense strand to SEQ ID NO: 46224
caucucaauaauguuucac

SEQ ID NO: 46306 - RNA, 19 nt, Artificial Sequence
  Description of Artificial Sequence: Synthetic oligonucleotide
  Sense strand starting at position 940 of SEQ ID NO: 555
ccacaaagcucuugccuga

SEQ ID NO: 46307 - RNA, 19 nt, Artificial Sequence
  Description of Artificial Sequence: Synthetic oligonucleotide
  Antisense strand to SEQ ID NO: 46226
ucaggcaagagcuuugugg

SEQ ID NO: 46308 - RNA, 19 nt, Artificial Sequence
  Description of Artificial Sequence: Synthetic oligonucleotide
  Sense strand starting at position 1011 of SEQ ID NO: 555
gucucaucucccuguccca

SEQ ID NO: 46309 - RNA, 19 nt, Artificial Sequence
  Description of Artificial Sequence: Synthetic oligonucleotide
  Antisense strand to SEQ ID NO: 46228
ugggacagggagaugagac

SEQ ID NO: 46310 - RNA, 19 nt, Artificial Sequence
  Description of Artificial Sequence: Synthetic oligonucleotide
  Sense strand starting at position 1076 of SEQ ID NO: 555
gugggugauucagagugaa

SEQ ID NO: 46311 - RNA, 19 nt, Artificial Sequence
  Description of Artificial Sequence: Synthetic oligonucleotide
  Antisense strand to SEQ ID NO: 46230
uucacucugaaucacccac

SEQ ID NO: 46312 - RNA, 19 nt, Artificial Sequence
  Description of Artificial Sequence: Synthetic oligonucleotide
  Sense strand starting at position 1491 of SEQ ID NO: 555
ggaaacuucucuccggauc

SEQ ID NO: 46313 - RNA, 19 nt, Artificial Sequence
  Description of Artificial Sequence: Synthetic oligonucleotide
  Antisense strand to SEQ ID NO: 46232
gauccggagagaaguuucc

SEQ ID NO: 46314 - RNA, 19 nt, Artificial Sequence
  Description of Artificial Sequence: Synthetic oligonucleotide
  Sense strand starting at position 2470 of SEQ ID NO: 555
gcagucacgcccugaaugu

SEQ ID NO: 46315 - RNA, 19 nt, Artificial Sequence
  Description of Artificial Sequence: Synthetic oligonucleotide
  Antisense strand to SEQ ID NO: 46234
acauucagggcgugacugc

SEQ ID NO: 46316 - RNA, 19 nt, Artificial Sequence
  Description of Artificial Sequence: Synthetic oligonucleotide
  Sense strand starting at position 3027 of SEQ ID NO: 555
caggguaggugugaggaaa

SEQ ID NO: 46317 - RNA, 19 nt, Artificial Sequence
  Description of Artificial Sequence: Synthetic oligonucleotide
  Antisense strand to SEQ ID NO: 46236
uuuccucacaccuacccug

SEQ ID NO: 46318 - RNA, 19 nt, Artificial Sequence
  Description of Artificial Sequence: Synthetic oligonucleotide
  Sense strand starting at position 3187 of SEQ ID NO: 555
aggaacauaccuuggaguu

SEQ ID NO: 46319 - RNA, 19 nt, Artificial Sequence
  Description of Artificial Sequence: Synthetic oligonucleotide
  Antisense strand to SEQ ID NO: 46238
aacuccaagguauguuccu

SEQ ID NO: 46320 - RNA, 19 nt, Artificial Sequence
  Description of Artificial Sequence: Synthetic oligonucleotide
  Sense strand starting at position 3188 of SEQ ID NO: 555
ggaacauaccuuggaguug

SEQ ID NO: 46321 - RNA, 19 nt, Artificial Sequence
  Description of Artificial Sequence: Synthetic oligonucleotide
  Antisense strand to SEQ ID NO: 46240
caacuccaagguauguucc

SEQ ID NO: 46322 - RNA, 19 nt, Artificial Sequence
  Description of Artificial Sequence: Synthetic oligonucleotide
  Sense strand starting at position 3189 of SEQ ID NO: 555
gaacauaccuuggaguugu

SEQ ID NO: 46323 - RNA, 19 nt, Artificial Sequence
  Description of Artificial Sequence: Synthetic oligonucleotide
  Antisense strand to SEQ ID NO: 46242
acaacuccaagguauguuc

SEQ ID NO: 46324 - RNA, 19 nt, Artificial Sequence
  Description of Artificial Sequence: Synthetic oligonucleotide
  Sense strand starting at position 3274 of SEQ ID NO: 555
cggcucuccucccuguaua

SEQ ID NO: 46325 - RNA, 19 nt, Artificial Sequence
  Description of Artificial Sequence: Synthetic oligonucleotide
  Antisense strand to SEQ ID NO: 46244
uauacagggaggagagccg

SEQ ID NO: 46326 - RNA, 19 nt, Artificial Sequence
  Description of Artificial Sequence: Synthetic oligonucleotide
  Sense strand starting at position 3275 of SEQ ID NO: 555
ggcucuccucccuguauaa

SEQ ID NO: 46327 - RNA, 19 nt, Artificial Sequence
  Description of Artificial Sequence: Synthetic oligonucleotide
  Antisense strand to SEQ ID NO: 46246
uuauacagggaggagagcc

SEQ ID NO: 46328 - RNA, 19 nt, Artificial Sequence
  Description of Artificial Sequence: Synthetic oligonucleotide
  Sense strand starting at position 3448 of SEQ ID NO: 555
cuagaagucugguaagaga

SEQ ID NO: 46329 - RNA, 19 nt, Artificial Sequence
  Description of Artificial Sequence: Synthetic oligonucleotide
  Antisense strand to SEQ ID NO: 46248
ucucuuaccagacuucuag

SEQ ID NO: 46330 - RNA, 19 nt, Artificial Sequence
  Description of Artificial Sequence: Synthetic oligonucleotide
  Sense strand starting at position 3451 of SEQ ID NO: 555
gaagucugguaagagacua

SEQ ID NO: 46331 - RNA, 19 nt, Artificial Sequence
  Description of Artificial Sequence: Synthetic oligonucleotide
  Antisense strand to SEQ ID NO: 46250
uagucucuuaccagacuuc

SEQ ID NO: 46332 - RNA, 19 nt, Artificial Sequence
  Description of Artificial Sequence: Synthetic oligonucleotide
  Sense strand starting at position 3459 of SEQ ID NO: 555
guaagagacuaguagauug

SEQ ID NO: 46333 - RNA, 19 nt, Artificial Sequence
  Description of Artificial Sequence: Synthetic oligonucleotide
  Antisense strand to SEQ ID NO: 46252
caaucuacuagucucuuac

SEQ ID NO: 46334 - RNA, 19 nt, Artificial Sequence
  Description of Artificial Sequence: Synthetic oligonucleotide
  Sense strand starting at position 3467 of SEQ ID NO: 555
cuaguagauuggucaccua

SEQ ID NO: 46335 - RNA, 19 nt, Artificial Sequence
  Description of Artificial Sequence: Synthetic oligonucleotide
  Antisense strand to SEQ ID NO: 46254
uaggugaccaaucuacuag

SEQ ID NO: 46336 - RNA, 19 nt, Artificial Sequence
  Description of Artificial Sequence: Synthetic oligonucleotide
  Sense strand starting at position 3519 of SEQ ID NO: 555
ucaaucaugaagugagguu

SEQ ID NO: 46337 - RNA, 19 nt, Artificial Sequence
  Description of Artificial Sequence: Synthetic oligonucleotide
  Antisense strand to SEQ ID NO: 46256
aaccucacuucaugauuga

SEQ ID NO: 46338 - RNA, 19 nt, Artificial Sequence
  Description of Artificial Sequence: Synthetic oligonucleotide
  Sense strand starting at position 3567 of SEQ ID NO: 555
aagagcagaugucaugaaa

SEQ ID NO: 46339 - RNA, 19 nt, Artificial Sequence
  Description of Artificial Sequence: Synthetic oligonucleotide
  Antisense strand to SEQ ID NO: 46258
uuucaugacaucugcucuu

SEQ ID NO: 46340 - RNA, 19 nt, Artificial Sequence
  Description of Artificial Sequence: Synthetic oligonucleotide
  Sense strand starting at position 3590 of SEQ ID NO: 555
gaaaguuguucccaggaac

SEQ ID NO: 46341 - RNA, 19 nt, Artificial Sequence
  Description of Artificial Sequence: Synthetic oligonucleotide
  Antisense strand to SEQ ID NO: 46260
guuccugggaacaacuuuc

SEQ ID NO: 46342 - RNA, 19 nt, Artificial Sequence
  Description of Artificial Sequence: Synthetic oligonucleotide
  Sense strand starting at position 3633 of SEQ ID NO: 555
cucacuuuccguggagcau

SEQ ID NO: 46343 - RNA, 19 nt, Artificial Sequence
  Description of Artificial Sequence: Synthetic oligonucleotide
  Antisense strand to SEQ ID NO: 46262
augcuccacggaaagugag

SEQ ID NO: 46344 - RNA, 19 nt, Artificial Sequence
  Description of Artificial Sequence: Synthetic oligonucleotide
  Sense strand starting at position 3634 of SEQ ID NO: 555
ucacuuuccguggagcaua

SEQ ID NO: 46345 - RNA, 19 nt, Artificial Sequence
  Description of Artificial Sequence: Synthetic oligonucleotide
  Antisense strand to SEQ ID NO: 46264
uaugcuccacggaaaguga

SEQ ID NO: 46346 - RNA, 19 nt, Artificial Sequence
  Description of Artificial Sequence: Synthetic oligonucleotide
  Sense strand starting at position 3946 of SEQ ID NO: 556
uccaguaauugguuaaaca

SEQ ID NO: 46347 - RNA, 19 nt, Artificial Sequence
  Description of Artificial Sequence: Synthetic oligonucleotide
  Antisense strand to SEQ ID NO: 46266
uguuuaaccaauuacugga

SEQ ID NO: 46348 - RNA, 19 nt, Artificial Sequence
  Description of Artificial Sequence: Synthetic oligonucleotide
  Sense strand starting at position 3856 of SEQ ID NO: 556
ugaccauguuaucugcaaa

SEQ ID NO: 46349 - RNA, 19 nt, Artificial Sequence
  Description of Artificial Sequence: Synthetic oligonucleotide
  Antisense strand to SEQ ID NO: 46268
uuugcagauaacaugguca

SEQ ID NO: 46350 - RNA, 19 nt, Artificial Sequence
  Description of Artificial Sequence: Synthetic oligonucleotide
  Sense strand starting at position 3850 of SEQ ID NO: 556
gaaagaugaccauguuauc

SEQ ID NO: 46351 - RNA, 19 nt, Artificial Sequence
  Description of Artificial Sequence: Synthetic oligonucleotide
  Antisense strand to SEQ ID NO: 46270
gauaacauggucaucuuuc

SEQ ID NO: 46352 - RNA, 19 nt, Artificial Sequence
  Description of Artificial Sequence: Synthetic oligonucleotide
  Sense strand starting at position 3775 of SEQ ID NO: 556
gugacuaucuagguuagag

SEQ ID NO: 46353 - RNA, 19 nt, Artificial Sequence
  Description of Artificial Sequence: Synthetic oligonucleotide
  Antisense strand to SEQ ID NO: 46272
cucuaaccuagauagucac

SEQ ID NO: 46354 - RNA, 19 nt, Artificial Sequence
  Description of Artificial Sequence: Synthetic oligonucleotide
  Sense strand starting at position 3774 of SEQ ID NO: 556
ugugacuaucuagguuaga

SEQ ID NO: 46355 - RNA, 19 nt, Artificial Sequence
  Description of Artificial Sequence: Synthetic oligonucleotide
  Antisense strand to SEQ ID NO: 46274
ucuaaccuagauagucaca

SEQ ID NO: 46356 - RNA, 19 nt, Artificial Sequence
  Description of Artificial Sequence: Synthetic oligonucleotide
  Sense strand starting at position 3768 of SEQ ID NO: 556
ggcaguugugacuaucuag

SEQ ID NO: 46357 - RNA, 19 nt, Artificial Sequence
  Description of Artificial Sequence: Synthetic oligonucleotide
  Antisense strand to SEQ ID NO: 46276
cuagauagucacaacugcc

SEQ ID NO: 46358 - RNA, 19 nt, Artificial Sequence
  Description of Artificial Sequence: Synthetic oligonucleotide
  Sense strand starting at position 3592 of SEQ ID NO: 556
augauuccaucacuuguuu

SEQ ID NO: 46359 - RNA, 19 nt, Artificial Sequence
  Description of Artificial Sequence: Synthetic oligonucleotide
  Antisense strand to SEQ ID NO: 46278
aaacaagugauggaaucau

SEQ ID NO: 46360 - RNA, 19 nt, Artificial Sequence
  Description of Artificial Sequence: Synthetic oligonucleotide
  Sense strand starting at position 3516 of SEQ ID NO: 556
gggaaaguuaguggucucu

SEQ ID NO: 46361 - RNA, 19 nt, Artificial Sequence
  Description of Artificial Sequence: Synthetic oligonucleotide
  Antisense strand to SEQ ID NO: 46280
agagaccacuaacuuuccc

SEQ ID NO: 46362 - RNA, 19 nt, Artificial Sequence
  Description of Artificial Sequence: Synthetic oligonucleotide
  Sense strand starting at position 3505 of SEQ ID NO: 556
uaaucuggucagggaaagu

SEQ ID NO: 46363 - RNA, 19 nt, Artificial Sequence
  Description of Artificial Sequence: Synthetic oligonucleotide
  Antisense strand to SEQ ID NO: 46282
acuuucccugaccagauua

SEQ ID NO: 46364 - RNA, 19 nt, Artificial Sequence
  Description of Artificial Sequence: Synthetic oligonucleotide
  Sense strand starting at position 3501 of SEQ ID NO: 556
uccauaaucuggucaggga

SEQ ID NO: 46365 - RNA, 19 nt, Artificial Sequence
  Description of Artificial Sequence: Synthetic oligonucleotide
  Antisense strand to SEQ ID NO: 46284
ucccugaccagauuaugga

SEQ ID NO: 46366 - RNA, 19 nt, Artificial Sequence
  Description of Artificial Sequence: Synthetic oligonucleotide
  Sense strand starting at position 3471 of SEQ ID NO: 556
gaaauagagcgaugggaug

SEQ ID NO: 46367 - RNA, 19 nt, Artificial Sequence
  Description of Artificial Sequence: Synthetic oligonucleotide
  Antisense strand to SEQ ID NO: 46286
caucccaucgcucuauuuc

SEQ ID NO: 46368 - RNA, 19 nt, Artificial Sequence
  Description of Artificial Sequence: Synthetic oligonucleotide
  Sense strand starting at position 3265 of SEQ ID NO: 556
acucauuucugugaagaca

SEQ ID NO: 46369 - RNA, 19 nt, Artificial Sequence
  Description of Artificial Sequence: Synthetic oligonucleotide
  Antisense strand to SEQ ID NO: 46288
ugucuucacagaaaugagu

SEQ ID NO: 46370 - RNA, 19 nt, Artificial Sequence
  Description of Artificial Sequence: Synthetic oligonucleotide
  Sense strand starting at position 3121 of SEQ ID NO: 556
agucuuacagcagaaauug

SEQ ID NO: 46371 - RNA, 19 nt, Artificial Sequence
  Description of Artificial Sequence: Synthetic oligonucleotide
  Antisense strand to SEQ ID NO: 46290
caauuucugcuguaagacu

SEQ ID NO: 46372 - RNA, 19 nt, Artificial Sequence
  Description of Artificial Sequence: Synthetic oligonucleotide
  Sense strand starting at position 3119 of SEQ ID NO: 556
acagucuuacagcagaaau

SEQ ID NO: 46373 - RNA, 19 nt, Artificial Sequence
  Description of Artificial Sequence: Synthetic oligonucleotide
  Antisense strand to SEQ ID NO: 46292
auuucugcuguaagacugu

SEQ ID NO: 46374 - RNA, 19 nt, Artificial Sequence
  Description of Artificial Sequence: Synthetic oligonucleotide
  Sense strand starting at position 3067 of SEQ ID NO: 556
gucugauuccuggauggau

SEQ ID NO: 46375 - RNA, 19 nt, Artificial Sequence
  Description of Artificial Sequence: Synthetic oligonucleotide
  Antisense strand to SEQ ID NO: 46294
auccauccaggaaucagac

SEQ ID NO: 46376 - RNA, 19 nt, Artificial Sequence
  Description of Artificial Sequence: Synthetic oligonucleotide
  Sense strand starting at position 2825 of SEQ ID NO: 556
acacauagccugugggaua

SEQ ID NO: 46377 - RNA, 19 nt, Artificial Sequence
  Description of Artificial Sequence: Synthetic oligonucleotide
  Antisense strand to SEQ ID NO: 46296
uaucccacaggcuaugugu

SEQ ID NO: 46378 - RNA, 19 nt, Artificial Sequence
  Description of Artificial Sequence: Synthetic oligonucleotide
  Sense strand starting at position 2691 of SEQ ID NO: 556
aguaucccucaagggaaua

SEQ ID NO: 46379 - RNA, 19 nt, Artificial Sequence
  Description of Artificial Sequence: Synthetic oligonucleotide
  Antisense strand to SEQ ID NO: 46298
uauucccuugagggauacu

SEQ ID NO: 46380 - RNA, 19 nt, Artificial Sequence
  Description of Artificial Sequence: Synthetic oligonucleotide
  Sense strand starting at position 2636 of SEQ ID NO: 556
cucuuugggcuacgaagaa

SEQ ID NO: 46381 - RNA, 19 nt, Artificial Sequence
  Description of Artificial Sequence: Synthetic oligonucleotide
  Antisense strand to SEQ ID NO: 46300
uucuucguagcccaaagag

SEQ ID NO: 46382 - RNA, 19 nt, Artificial Sequence
  Description of Artificial Sequence: Synthetic oligonucleotide
  Sense strand starting at position 2541 of SEQ ID NO: 556
accuccucugauggagaua

SEQ ID NO: 46383 - RNA, 19 nt, Artificial Sequence
  Description of Artificial Sequence: Synthetic oligonucleotide
  Antisense strand to SEQ ID NO: 46302
uaucuccaucagaggaggu

SEQ ID NO: 46384 - RNA, 19 nt, Artificial Sequence
  Description of Artificial Sequence: Synthetic oligonucleotide
  Sense strand starting at position 2455 of SEQ ID NO: 556
uugugauaagcuugaagau

SEQ ID NO: 46385 - RNA, 19 nt, Artificial Sequence
  Description of Artificial Sequence: Synthetic oligonucleotide
  Antisense strand to SEQ ID NO: 46304
aucuucaagcuuaucacaa

SEQ ID NO: 46386 - RNA, 19 nt, Artificial Sequence
  Description of Artificial Sequence: Synthetic oligonucleotide
  Sense strand starting at position 851 of SEQ ID NO: 556
agucauguccuggagcaaa

SEQ ID NO: 46387 - RNA, 19 nt, Artificial Sequence
  Description of Artificial Sequence: Synthetic oligonucleotide
  Antisense strand to SEQ ID NO: 46306
uuugcuccaggacaugacu

SEQ ID NO: 46388 - RNA, 19 nt, Artificial Sequence
  Description of Artificial Sequence: Synthetic oligonucleotide
  Sense strand starting at position 850 of SEQ ID NO: 556
aagucauguccuggagcaa

SEQ ID NO: 46389 - RNA, 19 nt, Artificial Sequence
  Description of Artificial Sequence: Synthetic oligonucleotide
  Antisense strand to SEQ ID NO: 46308
uugcuccaggacaugacuu

SEQ ID NO: 46390 - RNA, 19 nt, Artificial Sequence
  Description of Artificial Sequence: Synthetic oligonucleotide
  Sense strand starting at position 792 of SEQ ID NO: 556
agguguguuaaagagcuuu

SEQ ID NO: 46391 - RNA, 19 nt, Artificial Sequence
  Description of Artificial Sequence: Synthetic oligonucleotide
  Antisense strand to SEQ ID NO: 46310
aaagcucuuuaacacaccu

SEQ ID NO: 46392 - RNA, 19 nt, Artificial Sequence
  Description of Artificial Sequence: Synthetic oligonucleotide
  Sense strand starting at position 786 of SEQ ID NO: 556
aucagaagguguguuaaag

SEQ ID NO: 46393 - RNA, 19 nt, Artificial Sequence
  Description of Artificial Sequence: Synthetic oligonucleotide
  Antisense strand to SEQ ID NO: 46312
cuuuaacacaccuucugau

SEQ ID NO: 46394 - RNA, 19 nt, Artificial Sequence
  Description of Artificial Sequence: Synthetic oligonucleotide
  Sense strand starting at position 783 of SEQ ID NO: 556
agaaucagaagguguguua

SEQ ID NO: 46395 - RNA, 19 nt, Artificial Sequence
  Description of Artificial Sequence: Synthetic oligonucleotide
  Antisense strand to SEQ ID NO: 46314
uaacacaccuucugauucu

SEQ ID NO: 46396 - RNA, 19 nt, Artificial Sequence
  Description of Artificial Sequence: Synthetic oligonucleotide
  Sense strand starting at position 546 of SEQ ID NO: 556
gguagcuuaccuuauugaa

SEQ ID NO: 46397 - RNA, 19 nt, Artificial Sequence
  Description of Artificial Sequence: Synthetic oligonucleotide
  Antisense strand to SEQ ID NO: 46316
uucaauaagguaagcuacc

SEQ ID NO: 46398 - RNA, 19 nt, Artificial Sequence
  Description of Artificial Sequence: Synthetic oligonucleotide
  Sense strand starting at position 543 of SEQ ID NO: 556
gaagguagcuuaccuuauu

SEQ ID NO: 46399 - RNA, 19 nt, Artificial Sequence
  Description of Artificial Sequence: Synthetic oligonucleotide
  Antisense strand to SEQ ID NO: 46318
aauaagguaagcuaccuuc

SEQ ID NO: 46400 - RNA, 19 nt, Artificial Sequence
  Description of Artificial Sequence: Synthetic oligonucleotide
  Sense strand starting at position 531 of SEQ ID NO: 556
cuguguccgaaugaaggua

SEQ ID NO: 46401 - RNA, 19 nt, Artificial Sequence
  Description of Artificial Sequence: Synthetic oligonucleotide
  Antisense strand to SEQ ID NO: 46320
uaccuucauucggacacag

SEQ ID NO: 46402 - RNA, 19 nt, Artificial Sequence
  Description of Artificial Sequence: Synthetic oligonucleotide
  Sense strand starting at position 429 of SEQ ID NO: 556
uugaguggguaaucacagu

SEQ ID NO: 46403 - RNA, 19 nt, Artificial Sequence
  Description of Artificial Sequence: Synthetic oligonucleotide
  Antisense strand to SEQ ID NO: 46322
acugugauuacccacucaa

SEQ ID NO: 46404 - RNA, 19 nt, Artificial Sequence
  Description of Artificial Sequence: Synthetic oligonucleotide
  Sense strand starting at position 425 of SEQ ID NO: 556
aggauugaguggguaauca

SEQ ID NO: 46405 - RNA, 19 nt, Artificial Sequence
  Description of Artificial Sequence: Synthetic oligonucleotide
  Antisense strand to SEQ ID NO: 46324
ugauuacccacucaauccu

SEQ ID NO: 46406 - RNA, 19 nt, Artificial Sequence
  Description of Artificial Sequence: Synthetic oligonucleotide
  Sense strand starting at position 424 of SEQ ID NO: 556
gaggauugaguggguaauc

SEQ ID NO: 46407 - RNA, 19 nt, Artificial Sequence
  Description of Artificial Sequence: Synthetic oligonucleotide
  Antisense strand to SEQ ID NO: 46326
gauuacccacucaauccuc

SEQ ID NO: 46408 - RNA, 19 nt, Artificial Sequence
  Description of Artificial Sequence: Synthetic oligonucleotide
  Sense strand starting at position 423 of SEQ ID NO: 556
cgaggauugaguggguaau

SEQ ID NO: 46409 - RNA, 19 nt, Artificial Sequence
  Description of Artificial Sequence: Synthetic oligonucleotide
  Antisense strand to SEQ ID NO: 46328
auuacccacucaauccucg

SEQ ID NO: 46410 - RNA, 19 nt, Artificial Sequence
  Description of Artificial Sequence: Synthetic oligonucleotide
  Sense strand starting at position 422 of SEQ ID NO: 556
acgaggauugaguggguaa

SEQ ID NO: 46411 - RNA, 19 nt, Artificial Sequence
  Description of Artificial Sequence: Synthetic oligonucleotide
  Antisense strand to SEQ ID NO: 46330
uuacccacucaauccucgu

SEQ ID NO: 46412 - RNA, 19 nt, Artificial Sequence
  Description of Artificial Sequence: Synthetic oligonucleotide
  Sense strand starting at position 411 of SEQ ID NO: 556
augcauuugccacgaggau

SEQ ID NO: 46413 - RNA, 19 nt, Artificial Sequence
  Description of Artificial Sequence: Synthetic oligonucleotide
  Antisense strand to SEQ ID NO: 46332
auccucguggcaaaugcau

SEQ ID NO: 46414 - RNA, 19 nt, Artificial Sequence
  Description of Artificial Sequence: Synthetic oligonucleotide
  Sense strand starting at position 367 of SEQ ID NO: 556
acaggaucccuugggcaga

SEQ ID NO: 46415 - RNA, 19 nt, Artificial Sequence
  Description of Artificial Sequence: Synthetic oligonucleotide
  Antisense strand to SEQ ID NO: 46334
ucugcccaagggauccugu

SEQ ID NO: 46416 - RNA, 19 nt, Artificial Sequence
  Description of Artificial Sequence: Synthetic oligonucleotide
  Sense strand starting at position 215 of SEQ ID NO: 556
gugacuuguagagagggua

SEQ ID NO: 46417 - RNA, 19 nt, Artificial Sequence
  Description of Artificial Sequence: Synthetic oligonucleotide
  Antisense strand to SEQ ID NO: 46336
uacccucucuacaagucac

SEQ ID NO: 46418 - RNA, 19 nt, Artificial Sequence
  Description of Artificial Sequence: Synthetic oligonucleotide
  Sense strand starting at position 125 of SEQ ID NO: 556
ggguaccuaccugauguaa

SEQ ID NO: 46419 - RNA, 19 nt, Artificial Sequence
  Description of Artificial Sequence: Synthetic oligonucleotide
  Antisense strand to SEQ ID NO: 46338
uuacaucagguagguaccc

SEQ ID NO: 46420 - RNA, 19 nt, Artificial Sequence
  Description of Artificial Sequence: Synthetic oligonucleotide
  Sense strand starting at position 124 of SEQ ID NO: 556
aggguaccuaccugaugua

SEQ ID NO: 46421 - RNA, 19 nt, Artificial Sequence
  Description of Artificial Sequence: Synthetic oligonucleotide
  Antisense strand to SEQ ID NO: 46340
uacaucagguagguacccu

SEQ ID NO: 46422 - RNA, 19 nt, Artificial Sequence
  Description of Artificial Sequence: Synthetic oligonucleotide
  Sense strand starting at position 79 of SEQ ID NO: 556
ggaacagauuugggacuga

SEQ ID NO: 46423 - RNA, 19 nt, Artificial Sequence
  Description of Artificial Sequence: Synthetic oligonucleotide
  Antisense strand to SEQ ID NO: 46342
ucagucccaaaucuguucc

SEQ ID NO: 46424 - RNA, 19 nt, Artificial Sequence
  Description of Artificial Sequence: Synthetic oligonucleotide
  Sense strand starting at position 3 of SEQ ID NO: 556
agacuaagucaaggacgau

SEQ ID NO: 46425 - RNA, 19 nt, Artificial Sequence
  Description of Artificial Sequence: Synthetic oligonucleotide
  Antisense strand to SEQ ID NO: 46344
aucguccuugacuuagucu

SEQ ID NO: 46426 - RNA, 19 nt, Artificial Sequence
  Description of Artificial Sequence: Synthetic oligonucleotide
  Sense strand starting at position 2998 of SEQ ID NO: 557
uguuguuaugacugucaua

SEQ ID NO: 46427 - RNA, 19 nt, Artificial Sequence
  Description of Artificial Sequence: Synthetic oligonucleotide
  Antisense strand to SEQ ID NO: 46346
uaugacagucauaacaaca

SEQ ID NO: 46428 - RNA, 19 nt, Artificial Sequence
  Description of Artificial Sequence: Synthetic oligonucleotide
  Sense strand starting at position 2991 of SEQ ID NO: 557
agaauacuguuguuaugac

SEQ ID NO: 46429 - RNA, 19 nt, Artificial Sequence
  Description of Artificial Sequence: Synthetic oligonucleotide
  Antisense strand to SEQ ID NO: 46348
gucauaacaacaguauucu

SEQ ID NO: 46430 - RNA, 19 nt, Artificial Sequence
  Description of Artificial Sequence: Synthetic oligonucleotide
  Sense strand starting at position 2974 of SEQ ID NO: 557
acauaagaauacugauaag

SEQ ID NO: 46431 - RNA, 19 nt, Artificial Sequence
  Description of Artificial Sequence: Synthetic oligonucleotide
  Antisense strand to SEQ ID NO: 46350
cuuaucaguauucuuaugu

SEQ ID NO: 46432 - RNA, 19 nt, Artificial Sequence
  Description of Artificial Sequence: Synthetic oligonucleotide
  Sense strand starting at position 2610 of SEQ ID NO: 557
ggcauuugcuuugaaauga

SEQ ID NO: 46433 - RNA, 19 nt, Artificial Sequence
  Description of Artificial Sequence: Synthetic oligonucleotide
  Antisense strand to SEQ ID NO: 46352
ucauuucaaagcaaaugcc

SEQ ID NO: 46434 - RNA, 19 nt, Artificial Sequence
  Description of Artificial Sequence: Synthetic oligonucleotide
  Sense strand starting at position 2470 of SEQ ID NO: 557
augcaaucaucucuucguu

SEQ ID NO: 46435 - RNA, 19 nt, Artificial Sequence
  Description of Artificial Sequence: Synthetic oligonucleotide
  Antisense strand to SEQ ID NO: 46354
aacgaagagaugauugcau

SEQ ID NO: 46436 - RNA, 19 nt, Artificial Sequence
  Description of Artificial Sequence: Synthetic oligonucleotide
  Sense strand starting at position 2433 of SEQ ID NO: 557
guuagucauugugauuuac

SEQ ID NO: 46437 - RNA, 19 nt, Artificial Sequence
  Description of Artificial Sequence: Synthetic oligonucleotide
  Antisense strand to SEQ ID NO: 46356
guaaaucacaaugacuaac

SEQ ID NO: 46438 - RNA, 19 nt, Artificial Sequence
  Description of Artificial Sequence: Synthetic oligonucleotide
  Sense strand starting at position 2430 of SEQ ID NO: 557
aguguuagucauugugauu

SEQ ID NO: 46439 - RNA, 19 nt, Artificial Sequence
  Description of Artificial Sequence: Synthetic oligonucleotide
  Antisense strand to SEQ ID NO: 46358
aaucacaaugacuaacacu

SEQ ID NO: 46440 - RNA, 19 nt, Artificial Sequence
  Description of Artificial Sequence: Synthetic oligonucleotide
  Sense strand starting at position 2429 of SEQ ID NO: 557
aaguguuagucauugugau

SEQ ID NO: 46441 - RNA, 19 nt, Artificial Sequence
  Description of Artificial Sequence: Synthetic oligonucleotide
  Antisense strand to SEQ ID NO: 46360
aucacaaugacuaacacuu

SEQ ID NO: 46442 - RNA, 19 nt, Artificial Sequence
  Description of Artificial Sequence: Synthetic oligonucleotide
  Sense strand starting at position 2411 of SEQ ID NO: 557
aucauaguaugugcucaaa

SEQ ID NO: 46443 - RNA, 19 nt, Artificial Sequence
  Description of Artificial Sequence: Synthetic oligonucleotide
  Antisense strand to SEQ ID NO: 46362
uuugagcacauacuaugau

SEQ ID NO: 46444 - RNA, 19 nt, Artificial Sequence
  Description of Artificial Sequence: Synthetic oligonucleotide
  Sense strand starting at position 2409 of SEQ ID NO: 557
ggaucauaguaugugcuca

SEQ ID NO: 46445 - RNA, 19 nt, Artificial Sequence
  Description of Artificial Sequence: Synthetic oligonucleotide
  Antisense strand to SEQ ID NO: 46364
ugagcacauacuaugaucc

SEQ ID NO: 46446 - RNA, 19 nt, Artificial Sequence
  Description of Artificial Sequence: Synthetic oligonucleotide
  Sense strand starting at position 2309 of SEQ ID NO: 557
uuaucugacccauaguuuc

SEQ ID NO: 46447 - RNA, 19 nt, Artificial Sequence
  Description of Artificial Sequence: Synthetic oligonucleotide
  Antisense strand to SEQ ID NO: 46366
gaaacuaugggucagauaa

SEQ ID NO: 46448 - RNA, 19 nt, Artificial Sequence
  Description of Artificial Sequence: Synthetic oligonucleotide
  Sense strand starting at position 2290 of SEQ ID NO: 557
ggagcuuuguggcuuuaac

SEQ ID NO: 46449 - RNA, 19 nt, Artificial Sequence
  Description of Artificial Sequence: Synthetic oligonucleotide
  Antisense strand to SEQ ID NO: 46368
guuaaagccacaaagcucc

SEQ ID NO: 46450 - RNA, 19 nt, Artificial Sequence
  Description of Artificial Sequence: Synthetic oligonucleotide
  Sense strand starting at position 2090 of SEQ ID NO: 557
accuucugaugggucagaa

SEQ ID NO: 46451 - RNA, 19 nt, Artificial Sequence
  Description of Artificial Sequence: Synthetic oligonucleotide
  Antisense strand to SEQ ID NO: 46370
uucugacccaucagaaggu

SEQ ID NO: 46452 - RNA, 19 nt, Artificial Sequence
  Description of Artificial Sequence: Synthetic oligonucleotide
  Sense strand starting at position 1699 of SEQ ID NO: 557
ugcuaagugaccugagucu

SEQ ID NO: 46453 - RNA, 19 nt, Artificial Sequence
  Description of Artificial Sequence: Synthetic oligonucleotide
  Antisense strand to SEQ ID NO: 46372
agacucaggucacuuagca

SEQ ID NO: 46454 - RNA, 19 nt, Artificial Sequence
  Description of Artificial Sequence: Synthetic oligonucleotide
  Sense strand starting at position 1685 of SEQ ID NO: 557
acaucucucuguguugcua

SEQ ID NO: 46455 - RNA, 19 nt, Artificial Sequence
  Description of Artificial Sequence: Synthetic oligonucleotide
  Antisense strand to SEQ ID NO: 46374
uagcaacacagagagaugu

SEQ ID NO: 46456 - RNA, 19 nt, Artificial Sequence
  Description of Artificial Sequence: Synthetic oligonucleotide
  Sense strand starting at position 1681 of SEQ ID NO: 557
auugacaucucucuguguu

SEQ ID NO: 46457 - RNA, 19 nt, Artificial Sequence
  Description of Artificial Sequence: Synthetic oligonucleotide
  Antisense strand to SEQ ID NO: 46376
aacacagagagaugucaau

SEQ ID NO: 46458 - RNA, 19 nt, Artificial Sequence
  Description of Artificial Sequence: Synthetic oligonucleotide
  Sense strand starting at position 1502 of SEQ ID NO: 557
gccauaauacucuggacua

SEQ ID NO: 46459 - RNA, 19 nt, Artificial Sequence
  Description of Artificial Sequence: Synthetic oligonucleotide
  Antisense strand to SEQ ID NO: 46378
uaguccagaguauuauggc

SEQ ID NO: 46460 - RNA, 19 nt, Artificial Sequence
  Description of Artificial Sequence: Synthetic oligonucleotide
  Sense strand starting at position 1307 of SEQ ID NO: 557
ccguuuccuuguccauaaa

SEQ ID NO: 46461 - RNA, 19 nt, Artificial Sequence
  Description of Artificial Sequence: Synthetic oligonucleotide
  Antisense strand to SEQ ID NO: 46380
uuuauggacaaggaaacgg

SEQ ID NO: 46462 - RNA, 19 nt, Artificial Sequence
  Description of Artificial Sequence: Synthetic oligonucleotide
  Sense strand starting at position 1306 of SEQ ID NO: 557
uccguuuccuuguccauaa

SEQ ID NO: 46463 - RNA, 19 nt, Artificial Sequence
  Description of Artificial Sequence: Synthetic oligonucleotide
  Antisense strand to SEQ ID NO: 46382
uuauggacaaggaaacgga

SEQ ID NO: 46464 - RNA, 19 nt, Artificial Sequence
  Description of Artificial Sequence: Synthetic oligonucleotide
  Sense strand starting at position 1254 of SEQ ID NO: 557
uagccauguuacguuccaa

SEQ ID NO: 46465 - RNA, 19 nt, Artificial Sequence
  Description of Artificial Sequence: Synthetic oligonucleotide
  Antisense strand to SEQ ID NO: 46384
uuggaacguaacauggcua

SEQ ID NO: 46466 - RNA, 19 nt, Artificial Sequence
  Description of Artificial Sequence: Synthetic oligonucleotide
  Sense strand starting at position 1204 of SEQ ID NO: 557
ugggaaagcccgugcugau

SEQ ID NO: 46467 - RNA, 19 nt, Artificial Sequence
  Description of Artificial Sequence: Synthetic oligonucleotide
  Antisense strand to SEQ ID NO: 46386
aucagcacgggcuuuccca

SEQ ID NO: 46468 - RNA, 19 nt, Artificial Sequence
  Description of Artificial Sequence: Synthetic oligonucleotide
  Sense strand starting at position 1091 of SEQ ID NO: 557
gaaugcuuugcauauguca

SEQ ID NO: 46469 - RNA, 19 nt, Artificial Sequence
  Description of Artificial Sequence: Synthetic oligonucleotide
  Antisense strand to SEQ ID NO: 46388
ugacauaugcaaagcauuc

SEQ ID NO: 46470 - RNA, 19 nt, Artificial Sequence
  Description of Artificial Sequence: Synthetic oligonucleotide
  Sense strand starting at position 1088 of SEQ ID NO: 557
gcugaaugcuuugcauaug

SEQ ID NO: 46471 - RNA, 19 nt, Artificial Sequence
  Description of Artificial Sequence: Synthetic oligonucleotide
  Antisense strand to SEQ ID NO: 46390
cauaugcaaagcauucagc

SEQ ID NO: 46472 - RNA, 19 nt, Artificial Sequence
  Description of Artificial Sequence: Synthetic oligonucleotide
  Sense strand starting at position 1087 of SEQ ID NO: 557
ugcugaaugcuuugcauau

SEQ ID NO: 46473 - RNA, 19 nt, Artificial Sequence
  Description of Artificial Sequence: Synthetic oligonucleotide
  Antisense strand to SEQ ID NO: 46392
auaugcaaagcauucagca

SEQ ID NO: 46474 - RNA, 19 nt, Artificial Sequence
  Description of Artificial Sequence: Synthetic oligonucleotide
  Sense strand starting at position 1076 of SEQ ID NO: 557
cuaccaggcucugcugaau

SEQ ID NO: 46475 - RNA, 19 nt, Artificial Sequence
  Description of Artificial Sequence: Synthetic oligonucleotide
  Antisense strand to SEQ ID NO: 46394
auucagcagagccugguag

SEQ ID NO: 46476 - RNA, 19 nt, Artificial Sequence
  Description of Artificial Sequence: Synthetic oligonucleotide
  Sense strand starting at position 1053 of SEQ ID NO: 557
ggguaauaaugaccucuga

SEQ ID NO: 46477 - RNA, 19 nt, Artificial Sequence
  Description of Artificial Sequence: Synthetic oligonucleotide
  Antisense strand to SEQ ID NO: 46396
ucagaggucauuauuaccc

SEQ ID NO: 46478 - RNA, 19 nt, Artificial Sequence
  Description of Artificial Sequence: Synthetic oligonucleotide
  Sense strand starting at position 1044 of SEQ ID NO: 557
uugggcuuuggguaauaau

SEQ ID NO: 46479 - RNA, 19 nt, Artificial Sequence
  Description of Artificial Sequence: Synthetic oligonucleotide
  Antisense strand to SEQ ID NO: 46398
auuauuacccaaagcccaa

SEQ ID NO: 46480 - RNA, 19 nt, Artificial Sequence
  Description of Artificial Sequence: Synthetic oligonucleotide
  Sense strand starting at position 1024 of SEQ ID NO: 557
ggcauauauggguacuuac

SEQ ID NO: 46481 - RNA, 19 nt, Artificial Sequence
  Description of Artificial Sequence: Synthetic oligonucleotide
  Antisense strand to SEQ ID NO: 46400
guaaguacccauauaugcc

SEQ ID NO: 46482 - RNA, 19 nt, Artificial Sequence
  Description of Artificial Sequence: Synthetic oligonucleotide
  Sense strand starting at position 1023 of SEQ ID NO: 557
aggcauauauggguacuua

SEQ ID NO: 46483 - RNA, 19 nt, Artificial Sequence
  Description of Artificial Sequence: Synthetic oligonucleotide
  Antisense strand to SEQ ID NO: 46402
uaaguacccauauaugccu

SEQ ID NO: 46484 - RNA, 19 nt, Artificial Sequence
  Description of Artificial Sequence: Synthetic oligonucleotide
  Sense strand starting at position 1013 of SEQ ID NO: 557
ggucccucauaggcauaua

SEQ ID NO: 46485 - RNA, 19 nt, Artificial Sequence
  Description of Artificial Sequence: Synthetic oligonucleotide
  Antisense strand to SEQ ID NO: 46404
uauaugccuaugagggacc

SEQ ID NO: 46486 - RNA, 19 nt, Artificial Sequence
  Description of Artificial Sequence: Synthetic oligonucleotide
  Sense strand starting at position 844 of SEQ ID NO: 557
ggguuuaccagcugcucaa

SEQ ID NO: 46487 - RNA, 19 nt, Artificial Sequence
  Description of Artificial Sequence: Synthetic oligonucleotide
  Antisense strand to SEQ ID NO: 46406
uugagcagcugguaaaccc

SEQ ID NO: 46488 - RNA, 19 nt, Artificial Sequence
  Description of Artificial Sequence: Synthetic oligonucleotide
  Sense strand starting at position 789 of SEQ ID NO: 557
cuaggaguucccugaaguu

SEQ ID NO: 46489 - RNA, 19 nt, Artificial Sequence
  Description of Artificial Sequence: Synthetic oligonucleotide
  Antisense strand to SEQ ID NO: 46408
aacuucagggaacuccuag

SEQ ID NO: 46490 - RNA, 19 nt, Artificial Sequence
  Description of Artificial Sequence: Synthetic oligonucleotide
  Sense strand starting at position 778 of SEQ ID NO: 557
accuguucucccuaggagu

SEQ ID NO: 46491 - RNA, 19 nt, Artificial Sequence
  Description of Artificial Sequence: Synthetic oligonucleotide
  Antisense strand to SEQ ID NO: 46410
acuccuagggagaacaggu

SEQ ID NO: 46492 - RNA, 19 nt, Artificial Sequence
  Description of Artificial Sequence: Synthetic oligonucleotide
  Sense strand starting at position 674 of SEQ ID NO: 557
ucagaaagcucuuccugac

SEQ ID NO: 46493 - RNA, 19 nt, Artificial Sequence
  Description of Artificial Sequence: Synthetic oligonucleotide
  Antisense strand to SEQ ID NO: 46412
gucaggaagagcuuucuga

SEQ ID NO: 46494 - RNA, 19 nt, Artificial Sequence
  Description of Artificial Sequence: Synthetic oligonucleotide
  Sense strand starting at position 542 of SEQ ID NO: 557
ggucuaaaggagugagacu

SEQ ID NO: 46495 - RNA, 19 nt, Artificial Sequence
  Description of Artificial Sequence: Synthetic oligonucleotide
  Antisense strand to SEQ ID NO: 46414
agucucacuccuuuagacc

SEQ ID NO: 46496 - RNA, 19 nt, Artificial Sequence
  Description of Artificial Sequence: Synthetic oligonucleotide
  Sense strand starting at position 505 of SEQ ID NO: 557
accuuuauccacugaguuc

SEQ ID NO: 46497 - RNA, 19 nt, Artificial Sequence
  Description of Artificial Sequence: Synthetic oligonucleotide
  Antisense strand to SEQ ID NO: 46416
gaacucaguggauaaaggu

SEQ ID NO: 46498 - RNA, 19 nt, Artificial Sequence
  Description of Artificial Sequence: Synthetic oligonucleotide
  Sense strand starting at position 446 of SEQ ID NO: 557
auaggacuguauccaacau

SEQ ID NO: 46499 - RNA, 19 nt, Artificial Sequence
  Description of Artificial Sequence: Synthetic oligonucleotide
  Antisense strand to SEQ ID NO: 46418
auguuggauacaguccuau

SEQ ID NO: 46500 - RNA, 19 nt, Artificial Sequence
  Description of Artificial Sequence: Synthetic oligonucleotide
  Sense strand starting at position 443 of SEQ ID NO: 557
ugcauaggacuguauccaa

SEQ ID NO: 46501 - RNA, 19 nt, Artificial Sequence
  Description of Artificial Sequence: Synthetic oligonucleotide
  Antisense strand to SEQ ID NO: 46420
uuggauacaguccuaugca

SEQ ID NO: 46502 - RNA, 19 nt, Artificial Sequence
  Description of Artificial Sequence: Synthetic oligonucleotide
  Sense strand starting at position 294 of SEQ ID NO: 557
uccuaagaauuagagaguu

SEQ ID NO: 46503 - RNA, 19 nt, Artificial Sequence
  Description of Artificial Sequence: Synthetic oligonucleotide
  Antisense strand to SEQ ID NO: 46422
aacucucuaauucuuagga

SEQ ID NO: 46504 - RNA, 19 nt, Artificial Sequence
  Description of Artificial Sequence: Synthetic oligonucleotide
  Sense strand starting at position 22 of SEQ ID NO: 557
accuuaauccuaggccuga

SEQ ID NO: 46505 - RNA, 19 nt, Artificial Sequence
  Description of Artificial Sequence: Synthetic oligonucleotide
  Antisense strand to SEQ ID NO: 46424
ucaggccuaggauuaaggu

SEQ ID NO: 46506 - RNA, 19 nt, Artificial Sequence
  Description of Artificial Sequence: Synthetic oligonucleotide
  Sense strand starting at position 226 of SEQ ID NO: 558
gccagaauugcugggagga

SEQ ID NO: 46507 - RNA, 19 nt, Artificial Sequence
  Description of Artificial Sequence: Synthetic oligonucleotide
  Antisense strand to SEQ ID NO: 46426
uccucccagcaauucuggc

SEQ ID NO: 46508 - RNA, 19 nt, Artificial Sequence
  Description of Artificial Sequence: Synthetic oligonucleotide
  Sense strand starting at position 303 of SEQ ID NO: 558
gcucuuagaccugauauac

SEQ ID NO: 46509 - RNA, 19 nt, Artificial Sequence
  Description of Artificial Sequence: Synthetic oligonucleotide
  Antisense strand to SEQ ID NO: 46428
guauaucaggucuaagagc

SEQ ID NO: 46510 - RNA, 19 nt, Artificial Sequence
  Description of Artificial Sequence: Synthetic oligonucleotide
  Sense strand starting at position 347 of SEQ ID NO: 558
auuagugauuccgcuggaa

SEQ ID NO: 46511 - RNA, 19 nt, Artificial Sequence
  Description of Artificial Sequence: Synthetic oligonucleotide
  Antisense strand to SEQ ID NO: 46430
uuccagcggaaucacuaau

SEQ ID NO: 46512 - RNA, 19 nt, Artificial Sequence
  Description of Artificial Sequence: Synthetic oligonucleotide
  Sense strand starting at position 377 of SEQ ID NO: 558
acauguaaagugugaaagu

SEQ ID NO: 46513 - RNA, 19 nt, Artificial Sequence
  Description of Artificial Sequence: Synthetic oligonucleotide
  Antisense strand to SEQ ID NO: 46432
acuuucacacuuuacaugu

SEQ ID NO: 46514 - RNA, 19 nt, Artificial Sequence
  Description of Artificial Sequence: Synthetic oligonucleotide
  Sense strand starting at position 386 of SEQ ID NO: 558
gugugaaagucacugauuc

SEQ ID NO: 46515 - RNA, 19 nt, Artificial Sequence
  Description of Artificial Sequence: Synthetic oligonucleotide
  Antisense strand to SEQ ID NO: 46434
gaaucagugacuuucacac

SEQ ID NO: 46516 - RNA, 19 nt, Artificial Sequence
  Description of Artificial Sequence: Synthetic oligonucleotide
  Sense strand starting at position 402 of SEQ ID NO: 558
uucagauggcuguaaugag

SEQ ID NO: 46517 - RNA, 19 nt, Artificial Sequence
  Description of Artificial Sequence: Synthetic oligonucleotide
  Antisense strand to SEQ ID NO: 46436
cucauuacagccaucugaa

SEQ ID NO: 46518 - RNA, 19 nt, Artificial Sequence
  Description of Artificial Sequence: Synthetic oligonucleotide
  Sense strand starting at position 478 of SEQ ID NO: 558
gagagaaaugcucguuuga

SEQ ID NO: 46519 - RNA, 19 nt, Artificial Sequence
  Description of Artificial Sequence: Synthetic oligonucleotide
  Antisense strand to SEQ ID NO: 46438
ucaaacgagcauuucucuc

SEQ ID NO: 46520 - RNA, 19 nt, Artificial Sequence
  Description of Artificial Sequence: Synthetic oligonucleotide
  Sense strand starting at position 502 of SEQ ID NO: 558
cugggauuagagcgacagu

SEQ ID NO: 46521 - RNA, 19 nt, Artificial Sequence
  Description of Artificial Sequence: Synthetic oligonucleotide
  Antisense strand to SEQ ID NO: 46440
acugucgcucuaaucccag

SEQ ID NO: 46522 - RNA, 19 nt, Artificial Sequence
  Description of Artificial Sequence: Synthetic oligonucleotide
  Sense strand starting at position 503 of SEQ ID NO: 558
ugggauuagagcgacaguu

SEQ ID NO: 46523 - RNA, 19 nt, Artificial Sequence
  Description of Artificial Sequence: Synthetic oligonucleotide
  Antisense strand to SEQ ID NO: 46442
aacugucgcucuaauccca

SEQ ID NO: 46524 - RNA, 19 nt, Artificial Sequence
  Description of Artificial Sequence: Synthetic oligonucleotide
  Sense strand starting at position 871 of SEQ ID NO: 558
agcuuaggacugggaagua

SEQ ID NO: 46525 - RNA, 19 nt, Artificial Sequence
  Description of Artificial Sequence: Synthetic oligonucleotide
  Antisense strand to SEQ ID NO: 46444
uacuucccaguccuaagcu

SEQ ID NO: 46526 - RNA, 19 nt, Artificial Sequence
  Description of Artificial Sequence: Synthetic oligonucleotide
  Sense strand starting at position 1221 of SEQ ID NO: 558
gggacagagucgucagaca

SEQ ID NO: 46527 - RNA, 19 nt, Artificial Sequence
  Description of Artificial Sequence: Synthetic oligonucleotide
  Antisense strand to SEQ ID NO: 46446
ugucugacgacucuguccc

SEQ ID NO: 46528 - RNA, 19 nt, Artificial Sequence
  Description of Artificial Sequence: Synthetic oligonucleotide
  Sense strand starting at position 1851 of SEQ ID NO: 558
uucagaaauccgggucgga

SEQ ID NO: 46529 - RNA, 19 nt, Artificial Sequence
  Description of Artificial Sequence: Synthetic oligonucleotide
  Antisense strand to SEQ ID NO: 46448
uccgacccggauuucugaa

SEQ ID NO: 46530 - RNA, 19 nt, Artificial Sequence
  Description of Artificial Sequence: Synthetic oligonucleotide
  Sense strand starting at position 2023 of SEQ ID NO: 558
uccuuagggcuccauuaga

SEQ ID NO: 46531 - RNA, 19 nt, Artificial Sequence
  Description of Artificial Sequence: Synthetic oligonucleotide
  Antisense strand to SEQ ID NO: 46450
ucuaauggagcccuaagga

SEQ ID NO: 46532 - RNA, 19 nt, Artificial Sequence
  Description of Artificial Sequence: Synthetic oligonucleotide
  Sense strand starting at position 2084 of SEQ ID NO: 558
ggcagacggcgcucugauu

SEQ ID NO: 46533 - RNA, 19 nt, Artificial Sequence
  Description of Artificial Sequence: Synthetic oligonucleotide
  Antisense strand to SEQ ID NO: 46452
aaucagagcgccgucugcc

SEQ ID NO: 46534 - RNA, 19 nt, Artificial Sequence
  Description of Artificial Sequence: Synthetic oligonucleotide
  Sense strand starting at position 2141 of SEQ ID NO: 558
guccgaaagauucgaaacu

SEQ ID NO: 46535 - RNA, 19 nt, Artificial Sequence
  Description of Artificial Sequence: Synthetic oligonucleotide
  Antisense strand to SEQ ID NO: 46454
aguuucgaaucuuucggac

SEQ ID NO: 46536 - RNA, 19 nt, Artificial Sequence
  Description of Artificial Sequence: Synthetic oligonucleotide
  Sense strand starting at position 2271 of SEQ ID NO: 558
gcccgagagcgugugaauu

SEQ ID NO: 46537 - RNA, 19 nt, Artificial Sequence
  Description of Artificial Sequence: Synthetic oligonucleotide
  Antisense strand to SEQ ID NO: 46456
aauucacacgcucucgggc

SEQ ID NO: 46538 - RNA, 19 nt, Artificial Sequence
  Description of Artificial Sequence: Synthetic oligonucleotide
  Sense strand starting at position 2330 of SEQ ID NO: 558
uuguguaaccucucggcuu

SEQ ID NO: 46539 - RNA, 19 nt, Artificial Sequence
  Description of Artificial Sequence: Synthetic oligonucleotide
  Antisense strand to SEQ ID NO: 46458
aagccgagagguuacacaa

SEQ ID NO: 46540 - RNA, 19 nt, Artificial Sequence
  Description of Artificial Sequence: Synthetic oligonucleotide
  Sense strand starting at position 2525 of SEQ ID NO: 558
gcauaaaugccaggacgau

SEQ ID NO: 46541 - RNA, 19 nt, Artificial Sequence
  Description of Artificial Sequence: Synthetic oligonucleotide
  Antisense strand to SEQ ID NO: 46460
aucguccuggcauuuaugc

SEQ ID NO: 46542 - RNA, 19 nt, Artificial Sequence
  Description of Artificial Sequence: Synthetic oligonucleotide
  Sense strand starting at position 2526 of SEQ ID NO: 558
cauaaaugccaggacgauu

SEQ ID NO: 46543 - RNA, 19 nt, Artificial Sequence
  Description of Artificial Sequence: Synthetic oligonucleotide
  Antisense strand to SEQ ID NO: 46462
aaucguccuggcauuuaug

SEQ ID NO: 46544 - RNA, 19 nt, Artificial Sequence
  Description of Artificial Sequence: Synthetic oligonucleotide
  Sense strand starting at position 2551 of SEQ ID NO: 558
gccuucuuccugcuauguu

SEQ ID NO: 46545 - RNA, 19 nt, Artificial Sequence
  Description of Artificial Sequence: Synthetic oligonucleotide
  Antisense strand to SEQ ID NO: 46464
aacauagcaggaagaaggc

SEQ ID NO: 46546 - RNA, 19 nt, Artificial Sequence
  Description of Artificial Sequence: Synthetic oligonucleotide
  Sense strand starting at position 2579 of SEQ ID NO: 558
ucccaaauccgacgaguuu

SEQ ID NO: 46547 - RNA, 19 nt, Artificial Sequence
  Description of Artificial Sequence: Synthetic oligonucleotide
  Antisense strand to SEQ ID NO: 46466
aaacucgucggauuuggga

SEQ ID NO: 46548 - RNA, 19 nt, Artificial Sequence
  Description of Artificial Sequence: Synthetic oligonucleotide
  Sense strand starting at position 2672 of SEQ ID NO: 558
auacgauagucauccugga

SEQ ID NO: 46549 - RNA, 19 nt, Artificial Sequence
  Description of Artificial Sequence: Synthetic oligonucleotide
  Antisense strand to SEQ ID NO: 46468
uccaggaugacuaucguau

SEQ ID NO: 46550 - RNA, 19 nt, Artificial Sequence
  Description of Artificial Sequence: Synthetic oligonucleotide
  Sense strand starting at position 2676 of SEQ ID NO: 558
gauagucauccuggagggu

SEQ ID NO: 46551 - RNA, 19 nt, Artificial Sequence
  Description of Artificial Sequence: Synthetic oligonucleotide
  Antisense strand to SEQ ID NO: 46470
acccuccaggaugacuauc

SEQ ID NO: 46552 - RNA, 19 nt, Artificial Sequence
  Description of Artificial Sequence: Synthetic oligonucleotide
  Sense strand starting at position 2677 of SEQ ID NO: 558
auagucauccuggagggua

SEQ ID NO: 46553 - RNA, 19 nt, Artificial Sequence
  Description of Artificial Sequence: Synthetic oligonucleotide
  Antisense strand to SEQ ID NO: 46472
uacccuccaggaugacuau

SEQ ID NO: 46554 - RNA, 19 nt, Artificial Sequence
  Description of Artificial Sequence: Synthetic oligonucleotide
  Sense strand starting at position 2688 of SEQ ID NO: 558
ggaggguaagugugguuua

SEQ ID NO: 46555 - RNA, 19 nt, Artificial Sequence
  Description of Artificial Sequence: Synthetic oligonucleotide
  Antisense strand to SEQ ID NO: 46474
uaaaccacacuuacccucc

SEQ ID NO: 46556 - RNA, 19 nt, Artificial Sequence
  Description of Artificial Sequence: Synthetic oligonucleotide
  Sense strand starting at position 2691 of SEQ ID NO: 558
ggguaagugugguuuauga

SEQ ID NO: 46557 - RNA, 19 nt, Artificial Sequence
  Description of Artificial Sequence: Synthetic oligonucleotide
  Antisense strand to SEQ ID NO: 46476
ucauaaaccacacuuaccc

SEQ ID NO: 46558 - RNA, 19 nt, Artificial Sequence
  Description of Artificial Sequence: Synthetic oligonucleotide
  Sense strand starting at position 2693 of SEQ ID NO: 558
guaagugugguuuaugaag

SEQ ID NO: 46559 - RNA, 19 nt, Artificial Sequence
  Description of Artificial Sequence: Synthetic oligonucleotide
  Antisense strand to SEQ ID NO: 46478
cuucauaaaccacacuuac

SEQ ID NO: 46560 - RNA, 19 nt, Artificial Sequence
  Description of Artificial Sequence: Synthetic oligonucleotide
  Sense strand starting at position 2742 of SEQ ID NO: 558
gagaaaugagauugcacuu

SEQ ID NO: 46561 - RNA, 19 nt, Artificial Sequence
  Description of Artificial Sequence: Synthetic oligonucleotide
  Antisense strand to SEQ ID NO: 46480
aagugcaaucucauuucuc

SEQ ID NO: 46562 - RNA, 19 nt, Artificial Sequence
  Description of Artificial Sequence: Synthetic oligonucleotide
  Sense strand starting at position 2983 of SEQ ID NO: 558
cuccgcagauucucuuaaa

SEQ ID NO: 46563 - RNA, 19 nt, Artificial Sequence
  Description of Artificial Sequence: Synthetic oligonucleotide
  Antisense strand to SEQ ID NO: 46482
uuuaagagaaucugcggag

SEQ ID NO: 46564 - RNA, 19 nt, Artificial Sequence
  Description of Artificial Sequence: Synthetic oligonucleotide
  Sense strand starting at position 2984 of SEQ ID NO: 558
uccgcagauucucuuaaac

SEQ ID NO: 46565 - RNA, 19 nt, Artificial Sequence
  Description of Artificial Sequence: Synthetic oligonucleotide
  Antisense strand to SEQ ID NO: 46484
guuuaagagaaucugcgga

SEQ ID NO: 46566 - RNA, 19 nt, Artificial Sequence
  Description of Artificial Sequence: Synthetic oligonucleotide
  Sense strand starting at position 3025 of SEQ ID NO: 558
cgaccuucccggcaagaga

SEQ ID NO: 46567 - RNA, 19 nt, Artificial Sequence
  Description of Artificial Sequence: Synthetic oligonucleotide
  Antisense strand to SEQ ID NO: 46486
ucucuugccgggaaggucg

SEQ ID NO: 46568 - RNA, 19 nt, Artificial Sequence
  Description of Artificial Sequence: Synthetic oligonucleotide
  Sense strand starting at position 3135 of SEQ ID NO: 558
cagcucguucugcagaaga

SEQ ID NO: 46569 - RNA, 19 nt, Artificial Sequence
  Description of Artificial Sequence: Synthetic oligonucleotide
  Antisense strand to SEQ ID NO: 46488
ucuucugcagaacgagcug

SEQ ID NO: 46570 - RNA, 19 nt, Artificial Sequence
  Description of Artificial Sequence: Synthetic oligonucleotide
  Sense strand starting at position 3581 of SEQ ID NO: 558
gcgucuugucagucuauca

SEQ ID NO: 46571 - RNA, 19 nt, Artificial Sequence
  Description of Artificial Sequence: Synthetic oligonucleotide
  Antisense strand to SEQ ID NO: 46490
ugauagacugacaagacgc

SEQ ID NO: 46572 - RNA, 19 nt, Artificial Sequence
  Description of Artificial Sequence: Synthetic oligonucleotide
  Sense strand starting at position 3599 of SEQ ID NO: 558
agcuucugagcccaggaau

SEQ ID NO: 46573 - RNA, 19 nt, Artificial Sequence
  Description of Artificial Sequence: Synthetic oligonucleotide
  Antisense strand to SEQ ID NO: 46492
auuccugggcucagaagcu

SEQ ID NO: 46574 - RNA, 19 nt, Artificial Sequence
  Description of Artificial Sequence: Synthetic oligonucleotide
  Sense strand starting at position 3740 of SEQ ID NO: 558
gggugauucgcuggaggac

SEQ ID NO: 46575 - RNA, 19 nt, Artificial Sequence
  Description of Artificial Sequence: Synthetic oligonucleotide
  Antisense strand to SEQ ID NO: 46494
guccuccagcgaaucaccc

SEQ ID NO: 46576 - RNA, 19 nt, Artificial Sequence
  Description of Artificial Sequence: Synthetic oligonucleotide
  Sense strand starting at position 3876 of SEQ ID NO: 558
ggagucugugaauggguuu

SEQ ID NO: 46577 - RNA, 19 nt, Artificial Sequence
  Description of Artificial Sequence: Synthetic oligonucleotide
  Antisense strand to SEQ ID NO: 46496
aaacccauucacagacucc

SEQ ID NO: 46578 - RNA, 19 nt, Artificial Sequence
  Description of Artificial Sequence: Synthetic oligonucleotide
  Sense strand starting at position 3877 of SEQ ID NO: 558
gagucugugaauggguuua

SEQ ID NO: 46579 - RNA, 19 nt, Artificial Sequence
  Description of Artificial Sequence: Synthetic oligonucleotide
  Antisense strand to SEQ ID NO: 46498
uaaacccauucacagacuc

SEQ ID NO: 46580 - RNA, 19 nt, Artificial Sequence
  Description of Artificial Sequence: Synthetic oligonucleotide
  Sense strand starting at position 3954 of SEQ ID NO: 558
gugcuucagggauaauaug

SEQ ID NO: 46581 - RNA, 19 nt, Artificial Sequence
  Description of Artificial Sequence: Synthetic oligonucleotide
  Antisense strand to SEQ ID NO: 46500
cauauuaucccugaagcac

SEQ ID NO: 46582 - RNA, 19 nt, Artificial Sequence
  Description of Artificial Sequence: Synthetic oligonucleotide
  Sense strand starting at position 3962 of SEQ ID NO: 558
gggauaauauguccucuag

SEQ ID NO: 46583 - RNA, 19 nt, Artificial Sequence
  Description of Artificial Sequence: Synthetic oligonucleotide
  Antisense strand to SEQ ID NO: 46502
cuagaggacauauuauccc

SEQ ID NO: 46584 - RNA, 19 nt, Artificial Sequence
  Description of Artificial Sequence: Synthetic oligonucleotide
  Sense strand starting at position 3964 of SEQ ID NO: 558
gauaauauguccucuagga

SEQ ID NO: 46585 - RNA, 19 nt, Artificial Sequence
  Description of Artificial Sequence: Synthetic oligonucleotide
  Antisense strand to SEQ ID NO: 46504
uccuagaggacauauuauc

SEQ ID NO: 46586 - RNA, 19 nt, Artificial Sequence
  Description of Artificial Sequence: Synthetic oligonucleotide
  Sense strand starting at position 3667 of SEQ ID NO: 559
gcuuauuagaucuggaaag

SEQ ID NO: 46587 - RNA, 19 nt, Artificial Sequence
  Description of Artificial Sequence: Synthetic oligonucleotide
  Antisense strand to SEQ ID NO: 46506
cuuuccagaucuaauaagc

SEQ ID NO: 46588 - RNA, 19 nt, Artificial Sequence
  Description of Artificial Sequence: Synthetic oligonucleotide
  Sense strand starting at position 3626 of SEQ ID NO: 559
ucacuagcugccugggaau

SEQ ID NO: 46589 - RNA, 19 nt, Artificial Sequence
  Description of Artificial Sequence: Synthetic oligonucleotide
  Antisense strand to SEQ ID NO: 46508
auucccaggcagcuaguga

SEQ ID NO: 46590 - RNA, 19 nt, Artificial Sequence
  Description of Artificial Sequence: Synthetic oligonucleotide
  Sense strand starting at position 3590 of SEQ ID NO: 559
uccugaguccgugauugua

SEQ ID NO: 46591 - RNA, 19 nt, Artificial Sequence
  Description of Artificial Sequence: Synthetic oligonucleotide
  Antisense strand to SEQ ID NO: 46510
uacaaucacggacucagga

SEQ ID NO: 46592 - RNA, 19 nt, Artificial Sequence
  Description of Artificial Sequence: Synthetic oligonucleotide
  Sense strand starting at position 3537 of SEQ ID NO: 559
cucuuucuguugguagaau

SEQ ID NO: 46593 - RNA, 19 nt, Artificial Sequence
  Description of Artificial Sequence: Synthetic oligonucleotide
  Antisense strand to SEQ ID NO: 46512
auucuaccaacagaaagag

SEQ ID NO: 46594 - RNA, 19 nt, Artificial Sequence
  Description of Artificial Sequence: Synthetic oligonucleotide
  Sense strand starting at position 3536 of SEQ ID NO: 559
ucucuuucuguugguagaa

SEQ ID NO: 46595 - RNA, 19 nt, Artificial Sequence
  Description of Artificial Sequence: Synthetic oligonucleotide
  Antisense strand to SEQ ID NO: 46514
uucuaccaacagaaagaga

SEQ ID NO: 46596 - RNA, 19 nt, Artificial Sequence
  Description of Artificial Sequence: Synthetic oligonucleotide
  Sense strand starting at position 3473 of SEQ ID NO: 559
gguaguuacaguuaauaug

SEQ ID NO: 46597 - RNA, 19 nt, Artificial Sequence
  Description of Artificial Sequence: Synthetic oligonucleotide
  Antisense strand to SEQ ID NO: 46516
cauauuaacuguaacuacc

SEQ ID NO: 46598 - RNA, 19 nt, Artificial Sequence
  Description of Artificial Sequence: Synthetic oligonucleotide
  Sense strand starting at position 3461 of SEQ ID NO: 559
cgcauuuaaggagguaguu

SEQ ID NO: 46599 - RNA, 19 nt, Artificial Sequence
  Description of Artificial Sequence: Synthetic oligonucleotide
  Antisense strand to SEQ ID NO: 46518
aacuaccuccuuaaaugcg

SEQ ID NO: 46600 - RNA, 19 nt, Artificial Sequence
  Description of Artificial Sequence: Synthetic oligonucleotide
  Sense strand starting at position 3447 of SEQ ID NO: 559
cuaauuagaucagucgcau

SEQ ID NO: 46601 - RNA, 19 nt, Artificial Sequence
  Description of Artificial Sequence: Synthetic oligonucleotide
  Antisense strand to SEQ ID NO: 46520
augcgacugaucuaauuag

SEQ ID NO: 46602 - RNA, 19 nt, Artificial Sequence
  Description of Artificial Sequence: Synthetic oligonucleotide
  Sense strand starting at position 2913 of SEQ ID NO: 559
uaguuuacccgagggcauu

SEQ ID NO: 46603 - RNA, 19 nt, Artificial Sequence
  Description of Artificial Sequence: Synthetic oligonucleotide
  Antisense strand to SEQ ID NO: 46522
aaugcccucggguaaacua

SEQ ID NO: 46604 - RNA, 19 nt, Artificial Sequence
  Description of Artificial Sequence: Synthetic oligonucleotide
  Sense strand starting at position 2911 of SEQ ID NO: 559
cauaguuuacccgagggca

SEQ ID NO: 46605 - RNA, 19 nt, Artificial Sequence
  Description of Artificial Sequence: Synthetic oligonucleotide
  Antisense strand to SEQ ID NO: 46524
ugcccucggguaaacuaug

SEQ ID NO: 46606 - RNA, 19 nt, Artificial Sequence
  Description of Artificial Sequence: Synthetic oligonucleotide
  Sense strand starting at position 2848 of SEQ ID NO: 559
gaacuucguuauccuugua

SEQ ID NO: 46607 - RNA, 19 nt, Artificial Sequence
  Description of Artificial Sequence: Synthetic oligonucleotide
  Antisense strand to SEQ ID NO: 46526
uacaaggauaacgaaguuc

SEQ ID NO: 46608 - RNA, 19 nt, Artificial Sequence
  Description of Artificial Sequence: Synthetic oligonucleotide
  Sense strand starting at position 2844 of SEQ ID NO: 559
ucaugaacuucguuauccu

SEQ ID NO: 46609 - RNA, 19 nt, Artificial Sequence
  Description of Artificial Sequence: Synthetic oligonucleotide
  Antisense strand to SEQ ID NO: 46528
aggauaacgaaguucauga

SEQ ID NO: 46610 - RNA, 19 nt, Artificial Sequence
  Description of Artificial Sequence: Synthetic oligonucleotide
  Sense strand starting at position 2733 of SEQ ID NO: 559
cgagacuccucuuucuaaa

SEQ ID NO: 46611 - RNA, 19 nt, Artificial Sequence
  Description of Artificial Sequence: Synthetic oligonucleotide
  Antisense strand to SEQ ID NO: 46530
uuuagaaagaggagucucg

SEQ ID NO: 46612 - RNA, 19 nt, Artificial Sequence
  Description of Artificial Sequence: Synthetic oligonucleotide
  Sense strand starting at position 2730 of SEQ ID NO: 559
uagcgagacuccucuuucu

SEQ ID NO: 46613 - RNA, 19 nt, Artificial Sequence
  Description of Artificial Sequence: Synthetic oligonucleotide
  Antisense strand to SEQ ID NO: 46532
agaaagaggagucucgcua

SEQ ID NO: 46614 - RNA, 19 nt, Artificial Sequence
  Description of Artificial Sequence: Synthetic oligonucleotide
  Sense strand starting at position 2589 of SEQ ID NO: 559
aagugagcauacuuagaau

SEQ ID NO: 46615 - RNA, 19 nt, Artificial Sequence
  Description of Artificial Sequence: Synthetic oligonucleotide
  Antisense strand to SEQ ID NO: 46534
auucuaaguaugcucacuu

SEQ ID NO: 46616 - RNA, 19 nt, Artificial Sequence
  Description of Artificial Sequence: Synthetic oligonucleotide
  Sense strand starting at position 2571 of SEQ ID NO: 559
ggauguugaugccuuccaa

SEQ ID NO: 46617 - RNA, 19 nt, Artificial Sequence
  Description of Artificial Sequence: Synthetic oligonucleotide
  Antisense strand to SEQ ID NO: 46536
uuggaaggcaucaacaucc

SEQ ID NO: 46618 - RNA, 19 nt, Artificial Sequence
  Description of Artificial Sequence: Synthetic oligonucleotide
  Sense strand starting at position 2511 of SEQ ID NO: 559
aggguaugcccuuacagua

SEQ ID NO: 46619 - RNA, 19 nt, Artificial Sequence
  Description of Artificial Sequence: Synthetic oligonucleotide
  Antisense strand to SEQ ID NO: 46538
uacuguaagggcauacccu

SEQ ID NO: 46620 - RNA, 19 nt, Artificial Sequence
  Description of Artificial Sequence: Synthetic oligonucleotide
  Sense strand starting at position 2493 of SEQ ID NO: 559
cagugugaugguugcucaa

SEQ ID NO: 46621 - RNA, 19 nt, Artificial Sequence
  Description of Artificial Sequence: Synthetic oligonucleotide
  Antisense strand to SEQ ID NO: 46540
uugagcaaccaucacacug

SEQ ID NO: 46622 - RNA, 19 nt, Artificial Sequence
  Description of Artificial Sequence: Synthetic oligonucleotide
  Sense strand starting at position 2479 of SEQ ID NO: 559
ucaagaguucagugcagug

SEQ ID NO: 46623 - RNA, 19 nt, Artificial Sequence
  Description of Artificial Sequence: Synthetic oligonucleotide
  Antisense strand to SEQ ID NO: 46542
cacugcacugaacucuuga

SEQ ID NO: 46624 - RNA, 19 nt, Artificial Sequence
  Description of Artificial Sequence: Synthetic oligonucleotide
  Sense strand starting at position 2450 of SEQ ID NO: 559
agaugcuuccaggauauuc

SEQ ID NO: 46625 - RNA, 19 nt, Artificial Sequence
  Description of Artificial Sequence: Synthetic oligonucleotide
  Antisense strand to SEQ ID NO: 46544
gaauauccuggaagcaucu

SEQ ID NO: 46626 - RNA, 19 nt, Artificial Sequence
  Description of Artificial Sequence: Synthetic oligonucleotide
  Sense strand starting at position 2435 of SEQ ID NO: 559
uucucugcccugcagagau

SEQ ID NO: 46627 - RNA, 19 nt, Artificial Sequence
  Description of Artificial Sequence: Synthetic oligonucleotide
  Antisense strand to SEQ ID NO: 46546
aucucugcagggcagagaa

SEQ ID NO: 46628 - RNA, 19 nt, Artificial Sequence
  Description of Artificial Sequence: Synthetic oligonucleotide
  Sense strand starting at position 2309 of SEQ ID NO: 559
cggagugauauucaacggu

SEQ ID NO: 46629 - RNA, 19 nt, Artificial Sequence
  Description of Artificial Sequence: Synthetic oligonucleotide
  Antisense strand to SEQ ID NO: 46548
accguugaauaucacuccg

SEQ ID NO: 46630 - RNA, 19 nt, Artificial Sequence
  Description of Artificial Sequence: Synthetic oligonucleotide
  Sense strand starting at position 2299 of SEQ ID NO: 559
uuaugaaaggcggagugau

SEQ ID NO: 46631 - RNA, 19 nt, Artificial Sequence
  Description of Artificial Sequence: Synthetic oligonucleotide
  Antisense strand to SEQ ID NO: 46550
aucacuccgccuuucauaa

SEQ ID NO: 46632 - RNA, 19 nt, Artificial Sequence
  Description of Artificial Sequence: Synthetic oligonucleotide
  Sense strand starting at position 2237 of SEQ ID NO: 559
aagucuuaggcauguaauu

SEQ ID NO: 46633 - RNA, 19 nt, Artificial Sequence
  Description of Artificial Sequence: Synthetic oligonucleotide
  Antisense strand to SEQ ID NO: 46552
aauuacaugccuaagacuu

SEQ ID NO: 46634 - RNA, 19 nt, Artificial Sequence
  Description of Artificial Sequence: Synthetic oligonucleotide
  Sense strand starting at position 2235 of SEQ ID NO: 559
ugaagucuuaggcauguaa

SEQ ID NO: 46635 - RNA, 19 nt, Artificial Sequence
  Description of Artificial Sequence: Synthetic oligonucleotide
  Antisense strand to SEQ ID NO: 46554
uuacaugccuaagacuuca

SEQ ID NO: 46636 - RNA, 19 nt, Artificial Sequence
  Description of Artificial Sequence: Synthetic oligonucleotide
  Sense strand starting at position 2216 of SEQ ID NO: 559
guaugucauuuagcuuauc

SEQ ID NO: 46637 - RNA, 19 nt, Artificial Sequence
  Description of Artificial Sequence: Synthetic oligonucleotide
  Antisense strand to SEQ ID NO: 46556
gauaagcuaaaugacauac

SEQ ID NO: 46638 - RNA, 19 nt, Artificial Sequence
  Description of Artificial Sequence: Synthetic oligonucleotide
  Sense strand starting at position 2212 of SEQ ID NO: 559
gcauguaugucauuuagcu

SEQ ID NO: 46639 - RNA, 19 nt, Artificial Sequence
  Description of Artificial Sequence: Synthetic oligonucleotide
  Antisense strand to SEQ ID NO: 46558
agcuaaaugacauacaugc

SEQ ID NO: 46640 - RNA, 19 nt, Artificial Sequence
  Description of Artificial Sequence: Synthetic oligonucleotide
  Sense strand starting at position 2158 of SEQ ID NO: 559
uggguaauuagaugcaaug

SEQ ID NO: 46641 - RNA, 19 nt, Artificial Sequence
  Description of Artificial Sequence: Synthetic oligonucleotide
  Antisense strand to SEQ ID NO: 46560
cauugcaucuaauuaccca

SEQ ID NO: 46642 - RNA, 19 nt, Artificial Sequence
  Description of Artificial Sequence: Synthetic oligonucleotide
  Sense strand starting at position 2140 of SEQ ID NO: 559
uggagaguuucugugcuuu

SEQ ID NO: 46643 - RNA, 19 nt, Artificial Sequence
  Description of Artificial Sequence: Synthetic oligonucleotide
  Antisense strand to SEQ ID NO: 46562
aaagcacagaaacucucca

SEQ ID NO: 46644 - RNA, 19 nt, Artificial Sequence
  Description of Artificial Sequence: Synthetic oligonucleotide
  Sense strand starting at position 2049 of SEQ ID NO: 559
uggauacacuuguaacaaa

SEQ ID NO: 46645 - RNA, 19 nt, Artificial Sequence
  Description of Artificial Sequence: Synthetic oligonucleotide
  Antisense strand to SEQ ID NO: 46564
uuuguuacaaguguaucca

SEQ ID NO: 46646 - RNA, 19 nt, Artificial Sequence
  Description of Artificial Sequence: Synthetic oligonucleotide
  Sense strand starting at position 1368 of SEQ ID NO: 559
accaaagucggugaacagu

SEQ ID NO: 46647 - RNA, 19 nt, Artificial Sequence
  Description of Artificial Sequence: Synthetic oligonucleotide
  Antisense strand to SEQ ID NO: 46566
acuguucaccgacuuuggu

SEQ ID NO: 46648 - RNA, 19 nt, Artificial Sequence
  Description of Artificial Sequence: Synthetic oligonucleotide
  Sense strand starting at position 1214 of SEQ ID NO: 559
ccaaaucccuguucgaaga

SEQ ID NO: 46649 - RNA, 19 nt, Artificial Sequence
  Description of Artificial Sequence: Synthetic oligonucleotide
  Antisense strand to SEQ ID NO: 46568
ucuucgaacagggauuugg

SEQ ID NO: 46650 - RNA, 19 nt, Artificial Sequence
  Description of Artificial Sequence: Synthetic oligonucleotide
  Sense strand starting at position 1164 of SEQ ID NO: 559
cgcccauuccuuucuguuu

SEQ ID NO: 46651 - RNA, 19 nt, Artificial Sequence
  Description of Artificial Sequence: Synthetic oligonucleotide
  Antisense strand to SEQ ID NO: 46570
aaacagaaaggaaugggcg

SEQ ID NO: 46652 - RNA, 19 nt, Artificial Sequence
  Description of Artificial Sequence: Synthetic oligonucleotide
  Sense strand starting at position 806 of SEQ ID NO: 559
ucguguguggaguaaagaa

SEQ ID NO: 46653 - RNA, 19 nt, Artificial Sequence
  Description of Artificial Sequence: Synthetic oligonucleotide
  Antisense strand to SEQ ID NO: 46572
uucuuuacuccacacacga

SEQ ID NO: 46654 - RNA, 19 nt, Artificial Sequence
  Description of Artificial Sequence: Synthetic oligonucleotide
  Sense strand starting at position 687 of SEQ ID NO: 559
auguacaugugacuugaaa

SEQ ID NO: 46655 - RNA, 19 nt, Artificial Sequence
  Description of Artificial Sequence: Synthetic oligonucleotide
  Antisense strand to SEQ ID NO: 46574
uuucaagucacauguacau

SEQ ID NO: 46656 - RNA, 19 nt, Artificial Sequence
  Description of Artificial Sequence: Synthetic oligonucleotide
  Sense strand starting at position 419 of SEQ ID NO: 559
aaagguggcuucuccuaga

SEQ ID NO: 46657 - RNA, 19 nt, Artificial Sequence
  Description of Artificial Sequence: Synthetic oligonucleotide
  Antisense strand to SEQ ID NO: 46576
ucuaggagaagccaccuuu

SEQ ID NO: 46658 - RNA, 19 nt, Artificial Sequence
  Description of Artificial Sequence: Synthetic oligonucleotide
  Sense strand starting at position 359 of SEQ ID NO: 559
ucacgaaugccuggcucau

SEQ ID NO: 46659 - RNA, 19 nt, Artificial Sequence
  Description of Artificial Sequence: Synthetic oligonucleotide
  Antisense strand to SEQ ID NO: 46578
augagccaggcauucguga

SEQ ID NO: 46660 - RNA, 19 nt, Artificial Sequence
  Description of Artificial Sequence: Synthetic oligonucleotide
  Sense strand starting at position 279 of SEQ ID NO: 559
uugugugacucuuugauca

SEQ ID NO: 46661 - RNA, 19 nt, Artificial Sequence
  Description of Artificial Sequence: Synthetic oligonucleotide
  Antisense strand to SEQ ID NO: 46580
ugaucaaagagucacacaa

SEQ ID NO: 46662 - RNA, 19 nt, Artificial Sequence
  Description of Artificial Sequence: Synthetic oligonucleotide
  Sense strand starting at position 273 of SEQ ID NO: 559
acugauuugugugacucuu

SEQ ID NO: 46663 - RNA, 19 nt, Artificial Sequence
  Description of Artificial Sequence: Synthetic oligonucleotide
  Antisense strand to SEQ ID NO: 46582
aagagucacacaaaucagu

SEQ ID NO: 46664 - RNA, 19 nt, Artificial Sequence
  Description of Artificial Sequence: Synthetic oligonucleotide
  Sense strand starting at position 91 of SEQ ID NO: 559
cccacugcucuuggaaagu

SEQ ID NO: 46665 - RNA, 19 nt, Artificial Sequence
  Description of Artificial Sequence: Synthetic oligonucleotide
  Antisense strand to SEQ ID NO: 46584
acuuuccaagagcaguggg

SEQ ID NO: 46666 - RNA, 19 nt, Artificial Sequence
  Description of Artificial Sequence: Synthetic oligonucleotide
  Sense strand starting at position 3358 of SEQ ID NO: 561
ugacaaugcugauuauaca

SEQ ID NO: 46667 - RNA, 19 nt, Artificial Sequence
  Description of Artificial Sequence: Synthetic oligonucleotide
  Antisense strand to SEQ ID NO: 46586
uguauaaucagcauuguca

SEQ ID NO: 46668 - RNA, 19 nt, Artificial Sequence
  Description of Artificial Sequence: Synthetic oligonucleotide
  Sense strand starting at position 3356 of SEQ ID NO: 561
uuugacaaugcugauuaua

SEQ ID NO: 46669 - RNA, 19 nt, Artificial Sequence
  Description of Artificial Sequence: Synthetic oligonucleotide
  Antisense strand to SEQ ID NO: 46588
uauaaucagcauugucaaa

SEQ ID NO: 46670 - RNA, 19 nt, Artificial Sequence
  Description of Artificial Sequence: Synthetic oligonucleotide
  Sense strand starting at position 3355 of SEQ ID NO: 561
auuugacaaugcugauuau

SEQ ID NO: 46671 - RNA, 19 nt, Artificial Sequence
  Description of Artificial Sequence: Synthetic oligonucleotide
  Antisense strand to SEQ ID NO: 46590
auaaucagcauugucaaau

SEQ ID NO: 46672 - RNA, 19 nt, Artificial Sequence
  Description of Artificial Sequence: Synthetic oligonucleotide
  Sense strand starting at position 3347 of SEQ ID NO: 561
gcuaauugauuugacaaug

SEQ ID NO: 46673 - RNA, 19 nt, Artificial Sequence
  Description of Artificial Sequence: Synthetic oligonucleotide
  Antisense strand to SEQ ID NO: 46592
cauugucaaaucaauuagc

SEQ ID NO: 46674 - RNA, 19 nt, Artificial Sequence
  Description of Artificial Sequence: Synthetic oligonucleotide
  Sense strand starting at position 3240 of SEQ ID NO: 561
cguucuuucccagugcuuu

SEQ ID NO: 46675 - RNA, 19 nt, Artificial Sequence
  Description of Artificial Sequence: Synthetic oligonucleotide
  Antisense strand to SEQ ID NO: 46594
aaagcacugggaaagaacg

SEQ ID NO: 46676 - RNA, 19 nt, Artificial Sequence
  Description of Artificial Sequence: Synthetic oligonucleotide
  Sense strand starting at position 3191 of SEQ ID NO: 561
aucuuaacuugauugguuu

SEQ ID NO: 46677 - RNA, 19 nt, Artificial Sequence
  Description of Artificial Sequence: Synthetic oligonucleotide
  Antisense strand to SEQ ID NO: 46596
aaaccaaucaaguuaagau

SEQ ID NO: 46678 - RNA, 19 nt, Artificial Sequence
  Description of Artificial Sequence: Synthetic oligonucleotide
  Sense strand starting at position 2932 of SEQ ID NO: 561
aaaguugagagucguaacu

SEQ ID NO: 46679 - RNA, 19 nt, Artificial Sequence
  Description of Artificial Sequence: Synthetic oligonucleotide
  Antisense strand to SEQ ID NO: 46598
aguuacgacucucaacuuu

SEQ ID NO: 46680 - RNA, 19 nt, Artificial Sequence
  Description of Artificial Sequence: Synthetic oligonucleotide
  Sense strand starting at position 2807 of SEQ ID NO: 561
cgcuguuugguaagagggu

SEQ ID NO: 46681 - RNA, 19 nt, Artificial Sequence
  Description of Artificial Sequence: Synthetic oligonucleotide
  Antisense strand to SEQ ID NO: 46600
acccucuuaccaaacagcg

SEQ ID NO: 46682 - RNA, 19 nt, Artificial Sequence
  Description of Artificial Sequence: Synthetic oligonucleotide
  Sense strand starting at position 2801 of SEQ ID NO: 561
uugagacgcuguuugguaa

SEQ ID NO: 46683 - RNA, 19 nt, Artificial Sequence
  Description of Artificial Sequence: Synthetic oligonucleotide
  Antisense strand to SEQ ID NO: 46602
uuaccaaacagcgucucaa

SEQ ID NO: 46684 - RNA, 19 nt, Artificial Sequence
  Description of Artificial Sequence: Synthetic oligonucleotide
  Sense strand starting at position 2753 of SEQ ID NO: 561
auaaccauucggcauauua

SEQ ID NO: 46685 - RNA, 19 nt, Artificial Sequence
  Description of Artificial Sequence: Synthetic oligonucleotide
  Antisense strand to SEQ ID NO: 46604
uaauaugccgaaugguuau

SEQ ID NO: 46686 - RNA, 19 nt, Artificial Sequence
  Description of Artificial Sequence: Synthetic oligonucleotide
  Sense strand starting at position 2684 of SEQ ID NO: 561
uaaggcuguguuuaauauu

SEQ ID NO: 46687 - RNA, 19 nt, Artificial Sequence
  Description of Artificial Sequence: Synthetic oligonucleotide
  Antisense strand to SEQ ID NO: 46606
aauauuaaacacagccuua

SEQ ID NO: 46688 - RNA, 19 nt, Artificial Sequence
  Description of Artificial Sequence: Synthetic oligonucleotide
  Sense strand starting at position 2680 of SEQ ID NO: 561
caucuaaggcuguguuuaa

SEQ ID NO: 46689 - RNA, 19 nt, Artificial Sequence
  Description of Artificial Sequence: Synthetic oligonucleotide
  Antisense strand to SEQ ID NO: 46608
uuaaacacagccuuagaug

SEQ ID NO: 46690 - RNA, 19 nt, Artificial Sequence
  Description of Artificial Sequence: Synthetic oligonucleotide
  Sense strand starting at position 2621 of SEQ ID NO: 561
cauauuucuuggugggauc

SEQ ID NO: 46691 - RNA, 19 nt, Artificial Sequence
  Description of Artificial Sequence: Synthetic oligonucleotide
  Antisense strand to SEQ ID NO: 46610
gaucccaccaagaaauaug

SEQ ID NO: 46692 - RNA, 19 nt, Artificial Sequence
  Description of Artificial Sequence: Synthetic oligonucleotide
  Sense strand starting at position 2393 of SEQ ID NO: 561
uuacuagugaaggaucgua

SEQ ID NO: 46693 - RNA, 19 nt, Artificial Sequence
  Description of Artificial Sequence: Synthetic oligonucleotide
  Antisense strand to SEQ ID NO: 46612
uacgauccuucacuaguaa

SEQ ID NO: 46694 - RNA, 19 nt, Artificial Sequence
  Description of Artificial Sequence: Synthetic oligonucleotide
  Sense strand starting at position 2322 of SEQ ID NO: 561
cucugaaagaggugacuua

SEQ ID NO: 46695 - RNA, 19 nt, Artificial Sequence
  Description of Artificial Sequence: Synthetic oligonucleotide
  Antisense strand to SEQ ID NO: 46614
uaagucaccucuuucagag

SEQ ID NO: 46696 - RNA, 19 nt, Artificial Sequence
  Description of Artificial Sequence: Synthetic oligonucleotide
  Sense strand starting at position 2281 of SEQ ID NO: 561
gggagaaaugugugccuuu

SEQ ID NO: 46697 - RNA, 19 nt, Artificial Sequence
  Description of Artificial Sequence: Synthetic oligonucleotide
  Antisense strand to SEQ ID NO: 46616
aaaggcacacauuucuccc

SEQ ID NO: 46698 - RNA, 19 nt, Artificial Sequence
  Description of Artificial Sequence: Synthetic oligonucleotide
  Sense strand starting at position 2271 of SEQ ID NO: 561
gccuaaaggcgggagaaau

SEQ ID NO: 46699 - RNA, 19 nt, Artificial Sequence
  Description of Artificial Sequence: Synthetic oligonucleotide
  Antisense strand to SEQ ID NO: 46618
auuucucccgccuuuaggc

SEQ ID NO: 46700 - RNA, 19 nt, Artificial Sequence
  Description of Artificial Sequence: Synthetic oligonucleotide
  Sense strand starting at position 2204 of SEQ ID NO: 561
agauauggugcccaaguua

SEQ ID NO: 46701 - RNA, 19 nt, Artificial Sequence
  Description of Artificial Sequence: Synthetic oligonucleotide
  Antisense strand to SEQ ID NO: 46620
uaacuugggcaccauaucu

SEQ ID NO: 46702 - RNA, 19 nt, Artificial Sequence
  Description of Artificial Sequence: Synthetic oligonucleotide
  Sense strand starting at position 2203 of SEQ ID NO: 561
cagauauggugcccaaguu

SEQ ID NO: 46703 - RNA, 19 nt, Artificial Sequence
  Description of Artificial Sequence: Synthetic oligonucleotide
  Antisense strand to SEQ ID NO: 46622
aacuugggcaccauaucug

SEQ ID NO: 46704 - RNA, 19 nt, Artificial Sequence
  Description of Artificial Sequence: Synthetic oligonucleotide
  Sense strand starting at position 2081 of SEQ ID NO: 561
uggcucuugcgagauucca

SEQ ID NO: 46705 - RNA, 19 nt, Artificial Sequence
  Description of Artificial Sequence: Synthetic oligonucleotide
  Antisense strand to SEQ ID NO: 46624
uggaaucucgcaagagcca

SEQ ID NO: 46706 - RNA, 19 nt, Artificial Sequence
  Description of Artificial Sequence: Synthetic oligonucleotide
  Sense strand starting at position 1475 of SEQ ID NO: 561
gcucauuauucguuuauaa

SEQ ID NO: 46707 - RNA, 19 nt, Artificial Sequence
  Description of Artificial Sequence: Synthetic oligonucleotide
  Antisense strand to SEQ ID NO: 46626
uuauaaacgaauaaugagc

SEQ ID NO: 46708 - RNA, 19 nt, Artificial Sequence
  Description of Artificial Sequence: Synthetic oligonucleotide
  Sense strand starting at position 1474 of SEQ ID NO: 561
agcucauuauucguuuaua

SEQ ID NO: 46709 - RNA, 19 nt, Artificial Sequence
  Description of Artificial Sequence: Synthetic oligonucleotide
  Antisense strand to SEQ ID NO: 46628
uauaaacgaauaaugagcu

SEQ ID NO: 46710 - RNA, 19 nt, Artificial Sequence
  Description of Artificial Sequence: Synthetic oligonucleotide
  Sense strand starting at position 1472 of SEQ ID NO: 561
auagcucauuauucguuua

SEQ ID NO: 46711 - RNA, 19 nt, Artificial Sequence
  Description of Artificial Sequence: Synthetic oligonucleotide
  Antisense strand to SEQ ID NO: 46630
uaaacgaauaaugagcuau

SEQ ID NO: 46712 - RNA, 19 nt, Artificial Sequence
  Description of Artificial Sequence: Synthetic oligonucleotide
  Sense strand starting at position 1415 of SEQ ID NO: 561
uuguguugagaguguauau

SEQ ID NO: 46713 - RNA, 19 nt, Artificial Sequence
  Description of Artificial Sequence: Synthetic oligonucleotide
  Antisense strand to SEQ ID NO: 46632
auauacacucucaacacaa

SEQ ID NO: 46714 - RNA, 19 nt, Artificial Sequence
  Description of Artificial Sequence: Synthetic oligonucleotide
  Sense strand starting at position 1329 of SEQ ID NO: 561
ccauuagugucccuaaugu

SEQ ID NO: 46715 - RNA, 19 nt, Artificial Sequence
  Description of Artificial Sequence: Synthetic oligonucleotide
  Antisense strand to SEQ ID NO: 46634
acauuagggacacuaaugg

SEQ ID NO: 46716 - RNA, 19 nt, Artificial Sequence
  Description of Artificial Sequence: Synthetic oligonucleotide
  Sense strand starting at position 1327 of SEQ ID NO: 561
auccauuagugucccuaau

SEQ ID NO: 46717 - RNA, 19 nt, Artificial Sequence
  Description of Artificial Sequence: Synthetic oligonucleotide
  Antisense strand to SEQ ID NO: 46636
auuagggacacuaauggau

SEQ ID NO: 46718 - RNA, 19 nt, Artificial Sequence
  Description of Artificial Sequence: Synthetic oligonucleotide
  Sense strand starting at position 1295 of SEQ ID NO: 561
agcguagucuaucccacaa

SEQ ID NO: 46719 - RNA, 19 nt, Artificial Sequence
  Description of Artificial Sequence: Synthetic oligonucleotide
  Antisense strand to SEQ ID NO: 46638
uugugggauagacuacgcu

SEQ ID NO: 46720 - RNA, 19 nt, Artificial Sequence
  Description of Artificial Sequence: Synthetic oligonucleotide
  Sense strand starting at position 1268 of SEQ ID NO: 561
augacuguauauguacaua

SEQ ID NO: 46721 - RNA, 19 nt, Artificial Sequence
  Description of Artificial Sequence: Synthetic oligonucleotide
  Antisense strand to SEQ ID NO: 46640
uauguacauauacagucau

SEQ ID NO: 46722 - RNA, 19 nt, Artificial Sequence
  Description of Artificial Sequence: Synthetic oligonucleotide
  Sense strand starting at position 1253 of SEQ ID NO: 561
gcuguuaugaggcacauga

SEQ ID NO: 46723 - RNA, 19 nt, Artificial Sequence
  Description of Artificial Sequence: Synthetic oligonucleotide
  Antisense strand to SEQ ID NO: 46642
ucaugugccucauaacagc

SEQ ID NO: 46724 - RNA, 19 nt, Artificial Sequence
  Description of Artificial Sequence: Synthetic oligonucleotide
  Sense strand starting at position 1185 of SEQ ID NO: 561
augccuugacuaugacauc

SEQ ID NO: 46725 - RNA, 19 nt, Artificial Sequence
  Description of Artificial Sequence: Synthetic oligonucleotide
  Antisense strand to SEQ ID NO: 46644
gaugucauagucaaggcau

SEQ ID NO: 46726 - RNA, 19 nt, Artificial Sequence
  Description of Artificial Sequence: Synthetic oligonucleotide
  Sense strand starting at position 1180 of SEQ ID NO: 561
acauaaugccuugacuaug

SEQ ID NO: 46727 - RNA, 19 nt, Artificial Sequence
  Description of Artificial Sequence: Synthetic oligonucleotide
  Antisense strand to SEQ ID NO: 46646
cauagucaaggcauuaugu

SEQ ID NO: 46728 - RNA, 19 nt, Artificial Sequence
  Description of Artificial Sequence: Synthetic oligonucleotide
  Sense strand starting at position 1076 of SEQ ID NO: 561
guaacauacucaucuguua

SEQ ID NO: 46729 - RNA, 19 nt, Artificial Sequence
  Description of Artificial Sequence: Synthetic oligonucleotide
  Antisense strand to SEQ ID NO: 46648
uaacagaugaguauguuac

SEQ ID NO: 46730 - RNA, 19 nt, Artificial Sequence
  Description of Artificial Sequence: Synthetic oligonucleotide
  Sense strand starting at position 608 of SEQ ID NO: 561
gguaauaacacauggagcu

SEQ ID NO: 46731 - RNA, 19 nt, Artificial Sequence
  Description of Artificial Sequence: Synthetic oligonucleotide
  Antisense strand to SEQ ID NO: 46650
agcuccauguguuauuacc

SEQ ID NO: 46732 - RNA, 19 nt, Artificial Sequence
  Description of Artificial Sequence: Synthetic oligonucleotide
  Sense strand starting at position 547 of SEQ ID NO: 561
ggaucaguaucaccaauau

SEQ ID NO: 46733 - RNA, 19 nt, Artificial Sequence
  Description of Artificial Sequence: Synthetic oligonucleotide
  Antisense strand to SEQ ID NO: 46652
auauuggugauacugaucc

SEQ ID NO: 46734 - RNA, 19 nt, Artificial Sequence
  Description of Artificial Sequence: Synthetic oligonucleotide
  Sense strand starting at position 526 of SEQ ID NO: 561
acauuagccuaggcauaga

SEQ ID NO: 46735 - RNA, 19 nt, Artificial Sequence
  Description of Artificial Sequence: Synthetic oligonucleotide
  Antisense strand to SEQ ID NO: 46654
ucuaugccuaggcuaaugu

SEQ ID NO: 46736 - RNA, 19 nt, Artificial Sequence
  Description of Artificial Sequence: Synthetic oligonucleotide
  Sense strand starting at position 405 of SEQ ID NO: 561
uguacagcuguauagaaau

SEQ ID NO: 46737 - RNA, 19 nt, Artificial Sequence
  Description of Artificial Sequence: Synthetic oligonucleotide
  Antisense strand to SEQ ID NO: 46656
auuucuauacagcuguaca

SEQ ID NO: 46738 - RNA, 19 nt, Artificial Sequence
  Description of Artificial Sequence: Synthetic oligonucleotide
  Sense strand starting at position 403 of SEQ ID NO: 561
auuguacagcuguauagaa

SEQ ID NO: 46739 - RNA, 19 nt, Artificial Sequence
  Description of Artificial Sequence: Synthetic oligonucleotide
  Antisense strand to SEQ ID NO: 46658
uucuauacagcuguacaau

SEQ ID NO: 46740 - RNA, 19 nt, Artificial Sequence
  Description of Artificial Sequence: Synthetic oligonucleotide
  Sense strand starting at position 213 of SEQ ID NO: 561
accguaauuuggucacuac

SEQ ID NO: 46741 - RNA, 19 nt, Artificial Sequence
  Description of Artificial Sequence: Synthetic oligonucleotide
  Antisense strand to SEQ ID NO: 46660
guagugaccaaauuacggu

SEQ ID NO: 46742 - RNA, 19 nt, Artificial Sequence
  Description of Artificial Sequence: Synthetic oligonucleotide
  Sense strand starting at position 212 of SEQ ID NO: 561
uaccguaauuuggucacua

SEQ ID NO: 46743 - RNA, 19 nt, Artificial Sequence
  Description of Artificial Sequence: Synthetic oligonucleotide
  Antisense strand to SEQ ID NO: 46662
uagugaccaaauuacggua

SEQ ID NO: 46744 - RNA, 19 nt, Artificial Sequence
  Description of Artificial Sequence: Synthetic oligonucleotide
  Sense strand starting at position 145 of SEQ ID NO: 561
guguuugauaguggaguaa

SEQ ID NO: 46745 - RNA, 19 nt, Artificial Sequence
  Description of Artificial Sequence: Synthetic oligonucleotide
  Antisense strand to SEQ ID NO: 46664
uuacuccacuaucaaacac

SEQ ID NO: 46746 - RNA, 19 nt, Artificial Sequence
  Description of Artificial Sequence: Synthetic oligonucleotide
  Sense strand starting at position 3365 of SEQ ID NO: 560
ugacaaugcugauuauaca

SEQ ID NO: 46747 - RNA, 19 nt, Artificial Sequence
  Description of Artificial Sequence: Synthetic oligonucleotide
  Antisense strand to SEQ ID NO: 46666
uguauaaucagcauuguca

SEQ ID NO: 46748 - RNA, 19 nt, Artificial Sequence
  Description of Artificial Sequence: Synthetic oligonucleotide
  Sense strand starting at position 3363 of SEQ ID NO: 560
uuugacaaugcugauuaua

SEQ ID NO: 46749 - RNA, 19 nt, Artificial Sequence
  Description of Artificial Sequence: Synthetic oligonucleotide
  Antisense strand to SEQ ID NO: 46668
uauaaucagcauugucaaa

SEQ ID NO: 46750 - RNA, 19 nt, Artificial Sequence
  Description of Artificial Sequence: Synthetic oligonucleotide
  Sense strand starting at position 3362 of SEQ ID NO: 560
auuugacaaugcugauuau

SEQ ID NO: 46751 - RNA, 19 nt, Artificial Sequence
  Description of Artificial Sequence: Synthetic oligonucleotide
  Antisense strand to SEQ ID NO: 46670
auaaucagcauugucaaau

SEQ ID NO: 46752 - RNA, 19 nt, Artificial Sequence
  Description of Artificial Sequence: Synthetic oligonucleotide
  Sense strand starting at position 3354 of SEQ ID NO: 560
gcuaauugauuugacaaug

SEQ ID NO: 46753 - RNA, 19 nt, Artificial Sequence
  Description of Artificial Sequence: Synthetic oligonucleotide
  Antisense strand to SEQ ID NO: 46672
cauugucaaaucaauuagc

SEQ ID NO: 46754 - RNA, 19 nt, Artificial Sequence
  Description of Artificial Sequence: Synthetic oligonucleotide
  Sense strand starting at position 3247 of SEQ ID NO: 560
cguucuuucccagugcuuu

SEQ ID NO: 46755 - RNA, 19 nt, Artificial Sequence
  Description of Artificial Sequence: Synthetic oligonucleotide
  Antisense strand to SEQ ID NO: 46674
aaagcacugggaaagaacg

SEQ ID NO: 46756 - RNA, 19 nt, Artificial Sequence
  Description of Artificial Sequence: Synthetic oligonucleotide
  Sense strand starting at position 3198 of SEQ ID NO: 560
aucuuaacuugauugguuu

SEQ ID NO: 46757 - RNA, 19 nt, Artificial Sequence
  Description of Artificial Sequence: Synthetic oligonucleotide
  Antisense strand to SEQ ID NO: 46676
aaaccaaucaaguuaagau

SEQ ID NO: 46758 - RNA, 19 nt, Artificial Sequence
  Description of Artificial Sequence: Synthetic oligonucleotide
  Sense strand starting at position 2939 of SEQ ID NO: 560
aaaguugagagucguaacu

SEQ ID NO: 46759 - RNA, 19 nt, Artificial Sequence
  Description of Artificial Sequence: Synthetic oligonucleotide
  Antisense strand to SEQ ID NO: 46678
aguuacgacucucaacuuu

SEQ ID NO: 46760 - RNA, 19 nt, Artificial Sequence
  Description of Artificial Sequence: Synthetic oligonucleotide
  Sense strand starting at position 2814 of SEQ ID NO: 560
cgcuguuugguaagagggu

SEQ ID NO: 46761 - RNA, 19 nt, Artificial Sequence
  Description of Artificial Sequence: Synthetic oligonucleotide
  Antisense strand to SEQ ID NO: 46680
acccucuuaccaaacagcg

SEQ ID NO: 46762 - RNA, 19 nt, Artificial Sequence
  Description of Artificial Sequence: Synthetic oligonucleotide
  Sense strand starting at position 2808 of SEQ ID NO: 560
uugagacgcuguuugguaa

SEQ ID NO: 46763 - RNA, 19 nt, Artificial Sequence
  Description of Artificial Sequence: Synthetic oligonucleotide
  Antisense strand to SEQ ID NO: 46682
uuaccaaacagcgucucaa

SEQ ID NO: 46764 - RNA, 19 nt, Artificial Sequence
  Description of Artificial Sequence: Synthetic oligonucleotide
  Sense strand starting at position 2760 of SEQ ID NO: 560
auaaccauucggcauauua

SEQ ID NO: 46765 - RNA, 19 nt, Artificial Sequence
  Description of Artificial Sequence: Synthetic oligonucleotide
  Antisense strand to SEQ ID NO: 46684
uaauaugccgaaugguuau

SEQ ID NO: 46766 - RNA, 19 nt, Artificial Sequence
  Description of Artificial Sequence: Synthetic oligonucleotide
  Sense strand starting at position 2691 of SEQ ID NO: 560
uaaggcuguguuuaauauu

SEQ ID NO: 46767 - RNA, 19 nt, Artificial Sequence
  Description of Artificial Sequence: Synthetic oligonucleotide
  Antisense strand to SEQ ID NO: 46686
aauauuaaacacagccuua

SEQ ID NO: 46768 - RNA, 19 nt, Artificial Sequence
  Description of Artificial Sequence: Synthetic oligonucleotide
  Sense strand starting at position 2687 of SEQ ID NO: 560
caucuaaggcuguguuuaa

SEQ ID NO: 46769 - RNA, 19 nt, Artificial Sequence
  Description of Artificial Sequence: Synthetic oligonucleotide
  Antisense strand to SEQ ID NO: 46688
uuaaacacagccuuagaug

SEQ ID NO: 46770 - RNA, 19 nt, Artificial Sequence
  Description of Artificial Sequence: Synthetic oligonucleotide
  Sense strand starting at position 2628 of SEQ ID NO: 560
cauauuucuuggugggauc

SEQ ID NO: 46771 - RNA, 19 nt, Artificial Sequence
  Description of Artificial Sequence: Synthetic oligonucleotide
  Antisense strand to SEQ ID NO: 46690
gaucccaccaagaaauaug

SEQ ID NO: 46772 - RNA, 19 nt, Artificial Sequence
  Description of Artificial Sequence: Synthetic oligonucleotide
  Sense strand starting at position 2400 of SEQ ID NO: 560
uuacuagugaaggaucgua

SEQ ID NO: 46773 - RNA, 19 nt, Artificial Sequence
  Description of Artificial Sequence: Synthetic oligonucleotide
  Antisense strand to SEQ ID NO: 46692
uacgauccuucacuaguaa

SEQ ID NO: 46774 - RNA, 19 nt, Artificial Sequence
  Description of Artificial Sequence: Synthetic oligonucleotide
  Sense strand starting at position 2329 of SEQ ID NO: 560
cucugaaagaggugacuua

SEQ ID NO: 46775 - RNA, 19 nt, Artificial Sequence
  Description of Artificial Sequence: Synthetic oligonucleotide
  Antisense strand to SEQ ID NO: 46694
uaagucaccucuuucagag

SEQ ID NO: 46776 - RNA, 19 nt, Artificial Sequence
  Description of Artificial Sequence: Synthetic oligonucleotide
  Sense strand starting at position 2288 of SEQ ID NO: 560
gggagaaaugugugccuuu

SEQ ID NO: 46777 - RNA, 19 nt, Artificial Sequence
  Description of Artificial Sequence: Synthetic oligonucleotide
  Antisense strand to SEQ ID NO: 46696
aaaggcacacauuucuccc

SEQ ID NO: 46778 - RNA, 19 nt, Artificial Sequence
  Description of Artificial Sequence: Synthetic oligonucleotide
  Sense strand starting at position 2278 of SEQ ID NO: 560
gccuaaaggcgggagaaau

SEQ ID NO: 46779 - RNA, 19 nt, Artificial Sequence
  Description of Artificial Sequence: Synthetic oligonucleotide
  Antisense strand to SEQ ID NO: 46698
auuucucccgccuuuaggc

SEQ ID NO: 46780 - RNA, 19 nt, Artificial Sequence
  Description of Artificial Sequence: Synthetic oligonucleotide
  Sense strand starting at position 2211 of SEQ ID NO: 560
agauauggugcccaaguua

SEQ ID NO: 46781 - RNA, 19 nt, Artificial Sequence
  Description of Artificial Sequence: Synthetic oligonucleotide
  Antisense strand to SEQ ID NO: 46700
uaacuugggcaccauaucu

SEQ ID NO: 46782 - RNA, 19 nt, Artificial Sequence
  Description of Artificial Sequence: Synthetic oligonucleotide
  Sense strand starting at position 2210 of SEQ ID NO: 560
cagauauggugcccaaguu

SEQ ID NO: 46783 - RNA, 19 nt, Artificial Sequence
  Description of Artificial Sequence: Synthetic oligonucleotide
  Antisense strand to SEQ ID NO: 46702
aacuugggcaccauaucug

SEQ ID NO: 46784 - RNA, 19 nt, Artificial Sequence
  Description of Artificial Sequence: Synthetic oligonucleotide
  Sense strand starting at position 2088 of SEQ ID NO: 560
uggcucuugcgagauucca

SEQ ID NO: 46785 - RNA, 19 nt, Artificial Sequence
  Description of Artificial Sequence: Synthetic oligonucleotide
  Antisense strand to SEQ ID NO: 46704
uggaaucucgcaagagcca

SEQ ID NO: 46786 - RNA, 19 nt, Artificial Sequence
  Description of Artificial Sequence: Synthetic oligonucleotide
  Sense strand starting at position 1482 of SEQ ID NO: 560
gcucauuauucguuuauaa

SEQ ID NO: 46787 - RNA, 19 nt, Artificial Sequence
  Description of Artificial Sequence: Synthetic oligonucleotide
  Antisense strand to SEQ ID NO: 46706
uuauaaacgaauaaugagc

SEQ ID NO: 46788 - RNA, 19 nt, Artificial Sequence
  Description of Artificial Sequence: Synthetic oligonucleotide
  Sense strand starting at position 1481 of SEQ ID NO: 560
agcucauuauucguuuaua

SEQ ID NO: 46789 - RNA, 19 nt, Artificial Sequence
  Description of Artificial Sequence: Synthetic oligonucleotide
  Antisense strand to SEQ ID NO: 46708
uauaaacgaauaaugagcu

SEQ ID NO: 46790 - RNA, 19 nt, Artificial Sequence
  Description of Artificial Sequence: Synthetic oligonucleotide
  Sense strand starting at position 1479 of SEQ ID NO: 560
auagcucauuauucguuua

SEQ ID NO: 46791 - RNA, 19 nt, Artificial Sequence
  Description of Artificial Sequence: Synthetic oligonucleotide
  Antisense strand to SEQ ID NO: 46710
uaaacgaauaaugagcuau

SEQ ID NO: 46792 - RNA, 19 nt, Artificial Sequence
  Description of Artificial Sequence: Synthetic oligonucleotide
  Sense strand starting at position 1422 of SEQ ID NO: 560
uuguguugagaguguauau

SEQ ID NO: 46793 - RNA, 19 nt, Artificial Sequence
  Description of Artificial Sequence: Synthetic oligonucleotide
  Antisense strand to SEQ ID NO: 46712
auauacacucucaacacaa

SEQ ID NO: 46794 - RNA, 19 nt, Artificial Sequence
  Description of Artificial Sequence: Synthetic oligonucleotide
  Sense strand starting at position 1336 of SEQ ID NO: 560
ccauuagugucccuaaugu

SEQ ID NO: 46795 - RNA, 19 nt, Artificial Sequence
  Description of Artificial Sequence: Synthetic oligonucleotide
  Antisense strand to SEQ ID NO: 46714
acauuagggacacuaaugg

SEQ ID NO: 46796 - RNA, 19 nt, Artificial Sequence
  Description of Artificial Sequence: Synthetic oligonucleotide
  Sense strand starting at position 1334 of SEQ ID NO: 560
auccauuagugucccuaau

SEQ ID NO: 46797 - RNA, 19 nt, Artificial Sequence
  Description of Artificial Sequence: Synthetic oligonucleotide
  Antisense strand to SEQ ID NO: 46716
auuagggacacuaauggau

SEQ ID NO: 46798 - RNA, 19 nt, Artificial Sequence
  Description of Artificial Sequence: Synthetic oligonucleotide
  Sense strand starting at position 1302 of SEQ ID NO: 560
agcguagucuaucccacaa

SEQ ID NO: 46799 - RNA, 19 nt, Artificial Sequence
  Description of Artificial Sequence: Synthetic oligonucleotide
  Antisense strand to SEQ ID NO: 46718
uugugggauagacuacgcu

SEQ ID NO: 46800 - RNA, 19 nt, Artificial Sequence
  Description of Artificial Sequence: Synthetic oligonucleotide
  Sense strand starting at position 1275 of SEQ ID NO: 560
augacuguauauguacaua

SEQ ID NO: 46801 - RNA, 19 nt, Artificial Sequence
  Description of Artificial Sequence: Synthetic oligonucleotide
  Antisense strand to SEQ ID NO: 46720
uauguacauauacagucau

SEQ ID NO: 46802 - RNA, 19 nt, Artificial Sequence
  Description of Artificial Sequence: Synthetic oligonucleotide
  Sense strand starting at position 1260 of SEQ ID NO: 560
gcuguuaugaggcacauga

SEQ ID NO: 46803 - RNA, 19 nt, Artificial Sequence
  Description of Artificial Sequence: Synthetic oligonucleotide
  Antisense strand to SEQ ID NO: 46722
ucaugugccucauaacagc

SEQ ID NO: 46804 - RNA, 19 nt, Artificial Sequence
  Description of Artificial Sequence: Synthetic oligonucleotide
  Sense strand starting at position 1192 of SEQ ID NO: 560
augccuugacuaugacauc

SEQ ID NO: 46805 - RNA, 19 nt, Artificial Sequence
  Description of Artificial Sequence: Synthetic oligonucleotide
  Antisense strand to SEQ ID NO: 46724
gaugucauagucaaggcau

SEQ ID NO: 46806 - RNA, 19 nt, Artificial Sequence
  Description of Artificial Sequence: Synthetic oligonucleotide
  Sense strand starting at position 1187 of SEQ ID NO: 560
acauaaugccuugacuaug

SEQ ID NO: 46807 - RNA, 19 nt, Artificial Sequence
  Description of Artificial Sequence: Synthetic oligonucleotide
  Antisense strand to SEQ ID NO: 46726
cauagucaaggcauuaugu

SEQ ID NO: 46808 - RNA, 19 nt, Artificial Sequence
  Description of Artificial Sequence: Synthetic oligonucleotide
  Sense strand starting at position 1083 of SEQ ID NO: 560
guaacauacucaucuguua

SEQ ID NO: 46809 - RNA, 19 nt, Artificial Sequence
  Description of Artificial Sequence: Synthetic oligonucleotide
  Antisense strand to SEQ ID NO: 46728
uaacagaugaguauguuac

SEQ ID NO: 46810 - RNA, 19 nt, Artificial Sequence
  Description of Artificial Sequence: Synthetic oligonucleotide
  Sense strand starting at position 615 of SEQ ID NO: 560
gguaauaacacauggagcu

SEQ ID NO: 46811 - RNA, 19 nt, Artificial Sequence
  Description of Artificial Sequence: Synthetic oligonucleotide
  Antisense strand to SEQ ID NO: 46730
agcuccauguguuauuacc

SEQ ID NO: 46812 - RNA, 19 nt, Artificial Sequence
  Description of Artificial Sequence: Synthetic oligonucleotide
  Sense strand starting at position 554 of SEQ ID NO: 560
ggaucaguaucaccaauau

SEQ ID NO: 46813 - RNA, 19 nt, Artificial Sequence
  Description of Artificial Sequence: Synthetic oligonucleotide
  Antisense strand to SEQ ID NO: 46732
auauuggugauacugaucc

SEQ ID NO: 46814 - RNA, 19 nt, Artificial Sequence
  Description of Artificial Sequence: Synthetic oligonucleotide
  Sense strand starting at position 533 of SEQ ID NO: 560
acauuagccuaggcauaga

SEQ ID NO: 46815 - RNA, 19 nt, Artificial Sequence
  Description of Artificial Sequence: Synthetic oligonucleotide
  Antisense strand to SEQ ID NO: 46734
ucuaugccuaggcuaaugu

SEQ ID NO: 46816 - RNA, 19 nt, Artificial Sequence
  Description of Artificial Sequence: Synthetic oligonucleotide
  Sense strand starting at position 412 of SEQ ID NO: 560
uguacagcuguauagaaau

SEQ ID NO: 46817 - RNA, 19 nt, Artificial Sequence
  Description of Artificial Sequence: Synthetic oligonucleotide
  Antisense strand to SEQ ID NO: 46736
auuucuauacagcuguaca

SEQ ID NO: 46818 - RNA, 19 nt, Artificial Sequence
  Description of Artificial Sequence: Synthetic oligonucleotide
  Sense strand starting at position 410 of SEQ ID NO: 560
auuguacagcuguauagaa

SEQ ID NO: 46819 - RNA, 19 nt, Artificial Sequence
  Description of Artificial Sequence: Synthetic oligonucleotide
  Antisense strand to SEQ ID NO: 46738
uucuauacagcuguacaau

SEQ ID NO: 46820 - RNA, 19 nt, Artificial Sequence
  Description of Artificial Sequence: Synthetic oligonucleotide
  Sense strand starting at position 220 of SEQ ID NO: 560
accguaauuuggucacuac

SEQ ID NO: 46821 - RNA, 19 nt, Artificial Sequence
  Description of Artificial Sequence: Synthetic oligonucleotide
  Antisense strand to SEQ ID NO: 46740
guagugaccaaauuacggu

SEQ ID NO: 46822 - RNA, 19 nt, Artificial Sequence
  Description of Artificial Sequence: Synthetic oligonucleotide
  Sense strand starting at position 219 of SEQ ID NO: 560
uaccguaauuuggucacua

SEQ ID NO: 46823 - RNA, 19 nt, Artificial Sequence
  Description of Artificial Sequence: Synthetic oligonucleotide
  Antisense strand to SEQ ID NO: 46742
uagugaccaaauuacggua

SEQ ID NO: 46824 - RNA, 19 nt, Artificial Sequence
  Description of Artificial Sequence: Synthetic oligonucleotide
  Sense strand starting at position 152 of SEQ ID NO: 560
guguuugauaguggaguaa

SEQ ID NO: 46825 - RNA, 19 nt, Artificial Sequence
  Description of Artificial Sequence: Synthetic oligonucleotide
  Antisense strand to SEQ ID NO: 46744
uuacuccacuaucaaacac

SEQ ID NO: 46826 - RNA, 19 nt, Artificial Sequence
  Description of Artificial Sequence: Synthetic oligonucleotide
  Sense strand starting at position 3860 of SEQ ID NO: 562
cggugacuuuacuauuuaa

SEQ ID NO: 46827 - RNA, 19 nt, Artificial Sequence
  Description of Artificial Sequence: Synthetic oligonucleotide
  Antisense strand to SEQ ID NO: 46746
uuaaauaguaaagucaccg

SEQ ID NO: 46828 - RNA, 19 nt, Artificial Sequence
  Description of Artificial Sequence: Synthetic oligonucleotide
  Sense strand starting at position 3765 of SEQ ID NO: 562
ggaucaguaucacauagag

SEQ ID NO: 46829 - RNA, 19 nt, Artificial Sequence
  Description of Artificial Sequence: Synthetic oligonucleotide
  Antisense strand to SEQ ID NO: 46748
cucuaugugauacugaucc

SEQ ID NO: 46830 - RNA, 19 nt, Artificial Sequence
  Description of Artificial Sequence: Synthetic oligonucleotide
  Sense strand starting at position 3606 of SEQ ID NO: 562
agagguuugucagcuauuu

SEQ ID NO: 46831 - RNA, 19 nt, Artificial Sequence
  Description of Artificial Sequence: Synthetic oligonucleotide
  Antisense strand to SEQ ID NO: 46750
aaauagcugacaaaccucu

SEQ ID NO: 46832 - RNA, 19 nt, Artificial Sequence
  Description of Artificial Sequence: Synthetic oligonucleotide
  Sense strand starting at position 3603 of SEQ ID NO: 562
uacagagguuugucagcua

SEQ ID NO: 46833 - RNA, 19 nt, Artificial Sequence
  Description of Artificial Sequence: Synthetic oligonucleotide
  Antisense strand to SEQ ID NO: 46752
uagcugacaaaccucugua

SEQ ID NO: 46834 - RNA, 19 nt, Artificial Sequence
  Description of Artificial Sequence: Synthetic oligonucleotide
  Sense strand starting at position 3597 of SEQ ID NO: 562
guagguuacagagguuugu

SEQ ID NO: 46835 - RNA, 19 nt, Artificial Sequence
  Description of Artificial Sequence: Synthetic oligonucleotide
  Antisense strand to SEQ ID NO: 46754
acaaaccucuguaaccuac

SEQ ID NO: 46836 - RNA, 19 nt, Artificial Sequence
  Description of Artificial Sequence: Synthetic oligonucleotide
  Sense strand starting at position 3417 of SEQ ID NO: 562
uguguuaaccuuuaaagaa

SEQ ID NO: 46837 - RNA, 19 nt, Artificial Sequence
  Description of Artificial Sequence: Synthetic oligonucleotide
  Antisense strand to SEQ ID NO: 46756
uucuuuaaagguuaacaca

SEQ ID NO: 46838 - RNA, 19 nt, Artificial Sequence
  Description of Artificial Sequence: Synthetic oligonucleotide
  Sense strand starting at position 3286 of SEQ ID NO: 562
ccauuucuauuagagagau

SEQ ID NO: 46839 - RNA, 19 nt, Artificial Sequence
  Description of Artificial Sequence: Synthetic oligonucleotide
  Antisense strand to SEQ ID NO: 46758
aucucucuaauagaaaugg

SEQ ID NO: 46840 - RNA, 19 nt, Artificial Sequence
  Description of Artificial Sequence: Synthetic oligonucleotide
  Sense strand starting at position 3281 of SEQ ID NO: 562
uguucccauuucuauuaga

SEQ ID NO: 46841 - RNA, 19 nt, Artificial Sequence
  Description of Artificial Sequence: Synthetic oligonucleotide
  Antisense strand to SEQ ID NO: 46760
ucuaauagaaaugggaaca

SEQ ID NO: 46842 - RNA, 19 nt, Artificial Sequence
  Description of Artificial Sequence: Synthetic oligonucleotide
  Sense strand starting at position 3204 of SEQ ID NO: 562
ucagguauuuaugagacau

SEQ ID NO: 46843 - RNA, 19 nt, Artificial Sequence
  Description of Artificial Sequence: Synthetic oligonucleotide
  Antisense strand to SEQ ID NO: 46762
augucucauaaauaccuga

SEQ ID NO: 46844 - RNA, 19 nt, Artificial Sequence
  Description of Artificial Sequence: Synthetic oligonucleotide
  Sense strand starting at position 3146 of SEQ ID NO: 562
guuagaucauagcauuuau

SEQ ID NO: 46845 - RNA, 19 nt, Artificial Sequence
  Description of Artificial Sequence: Synthetic oligonucleotide
  Antisense strand to SEQ ID NO: 46764
auaaaugcuaugaucuaac

SEQ ID NO: 46846 - RNA, 19 nt, Artificial Sequence
  Description of Artificial Sequence: Synthetic oligonucleotide
  Sense strand starting at position 3045 of SEQ ID NO: 562
uuagguaaucccuguuaaa

SEQ ID NO: 46847 - RNA, 19 nt, Artificial Sequence
  Description of Artificial Sequence: Synthetic oligonucleotide
  Antisense strand to SEQ ID NO: 46766
uuuaacagggauuaccuaa

SEQ ID NO: 46848 - RNA, 19 nt, Artificial Sequence
  Description of Artificial Sequence: Synthetic oligonucleotide
  Sense strand starting at position 2553 of SEQ ID NO: 562
uuguuaagggaguaucuau

SEQ ID NO: 46849 - RNA, 19 nt, Artificial Sequence
  Description of Artificial Sequence: Synthetic oligonucleotide
  Antisense strand to SEQ ID NO: 46768
auagauacucccuuaacaa

SEQ ID NO: 46850 - RNA, 19 nt, Artificial Sequence
  Description of Artificial Sequence: Synthetic oligonucleotide
  Sense strand starting at position 2527 of SEQ ID NO: 562
cagaaaguuuguguacuag

SEQ ID NO: 46851 - RNA, 19 nt, Artificial Sequence
  Description of Artificial Sequence: Synthetic oligonucleotide
  Antisense strand to SEQ ID NO: 46770
cuaguacacaaacuuucug

SEQ ID NO: 46852 - RNA, 19 nt, Artificial Sequence
  Description of Artificial Sequence: Synthetic oligonucleotide
  Sense strand starting at position 2525 of SEQ ID NO: 562
gccagaaaguuuguguacu

SEQ ID NO: 46853 - RNA, 19 nt, Artificial Sequence
  Description of Artificial Sequence: Synthetic oligonucleotide
  Antisense strand to SEQ ID NO: 46772
aguacacaaacuuucuggc

SEQ ID NO: 46854 - RNA, 19 nt, Artificial Sequence
  Description of Artificial Sequence: Synthetic oligonucleotide
  Sense strand starting at position 2517 of SEQ ID NO: 562
ucagaaacgccagaaaguu

SEQ ID NO: 46855 - RNA, 19 nt, Artificial Sequence
  Description of Artificial Sequence: Synthetic oligonucleotide
  Antisense strand to SEQ ID NO: 46774
aacuuucuggcguuucuga

SEQ ID NO: 46856 - RNA, 19 nt, Artificial Sequence
  Description of Artificial Sequence: Synthetic oligonucleotide
  Sense strand starting at position 2475 of SEQ ID NO: 562
caaguaauuuaugucgucu

SEQ ID NO: 46857 - RNA, 19 nt, Artificial Sequence
  Description of Artificial Sequence: Synthetic oligonucleotide
  Antisense strand to SEQ ID NO: 46776
agacgacauaaauuacuug

SEQ ID NO: 46858 - RNA, 19 nt, Artificial Sequence
  Description of Artificial Sequence: Synthetic oligonucleotide
  Sense strand starting at position 2454 of SEQ ID NO: 562
gguuguuuaaauuaggauu

SEQ ID NO: 46859 - RNA, 19 nt, Artificial Sequence
  Description of Artificial Sequence: Synthetic oligonucleotide
  Antisense strand to SEQ ID NO: 46778
aauccuaauuuaaacaacc

SEQ ID NO: 46860 - RNA, 19 nt, Artificial Sequence
  Description of Artificial Sequence: Synthetic oligonucleotide
  Sense strand starting at position 2448 of SEQ ID NO: 562
aacgcagguuguuuaaauu

SEQ ID NO: 46861 - RNA, 19 nt, Artificial Sequence
  Description of Artificial Sequence: Synthetic oligonucleotide
  Antisense strand to SEQ ID NO: 46780
aauuuaaacaaccugcguu

SEQ ID NO: 46862 - RNA, 19 nt, Artificial Sequence
  Description of Artificial Sequence: Synthetic oligonucleotide
  Sense strand starting at position 2447 of SEQ ID NO: 562
aaacgcagguuguuuaaau

SEQ ID NO: 46863 - RNA, 19 nt, Artificial Sequence
  Description of Artificial Sequence: Synthetic oligonucleotide
  Antisense strand to SEQ ID NO: 46782
auuuaaacaaccugcguuu

SEQ ID NO: 46864 - RNA, 19 nt, Artificial Sequence
  Description of Artificial Sequence: Synthetic oligonucleotide
  Sense strand starting at position 2417 of SEQ ID NO: 562
agcuauuugucuguuaagu

SEQ ID NO: 46865 - RNA, 19 nt, Artificial Sequence
  Description of Artificial Sequence: Synthetic oligonucleotide
  Antisense strand to SEQ ID NO: 46784
acuuaacagacaaauagcu

SEQ ID NO: 46866 - RNA, 19 nt, Artificial Sequence
  Description of Artificial Sequence: Synthetic oligonucleotide
  Sense strand starting at position 2416 of SEQ ID NO: 562
aagcuauuugucuguuaag

SEQ ID NO: 46867 - RNA, 19 nt, Artificial Sequence
  Description of Artificial Sequence: Synthetic oligonucleotide
  Antisense strand to SEQ ID NO: 46786
cuuaacagacaaauagcuu

SEQ ID NO: 46868 - RNA, 19 nt, Artificial Sequence
  Description of Artificial Sequence: Synthetic oligonucleotide
  Sense strand starting at position 2414 of SEQ ID NO: 562
uuaagcuauuugucuguua

SEQ ID NO: 46869 - RNA, 19 nt, Artificial Sequence
  Description of Artificial Sequence: Synthetic oligonucleotide
  Antisense strand to SEQ ID NO: 46788
uaacagacaaauagcuuaa

SEQ ID NO: 46870 - RNA, 19 nt, Artificial Sequence
  Description of Artificial Sequence: Synthetic oligonucleotide
  Sense strand starting at position 2055 of SEQ ID NO: 562
gagacagccuccuucuaga

SEQ ID NO: 46871 - RNA, 19 nt, Artificial Sequence
  Description of Artificial Sequence: Synthetic oligonucleotide
  Antisense strand to SEQ ID NO: 46790
ucuagaaggaggcugucuc

SEQ ID NO: 46872 - RNA, 19 nt, Artificial Sequence
  Description of Artificial Sequence: Synthetic oligonucleotide
  Sense strand starting at position 1988 of SEQ ID NO: 562
gcagacagcgucucuguau

SEQ ID NO: 46873 - RNA, 19 nt, Artificial Sequence
  Description of Artificial Sequence: Synthetic oligonucleotide
  Antisense strand to SEQ ID NO: 46792
auacagagacgcugucugc

SEQ ID NO: 46874 - RNA, 19 nt, Artificial Sequence
  Description of Artificial Sequence: Synthetic oligonucleotide
  Sense strand starting at position 1499 of SEQ ID NO: 562
ugauaugacugagaaucca

SEQ ID NO: 46875 - RNA, 19 nt, Artificial Sequence
  Description of Artificial Sequence: Synthetic oligonucleotide
  Antisense strand to SEQ ID NO: 46794
uggauucucagucauauca

SEQ ID NO: 46876 - RNA, 19 nt, Artificial Sequence
  Description of Artificial Sequence: Synthetic oligonucleotide
  Sense strand starting at position 1128 of SEQ ID NO: 562
cuagccuugcuauaagaaa

SEQ ID NO: 46877 - RNA, 19 nt, Artificial Sequence
  Description of Artificial Sequence: Synthetic oligonucleotide
  Antisense strand to SEQ ID NO: 46796
uuucuuauagcaaggcuag

SEQ ID NO: 46878 - RNA, 19 nt, Artificial Sequence
  Description of Artificial Sequence: Synthetic oligonucleotide
  Sense strand starting at position 1081 of SEQ ID NO: 562
gcgccuucugcuucugaga

SEQ ID NO: 46879 - RNA, 19 nt, Artificial Sequence
  Description of Artificial Sequence: Synthetic oligonucleotide
  Antisense strand to SEQ ID NO: 46798
ucucagaagcagaaggcgc

SEQ ID NO: 46880 - RNA, 19 nt, Artificial Sequence
  Description of Artificial Sequence: Synthetic oligonucleotide
  Sense strand starting at position 686 of SEQ ID NO: 562
cccguuuauauggaaguga

SEQ ID NO: 46881 - RNA, 19 nt, Artificial Sequence
  Description of Artificial Sequence: Synthetic oligonucleotide
  Antisense strand to SEQ ID NO: 46800
ucacuuccauauaaacggg

SEQ ID NO: 46882 - RNA, 19 nt, Artificial Sequence
  Description of Artificial Sequence: Synthetic oligonucleotide
  Sense strand starting at position 440 of SEQ ID NO: 562
gucacugcuugacuauauu

SEQ ID NO: 46883 - RNA, 19 nt, Artificial Sequence
  Description of Artificial Sequence: Synthetic oligonucleotide
  Antisense strand to SEQ ID NO: 46802
aauauagucaagcagugac

SEQ ID NO: 46884 - RNA, 19 nt, Artificial Sequence
  Description of Artificial Sequence: Synthetic oligonucleotide
  Sense strand starting at position 436 of SEQ ID NO: 562
agcagucacugcuugacua

SEQ ID NO: 46885 - RNA, 19 nt, Artificial Sequence
  Description of Artificial Sequence: Synthetic oligonucleotide
  Antisense strand to SEQ ID NO: 46804
uagucaagcagugacugcu

SEQ ID NO: 46886 - RNA, 19 nt, Artificial Sequence
  Description of Artificial Sequence: Synthetic oligonucleotide
  Sense strand starting at position 232 of SEQ ID NO: 562
gauugaacugcccaguauu

SEQ ID NO: 46887 - RNA, 19 nt, Artificial Sequence
  Description of Artificial Sequence: Synthetic oligonucleotide
  Antisense strand to SEQ ID NO: 46806
aauacugggcaguucaauc

SEQ ID NO: 46888 - RNA, 19 nt, Artificial Sequence
  Description of Artificial Sequence: Synthetic oligonucleotide
  Sense strand starting at position 206 of SEQ ID NO: 562
guaauauggccauagguau

SEQ ID NO: 46889 - RNA, 19 nt, Artificial Sequence
  Description of Artificial Sequence: Synthetic oligonucleotide
  Antisense strand to SEQ ID NO: 46808
auaccuauggccauauuac

SEQ ID NO: 46890 - RNA, 19 nt, Artificial Sequence
  Description of Artificial Sequence: Synthetic oligonucleotide
  Sense strand starting at position 204 of SEQ ID NO: 562
ggguaauauggccauaggu

SEQ ID NO: 46891 - RNA, 19 nt, Artificial Sequence
  Description of Artificial Sequence: Synthetic oligonucleotide
  Antisense strand to SEQ ID NO: 46810
accuauggccauauuaccc

SEQ ID NO: 46892 - RNA, 19 nt, Artificial Sequence
  Description of Artificial Sequence: Synthetic oligonucleotide
  Sense strand starting at position 158 of SEQ ID NO: 562
ucagaauccugcuuagcuu

SEQ ID NO: 46893 - RNA, 19 nt, Artificial Sequence
  Description of Artificial Sequence: Synthetic oligonucleotide
  Antisense strand to SEQ ID NO: 46812
aagcuaagcaggauucuga

SEQ ID NO: 46894 - RNA, 19 nt, Artificial Sequence
  Description of Artificial Sequence: Synthetic oligonucleotide
  Sense strand starting at position 138 of SEQ ID NO: 562
aguacauuauugguaguau

SEQ ID NO: 46895 - RNA, 19 nt, Artificial Sequence
  Description of Artificial Sequence: Synthetic oligonucleotide
  Antisense strand to SEQ ID NO: 46814
auacuaccaauaauguacu

SEQ ID NO: 46896 - RNA, 19 nt, Artificial Sequence
  Description of Artificial Sequence: Synthetic oligonucleotide
  Sense strand starting at position 80 of SEQ ID NO: 562
ucauuccauguuugugaau

SEQ ID NO: 46897 - RNA, 19 nt, Artificial Sequence
  Description of Artificial Sequence: Synthetic oligonucleotide
  Antisense strand to SEQ ID NO: 46816
auucacaaacauggaauga

SEQ ID NO: 46898 - RNA, 19 nt, Artificial Sequence
  Description of Artificial Sequence: Synthetic oligonucleotide
  Sense strand starting at position 79 of SEQ ID NO: 562
gucauuccauguuugugaa

SEQ ID NO: 46899 - RNA, 19 nt, Artificial Sequence
  Description of Artificial Sequence: Synthetic oligonucleotide
  Antisense strand to SEQ ID NO: 46818
uucacaaacauggaaugac

SEQ ID NO: 46900 - RNA, 19 nt, Artificial Sequence
  Description of Artificial Sequence: Synthetic oligonucleotide
  Sense strand starting at position 8 of SEQ ID NO: 562
aucagugaauuguugcaaa

SEQ ID NO: 46901 - RNA, 19 nt, Artificial Sequence
  Description of Artificial Sequence: Synthetic oligonucleotide
  Antisense strand to SEQ ID NO: 46820
uuugcaacaauucacugau

SEQ ID NO: 46902 - RNA, 19 nt, Artificial Sequence
  Description of Artificial Sequence: Synthetic oligonucleotide
  Sense strand starting at position 2 of SEQ ID NO: 562
ugagcuaucagugaauugu

SEQ ID NO: 46903 - RNA, 19 nt, Artificial Sequence
  Description of Artificial Sequence: Synthetic oligonucleotide
  Antisense strand to SEQ ID NO: 46822
acaauucacugauagcuca

SEQ ID NO: 46904 - RNA, 19 nt, Artificial Sequence
  Description of Artificial Sequence: Synthetic oligonucleotide
  Sense strand starting at position 1 of SEQ ID NO: 562
uugagcuaucagugaauug

SEQ ID NO: 46905 - RNA, 19 nt, Artificial Sequence
  Description of Artificial Sequence: Synthetic oligonucleotide
  Antisense strand to SEQ ID NO: 46824
caauucacugauagcucaa

SEQ ID NO: 46906 - RNA, 19 nt, Artificial Sequence
  Description of Artificial Sequence: Synthetic oligonucleotide
  Sense strand starting at position 13 of SEQ ID NO: 563
ugaggugcucaguaucaag

SEQ ID NO: 46907 - RNA, 19 nt, Artificial Sequence
  Description of Artificial Sequence: Synthetic oligonucleotide
  Antisense strand to SEQ ID NO: 46826
cuugauacugagcaccuca

SEQ ID NO: 46908 - RNA, 19 nt, Artificial Sequence
  Description of Artificial Sequence: Synthetic oligonucleotide
  Sense strand starting at position 140 of SEQ ID NO: 563
gccuuaacugaagauauuc

SEQ ID NO: 46909 - RNA, 19 nt, Artificial Sequence
  Description of Artificial Sequence: Synthetic oligonucleotide
  Antisense strand to SEQ ID NO: 46828
gaauaucuucaguuaaggc

SEQ ID NO: 46910 - RNA, 19 nt, Artificial Sequence
  Description of Artificial Sequence: Synthetic oligonucleotide
  Sense strand starting at position 152 of SEQ ID NO: 563
gauauuccaccauggugau

SEQ ID NO: 46911 - RNA, 19 nt, Artificial Sequence
  Description of Artificial Sequence: Synthetic oligonucleotide
  Antisense strand to SEQ ID NO: 46830
aucaccaugguggaauauc

SEQ ID NO: 46912 - RNA, 19 nt, Artificial Sequence
  Description of Artificial Sequence: Synthetic oligonucleotide
  Sense strand starting at position 194 of SEQ ID NO: 563
gucaauuggccuuaugaca

SEQ ID NO: 46913 - RNA, 19 nt, Artificial Sequence
  Description of Artificial Sequence: Synthetic oligonucleotide
  Antisense strand to SEQ ID NO: 46832
ugucauaaggccaauugac

SEQ ID NO: 46914 - RNA, 19 nt, Artificial Sequence
  Description of Artificial Sequence: Synthetic oligonucleotide
  Sense strand starting at position 245 of SEQ ID NO: 563
uugugauauuccgcccuua

SEQ ID NO: 46915 - RNA, 19 nt, Artificial Sequence
  Description of Artificial Sequence: Synthetic oligonucleotide
  Antisense strand to SEQ ID NO: 46834
uaagggcggaauaucacaa

SEQ ID NO: 46916 - RNA, 19 nt, Artificial Sequence
  Description of Artificial Sequence: Synthetic oligonucleotide
  Sense strand starting at position 496 of SEQ ID NO: 563
gcgcgugacacucaaggau

SEQ ID NO: 46917 - RNA, 19 nt, Artificial Sequence
  Description of Artificial Sequence: Synthetic oligonucleotide
  Antisense strand to SEQ ID NO: 46836
auccuugagugucacgcgc

SEQ ID NO: 46918 - RNA, 19 nt, Artificial Sequence
  Description of Artificial Sequence: Synthetic oligonucleotide
  Sense strand starting at position 637 of SEQ ID NO: 563
uuucuaguagugugacuuu

SEQ ID NO: 46919 - RNA, 19 nt, Artificial Sequence
  Description of Artificial Sequence: Synthetic oligonucleotide
  Antisense strand to SEQ ID NO: 46838
aaagucacacuacuagaaa

SEQ ID NO: 46920 - RNA, 19 nt, Artificial Sequence
  Description of Artificial Sequence: Synthetic oligonucleotide
  Sense strand starting at position 687 of SEQ ID NO: 563
uuuccucaaguguaaauca

SEQ ID NO: 46921 - RNA, 19 nt, Artificial Sequence
  Description of Artificial Sequence: Synthetic oligonucleotide
  Antisense strand to SEQ ID NO: 46840
ugauuuacacuugaggaaa

SEQ ID NO: 46922 - RNA, 19 nt, Artificial Sequence
  Description of Artificial Sequence: Synthetic oligonucleotide
  Sense strand starting at position 695 of SEQ ID NO: 563
aguguaaaucaagggcuau

SEQ ID NO: 46923 - RNA, 19 nt, Artificial Sequence
  Description of Artificial Sequence: Synthetic oligonucleotide
  Antisense strand to SEQ ID NO: 46842
auagcccuugauuuacacu

SEQ ID NO: 46924 - RNA, 19 nt, Artificial Sequence
  Description of Artificial Sequence: Synthetic oligonucleotide
  Sense strand starting at position 696 of SEQ ID NO: 563
guguaaaucaagggcuauc

SEQ ID NO: 46925 - RNA, 19 nt, Artificial Sequence
  Description of Artificial Sequence: Synthetic oligonucleotide
  Antisense strand to SEQ ID NO: 46844
gauagcccuugauuuacac

SEQ ID NO: 46926 - RNA, 19 nt, Artificial Sequence
  Description of Artificial Sequence: Synthetic oligonucleotide
  Sense strand starting at position 853 of SEQ ID NO: 563
acccgcuuugguuagcaua

SEQ ID NO: 46927 - RNA, 19 nt, Artificial Sequence
  Description of Artificial Sequence: Synthetic oligonucleotide
  Antisense strand to SEQ ID NO: 46846
uaugcuaaccaaagcgggu

SEQ ID NO: 46928 - RNA, 19 nt, Artificial Sequence
  Description of Artificial Sequence: Synthetic oligonucleotide
  Sense strand starting at position 953 of SEQ ID NO: 563
gacccaucggcuuaaagaa

SEQ ID NO: 46929 - RNA, 19 nt, Artificial Sequence
  Description of Artificial Sequence: Synthetic oligonucleotide
  Antisense strand to SEQ ID NO: 46848
uucuuuaagccgauggguc

SEQ ID NO: 46930 - RNA, 19 nt, Artificial Sequence
  Description of Artificial Sequence: Synthetic oligonucleotide
  Sense strand starting at position 1146 of SEQ ID NO: 563
gaauguugaagcuguuguu

SEQ ID NO: 46931 - RNA, 19 nt, Artificial Sequence
  Description of Artificial Sequence: Synthetic oligonucleotide
  Antisense strand to SEQ ID NO: 46850
aacaacagcuucaacauuc

SEQ ID NO: 46932 - RNA, 19 nt, Artificial Sequence
  Description of Artificial Sequence: Synthetic oligonucleotide
  Sense strand starting at position 1233 of SEQ ID NO: 563
ggaggcucugccugcaauu

SEQ ID NO: 46933 - RNA, 19 nt, Artificial Sequence
  Description of Artificial Sequence: Synthetic oligonucleotide
  Antisense strand to SEQ ID NO: 46852
aauugcaggcagagccucc

SEQ ID NO: 46934 - RNA, 19 nt, Artificial Sequence
  Description of Artificial Sequence: Synthetic oligonucleotide
  Sense strand starting at position 2530 of SEQ ID NO: 563
aagggaaacuuugaaguca

SEQ ID NO: 46935 - RNA, 19 nt, Artificial Sequence
  Description of Artificial Sequence: Synthetic oligonucleotide
  Antisense strand to SEQ ID NO: 46854
ugacuucaaaguuucccuu

SEQ ID NO: 46936 - RNA, 19 nt, Artificial Sequence
  Description of Artificial Sequence: Synthetic oligonucleotide
  Sense strand starting at position 2543 of SEQ ID NO: 563
aagucaccuccaggagauu

SEQ ID NO: 46937 - RNA, 19 nt, Artificial Sequence
  Description of Artificial Sequence: Synthetic oligonucleotide
  Antisense strand to SEQ ID NO: 46856
aaucuccuggaggugacuu

SEQ ID NO: 46938 - RNA, 19 nt, Artificial Sequence
  Description of Artificial Sequence: Synthetic oligonucleotide
  Sense strand starting at position 2554 of SEQ ID NO: 563
aggagauugucauccucug

SEQ ID NO: 46939 - RNA, 19 nt, Artificial Sequence
  Description of Artificial Sequence: Synthetic oligonucleotide
  Antisense strand to SEQ ID NO: 46858
cagaggaugacaaucuccu

SEQ ID NO: 46940 - RNA, 19 nt, Artificial Sequence
  Description of Artificial Sequence: Synthetic oligonucleotide
  Sense strand starting at position 2561 of SEQ ID NO: 563
ugucauccucugggagaca

SEQ ID NO: 46941 - RNA, 19 nt, Artificial Sequence
  Description of Artificial Sequence: Synthetic oligonucleotide
  Antisense strand to SEQ ID NO: 46860
ugucucccagaggaugaca

SEQ ID NO: 46942 - RNA, 19 nt, Artificial Sequence
  Description of Artificial Sequence: Synthetic oligonucleotide
  Sense strand starting at position 2833 of SEQ ID NO: 563
cuauuugguuccugauaua

SEQ ID NO: 46943 - RNA, 19 nt, Artificial Sequence
  Description of Artificial Sequence: Synthetic oligonucleotide
  Antisense strand to SEQ ID NO: 46862
uauaucaggaaccaaauag

SEQ ID NO: 46944 - RNA, 19 nt, Artificial Sequence
  Description of Artificial Sequence: Synthetic oligonucleotide
  Sense strand starting at position 2918 of SEQ ID NO: 563
cuuauaauuuaucggugga

SEQ ID NO: 46945 - RNA, 19 nt, Artificial Sequence
  Description of Artificial Sequence: Synthetic oligonucleotide
  Antisense strand to SEQ ID NO: 46864
uccaccgauaaauuauaag

SEQ ID NO: 46946 - RNA, 19 nt, Artificial Sequence
  Description of Artificial Sequence: Synthetic oligonucleotide
  Sense strand starting at position 2922 of SEQ ID NO: 563
uaauuuaucgguggagucu

SEQ ID NO: 46947 - RNA, 19 nt, Artificial Sequence
  Description of Artificial Sequence: Synthetic oligonucleotide
  Antisense strand to SEQ ID NO: 46866
agacuccaccgauaaauua

SEQ ID NO: 46948 - RNA, 19 nt, Artificial Sequence
  Description of Artificial Sequence: Synthetic oligonucleotide
  Sense strand starting at position 2928 of SEQ ID NO: 563
aucgguggagucuaauuga

SEQ ID NO: 46949 - RNA, 19 nt, Artificial Sequence
  Description of Artificial Sequence: Synthetic oligonucleotide
  Antisense strand to SEQ ID NO: 46868
ucaauuagacuccaccgau

SEQ ID NO: 46950 - RNA, 19 nt, Artificial Sequence
  Description of Artificial Sequence: Synthetic oligonucleotide
  Sense strand starting at position 2962 of SEQ ID NO: 563
ugcuguuuggugcauuauu

SEQ ID NO: 46951 - RNA, 19 nt, Artificial Sequence
  Description of Artificial Sequence: Synthetic oligonucleotide
  Antisense strand to SEQ ID NO: 46870
aauaaugcaccaaacagca

SEQ ID NO: 46952 - RNA, 19 nt, Artificial Sequence
  Description of Artificial Sequence: Synthetic oligonucleotide
  Sense strand starting at position 2967 of SEQ ID NO: 563
uuuggugcauuauuaaaga

SEQ ID NO: 46953 - RNA, 19 nt, Artificial Sequence
  Description of Artificial Sequence: Synthetic oligonucleotide
  Antisense strand to SEQ ID NO: 46872
ucuuuaauaaugcaccaaa

SEQ ID NO: 46954 - RNA, 19 nt, Artificial Sequence
  Description of Artificial Sequence: Synthetic oligonucleotide
  Sense strand starting at position 2977 of SEQ ID NO: 563
uauuaaagaugucuugguu

SEQ ID NO: 46955 - RNA, 19 nt, Artificial Sequence
  Description of Artificial Sequence: Synthetic oligonucleotide
  Antisense strand to SEQ ID NO: 46874
aaccaagacaucuuuaaua

SEQ ID NO: 46956 - RNA, 19 nt, Artificial Sequence
  Description of Artificial Sequence: Synthetic oligonucleotide
  Sense strand starting at position 2980 of SEQ ID NO: 563
uaaagaugucuugguuaca

SEQ ID NO: 46957 - RNA, 19 nt, Artificial Sequence
  Description of Artificial Sequence: Synthetic oligonucleotide
  Antisense strand to SEQ ID NO: 46876
uguaaccaagacaucuuua

SEQ ID NO: 46958 - RNA, 19 nt, Artificial Sequence
  Description of Artificial Sequence: Synthetic oligonucleotide
  Sense strand starting at position 2981 of SEQ ID NO: 563
aaagaugucuugguuacaa

SEQ ID NO: 46959 - RNA, 19 nt, Artificial Sequence
  Description of Artificial Sequence: Synthetic oligonucleotide
  Antisense strand to SEQ ID NO: 46878
uuguaaccaagacaucuuu

SEQ ID NO: 46960 - RNA, 19 nt, Artificial Sequence
  Description of Artificial Sequence: Synthetic oligonucleotide
  Sense strand starting at position 2983 of SEQ ID NO: 563
agaugucuugguuacaaca

SEQ ID NO: 46961 - RNA, 19 nt, Artificial Sequence
  Description of Artificial Sequence: Synthetic oligonucleotide
  Antisense strand to SEQ ID NO: 46880
uguuguaaccaagacaucu

SEQ ID NO: 46962 - RNA, 19 nt, Artificial Sequence
  Description of Artificial Sequence: Synthetic oligonucleotide
  Sense strand starting at position 3012 of SEQ ID NO: 563
uuuaaaggucuucgaaaug

SEQ ID NO: 46963 - RNA, 19 nt, Artificial Sequence
  Description of Artificial Sequence: Synthetic oligonucleotide
  Antisense strand to SEQ ID NO: 46882
cauuucgaagaccuuuaaa

SEQ ID NO: 46964 - RNA, 19 nt, Artificial Sequence
  Description of Artificial Sequence: Synthetic oligonucleotide
  Sense strand starting at position 3033 of SEQ ID NO: 563
gccauugucaagggaaggu

SEQ ID NO: 46965 - RNA, 19 nt, Artificial Sequence
  Description of Artificial Sequence: Synthetic oligonucleotide
  Antisense strand to SEQ ID NO: 46884
accuucccuugacaauggc

SEQ ID NO: 46966 - RNA, 19 nt, Artificial Sequence
  Description of Artificial Sequence: Synthetic oligonucleotide
  Sense strand starting at position 3104 of SEQ ID NO: 563
cucagaaaccuuuguuguu

SEQ ID NO: 46967 - RNA, 19 nt, Artificial Sequence
  Description of Artificial Sequence: Synthetic oligonucleotide
  Antisense strand to SEQ ID NO: 46886
aacaacaaagguuucugag

SEQ ID NO: 46968 - RNA, 19 nt, Artificial Sequence
  Description of Artificial Sequence: Synthetic oligonucleotide
  Sense strand starting at position 3190 of SEQ ID NO: 563
gaacaccugucuguggauu

SEQ ID NO: 46969 - RNA, 19 nt, Artificial Sequence
  Description of Artificial Sequence: Synthetic oligonucleotide
  Antisense strand to SEQ ID NO: 46888
aauccacagacagguguuc

SEQ ID NO: 46970 - RNA, 19 nt, Artificial Sequence
  Description of Artificial Sequence: Synthetic oligonucleotide
  Sense strand starting at position 3328 of SEQ ID NO: 563
ugugcugagacagauuguu

SEQ ID NO: 46971 - RNA, 19 nt, Artificial Sequence
  Description of Artificial Sequence: Synthetic oligonucleotide
  Antisense strand to SEQ ID NO: 46890
aacaaucugucucagcaca

SEQ ID NO: 46972 - RNA, 19 nt, Artificial Sequence
  Description of Artificial Sequence: Synthetic oligonucleotide
  Sense strand starting at position 3340 of SEQ ID NO: 563
gauuguucggguggguuga

SEQ ID NO: 46973 - RNA, 19 nt, Artificial Sequence
  Description of Artificial Sequence: Synthetic oligonucleotide
  Antisense strand to SEQ ID NO: 46892
ucaacccacccgaacaauc

SEQ ID NO: 46974 - RNA, 19 nt, Artificial Sequence
  Description of Artificial Sequence: Synthetic oligonucleotide
  Sense strand starting at position 3351 of SEQ ID NO: 563
uggguugagucagccugaa

SEQ ID NO: 46975 - RNA, 19 nt, Artificial Sequence
  Description of Artificial Sequence: Synthetic oligonucleotide
  Antisense strand to SEQ ID NO: 46894
uucaggcugacucaaccca

SEQ ID NO: 46976 - RNA, 19 nt, Artificial Sequence
  Description of Artificial Sequence: Synthetic oligonucleotide
  Sense strand starting at position 3355 of SEQ ID NO: 563
uugagucagccugaaacaa

SEQ ID NO: 46977 - RNA, 19 nt, Artificial Sequence
  Description of Artificial Sequence: Synthetic oligonucleotide
  Antisense strand to SEQ ID NO: 46896
uuguuucaggcugacucaa

SEQ ID NO: 46978 - RNA, 19 nt, Artificial Sequence
  Description of Artificial Sequence: Synthetic oligonucleotide
  Sense strand starting at position 3399 of SEQ ID NO: 563
gggcuauuucuuuaguugu

SEQ ID NO: 46979 - RNA, 19 nt, Artificial Sequence
  Description of Artificial Sequence: Synthetic oligonucleotide
  Antisense strand to SEQ ID NO: 46898
acaacuaaagaaauagccc

SEQ ID NO: 46980 - RNA, 19 nt, Artificial Sequence
  Description of Artificial Sequence: Synthetic oligonucleotide
  Sense strand starting at position 3401 of SEQ ID NO: 563
gcuauuucuuuaguugugu

SEQ ID NO: 46981 - RNA, 19 nt, Artificial Sequence
  Description of Artificial Sequence: Synthetic oligonucleotide
  Antisense strand to SEQ ID NO: 46900
acacaacuaaagaaauagc

SEQ ID NO: 46982 - RNA, 19 nt, Artificial Sequence
  Description of Artificial Sequence: Synthetic oligonucleotide
  Sense strand starting at position 3416 of SEQ ID NO: 563
gugugaagcuucuccacaa

SEQ ID NO: 46983 - RNA, 19 nt, Artificial Sequence
  Description of Artificial Sequence: Synthetic oligonucleotide
  Antisense strand to SEQ ID NO: 46902
uuguggagaagcuucacac

SEQ ID NO: 46984 - RNA, 19 nt, Artificial Sequence
  Description of Artificial Sequence: Synthetic oligonucleotide
  Sense strand starting at position 3417 of SEQ ID NO: 563
ugugaagcuucuccacaac

SEQ ID NO: 46985 - RNA, 19 nt, Artificial Sequence
  Description of Artificial Sequence: Synthetic oligonucleotide
  Antisense strand to SEQ ID NO: 46904
guuguggagaagcuucaca

SEQ ID NO: 46986 - RNA, 19 nt, Artificial Sequence
  Description of Artificial Sequence: Synthetic oligonucleotide
  Sense strand starting at position 3329 of SEQ ID NO: 564
ucgaguuuggaacagucaa

SEQ ID NO: 46987 - RNA, 19 nt, Artificial Sequence
  Description of Artificial Sequence: Synthetic oligonucleotide
  Antisense strand to SEQ ID NO: 46906
uugacuguuccaaacucga

SEQ ID NO: 46988 - RNA, 19 nt, Artificial Sequence
  Description of Artificial Sequence: Synthetic oligonucleotide
  Sense strand starting at position 3318 of SEQ ID NO: 564
ggaucagacacucgaguuu

SEQ ID NO: 46989 - RNA, 19 nt, Artificial Sequence
  Description of Artificial Sequence: Synthetic oligonucleotide
  Antisense strand to SEQ ID NO: 46908
aaacucgagugucugaucc

SEQ ID NO: 46990 - RNA, 19 nt, Artificial Sequence
  Description of Artificial Sequence: Synthetic oligonucleotide
  Sense strand starting at position 3142 of SEQ ID NO: 564
uuagcaaaugcucaguaaa

SEQ ID NO: 46991 - RNA, 19 nt, Artificial Sequence
  Description of Artificial Sequence: Synthetic oligonucleotide
  Antisense strand to SEQ ID NO: 46910
uuuacugagcauuugcuaa

SEQ ID NO: 46992 - RNA, 19 nt, Artificial Sequence
  Description of Artificial Sequence: Synthetic oligonucleotide
  Sense strand starting at position 3131 of SEQ ID NO: 564
augccugggacuuagcaaa

SEQ ID NO: 46993 - RNA, 19 nt, Artificial Sequence
  Description of Artificial Sequence: Synthetic oligonucleotide
  Antisense strand to SEQ ID NO: 46912
uuugcuaagucccaggcau

SEQ ID NO: 46994 - RNA, 19 nt, Artificial Sequence
  Description of Artificial Sequence: Synthetic oligonucleotide
  Sense strand starting at position 3086 of SEQ ID NO: 564
uguaguuaaggauaaguga

SEQ ID NO: 46995 - RNA, 19 nt, Artificial Sequence
  Description of Artificial Sequence: Synthetic oligonucleotide
  Antisense strand to SEQ ID NO: 46914
ucacuuauccuuaacuaca

SEQ ID NO: 46996 - RNA, 19 nt, Artificial Sequence
  Description of Artificial Sequence: Synthetic oligonucleotide
  Sense strand starting at position 3084 of SEQ ID NO: 564
auuguaguuaaggauaagu

SEQ ID NO: 46997 - RNA, 19 nt, Artificial Sequence
  Description of Artificial Sequence: Synthetic oligonucleotide
  Antisense strand to SEQ ID NO: 46916
acuuauccuuaacuacaau

SEQ ID NO: 46998 - RNA, 19 nt, Artificial Sequence
  Description of Artificial Sequence: Synthetic oligonucleotide
  Sense strand starting at position 3079 of SEQ ID NO: 564
gcaggauuguaguuaagga

SEQ ID NO: 46999 - RNA, 19 nt, Artificial Sequence
  Description of Artificial Sequence: Synthetic oligonucleotide
  Antisense strand to SEQ ID NO: 46918
uccuuaacuacaauccugc

SEQ ID NO: 47000 - RNA, 19 nt, Artificial Sequence
  Description of Artificial Sequence: Synthetic oligonucleotide
  Sense strand starting at position 3066 of SEQ ID NO: 564
gaauacuuuccuggcagga

SEQ ID NO: 47001 - RNA, 19 nt, Artificial Sequence
  Description of Artificial Sequence: Synthetic oligonucleotide
  Antisense strand to SEQ ID NO: 46920
uccugccaggaaaguauuc

SEQ ID NO: 47002 - RNA, 19 nt, Artificial Sequence
  Description of Artificial Sequence: Synthetic oligonucleotide
  Sense strand starting at position 3063 of SEQ ID NO: 564
ugggaauacuuuccuggca

SEQ ID NO: 47003 - RNA, 19 nt, Artificial Sequence
  Description of Artificial Sequence: Synthetic oligonucleotide
  Antisense strand to SEQ ID NO: 46922
ugccaggaaaguauuccca

SEQ ID NO: 47004 - RNA, 19 nt, Artificial Sequence
  Description of Artificial Sequence: Synthetic oligonucleotide
  Sense strand starting at position 2994 of SEQ ID NO: 564
guacccaagugaccuuaaa

SEQ ID NO: 47005 - RNA, 19 nt, Artificial Sequence
  Description of Artificial Sequence: Synthetic oligonucleotide
  Antisense strand to SEQ ID NO: 46924
uuuaaggucacuuggguac

SEQ ID NO: 47006 - RNA, 19 nt, Artificial Sequence
  Description of Artificial Sequence: Synthetic oligonucleotide
  Sense strand starting at position 2900 of SEQ ID NO: 564
uggugcucaagagauuaua

SEQ ID NO: 47007 - RNA, 19 nt, Artificial Sequence
  Description of Artificial Sequence: Synthetic oligonucleotide
  Antisense strand to SEQ ID NO: 46926
uauaaucucuugagcacca

SEQ ID NO: 47008 - RNA, 19 nt, Artificial Sequence
  Description of Artificial Sequence: Synthetic oligonucleotide
  Sense strand starting at position 2898 of SEQ ID NO: 564
uuuggugcucaagagauua

SEQ ID NO: 47009 - RNA, 19 nt, Artificial Sequence
  Description of Artificial Sequence: Synthetic oligonucleotide
  Antisense strand to SEQ ID NO: 46928
uaaucucuugagcaccaaa

SEQ ID NO: 47010 - RNA, 19 nt, Artificial Sequence
  Description of Artificial Sequence: Synthetic oligonucleotide
  Sense strand starting at position 2867 of SEQ ID NO: 564
auucguagaagugaacgaa

SEQ ID NO: 47011 - RNA, 19 nt, Artificial Sequence
  Description of Artificial Sequence: Synthetic oligonucleotide
  Antisense strand to SEQ ID NO: 46930
uucguucacuucuacgaau

SEQ ID NO: 47012 - RNA, 19 nt, Artificial Sequence
  Description of Artificial Sequence: Synthetic oligonucleotide
  Sense strand starting at position 2862 of SEQ ID NO: 564
uaaauauucguagaaguga

SEQ ID NO: 47013 - RNA, 19 nt, Artificial Sequence
  Description of Artificial Sequence: Synthetic oligonucleotide
  Antisense strand to SEQ ID NO: 46932
ucacuucuacgaauauuua

SEQ ID NO: 47014 - RNA, 19 nt, Artificial Sequence
  Description of Artificial Sequence: Synthetic oligonucleotide
  Sense strand starting at position 2857 of SEQ ID NO: 564
cucaauaaauauucguaga

SEQ ID NO: 47015 - RNA, 19 nt, Artificial Sequence
  Description of Artificial Sequence: Synthetic oligonucleotide
  Antisense strand to SEQ ID NO: 46934
ucuacgaauauuuauugag

SEQ ID NO: 47016 - RNA, 19 nt, Artificial Sequence
  Description of Artificial Sequence: Synthetic oligonucleotide
  Sense strand starting at position 2765 of SEQ ID NO: 564
aguuuaucaccugauccuu

SEQ ID NO: 47017 - RNA, 19 nt, Artificial Sequence
  Description of Artificial Sequence: Synthetic oligonucleotide
  Antisense strand to SEQ ID NO: 46936
aaggaucaggugauaaacu

SEQ ID NO: 47018 - RNA, 19 nt, Artificial Sequence
  Description of Artificial Sequence: Synthetic oligonucleotide
  Sense strand starting at position 2659 of SEQ ID NO: 564
agaucccuugcggauauaa

SEQ ID NO: 47019 - RNA, 19 nt, Artificial Sequence
  Description of Artificial Sequence: Synthetic oligonucleotide
  Antisense strand to SEQ ID NO: 46938
uuauauccgcaagggaucu

SEQ ID NO: 47020 - RNA, 19 nt, Artificial Sequence
  Description of Artificial Sequence: Synthetic oligonucleotide
  Sense strand starting at position 2633 of SEQ ID NO: 564
ggaaacuuucuuugagcca

SEQ ID NO: 47021 - RNA, 19 nt, Artificial Sequence
  Description of Artificial Sequence: Synthetic oligonucleotide
  Antisense strand to SEQ ID NO: 46940
uggcucaaagaaaguuucc

SEQ ID NO: 47022 - RNA, 19 nt, Artificial Sequence
  Description of Artificial Sequence: Synthetic oligonucleotide
  Sense strand starting at position 2375 of SEQ ID NO: 564
gggauucuuuaacucucca

SEQ ID NO: 47023 - RNA, 19 nt, Artificial Sequence
  Description of Artificial Sequence: Synthetic oligonucleotide
  Antisense strand to SEQ ID NO: 46942
uggagaguuaaagaauccc

SEQ ID NO: 47024 - RNA, 19 nt, Artificial Sequence
  Description of Artificial Sequence: Synthetic oligonucleotide
  Sense strand starting at position 2330 of SEQ ID NO: 564
acccuauucguagaaccuu

SEQ ID NO: 47025 - RNA, 19 nt, Artificial Sequence
  Description of Artificial Sequence: Synthetic oligonucleotide
  Antisense strand to SEQ ID NO: 46944
aagguucuacgaauagggu

SEQ ID NO: 47026 - RNA, 19 nt, Artificial Sequence
  Description of Artificial Sequence: Synthetic oligonucleotide
  Sense strand starting at position 2147 of SEQ ID NO: 564
aaggcugaucgugaccaaa

SEQ ID NO: 47027 - RNA, 19 nt, Artificial Sequence
  Description of Artificial Sequence: Synthetic oligonucleotide
  Antisense strand to SEQ ID NO: 46946
uuuggucacgaucagccuu

SEQ ID NO: 47028 - RNA, 19 nt, Artificial Sequence
  Description of Artificial Sequence: Synthetic oligonucleotide
  Sense strand starting at position 1623 of SEQ ID NO: 564
agacaagcuccaggucuaa

SEQ ID NO: 47029 - RNA, 19 nt, Artificial Sequence
  Description of Artificial Sequence: Synthetic oligonucleotide
  Antisense strand to SEQ ID NO: 46948
uuagaccuggagcuugucu

SEQ ID NO: 47030 - RNA, 19 nt, Artificial Sequence
  Description of Artificial Sequence: Synthetic oligonucleotide
  Sense strand starting at position 1500 of SEQ ID NO: 564
ugggaaguucuuuagcuga

SEQ ID NO: 47031 - RNA, 19 nt, Artificial Sequence
  Description of Artificial Sequence: Synthetic oligonucleotide
  Antisense strand to SEQ ID NO: 46950
ucagcuaaagaacuuccca

SEQ ID NO: 47032 - RNA, 19 nt, Artificial Sequence
  Description of Artificial Sequence: Synthetic oligonucleotide
  Sense strand starting at position 1434 of SEQ ID NO: 564
guacgaucgcugccuuauu

SEQ ID NO: 47033 - RNA, 19 nt, Artificial Sequence
  Description of Artificial Sequence: Synthetic oligonucleotide
  Antisense strand to SEQ ID NO: 46952
aauaaggcagcgaucguac

SEQ ID NO: 47034 - RNA, 19 nt, Artificial Sequence
  Description of Artificial Sequence: Synthetic oligonucleotide
  Sense strand starting at position 1412 of SEQ ID NO: 564
gugcuauuauuucuaccau

SEQ ID NO: 47035 - RNA, 19 nt, Artificial Sequence
  Description of Artificial Sequence: Synthetic oligonucleotide
  Antisense strand to SEQ ID NO: 46954
augguagaaauaauagcac

SEQ ID NO: 47036 - RNA, 19 nt, Artificial Sequence
  Description of Artificial Sequence: Synthetic oligonucleotide
  Sense strand starting at position 1368 of SEQ ID NO: 564
aggguuuacugagcccaga

SEQ ID NO: 47037 - RNA, 19 nt, Artificial Sequence
  Description of Artificial Sequence: Synthetic oligonucleotide
  Antisense strand to SEQ ID NO: 46956
ucugggcucaguaaacccu

SEQ ID NO: 47038 - RNA, 19 nt, Artificial Sequence
  Description of Artificial Sequence: Synthetic oligonucleotide
  Sense strand starting at position 1351 of SEQ ID NO: 564
ggacuaaaugcauguaaag

SEQ ID NO: 47039 - RNA, 19 nt, Artificial Sequence
  Description of Artificial Sequence: Synthetic oligonucleotide
  Antisense strand to SEQ ID NO: 46958
cuuuacaugcauuuagucc

SEQ ID NO: 47040 - RNA, 19 nt, Artificial Sequence
  Description of Artificial Sequence: Synthetic oligonucleotide
  Sense strand starting at position 1031 of SEQ ID NO: 564
gguggauuuccguaagugc

SEQ ID NO: 47041 - RNA, 19 nt, Artificial Sequence
  Description of Artificial Sequence: Synthetic oligonucleotide
  Antisense strand to SEQ ID NO: 46960
gcacuuacggaaauccacc

SEQ ID NO: 47042 - RNA, 19 nt, Artificial Sequence
  Description of Artificial Sequence: Synthetic oligonucleotide
  Sense strand starting at position 1012 of SEQ ID NO: 564
agggcaaagcuauaacagu

SEQ ID NO: 47043 - RNA, 19 nt, Artificial Sequence
  Description of Artificial Sequence: Synthetic oligonucleotide
  Antisense strand to SEQ ID NO: 46962
acuguuauagcuuugcccu

SEQ ID NO: 47044 - RNA, 19 nt, Artificial Sequence
  Description of Artificial Sequence: Synthetic oligonucleotide
  Sense strand starting at position 906 of SEQ ID NO: 564
uguuauacccuacaauguu

SEQ ID NO: 47045 - RNA, 19 nt, Artificial Sequence
  Description of Artificial Sequence: Synthetic oligonucleotide
  Antisense strand to SEQ ID NO: 46964
aacauuguaggguauaaca

SEQ ID NO: 47046 - RNA, 19 nt, Artificial Sequence
  Description of Artificial Sequence: Synthetic oligonucleotide
  Sense strand starting at position 904 of SEQ ID NO: 564
gcuguuauacccuacaaug

SEQ ID NO: 47047 - RNA, 19 nt, Artificial Sequence
  Description of Artificial Sequence: Synthetic oligonucleotide
  Antisense strand to SEQ ID NO: 46966
cauuguaggguauaacagc

SEQ ID NO: 47048 - RNA, 19 nt, Artificial Sequence
  Description of Artificial Sequence: Synthetic oligonucleotide
  Sense strand starting at position 847 of SEQ ID NO: 564
gguuaaugaacaggguagu

SEQ ID NO: 47049 - RNA, 19 nt, Artificial Sequence
  Description of Artificial Sequence: Synthetic oligonucleotide
  Antisense strand to SEQ ID NO: 46968
acuacccuguucauuaacc

SEQ ID NO: 47050 - RNA, 19 nt, Artificial Sequence
  Description of Artificial Sequence: Synthetic oligonucleotide
  Sense strand starting at position 833 of SEQ ID NO: 564
aaauaauccuggcugguua

SEQ ID NO: 47051 - RNA, 19 nt, Artificial Sequence
  Description of Artificial Sequence: Synthetic oligonucleotide
  Antisense strand to SEQ ID NO: 46970
uaaccagccaggauuauuu

SEQ ID NO: 47052 - RNA, 19 nt, Artificial Sequence
  Description of Artificial Sequence: Synthetic oligonucleotide
  Sense strand starting at position 831 of SEQ ID NO: 564
ggaaauaauccuggcuggu

SEQ ID NO: 47053 - RNA, 19 nt, Artificial Sequence
  Description of Artificial Sequence: Synthetic oligonucleotide
  Antisense strand to SEQ ID NO: 46972
accagccaggauuauuucc

SEQ ID NO: 47054 - RNA, 19 nt, Artificial Sequence
  Description of Artificial Sequence: Synthetic oligonucleotide
  Sense strand starting at position 799 of SEQ ID NO: 564
ugaguacagugacuuaauu

SEQ ID NO: 47055 - RNA, 19 nt, Artificial Sequence
  Description of Artificial Sequence: Synthetic oligonucleotide
  Antisense strand to SEQ ID NO: 46974
aauuaagucacuguacuca

SEQ ID NO: 47056 - RNA, 19 nt, Artificial Sequence
  Description of Artificial Sequence: Synthetic oligonucleotide
  Sense strand starting at position 659 of SEQ ID NO: 564
ggccaauauggucauuauu

SEQ ID NO: 47057 - RNA, 19 nt, Artificial Sequence
  Description of Artificial Sequence: Synthetic oligonucleotide
  Antisense strand to SEQ ID NO: 46976
aauaaugaccauauuggcc

SEQ ID NO: 47058 - RNA, 19 nt, Artificial Sequence
  Description of Artificial Sequence: Synthetic oligonucleotide
  Sense strand starting at position 229 of SEQ ID NO: 564
uacaaacauggacgugaaa

SEQ ID NO: 47059 - RNA, 19 nt, Artificial Sequence
  Description of Artificial Sequence: Synthetic oligonucleotide
  Antisense strand to SEQ ID NO: 46978
uuucacguccauguuugua

SEQ ID NO: 47060 - RNA, 19 nt, Artificial Sequence
  Description of Artificial Sequence: Synthetic oligonucleotide
  Sense strand starting at position 216 of SEQ ID NO: 564
ggcauuaaauaaguacaaa

SEQ ID NO: 47061 - RNA, 19 nt, Artificial Sequence
  Description of Artificial Sequence: Synthetic oligonucleotide
  Antisense strand to SEQ ID NO: 46980
uuuguacuuauuuaaugcc

SEQ ID NO: 47062 - RNA, 19 nt, Artificial Sequence
  Description of Artificial Sequence: Synthetic oligonucleotide
  Sense strand starting at position 206 of SEQ ID NO: 564
ggcauucuugggcauuaaa

SEQ ID NO: 47063 - RNA, 19 nt, Artificial Sequence
  Description of Artificial Sequence: Synthetic oligonucleotide
  Antisense strand to SEQ ID NO: 46982
uuuaaugcccaagaaugcc

SEQ ID NO: 47064 - RNA, 19 nt, Artificial Sequence
  Description of Artificial Sequence: Synthetic oligonucleotide
  Sense strand starting at position 191 of SEQ ID NO: 564
aaaugagauaguuguggca

SEQ ID NO: 47065 - RNA, 19 nt, Artificial Sequence
  Description of Artificial Sequence: Synthetic oligonucleotide
  Antisense strand to SEQ ID NO: 46984
ugccacaacuaucucauuu

SEQ ID NO: 47066 - RNA, 19 nt, Artificial Sequence
  Description of Artificial Sequence: Synthetic oligonucleotide
  Sense strand starting at position 3915 of SEQ ID NO: 565
cugacaaaugcuggacuau

SEQ ID NO: 47067 - RNA, 19 nt, Artificial Sequence
  Description of Artificial Sequence: Synthetic oligonucleotide
  Antisense strand to SEQ ID NO: 46986
auaguccagcauuugucag

SEQ ID NO: 47068 - RNA, 19 nt, Artificial Sequence
  Description of Artificial Sequence: Synthetic oligonucleotide
  Sense strand starting at position 3796 of SEQ ID NO: 565
uucugugaagucuaguaaa

SEQ ID NO: 47069 - RNA, 19 nt, Artificial Sequence
  Description of Artificial Sequence: Synthetic oligonucleotide
  Antisense strand to SEQ ID NO: 46988
uuuacuagacuucacagaa

SEQ ID NO: 47070 - RNA, 19 nt, Artificial Sequence
  Description of Artificial Sequence: Synthetic oligonucleotide
  Sense strand starting at position 3772 of SEQ ID NO: 565
uuaguuacuugacuaaagu

SEQ ID NO: 47071 - RNA, 19 nt, Artificial Sequence
  Description of Artificial Sequence: Synthetic oligonucleotide
  Antisense strand to SEQ ID NO: 46990
acuuuagucaaguaacuaa

SEQ ID NO: 47072 - RNA, 19 nt, Artificial Sequence
  Description of Artificial Sequence: Synthetic oligonucleotide
  Sense strand starting at position 3609 of SEQ ID NO: 565
gcauucuuugaugagguau

SEQ ID NO: 47073 - RNA, 19 nt, Artificial Sequence
  Description of Artificial Sequence: Synthetic oligonucleotide
  Antisense strand to SEQ ID NO: 46992
auaccucaucaaagaaugc

SEQ ID NO: 47074 - RNA, 19 nt, Artificial Sequence
  Description of Artificial Sequence: Synthetic oligonucleotide
  Sense strand starting at position 3408 of SEQ ID NO: 565
gaaaguuuccgggaagcuc

SEQ ID NO: 47075 - RNA, 19 nt, Artificial Sequence
  Description of Artificial Sequence: Synthetic oligonucleotide
  Antisense strand to SEQ ID NO: 46994
gagcuucccggaaacuuuc

SEQ ID NO: 47076 - RNA, 19 nt, Artificial Sequence
  Description of Artificial Sequence: Synthetic oligonucleotide
  Sense strand starting at position 3404 of SEQ ID NO: 565
cucagaaaguuuccgggaa

SEQ ID NO: 47077 - RNA, 19 nt, Artificial Sequence
  Description of Artificial Sequence: Synthetic oligonucleotide
  Antisense strand to SEQ ID NO: 46996
uucccggaaacuuucugag

SEQ ID NO: 47078 - RNA, 19 nt, Artificial Sequence
  Description of Artificial Sequence: Synthetic oligonucleotide
  Sense strand starting at position 3394 of SEQ ID NO: 565
ugauuugggucucagaaag

SEQ ID NO: 47079 - RNA, 19 nt, Artificial Sequence
  Description of Artificial Sequence: Synthetic oligonucleotide
  Antisense strand to SEQ ID NO: 46998
cuuucugagacccaaauca

SEQ ID NO: 47080 - RNA, 19 nt, Artificial Sequence
  Description of Artificial Sequence: Synthetic oligonucleotide
  Sense strand starting at position 3116 of SEQ ID NO: 565
ucaucaucuuaggucaaga

SEQ ID NO: 47081 - RNA, 19 nt, Artificial Sequence
  Description of Artificial Sequence: Synthetic oligonucleotide
  Antisense strand to SEQ ID NO: 47000
ucuugaccuaagaugauga

SEQ ID NO: 47082 - RNA, 19 nt, Artificial Sequence
  Description of Artificial Sequence: Synthetic oligonucleotide
  Sense strand starting at position 3028 of SEQ ID NO: 565
cuggauaaacucugguaag

SEQ ID NO: 47083 - RNA, 19 nt, Artificial Sequence
  Description of Artificial Sequence: Synthetic oligonucleotide
  Antisense strand to SEQ ID NO: 47002
cuuaccagaguuuauccag

SEQ ID NO: 47084 - RNA, 19 nt, Artificial Sequence
  Description of Artificial Sequence: Synthetic oligonucleotide
  Sense strand starting at position 3002 of SEQ ID NO: 565
guauaaguucuggaucuga

SEQ ID NO: 47085 - RNA, 19 nt, Artificial Sequence
  Description of Artificial Sequence: Synthetic oligonucleotide
  Antisense strand to SEQ ID NO: 47004
ucagauccagaacuuauac

SEQ ID NO: 47086 - RNA, 19 nt, Artificial Sequence
  Description of Artificial Sequence: Synthetic oligonucleotide
  Sense strand starting at position 2989 of SEQ ID NO: 565
agacuccgacauuguauaa

SEQ ID NO: 47087 - RNA, 19 nt, Artificial Sequence
  Description of Artificial Sequence: Synthetic oligonucleotide
  Antisense strand to SEQ ID NO: 47006
uuauacaaugucggagucu

SEQ ID NO: 47088 - RNA, 19 nt, Artificial Sequence
  Description of Artificial Sequence: Synthetic oligonucleotide
  Sense strand starting at position 2961 of SEQ ID NO: 565
guaucugucaucguguauu

SEQ ID NO: 47089 - RNA, 19 nt, Artificial Sequence
  Description of Artificial Sequence: Synthetic oligonucleotide
  Antisense strand to SEQ ID NO: 47008
aauacacgaugacagauac

SEQ ID NO: 47090 - RNA, 19 nt, Artificial Sequence
  Description of Artificial Sequence: Synthetic oligonucleotide
  Sense strand starting at position 2928 of SEQ ID NO: 565
ucaugaaguuaauuaagcu

SEQ ID NO: 47091 - RNA, 19 nt, Artificial Sequence
  Description of Artificial Sequence: Synthetic oligonucleotide
  Antisense strand to SEQ ID NO: 47010
agcuuaauuaacuucauga

SEQ ID NO: 47092 - RNA, 19 nt, Artificial Sequence
  Description of Artificial Sequence: Synthetic oligonucleotide
  Sense strand starting at position 2878 of SEQ ID NO: 565
ucacaauucuggccaaaga

SEQ ID NO: 47093 - RNA, 19 nt, Artificial Sequence
  Description of Artificial Sequence: Synthetic oligonucleotide
  Antisense strand to SEQ ID NO: 47012
ucuuuggccagaauuguga

SEQ ID NO: 47094 - RNA, 19 nt, Artificial Sequence
  Description of Artificial Sequence: Synthetic oligonucleotide
  Sense strand starting at position 2810 of SEQ ID NO: 565
cugcuugggaagcaagaua

SEQ ID NO: 47095 - RNA, 19 nt, Artificial Sequence
  Description of Artificial Sequence: Synthetic oligonucleotide
  Antisense strand to SEQ ID NO: 47014
uaucuugcuucccaagcag

SEQ ID NO: 47096 - RNA, 19 nt, Artificial Sequence
  Description of Artificial Sequence: Synthetic oligonucleotide
  Sense strand starting at position 2686 of SEQ ID NO: 565
gaacucuuuguugagcgaa

SEQ ID NO: 47097 - RNA, 19 nt, Artificial Sequence
  Description of Artificial Sequence: Synthetic oligonucleotide
  Antisense strand to SEQ ID NO: 47016
uucgcucaacaaagaguuc

SEQ ID NO: 47098 - RNA, 19 nt, Artificial Sequence
  Description of Artificial Sequence: Synthetic oligonucleotide
  Sense strand starting at position 2682 of SEQ ID NO: 565
uuuagaacucuuuguugag

SEQ ID NO: 47099 - RNA, 19 nt, Artificial Sequence
  Description of Artificial Sequence: Synthetic oligonucleotide
  Antisense strand to SEQ ID NO: 47018
cucaacaaagaguucuaaa

SEQ ID NO: 47100 - RNA, 19 nt, Artificial Sequence
  Description of Artificial Sequence: Synthetic oligonucleotide
  Sense strand starting at position 2671 of SEQ ID NO: 565
agaugugacuguuuagaac

SEQ ID NO: 47101 - RNA, 19 nt, Artificial Sequence
  Description of Artificial Sequence: Synthetic oligonucleotide
  Antisense strand to SEQ ID NO: 47020
guucuaaacagucacaucu

SEQ ID NO: 47102 - RNA, 19 nt, Artificial Sequence
  Description of Artificial Sequence: Synthetic oligonucleotide
  Sense strand starting at position 2620 of SEQ ID NO: 565
agaguuggguauucuaaua

SEQ ID NO: 47103 - RNA, 19 nt, Artificial Sequence
  Description of Artificial Sequence: Synthetic oligonucleotide
  Antisense strand to SEQ ID NO: 47022
uauuagaauacccaacucu

SEQ ID NO: 47104 - RNA, 19 nt, Artificial Sequence
  Description of Artificial Sequence: Synthetic oligonucleotide
  Sense strand starting at position 2614 of SEQ ID NO: 565
uaucaaagaguuggguauu

SEQ ID NO: 47105 - RNA, 19 nt, Artificial Sequence
  Description of Artificial Sequence: Synthetic oligonucleotide
  Antisense strand to SEQ ID NO: 47024
aauacccaacucuuugaua

SEQ ID NO: 47106 - RNA, 19 nt, Artificial Sequence
  Description of Artificial Sequence: Synthetic oligonucleotide
  Sense strand starting at position 2613 of SEQ ID NO: 565
auaucaaagaguuggguau

SEQ ID NO: 47107 - RNA, 19 nt, Artificial Sequence
  Description of Artificial Sequence: Synthetic oligonucleotide
  Antisense strand to SEQ ID NO: 47026
auacccaacucuuugauau

SEQ ID NO: 47108 - RNA, 19 nt, Artificial Sequence
  Description of Artificial Sequence: Synthetic oligonucleotide
  Sense strand starting at position 2540 of SEQ ID NO: 565
auaucuaugcuaggauaua

SEQ ID NO: 47109 - RNA, 19 nt, Artificial Sequence
  Description of Artificial Sequence: Synthetic oligonucleotide
  Antisense strand to SEQ ID NO: 47028
uauauccuagcauagauau

SEQ ID NO: 47110 - RNA, 19 nt, Artificial Sequence
  Description of Artificial Sequence: Synthetic oligonucleotide
  Sense strand starting at position 2524 of SEQ ID NO: 565
uguuaagugccagaauaua

SEQ ID NO: 47111 - RNA, 19 nt, Artificial Sequence
  Description of Artificial Sequence: Synthetic oligonucleotide
  Antisense strand to SEQ ID NO: 47030
uauauucuggcacuuaaca

SEQ ID NO: 47112 - RNA, 19 nt, Artificial Sequence
  Description of Artificial Sequence: Synthetic oligonucleotide
  Sense strand starting at position 2471 of SEQ ID NO: 565
guaaccguccuagagaacu

SEQ ID NO: 47113 - RNA, 19 nt, Artificial Sequence
  Description of Artificial Sequence: Synthetic oligonucleotide
  Antisense strand to SEQ ID NO: 47032
aguucucuaggacgguuac

SEQ ID NO: 47114 - RNA, 19 nt, Artificial Sequence
  Description of Artificial Sequence: Synthetic oligonucleotide
  Sense strand starting at position 2328 of SEQ ID NO: 565
gcgugugacagagaagaaa

SEQ ID NO: 47115 - RNA, 19 nt, Artificial Sequence
  Description of Artificial Sequence: Synthetic oligonucleotide
  Antisense strand to SEQ ID NO: 47034
uuucuucucugucacacgc

SEQ ID NO: 47116 - RNA, 19 nt, Artificial Sequence
  Description of Artificial Sequence: Synthetic oligonucleotide
  Sense strand starting at position 2132 of SEQ ID NO: 565
gaagcaauccuauaggugu

SEQ ID NO: 47117 - RNA, 19 nt, Artificial Sequence
  Description of Artificial Sequence: Synthetic oligonucleotide
  Antisense strand to SEQ ID NO: 47036
acaccuauaggauugcuuc

SEQ ID NO: 47118 - RNA, 19 nt, Artificial Sequence
  Description of Artificial Sequence: Synthetic oligonucleotide
  Sense strand starting at position 1394 of SEQ ID NO: 565
ucaggacugaucuaacguu

SEQ ID NO: 47119 - RNA, 19 nt, Artificial Sequence
  Description of Artificial Sequence: Synthetic oligonucleotide
  Antisense strand to SEQ ID NO: 47038
aacguuagaucaguccuga

SEQ ID NO: 47120 - RNA, 19 nt, Artificial Sequence
  Description of Artificial Sequence: Synthetic oligonucleotide
  Sense strand starting at position 1389 of SEQ ID NO: 565
gggccucaggacugaucua

SEQ ID NO: 47121 - RNA, 19 nt, Artificial Sequence
  Description of Artificial Sequence: Synthetic oligonucleotide
  Antisense strand to SEQ ID NO: 47040
uagaucaguccugaggccc

SEQ ID NO: 47122 - RNA, 19 nt, Artificial Sequence
  Description of Artificial Sequence: Synthetic oligonucleotide
  Sense strand starting at position 1126 of SEQ ID NO: 565
ucagcauugcaagaauaac

SEQ ID NO: 47123 - RNA, 19 nt, Artificial Sequence
  Description of Artificial Sequence: Synthetic oligonucleotide
  Antisense strand to SEQ ID NO: 47042
guuauucuugcaaugcuga

SEQ ID NO: 47124 - RNA, 19 nt, Artificial Sequence
  Description of Artificial Sequence: Synthetic oligonucleotide
  Sense strand starting at position 1095 of SEQ ID NO: 565
guggcagagcuuuacagaa

SEQ ID NO: 47125 - RNA, 19 nt, Artificial Sequence
  Description of Artificial Sequence: Synthetic oligonucleotide
  Antisense strand to SEQ ID NO: 47044
uucuguaaagcucugccac

SEQ ID NO: 47126 - RNA, 19 nt, Artificial Sequence
  Description of Artificial Sequence: Synthetic oligonucleotide
  Sense strand starting at position 1089 of SEQ ID NO: 565
uaagauguggcagagcuuu

SEQ ID NO: 47127 - RNA, 19 nt, Artificial Sequence
  Description of Artificial Sequence: Synthetic oligonucleotide
  Antisense strand to SEQ ID NO: 47046
aaagcucugccacaucuua

SEQ ID NO: 47128 - RNA, 19 nt, Artificial Sequence
  Description of Artificial Sequence: Synthetic oligonucleotide
  Sense strand starting at position 765 of SEQ ID NO: 565
cuaguccaacauggauaua

SEQ ID NO: 47129 - RNA, 19 nt, Artificial Sequence
  Description of Artificial Sequence: Synthetic oligonucleotide
  Antisense strand to SEQ ID NO: 47048
uauauccauguuggacuag

SEQ ID NO: 47130 - RNA, 19 nt, Artificial Sequence
  Description of Artificial Sequence: Synthetic oligonucleotide
  Sense strand starting at position 762 of SEQ ID NO: 565
cuccuaguccaacauggau

SEQ ID NO: 47131 - RNA, 19 nt, Artificial Sequence
  Description of Artificial Sequence: Synthetic oligonucleotide
  Antisense strand to SEQ ID NO: 47050
auccauguuggacuaggag

SEQ ID NO: 47132 - RNA, 19 nt, Artificial Sequence
  Description of Artificial Sequence: Synthetic oligonucleotide
  Sense strand starting at position 724 of SEQ ID NO: 565
ugguucccugcagaaguaa

SEQ ID NO: 47133 - RNA, 19 nt, Artificial Sequence
  Description of Artificial Sequence: Synthetic oligonucleotide
  Antisense strand to SEQ ID NO: 47052
uuacuucugcagggaacca

SEQ ID NO: 47134 - RNA, 19 nt, Artificial Sequence
  Description of Artificial Sequence: Synthetic oligonucleotide
  Sense strand starting at position 652 of SEQ ID NO: 565
uaaaguuaccaguguagaa

SEQ ID NO: 47135 - RNA, 19 nt, Artificial Sequence
  Description of Artificial Sequence: Synthetic oligonucleotide
  Antisense strand to SEQ ID NO: 47054
uucuacacugguaacuuua

SEQ ID NO: 47136 - RNA, 19 nt, Artificial Sequence
  Description of Artificial Sequence: Synthetic oligonucleotide
  Sense strand starting at position 637 of SEQ ID NO: 565
ucaguuguccaguauuaaa

SEQ ID NO: 47137 - RNA, 19 nt, Artificial Sequence
  Description of Artificial Sequence: Synthetic oligonucleotide
  Antisense strand to SEQ ID NO: 47056
uuuaauacuggacaacuga

SEQ ID NO: 47138 - RNA, 19 nt, Artificial Sequence
  Description of Artificial Sequence: Synthetic oligonucleotide
  Sense strand starting at position 615 of SEQ ID NO: 565
augaaucuuuccucuggaa

SEQ ID NO: 47139 - RNA, 19 nt, Artificial Sequence
  Description of Artificial Sequence: Synthetic oligonucleotide
  Antisense strand to SEQ ID NO: 47058
uuccagaggaaagauucau

SEQ ID NO: 47140 - RNA, 19 nt, Artificial Sequence
  Description of Artificial Sequence: Synthetic oligonucleotide
  Sense strand starting at position 547 of SEQ ID NO: 565
caagcauuuguuugcaaag

SEQ ID NO: 47141 - RNA, 19 nt, Artificial Sequence
  Description of Artificial Sequence: Synthetic oligonucleotide
  Antisense strand to SEQ ID NO: 47060
cuuugcaaacaaaugcuug

SEQ ID NO: 47142 - RNA, 19 nt, Artificial Sequence
  Description of Artificial Sequence: Synthetic oligonucleotide
  Sense strand starting at position 458 of SEQ ID NO: 565
agcaucuguggacaauauu

SEQ ID NO: 47143 - RNA, 19 nt, Artificial Sequence
  Description of Artificial Sequence: Synthetic oligonucleotide
  Antisense strand to SEQ ID NO: 47062
aauauuguccacagaugcu

SEQ ID NO: 47144 - RNA, 19 nt, Artificial Sequence
  Description of Artificial Sequence: Synthetic oligonucleotide
  Sense strand starting at position 456 of SEQ ID NO: 565
ugagcaucuguggacaaua

SEQ ID NO: 47145 - RNA, 19 nt, Artificial Sequence
  Description of Artificial Sequence: Synthetic oligonucleotide
  Antisense strand to SEQ ID NO: 47064
uauuguccacagaugcuca

SEQ ID NO: 47146 - RNA, 19 nt, Artificial Sequence
  Description of Artificial Sequence: Synthetic oligonucleotide
  Sense strand starting at position 3919 of SEQ ID NO: 566
gggcaagagcucuaaagca

SEQ ID NO: 47147 - RNA, 19 nt, Artificial Sequence
  Description of Artificial Sequence: Synthetic oligonucleotide
  Antisense strand to SEQ ID NO: 47066
ugcuuuagagcucuugccc

SEQ ID NO: 47148 - RNA, 19 nt, Artificial Sequence
  Description of Artificial Sequence: Synthetic oligonucleotide
  Sense strand starting at position 3627 of SEQ ID NO: 566
gcaucuuuaucuccaagga

SEQ ID NO: 47149 - RNA, 19 nt, Artificial Sequence
  Description of Artificial Sequence: Synthetic oligonucleotide
  Antisense strand to SEQ ID NO: 47068
uccuuggagauaaagaugc

SEQ ID NO: 47150 - RNA, 19 nt, Artificial Sequence
  Description of Artificial Sequence: Synthetic oligonucleotide
  Sense strand starting at position 3616 of SEQ ID NO: 566
cagagaaaccggcaucuuu

SEQ ID NO: 47151 - RNA, 19 nt, Artificial Sequence
  Description of Artificial Sequence: Synthetic oligonucleotide
  Antisense strand to SEQ ID NO: 47070
aaagaugccgguuucucug

SEQ ID NO: 47152 - RNA, 19 nt, Artificial Sequence
  Description of Artificial Sequence: Synthetic oligonucleotide
  Sense strand starting at position 3509 of SEQ ID NO: 566
uggauaauaucuuucugcu

SEQ ID NO: 47153 - RNA, 19 nt, Artificial Sequence
  Description of Artificial Sequence: Synthetic oligonucleotide
  Antisense strand to SEQ ID NO: 47072
agcagaaagauauuaucca

SEQ ID NO: 47154 - RNA, 19 nt, Artificial Sequence
  Description of Artificial Sequence: Synthetic oligonucleotide
  Sense strand starting at position 3498 of SEQ ID NO: 566
uuccuuggcaguggauaau

SEQ ID NO: 47155 - RNA, 19 nt, Artificial Sequence
  Description of Artificial Sequence: Synthetic oligonucleotide
  Antisense strand to SEQ ID NO: 47074
auuauccacugccaaggaa

SEQ ID NO: 47156 - RNA, 19 nt, Artificial Sequence
  Description of Artificial Sequence: Synthetic oligonucleotide
  Sense strand starting at position 3497 of SEQ ID NO: 566
uuuccuuggcaguggauaa

SEQ ID NO: 47157 - RNA, 19 nt, Artificial Sequence
  Description of Artificial Sequence: Synthetic oligonucleotide
  Antisense strand to SEQ ID NO: 47076
uuauccacugccaaggaaa

SEQ ID NO: 47158 - RNA, 19 nt, Artificial Sequence
  Description of Artificial Sequence: Synthetic oligonucleotide
  Sense strand starting at position 3439 of SEQ ID NO: 566
gcuggaagauuccuugaaa

SEQ ID NO: 47159 - RNA, 19 nt, Artificial Sequence
  Description of Artificial Sequence: Synthetic oligonucleotide
  Antisense strand to SEQ ID NO: 47078
uuucaaggaaucuuccagc

SEQ ID NO: 47160 - RNA, 19 nt, Artificial Sequence
  Description of Artificial Sequence: Synthetic oligonucleotide
  Sense strand starting at position 3431 of SEQ ID NO: 566
uugccacagcuggaagauu

SEQ ID NO: 47161 - RNA, 19 nt, Artificial Sequence
  Description of Artificial Sequence: Synthetic oligonucleotide
  Antisense strand to SEQ ID NO: 47080
aaucuuccagcuguggcaa

SEQ ID NO: 47162 - RNA, 19 nt, Artificial Sequence
  Description of Artificial Sequence: Synthetic oligonucleotide
  Sense strand starting at position 3334 of SEQ ID NO: 566
gaggacuaauugucagugu

SEQ ID NO: 47163 - RNA, 19 nt, Artificial Sequence
  Description of Artificial Sequence: Synthetic oligonucleotide
  Antisense strand to SEQ ID NO: 47082
acacugacaauuaguccuc

SEQ ID NO: 47164 - RNA, 19 nt, Artificial Sequence
  Description of Artificial Sequence: Synthetic oligonucleotide
  Sense strand starting at position 3289 of SEQ ID NO: 566
uaaauaaaugcaggguaua

SEQ ID NO: 47165 - RNA, 19 nt, Artificial Sequence
  Description of Artificial Sequence: Synthetic oligonucleotide
  Antisense strand to SEQ ID NO: 47084
uauacccugcauuuauuua

SEQ ID NO: 47166 - RNA, 19 nt, Artificial Sequence
  Description of Artificial Sequence: Synthetic oligonucleotide
  Sense strand starting at position 3217 of SEQ ID NO: 566
auagcuguccuauauaugu

SEQ ID NO: 47167 - RNA, 19 nt, Artificial Sequence
  Description of Artificial Sequence: Synthetic oligonucleotide
  Antisense strand to SEQ ID NO: 47086
acauauauaggacagcuau

SEQ ID NO: 47168 - RNA, 19 nt, Artificial Sequence
  Description of Artificial Sequence: Synthetic oligonucleotide
  Sense strand starting at position 3018 of SEQ ID NO: 566
aggaauacaucuuccuguu

SEQ ID NO: 47169 - RNA, 19 nt, Artificial Sequence
  Description of Artificial Sequence: Synthetic oligonucleotide
  Antisense strand to SEQ ID NO: 47088
aacaggaagauguauuccu

SEQ ID NO: 47170 - RNA, 19 nt, Artificial Sequence
  Description of Artificial Sequence: Synthetic oligonucleotide
  Sense strand starting at position 2946 of SEQ ID NO: 566
gcaaacugguauccagaaa

SEQ ID NO: 47171 - RNA, 19 nt, Artificial Sequence
  Description of Artificial Sequence: Synthetic oligonucleotide
  Antisense strand to SEQ ID NO: 47090
uuucuggauaccaguuugc

SEQ ID NO: 47172 - RNA, 19 nt, Artificial Sequence
  Description of Artificial Sequence: Synthetic oligonucleotide
  Sense strand starting at position 2899 of SEQ ID NO: 566
augcauacucacugaugga

SEQ ID NO: 47173 - RNA, 19 nt, Artificial Sequence
  Description of Artificial Sequence: Synthetic oligonucleotide
  Antisense strand to SEQ ID NO: 47092
uccaucagugaguaugcau

SEQ ID NO: 47174 - RNA, 19 nt, Artificial Sequence
  Description of Artificial Sequence: Synthetic oligonucleotide
  Sense strand starting at position 2813 of SEQ ID NO: 566
agguaagagucaucacagu

SEQ ID NO: 47175 - RNA, 19 nt, Artificial Sequence
  Description of Artificial Sequence: Synthetic oligonucleotide
  Antisense strand to SEQ ID NO: 47094
acugugaugacucuuaccu

SEQ ID NO: 47176 - RNA, 19 nt, Artificial Sequence
  Description of Artificial Sequence: Synthetic oligonucleotide
  Sense strand starting at position 2448 of SEQ ID NO: 566
uauguaugaggaugccaaa

SEQ ID NO: 47177 - RNA, 19 nt, Artificial Sequence
  Description of Artificial Sequence: Synthetic oligonucleotide
  Antisense strand to SEQ ID NO: 47096
uuuggcauccucauacaua

SEQ ID NO: 47178 - RNA, 19 nt, Artificial Sequence
  Description of Artificial Sequence: Synthetic oligonucleotide
  Sense strand starting at position 2407 of SEQ ID NO: 566
uuuagugacugguuguaag

SEQ ID NO: 47179 - RNA, 19 nt, Artificial Sequence
  Description of Artificial Sequence: Synthetic oligonucleotide
  Antisense strand to SEQ ID NO: 47098
cuuacaaccagucacuaaa

SEQ ID NO: 47180 - RNA, 19 nt, Artificial Sequence
  Description of Artificial Sequence: Synthetic oligonucleotide
  Sense strand starting at position 2385 of SEQ ID NO: 566
cuaaguugauacucaagga

SEQ ID NO: 47181 - RNA, 19 nt, Artificial Sequence
  Description of Artificial Sequence: Synthetic oligonucleotide
  Antisense strand to SEQ ID NO: 47100
uccuugaguaucaacuuag

SEQ ID NO: 47182 - RNA, 19 nt, Artificial Sequence
  Description of Artificial Sequence: Synthetic oligonucleotide
  Sense strand starting at position 2152 of SEQ ID NO: 566
gucagcuuuggaggaggau

SEQ ID NO: 47183 - RNA, 19 nt, Artificial Sequence
  Description of Artificial Sequence: Synthetic oligonucleotide
  Antisense strand to SEQ ID NO: 47102
auccuccuccaaagcugac

SEQ ID NO: 47184 - RNA, 19 nt, Artificial Sequence
  Description of Artificial Sequence: Synthetic oligonucleotide
  Sense strand starting at position 2148 of SEQ ID NO: 566
guaagucagcuuuggagga

SEQ ID NO: 47185 - RNA, 19 nt, Artificial Sequence
  Description of Artificial Sequence: Synthetic oligonucleotide
  Antisense strand to SEQ ID NO: 47104
uccuccaaagcugacuuac

SEQ ID NO: 47186 - RNA, 19 nt, Artificial Sequence
  Description of Artificial Sequence: Synthetic oligonucleotide
  Sense strand starting at position 1675 of SEQ ID NO: 566
uaaauaugucuguggagug

SEQ ID NO: 47187 - RNA, 19 nt, Artificial Sequence
  Description of Artificial Sequence: Synthetic oligonucleotide
  Antisense strand to SEQ ID NO: 47106
cacuccacagacauauuua

SEQ ID NO: 47188 - RNA, 19 nt, Artificial Sequence
  Description of Artificial Sequence: Synthetic oligonucleotide
  Sense strand starting at position 1674 of SEQ ID NO: 566
cuaaauaugucuguggagu

SEQ ID NO: 47189 - RNA, 19 nt, Artificial Sequence
  Description of Artificial Sequence: Synthetic oligonucleotide
  Antisense strand to SEQ ID NO: 47108
acuccacagacauauuuag

SEQ ID NO: 47190 - RNA, 19 nt, Artificial Sequence
  Description of Artificial Sequence: Synthetic oligonucleotide
  Sense strand starting at position 1673 of SEQ ID NO: 566
acuaaauaugucuguggag

SEQ ID NO: 47191 - RNA, 19 nt, Artificial Sequence
  Description of Artificial Sequence: Synthetic oligonucleotide
  Antisense strand to SEQ ID NO: 47110
cuccacagacauauuuagu

SEQ ID NO: 47192 - RNA, 19 nt, Artificial Sequence
  Description of Artificial Sequence: Synthetic oligonucleotide
  Sense strand starting at position 1672 of SEQ ID NO: 566
aacuaaauaugucugugga

SEQ ID NO: 47193 - RNA, 19 nt, Artificial Sequence
  Description of Artificial Sequence: Synthetic oligonucleotide
  Antisense strand to SEQ ID NO: 47112
uccacagacauauuuaguu

SEQ ID NO: 47194 - RNA, 19 nt, Artificial Sequence
  Description of Artificial Sequence: Synthetic oligonucleotide
  Sense strand starting at position 1630 of SEQ ID NO: 566
uguuaauauagguauggua

SEQ ID NO: 47195 - RNA, 19 nt, Artificial Sequence
  Description of Artificial Sequence: Synthetic oligonucleotide
  Antisense strand to SEQ ID NO: 47114
uaccauaccuauauuaaca

SEQ ID NO: 47196 - RNA, 19 nt, Artificial Sequence
  Description of Artificial Sequence: Synthetic oligonucleotide
  Sense strand starting at position 1527 of SEQ ID NO: 566
gguuauauuuaggacuaua

SEQ ID NO: 47197 - RNA, 19 nt, Artificial Sequence
  Description of Artificial Sequence: Synthetic oligonucleotide
  Antisense strand to SEQ ID NO: 47116
uauaguccuaaauauaacc

SEQ ID NO: 47198 - RNA, 19 nt, Artificial Sequence
  Description of Artificial Sequence: Synthetic oligonucleotide
  Sense strand starting at position 1526 of SEQ ID NO: 566
ggguuauauuuaggacuau

SEQ ID NO: 47199 - RNA, 19 nt, Artificial Sequence
  Description of Artificial Sequence: Synthetic oligonucleotide
  Antisense strand to SEQ ID NO: 47118
auaguccuaaauauaaccc

SEQ ID NO: 47200 - RNA, 19 nt, Artificial Sequence
  Description of Artificial Sequence: Synthetic oligonucleotide
  Sense strand starting at position 1228 of SEQ ID NO: 566
ccagcauuucuuugcaaga

SEQ ID NO: 47201 - RNA, 19 nt, Artificial Sequence
  Description of Artificial Sequence: Synthetic oligonucleotide
  Antisense strand to SEQ ID NO: 47120
ucuugcaaagaaaugcugg

SEQ ID NO: 47202 - RNA, 19 nt, Artificial Sequence
  Description of Artificial Sequence: Synthetic oligonucleotide
  Sense strand starting at position 1052 of SEQ ID NO: 566
augcuuguuguugaacuua

SEQ ID NO: 47203 - RNA, 19 nt, Artificial Sequence
  Description of Artificial Sequence: Synthetic oligonucleotide
  Antisense strand to SEQ ID NO: 47122
uaaguucaacaacaagcau

SEQ ID NO: 47204 - RNA, 19 nt, Artificial Sequence
  Description of Artificial Sequence: Synthetic oligonucleotide
  Sense strand starting at position 1013 of SEQ ID NO: 566
uaaggagccuccgaauuua

SEQ ID NO: 47205 - RNA, 19 nt, Artificial Sequence
  Description of Artificial Sequence: Synthetic oligonucleotide
  Antisense strand to SEQ ID NO: 47124
uaaauucggaggcuccuua

SEQ ID NO: 47206 - RNA, 19 nt, Artificial Sequence
  Description of Artificial Sequence: Synthetic oligonucleotide
  Sense strand starting at position 994 of SEQ ID NO: 566
ccaacugcggcagaauauu

SEQ ID NO: 47207 - RNA, 19 nt, Artificial Sequence
  Description of Artificial Sequence: Synthetic oligonucleotide
  Antisense strand to SEQ ID NO: 47126
aauauucugccgcaguugg

SEQ ID NO: 47208 - RNA, 19 nt, Artificial Sequence
  Description of Artificial Sequence: Synthetic oligonucleotide
  Sense strand starting at position 439 of SEQ ID NO: 566
auguauauaucauugccca

SEQ ID NO: 47209 - RNA, 19 nt, Artificial Sequence
  Description of Artificial Sequence: Synthetic oligonucleotide
  Antisense strand to SEQ ID NO: 47128
ugggcaaugauauauacau

SEQ ID NO: 47210 - RNA, 19 nt, Artificial Sequence
  Description of Artificial Sequence: Synthetic oligonucleotide
  Sense strand starting at position 385 of SEQ ID NO: 566
uuggcauuagauugugagu

SEQ ID NO: 47211 - RNA, 19 nt, Artificial Sequence
  Description of Artificial Sequence: Synthetic oligonucleotide
  Antisense strand to SEQ ID NO: 47130
acucacaaucuaaugccaa

SEQ ID NO: 47212 - RNA, 19 nt, Artificial Sequence
  Description of Artificial Sequence: Synthetic oligonucleotide
  Sense strand starting at position 351 of SEQ ID NO: 566
uacaguuucguagauuaaa

SEQ ID NO: 47213 - RNA, 19 nt, Artificial Sequence
  Description of Artificial Sequence: Synthetic oligonucleotide
  Antisense strand to SEQ ID NO: 47132
uuuaaucuacgaaacugua

SEQ ID NO: 47214 - RNA, 19 nt, Artificial Sequence
  Description of Artificial Sequence: Synthetic oligonucleotide
  Sense strand starting at position 348 of SEQ ID NO: 566
cauuacaguuucguagauu

SEQ ID NO: 47215 - RNA, 19 nt, Artificial Sequence
  Description of Artificial Sequence: Synthetic oligonucleotide
  Antisense strand to SEQ ID NO: 47134
aaucuacgaaacuguaaug

SEQ ID NO: 47216 - RNA, 19 nt, Artificial Sequence
  Description of Artificial Sequence: Synthetic oligonucleotide
  Sense strand starting at position 311 of SEQ ID NO: 566
gccucaauuauggaaagug

SEQ ID NO: 47217 - RNA, 19 nt, Artificial Sequence
  Description of Artificial Sequence: Synthetic oligonucleotide
  Antisense strand to SEQ ID NO: 47136
cacuuuccauaauugaggc

SEQ ID NO: 47218 - RNA, 19 nt, Artificial Sequence
  Description of Artificial Sequence: Synthetic oligonucleotide
  Sense strand starting at position 247 of SEQ ID NO: 566
gugaaugauccagagccua

SEQ ID NO: 47219 - RNA, 19 nt, Artificial Sequence
  Description of Artificial Sequence: Synthetic oligonucleotide
  Antisense strand to SEQ ID NO: 47138
uaggcucuggaucauucac

SEQ ID NO: 47220 - RNA, 19 nt, Artificial Sequence
  Description of Artificial Sequence: Synthetic oligonucleotide
  Sense strand starting at position 243 of SEQ ID NO: 566
ggcugugaaugauccagag

SEQ ID NO: 47221 - RNA, 19 nt, Artificial Sequence
  Description of Artificial Sequence: Synthetic oligonucleotide
  Antisense strand to SEQ ID NO: 47140
cucuggaucauucacagcc

SEQ ID NO: 47222 - RNA, 19 nt, Artificial Sequence
  Description of Artificial Sequence: Synthetic oligonucleotide
  Sense strand starting at position 111 of SEQ ID NO: 566
uuaagaugcuggcuuagaa

SEQ ID NO: 47223 - RNA, 19 nt, Artificial Sequence
  Description of Artificial Sequence: Synthetic oligonucleotide
  Antisense strand to SEQ ID NO: 47142
uucuaagccagcaucuuaa

SEQ ID NO: 47224 - RNA, 19 nt, Artificial Sequence
  Description of Artificial Sequence: Synthetic oligonucleotide
  Sense strand starting at position 97 of SEQ ID NO: 566
gguaauaccuacucuuaag

SEQ ID NO: 47225 - RNA, 19 nt, Artificial Sequence
  Description of Artificial Sequence: Synthetic oligonucleotide
  Antisense strand to SEQ ID NO: 47144
cuuaagaguagguauuacc

SEQ ID NO: 47226 - RNA, 19 nt, Artificial Sequence
  Description of Artificial Sequence: Synthetic oligonucleotide
  Sense strand starting at position 228 of SEQ ID NO: 567
gcuacugaugugggagaau

SEQ ID NO: 47227 - RNA, 19 nt, Artificial Sequence
  Description of Artificial Sequence: Synthetic oligonucleotide
  Antisense strand to SEQ ID NO: 47146
auucucccacaucaguagc

SEQ ID NO: 47228 - RNA, 19 nt, Artificial Sequence
  Description of Artificial Sequence: Synthetic oligonucleotide
  Sense strand starting at position 462 of SEQ ID NO: 567
gaccuuaagucaggagauc

SEQ ID NO: 47229 - RNA, 19 nt, Artificial Sequence
  Description of Artificial Sequence: Synthetic oligonucleotide
  Antisense strand to SEQ ID NO: 47148
gaucuccugacuuaagguc

SEQ ID NO: 47230 - RNA, 19 nt, Artificial Sequence
  Description of Artificial Sequence: Synthetic oligonucleotide
  Sense strand starting at position 722 of SEQ ID NO: 567
gguuaacugucuuccaaga

SEQ ID NO: 47231 - RNA, 19 nt, Artificial Sequence
  Description of Artificial Sequence: Synthetic oligonucleotide
  Antisense strand to SEQ ID NO: 47150
ucuuggaagacaguuaacc

SEQ ID NO: 47232 - RNA, 19 nt, Artificial Sequence
  Description of Artificial Sequence: Synthetic oligonucleotide
  Sense strand starting at position 1070 of SEQ ID NO: 567
gggucucacucucgccaaa

SEQ ID NO: 47233 - RNA, 19 nt, Artificial Sequence
  Description of Artificial Sequence: Synthetic oligonucleotide
  Antisense strand to SEQ ID NO: 47152
uuuggcgagagugagaccc

SEQ ID NO: 47234 - RNA, 19 nt, Artificial Sequence
  Description of Artificial Sequence: Synthetic oligonucleotide
  Sense strand starting at position 1300 of SEQ ID NO: 567
cauacuaugcgcuggagau

SEQ ID NO: 47235 - RNA, 19 nt, Artificial Sequence
  Description of Artificial Sequence: Synthetic oligonucleotide
  Antisense strand to SEQ ID NO: 47154
aucuccagcgcauaguaug

SEQ ID NO: 47236 - RNA, 19 nt, Artificial Sequence
  Description of Artificial Sequence: Synthetic oligonucleotide
  Sense strand starting at position 1301 of SEQ ID NO: 567
auacuaugcgcuggagaug

SEQ ID NO: 47237 - RNA, 19 nt, Artificial Sequence
  Description of Artificial Sequence: Synthetic oligonucleotide
  Antisense strand to SEQ ID NO: 47156
caucuccagcgcauaguau

SEQ ID NO: 47238 - RNA, 19 nt, Artificial Sequence
  Description of Artificial Sequence: Synthetic oligonucleotide
  Sense strand starting at position 1457 of SEQ ID NO: 567
augccuaacuggcaugaua

SEQ ID NO: 47239 - RNA, 19 nt, Artificial Sequence
  Description of Artificial Sequence: Synthetic oligonucleotide
  Antisense strand to SEQ ID NO: 47158
uaucaugccaguuaggcau

SEQ ID NO: 47240 - RNA, 19 nt, Artificial Sequence
  Description of Artificial Sequence: Synthetic oligonucleotide
  Sense strand starting at position 1459 of SEQ ID NO: 567
gccuaacuggcaugauaca

SEQ ID NO: 47241 - RNA, 19 nt, Artificial Sequence
  Description of Artificial Sequence: Synthetic oligonucleotide
  Antisense strand to SEQ ID NO: 47160
uguaucaugccaguuaggc

SEQ ID NO: 47242 - RNA, 19 nt, Artificial Sequence
  Description of Artificial Sequence: Synthetic oligonucleotide
  Sense strand starting at position 1480 of SEQ ID NO: 567
gugccuggcguucgugaau

SEQ ID NO: 47243 - RNA, 19 nt, Artificial Sequence
  Description of Artificial Sequence: Synthetic oligonucleotide
  Antisense strand to SEQ ID NO: 47162
auucacgaacgccaggcac

SEQ ID NO: 47244 - RNA, 19 nt, Artificial Sequence
  Description of Artificial Sequence: Synthetic oligonucleotide
  Sense strand starting at position 1486 of SEQ ID NO: 567
ggcguucgugaauggcaga

SEQ ID NO: 47245 - RNA, 19 nt, Artificial Sequence
  Description of Artificial Sequence: Synthetic oligonucleotide
  Antisense strand to SEQ ID NO: 47164
ucugccauucacgaacgcc

SEQ ID NO: 47246 - RNA, 19 nt, Artificial Sequence
  Description of Artificial Sequence: Synthetic oligonucleotide
  Sense strand starting at position 1491 of SEQ ID NO: 567
ucgugaauggcagaaacaa

SEQ ID NO: 47247 - RNA, 19 nt, Artificial Sequence
  Description of Artificial Sequence: Synthetic oligonucleotide
  Antisense strand to SEQ ID NO: 47166
uuguuucugccauucacga

SEQ ID NO: 47248 - RNA, 19 nt, Artificial Sequence
  Description of Artificial Sequence: Synthetic oligonucleotide
  Sense strand starting at position 1661 of SEQ ID NO: 567
gccaccucccucgauagau

SEQ ID NO: 47249 - RNA, 19 nt, Artificial Sequence
  Description of Artificial Sequence: Synthetic oligonucleotide
  Antisense strand to SEQ ID NO: 47168
aucuaucgagggagguggc

SEQ ID NO: 47250 - RNA, 19 nt, Artificial Sequence
  Description of Artificial Sequence: Synthetic oligonucleotide
  Sense strand starting at position 1720 of SEQ ID NO: 567
agcagcuaucagugggaga

SEQ ID NO: 47251 - RNA, 19 nt, Artificial Sequence
  Description of Artificial Sequence: Synthetic oligonucleotide
  Antisense strand to SEQ ID NO: 47170
ucucccacugauagcugcu

SEQ ID NO: 47252 - RNA, 19 nt, Artificial Sequence
  Description of Artificial Sequence: Synthetic oligonucleotide
  Sense strand starting at position 1721 of SEQ ID NO: 567
gcagcuaucagugggagac

SEQ ID NO: 47253 - RNA, 19 nt, Artificial Sequence
  Description of Artificial Sequence: Synthetic oligonucleotide
  Antisense strand to SEQ ID NO: 47172
gucucccacugauagcugc

SEQ ID NO: 47254 - RNA, 19 nt, Artificial Sequence
  Description of Artificial Sequence: Synthetic oligonucleotide
  Sense strand starting at position 1782 of SEQ ID NO: 567
gaaggaaucgcccaacggu

SEQ ID NO: 47255 - RNA, 19 nt, Artificial Sequence
  Description of Artificial Sequence: Synthetic oligonucleotide
  Antisense strand to SEQ ID NO: 47174
accguugggcgauuccuuc

SEQ ID NO: 47256 - RNA, 19 nt, Artificial Sequence
  Description of Artificial Sequence: Synthetic oligonucleotide
  Sense strand starting at position 1819 of SEQ ID NO: 567
gccuuuguccacugggaaa

SEQ ID NO: 47257 - RNA, 19 nt, Artificial Sequence
  Description of Artificial Sequence: Synthetic oligonucleotide
  Antisense strand to SEQ ID NO: 47176
uuucccaguggacaaaggc

SEQ ID NO: 47258 - RNA, 19 nt, Artificial Sequence
  Description of Artificial Sequence: Synthetic oligonucleotide
  Sense strand starting at position 2013 of SEQ ID NO: 567
ucacgugauucuuacaggu

SEQ ID NO: 47259 - RNA, 19 nt, Artificial Sequence
  Description of Artificial Sequence: Synthetic oligonucleotide
  Antisense strand to SEQ ID NO: 47178
accuguaagaaucacguga

SEQ ID NO: 47260 - RNA, 19 nt, Artificial Sequence
  Description of Artificial Sequence: Synthetic oligonucleotide
  Sense strand starting at position 2162 of SEQ ID NO: 567
aguaaauaaugugcuuaag

SEQ ID NO: 47261 - RNA, 19 nt, Artificial Sequence
  Description of Artificial Sequence: Synthetic oligonucleotide
  Antisense strand to SEQ ID NO: 47180
cuuaagcacauuauuuacu

SEQ ID NO: 47262 - RNA, 19 nt, Artificial Sequence
  Description of Artificial Sequence: Synthetic oligonucleotide
  Sense strand starting at position 2172 of SEQ ID NO: 567
gugcuuaaguuauuguuag

SEQ ID NO: 47263 - RNA, 19 nt, Artificial Sequence
  Description of Artificial Sequence: Synthetic oligonucleotide
  Antisense strand to SEQ ID NO: 47182
cuaacaauaacuuaagcac

SEQ ID NO: 47264 - RNA, 19 nt, Artificial Sequence
  Description of Artificial Sequence: Synthetic oligonucleotide
  Sense strand starting at position 2495 of SEQ ID NO: 567
cggcucagcugucuucaga

SEQ ID NO: 47265 - RNA, 19 nt, Artificial Sequence
  Description of Artificial Sequence: Synthetic oligonucleotide
  Antisense strand to SEQ ID NO: 47184
ucugaagacagcugagccg

SEQ ID NO: 47266 - RNA, 19 nt, Artificial Sequence
  Description of Artificial Sequence: Synthetic oligonucleotide
  Sense strand starting at position 2539 of SEQ ID NO: 567
augucuaccugguuccaaa

SEQ ID NO: 47267 - RNA, 19 nt, Artificial Sequence
  Description of Artificial Sequence: Synthetic oligonucleotide
  Antisense strand to SEQ ID NO: 47186
uuuggaaccagguagacau

SEQ ID NO: 47268 - RNA, 19 nt, Artificial Sequence
  Description of Artificial Sequence: Synthetic oligonucleotide
  Sense strand starting at position 2659 of SEQ ID NO: 567
uccagaaauucugccuuag

SEQ ID NO: 47269 - RNA, 19 nt, Artificial Sequence
  Description of Artificial Sequence: Synthetic oligonucleotide
  Antisense strand to SEQ ID NO: 47188
cuaaggcagaauuucugga

SEQ ID NO: 47270 - RNA, 19 nt, Artificial Sequence
  Description of Artificial Sequence: Synthetic oligonucleotide
  Sense strand starting at position 2745 of SEQ ID NO: 567
gccggauguucaccauguu

SEQ ID NO: 47271 - RNA, 19 nt, Artificial Sequence
  Description of Artificial Sequence: Synthetic oligonucleotide
  Antisense strand to SEQ ID NO: 47190
aacauggugaacauccggc

SEQ ID NO: 47272 - RNA, 19 nt, Artificial Sequence
  Description of Artificial Sequence: Synthetic oligonucleotide
  Sense strand starting at position 2791 of SEQ ID NO: 567
gucguaauccgcucgccuu

SEQ ID NO: 47273 - RNA, 19 nt, Artificial Sequence
  Description of Artificial Sequence: Synthetic oligonucleotide
  Antisense strand to SEQ ID NO: 47192
aaggcgagcggauuacgac

SEQ ID NO: 47274 - RNA, 19 nt, Artificial Sequence
  Description of Artificial Sequence: Synthetic oligonucleotide
  Sense strand starting at position 2921 of SEQ ID NO: 567
acaagcaaucuguguucua

SEQ ID NO: 47275 - RNA, 19 nt, Artificial Sequence
  Description of Artificial Sequence: Synthetic oligonucleotide
  Antisense strand to SEQ ID NO: 47194
uagaacacagauugcuugu

SEQ ID NO: 47276 - RNA, 19 nt, Artificial Sequence
  Description of Artificial Sequence: Synthetic oligonucleotide
  Sense strand starting at position 2924 of SEQ ID NO: 567
agcaaucuguguucuaucu

SEQ ID NO: 47277 - RNA, 19 nt, Artificial Sequence
  Description of Artificial Sequence: Synthetic oligonucleotide
  Antisense strand to SEQ ID NO: 47196
agauagaacacagauugcu

SEQ ID NO: 47278 - RNA, 19 nt, Artificial Sequence
  Description of Artificial Sequence: Synthetic oligonucleotide
  Sense strand starting at position 2932 of SEQ ID NO: 567
guguucuaucuauauggau

SEQ ID NO: 47279 - RNA, 19 nt, Artificial Sequence
  Description of Artificial Sequence: Synthetic oligonucleotide
  Antisense strand to SEQ ID NO: 47198
auccauauagauagaacac

SEQ ID NO: 47280 - RNA, 19 nt, Artificial Sequence
  Description of Artificial Sequence: Synthetic oligonucleotide
  Sense strand starting at position 2987 of SEQ ID NO: 567
acaauaugugaauacguau

SEQ ID NO: 47281 - RNA, 19 nt, Artificial Sequence
  Description of Artificial Sequence: Synthetic oligonucleotide
  Antisense strand to SEQ ID NO: 47200
auacguauucacauauugu

SEQ ID NO: 47282 - RNA, 19 nt, Artificial Sequence
  Description of Artificial Sequence: Synthetic oligonucleotide
  Sense strand starting at position 3303 of SEQ ID NO: 567
cggaguuagucaggcugau

SEQ ID NO: 47283 - RNA, 19 nt, Artificial Sequence
  Description of Artificial Sequence: Synthetic oligonucleotide
  Antisense strand to SEQ ID NO: 47202
aucagccugacuaacuccg

SEQ ID NO: 47284 - RNA, 19 nt, Artificial Sequence
  Description of Artificial Sequence: Synthetic oligonucleotide
  Sense strand starting at position 3434 of SEQ ID NO: 567
gguagauaaucuggcccaa

SEQ ID NO: 47285 - RNA, 19 nt, Artificial Sequence
  Description of Artificial Sequence: Synthetic oligonucleotide
  Antisense strand to SEQ ID NO: 47204
uugggccagauuaucuacc

SEQ ID NO: 47286 - RNA, 19 nt, Artificial Sequence
  Description of Artificial Sequence: Synthetic oligonucleotide
  Sense strand starting at position 3527 of SEQ ID NO: 567
agacuacuguugucuuguu

SEQ ID NO: 47287 - RNA, 19 nt, Artificial Sequence
  Description of Artificial Sequence: Synthetic oligonucleotide
  Antisense strand to SEQ ID NO: 47206
aacaagacaacaguagucu

SEQ ID NO: 47288 - RNA, 19 nt, Artificial Sequence
  Description of Artificial Sequence: Synthetic oligonucleotide
  Sense strand starting at position 3568 of SEQ ID NO: 567
ggagguuaaggucaagcuu

SEQ ID NO: 47289 - RNA, 19 nt, Artificial Sequence
  Description of Artificial Sequence: Synthetic oligonucleotide
  Antisense strand to SEQ ID NO: 47208
aagcuugaccuuaaccucc

SEQ ID NO: 47290 - RNA, 19 nt, Artificial Sequence
  Description of Artificial Sequence: Synthetic oligonucleotide
  Sense strand starting at position 3576 of SEQ ID NO: 567
aggucaagcuuucccuaga

SEQ ID NO: 47291 - RNA, 19 nt, Artificial Sequence
  Description of Artificial Sequence: Synthetic oligonucleotide
  Antisense strand to SEQ ID NO: 47210
ucuagggaaagcuugaccu

SEQ ID NO: 47292 - RNA, 19 nt, Artificial Sequence
  Description of Artificial Sequence: Synthetic oligonucleotide
  Sense strand starting at position 3917 of SEQ ID NO: 568
ggguuaucaucucugauug

SEQ ID NO: 47293 - RNA, 19 nt, Artificial Sequence
  Description of Artificial Sequence: Synthetic oligonucleotide
  Antisense strand to SEQ ID NO: 47212
caaucagagaugauaaccc

SEQ ID NO: 47294 - RNA, 19 nt, Artificial Sequence
  Description of Artificial Sequence: Synthetic oligonucleotide
  Sense strand starting at position 3845 of SEQ ID NO: 568
aacagcauugcagaaaguu

SEQ ID NO: 47295 - RNA, 19 nt, Artificial Sequence
  Description of Artificial Sequence: Synthetic oligonucleotide
  Antisense strand to SEQ ID NO: 47214
aacuuucugcaaugcuguu

SEQ ID NO: 47296 - RNA, 19 nt, Artificial Sequence
  Description of Artificial Sequence: Synthetic oligonucleotide
  Sense strand starting at position 3803 of SEQ ID NO: 568
uugucagugagccguauuu

SEQ ID NO: 47297 - RNA, 19 nt, Artificial Sequence
  Description of Artificial Sequence: Synthetic oligonucleotide
  Antisense strand to SEQ ID NO: 47216
aaauacggcucacugacaa

SEQ ID NO: 47298 - RNA, 19 nt, Artificial Sequence
  Description of Artificial Sequence: Synthetic oligonucleotide
  Sense strand starting at position 3739 of SEQ ID NO: 568
agaccugugcuuugggaga

SEQ ID NO: 47299 - RNA, 19 nt, Artificial Sequence
  Description of Artificial Sequence: Synthetic oligonucleotide
  Antisense strand to SEQ ID NO: 47218
ucucccaaagcacaggucu

SEQ ID NO: 47300 - RNA, 19 nt, Artificial Sequence
  Description of Artificial Sequence: Synthetic oligonucleotide
  Sense strand starting at position 3734 of SEQ ID NO: 568
gauaaagaccugugcuuug

SEQ ID NO: 47301 - RNA, 19 nt, Artificial Sequence
  Description of Artificial Sequence: Synthetic oligonucleotide
  Antisense strand to SEQ ID NO: 47220
caaagcacaggucuuuauc

SEQ ID NO: 47302 - RNA, 19 nt, Artificial Sequence
  Description of Artificial Sequence: Synthetic oligonucleotide
  Sense strand starting at position 3711 of SEQ ID NO: 568
uuugguagucuggaucuua

SEQ ID NO: 47303 - RNA, 19 nt, Artificial Sequence
  Description of Artificial Sequence: Synthetic oligonucleotide
  Antisense strand to SEQ ID NO: 47222
uaagauccagacuaccaaa

SEQ ID NO: 47304 - RNA, 19 nt, Artificial Sequence
  Description of Artificial Sequence: Synthetic oligonucleotide
  Sense strand starting at position 3673 of SEQ ID NO: 568
uacauucuuggguggagaa

SEQ ID NO: 47305 - RNA, 19 nt, Artificial Sequence
  Description of Artificial Sequence: Synthetic oligonucleotide
  Antisense strand to SEQ ID NO: 47224
uucuccacccaagaaugua

SEQ ID NO: 47306 - RNA, 19 nt, Artificial Sequence
  Description of Artificial Sequence: Synthetic oligonucleotide
  Sense strand starting at position 3672 of SEQ ID NO: 568
uuacauucuuggguggaga

SEQ ID NO: 47307 - RNA, 19 nt, Artificial Sequence
  Description of Artificial Sequence: Synthetic oligonucleotide
  Antisense strand to SEQ ID NO: 47226
ucuccacccaagaauguaa

SEQ ID NO: 47308 - RNA, 19 nt, Artificial Sequence
  Description of Artificial Sequence: Synthetic oligonucleotide
  Sense strand starting at position 3614 of SEQ ID NO: 568
ccgugcucggcuguaaaua

SEQ ID NO: 47309 - RNA, 19 nt, Artificial Sequence
  Description of Artificial Sequence: Synthetic oligonucleotide
  Antisense strand to SEQ ID NO: 47228
uauuuacagccgagcacgg

SEQ ID NO: 47310 - RNA, 19 nt, Artificial Sequence
  Description of Artificial Sequence: Synthetic oligonucleotide
  Sense strand starting at position 3612 of SEQ ID NO: 568
caccgugcucggcuguaaa

SEQ ID NO: 47311 - RNA, 19 nt, Artificial Sequence
  Description of Artificial Sequence: Synthetic oligonucleotide
  Antisense strand to SEQ ID NO: 47230
uuuacagccgagcacggug

SEQ ID NO: 47312 - RNA, 19 nt, Artificial Sequence
  Description of Artificial Sequence: Synthetic oligonucleotide
  Sense strand starting at position 3075 of SEQ ID NO: 568
cccugaagauucgcucaaa

SEQ ID NO: 47313 - RNA, 19 nt, Artificial Sequence
  Description of Artificial Sequence: Synthetic oligonucleotide
  Antisense strand to SEQ ID NO: 47232
uuugagcgaaucuucaggg

SEQ ID NO: 47314 - RNA, 19 nt, Artificial Sequence
  Description of Artificial Sequence: Synthetic oligonucleotide
  Sense strand starting at position 2293 of SEQ ID NO: 568
agggacaauucccaaagga

SEQ ID NO: 47315 - RNA, 19 nt, Artificial Sequence
  Description of Artificial Sequence: Synthetic oligonucleotide
  Antisense strand to SEQ ID NO: 47234
uccuuugggaauugucccu

SEQ ID NO: 47316 - RNA, 19 nt, Artificial Sequence
  Description of Artificial Sequence: Synthetic oligonucleotide
  Sense strand starting at position 2275 of SEQ ID NO: 568
acuucucaugaaggguuaa

SEQ ID NO: 47317 - RNA, 19 nt, Artificial Sequence
  Description of Artificial Sequence: Synthetic oligonucleotide
  Antisense strand to SEQ ID NO: 47236
uuaacccuucaugagaagu

SEQ ID NO: 47318 - RNA, 19 nt, Artificial Sequence
  Description of Artificial Sequence: Synthetic oligonucleotide
  Sense strand starting at position 2264 of SEQ ID NO: 568
gucaucuccugacuucuca

SEQ ID NO: 47319 - RNA, 19 nt, Artificial Sequence
  Description of Artificial Sequence: Synthetic oligonucleotide
  Antisense strand to SEQ ID NO: 47238
ugagaagucaggagaugac

SEQ ID NO: 47320 - RNA, 19 nt, Artificial Sequence
  Description of Artificial Sequence: Synthetic oligonucleotide
  Sense strand starting at position 2203 of SEQ ID NO: 568
gcgauuugaagugggcaga

SEQ ID NO: 47321 - RNA, 19 nt, Artificial Sequence
  Description of Artificial Sequence: Synthetic oligonucleotide
  Antisense strand to SEQ ID NO: 47240
ucugcccacuucaaaucgc

SEQ ID NO: 47322 - RNA, 19 nt, Artificial Sequence
  Description of Artificial Sequence: Synthetic oligonucleotide
  Sense strand starting at position 2193 of SEQ ID NO: 568
cgucuagcuagcgauuuga

SEQ ID NO: 47323 - RNA, 19 nt, Artificial Sequence
  Description of Artificial Sequence: Synthetic oligonucleotide
  Antisense strand to SEQ ID NO: 47242
ucaaaucgcuagcuagacg

SEQ ID NO: 47324 - RNA, 19 nt, Artificial Sequence
  Description of Artificial Sequence: Synthetic oligonucleotide
  Sense strand starting at position 1782 of SEQ ID NO: 568
gggaaugugucuuucccua

SEQ ID NO: 47325 - RNA, 19 nt, Artificial Sequence
  Description of Artificial Sequence: Synthetic oligonucleotide
  Antisense strand to SEQ ID NO: 47244
uagggaaagacacauuccc

SEQ ID NO: 47326 - RNA, 19 nt, Artificial Sequence
  Description of Artificial Sequence: Synthetic oligonucleotide
  Sense strand starting at position 1677 of SEQ ID NO: 568
cugggcuuccuauacaauc

SEQ ID NO: 47327 - RNA, 19 nt, Artificial Sequence
  Description of Artificial Sequence: Synthetic oligonucleotide
  Antisense strand to SEQ ID NO: 47246
gauuguauaggaagcccag

SEQ ID NO: 47328 - RNA, 19 nt, Artificial Sequence
  Description of Artificial Sequence: Synthetic oligonucleotide
  Sense strand starting at position 1555 of SEQ ID NO: 568
ggaaaucacuaccuaguca

SEQ ID NO: 47329 - RNA, 19 nt, Artificial Sequence
  Description of Artificial Sequence: Synthetic oligonucleotide
  Antisense strand to SEQ ID NO: 47248
ugacuagguagugauuucc

SEQ ID NO: 47330 - RNA, 19 nt, Artificial Sequence
  Description of Artificial Sequence: Synthetic oligonucleotide
  Sense strand starting at position 1442 of SEQ ID NO: 568
gucuucucagcagaaauua

SEQ ID NO: 47331 - RNA, 19 nt, Artificial Sequence
  Description of Artificial Sequence: Synthetic oligonucleotide
  Antisense strand to SEQ ID NO: 47250
uaauuucugcugagaagac

SEQ ID NO: 47332 - RNA, 19 nt, Artificial Sequence
  Description of Artificial Sequence: Synthetic oligonucleotide
  Sense strand starting at position 1440 of SEQ ID NO: 568
cggucuucucagcagaaau

SEQ ID NO: 47333 - RNA, 19 nt, Artificial Sequence
  Description of Artificial Sequence: Synthetic oligonucleotide
  Antisense strand to SEQ ID NO: 47252
auuucugcugagaagaccg

SEQ ID NO: 47334 - RNA, 19 nt, Artificial Sequence
  Description of Artificial Sequence: Synthetic oligonucleotide
  Sense strand starting at position 1341 of SEQ ID NO: 568
gcaggaaauuguucaggag

SEQ ID NO: 47335 - RNA, 19 nt, Artificial Sequence
  Description of Artificial Sequence: Synthetic oligonucleotide
  Antisense strand to SEQ ID NO: 47254
cuccugaacaauuuccugc

SEQ ID NO: 47336 - RNA, 19 nt, Artificial Sequence
  Description of Artificial Sequence: Synthetic oligonucleotide
  Sense strand starting at position 1051 of SEQ ID NO: 568
cucugugauacugggagga

SEQ ID NO: 47337 - RNA, 19 nt, Artificial Sequence
  Description of Artificial Sequence: Synthetic oligonucleotide
  Antisense strand to SEQ ID NO: 47256
uccucccaguaucacagag

SEQ ID NO: 47338 - RNA, 19 nt, Artificial Sequence
  Description of Artificial Sequence: Synthetic oligonucleotide
  Sense strand starting at position 1044 of SEQ ID NO: 568
cuaggagcucugugauacu

SEQ ID NO: 47339 - RNA, 19 nt, Artificial Sequence
  Description of Artificial Sequence: Synthetic oligonucleotide
  Antisense strand to SEQ ID NO: 47258
aguaucacagagcuccuag

SEQ ID NO: 47340 - RNA, 19 nt, Artificial Sequence
  Description of Artificial Sequence: Synthetic oligonucleotide
  Sense strand starting at position 1022 of SEQ ID NO: 568
aggauccagccauauguaa

SEQ ID NO: 47341 - RNA, 19 nt, Artificial Sequence
  Description of Artificial Sequence: Synthetic oligonucleotide
  Antisense strand to SEQ ID NO: 47260
uuacauauggcuggauccu

SEQ ID NO: 47342 - RNA, 19 nt, Artificial Sequence
  Description of Artificial Sequence: Synthetic oligonucleotide
  Sense strand starting at position 976 of SEQ ID NO: 568
gcaggaaaugaggguagau

SEQ ID NO: 47343 - RNA, 19 nt, Artificial Sequence
  Description of Artificial Sequence: Synthetic oligonucleotide
  Antisense strand to SEQ ID NO: 47262
aucuacccucauuuccugc

SEQ ID NO: 47344 - RNA, 19 nt, Artificial Sequence
  Description of Artificial Sequence: Synthetic oligonucleotide
  Sense strand starting at position 883 of SEQ ID NO: 568
ggaguuuaguggagaagac

SEQ ID NO: 47345 - RNA, 19 nt, Artificial Sequence
  Description of Artificial Sequence: Synthetic oligonucleotide
  Antisense strand to SEQ ID NO: 47264
gucuucuccacuaaacucc

SEQ ID NO: 47346 - RNA, 19 nt, Artificial Sequence
  Description of Artificial Sequence: Synthetic oligonucleotide
  Sense strand starting at position 871 of SEQ ID NO: 568
cuauaugguccuggaguuu

SEQ ID NO: 47347 - RNA, 19 nt, Artificial Sequence
  Description of Artificial Sequence: Synthetic oligonucleotide
  Antisense strand to SEQ ID NO: 47266
aaacuccaggaccauauag

SEQ ID NO: 47348 - RNA, 19 nt, Artificial Sequence
  Description of Artificial Sequence: Synthetic oligonucleotide
  Sense strand starting at position 811 of SEQ ID NO: 568
auauauugaguuugagaug

SEQ ID NO: 47349 - RNA, 19 nt, Artificial Sequence
  Description of Artificial Sequence: Synthetic oligonucleotide
  Antisense strand to SEQ ID NO: 47268
caucucaaacucaauauau

SEQ ID NO: 47350 - RNA, 19 nt, Artificial Sequence
  Description of Artificial Sequence: Synthetic oligonucleotide
  Sense strand starting at position 808 of SEQ ID NO: 568
ugaauauauugaguuugag

SEQ ID NO: 47351 - RNA, 19 nt, Artificial Sequence
  Description of Artificial Sequence: Synthetic oligonucleotide
  Antisense strand to SEQ ID NO: 47270
cucaaacucaauauauuca

SEQ ID NO: 47352 - RNA, 19 nt, Artificial Sequence
  Description of Artificial Sequence: Synthetic oligonucleotide
  Sense strand starting at position 787 of SEQ ID NO: 568
ggaagaaauugugauuuag

SEQ ID NO: 47353 - RNA, 19 nt, Artificial Sequence
  Description of Artificial Sequence: Synthetic oligonucleotide
  Antisense strand to SEQ ID NO: 47272
cuaaaucacaauuucuucc

SEQ ID NO: 47354 - RNA, 19 nt, Artificial Sequence
  Description of Artificial Sequence: Synthetic oligonucleotide
  Sense strand starting at position 725 of SEQ ID NO: 568
aaugaaaggugguuugagu

SEQ ID NO: 47355 - RNA, 19 nt, Artificial Sequence
  Description of Artificial Sequence: Synthetic oligonucleotide
  Antisense strand to SEQ ID NO: 47274
acucaaaccaccuuucauu

SEQ ID NO: 47356 - RNA, 19 nt, Artificial Sequence
  Description of Artificial Sequence: Synthetic oligonucleotide
  Sense strand starting at position 703 of SEQ ID NO: 568
ugcugugagagugaucaaa

SEQ ID NO: 47357 - RNA, 19 nt, Artificial Sequence
  Description of Artificial Sequence: Synthetic oligonucleotide
  Antisense strand to SEQ ID NO: 47276
uuugaucacucucacagca

SEQ ID NO: 47358 - RNA, 19 nt, Artificial Sequence
  Description of Artificial Sequence: Synthetic oligonucleotide
  Sense strand starting at position 696 of SEQ ID NO: 568
ggacacaugcugugagagu

SEQ ID NO: 47359 - RNA, 19 nt, Artificial Sequence
  Description of Artificial Sequence: Synthetic oligonucleotide
  Antisense strand to SEQ ID NO: 47278
acucucacagcaugugucc

SEQ ID NO: 47360 - RNA, 19 nt, Artificial Sequence
  Description of Artificial Sequence: Synthetic oligonucleotide
  Sense strand starting at position 387 of SEQ ID NO: 568
gauacaucguaggccagau

SEQ ID NO: 47361 - RNA, 19 nt, Artificial Sequence
  Description of Artificial Sequence: Synthetic oligonucleotide
  Antisense strand to SEQ ID NO: 47280
aucuggccuacgauguauc

SEQ ID NO: 47362 - RNA, 19 nt, Artificial Sequence
  Description of Artificial Sequence: Synthetic oligonucleotide
  Sense strand starting at position 386 of SEQ ID NO: 568
ggauacaucguaggccaga

SEQ ID NO: 47363 - RNA, 19 nt, Artificial Sequence
  Description of Artificial Sequence: Synthetic oligonucleotide
  Antisense strand to SEQ ID NO: 47282
ucuggccuacgauguaucc

SEQ ID NO: 47364 - RNA, 19 nt, Artificial Sequence
  Description of Artificial Sequence: Synthetic oligonucleotide
  Sense strand starting at position 336 of SEQ ID NO: 568
guggauucagcacagugaa

SEQ ID NO: 47365 - RNA, 19 nt, Artificial Sequence
  Description of Artificial Sequence: Synthetic oligonucleotide
  Antisense strand to SEQ ID NO: 47284
uucacugugcugaauccac

SEQ ID NO: 47366 - RNA, 19 nt, Artificial Sequence
  Description of Artificial Sequence: Synthetic oligonucleotide
  Sense strand starting at position 323 of SEQ ID NO: 568
aagugaggucccuguggau

SEQ ID NO: 47367 - RNA, 19 nt, Artificial Sequence
  Description of Artificial Sequence: Synthetic oligonucleotide
  Antisense strand to SEQ ID NO: 47286
auccacagggaccucacuu

SEQ ID NO: 47368 - RNA, 19 nt, Artificial Sequence
  Description of Artificial Sequence: Synthetic oligonucleotide
  Sense strand starting at position 246 of SEQ ID NO: 568
agaacaucuuuggcaguga

SEQ ID NO: 47369 - RNA, 19 nt, Artificial Sequence
  Description of Artificial Sequence: Synthetic oligonucleotide
  Antisense strand to SEQ ID NO: 47288
ucacugccaaagauguucu

SEQ ID NO: 47370 - RNA, 19 nt, Artificial Sequence
  Description of Artificial Sequence: Synthetic oligonucleotide
  Sense strand starting at position 244 of SEQ ID NO: 568
ggagaacaucuuuggcagu

SEQ ID NO: 47371 - RNA, 19 nt, Artificial Sequence
  Description of Artificial Sequence: Synthetic oligonucleotide
  Antisense strand to SEQ ID NO: 47290
acugccaaagauguucucc

SEQ ID NO: 47372 - RNA, 19 nt, Artificial Sequence
  Description of Artificial Sequence: Synthetic oligonucleotide
  Sense strand starting at position 3927 of SEQ ID NO: 570
agauuacucuucucuguua

SEQ ID NO: 47373 - RNA, 19 nt, Artificial Sequence
  Description of Artificial Sequence: Synthetic oligonucleotide
  Antisense strand to SEQ ID NO: 47292
uaacagagaagaguaaucu

SEQ ID NO: 47374 - RNA, 19 nt, Artificial Sequence
  Description of Artificial Sequence: Synthetic oligonucleotide
  Sense strand starting at position 3925 of SEQ ID NO: 570
agagauuacucuucucugu

SEQ ID NO: 47375 - RNA, 19 nt, Artificial Sequence
  Description of Artificial Sequence: Synthetic oligonucleotide
  Antisense strand to SEQ ID NO: 47294
acagagaagaguaaucucu

SEQ ID NO: 47376 - RNA, 19 nt, Artificial Sequence
  Description of Artificial Sequence: Synthetic oligonucleotide
  Sense strand starting at position 3822 of SEQ ID NO: 570
gagugagauugucucaaau

SEQ ID NO: 47377 - RNA, 19 nt, Artificial Sequence
  Description of Artificial Sequence: Synthetic oligonucleotide
  Antisense strand to SEQ ID NO: 47296
auuugagacaaucucacuc

SEQ ID NO: 47378 - RNA, 19 nt, Artificial Sequence
  Description of Artificial Sequence: Synthetic oligonucleotide
  Sense strand starting at position 3655 of SEQ ID NO: 570
gcaagaauguaucucuaca

SEQ ID NO: 47379 - RNA, 19 nt, Artificial Sequence
  Description of Artificial Sequence: Synthetic oligonucleotide
  Antisense strand to SEQ ID NO: 47298
uguagagauacauucuugc

SEQ ID NO: 47380 - RNA, 19 nt, Artificial Sequence
  Description of Artificial Sequence: Synthetic oligonucleotide
  Sense strand starting at position 3647 of SEQ ID NO: 570
gcaacauagcaagaaugua

SEQ ID NO: 47381 - RNA, 19 nt, Artificial Sequence
  Description of Artificial Sequence: Synthetic oligonucleotide
  Antisense strand to SEQ ID NO: 47300
uacauucuugcuauguugc

SEQ ID NO: 47382 - RNA, 19 nt, Artificial Sequence
  Description of Artificial Sequence: Synthetic oligonucleotide
  Sense strand starting at position 3303 of SEQ ID NO: 570
ccauuccuccauugguauu

SEQ ID NO: 47383 - RNA, 19 nt, Artificial Sequence
  Description of Artificial Sequence: Synthetic oligonucleotide
  Antisense strand to SEQ ID NO: 47302
aauaccaauggaggaaugg

SEQ ID NO: 47384 - RNA, 19 nt, Artificial Sequence
  Description of Artificial Sequence: Synthetic oligonucleotide
  Sense strand starting at position 3267 of SEQ ID NO: 570
cuuucugcagguuaaauga

SEQ ID NO: 47385 - RNA, 19 nt, Artificial Sequence
  Description of Artificial Sequence: Synthetic oligonucleotide
  Antisense strand to SEQ ID NO: 47304
ucauuuaaccugcagaaag

SEQ ID NO: 47386 - RNA, 19 nt, Artificial Sequence
  Description of Artificial Sequence: Synthetic oligonucleotide
  Sense strand starting at position 3262 of SEQ ID NO: 570
cacagcuuucugcagguua

SEQ ID NO: 47387 - RNA, 19 nt, Artificial Sequence
  Description of Artificial Sequence: Synthetic oligonucleotide
  Antisense strand to SEQ ID NO: 47306
uaaccugcagaaagcugug

SEQ ID NO: 47388 - RNA, 19 nt, Artificial Sequence
  Description of Artificial Sequence: Synthetic oligonucleotide
  Sense strand starting at position 3241 of SEQ ID NO: 570
cuaugcuguauuugguaga

SEQ ID NO: 47389 - RNA, 19 nt, Artificial Sequence
  Description of Artificial Sequence: Synthetic oligonucleotide
  Antisense strand to SEQ ID NO: 47308
ucuaccaaauacagcauag

SEQ ID NO: 47390 - RNA, 19 nt, Artificial Sequence
  Description of Artificial Sequence: Synthetic oligonucleotide
  Sense strand starting at position 3233 of SEQ ID NO: 570
ggccaagacuaugcuguau

SEQ ID NO: 47391 - RNA, 19 nt, Artificial Sequence
  Description of Artificial Sequence: Synthetic oligonucleotide
  Antisense strand to SEQ ID NO: 47310
auacagcauagucuuggcc

SEQ ID NO: 47392 - RNA, 19 nt, Artificial Sequence
  Description of Artificial Sequence: Synthetic oligonucleotide
  Sense strand starting at position 3196 of SEQ ID NO: 570
gcugguguacccuaaaguu

SEQ ID NO: 47393 - RNA, 19 nt, Artificial Sequence
  Description of Artificial Sequence: Synthetic oligonucleotide
  Antisense strand to SEQ ID NO: 47312
aacuuuaggguacaccagc

SEQ ID NO: 47394 - RNA, 19 nt, Artificial Sequence
  Description of Artificial Sequence: Synthetic oligonucleotide
  Sense strand starting at position 3176 of SEQ ID NO: 570
uuaauaagcuuauugguga

SEQ ID NO: 47395 - RNA, 19 nt, Artificial Sequence
  Description of Artificial Sequence: Synthetic oligonucleotide
  Antisense strand to SEQ ID NO: 47314
ucaccaauaagcuuauuaa

SEQ ID NO: 47396 - RNA, 19 nt, Artificial Sequence
  Description of Artificial Sequence: Synthetic oligonucleotide
  Sense strand starting at position 3149 of SEQ ID NO: 570
uccaguugggcucaagaau

SEQ ID NO: 47397 - RNA, 19 nt, Artificial Sequence
  Description of Artificial Sequence: Synthetic oligonucleotide
  Antisense strand to SEQ ID NO: 47316
auucuugagcccaacugga

SEQ ID NO: 47398 - RNA, 19 nt, Artificial Sequence
  Description of Artificial Sequence: Synthetic oligonucleotide
  Sense strand starting at position 3104 of SEQ ID NO: 570
ggcagaauucuaggacuua

SEQ ID NO: 47399 - RNA, 19 nt, Artificial Sequence
  Description of Artificial Sequence: Synthetic oligonucleotide
  Antisense strand to SEQ ID NO: 47318
uaaguccuagaauucugcc

SEQ ID NO: 47400 - RNA, 19 nt, Artificial Sequence
  Description of Artificial Sequence: Synthetic oligonucleotide
  Sense strand starting at position 3024 of SEQ ID NO: 570
uugugucucuauccuaaga

SEQ ID NO: 47401 - RNA, 19 nt, Artificial Sequence
  Description of Artificial Sequence: Synthetic oligonucleotide
  Antisense strand to SEQ ID NO: 47320
ucuuaggauagagacacaa

SEQ ID NO: 47402 - RNA, 19 nt, Artificial Sequence
  Description of Artificial Sequence: Synthetic oligonucleotide
  Sense strand starting at position 2957 of SEQ ID NO: 570
ucagauuaccucugugguu

SEQ ID NO: 47403 - RNA, 19 nt, Artificial Sequence
  Description of Artificial Sequence: Synthetic oligonucleotide
  Antisense strand to SEQ ID NO: 47322
aaccacagagguaaucuga

SEQ ID NO: 47404 - RNA, 19 nt, Artificial Sequence
  Description of Artificial Sequence: Synthetic oligonucleotide
  Sense strand starting at position 2846 of SEQ ID NO: 570
uuacaucaugccuggaaau

SEQ ID NO: 47405 - RNA, 19 nt, Artificial Sequence
  Description of Artificial Sequence: Synthetic oligonucleotide
  Antisense strand to SEQ ID NO: 47324
auuuccaggcaugauguaa

SEQ ID NO: 47406 - RNA, 19 nt, Artificial Sequence
  Description of Artificial Sequence: Synthetic oligonucleotide
  Sense strand starting at position 2845 of SEQ ID NO: 570
uuuacaucaugccuggaaa

SEQ ID NO: 47407 - RNA, 19 nt, Artificial Sequence
  Description of Artificial Sequence: Synthetic oligonucleotide
  Antisense strand to SEQ ID NO: 47326
uuuccaggcaugauguaaa

SEQ ID NO: 47408 - RNA, 19 nt, Artificial Sequence
  Description of Artificial Sequence: Synthetic oligonucleotide
  Sense strand starting at position 2668 of SEQ ID NO: 570
cgaagcugaaucugaagua

SEQ ID NO: 47409 - RNA, 19 nt, Artificial Sequence
  Description of Artificial Sequence: Synthetic oligonucleotide
  Antisense strand to SEQ ID NO: 47328
uacuucagauucagcuucg

SEQ ID NO: 47410 - RNA, 19 nt, Artificial Sequence
  Description of Artificial Sequence: Synthetic oligonucleotide
  Sense strand starting at position 2570 of SEQ ID NO: 570
gcugcuaugcaauagguaa

SEQ ID NO: 47411 - RNA, 19 nt, Artificial Sequence
  Description of Artificial Sequence: Synthetic oligonucleotide
  Antisense strand to SEQ ID NO: 47330
uuaccuauugcauagcagc

SEQ ID NO: 47412 - RNA, 19 nt, Artificial Sequence
  Description of Artificial Sequence: Synthetic oligonucleotide
  Sense strand starting at position 2389 of SEQ ID NO: 570
ccuuaugucuuaguaauaa

SEQ ID NO: 47413 - RNA, 19 nt, Artificial Sequence
  Description of Artificial Sequence: Synthetic oligonucleotide
  Antisense strand to SEQ ID NO: 47332
uuauuacuaagacauaagg

SEQ ID NO: 47414 - RNA, 19 nt, Artificial Sequence
  Description of Artificial Sequence: Synthetic oligonucleotide
  Sense strand starting at position 2243 of SEQ ID NO: 570
gagugaacauuguuguaug

SEQ ID NO: 47415 - RNA, 19 nt, Artificial Sequence
  Description of Artificial Sequence: Synthetic oligonucleotide
  Antisense strand to SEQ ID NO: 47334
cauacaacaauguucacuc

SEQ ID NO: 47416 - RNA, 19 nt, Artificial Sequence
  Description of Artificial Sequence: Synthetic oligonucleotide
  Sense strand starting at position 2241 of SEQ ID NO: 570
uggagugaacauuguugua

SEQ ID NO: 47417 - RNA, 19 nt, Artificial Sequence
  Description of Artificial Sequence: Synthetic oligonucleotide
  Antisense strand to SEQ ID NO: 47336
uacaacaauguucacucca

SEQ ID NO: 47418 - RNA, 19 nt, Artificial Sequence
  Description of Artificial Sequence: Synthetic oligonucleotide
  Sense strand starting at position 2234 of SEQ ID NO: 570
cacucuuuggagugaacau

SEQ ID NO: 47419 - RNA, 19 nt, Artificial Sequence
  Description of Artificial Sequence: Synthetic oligonucleotide
  Antisense strand to SEQ ID NO: 47338
auguucacuccaaagagug

SEQ ID NO: 47420 - RNA, 19 nt, Artificial Sequence
  Description of Artificial Sequence: Synthetic oligonucleotide
  Sense strand starting at position 2176 of SEQ ID NO: 570
uguugacugguuugcaaag

SEQ ID NO: 47421 - RNA, 19 nt, Artificial Sequence
  Description of Artificial Sequence: Synthetic oligonucleotide
  Antisense strand to SEQ ID NO: 47340
cuuugcaaaccagucaaca

SEQ ID NO: 47422 - RNA, 19 nt, Artificial Sequence
  Description of Artificial Sequence: Synthetic oligonucleotide
  Sense strand starting at position 2117 of SEQ ID NO: 570
guaauugugcgauucuguc

SEQ ID NO: 47423 - RNA, 19 nt, Artificial Sequence
  Description of Artificial Sequence: Synthetic oligonucleotide
  Antisense strand to SEQ ID NO: 47342
gacagaaucgcacaauuac

SEQ ID NO: 47424 - RNA, 19 nt, Artificial Sequence
  Description of Artificial Sequence: Synthetic oligonucleotide
  Sense strand starting at position 2060 of SEQ ID NO: 570
uugauuuaccugugcuguu

SEQ ID NO: 47425 - RNA, 19 nt, Artificial Sequence
  Description of Artificial Sequence: Synthetic oligonucleotide
  Antisense strand to SEQ ID NO: 47344
aacagcacagguaaaucaa

SEQ ID NO: 47426 - RNA, 19 nt, Artificial Sequence
  Description of Artificial Sequence: Synthetic oligonucleotide
  Sense strand starting at position 2006 of SEQ ID NO: 570
uguggagucugaguuucaa

SEQ ID NO: 47427 - RNA, 19 nt, Artificial Sequence
  Description of Artificial Sequence: Synthetic oligonucleotide
  Antisense strand to SEQ ID NO: 47346
uugaaacucagacuccaca

SEQ ID NO: 47428 - RNA, 19 nt, Artificial Sequence
  Description of Artificial Sequence: Synthetic oligonucleotide
  Sense strand starting at position 2003 of SEQ ID NO: 570
gauuguggagucugaguuu

SEQ ID NO: 47429 - RNA, 19 nt, Artificial Sequence
  Description of Artificial Sequence: Synthetic oligonucleotide
  Antisense strand to SEQ ID NO: 47348
aaacucagacuccacaauc

SEQ ID NO: 47430 - RNA, 19 nt, Artificial Sequence
  Description of Artificial Sequence: Synthetic oligonucleotide
  Sense strand starting at position 1691 of SEQ ID NO: 570
cugggaguuuggccgauuu

SEQ ID NO: 47431 - RNA, 19 nt, Artificial Sequence
  Description of Artificial Sequence: Synthetic oligonucleotide
  Antisense strand to SEQ ID NO: 47350
aaaucggccaaacucccag

SEQ ID NO: 47432 - RNA, 19 nt, Artificial Sequence
  Description of Artificial Sequence: Synthetic oligonucleotide
  Sense strand starting at position 1660 of SEQ ID NO: 570
gaaacuccgucacucagaa

SEQ ID NO: 47433 - RNA, 19 nt, Artificial Sequence
  Description of Artificial Sequence: Synthetic oligonucleotide
  Antisense strand to SEQ ID NO: 47352
uucugagugacggaguuuc

SEQ ID NO: 47434 - RNA, 19 nt, Artificial Sequence
  Description of Artificial Sequence: Synthetic oligonucleotide
  Sense strand starting at position 1606 of SEQ ID NO: 570
cgcugagaacagugaauca

SEQ ID NO: 47435 - RNA, 19 nt, Artificial Sequence
  Description of Artificial Sequence: Synthetic oligonucleotide
  Antisense strand to SEQ ID NO: 47354
ugauucacuguucucagcg

SEQ ID NO: 47436 - RNA, 19 nt, Artificial Sequence
  Description of Artificial Sequence: Synthetic oligonucleotide
  Sense strand starting at position 1374 of SEQ ID NO: 570
aaccgauguuaggcaaaca

SEQ ID NO: 47437 - RNA, 19 nt, Artificial Sequence
  Description of Artificial Sequence: Synthetic oligonucleotide
  Antisense strand to SEQ ID NO: 47356
uguuugccuaacaucgguu

SEQ ID NO: 47438 - RNA, 19 nt, Artificial Sequence
  Description of Artificial Sequence: Synthetic oligonucleotide
  Sense strand starting at position 1301 of SEQ ID NO: 570
ugucuuugacacuguacaa

SEQ ID NO: 47439 - RNA, 19 nt, Artificial Sequence
  Description of Artificial Sequence: Synthetic oligonucleotide
  Antisense strand to SEQ ID NO: 47358
uuguacagugucaaagaca

SEQ ID NO: 47440 - RNA, 19 nt, Artificial Sequence
  Description of Artificial Sequence: Synthetic oligonucleotide
  Sense strand starting at position 1144 of SEQ ID NO: 570
gacuacugccuugaguaua

SEQ ID NO: 47441 - RNA, 19 nt, Artificial Sequence
  Description of Artificial Sequence: Synthetic oligonucleotide
  Antisense strand to SEQ ID NO: 47360
uauacucaaggcaguaguc

SEQ ID NO: 47442 - RNA, 19 nt, Artificial Sequence
  Description of Artificial Sequence: Synthetic oligonucleotide
  Sense strand starting at position 1143 of SEQ ID NO: 570
ugacuacugccuugaguau

SEQ ID NO: 47443 - RNA, 19 nt, Artificial Sequence
  Description of Artificial Sequence: Synthetic oligonucleotide
  Antisense strand to SEQ ID NO: 47362
auacucaaggcaguaguca

SEQ ID NO: 47444 - RNA, 19 nt, Artificial Sequence
  Description of Artificial Sequence: Synthetic oligonucleotide
  Sense strand starting at position 1116 of SEQ ID NO: 570
uguugagcucaguaacuga

SEQ ID NO: 47445 - RNA, 19 nt, Artificial Sequence
  Description of Artificial Sequence: Synthetic oligonucleotide
  Antisense strand to SEQ ID NO: 47364
ucaguuacugagcucaaca

SEQ ID NO: 47446 - RNA, 19 nt, Artificial Sequence
  Description of Artificial Sequence: Synthetic oligonucleotide
  Sense strand starting at position 1046 of SEQ ID NO: 570
cugugagguccuugagggu

SEQ ID NO: 47447 - RNA, 19 nt, Artificial Sequence
  Description of Artificial Sequence: Synthetic oligonucleotide
  Antisense strand to SEQ ID NO: 47366
acccucaaggaccucacag

SEQ ID NO: 47448 - RNA, 19 nt, Artificial Sequence
  Description of Artificial Sequence: Synthetic oligonucleotide
  Sense strand starting at position 807 of SEQ ID NO: 570
cuguauucuccugaaguuc

SEQ ID NO: 47449 - RNA, 19 nt, Artificial Sequence
  Description of Artificial Sequence: Synthetic oligonucleotide
  Antisense strand to SEQ ID NO: 47368
gaacuucaggagaauacag

SEQ ID NO: 47450 - RNA, 19 nt, Artificial Sequence
  Description of Artificial Sequence: Synthetic oligonucleotide
  Sense strand starting at position 170 of SEQ ID NO: 570
ggagucucauucuuguuau

SEQ ID NO: 47451 - RNA, 19 nt, Artificial Sequence
  Description of Artificial Sequence: Synthetic oligonucleotide
  Antisense strand to SEQ ID NO: 47370
auaacaagaaugagacucc

SEQ ID NO: 47452 - RNA, 19 nt, Artificial Sequence
  Description of Artificial Sequence: Synthetic oligonucleotide
  Sense strand starting at position 3696 of SEQ ID NO: 569
gccaaucaggcauggaaau

SEQ ID NO: 47453 - RNA, 19 nt, Artificial Sequence
  Description of Artificial Sequence: Synthetic oligonucleotide
  Antisense strand to SEQ ID NO: 47372
auuuccaugccugauuggc

SEQ ID NO: 47454 - RNA, 19 nt, Artificial Sequence
  Description of Artificial Sequence: Synthetic oligonucleotide
  Sense strand starting at position 3643 of SEQ ID NO: 569
ugagucauaccuggauauc

SEQ ID NO: 47455 - RNA, 19 nt, Artificial Sequence
  Description of Artificial Sequence: Synthetic oligonucleotide
  Antisense strand to SEQ ID NO: 47374
gauauccagguaugacuca

SEQ ID NO: 47456 - RNA, 19 nt, Artificial Sequence
  Description of Artificial Sequence: Synthetic oligonucleotide
  Sense strand starting at position 3588 of SEQ ID NO: 569
ggaguaauauucucacagu

SEQ ID NO: 47457 - RNA, 19 nt, Artificial Sequence
  Description of Artificial Sequence: Synthetic oligonucleotide
  Antisense strand to SEQ ID NO: 47376
acugugagaauauuacucc

SEQ ID NO: 47458 - RNA, 19 nt, Artificial Sequence
  Description of Artificial Sequence: Synthetic oligonucleotide
  Sense strand starting at position 3396 of SEQ ID NO: 569
ggcaauauaguuugauaaa

SEQ ID NO: 47459 - RNA, 19 nt, Artificial Sequence
  Description of Artificial Sequence: Synthetic oligonucleotide
  Antisense strand to SEQ ID NO: 47378
uuuaucaaacuauauugcc

SEQ ID NO: 47460 - RNA, 19 nt, Artificial Sequence
  Description of Artificial Sequence: Synthetic oligonucleotide
  Sense strand starting at position 3394 of SEQ ID NO: 569
caggcaauauaguuugaua

SEQ ID NO: 47461 - RNA, 19 nt, Artificial Sequence
  Description of Artificial Sequence: Synthetic oligonucleotide
  Antisense strand to SEQ ID NO: 47380
uaucaaacuauauugccug

SEQ ID NO: 47462 - RNA, 19 nt, Artificial Sequence
  Description of Artificial Sequence: Synthetic oligonucleotide
  Sense strand starting at position 3320 of SEQ ID NO: 569
uugacuauugaguguugaa

SEQ ID NO: 47463 - RNA, 19 nt, Artificial Sequence
  Description of Artificial Sequence: Synthetic oligonucleotide
  Antisense strand to SEQ ID NO: 47382
uucaacacucaauagucaa

SEQ ID NO: 47464 - RNA, 19 nt, Artificial Sequence
  Description of Artificial Sequence: Synthetic oligonucleotide
  Sense strand starting at position 3245 of SEQ ID NO: 569
gacuuaagaguagguagau

SEQ ID NO: 47465 - RNA, 19 nt, Artificial Sequence
  Description of Artificial Sequence: Synthetic oligonucleotide
  Antisense strand to SEQ ID NO: 47384
aucuaccuacucuuaaguc

SEQ ID NO: 47466 - RNA, 19 nt, Artificial Sequence
  Description of Artificial Sequence: Synthetic oligonucleotide
  Sense strand starting at position 3154 of SEQ ID NO: 569
auuguucuaacugagugua

SEQ ID NO: 47467 - RNA, 19 nt, Artificial Sequence
  Description of Artificial Sequence: Synthetic oligonucleotide
  Antisense strand to SEQ ID NO: 47386
uacacucaguuagaacaau

SEQ ID NO: 47468 - RNA, 19 nt, Artificial Sequence
  Description of Artificial Sequence: Synthetic oligonucleotide
  Sense strand starting at position 2773 of SEQ ID NO: 569
aggauaaccuauguccuua

SEQ ID NO: 47469 - RNA, 19 nt, Artificial Sequence
  Description of Artificial Sequence: Synthetic oligonucleotide
  Antisense strand to SEQ ID NO: 47388
uaaggacauagguuauccu

SEQ ID NO: 47470 - RNA, 19 nt, Artificial Sequence
  Description of Artificial Sequence: Synthetic oligonucleotide
  Sense strand starting at position 2685 of SEQ ID NO: 569
ccauuuaauuugugugaug

SEQ ID NO: 47471 - RNA, 19 nt, Artificial Sequence
  Description of Artificial Sequence: Synthetic oligonucleotide
  Antisense strand to SEQ ID NO: 47390
caucacacaaauuaaaugg

SEQ ID NO: 47472 - RNA, 19 nt, Artificial Sequence
  Description of Artificial Sequence: Synthetic oligonucleotide
  Sense strand starting at position 2666 of SEQ ID NO: 569
auauuuguucuaggugguu

SEQ ID NO: 47473 - RNA, 19 nt, Artificial Sequence
  Description of Artificial Sequence: Synthetic oligonucleotide
  Antisense strand to SEQ ID NO: 47392
aaccaccuagaacaaauau

SEQ ID NO: 47474 - RNA, 19 nt, Artificial Sequence
  Description of Artificial Sequence: Synthetic oligonucleotide
  Sense strand starting at position 2662 of SEQ ID NO: 569
gcuaauauuuguucuaggu

SEQ ID NO: 47475 - RNA, 19 nt, Artificial Sequence
  Description of Artificial Sequence: Synthetic oligonucleotide
  Antisense strand to SEQ ID NO: 47394
accuagaacaaauauuagc

SEQ ID NO: 47476 - RNA, 19 nt, Artificial Sequence
  Description of Artificial Sequence: Synthetic oligonucleotide
  Sense strand starting at position 2568 of SEQ ID NO: 569
ggccaaauaugagucaauu

SEQ ID NO: 47477 - RNA, 19 nt, Artificial Sequence
  Description of Artificial Sequence: Synthetic oligonucleotide
  Antisense strand to SEQ ID NO: 47396
aauugacucauauuuggcc

SEQ ID NO: 47478 - RNA, 19 nt, Artificial Sequence
  Description of Artificial Sequence: Synthetic oligonucleotide
  Sense strand starting at position 2405 of SEQ ID NO: 569
guguuuaaucaggaucccu

SEQ ID NO: 47479 - RNA, 19 nt, Artificial Sequence
  Description of Artificial Sequence: Synthetic oligonucleotide
  Antisense strand to SEQ ID NO: 47398
agggauccugauuaaacac

SEQ ID NO: 47480 - RNA, 19 nt, Artificial Sequence
  Description of Artificial Sequence: Synthetic oligonucleotide
  Sense strand starting at position 2396 of SEQ ID NO: 569
aguagcguuguguuuaauc

SEQ ID NO: 47481 - RNA, 19 nt, Artificial Sequence
  Description of Artificial Sequence: Synthetic oligonucleotide
  Antisense strand to SEQ ID NO: 47400
gauuaaacacaacgcuacu

SEQ ID NO: 47482 - RNA, 19 nt, Artificial Sequence
  Description of Artificial Sequence: Synthetic oligonucleotide
  Sense strand starting at position 2393 of SEQ ID NO: 569
gguaguagcguuguguuua

SEQ ID NO: 47483 - RNA, 19 nt, Artificial Sequence
  Description of Artificial Sequence: Synthetic oligonucleotide
  Antisense strand to SEQ ID NO: 47402
uaaacacaacgcuacuacc

SEQ ID NO: 47484 - RNA, 19 nt, Artificial Sequence
  Description of Artificial Sequence: Synthetic oligonucleotide
  Sense strand starting at position 2391 of SEQ ID NO: 569
uggguaguagcguuguguu

SEQ ID NO: 47485 - RNA, 19 nt, Artificial Sequence
  Description of Artificial Sequence: Synthetic oligonucleotide
  Antisense strand to SEQ ID NO: 47404
aacacaacgcuacuaccca

SEQ ID NO: 47486 - RNA, 19 nt, Artificial Sequence
  Description of Artificial Sequence: Synthetic oligonucleotide
  Sense strand starting at position 2222 of SEQ ID NO: 569
gcaaccaguguauaauaaa

SEQ ID NO: 47487 - RNA, 19 nt, Artificial Sequence
  Description of Artificial Sequence: Synthetic oligonucleotide
  Antisense strand to SEQ ID NO: 47406
uuuauuauacacugguugc

SEQ ID NO: 47488 - RNA, 19 nt, Artificial Sequence
  Description of Artificial Sequence: Synthetic oligonucleotide
  Sense strand starting at position 2202 of SEQ ID NO: 569
ggaaccaaguuucugauua

SEQ ID NO: 47489 - RNA, 19 nt, Artificial Sequence
  Description of Artificial Sequence: Synthetic oligonucleotide
  Antisense strand to SEQ ID NO: 47408
uaaucagaaacuugguucc

SEQ ID NO: 47490 - RNA, 19 nt, Artificial Sequence
  Description of Artificial Sequence: Synthetic oligonucleotide
  Sense strand starting at position 2182 of SEQ ID NO: 569
cuauuucucuugguuguuu

SEQ ID NO: 47491 - RNA, 19 nt, Artificial Sequence
  Description of Artificial Sequence: Synthetic oligonucleotide
  Antisense strand to SEQ ID NO: 47410
aaacaaccaagagaaauag

SEQ ID NO: 47492 - RNA, 19 nt, Artificial Sequence
  Description of Artificial Sequence: Synthetic oligonucleotide
  Sense strand starting at position 2181 of SEQ ID NO: 569
ccuauuucucuugguuguu

SEQ ID NO: 47493 - RNA, 19 nt, Artificial Sequence
  Description of Artificial Sequence: Synthetic oligonucleotide
  Antisense strand to SEQ ID NO: 47412
aacaaccaagagaaauagg

SEQ ID NO: 47494 - RNA, 19 nt, Artificial Sequence
  Description of Artificial Sequence: Synthetic oligonucleotide
  Sense strand starting at position 2178 of SEQ ID NO: 569
guuccuauuucucuugguu

SEQ ID NO: 47495 - RNA, 19 nt, Artificial Sequence
  Description of Artificial Sequence: Synthetic oligonucleotide
  Antisense strand to SEQ ID NO: 47414
aaccaagagaaauaggaac

SEQ ID NO: 47496 - RNA, 19 nt, Artificial Sequence
  Description of Artificial Sequence: Synthetic oligonucleotide
  Sense strand starting at position 2065 of SEQ ID NO: 569
auaugaagccugugacaug

SEQ ID NO: 47497 - RNA, 19 nt, Artificial Sequence
  Description of Artificial Sequence: Synthetic oligonucleotide
  Antisense strand to SEQ ID NO: 47416
caugucacaggcuucauau

SEQ ID NO: 47498 - RNA, 19 nt, Artificial Sequence
  Description of Artificial Sequence: Synthetic oligonucleotide
  Sense strand starting at position 2063 of SEQ ID NO: 569
caauaugaagccugugaca

SEQ ID NO: 47499 - RNA, 19 nt, Artificial Sequence
  Description of Artificial Sequence: Synthetic oligonucleotide
  Antisense strand to SEQ ID NO: 47418
ugucacaggcuucauauug

SEQ ID NO: 47500 - RNA, 19 nt, Artificial Sequence
  Description of Artificial Sequence: Synthetic oligonucleotide
  Sense strand starting at position 1392 of SEQ ID NO: 569
agggaacuguauguuaaga

SEQ ID NO: 47501 - RNA, 19 nt, Artificial Sequence
  Description of Artificial Sequence: Synthetic oligonucleotide
  Antisense strand to SEQ ID NO: 47420
ucuuaacauacaguucccu

SEQ ID NO: 47502 - RNA, 19 nt, Artificial Sequence
  Description of Artificial Sequence: Synthetic oligonucleotide
  Sense strand starting at position 1391 of SEQ ID NO: 569
aagggaacuguauguuaag

SEQ ID NO: 47503 - RNA, 19 nt, Artificial Sequence
  Description of Artificial Sequence: Synthetic oligonucleotide
  Antisense strand to SEQ ID NO: 47422
cuuaacauacaguucccuu

SEQ ID NO: 47504 - RNA, 19 nt, Artificial Sequence
  Description of Artificial Sequence: Synthetic oligonucleotide
  Sense strand starting at position 1378 of SEQ ID NO: 569
aauguauauuuccaaggga

SEQ ID NO: 47505 - RNA, 19 nt, Artificial Sequence
  Description of Artificial Sequence: Synthetic oligonucleotide
  Antisense strand to SEQ ID NO: 47424
ucccuuggaaauauacauu

SEQ ID NO: 47506 - RNA, 19 nt, Artificial Sequence
  Description of Artificial Sequence: Synthetic oligonucleotide
  Sense strand starting at position 730 of SEQ ID NO: 569
agagcaacuuugcuaaaua

SEQ ID NO: 47507 - RNA, 19 nt, Artificial Sequence
  Description of Artificial Sequence: Synthetic oligonucleotide
  Antisense strand to SEQ ID NO: 47426
uauuuagcaaaguugcucu

SEQ ID NO: 47508 - RNA, 19 nt, Artificial Sequence
  Description of Artificial Sequence: Synthetic oligonucleotide
  Sense strand starting at position 701 of SEQ ID NO: 569
uuggguucccaguaaauag

SEQ ID NO: 47509 - RNA, 19 nt, Artificial Sequence
  Description of Artificial Sequence: Synthetic oligonucleotide
  Antisense strand to SEQ ID NO: 47428
cuauuuacugggaacccaa

SEQ ID NO: 47510 - RNA, 19 nt, Artificial Sequence
  Description of Artificial Sequence: Synthetic oligonucleotide
  Sense strand starting at position 664 of SEQ ID NO: 569
aggagagguugaagaaugu

SEQ ID NO: 47511 - RNA, 19 nt, Artificial Sequence
  Description of Artificial Sequence: Synthetic oligonucleotide
  Antisense strand to SEQ ID NO: 47430
acauucuucaaccucuccu

SEQ ID NO: 47512 - RNA, 19 nt, Artificial Sequence
  Description of Artificial Sequence: Synthetic oligonucleotide
  Sense strand starting at position 652 of SEQ ID NO: 569
ggagauuguuggaggagag

SEQ ID NO: 47513 - RNA, 19 nt, Artificial Sequence
  Description of Artificial Sequence: Synthetic oligonucleotide
  Antisense strand to SEQ ID NO: 47432
cucuccuccaacaaucucc

SEQ ID NO: 47514 - RNA, 19 nt, Artificial Sequence
  Description of Artificial Sequence: Synthetic oligonucleotide
  Sense strand starting at position 640 of SEQ ID NO: 569
aggaauagugugggagauu

SEQ ID NO: 47515 - RNA, 19 nt, Artificial Sequence
  Description of Artificial Sequence: Synthetic oligonucleotide
  Antisense strand to SEQ ID NO: 47434
aaucucccacacuauuccu

SEQ ID NO: 47516 - RNA, 19 nt, Artificial Sequence
  Description of Artificial Sequence: Synthetic oligonucleotide
  Sense strand starting at position 638 of SEQ ID NO: 569
gcaggaauagugugggaga

SEQ ID NO: 47517 - RNA, 19 nt, Artificial Sequence
  Description of Artificial Sequence: Synthetic oligonucleotide
  Antisense strand to SEQ ID NO: 47436
ucucccacacuauuccugc

SEQ ID NO: 47518 - RNA, 19 nt, Artificial Sequence
  Description of Artificial Sequence: Synthetic oligonucleotide
  Sense strand starting at position 440 of SEQ ID NO: 569
guguaacagaacuggauaa

SEQ ID NO: 47519 - RNA, 19 nt, Artificial Sequence
  Description of Artificial Sequence: Synthetic oligonucleotide
  Antisense strand to SEQ ID NO: 47438
uuauccaguucuguuacac

SEQ ID NO: 47520 - RNA, 19 nt, Artificial Sequence
  Description of Artificial Sequence: Synthetic oligonucleotide
  Sense strand starting at position 431 of SEQ ID NO: 569
aaguucuguguguaacaga

SEQ ID NO: 47521 - RNA, 19 nt, Artificial Sequence
  Description of Artificial Sequence: Synthetic oligonucleotide
  Antisense strand to SEQ ID NO: 47440
ucuguuacacacagaacuu

SEQ ID NO: 47522 - RNA, 19 nt, Artificial Sequence
  Description of Artificial Sequence: Synthetic oligonucleotide
  Sense strand starting at position 379 of SEQ ID NO: 569
guucuuuggguggaaauag

SEQ ID NO: 47523 - RNA, 19 nt, Artificial Sequence
  Description of Artificial Sequence: Synthetic oligonucleotide
  Antisense strand to SEQ ID NO: 47442
cuauuuccacccaaagaac

SEQ ID NO: 47524 - RNA, 19 nt, Artificial Sequence
  Description of Artificial Sequence: Synthetic oligonucleotide
  Sense strand starting at position 263 of SEQ ID NO: 569
gcauaugacuaugcaaaca

SEQ ID NO: 47525 - RNA, 19 nt, Artificial Sequence
  Description of Artificial Sequence: Synthetic oligonucleotide
  Antisense strand to SEQ ID NO: 47444
uguuugcauagucauaugc

SEQ ID NO: 47526 - RNA, 19 nt, Artificial Sequence
  Description of Artificial Sequence: Synthetic oligonucleotide
  Sense strand starting at position 260 of SEQ ID NO: 569
uuugcauaugacuaugcaa

SEQ ID NO: 47527 - RNA, 19 nt, Artificial Sequence
  Description of Artificial Sequence: Synthetic oligonucleotide
  Antisense strand to SEQ ID NO: 47446
uugcauagucauaugcaaa

SEQ ID NO: 47528 - RNA, 19 nt, Artificial Sequence
  Description of Artificial Sequence: Synthetic oligonucleotide
  Sense strand starting at position 238 of SEQ ID NO: 569
guaugauagcuagacuuuc

SEQ ID NO: 47529 - RNA, 19 nt, Artificial Sequence
  Description of Artificial Sequence: Synthetic oligonucleotide
  Antisense strand to SEQ ID NO: 47448
gaaagucuagcuaucauac

SEQ ID NO: 47530 - RNA, 19 nt, Artificial Sequence
  Description of Artificial Sequence: Synthetic oligonucleotide
  Sense strand starting at position 236 of SEQ ID NO: 569
ugguaugauagcuagacuu

SEQ ID NO: 47531 - RNA, 19 nt, Artificial Sequence
  Description of Artificial Sequence: Synthetic oligonucleotide
  Antisense strand to SEQ ID NO: 47450
aagucuagcuaucauacca

SEQ ID NO: 47532 - RNA, 19 nt, Artificial Sequence
  Description of Artificial Sequence: Synthetic oligonucleotide
  Sense strand starting at position 3808 of SEQ ID NO: 571
caacuaugguuaguaagau

SEQ ID NO: 47533 - RNA, 19 nt, Artificial Sequence
  Description of Artificial Sequence: Synthetic oligonucleotide
  Antisense strand to SEQ ID NO: 47452
aucuuacuaaccauaguug

SEQ ID NO: 47534 - RNA, 19 nt, Artificial Sequence
  Description of Artificial Sequence: Synthetic oligonucleotide
  Sense strand starting at position 3805 of SEQ ID NO: 571
uggcaacuaugguuaguaa

SEQ ID NO: 47535 - RNA, 19 nt, Artificial Sequence
  Description of Artificial Sequence: Synthetic oligonucleotide
  Antisense strand to SEQ ID NO: 47454
uuacuaaccauaguugcca

SEQ ID NO: 47536 - RNA, 19 nt, Artificial Sequence
  Description of Artificial Sequence: Synthetic oligonucleotide
  Sense strand starting at position 3770 of SEQ ID NO: 571
gucugagugacugaacuau

SEQ ID NO: 47537 - RNA, 19 nt, Artificial Sequence
  Description of Artificial Sequence: Synthetic oligonucleotide
  Antisense strand to SEQ ID NO: 47456
auaguucagucacucagac

SEQ ID NO: 47538 - RNA, 19 nt, Artificial Sequence
  Description of Artificial Sequence: Synthetic oligonucleotide
  Sense strand starting at position 3766 of SEQ ID NO: 571
cuuugucugagugacugaa

SEQ ID NO: 47539 - RNA, 19 nt, Artificial Sequence
  Description of Artificial Sequence: Synthetic oligonucleotide
  Antisense strand to SEQ ID NO: 47458
uucagucacucagacaaag

SEQ ID NO: 47540 - RNA, 19 nt, Artificial Sequence
  Description of Artificial Sequence: Synthetic oligonucleotide
  Sense strand starting at position 3738 of SEQ ID NO: 571
ggaguaugcaauugagaga

SEQ ID NO: 47541 - RNA, 19 nt, Artificial Sequence
  Description of Artificial Sequence: Synthetic oligonucleotide
  Antisense strand to SEQ ID NO: 47460
ucucucaauugcauacucc

SEQ ID NO: 47542 - RNA, 19 nt, Artificial Sequence
  Description of Artificial Sequence: Synthetic oligonucleotide
  Sense strand starting at position 3732 of SEQ ID NO: 571
uucccaggaguaugcaauu

SEQ ID NO: 47543 - RNA, 19 nt, Artificial Sequence
  Description of Artificial Sequence: Synthetic oligonucleotide
  Antisense strand to SEQ ID NO: 47462
aauugcauacuccugggaa

SEQ ID NO: 47544 - RNA, 19 nt, Artificial Sequence
  Description of Artificial Sequence: Synthetic oligonucleotide
  Sense strand starting at position 3704 of SEQ ID NO: 571
ugacuugagcuuuaccaau

SEQ ID NO: 47545 - RNA, 19 nt, Artificial Sequence
  Description of Artificial Sequence: Synthetic oligonucleotide
  Antisense strand to SEQ ID NO: 47464
auugguaaagcucaaguca

SEQ ID NO: 47546 - RNA, 19 nt, Artificial Sequence
  Description of Artificial Sequence: Synthetic oligonucleotide
  Sense strand starting at position 3567 of SEQ ID NO: 571
uagaaugucugcccaggaa

SEQ ID NO: 47547 - RNA, 19 nt, Artificial Sequence
  Description of Artificial Sequence: Synthetic oligonucleotide
  Antisense strand to SEQ ID NO: 47466
uuccugggcagacauucua

SEQ ID NO: 47548 - RNA, 19 nt, Artificial Sequence
  Description of Artificial Sequence: Synthetic oligonucleotide
  Sense strand starting at position 3418 of SEQ ID NO: 571
cugggaugugggcauacau

SEQ ID NO: 47549 - RNA, 19 nt, Artificial Sequence
  Description of Artificial Sequence: Synthetic oligonucleotide
  Antisense strand to SEQ ID NO: 47468
auguaugcccacaucccag

SEQ ID NO: 47550 - RNA, 19 nt, Artificial Sequence
  Description of Artificial Sequence: Synthetic oligonucleotide
  Sense strand starting at position 3407 of SEQ ID NO: 571
ccaugucuugacugggaug

SEQ ID NO: 47551 - RNA, 19 nt, Artificial Sequence
  Description of Artificial Sequence: Synthetic oligonucleotide
  Antisense strand to SEQ ID NO: 47470
caucccagucaagacaugg

SEQ ID NO: 47552 - RNA, 19 nt, Artificial Sequence
  Description of Artificial Sequence: Synthetic oligonucleotide
  Sense strand starting at position 3398 of SEQ ID NO: 571
ggaaaugucccaugucuug

SEQ ID NO: 47553 - RNA, 19 nt, Artificial Sequence
  Description of Artificial Sequence: Synthetic oligonucleotide
  Antisense strand to SEQ ID NO: 47472
caagacaugggacauuucc

SEQ ID NO: 47554 - RNA, 19 nt, Artificial Sequence
  Description of Artificial Sequence: Synthetic oligonucleotide
  Sense strand starting at position 3391 of SEQ ID NO: 571
gagugauggaaauguccca

SEQ ID NO: 47555 - RNA, 19 nt, Artificial Sequence
  Description of Artificial Sequence: Synthetic oligonucleotide
  Antisense strand to SEQ ID NO: 47474
ugggacauuuccaucacuc

SEQ ID NO: 47556 - RNA, 19 nt, Artificial Sequence
  Description of Artificial Sequence: Synthetic oligonucleotide
  Sense strand starting at position 3342 of SEQ ID NO: 571
gucuuugaggaguggagau

SEQ ID NO: 47557 - RNA, 19 nt, Artificial Sequence
  Description of Artificial Sequence: Synthetic oligonucleotide
  Antisense strand to SEQ ID NO: 47476
aucuccacuccucaaagac

SEQ ID NO: 47558 - RNA, 19 nt, Artificial Sequence
  Description of Artificial Sequence: Synthetic oligonucleotide
  Sense strand starting at position 3339 of SEQ ID NO: 571
guugucuuugaggagugga

SEQ ID NO: 47559 - RNA, 19 nt, Artificial Sequence
  Description of Artificial Sequence: Synthetic oligonucleotide
  Antisense strand to SEQ ID NO: 47478
uccacuccucaaagacaac

SEQ ID NO: 47560 - RNA, 19 nt, Artificial Sequence
  Description of Artificial Sequence: Synthetic oligonucleotide
  Sense strand starting at position 3317 of SEQ ID NO: 571
gguaauagaaaucggaacu

SEQ ID NO: 47561 - RNA, 19 nt, Artificial Sequence
  Description of Artificial Sequence: Synthetic oligonucleotide
  Antisense strand to SEQ ID NO: 47480
aguuccgauuucuauuacc

SEQ ID NO: 47562 - RNA, 19 nt, Artificial Sequence
  Description of Artificial Sequence: Synthetic oligonucleotide
  Sense strand starting at position 3258 of SEQ ID NO: 571
agaccauauugguuugauu

SEQ ID NO: 47563 - RNA, 19 nt, Artificial Sequence
  Description of Artificial Sequence: Synthetic oligonucleotide
  Antisense strand to SEQ ID NO: 47482
aaucaaaccaauauggucu

SEQ ID NO: 47564 - RNA, 19 nt, Artificial Sequence
  Description of Artificial Sequence: Synthetic oligonucleotide
  Sense strand starting at position 3179 of SEQ ID NO: 571
gugaaauaaucucugccac

SEQ ID NO: 47565 - RNA, 19 nt, Artificial Sequence
  Description of Artificial Sequence: Synthetic oligonucleotide
  Antisense strand to SEQ ID NO: 47484
guggcagagauuauuucac

SEQ ID NO: 47566 - RNA, 19 nt, Artificial Sequence
  Description of Artificial Sequence: Synthetic oligonucleotide
  Sense strand starting at position 3153 of SEQ ID NO: 571
auaaacaaacgugguauau

SEQ ID NO: 47567 - RNA, 19 nt, Artificial Sequence
  Description of Artificial Sequence: Synthetic oligonucleotide
  Antisense strand to SEQ ID NO: 47486
auauaccacguuuguuuau

SEQ ID NO: 47568 - RNA, 19 nt, Artificial Sequence
  Description of Artificial Sequence: Synthetic oligonucleotide
  Sense strand starting at position 3150 of SEQ ID NO: 571
ugaauaaacaaacguggua

SEQ ID NO: 47569 - RNA, 19 nt, Artificial Sequence
  Description of Artificial Sequence: Synthetic oligonucleotide
  Antisense strand to SEQ ID NO: 47488
uaccacguuuguuuauuca

SEQ ID NO: 47570 - RNA, 19 nt, Artificial Sequence
  Description of Artificial Sequence: Synthetic oligonucleotide
  Sense strand starting at position 2985 of SEQ ID NO: 571
cugaguguccuacaaguac

SEQ ID NO: 47571 - RNA, 19 nt, Artificial Sequence
  Description of Artificial Sequence: Synthetic oligonucleotide
  Antisense strand to SEQ ID NO: 47490
guacuuguaggacacucag

SEQ ID NO: 47572 - RNA, 19 nt, Artificial Sequence
  Description of Artificial Sequence: Synthetic oligonucleotide
  Sense strand starting at position 2981 of SEQ ID NO: 571
cuaccugaguguccuacaa

SEQ ID NO: 47573 - RNA, 19 nt, Artificial Sequence
  Description of Artificial Sequence: Synthetic oligonucleotide
  Antisense strand to SEQ ID NO: 47492
uuguaggacacucagguag

SEQ ID NO: 47574 - RNA, 19 nt, Artificial Sequence
  Description of Artificial Sequence: Synthetic oligonucleotide
  Sense strand starting at position 2949 of SEQ ID NO: 571
cuuagacuguacuccaaga

SEQ ID NO: 47575 - RNA, 19 nt, Artificial Sequence
  Description of Artificial Sequence: Synthetic oligonucleotide
  Antisense strand to SEQ ID NO: 47494
ucuuggaguacagucuaag

SEQ ID NO: 47576 - RNA, 19 nt, Artificial Sequence
  Description of Artificial Sequence: Synthetic oligonucleotide
  Sense strand starting at position 2866 of SEQ ID NO: 571
aggacuuucccauagcuuu

SEQ ID NO: 47577 - RNA, 19 nt, Artificial Sequence
  Description of Artificial Sequence: Synthetic oligonucleotide
  Antisense strand to SEQ ID NO: 47496
aaagcuaugggaaaguccu

SEQ ID NO: 47578 - RNA, 19 nt, Artificial Sequence
  Description of Artificial Sequence: Synthetic oligonucleotide
  Sense strand starting at position 2630 of SEQ ID NO: 571
cuccuucuaccggaucuau

SEQ ID NO: 47579 - RNA, 19 nt, Artificial Sequence
  Description of Artificial Sequence: Synthetic oligonucleotide
  Antisense strand to SEQ ID NO: 47498
auagauccgguagaaggag

SEQ ID NO: 47580 - RNA, 19 nt, Artificial Sequence
  Description of Artificial Sequence: Synthetic oligonucleotide
  Sense strand starting at position 2475 of SEQ ID NO: 571
guggucugaccuuacuuaa

SEQ ID NO: 47581 - RNA, 19 nt, Artificial Sequence
  Description of Artificial Sequence: Synthetic oligonucleotide
  Antisense strand to SEQ ID NO: 47500
uuaaguaaggucagaccac

SEQ ID NO: 47582 - RNA, 19 nt, Artificial Sequence
  Description of Artificial Sequence: Synthetic oligonucleotide
  Sense strand starting at position 2391 of SEQ ID NO: 571
uccagaauccgcgaugacu

SEQ ID NO: 47583 - RNA, 19 nt, Artificial Sequence
  Description of Artificial Sequence: Synthetic oligonucleotide
  Antisense strand to SEQ ID NO: 47502
agucaucgcggauucugga

SEQ ID NO: 47584 - RNA, 19 nt, Artificial Sequence
  Description of Artificial Sequence: Synthetic oligonucleotide
  Sense strand starting at position 2269 of SEQ ID NO: 571
agcacuaucgccgcuaaca

SEQ ID NO: 47585 - RNA, 19 nt, Artificial Sequence
  Description of Artificial Sequence: Synthetic oligonucleotide
  Antisense strand to SEQ ID NO: 47504
uguuagcggcgauagugcu

SEQ ID NO: 47586 - RNA, 19 nt, Artificial Sequence
  Description of Artificial Sequence: Synthetic oligonucleotide
  Sense strand starting at position 1404 of SEQ ID NO: 571
uggcuuuguaucgcacgau

SEQ ID NO: 47587 - RNA, 19 nt, Artificial Sequence
  Description of Artificial Sequence: Synthetic oligonucleotide
  Antisense strand to SEQ ID NO: 47506
aucgugcgauacaaagcca

SEQ ID NO: 47588 - RNA, 19 nt, Artificial Sequence
  Description of Artificial Sequence: Synthetic oligonucleotide
  Sense strand starting at position 875 of SEQ ID NO: 571
cgagaugaugcaggaauga

SEQ ID NO: 47589 - RNA, 19 nt, Artificial Sequence
  Description of Artificial Sequence: Synthetic oligonucleotide
  Antisense strand to SEQ ID NO: 47508
ucauuccugcaucaucucg

SEQ ID NO: 47590 - RNA, 19 nt, Artificial Sequence
  Description of Artificial Sequence: Synthetic oligonucleotide
  Sense strand starting at position 854 of SEQ ID NO: 571
gagaaagaugcuggucagu

SEQ ID NO: 47591 - RNA, 19 nt, Artificial Sequence
  Description of Artificial Sequence: Synthetic oligonucleotide
  Antisense strand to SEQ ID NO: 47510
acugaccagcaucuuucuc

SEQ ID NO: 47592 - RNA, 19 nt, Artificial Sequence
  Description of Artificial Sequence: Synthetic oligonucleotide
  Sense strand starting at position 770 of SEQ ID NO: 571
gaauguugucuugaaggcu

SEQ ID NO: 47593 - RNA, 19 nt, Artificial Sequence
  Description of Artificial Sequence: Synthetic oligonucleotide
  Antisense strand to SEQ ID NO: 47512
agccuucaagacaacauuc

SEQ ID NO: 47594 - RNA, 19 nt, Artificial Sequence
  Description of Artificial Sequence: Synthetic oligonucleotide
  Sense strand starting at position 767 of SEQ ID NO: 571
ucagaauguugucuugaag

SEQ ID NO: 47595 - RNA, 19 nt, Artificial Sequence
  Description of Artificial Sequence: Synthetic oligonucleotide
  Antisense strand to SEQ ID NO: 47514
cuucaagacaacauucuga

SEQ ID NO: 47596 - RNA, 19 nt, Artificial Sequence
  Description of Artificial Sequence: Synthetic oligonucleotide
  Sense strand starting at position 686 of SEQ ID NO: 571
gcugauuccuaauucgaaa

SEQ ID NO: 47597 - RNA, 19 nt, Artificial Sequence
  Description of Artificial Sequence: Synthetic oligonucleotide
  Antisense strand to SEQ ID NO: 47516
uuucgaauuaggaaucagc

SEQ ID NO: 47598 - RNA, 19 nt, Artificial Sequence
  Description of Artificial Sequence: Synthetic oligonucleotide
  Sense strand starting at position 664 of SEQ ID NO: 571
ugaauugcucaguggaaga

SEQ ID NO: 47599 - RNA, 19 nt, Artificial Sequence
  Description of Artificial Sequence: Synthetic oligonucleotide
  Antisense strand to SEQ ID NO: 47518
ucuuccacugagcaauuca

SEQ ID NO: 47600 - RNA, 19 nt, Artificial Sequence
  Description of Artificial Sequence: Synthetic oligonucleotide
  Sense strand starting at position 663 of SEQ ID NO: 571
augaauugcucaguggaag

SEQ ID NO: 47601 - RNA, 19 nt, Artificial Sequence
  Description of Artificial Sequence: Synthetic oligonucleotide
  Antisense strand to SEQ ID NO: 47520
cuuccacugagcaauucau

SEQ ID NO: 47602 - RNA, 19 nt, Artificial Sequence
  Description of Artificial Sequence: Synthetic oligonucleotide
  Sense strand starting at position 661 of SEQ ID NO: 571
ucaugaauugcucagugga

SEQ ID NO: 47603 - RNA, 19 nt, Artificial Sequence
  Description of Artificial Sequence: Synthetic oligonucleotide
  Antisense strand to SEQ ID NO: 47522
uccacugagcaauucauga

SEQ ID NO: 47604 - RNA, 19 nt, Artificial Sequence
  Description of Artificial Sequence: Synthetic oligonucleotide
  Sense strand starting at position 537 of SEQ ID NO: 571
guacauuucuaccugguuu

SEQ ID NO: 47605 - RNA, 19 nt, Artificial Sequence
  Description of Artificial Sequence: Synthetic oligonucleotide
  Antisense strand to SEQ ID NO: 47524
aaaccagguagaaauguac

SEQ ID NO: 47606 - RNA, 19 nt, Artificial Sequence
  Description of Artificial Sequence: Synthetic oligonucleotide
  Sense strand starting at position 243 of SEQ ID NO: 571
agccaauugucagcaauuu

SEQ ID NO: 47607 - RNA, 19 nt, Artificial Sequence
  Description of Artificial Sequence: Synthetic oligonucleotide
  Antisense strand to SEQ ID NO: 47526
aaauugcugacaauuggcu

SEQ ID NO: 47608 - RNA, 19 nt, Artificial Sequence
  Description of Artificial Sequence: Synthetic oligonucleotide
  Sense strand starting at position 208 of SEQ ID NO: 571
agguguagugauuaaguga

SEQ ID NO: 47609 - RNA, 19 nt, Artificial Sequence
  Description of Artificial Sequence: Synthetic oligonucleotide
  Antisense strand to SEQ ID NO: 47528
ucacuuaaucacuacaccu

SEQ ID NO: 47610 - RNA, 19 nt, Artificial Sequence
  Description of Artificial Sequence: Synthetic oligonucleotide
  Sense strand starting at position 105 of SEQ ID NO: 571
cuguuauauguuugaaauc

SEQ ID NO: 47611 - RNA, 19 nt, Artificial Sequence
  Description of Artificial Sequence: Synthetic oligonucleotide
  Antisense strand to SEQ ID NO: 47530
gauuucaaacauauaacag

SEQ ID NO: 47612 - RNA, 19 nt, Artificial Sequence
  Description of Artificial Sequence: Synthetic oligonucleotide
  Sense strand starting at position 7 of SEQ ID NO: 572
guaucugaauccucugaau

SEQ ID NO: 47613 - RNA, 19 nt, Artificial Sequence
  Description of Artificial Sequence: Synthetic oligonucleotide
  Antisense strand to SEQ ID NO: 47532
auucagaggauucagauac

SEQ ID NO: 47614 - RNA, 19 nt, Artificial Sequence
  Description of Artificial Sequence: Synthetic oligonucleotide
  Sense strand starting at position 130 of SEQ ID NO: 572
guugcaauuccagagaaug

SEQ ID NO: 47615 - RNA, 19 nt, Artificial Sequence
  Description of Artificial Sequence: Synthetic oligonucleotide
  Antisense strand to SEQ ID NO: 47534
cauucucuggaauugcaac

SEQ ID NO: 47616 - RNA, 19 nt, Artificial Sequence
  Description of Artificial Sequence: Synthetic oligonucleotide
  Sense strand starting at position 164 of SEQ ID NO: 572
augucucagcaucagauau

SEQ ID NO: 47617 - RNA, 19 nt, Artificial Sequence
  Description of Artificial Sequence: Synthetic oligonucleotide
  Antisense strand to SEQ ID NO: 47536
auaucugaugcugagacau

SEQ ID NO: 47618 - RNA, 19 nt, Artificial Sequence
  Description of Artificial Sequence: Synthetic oligonucleotide
  Sense strand starting at position 192 of SEQ ID NO: 572
augagauucuuggcuugga

SEQ ID NO: 47619 - RNA, 19 nt, Artificial Sequence
  Description of Artificial Sequence: Synthetic oligonucleotide
  Antisense strand to SEQ ID NO: 47538
uccaagccaagaaucucau

SEQ ID NO: 47620 - RNA, 19 nt, Artificial Sequence
  Description of Artificial Sequence: Synthetic oligonucleotide
  Sense strand starting at position 541 of SEQ ID NO: 572
uuaggaguucuagggauua

SEQ ID NO: 47621 - RNA, 19 nt, Artificial Sequence
  Description of Artificial Sequence: Synthetic oligonucleotide
  Antisense strand to SEQ ID NO: 47540
uaaucccuagaacuccuaa

SEQ ID NO: 47622 - RNA, 19 nt, Artificial Sequence
  Description of Artificial Sequence: Synthetic oligonucleotide
  Sense strand starting at position 1002 of SEQ ID NO: 572
gcagaagaauuguuggaau

SEQ ID NO: 47623 - RNA, 19 nt, Artificial Sequence
  Description of Artificial Sequence: Synthetic oligonucleotide
  Antisense strand to SEQ ID NO: 47542
auuccaacaauucuucugc

SEQ ID NO: 47624 - RNA, 19 nt, Artificial Sequence
  Description of Artificial Sequence: Synthetic oligonucleotide
  Sense strand starting at position 1221 of SEQ ID NO: 572
gucaaauauaauggguaga

SEQ ID NO: 47625 - RNA, 19 nt, Artificial Sequence
  Description of Artificial Sequence: Synthetic oligonucleotide
  Antisense strand to SEQ ID NO: 47544
ucuacccauuauauuugac

SEQ ID NO: 47626 - RNA, 19 nt, Artificial Sequence
  Description of Artificial Sequence: Synthetic oligonucleotide
  Sense strand starting at position 1294 of SEQ ID NO: 572
caccgauguguuuaggaac

SEQ ID NO: 47627 - RNA, 19 nt, Artificial Sequence
  Description of Artificial Sequence: Synthetic oligonucleotide
  Antisense strand to SEQ ID NO: 47546
guuccuaaacacaucggug

SEQ ID NO: 47628 - RNA, 19 nt, Artificial Sequence
  Description of Artificial Sequence: Synthetic oligonucleotide
  Sense strand starting at position 1339 of SEQ ID NO: 572
uaccuuuacguacaggaaa

SEQ ID NO: 47629 - RNA, 19 nt, Artificial Sequence
  Description of Artificial Sequence: Synthetic oligonucleotide
  Antisense strand to SEQ ID NO: 47548
uuuccuguacguaaaggua

SEQ ID NO: 47630 - RNA, 19 nt, Artificial Sequence
  Description of Artificial Sequence: Synthetic oligonucleotide
  Sense strand starting at position 1408 of SEQ ID NO: 572
gacuaacgccacuaagagu

SEQ ID NO: 47631 - RNA, 19 nt, Artificial Sequence
  Description of Artificial Sequence: Synthetic oligonucleotide
  Antisense strand to SEQ ID NO: 47550
acucuuaguggcguuaguc

SEQ ID NO: 47632 - RNA, 19 nt, Artificial Sequence
  Description of Artificial Sequence: Synthetic oligonucleotide
  Sense strand starting at position 1600 of SEQ ID NO: 572
ucgaacugugcuucugcau

SEQ ID NO: 47633 - RNA, 19 nt, Artificial Sequence
  Description of Artificial Sequence: Synthetic oligonucleotide
  Antisense strand to SEQ ID NO: 47552
augcagaagcacaguucga

SEQ ID NO: 47634 - RNA, 19 nt, Artificial Sequence
  Description of Artificial Sequence: Synthetic oligonucleotide
  Sense strand starting at position 1601 of SEQ ID NO: 572
cgaacugugcuucugcauu

SEQ ID NO: 47635 - RNA, 19 nt, Artificial Sequence
  Description of Artificial Sequence: Synthetic oligonucleotide
  Antisense strand to SEQ ID NO: 47554
aaugcagaagcacaguucg

SEQ ID NO: 47636 - RNA, 19 nt, Artificial Sequence
  Description of Artificial Sequence: Synthetic oligonucleotide
  Sense strand starting at position 1991 of SEQ ID NO: 572
ccggaaaugcgucagagaa

SEQ ID NO: 47637 - RNA, 19 nt, Artificial Sequence
  Description of Artificial Sequence: Synthetic oligonucleotide
  Antisense strand to SEQ ID NO: 47556
uucucugacgcauuuccgg

SEQ ID NO: 47638 - RNA, 19 nt, Artificial Sequence
  Description of Artificial Sequence: Synthetic oligonucleotide
  Sense strand starting at position 2040 of SEQ ID NO: 572
gagaauucgcgagaaucuc

SEQ ID NO: 47639 - RNA, 19 nt, Artificial Sequence
  Description of Artificial Sequence: Synthetic oligonucleotide
  Antisense strand to SEQ ID NO: 47558
gagauucucgcgaauucuc

SEQ ID NO: 47640 - RNA, 19 nt, Artificial Sequence
  Description of Artificial Sequence: Synthetic oligonucleotide
  Sense strand starting at position 2307 of SEQ ID NO: 572
uucuaaagagcuuaaugua

SEQ ID NO: 47641 - RNA, 19 nt, Artificial Sequence
  Description of Artificial Sequence: Synthetic oligonucleotide
  Antisense strand to SEQ ID NO: 47560
uacauuaagcucuuuagaa

SEQ ID NO: 47642 - RNA, 19 nt, Artificial Sequence
  Description of Artificial Sequence: Synthetic oligonucleotide
  Sense strand starting at position 2331 of SEQ ID NO: 572
ugguauguccaagggagaa

SEQ ID NO: 47643 - RNA, 19 nt, Artificial Sequence
  Description of Artificial Sequence: Synthetic oligonucleotide
  Antisense strand to SEQ ID NO: 47562
uucucccuuggacauacca

SEQ ID NO: 47644 - RNA, 19 nt, Artificial Sequence
  Description of Artificial Sequence: Synthetic oligonucleotide
  Sense strand starting at position 2344 of SEQ ID NO: 572
ggagaaguuugagauauuu

SEQ ID NO: 47645 - RNA, 19 nt, Artificial Sequence
  Description of Artificial Sequence: Synthetic oligonucleotide
  Antisense strand to SEQ ID NO: 47564
aaauaucucaaacuucucc

SEQ ID NO: 47646 - RNA, 19 nt, Artificial Sequence
  Description of Artificial Sequence: Synthetic oligonucleotide
  Sense strand starting at position 2350 of SEQ ID NO: 572
guuugagauauuugugcuu

SEQ ID NO: 47647 - RNA, 19 nt, Artificial Sequence
  Description of Artificial Sequence: Synthetic oligonucleotide
  Antisense strand to SEQ ID NO: 47566
aagcacaaauaucucaaac

SEQ ID NO: 47648 - RNA, 19 nt, Artificial Sequence
  Description of Artificial Sequence: Synthetic oligonucleotide
  Sense strand starting at position 2480 of SEQ ID NO: 572
aguggaaagcuguauaauc

SEQ ID NO: 47649 - RNA, 19 nt, Artificial Sequence
  Description of Artificial Sequence: Synthetic oligonucleotide
  Antisense strand to SEQ ID NO: 47568
gauuauacagcuuuccacu

SEQ ID NO: 47650 - RNA, 19 nt, Artificial Sequence
  Description of Artificial Sequence: Synthetic oligonucleotide
  Sense strand starting at position 2482 of SEQ ID NO: 572
uggaaagcuguauaaucua

SEQ ID NO: 47651 - RNA, 19 nt, Artificial Sequence
  Description of Artificial Sequence: Synthetic oligonucleotide
  Antisense strand to SEQ ID NO: 47570
uagauuauacagcuuucca

SEQ ID NO: 47652 - RNA, 19 nt, Artificial Sequence
  Description of Artificial Sequence: Synthetic oligonucleotide
  Sense strand starting at position 2493 of SEQ ID NO: 572
auaaucuaaacgugagaug

SEQ ID NO: 47653 - RNA, 19 nt, Artificial Sequence
  Description of Artificial Sequence: Synthetic oligonucleotide
  Antisense strand to SEQ ID NO: 47572
caucucacguuuagauuau

SEQ ID NO: 47654 - RNA, 19 nt, Artificial Sequence
  Description of Artificial Sequence: Synthetic oligonucleotide
  Sense strand starting at position 2512 of SEQ ID NO: 572
guguuuagggauugggaau

SEQ ID NO: 47655 - RNA, 19 nt, Artificial Sequence
  Description of Artificial Sequence: Synthetic oligonucleotide
  Antisense strand to SEQ ID NO: 47574
auucccaaucccuaaacac

SEQ ID NO: 47656 - RNA, 19 nt, Artificial Sequence
  Description of Artificial Sequence: Synthetic oligonucleotide
  Sense strand starting at position 2513 of SEQ ID NO: 572
uguuuagggauugggaaua

SEQ ID NO: 47657 - RNA, 19 nt, Artificial Sequence
  Description of Artificial Sequence: Synthetic oligonucleotide
  Antisense strand to SEQ ID NO: 47576
uauucccaaucccuaaaca

SEQ ID NO: 47658 - RNA, 19 nt, Artificial Sequence
  Description of Artificial Sequence: Synthetic oligonucleotide
  Sense strand starting at position 2548 of SEQ ID NO: 572
cguuaaagaaauuguaaag

SEQ ID NO: 47659 - RNA, 19 nt, Artificial Sequence
  Description of Artificial Sequence: Synthetic oligonucleotide
  Antisense strand to SEQ ID NO: 47578
cuuuacaauuucuuuaacg

SEQ ID NO: 47660 - RNA, 19 nt, Artificial Sequence
  Description of Artificial Sequence: Synthetic oligonucleotide
  Sense strand starting at position 2673 of SEQ ID NO: 572
gguagagaacuauguuuga

SEQ ID NO: 47661 - RNA, 19 nt, Artificial Sequence
  Description of Artificial Sequence: Synthetic oligonucleotide
  Antisense strand to SEQ ID NO: 47580
ucaaacauaguucucuacc

SEQ ID NO: 47662 - RNA, 19 nt, Artificial Sequence
  Description of Artificial Sequence: Synthetic oligonucleotide
  Sense strand starting at position 2729 of SEQ ID NO: 572
auuauuguuggaggugaga

SEQ ID NO: 47663 - RNA, 19 nt, Artificial Sequence
  Description of Artificial Sequence: Synthetic oligonucleotide
  Antisense strand to SEQ ID NO: 47582
ucucaccuccaacaauaau

SEQ ID NO: 47664 - RNA, 19 nt, Artificial Sequence
  Description of Artificial Sequence: Synthetic oligonucleotide
  Sense strand starting at position 2731 of SEQ ID NO: 572
uauuguuggaggugagaaa

SEQ ID NO: 47665 - RNA, 19 nt, Artificial Sequence
  Description of Artificial Sequence: Synthetic oligonucleotide
  Antisense strand to SEQ ID NO: 47584
uuucucaccuccaacaaua

SEQ ID NO: 47666 - RNA, 19 nt, Artificial Sequence
  Description of Artificial Sequence: Synthetic oligonucleotide
  Sense strand starting at position 2754 of SEQ ID NO: 572
gaaugagugccucaccaaa

SEQ ID NO: 47667 - RNA, 19 nt, Artificial Sequence
  Description of Artificial Sequence: Synthetic oligonucleotide
  Antisense strand to SEQ ID NO: 47586
uuuggugaggcacucauuc

SEQ ID NO: 47668 - RNA, 19 nt, Artificial Sequence
  Description of Artificial Sequence: Synthetic oligonucleotide
  Sense strand starting at position 2914 of SEQ ID NO: 572
uuagccaauuagguauaaa

SEQ ID NO: 47669 - RNA, 19 nt, Artificial Sequence
  Description of Artificial Sequence: Synthetic oligonucleotide
  Antisense strand to SEQ ID NO: 47588
uuuauaccuaauuggcuaa

SEQ ID NO: 47670 - RNA, 19 nt, Artificial Sequence
  Description of Artificial Sequence: Synthetic oligonucleotide
  Sense strand starting at position 2917 of SEQ ID NO: 572
gccaauuagguauaaauug

SEQ ID NO: 47671 - RNA, 19 nt, Artificial Sequence
  Description of Artificial Sequence: Synthetic oligonucleotide
  Antisense strand to SEQ ID NO: 47590
caauuuauaccuaauuggc

SEQ ID NO: 47672 - RNA, 19 nt, Artificial Sequence
  Description of Artificial Sequence: Synthetic oligonucleotide
  Sense strand starting at position 3361 of SEQ ID NO: 572
aaguuugugccauaaggau

SEQ ID NO: 47673 - RNA, 19 nt, Artificial Sequence
  Description of Artificial Sequence: Synthetic oligonucleotide
  Antisense strand to SEQ ID NO: 47592
auccuuauggcacaaacuu

SEQ ID NO: 47674 - RNA, 19 nt, Artificial Sequence
  Description of Artificial Sequence: Synthetic oligonucleotide
  Sense strand starting at position 3380 of SEQ ID NO: 572
gaaggcaugcuuuagagau

SEQ ID NO: 47675 - RNA, 19 nt, Artificial Sequence
  Description of Artificial Sequence: Synthetic oligonucleotide
  Antisense strand to SEQ ID NO: 47594
aucucuaaagcaugccuuc

SEQ ID NO: 47676 - RNA, 19 nt, Artificial Sequence
  Description of Artificial Sequence: Synthetic oligonucleotide
  Sense strand starting at position 3643 of SEQ ID NO: 572
ggagaaugugaaugcaagu

SEQ ID NO: 47677 - RNA, 19 nt, Artificial Sequence
  Description of Artificial Sequence: Synthetic oligonucleotide
  Antisense strand to SEQ ID NO: 47596
acuugcauucacauucucc

SEQ ID NO: 47678 - RNA, 19 nt, Artificial Sequence
  Description of Artificial Sequence: Synthetic oligonucleotide
  Sense strand starting at position 3664 of SEQ ID NO: 572
guucaaguggagugaagaa

SEQ ID NO: 47679 - RNA, 19 nt, Artificial Sequence
  Description of Artificial Sequence: Synthetic oligonucleotide
  Antisense strand to SEQ ID NO: 47598
uucuucacuccacuugaac

SEQ ID NO: 47680 - RNA, 19 nt, Artificial Sequence
  Description of Artificial Sequence: Synthetic oligonucleotide
  Sense strand starting at position 3710 of SEQ ID NO: 572
cuguaaguaggugauacau

SEQ ID NO: 47681 - RNA, 19 nt, Artificial Sequence
  Description of Artificial Sequence: Synthetic oligonucleotide
  Antisense strand to SEQ ID NO: 47600
auguaucaccuacuuacag

SEQ ID NO: 47682 - RNA, 19 nt, Artificial Sequence
  Description of Artificial Sequence: Synthetic oligonucleotide
  Sense strand starting at position 3804 of SEQ ID NO: 572
ccaaguagcagugagacua

SEQ ID NO: 47683 - RNA, 19 nt, Artificial Sequence
  Description of Artificial Sequence: Synthetic oligonucleotide
  Antisense strand to SEQ ID NO: 47602
uagucucacugcuacuugg

SEQ ID NO: 47684 - RNA, 19 nt, Artificial Sequence
  Description of Artificial Sequence: Synthetic oligonucleotide
  Sense strand starting at position 3812 of SEQ ID NO: 572
cagugagacuauguaagaa

SEQ ID NO: 47685 - RNA, 19 nt, Artificial Sequence
  Description of Artificial Sequence: Synthetic oligonucleotide
  Antisense strand to SEQ ID NO: 47604
uucuuacauagucucacug

SEQ ID NO: 47686 - RNA, 19 nt, Artificial Sequence
  Description of Artificial Sequence: Synthetic oligonucleotide
  Sense strand starting at position 3841 of SEQ ID NO: 572
agagaaagguuagauuuga

SEQ ID NO: 47687 - RNA, 19 nt, Artificial Sequence
  Description of Artificial Sequence: Synthetic oligonucleotide
  Antisense strand to SEQ ID NO: 47606
ucaaaucuaaccuuucucu

SEQ ID NO: 47688 - RNA, 19 nt, Artificial Sequence
  Description of Artificial Sequence: Synthetic oligonucleotide
  Sense strand starting at position 3902 of SEQ ID NO: 572
guagguuguggagaucaaa

SEQ ID NO: 47689 - RNA, 19 nt, Artificial Sequence
  Description of Artificial Sequence: Synthetic oligonucleotide
  Antisense strand to SEQ ID NO: 47608
uuugaucuccacaaccuac

SEQ ID NO: 47690 - RNA, 19 nt, Artificial Sequence
  Description of Artificial Sequence: Synthetic oligonucleotide
  Sense strand starting at position 3966 of SEQ ID NO: 572
auaucugcuggauacuaau

SEQ ID NO: 47691 - RNA, 19 nt, Artificial Sequence
  Description of Artificial Sequence: Synthetic oligonucleotide
  Antisense strand to SEQ ID NO: 47610
auuaguauccagcagauau

SEQ ID NO: 47692 - RNA, 19 nt, Artificial Sequence
  Description of Artificial Sequence: Synthetic oligonucleotide
  Sense strand starting at position 222 of SEQ ID NO: 573
uacuacaaguguuugauga

SEQ ID NO: 47693 - RNA, 19 nt, Artificial Sequence
  Description of Artificial Sequence: Synthetic oligonucleotide
  Antisense strand to SEQ ID NO: 47612
ucaucaaacacuuguagua

SEQ ID NO: 47694 - RNA, 19 nt, Artificial Sequence
  Description of Artificial Sequence: Synthetic oligonucleotide
  Sense strand starting at position 494 of SEQ ID NO: 573
gcuagaacgcuggaaagaa

SEQ ID NO: 47695 - RNA, 19 nt, Artificial Sequence
  Description of Artificial Sequence: Synthetic oligonucleotide
  Antisense strand to SEQ ID NO: 47614
uucuuuccagcguucuagc

SEQ ID NO: 47696 - RNA, 19 nt, Artificial Sequence
  Description of Artificial Sequence: Synthetic oligonucleotide
  Sense strand starting at position 908 of SEQ ID NO: 573
auauuagaguccucuguca

SEQ ID NO: 47697 - RNA, 19 nt, Artificial Sequence
  Description of Artificial Sequence: Synthetic oligonucleotide
  Antisense strand to SEQ ID NO: 47616
ugacagaggacucuaauau

SEQ ID NO: 47698 - RNA, 19 nt, Artificial Sequence
  Description of Artificial Sequence: Synthetic oligonucleotide
  Sense strand starting at position 910 of SEQ ID NO: 573
auuagaguccucugucauu

SEQ ID NO: 47699 - RNA, 19 nt, Artificial Sequence
  Description of Artificial Sequence: Synthetic oligonucleotide
  Antisense strand to SEQ ID NO: 47618
aaugacagaggacucuaau

SEQ ID NO: 47700 - RNA, 19 nt, Artificial Sequence
  Description of Artificial Sequence: Synthetic oligonucleotide
  Sense strand starting at position 1068 of SEQ ID NO: 573
aaaggaugucaguguauaa

SEQ ID NO: 47701 - RNA, 19 nt, Artificial Sequence
  Description of Artificial Sequence: Synthetic oligonucleotide
  Antisense strand to SEQ ID NO: 47620
uuauacacugacauccuuu

SEQ ID NO: 47702 - RNA, 19 nt, Artificial Sequence
  Description of Artificial Sequence: Synthetic oligonucleotide
  Sense strand starting at position 1176 of SEQ ID NO: 573
ccugcaauccgucagggau

SEQ ID NO: 47703 - RNA, 19 nt, Artificial Sequence
  Description of Artificial Sequence: Synthetic oligonucleotide
  Antisense strand to SEQ ID NO: 47622
aucccugacggauugcagg

SEQ ID NO: 47704 - RNA, 19 nt, Artificial Sequence
  Description of Artificial Sequence: Synthetic oligonucleotide
  Sense strand starting at position 1318 of SEQ ID NO: 573
ucagauuucucaggaagag

SEQ ID NO: 47705 - RNA, 19 nt, Artificial Sequence
  Description of Artificial Sequence: Synthetic oligonucleotide
  Antisense strand to SEQ ID NO: 47624
cucuuccugagaaaucuga

SEQ ID NO: 47706 - RNA, 19 nt, Artificial Sequence
  Description of Artificial Sequence: Synthetic oligonucleotide
  Sense strand starting at position 1543 of SEQ ID NO: 573
uccauaaaccuccgcagaa

SEQ ID NO: 47707 - RNA, 19 nt, Artificial Sequence
  Description of Artificial Sequence: Synthetic oligonucleotide
  Antisense strand to SEQ ID NO: 47626
uucugcggagguuuaugga

SEQ ID NO: 47708 - RNA, 19 nt, Artificial Sequence
  Description of Artificial Sequence: Synthetic oligonucleotide
  Sense strand starting at position 1545 of SEQ ID NO: 573
cauaaaccuccgcagaagu

SEQ ID NO: 47709 - RNA, 19 nt, Artificial Sequence
  Description of Artificial Sequence: Synthetic oligonucleotide
  Antisense strand to SEQ ID NO: 47628
acuucugcggagguuuaug

SEQ ID NO: 47710 - RNA, 19 nt, Artificial Sequence
  Description of Artificial Sequence: Synthetic oligonucleotide
  Sense strand starting at position 2060 of SEQ ID NO: 573
ccguaauguuccuuagagg

SEQ ID NO: 47711 - RNA, 19 nt, Artificial Sequence
  Description of Artificial Sequence: Synthetic oligonucleotide
  Antisense strand to SEQ ID NO: 47630
ccucuaaggaacauuacgg

SEQ ID NO: 47712 - RNA, 19 nt, Artificial Sequence
  Description of Artificial Sequence: Synthetic oligonucleotide
  Sense strand starting at position 2109 of SEQ ID NO: 573
gcgucaaucccggcgggaa

SEQ ID NO: 47713 - RNA, 19 nt, Artificial Sequence
  Description of Artificial Sequence: Synthetic oligonucleotide
  Antisense strand to SEQ ID NO: 47632
uucccgccgggauugacgc

SEQ ID NO: 47714 - RNA, 19 nt, Artificial Sequence
  Description of Artificial Sequence: Synthetic oligonucleotide
  Sense strand starting at position 2238 of SEQ ID NO: 573
cgagaggucgcggagagaa

SEQ ID NO: 47715 - RNA, 19 nt, Artificial Sequence
  Description of Artificial Sequence: Synthetic oligonucleotide
  Antisense strand to SEQ ID NO: 47634
uucucuccgcgaccucucg

SEQ ID NO: 47716 - RNA, 19 nt, Artificial Sequence
  Description of Artificial Sequence: Synthetic oligonucleotide
  Sense strand starting at position 2394 of SEQ ID NO: 573
ccuggaugacuggguucau

SEQ ID NO: 47717 - RNA, 19 nt, Artificial Sequence
  Description of Artificial Sequence: Synthetic oligonucleotide
  Antisense strand to SEQ ID NO: 47636
augaacccagucauccagg

SEQ ID NO: 47718 - RNA, 19 nt, Artificial Sequence
  Description of Artificial Sequence: Synthetic oligonucleotide
  Sense strand starting at position 2617 of SEQ ID NO: 573
uuugaaguagaucguuacu

SEQ ID NO: 47719 - RNA, 19 nt, Artificial Sequence
  Description of Artificial Sequence: Synthetic oligonucleotide
  Antisense strand to SEQ ID NO: 47638
aguaacgaucuacuucaaa

SEQ ID NO: 47720 - RNA, 19 nt, Artificial Sequence
  Description of Artificial Sequence: Synthetic oligonucleotide
  Sense strand starting at position 2619 of SEQ ID NO: 573
ugaaguagaucguuacuau

SEQ ID NO: 47721 - RNA, 19 nt, Artificial Sequence
  Description of Artificial Sequence: Synthetic oligonucleotide
  Antisense strand to SEQ ID NO: 47640
auaguaacgaucuacuuca

SEQ ID NO: 47722 - RNA, 19 nt, Artificial Sequence
  Description of Artificial Sequence: Synthetic oligonucleotide
  Sense strand starting at position 2620 of SEQ ID NO: 573
gaaguagaucguuacuauc

SEQ ID NO: 47723 - RNA, 19 nt, Artificial Sequence
  Description of Artificial Sequence: Synthetic oligonucleotide
  Antisense strand to SEQ ID NO: 47642
gauaguaacgaucuacuuc

SEQ ID NO: 47724 - RNA, 19 nt, Artificial Sequence
  Description of Artificial Sequence: Synthetic oligonucleotide
  Sense strand starting at position 2908 of SEQ ID NO: 573
uaaauaagcucuguguuga

SEQ ID NO: 47725 - RNA, 19 nt, Artificial Sequence
  Description of Artificial Sequence: Synthetic oligonucleotide
  Antisense strand to SEQ ID NO: 47644
ucaacacagagcuuauuua

SEQ ID NO: 47726 - RNA, 19 nt, Artificial Sequence
  Description of Artificial Sequence: Synthetic oligonucleotide
  Sense strand starting at position 2909 of SEQ ID NO: 573
aaauaagcucuguguugac

SEQ ID NO: 47727 - RNA, 19 nt, Artificial Sequence
  Description of Artificial Sequence: Synthetic oligonucleotide
  Antisense strand to SEQ ID NO: 47646
gucaacacagagcuuauuu

SEQ ID NO: 47728 - RNA, 19 nt, Artificial Sequence
  Description of Artificial Sequence: Synthetic oligonucleotide
  Sense strand starting at position 2916 of SEQ ID NO: 573
cucuguguugaccacugaa

SEQ ID NO: 47729 - RNA, 19 nt, Artificial Sequence
  Description of Artificial Sequence: Synthetic oligonucleotide
  Antisense strand to SEQ ID NO: 47648
uucaguggucaacacagag

SEQ ID NO: 47730 - RNA, 19 nt, Artificial Sequence
  Description of Artificial Sequence: Synthetic oligonucleotide
  Sense strand starting at position 2919 of SEQ ID NO: 573
uguguugaccacugaaacu

SEQ ID NO: 47731 - RNA, 19 nt, Artificial Sequence
  Description of Artificial Sequence: Synthetic oligonucleotide
  Antisense strand to SEQ ID NO: 47650
aguuucaguggucaacaca

SEQ ID NO: 47732 - RNA, 19 nt, Artificial Sequence
  Description of Artificial Sequence: Synthetic oligonucleotide
  Sense strand starting at position 2998 of SEQ ID NO: 573
guuguaaucccauaauguc

SEQ ID NO: 47733 - RNA, 19 nt, Artificial Sequence
  Description of Artificial Sequence: Synthetic oligonucleotide
  Antisense strand to SEQ ID NO: 47652
gacauuaugggauuacaac

SEQ ID NO: 47734 - RNA, 19 nt, Artificial Sequence
  Description of Artificial Sequence: Synthetic oligonucleotide
  Sense strand starting at position 3093 of SEQ ID NO: 573
guaguaccuuuccucuuaa

SEQ ID NO: 47735 - RNA, 19 nt, Artificial Sequence
  Description of Artificial Sequence: Synthetic oligonucleotide
  Antisense strand to SEQ ID NO: 47654
uuaagaggaaagguacuac

SEQ ID NO: 47736 - RNA, 19 nt, Artificial Sequence
  Description of Artificial Sequence: Synthetic oligonucleotide
  Sense strand starting at position 3153 of SEQ ID NO: 573
auuauauucucaguauguc

SEQ ID NO: 47737 - RNA, 19 nt, Artificial Sequence
  Description of Artificial Sequence: Synthetic oligonucleotide
  Antisense strand to SEQ ID NO: 47656
gacauacugagaauauaau

SEQ ID NO: 47738 - RNA, 19 nt, Artificial Sequence
  Description of Artificial Sequence: Synthetic oligonucleotide
  Sense strand starting at position 3162 of SEQ ID NO: 573
ucaguauguccugguggaa

SEQ ID NO: 47739 - RNA, 19 nt, Artificial Sequence
  Description of Artificial Sequence: Synthetic oligonucleotide
  Antisense strand to SEQ ID NO: 47658
uuccaccaggacauacuga

SEQ ID NO: 47740 - RNA, 19 nt, Artificial Sequence
  Description of Artificial Sequence: Synthetic oligonucleotide
  Sense strand starting at position 3165 of SEQ ID NO: 573
guauguccugguggaauau

SEQ ID NO: 47741 - RNA, 19 nt, Artificial Sequence
  Description of Artificial Sequence: Synthetic oligonucleotide
  Antisense strand to SEQ ID NO: 47660
auauuccaccaggacauac

SEQ ID NO: 47742 - RNA, 19 nt, Artificial Sequence
  Description of Artificial Sequence: Synthetic oligonucleotide
  Sense strand starting at position 3178 of SEQ ID NO: 573
gaauauguuggauaccugu

SEQ ID NO: 47743 - RNA, 19 nt, Artificial Sequence
  Description of Artificial Sequence: Synthetic oligonucleotide
  Antisense strand to SEQ ID NO: 47662
acagguauccaacauauuc

SEQ ID NO: 47744 - RNA, 19 nt, Artificial Sequence
  Description of Artificial Sequence: Synthetic oligonucleotide
  Sense strand starting at position 3317 of SEQ ID NO: 573
gcuguaacuucuguggaag

SEQ ID NO: 47745 - RNA, 19 nt, Artificial Sequence
  Description of Artificial Sequence: Synthetic oligonucleotide
  Antisense strand to SEQ ID NO: 47664
cuuccacagaaguuacagc

SEQ ID NO: 47746 - RNA, 19 nt, Artificial Sequence
  Description of Artificial Sequence: Synthetic oligonucleotide
  Sense strand starting at position 3318 of SEQ ID NO: 573
cuguaacuucuguggaaga

SEQ ID NO: 47747 - RNA, 19 nt, Artificial Sequence
  Description of Artificial Sequence: Synthetic oligonucleotide
  Antisense strand to SEQ ID NO: 47666
ucuuccacagaaguuacag

SEQ ID NO: 47748 - RNA, 19 nt, Artificial Sequence
  Description of Artificial Sequence: Synthetic oligonucleotide
  Sense strand starting at position 3320 of SEQ ID NO: 573
guaacuucuguggaagacu

SEQ ID NO: 47749 - RNA, 19 nt, Artificial Sequence
  Description of Artificial Sequence: Synthetic oligonucleotide
  Antisense strand to SEQ ID NO: 47668
agucuuccacagaaguuac

SEQ ID NO: 47750 - RNA, 19 nt, Artificial Sequence
  Description of Artificial Sequence: Synthetic oligonucleotide
  Sense strand starting at position 3356 of SEQ ID NO: 573
ugcucauugcaguaacaca

SEQ ID NO: 47751 - RNA, 19 nt, Artificial Sequence
  Description of Artificial Sequence: Synthetic oligonucleotide
  Antisense strand to SEQ ID NO: 47670
uguguuacugcaaugagca

SEQ ID NO: 47752 - RNA, 19 nt, Artificial Sequence
  Description of Artificial Sequence: Synthetic oligonucleotide
  Sense strand starting at position 3556 of SEQ ID NO: 573
ucagaugcuuguuuacuaa

SEQ ID NO: 47753 - RNA, 19 nt, Artificial Sequence
  Description of Artificial Sequence: Synthetic oligonucleotide
  Antisense strand to SEQ ID NO: 47672
uuaguaaacaagcaucuga

SEQ ID NO: 47754 - RNA, 19 nt, Artificial Sequence
  Description of Artificial Sequence: Synthetic oligonucleotide
  Sense strand starting at position 3608 of SEQ ID NO: 573
uuuggcuucuaccuaagua

SEQ ID NO: 47755 - RNA, 19 nt, Artificial Sequence
  Description of Artificial Sequence: Synthetic oligonucleotide
  Antisense strand to SEQ ID NO: 47674
uacuuagguagaagccaaa

SEQ ID NO: 47756 - RNA, 19 nt, Artificial Sequence
  Description of Artificial Sequence: Synthetic oligonucleotide
  Sense strand starting at position 3612 of SEQ ID NO: 573
gcuucuaccuaaguauaga

SEQ ID NO: 47757 - RNA, 19 nt, Artificial Sequence
  Description of Artificial Sequence: Synthetic oligonucleotide
  Antisense strand to SEQ ID NO: 47676
ucuauacuuagguagaagc

SEQ ID NO: 47758 - RNA, 19 nt, Artificial Sequence
  Description of Artificial Sequence: Synthetic oligonucleotide
  Sense strand starting at position 3678 of SEQ ID NO: 573
cugcucucagaauguuuga

SEQ ID NO: 47759 - RNA, 19 nt, Artificial Sequence
  Description of Artificial Sequence: Synthetic oligonucleotide
  Antisense strand to SEQ ID NO: 47678
ucaaacauucugagagcag

SEQ ID NO: 47760 - RNA, 19 nt, Artificial Sequence
  Description of Artificial Sequence: Synthetic oligonucleotide
  Sense strand starting at position 3685 of SEQ ID NO: 573
cagaauguuugaguccauu

SEQ ID NO: 47761 - RNA, 19 nt, Artificial Sequence
  Description of Artificial Sequence: Synthetic oligonucleotide
  Antisense strand to SEQ ID NO: 47680
aauggacucaaacauucug

SEQ ID NO: 47762 - RNA, 19 nt, Artificial Sequence
  Description of Artificial Sequence: Synthetic oligonucleotide
  Sense strand starting at position 3691 of SEQ ID NO: 573
guuugaguccauugggaaa

SEQ ID NO: 47763 - RNA, 19 nt, Artificial Sequence
  Description of Artificial Sequence: Synthetic oligonucleotide
  Antisense strand to SEQ ID NO: 47682
uuucccaauggacucaaac

SEQ ID NO: 47764 - RNA, 19 nt, Artificial Sequence
  Description of Artificial Sequence: Synthetic oligonucleotide
  Sense strand starting at position 3733 of SEQ ID NO: 573
guaagucaaggcuaucacu

SEQ ID NO: 47765 - RNA, 19 nt, Artificial Sequence
  Description of Artificial Sequence: Synthetic oligonucleotide
  Antisense strand to SEQ ID NO: 47684
agugauagccuugacuuac

SEQ ID NO: 47766 - RNA, 19 nt, Artificial Sequence
  Description of Artificial Sequence: Synthetic oligonucleotide
  Sense strand starting at position 3935 of SEQ ID NO: 573
gguucaugguaaguacgau

SEQ ID NO: 47767 - RNA, 19 nt, Artificial Sequence
  Description of Artificial Sequence: Synthetic oligonucleotide
  Antisense strand to SEQ ID NO: 47686
aucguacuuaccaugaacc

SEQ ID NO: 47768 - RNA, 19 nt, Artificial Sequence
  Description of Artificial Sequence: Synthetic oligonucleotide
  Sense strand starting at position 3954 of SEQ ID NO: 573
gugugucagcuguuguuau

SEQ ID NO: 47769 - RNA, 19 nt, Artificial Sequence
  Description of Artificial Sequence: Synthetic oligonucleotide
  Antisense strand to SEQ ID NO: 47688
auaacaacagcugacacac

SEQ ID NO: 47770 - RNA, 19 nt, Artificial Sequence
  Description of Artificial Sequence: Synthetic oligonucleotide
  Sense strand starting at position 3956 of SEQ ID NO: 573
gugucagcuguuguuauua

SEQ ID NO: 47771 - RNA, 19 nt, Artificial Sequence
  Description of Artificial Sequence: Synthetic oligonucleotide
  Antisense strand to SEQ ID NO: 47690
uaauaacaacagcugacac

SEQ ID NO: 47772 - RNA, 19 nt, Artificial Sequence
  Description of Artificial Sequence: Synthetic oligonucleotide
  Sense strand starting at position 3928 of SEQ ID NO: 574
ggcgguguugauuaaauaa

SEQ ID NO: 47773 - RNA, 19 nt, Artificial Sequence
  Description of Artificial Sequence: Synthetic oligonucleotide
  Antisense strand to SEQ ID NO: 47692
uuauuuaaucaacaccgcc

SEQ ID NO: 47774 - RNA, 19 nt, Artificial Sequence
  Description of Artificial Sequence: Synthetic oligonucleotide
  Sense strand starting at position 3858 of SEQ ID NO: 574
guagcuauggacuagauca

SEQ ID NO: 47775 - RNA, 19 nt, Artificial Sequence
  Description of Artificial Sequence: Synthetic oligonucleotide
  Antisense strand to SEQ ID NO: 47694
ugaucuaguccauagcuac

SEQ ID NO: 47776 - RNA, 19 nt, Artificial Sequence
  Description of Artificial Sequence: Synthetic oligonucleotide
  Sense strand starting at position 3842 of SEQ ID NO: 574
ccuaccauucuccauggua

SEQ ID NO: 47777 - RNA, 19 nt, Artificial Sequence
  Description of Artificial Sequence: Synthetic oligonucleotide
  Antisense strand to SEQ ID NO: 47696
uaccauggagaaugguagg

SEQ ID NO: 47778 - RNA, 19 nt, Artificial Sequence
  Description of Artificial Sequence: Synthetic oligonucleotide
  Sense strand starting at position 3671 of SEQ ID NO: 574
guuguauaacuccacacca

SEQ ID NO: 47779 - RNA, 19 nt, Artificial Sequence
  Description of Artificial Sequence: Synthetic oligonucleotide
  Antisense strand to SEQ ID NO: 47698
ugguguggaguuauacaac

SEQ ID NO: 47780 - RNA, 19 nt, Artificial Sequence
  Description of Artificial Sequence: Synthetic oligonucleotide
  Sense strand starting at position 3464 of SEQ ID NO: 574
cugauugaucccugaccau

SEQ ID NO: 47781 - RNA, 19 nt, Artificial Sequence
  Description of Artificial Sequence: Synthetic oligonucleotide
  Antisense strand to SEQ ID NO: 47700
auggucagggaucaaucag

SEQ ID NO: 47782 - RNA, 19 nt, Artificial Sequence
  Description of Artificial Sequence: Synthetic oligonucleotide
  Sense strand starting at position 3463 of SEQ ID NO: 574
gcugauugaucccugacca

SEQ ID NO: 47783 - RNA, 19 nt, Artificial Sequence
  Description of Artificial Sequence: Synthetic oligonucleotide
  Antisense strand to SEQ ID NO: 47702
uggucagggaucaaucagc

SEQ ID NO: 47784 - RNA, 19 nt, Artificial Sequence
  Description of Artificial Sequence: Synthetic oligonucleotide
  Sense strand starting at position 3460 of SEQ ID NO: 574
ggugcugauugaucccuga

SEQ ID NO: 47785 - RNA, 19 nt, Artificial Sequence
  Description of Artificial Sequence: Synthetic oligonucleotide
  Antisense strand to SEQ ID NO: 47704
ucagggaucaaucagcacc

SEQ ID NO: 47786 - RNA, 19 nt, Artificial Sequence
  Description of Artificial Sequence: Synthetic oligonucleotide
  Sense strand starting at position 3290 of SEQ ID NO: 574
uugaaagcucaaggguaaa

SEQ ID NO: 47787 - RNA, 19 nt, Artificial Sequence
  Description of Artificial Sequence: Synthetic oligonucleotide
  Antisense strand to SEQ ID NO: 47706
uuuacccuugagcuuucaa

SEQ ID NO: 47788 - RNA, 19 nt, Artificial Sequence
  Description of Artificial Sequence: Synthetic oligonucleotide
  Sense strand starting at position 3243 of SEQ ID NO: 574
gugggaugaaugugggagu

SEQ ID NO: 47789 - RNA, 19 nt, Artificial Sequence
  Description of Artificial Sequence: Synthetic oligonucleotide
  Antisense strand to SEQ ID NO: 47708
acucccacauucaucccac

SEQ ID NO: 47790 - RNA, 19 nt, Artificial Sequence
  Description of Artificial Sequence: Synthetic oligonucleotide
  Sense strand starting at position 3210 of SEQ ID NO: 574
gcaucaaacccggaucuau

SEQ ID NO: 47791 - RNA, 19 nt, Artificial Sequence
  Description of Artificial Sequence: Synthetic oligonucleotide
  Antisense strand to SEQ ID NO: 47710
auagauccggguuugaugc

SEQ ID NO: 47792 - RNA, 19 nt, Artificial Sequence
  Description of Artificial Sequence: Synthetic oligonucleotide
  Sense strand starting at position 3187 of SEQ ID NO: 574
acacuaauucuguggcaca

SEQ ID NO: 47793 - RNA, 19 nt, Artificial Sequence
  Description of Artificial Sequence: Synthetic oligonucleotide
  Antisense strand to SEQ ID NO: 47712
ugugccacagaauuagugu

SEQ ID NO: 47794 - RNA, 19 nt, Artificial Sequence
  Description of Artificial Sequence: Synthetic oligonucleotide
  Sense strand starting at position 3167 of SEQ ID NO: 574
gagacuacuuguguaauaa

SEQ ID NO: 47795 - RNA, 19 nt, Artificial Sequence
  Description of Artificial Sequence: Synthetic oligonucleotide
  Antisense strand to SEQ ID NO: 47714
uuauuacacaaguagucuc

SEQ ID NO: 47796 - RNA, 19 nt, Artificial Sequence
  Description of Artificial Sequence: Synthetic oligonucleotide
  Sense strand starting at position 3163 of SEQ ID NO: 574
caaagagacuacuugugua

SEQ ID NO: 47797 - RNA, 19 nt, Artificial Sequence
  Description of Artificial Sequence: Synthetic oligonucleotide
  Antisense strand to SEQ ID NO: 47716
uacacaaguagucucuuug

SEQ ID NO: 47798 - RNA, 19 nt, Artificial Sequence
  Description of Artificial Sequence: Synthetic oligonucleotide
  Sense strand starting at position 3135 of SEQ ID NO: 574
accucugucagauacggaa

SEQ ID NO: 47799 - RNA, 19 nt, Artificial Sequence
  Description of Artificial Sequence: Synthetic oligonucleotide
  Antisense strand to SEQ ID NO: 47718
uuccguaucugacagaggu

SEQ ID NO: 47800 - RNA, 19 nt, Artificial Sequence
  Description of Artificial Sequence: Synthetic oligonucleotide
  Sense strand starting at position 3129 of SEQ ID NO: 574
uuacauaccucugucagau

SEQ ID NO: 47801 - RNA, 19 nt, Artificial Sequence
  Description of Artificial Sequence: Synthetic oligonucleotide
  Antisense strand to SEQ ID NO: 47720
aucugacagagguauguaa

SEQ ID NO: 47802 - RNA, 19 nt, Artificial Sequence
  Description of Artificial Sequence: Synthetic oligonucleotide
  Sense strand starting at position 3128 of SEQ ID NO: 574
cuuacauaccucugucaga

SEQ ID NO: 47803 - RNA, 19 nt, Artificial Sequence
  Description of Artificial Sequence: Synthetic oligonucleotide
  Antisense strand to SEQ ID NO: 47722
ucugacagagguauguaag

SEQ ID NO: 47804 - RNA, 19 nt, Artificial Sequence
  Description of Artificial Sequence: Synthetic oligonucleotide
  Sense strand starting at position 2907 of SEQ ID NO: 574
aagaauuaucccgaguggu

SEQ ID NO: 47805 - RNA, 19 nt, Artificial Sequence
  Description of Artificial Sequence: Synthetic oligonucleotide
  Antisense strand to SEQ ID NO: 47724
accacucgggauaauucuu

SEQ ID NO: 47806 - RNA, 19 nt, Artificial Sequence
  Description of Artificial Sequence: Synthetic oligonucleotide
  Sense strand starting at position 2903 of SEQ ID NO: 574
gaguaagaauuaucccgag

SEQ ID NO: 47807 - RNA, 19 nt, Artificial Sequence
  Description of Artificial Sequence: Synthetic oligonucleotide
  Antisense strand to SEQ ID NO: 47726
cucgggauaauucuuacuc

SEQ ID NO: 47808 - RNA, 19 nt, Artificial Sequence
  Description of Artificial Sequence: Synthetic oligonucleotide
  Sense strand starting at position 2843 of SEQ ID NO: 574
gccaaauacugagcacuua

SEQ ID NO: 47809 - RNA, 19 nt, Artificial Sequence
  Description of Artificial Sequence: Synthetic oligonucleotide
  Antisense strand to SEQ ID NO: 47728
uaagugcucaguauuuggc

SEQ ID NO: 47810 - RNA, 19 nt, Artificial Sequence
  Description of Artificial Sequence: Synthetic oligonucleotide
  Sense strand starting at position 2805 of SEQ ID NO: 574
ggauaucgcaugcagugaa

SEQ ID NO: 47811 - RNA, 19 nt, Artificial Sequence
  Description of Artificial Sequence: Synthetic oligonucleotide
  Antisense strand to SEQ ID NO: 47730
uucacugcaugcgauaucc

SEQ ID NO: 47812 - RNA, 19 nt, Artificial Sequence
  Description of Artificial Sequence: Synthetic oligonucleotide
  Sense strand starting at position 2796 of SEQ ID NO: 574
uaguucuuuggauaucgca

SEQ ID NO: 47813 - RNA, 19 nt, Artificial Sequence
  Description of Artificial Sequence: Synthetic oligonucleotide
  Antisense strand to SEQ ID NO: 47732
ugcgauauccaaagaacua

SEQ ID NO: 47814 - RNA, 19 nt, Artificial Sequence
  Description of Artificial Sequence: Synthetic oligonucleotide
  Sense strand starting at position 2792 of SEQ ID NO: 574
aaaguaguucuuuggauau

SEQ ID NO: 47815 - RNA, 19 nt, Artificial Sequence
  Description of Artificial Sequence: Synthetic oligonucleotide
  Antisense strand to SEQ ID NO: 47734
auauccaaagaacuacuuu

SEQ ID NO: 47816 - RNA, 19 nt, Artificial Sequence
  Description of Artificial Sequence: Synthetic oligonucleotide
  Sense strand starting at position 2791 of SEQ ID NO: 574
caaaguaguucuuuggaua

SEQ ID NO: 47817 - RNA, 19 nt, Artificial Sequence
  Description of Artificial Sequence: Synthetic oligonucleotide
  Antisense strand to SEQ ID NO: 47736
uauccaaagaacuacuuug

SEQ ID NO: 47818 - RNA, 19 nt, Artificial Sequence
  Description of Artificial Sequence: Synthetic oligonucleotide
  Sense strand starting at position 2750 of SEQ ID NO: 574
gauuguugugagggucuaa

SEQ ID NO: 47819 - RNA, 19 nt, Artificial Sequence
  Description of Artificial Sequence: Synthetic oligonucleotide
  Antisense strand to SEQ ID NO: 47738
uuagacccucacaacaauc

SEQ ID NO: 47820 - RNA, 19 nt, Artificial Sequence
  Description of Artificial Sequence: Synthetic oligonucleotide
  Sense strand starting at position 2667 of SEQ ID NO: 574
gcuacugaguaucuuagga

SEQ ID NO: 47821 - RNA, 19 nt, Artificial Sequence
  Description of Artificial Sequence: Synthetic oligonucleotide
  Antisense strand to SEQ ID NO: 47740
uccuaagauacucaguagc

SEQ ID NO: 47822 - RNA, 19 nt, Artificial Sequence
  Description of Artificial Sequence: Synthetic oligonucleotide
  Sense strand starting at position 2664 of SEQ ID NO: 574
cuugcuacugaguaucuua

SEQ ID NO: 47823 - RNA, 19 nt, Artificial Sequence
  Description of Artificial Sequence: Synthetic oligonucleotide
  Antisense strand to SEQ ID NO: 47742
uaagauacucaguagcaag

SEQ ID NO: 47824 - RNA, 19 nt, Artificial Sequence
  Description of Artificial Sequence: Synthetic oligonucleotide
  Sense strand starting at position 2598 of SEQ ID NO: 574
ccggcuacacugcauaauu

SEQ ID NO: 47825 - RNA, 19 nt, Artificial Sequence
  Description of Artificial Sequence: Synthetic oligonucleotide
  Antisense strand to SEQ ID NO: 47744
aauuaugcaguguagccgg

SEQ ID NO: 47826 - RNA, 19 nt, Artificial Sequence
  Description of Artificial Sequence: Synthetic oligonucleotide
  Sense strand starting at position 2285 of SEQ ID NO: 574
gcaguaucacugcauaauu

SEQ ID NO: 47827 - RNA, 19 nt, Artificial Sequence
  Description of Artificial Sequence: Synthetic oligonucleotide
  Antisense strand to SEQ ID NO: 47746
aauuaugcagugauacugc

SEQ ID NO: 47828 - RNA, 19 nt, Artificial Sequence
  Description of Artificial Sequence: Synthetic oligonucleotide
  Sense strand starting at position 1392 of SEQ ID NO: 574
agcauaaaccauggaguca

SEQ ID NO: 47829 - RNA, 19 nt, Artificial Sequence
  Description of Artificial Sequence: Synthetic oligonucleotide
  Antisense strand to SEQ ID NO: 47748
ugacuccaugguuuaugcu

SEQ ID NO: 47830 - RNA, 19 nt, Artificial Sequence
  Description of Artificial Sequence: Synthetic oligonucleotide
  Sense strand starting at position 1194 of SEQ ID NO: 574
gaaggcaaucacugucaua

SEQ ID NO: 47831 - RNA, 19 nt, Artificial Sequence
  Description of Artificial Sequence: Synthetic oligonucleotide
  Antisense strand to SEQ ID NO: 47750
uaugacagugauugccuuc

SEQ ID NO: 47832 - RNA, 19 nt, Artificial Sequence
  Description of Artificial Sequence: Synthetic oligonucleotide
  Sense strand starting at position 1082 of SEQ ID NO: 574
aaauguggucagugaauaa

SEQ ID NO: 47833 - RNA, 19 nt, Artificial Sequence
  Description of Artificial Sequence: Synthetic oligonucleotide
  Antisense strand to SEQ ID NO: 47752
uuauucacugaccacauuu

SEQ ID NO: 47834 - RNA, 19 nt, Artificial Sequence
  Description of Artificial Sequence: Synthetic oligonucleotide
  Sense strand starting at position 1078 of SEQ ID NO: 574
ugggaaauguggucaguga

SEQ ID NO: 47835 - RNA, 19 nt, Artificial Sequence
  Description of Artificial Sequence: Synthetic oligonucleotide
  Antisense strand to SEQ ID NO: 47754
ucacugaccacauuuccca

SEQ ID NO: 47836 - RNA, 19 nt, Artificial Sequence
  Description of Artificial Sequence: Synthetic oligonucleotide
  Sense strand starting at position 1068 of SEQ ID NO: 574
cugucaucacugggaaaug

SEQ ID NO: 47837 - RNA, 19 nt, Artificial Sequence
  Description of Artificial Sequence: Synthetic oligonucleotide
  Antisense strand to SEQ ID NO: 47756
cauuucccagugaugacag

SEQ ID NO: 47838 - RNA, 19 nt, Artificial Sequence
  Description of Artificial Sequence: Synthetic oligonucleotide
  Sense strand starting at position 1067 of SEQ ID NO: 574
gcugucaucacugggaaau

SEQ ID NO: 47839 - RNA, 19 nt, Artificial Sequence
  Description of Artificial Sequence: Synthetic oligonucleotide
  Antisense strand to SEQ ID NO: 47758
auuucccagugaugacagc

SEQ ID NO: 47840 - RNA, 19 nt, Artificial Sequence
  Description of Artificial Sequence: Synthetic oligonucleotide
  Sense strand starting at position 1066 of SEQ ID NO: 574
ugcugucaucacugggaaa

SEQ ID NO: 47841 - RNA, 19 nt, Artificial Sequence
  Description of Artificial Sequence: Synthetic oligonucleotide
  Antisense strand to SEQ ID NO: 47760
uuucccagugaugacagca

SEQ ID NO: 47842 - RNA, 19 nt, Artificial Sequence
  Description of Artificial Sequence: Synthetic oligonucleotide
  Sense strand starting at position 705 of SEQ ID NO: 574
aguucuauggaugguauau

SEQ ID NO: 47843 - RNA, 19 nt, Artificial Sequence
  Description of Artificial Sequence: Synthetic oligonucleotide
  Antisense strand to SEQ ID NO: 47762
auauaccauccauagaacu

SEQ ID NO: 47844 - RNA, 19 nt, Artificial Sequence
  Description of Artificial Sequence: Synthetic oligonucleotide
  Sense strand starting at position 704 of SEQ ID NO: 574
gaguucuauggaugguaua

SEQ ID NO: 47845 - RNA, 19 nt, Artificial Sequence
  Description of Artificial Sequence: Synthetic oligonucleotide
  Antisense strand to SEQ ID NO: 47764
uauaccauccauagaacuc

SEQ ID NO: 47846 - RNA, 19 nt, Artificial Sequence
  Description of Artificial Sequence: Synthetic oligonucleotide
  Sense strand starting at position 700 of SEQ ID NO: 574
ucaagaguucuauggaugg

SEQ ID NO: 47847 - RNA, 19 nt, Artificial Sequence
  Description of Artificial Sequence: Synthetic oligonucleotide
  Antisense strand to SEQ ID NO: 47766
ccauccauagaacucuuga

SEQ ID NO: 47848 - RNA, 19 nt, Artificial Sequence
  Description of Artificial Sequence: Synthetic oligonucleotide
  Sense strand starting at position 692 of SEQ ID NO: 574
agcccauaucaagaguucu

SEQ ID NO: 47849 - RNA, 19 nt, Artificial Sequence
  Description of Artificial Sequence: Synthetic oligonucleotide
  Antisense strand to SEQ ID NO: 47768
agaacucuugauaugggcu

SEQ ID NO: 47850 - RNA, 19 nt, Artificial Sequence
  Description of Artificial Sequence: Synthetic oligonucleotide
  Sense strand starting at position 619 of SEQ ID NO: 574
gagguuggagccuggcaaa

SEQ ID NO: 47851 - RNA, 19 nt, Artificial Sequence
  Description of Artificial Sequence: Synthetic oligonucleotide
  Antisense strand to SEQ ID NO: 47770
uuugccaggcuccaaccuc

SEQ ID NO: 47852 - RNA, 19 nt, Artificial Sequence
  Description of Artificial Sequence: Synthetic oligonucleotide
  Sense strand starting at position 152 of SEQ ID NO: 575
uuuguuauuugucugucuu

SEQ ID NO: 47853 - RNA, 19 nt, Artificial Sequence
  Description of Artificial Sequence: Synthetic oligonucleotide
  Antisense strand to SEQ ID NO: 47772
aagacagacaaauaacaaa

SEQ ID NO: 47854 - RNA, 19 nt, Artificial Sequence
  Description of Artificial Sequence: Synthetic oligonucleotide
  Sense strand starting at position 153 of SEQ ID NO: 575
uuguuauuugucugucuuu

SEQ ID NO: 47855 - RNA, 19 nt, Artificial Sequence
  Description of Artificial Sequence: Synthetic oligonucleotide
  Antisense strand to SEQ ID NO: 47774
aaagacagacaaauaacaa

SEQ ID NO: 47856 - RNA, 19 nt, Artificial Sequence
  Description of Artificial Sequence: Synthetic oligonucleotide
  Sense strand starting at position 210 of SEQ ID NO: 575
acugauuagagacgcacau

SEQ ID NO: 47857 - RNA, 19 nt, Artificial Sequence
  Description of Artificial Sequence: Synthetic oligonucleotide
  Antisense strand to SEQ ID NO: 47776
augugcgucucuaaucagu

SEQ ID NO: 47858 - RNA, 19 nt, Artificial Sequence
  Description of Artificial Sequence: Synthetic oligonucleotide
  Sense strand starting at position 626 of SEQ ID NO: 575
auaucaaaguuggucuuua

SEQ ID NO: 47859 - RNA, 19 nt, Artificial Sequence
  Description of Artificial Sequence: Synthetic oligonucleotide
  Antisense strand to SEQ ID NO: 47778
uaaagaccaacuuugauau

SEQ ID NO: 47860 - RNA, 19 nt, Artificial Sequence
  Description of Artificial Sequence: Synthetic oligonucleotide
  Sense strand starting at position 813 of SEQ ID NO: 575
uuuacauucuacuuagagu

SEQ ID NO: 47861 - RNA, 19 nt, Artificial Sequence
  Description of Artificial Sequence: Synthetic oligonucleotide
  Antisense strand to SEQ ID NO: 47780
acucuaaguagaauguaaa

SEQ ID NO: 47862 - RNA, 19 nt, Artificial Sequence
  Description of Artificial Sequence: Synthetic oligonucleotide
  Sense strand starting at position 821 of SEQ ID NO: 575
cuacuuagaguuugacaau

SEQ ID NO: 47863 - RNA, 19 nt, Artificial Sequence
  Description of Artificial Sequence: Synthetic oligonucleotide
  Antisense strand to SEQ ID NO: 47782
auugucaaacucuaaguag

SEQ ID NO: 47864 - RNA, 19 nt, Artificial Sequence
  Description of Artificial Sequence: Synthetic oligonucleotide
  Sense strand starting at position 827 of SEQ ID NO: 575
agaguuugacaaugaaccu

SEQ ID NO: 47865 - RNA, 19 nt, Artificial Sequence
  Description of Artificial Sequence: Synthetic oligonucleotide
  Antisense strand to SEQ ID NO: 47784
agguucauugucaaacucu

SEQ ID NO: 47866 - RNA, 19 nt, Artificial Sequence
  Description of Artificial Sequence: Synthetic oligonucleotide
  Sense strand starting at position 926 of SEQ ID NO: 575
uuacuuaguguauacucau

SEQ ID NO: 47867 - RNA, 19 nt, Artificial Sequence
  Description of Artificial Sequence: Synthetic oligonucleotide
  Antisense strand to SEQ ID NO: 47786
augaguauacacuaaguaa

SEQ ID NO: 47868 - RNA, 19 nt, Artificial Sequence
  Description of Artificial Sequence: Synthetic oligonucleotide
  Sense strand starting at position 937 of SEQ ID NO: 575
auacucauguaaguguaua

SEQ ID NO: 47869 - RNA, 19 nt, Artificial Sequence
  Description of Artificial Sequence: Synthetic oligonucleotide
  Antisense strand to SEQ ID NO: 47788
uauacacuuacaugaguau

SEQ ID NO: 47870 - RNA, 19 nt, Artificial Sequence
  Description of Artificial Sequence: Synthetic oligonucleotide
  Sense strand starting at position 945 of SEQ ID NO: 575
guaaguguauacucauaca

SEQ ID NO: 47871 - RNA, 19 nt, Artificial Sequence
  Description of Artificial Sequence: Synthetic oligonucleotide
  Antisense strand to SEQ ID NO: 47790
uguaugaguauacacuuac

SEQ ID NO: 47872 - RNA, 19 nt, Artificial Sequence
  Description of Artificial Sequence: Synthetic oligonucleotide
  Sense strand starting at position 977 of SEQ ID NO: 575
aguccaggcucacucaaua

SEQ ID NO: 47873 - RNA, 19 nt, Artificial Sequence
  Description of Artificial Sequence: Synthetic oligonucleotide
  Antisense strand to SEQ ID NO: 47792
uauugagugagccuggacu

SEQ ID NO: 47874 - RNA, 19 nt, Artificial Sequence
  Description of Artificial Sequence: Synthetic oligonucleotide
  Sense strand starting at position 999 of SEQ ID NO: 575
acaaguguaucaguauaag

SEQ ID NO: 47875 - RNA, 19 nt, Artificial Sequence
  Description of Artificial Sequence: Synthetic oligonucleotide
  Antisense strand to SEQ ID NO: 47794
cuuauacugauacacuugu

SEQ ID NO: 47876 - RNA, 19 nt, Artificial Sequence
  Description of Artificial Sequence: Synthetic oligonucleotide
  Sense strand starting at position 1011 of SEQ ID NO: 575
guauaagccuuauugggag

SEQ ID NO: 47877 - RNA, 19 nt, Artificial Sequence
  Description of Artificial Sequence: Synthetic oligonucleotide
  Antisense strand to SEQ ID NO: 47796
cucccaauaaggcuuauac

SEQ ID NO: 47878 - RNA, 19 nt, Artificial Sequence
  Description of Artificial Sequence: Synthetic oligonucleotide
  Sense strand starting at position 1017 of SEQ ID NO: 575
gccuuauugggagauaguc

SEQ ID NO: 47879 - RNA, 19 nt, Artificial Sequence
  Description of Artificial Sequence: Synthetic oligonucleotide
  Antisense strand to SEQ ID NO: 47798
gacuaucucccaauaaggc

SEQ ID NO: 47880 - RNA, 19 nt, Artificial Sequence
  Description of Artificial Sequence: Synthetic oligonucleotide
  Sense strand starting at position 1155 of SEQ ID NO: 575
ggcugugucagcuccucau

SEQ ID NO: 47881 - RNA, 19 nt, Artificial Sequence
  Description of Artificial Sequence: Synthetic oligonucleotide
  Antisense strand to SEQ ID NO: 47800
augaggagcugacacagcc

SEQ ID NO: 47882 - RNA, 19 nt, Artificial Sequence
  Description of Artificial Sequence: Synthetic oligonucleotide
  Sense strand starting at position 1186 of SEQ ID NO: 575
cagaaaggguuucuugacu

SEQ ID NO: 47883 - RNA, 19 nt, Artificial Sequence
  Description of Artificial Sequence: Synthetic oligonucleotide
  Antisense strand to SEQ ID NO: 47802
agucaagaaacccuuucug

SEQ ID NO: 47884 - RNA, 19 nt, Artificial Sequence
  Description of Artificial Sequence: Synthetic oligonucleotide
  Sense strand starting at position 1192 of SEQ ID NO: 575
ggguuucuugacuaccuca

SEQ ID NO: 47885 - RNA, 19 nt, Artificial Sequence
  Description of Artificial Sequence: Synthetic oligonucleotide
  Antisense strand to SEQ ID NO: 47804
ugagguagucaagaaaccc

SEQ ID NO: 47886 - RNA, 19 nt, Artificial Sequence
  Description of Artificial Sequence: Synthetic oligonucleotide
  Sense strand starting at position 1613 of SEQ ID NO: 575
ggcccaacccgaugagaua

SEQ ID NO: 47887 - RNA, 19 nt, Artificial Sequence
  Description of Artificial Sequence: Synthetic oligonucleotide
  Antisense strand to SEQ ID NO: 47806
uaucucaucggguugggcc

SEQ ID NO: 47888 - RNA, 19 nt, Artificial Sequence
  Description of Artificial Sequence: Synthetic oligonucleotide
  Sense strand starting at position 1787 of SEQ ID NO: 575
uuaugucacgcuuaagaac

SEQ ID NO: 47889 - RNA, 19 nt, Artificial Sequence
  Description of Artificial Sequence: Synthetic oligonucleotide
  Antisense strand to SEQ ID NO: 47808
guucuuaagcgugacauaa

SEQ ID NO: 47890 - RNA, 19 nt, Artificial Sequence
  Description of Artificial Sequence: Synthetic oligonucleotide
  Sense strand starting at position 1794 of SEQ ID NO: 575
acgcuuaagaacugggaua

SEQ ID NO: 47891 - RNA, 19 nt, Artificial Sequence
  Description of Artificial Sequence: Synthetic oligonucleotide
  Antisense strand to SEQ ID NO: 47810
uaucccaguucuuaagcgu

SEQ ID NO: 47892 - RNA, 19 nt, Artificial Sequence
  Description of Artificial Sequence: Synthetic oligonucleotide
  Sense strand starting at position 1795 of SEQ ID NO: 575
cgcuuaagaacugggauaa

SEQ ID NO: 47893 - RNA, 19 nt, Artificial Sequence
  Description of Artificial Sequence: Synthetic oligonucleotide
  Antisense strand to SEQ ID NO: 47812
uuaucccaguucuuaagcg

SEQ ID NO: 47894 - RNA, 19 nt, Artificial Sequence
  Description of Artificial Sequence: Synthetic oligonucleotide
  Sense strand starting at position 1869 of SEQ ID NO: 575
ccaauuacccgcugagaga

SEQ ID NO: 47895 - RNA, 19 nt, Artificial Sequence
  Description of Artificial Sequence: Synthetic oligonucleotide
  Antisense strand to SEQ ID NO: 47814
ucucucagcggguaauugg

SEQ ID NO: 47896 - RNA, 19 nt, Artificial Sequence
  Description of Artificial Sequence: Synthetic oligonucleotide
  Sense strand starting at position 1870 of SEQ ID NO: 575
caauuacccgcugagagaa

SEQ ID NO: 47897 - RNA, 19 nt, Artificial Sequence
  Description of Artificial Sequence: Synthetic oligonucleotide
  Antisense strand to SEQ ID NO: 47816
uucucucagcggguaauug

SEQ ID NO: 47898 - RNA, 19 nt, Artificial Sequence
  Description of Artificial Sequence: Synthetic oligonucleotide
  Sense strand starting at position 2482 of SEQ ID NO: 575
gugugcuucugauuuccca

SEQ ID NO: 47899 - RNA, 19 nt, Artificial Sequence
  Description of Artificial Sequence: Synthetic oligonucleotide
  Antisense strand to SEQ ID NO: 47818
ugggaaaucagaagcacac

SEQ ID NO: 47900 - RNA, 19 nt, Artificial Sequence
  Description of Artificial Sequence: Synthetic oligonucleotide
  Sense strand starting at position 2618 of SEQ ID NO: 575
cuuuaauagugcucaggga

SEQ ID NO: 47901 - RNA, 19 nt, Artificial Sequence
  Description of Artificial Sequence: Synthetic oligonucleotide
  Antisense strand to SEQ ID NO: 47820
ucccugagcacuauuaaag

SEQ ID NO: 47902 - RNA, 19 nt, Artificial Sequence
  Description of Artificial Sequence: Synthetic oligonucleotide
  Sense strand starting at position 2619 of SEQ ID NO: 575
uuuaauagugcucagggau

SEQ ID NO: 47903 - RNA, 19 nt, Artificial Sequence
  Description of Artificial Sequence: Synthetic oligonucleotide
  Antisense strand to SEQ ID NO: 47822
aucccugagcacuauuaaa

SEQ ID NO: 47904 - RNA, 19 nt, Artificial Sequence
  Description of Artificial Sequence: Synthetic oligonucleotide
  Sense strand starting at position 2683 of SEQ ID NO: 575
guugguuacauguaauuag

SEQ ID NO: 47905 - RNA, 19 nt, Artificial Sequence
  Description of Artificial Sequence: Synthetic oligonucleotide
  Antisense strand to SEQ ID NO: 47824
cuaauuacauguaaccaac

SEQ ID NO: 47906 - RNA, 19 nt, Artificial Sequence
  Description of Artificial Sequence: Synthetic oligonucleotide
  Sense strand starting at position 2686 of SEQ ID NO: 575
gguuacauguaauuagaaa

SEQ ID NO: 47907 - RNA, 19 nt, Artificial Sequence
  Description of Artificial Sequence: Synthetic oligonucleotide
  Antisense strand to SEQ ID NO: 47826
uuucuaauuacauguaacc

SEQ ID NO: 47908 - RNA, 19 nt, Artificial Sequence
  Description of Artificial Sequence: Synthetic oligonucleotide
  Sense strand starting at position 2942 of SEQ ID NO: 575
ucucauuacguugaucuau

SEQ ID NO: 47909 - RNA, 19 nt, Artificial Sequence
  Description of Artificial Sequence: Synthetic oligonucleotide
  Antisense strand to SEQ ID NO: 47828
auagaucaacguaaugaga

SEQ ID NO: 47910 - RNA, 19 nt, Artificial Sequence
  Description of Artificial Sequence: Synthetic oligonucleotide
  Sense strand starting at position 2996 of SEQ ID NO: 575
auggaucguagauguaaau

SEQ ID NO: 47911 - RNA, 19 nt, Artificial Sequence
  Description of Artificial Sequence: Synthetic oligonucleotide
  Antisense strand to SEQ ID NO: 47830
auuuacaucuacgauccau

SEQ ID NO: 47912 - RNA, 19 nt, Artificial Sequence
  Description of Artificial Sequence: Synthetic oligonucleotide
  Sense strand starting at position 3049 of SEQ ID NO: 575
gaggaaauauucgugaccu

SEQ ID NO: 47913 - RNA, 19 nt, Artificial Sequence
  Description of Artificial Sequence: Synthetic oligonucleotide
  Antisense strand to SEQ ID NO: 47832
aggucacgaauauuuccuc

SEQ ID NO: 47914 - RNA, 19 nt, Artificial Sequence
  Description of Artificial Sequence: Synthetic oligonucleotide
  Sense strand starting at position 3051 of SEQ ID NO: 575
ggaaauauucgugaccuua

SEQ ID NO: 47915 - RNA, 19 nt, Artificial Sequence
  Description of Artificial Sequence: Synthetic oligonucleotide
  Antisense strand to SEQ ID NO: 47834
uaaggucacgaauauuucc

SEQ ID NO: 47916 - RNA, 19 nt, Artificial Sequence
  Description of Artificial Sequence: Synthetic oligonucleotide
  Sense strand starting at position 3423 of SEQ ID NO: 575
cuauuagaauggcuuaagu

SEQ ID NO: 47917 - RNA, 19 nt, Artificial Sequence
  Description of Artificial Sequence: Synthetic oligonucleotide
  Antisense strand to SEQ ID NO: 47836
acuuaagccauucuaauag

SEQ ID NO: 47918 - RNA, 19 nt, Artificial Sequence
  Description of Artificial Sequence: Synthetic oligonucleotide
  Sense strand starting at position 3583 of SEQ ID NO: 575
cuagauaacccggaagcau

SEQ ID NO: 47919 - RNA, 19 nt, Artificial Sequence
  Description of Artificial Sequence: Synthetic oligonucleotide
  Antisense strand to SEQ ID NO: 47838
augcuuccggguuaucuag

SEQ ID NO: 47920 - RNA, 19 nt, Artificial Sequence
  Description of Artificial Sequence: Synthetic oligonucleotide
  Sense strand starting at position 3699 of SEQ ID NO: 575
aggagaguauugucaucaa

SEQ ID NO: 47921 - RNA, 19 nt, Artificial Sequence
  Description of Artificial Sequence: Synthetic oligonucleotide
  Antisense strand to SEQ ID NO: 47840
uugaugacaauacucuccu

SEQ ID NO: 47922 - RNA, 19 nt, Artificial Sequence
  Description of Artificial Sequence: Synthetic oligonucleotide
  Sense strand starting at position 3702 of SEQ ID NO: 575
agaguauugucaucaacag

SEQ ID NO: 47923 - RNA, 19 nt, Artificial Sequence
  Description of Artificial Sequence: Synthetic oligonucleotide
  Antisense strand to SEQ ID NO: 47842
cuguugaugacaauacucu

SEQ ID NO: 47924 - RNA, 19 nt, Artificial Sequence
  Description of Artificial Sequence: Synthetic oligonucleotide
  Sense strand starting at position 3762 of SEQ ID NO: 575
cugucaugucugccuguau

SEQ ID NO: 47925 - RNA, 19 nt, Artificial Sequence
  Description of Artificial Sequence: Synthetic oligonucleotide
  Antisense strand to SEQ ID NO: 47844
auacaggcagacaugacag

SEQ ID NO: 47926 - RNA, 19 nt, Artificial Sequence
  Description of Artificial Sequence: Synthetic oligonucleotide
  Sense strand starting at position 3839 of SEQ ID NO: 575
acucuuguagcugauaaua

SEQ ID NO: 47927 - RNA, 19 nt, Artificial Sequence
  Description of Artificial Sequence: Synthetic oligonucleotide
  Antisense strand to SEQ ID NO: 47846
uauuaucagcuacaagagu

SEQ ID NO: 47928 - RNA, 19 nt, Artificial Sequence
  Description of Artificial Sequence: Synthetic oligonucleotide
  Sense strand starting at position 3877 of SEQ ID NO: 575
gggucagagaguuauaguu

SEQ ID NO: 47929 - RNA, 19 nt, Artificial Sequence
  Description of Artificial Sequence: Synthetic oligonucleotide
  Antisense strand to SEQ ID NO: 47848
aacuauaacucucugaccc

SEQ ID NO: 47930 - RNA, 19 nt, Artificial Sequence
  Description of Artificial Sequence: Synthetic oligonucleotide
  Sense strand starting at position 3941 of SEQ ID NO: 575
agagaaaguccagguuugu

SEQ ID NO: 47931 - RNA, 19 nt, Artificial Sequence
  Description of Artificial Sequence: Synthetic oligonucleotide
  Antisense strand to SEQ ID NO: 47850
acaaaccuggacuuucucu

SEQ ID NO: 47932 - RNA, 19 nt, Artificial Sequence
  Description of Artificial Sequence: Synthetic oligonucleotide
  Sense strand starting at position 485 of SEQ ID NO: 577
cugguuuggugaaggauag

SEQ ID NO: 47933 - RNA, 19 nt, Artificial Sequence
  Description of Artificial Sequence: Synthetic oligonucleotide
  Antisense strand to SEQ ID NO: 47852
cuauccuucaccaaaccag

SEQ ID NO: 47934 - RNA, 19 nt, Artificial Sequence
  Description of Artificial Sequence: Synthetic oligonucleotide
  Sense strand starting at position 486 of SEQ ID NO: 577
ugguuuggugaaggauaga

SEQ ID NO: 47935 - RNA, 19 nt, Artificial Sequence
  Description of Artificial Sequence: Synthetic oligonucleotide
  Antisense strand to SEQ ID NO: 47854
ucuauccuucaccaaacca

SEQ ID NO: 47936 - RNA, 19 nt, Artificial Sequence
  Description of Artificial Sequence: Synthetic oligonucleotide
  Sense strand starting at position 603 of SEQ ID NO: 577
cuuggauguuaugaagaau

SEQ ID NO: 47937 - RNA, 19 nt, Artificial Sequence
  Description of Artificial Sequence: Synthetic oligonucleotide
  Antisense strand to SEQ ID NO: 47856
auucuucauaacauccaag

SEQ ID NO: 47938 - RNA, 19 nt, Artificial Sequence
  Description of Artificial Sequence: Synthetic oligonucleotide
  Sense strand starting at position 641 of SEQ ID NO: 577
aguacuucuggccggguaa

SEQ ID NO: 47939 - RNA, 19 nt, Artificial Sequence
  Description of Artificial Sequence: Synthetic oligonucleotide
  Antisense strand to SEQ ID NO: 47858
uuacccggccagaaguacu

SEQ ID NO: 47940 - RNA, 19 nt, Artificial Sequence
  Description of Artificial Sequence: Synthetic oligonucleotide
  Sense strand starting at position 1284 of SEQ ID NO: 577
aggaaagugaaaugucauu

SEQ ID NO: 47941 - RNA, 19 nt, Artificial Sequence
  Description of Artificial Sequence: Synthetic oligonucleotide
  Antisense strand to SEQ ID NO: 47860
aaugacauuucacuuuccu

SEQ ID NO: 47942 - RNA, 19 nt, Artificial Sequence
  Description of Artificial Sequence: Synthetic oligonucleotide
  Sense strand starting at position 1419 of SEQ ID NO: 577
ucacuucucgaccguuagu

SEQ ID NO: 47943 - RNA, 19 nt, Artificial Sequence
  Description of Artificial Sequence: Synthetic oligonucleotide
  Antisense strand to SEQ ID NO: 47862
acuaacggucgagaaguga

SEQ ID NO: 47944 - RNA, 19 nt, Artificial Sequence
  Description of Artificial Sequence: Synthetic oligonucleotide
  Sense strand starting at position 1424 of SEQ ID NO: 577
ucucgaccguuaguacaua

SEQ ID NO: 47945 - RNA, 19 nt, Artificial Sequence
  Description of Artificial Sequence: Synthetic oligonucleotide
  Antisense strand to SEQ ID NO: 47864
uauguacuaacggucgaga

SEQ ID NO: 47946 - RNA, 19 nt, Artificial Sequence
  Description of Artificial Sequence: Synthetic oligonucleotide
  Sense strand starting at position 1498 of SEQ ID NO: 577
ggcucuuuaaugggaaaug

SEQ ID NO: 47947 - RNA, 19 nt, Artificial Sequence
  Description of Artificial Sequence: Synthetic oligonucleotide
  Antisense strand to SEQ ID NO: 47866
cauuucccauuaaagagcc

SEQ ID NO: 47948 - RNA, 19 nt, Artificial Sequence
  Description of Artificial Sequence: Synthetic oligonucleotide
  Sense strand starting at position 1625 of SEQ ID NO: 577
gcguccucgcagucaugaa

SEQ ID NO: 47949 - RNA, 19 nt, Artificial Sequence
  Description of Artificial Sequence: Synthetic oligonucleotide
  Antisense strand to SEQ ID NO: 47868
uucaugacugcgaggacgc

SEQ ID NO: 47950 - RNA, 19 nt, Artificial Sequence
  Description of Artificial Sequence: Synthetic oligonucleotide
  Sense strand starting at position 1626 of SEQ ID NO: 577
cguccucgcagucaugaaa

SEQ ID NO: 47951 - RNA, 19 nt, Artificial Sequence
  Description of Artificial Sequence: Synthetic oligonucleotide
  Antisense strand to SEQ ID NO: 47870
uuucaugacugcgaggacg

SEQ ID NO: 47952 - RNA, 19 nt, Artificial Sequence
  Description of Artificial Sequence: Synthetic oligonucleotide
  Sense strand starting at position 1818 of SEQ ID NO: 577
gcgcuaauuucgucauggu

SEQ ID NO: 47953 - RNA, 19 nt, Artificial Sequence
  Description of Artificial Sequence: Synthetic oligonucleotide
  Antisense strand to SEQ ID NO: 47872
accaugacgaaauuagcgc

SEQ ID NO: 47954 - RNA, 19 nt, Artificial Sequence
  Description of Artificial Sequence: Synthetic oligonucleotide
  Sense strand starting at position 1819 of SEQ ID NO: 577
cgcuaauuucgucaugguc

SEQ ID NO: 47955 - RNA, 19 nt, Artificial Sequence
  Description of Artificial Sequence: Synthetic oligonucleotide
  Antisense strand to SEQ ID NO: 47874
gaccaugacgaaauuagcg

SEQ ID NO: 47956 - RNA, 19 nt, Artificial Sequence
  Description of Artificial Sequence: Synthetic oligonucleotide
  Sense strand starting at position 1828 of SEQ ID NO: 577
cgucauggucacugcgaga

SEQ ID NO: 47957 - RNA, 19 nt, Artificial Sequence
  Description of Artificial Sequence: Synthetic oligonucleotide
  Antisense strand to SEQ ID NO: 47876
ucucgcagugaccaugacg

SEQ ID NO: 47958 - RNA, 19 nt, Artificial Sequence
  Description of Artificial Sequence: Synthetic oligonucleotide
  Sense strand starting at position 2117 of SEQ ID NO: 577
cggauguuggcguccggaa

SEQ ID NO: 47959 - RNA, 19 nt, Artificial Sequence
  Description of Artificial Sequence: Synthetic oligonucleotide
  Antisense strand to SEQ ID NO: 47878
uuccggacgccaacauccg

SEQ ID NO: 47960 - RNA, 19 nt, Artificial Sequence
  Description of Artificial Sequence: Synthetic oligonucleotide
  Sense strand starting at position 2244 of SEQ ID NO: 577
gugggcugugcuccgcaaa

SEQ ID NO: 47961 - RNA, 19 nt, Artificial Sequence
  Description of Artificial Sequence: Synthetic oligonucleotide
  Antisense strand to SEQ ID NO: 47880
uuugcggagcacagcccac

SEQ ID NO: 47962 - RNA, 19 nt, Artificial Sequence
  Description of Artificial Sequence: Synthetic oligonucleotide
  Sense strand starting at position 2360 of SEQ ID NO: 577
gcaacaagaugggaauaua

SEQ ID NO: 47963 - RNA, 19 nt, Artificial Sequence
  Description of Artificial Sequence: Synthetic oligonucleotide
  Antisense strand to SEQ ID NO: 47882
uauauucccaucuuguugc

SEQ ID NO: 47964 - RNA, 19 nt, Artificial Sequence
  Description of Artificial Sequence: Synthetic oligonucleotide
  Sense strand starting at position 2368 of SEQ ID NO: 577
augggaauauaauaccauu

SEQ ID NO: 47965 - RNA, 19 nt, Artificial Sequence
  Description of Artificial Sequence: Synthetic oligonucleotide
  Antisense strand to SEQ ID NO: 47884
aaugguauuauauucccau

SEQ ID NO: 47966 - RNA, 19 nt, Artificial Sequence
  Description of Artificial Sequence: Synthetic oligonucleotide
  Sense strand starting at position 2397 of SEQ ID NO: 577
ucaauucuccagcgcugaa

SEQ ID NO: 47967 - RNA, 19 nt, Artificial Sequence
  Description of Artificial Sequence: Synthetic oligonucleotide
  Antisense strand to SEQ ID NO: 47886
uucagcgcuggagaauuga

SEQ ID NO: 47968 - RNA, 19 nt, Artificial Sequence
  Description of Artificial Sequence: Synthetic oligonucleotide
  Sense strand starting at position 2470 of SEQ ID NO: 577
uugacagggucucucuaua

SEQ ID NO: 47969 - RNA, 19 nt, Artificial Sequence
  Description of Artificial Sequence: Synthetic oligonucleotide
  Antisense strand to SEQ ID NO: 47888
uauagagagacccugucaa

SEQ ID NO: 47970 - RNA, 19 nt, Artificial Sequence
  Description of Artificial Sequence: Synthetic oligonucleotide
  Sense strand starting at position 2804 of SEQ ID NO: 577
ucuugauuaccaugauaga

SEQ ID NO: 47971 - RNA, 19 nt, Artificial Sequence
  Description of Artificial Sequence: Synthetic oligonucleotide
  Antisense strand to SEQ ID NO: 47890
ucuaucaugguaaucaaga

SEQ ID NO: 47972 - RNA, 19 nt, Artificial Sequence
  Description of Artificial Sequence: Synthetic oligonucleotide
  Sense strand starting at position 2807 of SEQ ID NO: 577
ugauuaccaugauagacuu

SEQ ID NO: 47973 - RNA, 19 nt, Artificial Sequence
  Description of Artificial Sequence: Synthetic oligonucleotide
  Antisense strand to SEQ ID NO: 47892
aagucuaucaugguaauca

SEQ ID NO: 47974 - RNA, 19 nt, Artificial Sequence
  Description of Artificial Sequence: Synthetic oligonucleotide
  Sense strand starting at position 2815 of SEQ ID NO: 577
augauagacuuuggagaua

SEQ ID NO: 47975 - RNA, 19 nt, Artificial Sequence
  Description of Artificial Sequence: Synthetic oligonucleotide
  Antisense strand to SEQ ID NO: 47894
uaucuccaaagucuaucau

SEQ ID NO: 47976 - RNA, 19 nt, Artificial Sequence
  Description of Artificial Sequence: Synthetic oligonucleotide
  Sense strand starting at position 2918 of SEQ ID NO: 577
aaggcuugagauuauuguu

SEQ ID NO: 47977 - RNA, 19 nt, Artificial Sequence
  Description of Artificial Sequence: Synthetic oligonucleotide
  Antisense strand to SEQ ID NO: 47896
aacaauaaucucaagccuu

SEQ ID NO: 47978 - RNA, 19 nt, Artificial Sequence
  Description of Artificial Sequence: Synthetic oligonucleotide
  Sense strand starting at position 2923 of SEQ ID NO: 577
uugagauuauuguuagaac

SEQ ID NO: 47979 - RNA, 19 nt, Artificial Sequence
  Description of Artificial Sequence: Synthetic oligonucleotide
  Antisense strand to SEQ ID NO: 47898
guucuaacaauaaucucaa

SEQ ID NO: 47980 - RNA, 19 nt, Artificial Sequence
  Description of Artificial Sequence: Synthetic oligonucleotide
  Sense strand starting at position 2924 of SEQ ID NO: 577
ugagauuauuguuagaaca

SEQ ID NO: 47981 - RNA, 19 nt, Artificial Sequence
  Description of Artificial Sequence: Synthetic oligonucleotide
  Antisense strand to SEQ ID NO: 47900
uguucuaacaauaaucuca

SEQ ID NO: 47982 - RNA, 19 nt, Artificial Sequence
  Description of Artificial Sequence: Synthetic oligonucleotide
  Sense strand starting at position 2926 of SEQ ID NO: 577
agauuauuguuagaacaga

SEQ ID NO: 47983 - RNA, 19 nt, Artificial Sequence
  Description of Artificial Sequence: Synthetic oligonucleotide
  Antisense strand to SEQ ID NO: 47902
ucuguucuaacaauaaucu

SEQ ID NO: 47984 - RNA, 19 nt, Artificial Sequence
  Description of Artificial Sequence: Synthetic oligonucleotide
  Sense strand starting at position 3006 of SEQ ID NO: 577
ccaggagucuggguuucaa

SEQ ID NO: 47985 - RNA, 19 nt, Artificial Sequence
  Description of Artificial Sequence: Synthetic oligonucleotide
  Antisense strand to SEQ ID NO: 47904
uugaaacccagacuccugg

SEQ ID NO: 47986 - RNA, 19 nt, Artificial Sequence
  Description of Artificial Sequence: Synthetic oligonucleotide
  Sense strand starting at position 3067 of SEQ ID NO: 577
uggugaaggcauugaaaga

SEQ ID NO: 47987 - RNA, 19 nt, Artificial Sequence
  Description of Artificial Sequence: Synthetic oligonucleotide
  Antisense strand to SEQ ID NO: 47906
ucuuucaaugccuucacca

SEQ ID NO: 47988 - RNA, 19 nt, Artificial Sequence
  Description of Artificial Sequence: Synthetic oligonucleotide
  Sense strand starting at position 3203 of SEQ ID NO: 577
agaguuauauaagaaagga

SEQ ID NO: 47989 - RNA, 19 nt, Artificial Sequence
  Description of Artificial Sequence: Synthetic oligonucleotide
  Antisense strand to SEQ ID NO: 47908
uccuuucuuauauaacucu

SEQ ID NO: 47990 - RNA, 19 nt, Artificial Sequence
  Description of Artificial Sequence: Synthetic oligonucleotide
  Sense strand starting at position 3230 of SEQ ID NO: 577
ugauaagccugucuuauaa

SEQ ID NO: 47991 - RNA, 19 nt, Artificial Sequence
  Description of Artificial Sequence: Synthetic oligonucleotide
  Antisense strand to SEQ ID NO: 47910
uuauaagacaggcuuauca

SEQ ID NO: 47992 - RNA, 19 nt, Artificial Sequence
  Description of Artificial Sequence: Synthetic oligonucleotide
  Sense strand starting at position 3252 of SEQ ID NO: 577
ccacaucuguaguuugaca

SEQ ID NO: 47993 - RNA, 19 nt, Artificial Sequence
  Description of Artificial Sequence: Synthetic oligonucleotide
  Antisense strand to SEQ ID NO: 47912
ugucaaacuacagaugugg

SEQ ID NO: 47994 - RNA, 19 nt, Artificial Sequence
  Description of Artificial Sequence: Synthetic oligonucleotide
  Sense strand starting at position 3254 of SEQ ID NO: 577
acaucuguaguuugacagu

SEQ ID NO: 47995 - RNA, 19 nt, Artificial Sequence
  Description of Artificial Sequence: Synthetic oligonucleotide
  Antisense strand to SEQ ID NO: 47914
acugucaaacuacagaugu

SEQ ID NO: 47996 - RNA, 19 nt, Artificial Sequence
  Description of Artificial Sequence: Synthetic oligonucleotide
  Sense strand starting at position 3264 of SEQ ID NO: 577
uuugacaguuagguuuauu

SEQ ID NO: 47997 - RNA, 19 nt, Artificial Sequence
  Description of Artificial Sequence: Synthetic oligonucleotide
  Antisense strand to SEQ ID NO: 47916
aauaaaccuaacugucaaa

SEQ ID NO: 47998 - RNA, 19 nt, Artificial Sequence
  Description of Artificial Sequence: Synthetic oligonucleotide
  Sense strand starting at position 3267 of SEQ ID NO: 577
gacaguuagguuuauuaac

SEQ ID NO: 47999 - RNA, 19 nt, Artificial Sequence
  Description of Artificial Sequence: Synthetic oligonucleotide
  Antisense strand to SEQ ID NO: 47918
guuaauaaaccuaacuguc

SEQ ID NO: 48000 - RNA, 19 nt, Artificial Sequence
  Description of Artificial Sequence: Synthetic oligonucleotide
  Sense strand starting at position 3414 of SEQ ID NO: 577
ccagaauucccacgugcga

SEQ ID NO: 48001 - RNA, 19 nt, Artificial Sequence
  Description of Artificial Sequence: Synthetic oligonucleotide
  Antisense strand to SEQ ID NO: 47920
ucgcacgugggaauucugg

SEQ ID NO: 48002 - RNA, 19 nt, Artificial Sequence
  Description of Artificial Sequence: Synthetic oligonucleotide
  Sense strand starting at position 3719 of SEQ ID NO: 577
augggaaaggcuugacuuu

SEQ ID NO: 48003 - RNA, 19 nt, Artificial Sequence
  Description of Artificial Sequence: Synthetic oligonucleotide
  Antisense strand to SEQ ID NO: 47922
aaagucaagccuuucccau

SEQ ID NO: 48004 - RNA, 19 nt, Artificial Sequence
  Description of Artificial Sequence: Synthetic oligonucleotide
  Sense strand starting at position 3777 of SEQ ID NO: 577
aguugaagucucgguaugu

SEQ ID NO: 48005 - RNA, 19 nt, Artificial Sequence
  Description of Artificial Sequence: Synthetic oligonucleotide
  Antisense strand to SEQ ID NO: 47924
acauaccgagacuucaacu

SEQ ID NO: 48006 - RNA, 19 nt, Artificial Sequence
  Description of Artificial Sequence: Synthetic oligonucleotide
  Sense strand starting at position 3778 of SEQ ID NO: 577
guugaagucucgguauguu

SEQ ID NO: 48007 - RNA, 19 nt, Artificial Sequence
  Description of Artificial Sequence: Synthetic oligonucleotide
  Antisense strand to SEQ ID NO: 47926
aacauaccgagacuucaac

SEQ ID NO: 48008 - RNA, 19 nt, Artificial Sequence
  Description of Artificial Sequence: Synthetic oligonucleotide
  Sense strand starting at position 3902 of SEQ ID NO: 577
aucgguucgagguaagcau

SEQ ID NO: 48009 - RNA, 19 nt, Artificial Sequence
  Description of Artificial Sequence: Synthetic oligonucleotide
  Antisense strand to SEQ ID NO: 47928
augcuuaccucgaaccgau

SEQ ID NO: 48010 - RNA, 19 nt, Artificial Sequence
  Description of Artificial Sequence: Synthetic oligonucleotide
  Sense strand starting at position 3906 of SEQ ID NO: 577
guucgagguaagcauaacu

SEQ ID NO: 48011 - RNA, 19 nt, Artificial Sequence
  Description of Artificial Sequence: Synthetic oligonucleotide
  Antisense strand to SEQ ID NO: 47930
aguuaugcuuaccucgaac

SEQ ID NO: 48012 - RNA, 19 nt, Artificial Sequence
  Description of Artificial Sequence: Synthetic oligonucleotide
  Sense strand starting at position 372 of SEQ ID NO: 576
cugguuuggugaaggauag

SEQ ID NO: 48013 - RNA, 19 nt, Artificial Sequence
  Description of Artificial Sequence: Synthetic oligonucleotide
  Antisense strand to SEQ ID NO: 47932
cuauccuucaccaaaccag

SEQ ID NO: 48014 - RNA, 19 nt, Artificial Sequence
  Description of Artificial Sequence: Synthetic oligonucleotide
  Sense strand starting at position 373 of SEQ ID NO: 576
ugguuuggugaaggauaga

SEQ ID NO: 48015 - RNA, 19 nt, Artificial Sequence
  Description of Artificial Sequence: Synthetic oligonucleotide
  Antisense strand to SEQ ID NO: 47934
ucuauccuucaccaaacca

SEQ ID NO: 48016 - RNA, 19 nt, Artificial Sequence
  Description of Artificial Sequence: Synthetic oligonucleotide
  Sense strand starting at position 490 of SEQ ID NO: 576
cuuggauguuaugaagaau

SEQ ID NO: 48017 - RNA, 19 nt, Artificial Sequence
  Description of Artificial Sequence: Synthetic oligonucleotide
  Antisense strand to SEQ ID NO: 47936
auucuucauaacauccaag

SEQ ID NO: 48018 - RNA, 19 nt, Artificial Sequence
  Description of Artificial Sequence: Synthetic oligonucleotide
  Sense strand starting at position 528 of SEQ ID NO: 576
aguacuucuggccggguaa

SEQ ID NO: 48019 - RNA, 19 nt, Artificial Sequence
  Description of Artificial Sequence: Synthetic oligonucleotide
  Antisense strand to SEQ ID NO: 47938
uuacccggccagaaguacu

SEQ ID NO: 48020 - RNA, 19 nt, Artificial Sequence
  Description of Artificial Sequence: Synthetic oligonucleotide
  Sense strand starting at position 1171 of SEQ ID NO: 576
aggaaagugaaaugucauu

SEQ ID NO: 48021 - RNA, 19 nt, Artificial Sequence
  Description of Artificial Sequence: Synthetic oligonucleotide
  Antisense strand to SEQ ID NO: 47940
aaugacauuucacuuuccu

SEQ ID NO: 48022 - RNA, 19 nt, Artificial Sequence
  Description of Artificial Sequence: Synthetic oligonucleotide
  Sense strand starting at position 1311 of SEQ ID NO: 576
ucucgaccguuaguacaua

SEQ ID NO: 48023 - RNA, 19 nt, Artificial Sequence
  Description of Artificial Sequence: Synthetic oligonucleotide
  Antisense strand to SEQ ID NO: 47942
uauguacuaacggucgaga

SEQ ID NO: 48024 - RNA, 19 nt, Artificial Sequence
  Description of Artificial Sequence: Synthetic oligonucleotide
  Sense strand starting at position 1385 of SEQ ID NO: 576
ggcucuuuaaugggaaaug

SEQ ID NO: 48025 - RNA, 19 nt, Artificial Sequence
  Description of Artificial Sequence: Synthetic oligonucleotide
  Antisense strand to SEQ ID NO: 47944
cauuucccauuaaagagcc

SEQ ID NO: 48026 - RNA, 19 nt, Artificial Sequence
  Description of Artificial Sequence: Synthetic oligonucleotide
  Sense strand starting at position 1512 of SEQ ID NO: 576
gcguccucgcagucaugaa

SEQ ID NO: 48027 - RNA, 19 nt, Artificial Sequence
  Description of Artificial Sequence: Synthetic oligonucleotide
  Antisense strand to SEQ ID NO: 47946
uucaugacugcgaggacgc

SEQ ID NO: 48028 - RNA, 19 nt, Artificial Sequence
  Description of Artificial Sequence: Synthetic oligonucleotide
  Sense strand starting at position 1513 of SEQ ID NO: 576
cguccucgcagucaugaaa

SEQ ID NO: 48029 - RNA, 19 nt, Artificial Sequence
  Description of Artificial Sequence: Synthetic oligonucleotide
  Antisense strand to SEQ ID NO: 47948
uuucaugacugcgaggacg

SEQ ID NO: 48030 - RNA, 19 nt, Artificial Sequence
  Description of Artificial Sequence: Synthetic oligonucleotide
  Sense strand starting at position 1705 of SEQ ID NO: 576
gcgcuaauuucgucauggu

SEQ ID NO: 48031 - RNA, 19 nt, Artificial Sequence
  Description of Artificial Sequence: Synthetic oligonucleotide
  Antisense strand to SEQ ID NO: 47950
accaugacgaaauuagcgc

SEQ ID NO: 48032 - RNA, 19 nt, Artificial Sequence
  Description of Artificial Sequence: Synthetic oligonucleotide
  Sense strand starting at position 1706 of SEQ ID NO: 576
cgcuaauuucgucaugguc

SEQ ID NO: 48033 - RNA, 19 nt, Artificial Sequence
  Description of Artificial Sequence: Synthetic oligonucleotide
  Antisense strand to SEQ ID NO: 47952
gaccaugacgaaauuagcg

SEQ ID NO: 48034 - RNA, 19 nt, Artificial Sequence
  Description of Artificial Sequence: Synthetic oligonucleotide
  Sense strand starting at position 1715 of SEQ ID NO: 576
cgucauggucacugcgaga

SEQ ID NO: 48035 - RNA, 19 nt, Artificial Sequence
  Description of Artificial Sequence: Synthetic oligonucleotide
  Antisense strand to SEQ ID NO: 47954
ucucgcagugaccaugacg

SEQ ID NO: 48036 - RNA, 19 nt, Artificial Sequence
  Description of Artificial Sequence: Synthetic oligonucleotide
  Sense strand starting at position 2004 of SEQ ID NO: 576
cggauguuggcguccggaa

SEQ ID NO: 48037 - RNA, 19 nt, Artificial Sequence
  Description of Artificial Sequence: Synthetic oligonucleotide
  Antisense strand to SEQ ID NO: 47956
uuccggacgccaacauccg

SEQ ID NO: 48038 - RNA, 19 nt, Artificial Sequence
  Description of Artificial Sequence: Synthetic oligonucleotide
  Sense strand starting at position 2131 of SEQ ID NO: 576
gugggcugugcuccgcaaa

SEQ ID NO: 48039 - RNA, 19 nt, Artificial Sequence
  Description of Artificial Sequence: Synthetic oligonucleotide
  Antisense strand to SEQ ID NO: 47958
uuugcggagcacagcccac

SEQ ID NO: 48040 - RNA, 19 nt, Artificial Sequence
  Description of Artificial Sequence: Synthetic oligonucleotide
  Sense strand starting at position 2247 of SEQ ID NO: 576
gcaacaagaugggaauaua

SEQ ID NO: 48041 - RNA, 19 nt, Artificial Sequence
  Description of Artificial Sequence: Synthetic oligonucleotide
  Antisense strand to SEQ ID NO: 47960
uauauucccaucuuguugc

SEQ ID NO: 48042 - RNA, 19 nt, Artificial Sequence
  Description of Artificial Sequence: Synthetic oligonucleotide
  Sense strand starting at position 2255 of SEQ ID NO: 576
augggaauauaauaccauu

SEQ ID NO: 48043 - RNA, 19 nt, Artificial Sequence
  Description of Artificial Sequence: Synthetic oligonucleotide
  Antisense strand to SEQ ID NO: 47962
aaugguauuauauucccau

SEQ ID NO: 48044 - RNA, 19 nt, Artificial Sequence
  Description of Artificial Sequence: Synthetic oligonucleotide
  Sense strand starting at position 2284 of SEQ ID NO: 576
ucaauucuccagcgcugaa

SEQ ID NO: 48045 - RNA, 19 nt, Artificial Sequence
  Description of Artificial Sequence: Synthetic oligonucleotide
  Antisense strand to SEQ ID NO: 47964
uucagcgcuggagaauuga

SEQ ID NO: 48046 - RNA, 19 nt, Artificial Sequence
  Description of Artificial Sequence: Synthetic oligonucleotide
  Sense strand starting at position 2357 of SEQ ID NO: 576
uugacagggucucucuaua

SEQ ID NO: 48047 - RNA, 19 nt, Artificial Sequence
  Description of Artificial Sequence: Synthetic oligonucleotide
  Antisense strand to SEQ ID NO: 47966
uauagagagacccugucaa

SEQ ID NO: 48048 - RNA, 19 nt, Artificial Sequence
  Description of Artificial Sequence: Synthetic oligonucleotide
  Sense strand starting at position 2691 of SEQ ID NO: 576
ucuugauuaccaugauaga

SEQ ID NO: 48049 - RNA, 19 nt, Artificial Sequence
  Description of Artificial Sequence: Synthetic oligonucleotide
  Antisense strand to SEQ ID NO: 47968
ucuaucaugguaaucaaga

SEQ ID NO: 48050 - RNA, 19 nt, Artificial Sequence
  Description of Artificial Sequence: Synthetic oligonucleotide
  Sense strand starting at position 2694 of SEQ ID NO: 576
ugauuaccaugauagacuu

SEQ ID NO: 48051 - RNA, 19 nt, Artificial Sequence
  Description of Artificial Sequence: Synthetic oligonucleotide
  Antisense strand to SEQ ID NO: 47970
aagucuaucaugguaauca

SEQ ID NO: 48052 - RNA, 19 nt, Artificial Sequence
  Description of Artificial Sequence: Synthetic oligonucleotide
  Sense strand starting at position 2702 of SEQ ID NO: 576
augauagacuuuggagaua

SEQ ID NO: 48053 - RNA, 19 nt, Artificial Sequence
  Description of Artificial Sequence: Synthetic oligonucleotide
  Antisense strand to SEQ ID NO: 47972
uaucuccaaagucuaucau

SEQ ID NO: 48054 - RNA, 19 nt, Artificial Sequence
  Description of Artificial Sequence: Synthetic oligonucleotide
  Sense strand starting at position 2805 of SEQ ID NO: 576
aaggcuugagauuauuguu

SEQ ID NO: 48055 - RNA, 19 nt, Artificial Sequence
  Description of Artificial Sequence: Synthetic oligonucleotide
  Antisense strand to SEQ ID NO: 47974
aacaauaaucucaagccuu

SEQ ID NO: 48056 - RNA, 19 nt, Artificial Sequence
  Description of Artificial Sequence: Synthetic oligonucleotide
  Sense strand starting at position 2810 of SEQ ID NO: 576
uugagauuauuguuagaac

SEQ ID NO: 48057 - RNA, 19 nt, Artificial Sequence
  Description of Artificial Sequence: Synthetic oligonucleotide
  Antisense strand to SEQ ID NO: 47976
guucuaacaauaaucucaa

SEQ ID NO: 48058 - RNA, 19 nt, Artificial Sequence
  Description of Artificial Sequence: Synthetic oligonucleotide
  Sense strand starting at position 2811 of SEQ ID NO: 576
ugagauuauuguuagaaca

SEQ ID NO: 48059 - RNA, 19 nt, Artificial Sequence
  Description of Artificial Sequence: Synthetic oligonucleotide
  Antisense strand to SEQ ID NO: 47978
uguucuaacaauaaucuca

SEQ ID NO: 48060 - RNA, 19 nt, Artificial Sequence
  Description of Artificial Sequence: Synthetic oligonucleotide
  Sense strand starting at position 2813 of SEQ ID NO: 576
agauuauuguuagaacaga

SEQ ID NO: 48061 - RNA, 19 nt, Artificial Sequence
  Description of Artificial Sequence: Synthetic oligonucleotide
  Antisense strand to SEQ ID NO: 47980
ucuguucuaacaauaaucu

SEQ ID NO: 48062 - RNA, 19 nt, Artificial Sequence
  Description of Artificial Sequence: Synthetic oligonucleotide
  Sense strand starting at position 2893 of SEQ ID NO: 576
ccaggagucuggguuucaa

SEQ ID NO: 48063 - RNA, 19 nt, Artificial Sequence
  Description of Artificial Sequence: Synthetic oligonucleotide
  Antisense strand to SEQ ID NO: 47982
uugaaacccagacuccugg

SEQ ID NO: 48064 - RNA, 19 nt, Artificial Sequence
  Description of Artificial Sequence: Synthetic oligonucleotide
  Sense strand starting at position 2954 of SEQ ID NO: 576
uggugaaggcauugaaaga

SEQ ID NO: 48065 - RNA, 19 nt, Artificial Sequence
  Description of Artificial Sequence: Synthetic oligonucleotide
  Antisense strand to SEQ ID NO: 47984
ucuuucaaugccuucacca

SEQ ID NO: 48066 - RNA, 19 nt, Artificial Sequence
  Description of Artificial Sequence: Synthetic oligonucleotide
  Sense strand starting at position 3090 of SEQ ID NO: 576
agaguuauauaagaaagga

SEQ ID NO: 48067 - RNA, 19 nt, Artificial Sequence
  Description of Artificial Sequence: Synthetic oligonucleotide
  Antisense strand to SEQ ID NO: 47986
uccuuucuuauauaacucu

SEQ ID NO: 48068 - RNA, 19 nt, Artificial Sequence
  Description of Artificial Sequence: Synthetic oligonucleotide
  Sense strand starting at position 3117 of SEQ ID NO: 576
ugauaagccugucuuauaa

SEQ ID NO: 48069 - RNA, 19 nt, Artificial Sequence
  Description of Artificial Sequence: Synthetic oligonucleotide
  Antisense strand to SEQ ID NO: 47988
uuauaagacaggcuuauca

SEQ ID NO: 48070 - RNA, 19 nt, Artificial Sequence
  Description of Artificial Sequence: Synthetic oligonucleotide
  Sense strand starting at position 3139 of SEQ ID NO: 576
ccacaucuguaguuugaca

SEQ ID NO: 48071 - RNA, 19 nt, Artificial Sequence
  Description of Artificial Sequence: Synthetic oligonucleotide
  Antisense strand to SEQ ID NO: 47990
ugucaaacuacagaugugg

SEQ ID NO: 48072 - RNA, 19 nt, Artificial Sequence
  Description of Artificial Sequence: Synthetic oligonucleotide
  Sense strand starting at position 3141 of SEQ ID NO: 576
acaucuguaguuugacagu

SEQ ID NO: 48073 - RNA, 19 nt, Artificial Sequence
  Description of Artificial Sequence: Synthetic oligonucleotide
  Antisense strand to SEQ ID NO: 47992
acugucaaacuacagaugu

SEQ ID NO: 48074 - RNA, 19 nt, Artificial Sequence
  Description of Artificial Sequence: Synthetic oligonucleotide
  Sense strand starting at position 3151 of SEQ ID NO: 576
uuugacaguuagguuuauu

SEQ ID NO: 48075 - RNA, 19 nt, Artificial Sequence
  Description of Artificial Sequence: Synthetic oligonucleotide
  Antisense strand to SEQ ID NO: 47994
aauaaaccuaacugucaaa

SEQ ID NO: 48076 - RNA, 19 nt, Artificial Sequence
  Description of Artificial Sequence: Synthetic oligonucleotide
  Sense strand starting at position 3154 of SEQ ID NO: 576
gacaguuagguuuauuaac

SEQ ID NO: 48077 - RNA, 19 nt, Artificial Sequence
  Description of Artificial Sequence: Synthetic oligonucleotide
  Antisense strand to SEQ ID NO: 47996
guuaauaaaccuaacuguc

SEQ ID NO: 48078 - RNA, 19 nt, Artificial Sequence
  Description of Artificial Sequence: Synthetic oligonucleotide
  Sense strand starting at position 3301 of SEQ ID NO: 576
ccagaauucccacgugcga

SEQ ID NO: 48079 - RNA, 19 nt, Artificial Sequence
  Description of Artificial Sequence: Synthetic oligonucleotide
  Antisense strand to SEQ ID NO: 47998
ucgcacgugggaauucugg

SEQ ID NO: 48080 - RNA, 19 nt, Artificial Sequence
  Description of Artificial Sequence: Synthetic oligonucleotide
  Sense strand starting at position 3606 of SEQ ID NO: 576
augggaaaggcuugacuuu

SEQ ID NO: 48081 - RNA, 19 nt, Artificial Sequence
  Description of Artificial Sequence: Synthetic oligonucleotide
  Antisense strand to SEQ ID NO: 48000
aaagucaagccuuucccau

SEQ ID NO: 48082 - RNA, 19 nt, Artificial Sequence
  Description of Artificial Sequence: Synthetic oligonucleotide
  Sense strand starting at position 3664 of SEQ ID NO: 576
aguugaagucucgguaugu

SEQ ID NO: 48083 - RNA, 19 nt, Artificial Sequence
  Description of Artificial Sequence: Synthetic oligonucleotide
  Antisense strand to SEQ ID NO: 48002
acauaccgagacuucaacu

SEQ ID NO: 48084 - RNA, 19 nt, Artificial Sequence
  Description of Artificial Sequence: Synthetic oligonucleotide
  Sense strand starting at position 3665 of SEQ ID NO: 576
guugaagucucgguauguu

SEQ ID NO: 48085 - RNA, 19 nt, Artificial Sequence
  Description of Artificial Sequence: Synthetic oligonucleotide
  Antisense strand to SEQ ID NO: 48004
aacauaccgagacuucaac

SEQ ID NO: 48086 - RNA, 19 nt, Artificial Sequence
  Description of Artificial Sequence: Synthetic oligonucleotide
  Sense strand starting at position 3789 of SEQ ID NO: 576
aucgguucgagguaagcau

SEQ ID NO: 48087 - RNA, 19 nt, Artificial Sequence
  Description of Artificial Sequence: Synthetic oligonucleotide
  Antisense strand to SEQ ID NO: 48006
augcuuaccucgaaccgau

SEQ ID NO: 48088 - RNA, 19 nt, Artificial Sequence
  Description of Artificial Sequence: Synthetic oligonucleotide
  Sense strand starting at position 3793 of SEQ ID NO: 576
guucgagguaagcauaacu

SEQ ID NO: 48089 - RNA, 19 nt, Artificial Sequence
  Description of Artificial Sequence: Synthetic oligonucleotide
  Antisense strand to SEQ ID NO: 48008
aguuaugcuuaccucgaac

SEQ ID NO: 48090 - RNA, 19 nt, Artificial Sequence
  Description of Artificial Sequence: Synthetic oligonucleotide
  Sense strand starting at position 3956 of SEQ ID NO: 576
caaaguaauccacguggcu

SEQ ID NO: 48091 - RNA, 19 nt, Artificial Sequence
  Description of Artificial Sequence: Synthetic oligonucleotide
  Antisense strand to SEQ ID NO: 48010
agccacguggauuacuuug

SEQ ID NO: 48092 - RNA, 19 nt, Artificial Sequence
  Description of Artificial Sequence: Synthetic oligonucleotide
  Sense strand starting at position 6 of SEQ ID NO: 578
guacaaacucuuugaagca

SEQ ID NO: 48093 - RNA, 19 nt, Artificial Sequence
  Description of Artificial Sequence: Synthetic oligonucleotide
  Antisense strand to SEQ ID NO: 48012
ugcuucaaagaguuuguac

SEQ ID NO: 48094 - RNA, 19 nt, Artificial Sequence
  Description of Artificial Sequence: Synthetic oligonucleotide
  Sense strand starting at position 20 of SEQ ID NO: 578
aagcaaagacucuguggau

SEQ ID NO: 48095 - RNA, 19 nt, Artificial Sequence
  Description of Artificial Sequence: Synthetic oligonucleotide
  Antisense strand to SEQ ID NO: 48014
auccacagagucuuugcuu

SEQ ID NO: 48096 - RNA, 19 nt, Artificial Sequence
  Description of Artificial Sequence: Synthetic oligonucleotide
  Sense strand starting at position 48 of SEQ ID NO: 578
agcuuucuagccgaggaaa

SEQ ID NO: 48097 - RNA, 19 nt, Artificial Sequence
  Description of Artificial Sequence: Synthetic oligonucleotide
  Antisense strand to SEQ ID NO: 48016
uuuccucggcuagaaagcu

SEQ ID NO: 48098 - RNA, 19 nt, Artificial Sequence
  Description of Artificial Sequence: Synthetic oligonucleotide
  Sense strand starting at position 50 of SEQ ID NO: 578
cuuucuagccgaggaaaua

SEQ ID NO: 48099 - RNA, 19 nt, Artificial Sequence
  Description of Artificial Sequence: Synthetic oligonucleotide
  Antisense strand to SEQ ID NO: 48018
uauuuccucggcuagaaag

SEQ ID NO: 48100 - RNA, 19 nt, Artificial Sequence
  Description of Artificial Sequence: Synthetic oligonucleotide
  Sense strand starting at position 124 of SEQ ID NO: 578
agcauuacacgagaugauc

SEQ ID NO: 48101 - RNA, 19 nt, Artificial Sequence
  Description of Artificial Sequence: Synthetic oligonucleotide
  Antisense strand to SEQ ID NO: 48020
gaucaucucguguaaugcu

SEQ ID NO: 48102 - RNA, 19 nt, Artificial Sequence
  Description of Artificial Sequence: Synthetic oligonucleotide
  Sense strand starting at position 196 of SEQ ID NO: 578
agcuguugucauuacuuaa

SEQ ID NO: 48103 - RNA, 19 nt, Artificial Sequence
  Description of Artificial Sequence: Synthetic oligonucleotide
  Antisense strand to SEQ ID NO: 48022
uuaaguaaugacaacagcu

SEQ ID NO: 48104 - RNA, 19 nt, Artificial Sequence
  Description of Artificial Sequence: Synthetic oligonucleotide
  Sense strand starting at position 695 of SEQ ID NO: 578
gguugcucuacagauagca

SEQ ID NO: 48105 - RNA, 19 nt, Artificial Sequence
  Description of Artificial Sequence: Synthetic oligonucleotide
  Antisense strand to SEQ ID NO: 48024
ugcuaucuguagagcaacc

SEQ ID NO: 48106 - RNA, 19 nt, Artificial Sequence
  Description of Artificial Sequence: Synthetic oligonucleotide
  Sense strand starting at position 804 of SEQ ID NO: 578
ggcuguuguaaauaaucag

SEQ ID NO: 48107 - RNA, 19 nt, Artificial Sequence
  Description of Artificial Sequence: Synthetic oligonucleotide
  Antisense strand to SEQ ID NO: 48026
cugauuauuuacaacagcc

SEQ ID NO: 48108 - RNA, 19 nt, Artificial Sequence
  Description of Artificial Sequence: Synthetic oligonucleotide
  Sense strand starting at position 1041 of SEQ ID NO: 578
ggaccucaguacucauaau

SEQ ID NO: 48109 - RNA, 19 nt, Artificial Sequence
  Description of Artificial Sequence: Synthetic oligonucleotide
  Antisense strand to SEQ ID NO: 48028
auuaugaguacugaggucc

SEQ ID NO: 48110 - RNA, 19 nt, Artificial Sequence
  Description of Artificial Sequence: Synthetic oligonucleotide
  Sense strand starting at position 1562 of SEQ ID NO: 578
ccaggcuuugguuacugau

SEQ ID NO: 48111 - RNA, 19 nt, Artificial Sequence
  Description of Artificial Sequence: Synthetic oligonucleotide
  Antisense strand to SEQ ID NO: 48030
aucaguaaccaaagccugg

SEQ ID NO: 48112 - RNA, 19 nt, Artificial Sequence
  Description of Artificial Sequence: Synthetic oligonucleotide
  Sense strand starting at position 1564 of SEQ ID NO: 578
aggcuuugguuacugauau

SEQ ID NO: 48113 - RNA, 19 nt, Artificial Sequence
  Description of Artificial Sequence: Synthetic oligonucleotide
  Antisense strand to SEQ ID NO: 48032
auaucaguaaccaaagccu

SEQ ID NO: 48114 - RNA, 19 nt, Artificial Sequence
  Description of Artificial Sequence: Synthetic oligonucleotide
  Sense strand starting at position 1571 of SEQ ID NO: 578
gguuacugauauuccuuga

SEQ ID NO: 48115 - RNA, 19 nt, Artificial Sequence
  Description of Artificial Sequence: Synthetic oligonucleotide
  Antisense strand to SEQ ID NO: 48034
ucaaggaauaucaguaacc

SEQ ID NO: 48116 - RNA, 19 nt, Artificial Sequence
  Description of Artificial Sequence: Synthetic oligonucleotide
  Sense strand starting at position 1574 of SEQ ID NO: 578
uacugauauuccuugagag

SEQ ID NO: 48117 - RNA, 19 nt, Artificial Sequence
  Description of Artificial Sequence: Synthetic oligonucleotide
  Antisense strand to SEQ ID NO: 48036
cucucaaggaauaucagua

SEQ ID NO: 48118 - RNA, 19 nt, Artificial Sequence
  Description of Artificial Sequence: Synthetic oligonucleotide
  Sense strand starting at position 1575 of SEQ ID NO: 578
acugauauuccuugagagu

SEQ ID NO: 48119 - RNA, 19 nt, Artificial Sequence
  Description of Artificial Sequence: Synthetic oligonucleotide
  Antisense strand to SEQ ID NO: 48038
acucucaaggaauaucagu

SEQ ID NO: 48120 - RNA, 19 nt, Artificial Sequence
  Description of Artificial Sequence: Synthetic oligonucleotide
  Sense strand starting at position 1576 of SEQ ID NO: 578
cugauauuccuugagaguc

SEQ ID NO: 48121 - RNA, 19 nt, Artificial Sequence
  Description of Artificial Sequence: Synthetic oligonucleotide
  Antisense strand to SEQ ID NO: 48040
gacucucaaggaauaucag

SEQ ID NO: 48122 - RNA, 19 nt, Artificial Sequence
  Description of Artificial Sequence: Synthetic oligonucleotide
  Sense strand starting at position 1613 of SEQ ID NO: 578
gggauaugcagagauguuc

SEQ ID NO: 48123 - RNA, 19 nt, Artificial Sequence
  Description of Artificial Sequence: Synthetic oligonucleotide
  Antisense strand to SEQ ID NO: 48042
gaacaucucugcauauccc

SEQ ID NO: 48124 - RNA, 19 nt, Artificial Sequence
  Description of Artificial Sequence: Synthetic oligonucleotide
  Sense strand starting at position 1651 of SEQ ID NO: 578
gggacuggcccuuaccauu

SEQ ID NO: 48125 - RNA, 19 nt, Artificial Sequence
  Description of Artificial Sequence: Synthetic oligonucleotide
  Antisense strand to SEQ ID NO: 48044
aaugguaagggccaguccc

SEQ ID NO: 48126 - RNA, 19 nt, Artificial Sequence
  Description of Artificial Sequence: Synthetic oligonucleotide
  Sense strand starting at position 1888 of SEQ ID NO: 578
ugguauggguauccauaau

SEQ ID NO: 48127 - RNA, 19 nt, Artificial Sequence
  Description of Artificial Sequence: Synthetic oligonucleotide
  Antisense strand to SEQ ID NO: 48046
auuauggauacccauacca

SEQ ID NO: 48128 - RNA, 19 nt, Artificial Sequence
  Description of Artificial Sequence: Synthetic oligonucleotide
  Sense strand starting at position 2052 of SEQ ID NO: 578
uccagaugugggugagaag

SEQ ID NO: 48129 - RNA, 19 nt, Artificial Sequence
  Description of Artificial Sequence: Synthetic oligonucleotide
  Antisense strand to SEQ ID NO: 48048
cuucucacccacaucugga

SEQ ID NO: 48130 - RNA, 19 nt, Artificial Sequence
  Description of Artificial Sequence: Synthetic oligonucleotide
  Sense strand starting at position 2189 of SEQ ID NO: 578
cuaagaagcucccuggaga

SEQ ID NO: 48131 - RNA, 19 nt, Artificial Sequence
  Description of Artificial Sequence: Synthetic oligonucleotide
  Antisense strand to SEQ ID NO: 48050
ucuccagggagcuucuuag

SEQ ID NO: 48132 - RNA, 19 nt, Artificial Sequence
  Description of Artificial Sequence: Synthetic oligonucleotide
  Sense strand starting at position 2190 of SEQ ID NO: 578
uaagaagcucccuggagaa

SEQ ID NO: 48133 - RNA, 19 nt, Artificial Sequence
  Description of Artificial Sequence: Synthetic oligonucleotide
  Antisense strand to SEQ ID NO: 48052
uucuccagggagcuucuua

SEQ ID NO: 48134 - RNA, 19 nt, Artificial Sequence
  Description of Artificial Sequence: Synthetic oligonucleotide
  Sense strand starting at position 2246 of SEQ ID NO: 578
ugcucuacccuguagaaau

SEQ ID NO: 48135 - RNA, 19 nt, Artificial Sequence
  Description of Artificial Sequence: Synthetic oligonucleotide
  Antisense strand to SEQ ID NO: 48054
auuucuacaggguagagca

SEQ ID NO: 48136 - RNA, 19 nt, Artificial Sequence
  Description of Artificial Sequence: Synthetic oligonucleotide
  Sense strand starting at position 2288 of SEQ ID NO: 578
guagcauauuugucccuca

SEQ ID NO: 48137 - RNA, 19 nt, Artificial Sequence
  Description of Artificial Sequence: Synthetic oligonucleotide
  Antisense strand to SEQ ID NO: 48056
ugagggacaaauaugcuac

SEQ ID NO: 48138 - RNA, 19 nt, Artificial Sequence
  Description of Artificial Sequence: Synthetic oligonucleotide
  Sense strand starting at position 2291 of SEQ ID NO: 578
gcauauuugucccucaccu

SEQ ID NO: 48139 - RNA, 19 nt, Artificial Sequence
  Description of Artificial Sequence: Synthetic oligonucleotide
  Antisense strand to SEQ ID NO: 48058
aggugagggacaaauaugc

SEQ ID NO: 48140 - RNA, 19 nt, Artificial Sequence
  Description of Artificial Sequence: Synthetic oligonucleotide
  Sense strand starting at position 2358 of SEQ ID NO: 578
cccuguauuuguucuccaa

SEQ ID NO: 48141 - RNA, 19 nt, Artificial Sequence
  Description of Artificial Sequence: Synthetic oligonucleotide
  Antisense strand to SEQ ID NO: 48060
uuggagaacaaauacaggg

SEQ ID NO: 48142 - RNA, 19 nt, Artificial Sequence
  Description of Artificial Sequence: Synthetic oligonucleotide
  Sense strand starting at position 2563 of SEQ ID NO: 578
gagaacucauaaguugcau

SEQ ID NO: 48143 - RNA, 19 nt, Artificial Sequence
  Description of Artificial Sequence: Synthetic oligonucleotide
  Antisense strand to SEQ ID NO: 48062
augcaacuuaugaguucuc

SEQ ID NO: 48144 - RNA, 19 nt, Artificial Sequence
  Description of Artificial Sequence: Synthetic oligonucleotide
  Sense strand starting at position 2616 of SEQ ID NO: 578
ggauaugauuucuacacuu

SEQ ID NO: 48145 - RNA, 19 nt, Artificial Sequence
  Description of Artificial Sequence: Synthetic oligonucleotide
  Antisense strand to SEQ ID NO: 48064
aaguguagaaaucauaucc

SEQ ID NO: 48146 - RNA, 19 nt, Artificial Sequence
  Description of Artificial Sequence: Synthetic oligonucleotide
  Sense strand starting at position 2666 of SEQ ID NO: 578
cagucaagucuagaaagug

SEQ ID NO: 48147 - RNA, 19 nt, Artificial Sequence
  Description of Artificial Sequence: Synthetic oligonucleotide
  Antisense strand to SEQ ID NO: 48066
cacuuucuagacuugacug

SEQ ID NO: 48148 - RNA, 19 nt, Artificial Sequence
  Description of Artificial Sequence: Synthetic oligonucleotide
  Sense strand starting at position 2700 of SEQ ID NO: 578
auguaauggguuuaaucua

SEQ ID NO: 48149 - RNA, 19 nt, Artificial Sequence
  Description of Artificial Sequence: Synthetic oligonucleotide
  Antisense strand to SEQ ID NO: 48068
uagauuaaacccauuacau

SEQ ID NO: 48150 - RNA, 19 nt, Artificial Sequence
  Description of Artificial Sequence: Synthetic oligonucleotide
  Sense strand starting at position 3104 of SEQ ID NO: 578
cuuguuauuguugaguaau

SEQ ID NO: 48151 - RNA, 19 nt, Artificial Sequence
  Description of Artificial Sequence: Synthetic oligonucleotide
  Antisense strand to SEQ ID NO: 48070
auuacucaacaauaacaag

SEQ ID NO: 48152 - RNA, 19 nt, Artificial Sequence
  Description of Artificial Sequence: Synthetic oligonucleotide
  Sense strand starting at position 3117 of SEQ ID NO: 578
aguaauauuccauagcaug

SEQ ID NO: 48153 - RNA, 19 nt, Artificial Sequence
  Description of Artificial Sequence: Synthetic oligonucleotide
  Antisense strand to SEQ ID NO: 48072
caugcuauggaauauuacu

SEQ ID NO: 48154 - RNA, 19 nt, Artificial Sequence
  Description of Artificial Sequence: Synthetic oligonucleotide
  Sense strand starting at position 3123 of SEQ ID NO: 578
auuccauagcauggaugua

SEQ ID NO: 48155 - RNA, 19 nt, Artificial Sequence
  Description of Artificial Sequence: Synthetic oligonucleotide
  Antisense strand to SEQ ID NO: 48074
uacauccaugcuauggaau

SEQ ID NO: 48156 - RNA, 19 nt, Artificial Sequence
  Description of Artificial Sequence: Synthetic oligonucleotide
  Sense strand starting at position 3135 of SEQ ID NO: 578
ggauguaccacagauuguu

SEQ ID NO: 48157 - RNA, 19 nt, Artificial Sequence
  Description of Artificial Sequence: Synthetic oligonucleotide
  Antisense strand to SEQ ID NO: 48076
aacaaucugugguacaucc

SEQ ID NO: 48158 - RNA, 19 nt, Artificial Sequence
  Description of Artificial Sequence: Synthetic oligonucleotide
  Sense strand starting at position 3141 of SEQ ID NO: 578
accacagauuguuuauaca

SEQ ID NO: 48159 - RNA, 19 nt, Artificial Sequence
  Description of Artificial Sequence: Synthetic oligonucleotide
  Antisense strand to SEQ ID NO: 48078
uguauaaacaaucuguggu

SEQ ID NO: 48160 - RNA, 19 nt, Artificial Sequence
  Description of Artificial Sequence: Synthetic oligonucleotide
  Sense strand starting at position 3334 of SEQ ID NO: 578
ggucaauaccuaggaguga

SEQ ID NO: 48161 - RNA, 19 nt, Artificial Sequence
  Description of Artificial Sequence: Synthetic oligonucleotide
  Antisense strand to SEQ ID NO: 48080
ucacuccuagguauugacc

SEQ ID NO: 48162 - RNA, 19 nt, Artificial Sequence
  Description of Artificial Sequence: Synthetic oligonucleotide
  Sense strand starting at position 3366 of SEQ ID NO: 578
caagguaauguauguuuaa

SEQ ID NO: 48163 - RNA, 19 nt, Artificial Sequence
  Description of Artificial Sequence: Synthetic oligonucleotide
  Antisense strand to SEQ ID NO: 48082
uuaaacauacauuaccuug

SEQ ID NO: 48164 - RNA, 19 nt, Artificial Sequence
  Description of Artificial Sequence: Synthetic oligonucleotide
  Sense strand starting at position 3367 of SEQ ID NO: 578
aagguaauguauguuuaac

SEQ ID NO: 48165 - RNA, 19 nt, Artificial Sequence
  Description of Artificial Sequence: Synthetic oligonucleotide
  Antisense strand to SEQ ID NO: 48084
guuaaacauacauuaccuu

SEQ ID NO: 48166 - RNA, 19 nt, Artificial Sequence
  Description of Artificial Sequence: Synthetic oligonucleotide
  Sense strand starting at position 3790 of SEQ ID NO: 578
ucaaauagguuuguaguga

SEQ ID NO: 48167 - RNA, 19 nt, Artificial Sequence
  Description of Artificial Sequence: Synthetic oligonucleotide
  Antisense strand to SEQ ID NO: 48086
ucacuacaaaccuauuuga

SEQ ID NO: 48168 - RNA, 19 nt, Artificial Sequence
  Description of Artificial Sequence: Synthetic oligonucleotide
  Sense strand starting at position 3804 of SEQ ID NO: 578
agugauauuucaguguggu

SEQ ID NO: 48169 - RNA, 19 nt, Artificial Sequence
  Description of Artificial Sequence: Synthetic oligonucleotide
  Antisense strand to SEQ ID NO: 48088
accacacugaaauaucacu

SEQ ID NO: 48170 - RNA, 19 nt, Artificial Sequence
  Description of Artificial Sequence: Synthetic oligonucleotide
  Sense strand starting at position 3805 of SEQ ID NO: 578
gugauauuucagugugguu

SEQ ID NO: 48171 - RNA, 19 nt, Artificial Sequence
  Description of Artificial Sequence: Synthetic oligonucleotide
  Antisense strand to SEQ ID NO: 48090
aaccacacugaaauaucac

SEQ ID NO: 48172 - RNA, 19 nt, Artificial Sequence
  Description of Artificial Sequence: Synthetic oligonucleotide
  Sense strand starting at position 63 of SEQ ID NO: 579
gguauucuagcucaugaau

SEQ ID NO: 48173 - RNA, 19 nt, Artificial Sequence
  Description of Artificial Sequence: Synthetic oligonucleotide
  Antisense strand to SEQ ID NO: 48092
auucaugagcuagaauacc

SEQ ID NO: 48174 - RNA, 19 nt, Artificial Sequence
  Description of Artificial Sequence: Synthetic oligonucleotide
  Sense strand starting at position 74 of SEQ ID NO: 579
ucaugaaucacggguauua

SEQ ID NO: 48175 - RNA, 19 nt, Artificial Sequence
  Description of Artificial Sequence: Synthetic oligonucleotide
  Antisense strand to SEQ ID NO: 48094
uaauacccgugauucauga

SEQ ID NO: 48176 - RNA, 19 nt, Artificial Sequence
  Description of Artificial Sequence: Synthetic oligonucleotide
  Sense strand starting at position 76 of SEQ ID NO: 579
augaaucacggguauuacu

SEQ ID NO: 48177 - RNA, 19 nt, Artificial Sequence
  Description of Artificial Sequence: Synthetic oligonucleotide
  Antisense strand to SEQ ID NO: 48096
aguaauacccgugauucau

SEQ ID NO: 48178 - RNA, 19 nt, Artificial Sequence
  Description of Artificial Sequence: Synthetic oligonucleotide
  Sense strand starting at position 84 of SEQ ID NO: 579
cggguauuacuuugaggga

SEQ ID NO: 48179 - RNA, 19 nt, Artificial Sequence
  Description of Artificial Sequence: Synthetic oligonucleotide
  Antisense strand to SEQ ID NO: 48098
ucccucaaaguaauacccg

SEQ ID NO: 48180 - RNA, 19 nt, Artificial Sequence
  Description of Artificial Sequence: Synthetic oligonucleotide
  Sense strand starting at position 110 of SEQ ID NO: 579
ggugcugugagugaugaaa

SEQ ID NO: 48181 - RNA, 19 nt, Artificial Sequence
  Description of Artificial Sequence: Synthetic oligonucleotide
  Antisense strand to SEQ ID NO: 48100
uuucaucacucacagcacc

SEQ ID NO: 48182 - RNA, 19 nt, Artificial Sequence
  Description of Artificial Sequence: Synthetic oligonucleotide
  Sense strand starting at position 119 of SEQ ID NO: 579
agugaugaaagauguuacu

SEQ ID NO: 48183 - RNA, 19 nt, Artificial Sequence
  Description of Artificial Sequence: Synthetic oligonucleotide
  Antisense strand to SEQ ID NO: 48102
aguaacaucuuucaucacu

SEQ ID NO: 48184 - RNA, 19 nt, Artificial Sequence
  Description of Artificial Sequence: Synthetic oligonucleotide
  Sense strand starting at position 128 of SEQ ID NO: 579
agauguuacugauuaaagu

SEQ ID NO: 48185 - RNA, 19 nt, Artificial Sequence
  Description of Artificial Sequence: Synthetic oligonucleotide
  Antisense strand to SEQ ID NO: 48104
acuuuaaucaguaacaucu

SEQ ID NO: 48186 - RNA, 19 nt, Artificial Sequence
  Description of Artificial Sequence: Synthetic oligonucleotide
  Sense strand starting at position 141 of SEQ ID NO: 579
uaaaguguugcacauauga

SEQ ID NO: 48187 - RNA, 19 nt, Artificial Sequence
  Description of Artificial Sequence: Synthetic oligonucleotide
  Antisense strand to SEQ ID NO: 48106
ucauaugugcaacacuuua

SEQ ID NO: 48188 - RNA, 19 nt, Artificial Sequence
  Description of Artificial Sequence: Synthetic oligonucleotide
  Sense strand starting at position 170 of SEQ ID NO: 579
agcugaagguguuugaaca

SEQ ID NO: 48189 - RNA, 19 nt, Artificial Sequence
  Description of Artificial Sequence: Synthetic oligonucleotide
  Antisense strand to SEQ ID NO: 48108
uguucaaacaccuucagcu

SEQ ID NO: 48190 - RNA, 19 nt, Artificial Sequence
  Description of Artificial Sequence: Synthetic oligonucleotide
  Sense strand starting at position 225 of SEQ ID NO: 579
ggccauauagacuaagguu

SEQ ID NO: 48191 - RNA, 19 nt, Artificial Sequence
  Description of Artificial Sequence: Synthetic oligonucleotide
  Antisense strand to SEQ ID NO: 48110
aaccuuagucuauauggcc

SEQ ID NO: 48192 - RNA, 19 nt, Artificial Sequence
  Description of Artificial Sequence: Synthetic oligonucleotide
  Sense strand starting at position 282 of SEQ ID NO: 579
auguucuuaguugaaacaa

SEQ ID NO: 48193 - RNA, 19 nt, Artificial Sequence
  Description of Artificial Sequence: Synthetic oligonucleotide
  Antisense strand to SEQ ID NO: 48112
uuguuucaacuaagaacau

SEQ ID NO: 48194 - RNA, 19 nt, Artificial Sequence
  Description of Artificial Sequence: Synthetic oligonucleotide
  Sense strand starting at position 341 of SEQ ID NO: 579
cuuucuccucaguagaaug

SEQ ID NO: 48195 - RNA, 19 nt, Artificial Sequence
  Description of Artificial Sequence: Synthetic oligonucleotide
  Antisense strand to SEQ ID NO: 48114
cauucuacugaggagaaag

SEQ ID NO: 48196 - RNA, 19 nt, Artificial Sequence
  Description of Artificial Sequence: Synthetic oligonucleotide
  Sense strand starting at position 346 of SEQ ID NO: 579
uccucaguagaauguaaga

SEQ ID NO: 48197 - RNA, 19 nt, Artificial Sequence
  Description of Artificial Sequence: Synthetic oligonucleotide
  Antisense strand to SEQ ID NO: 48116
ucuuacauucuacugagga

SEQ ID NO: 48198 - RNA, 19 nt, Artificial Sequence
  Description of Artificial Sequence: Synthetic oligonucleotide
  Sense strand starting at position 362 of SEQ ID NO: 579
agaacugauuucgaagaca

SEQ ID NO: 48199 - RNA, 19 nt, Artificial Sequence
  Description of Artificial Sequence: Synthetic oligonucleotide
  Antisense strand to SEQ ID NO: 48118
ugucuucgaaaucaguucu

SEQ ID NO: 48200 - RNA, 19 nt, Artificial Sequence
  Description of Artificial Sequence: Synthetic oligonucleotide
  Sense strand starting at position 393 of SEQ ID NO: 579
gaaaucaguuaagcagaua

SEQ ID NO: 48201 - RNA, 19 nt, Artificial Sequence
  Description of Artificial Sequence: Synthetic oligonucleotide
  Antisense strand to SEQ ID NO: 48120
uaucugcuuaacugauuuc

SEQ ID NO: 48202 - RNA, 19 nt, Artificial Sequence
  Description of Artificial Sequence: Synthetic oligonucleotide
  Sense strand starting at position 455 of SEQ ID NO: 579
agucaacuccgauaucuua

SEQ ID NO: 48203 - RNA, 19 nt, Artificial Sequence
  Description of Artificial Sequence: Synthetic oligonucleotide
  Antisense strand to SEQ ID NO: 48122
uaagauaucggaguugacu

SEQ ID NO: 48204 - RNA, 19 nt, Artificial Sequence
  Description of Artificial Sequence: Synthetic oligonucleotide
  Sense strand starting at position 768 of SEQ ID NO: 579
aguuauggagccuggagaa

SEQ ID NO: 48205 - RNA, 19 nt, Artificial Sequence
  Description of Artificial Sequence: Synthetic oligonucleotide
  Antisense strand to SEQ ID NO: 48124
uucuccaggcuccauaacu

SEQ ID NO: 48206 - RNA, 19 nt, Artificial Sequence
  Description of Artificial Sequence: Synthetic oligonucleotide
  Sense strand starting at position 790 of SEQ ID NO: 579
aggacuacuuccucccaga

SEQ ID NO: 48207 - RNA, 19 nt, Artificial Sequence
  Description of Artificial Sequence: Synthetic oligonucleotide
  Antisense strand to SEQ ID NO: 48126
ucugggaggaaguaguccu

SEQ ID NO: 48208 - RNA, 19 nt, Artificial Sequence
  Description of Artificial Sequence: Synthetic oligonucleotide
  Sense strand starting at position 1129 of SEQ ID NO: 579
ugccaugucguuucaggua

SEQ ID NO: 48209 - RNA, 19 nt, Artificial Sequence
  Description of Artificial Sequence: Synthetic oligonucleotide
  Antisense strand to SEQ ID NO: 48128
uaccugaaacgacauggca

SEQ ID NO: 48210 - RNA, 19 nt, Artificial Sequence
  Description of Artificial Sequence: Synthetic oligonucleotide
  Sense strand starting at position 1455 of SEQ ID NO: 579
ggguagaacgugugggaaa

SEQ ID NO: 48211 - RNA, 19 nt, Artificial Sequence
  Description of Artificial Sequence: Synthetic oligonucleotide
  Antisense strand to SEQ ID NO: 48130
uuucccacacguucuaccc

SEQ ID NO: 48212 - RNA, 19 nt, Artificial Sequence
  Description of Artificial Sequence: Synthetic oligonucleotide
  Sense strand starting at position 1561 of SEQ ID NO: 579
ccugaaaucucuuccgaag

SEQ ID NO: 48213 - RNA, 19 nt, Artificial Sequence
  Description of Artificial Sequence: Synthetic oligonucleotide
  Antisense strand to SEQ ID NO: 48132
cuucggaagagauuucagg

SEQ ID NO: 48214 - RNA, 19 nt, Artificial Sequence
  Description of Artificial Sequence: Synthetic oligonucleotide
  Sense strand starting at position 2297 of SEQ ID NO: 579
ccgcgagauguagauacau

SEQ ID NO: 48215 - RNA, 19 nt, Artificial Sequence
  Description of Artificial Sequence: Synthetic oligonucleotide
  Antisense strand to SEQ ID NO: 48134
auguaucuacaucucgcgg

SEQ ID NO: 48216 - RNA, 19 nt, Artificial Sequence
  Description of Artificial Sequence: Synthetic oligonucleotide
  Sense strand starting at position 2299 of SEQ ID NO: 579
gcgagauguagauacauug

SEQ ID NO: 48217 - RNA, 19 nt, Artificial Sequence
  Description of Artificial Sequence: Synthetic oligonucleotide
  Antisense strand to SEQ ID NO: 48136
caauguaucuacaucucgc

SEQ ID NO: 48218 - RNA, 19 nt, Artificial Sequence
  Description of Artificial Sequence: Synthetic oligonucleotide
  Sense strand starting at position 2522 of SEQ ID NO: 579
gcaggugguacauaaucaa

SEQ ID NO: 48219 - RNA, 19 nt, Artificial Sequence
  Description of Artificial Sequence: Synthetic oligonucleotide
  Antisense strand to SEQ ID NO: 48138
uugauuauguaccaccugc

SEQ ID NO: 48220 - RNA, 19 nt, Artificial Sequence
  Description of Artificial Sequence: Synthetic oligonucleotide
  Sense strand starting at position 2526 of SEQ ID NO: 579
gugguacauaaucaagguu

SEQ ID NO: 48221 - RNA, 19 nt, Artificial Sequence
  Description of Artificial Sequence: Synthetic oligonucleotide
  Antisense strand to SEQ ID NO: 48140
aaccuugauuauguaccac

SEQ ID NO: 48222 - RNA, 19 nt, Artificial Sequence
  Description of Artificial Sequence: Synthetic oligonucleotide
  Sense strand starting at position 2719 of SEQ ID NO: 579
ugaggauauguguacucca

SEQ ID NO: 48223 - RNA, 19 nt, Artificial Sequence
  Description of Artificial Sequence: Synthetic oligonucleotide
  Antisense strand to SEQ ID NO: 48142
uggaguacacauauccuca

SEQ ID NO: 48224 - RNA, 19 nt, Artificial Sequence
  Description of Artificial Sequence: Synthetic oligonucleotide
  Sense strand starting at position 2722 of SEQ ID NO: 579
ggauauguguacuccagac

SEQ ID NO: 48225 - RNA, 19 nt, Artificial Sequence
  Description of Artificial Sequence: Synthetic oligonucleotide
  Antisense strand to SEQ ID NO: 48144
gucuggaguacacauaucc

SEQ ID NO: 48226 - RNA, 19 nt, Artificial Sequence
  Description of Artificial Sequence: Synthetic oligonucleotide
  Sense strand starting at position 2812 of SEQ ID NO: 579
uucuacuuccguuaggaca

SEQ ID NO: 48227 - RNA, 19 nt, Artificial Sequence
  Description of Artificial Sequence: Synthetic oligonucleotide
  Antisense strand to SEQ ID NO: 48146
uguccuaacggaaguagaa

SEQ ID NO: 48228 - RNA, 19 nt, Artificial Sequence
  Description of Artificial Sequence: Synthetic oligonucleotide
  Sense strand starting at position 2929 of SEQ ID NO: 579
caacgaauauguuuauuga

SEQ ID NO: 48229 - RNA, 19 nt, Artificial Sequence
  Description of Artificial Sequence: Synthetic oligonucleotide
  Antisense strand to SEQ ID NO: 48148
ucaauaaacauauucguug

SEQ ID NO: 48230 - RNA, 19 nt, Artificial Sequence
  Description of Artificial Sequence: Synthetic oligonucleotide
  Sense strand starting at position 2980 of SEQ ID NO: 579
cuagguucuccggauauag

SEQ ID NO: 48231 - RNA, 19 nt, Artificial Sequence
  Description of Artificial Sequence: Synthetic oligonucleotide
  Antisense strand to SEQ ID NO: 48150
cuauauccggagaaccuag

SEQ ID NO: 48232 - RNA, 19 nt, Artificial Sequence
  Description of Artificial Sequence: Synthetic oligonucleotide
  Sense strand starting at position 3013 of SEQ ID NO: 579
caucacugucauggagauu

SEQ ID NO: 48233 - RNA, 19 nt, Artificial Sequence
  Description of Artificial Sequence: Synthetic oligonucleotide
  Antisense strand to SEQ ID NO: 48152
aaucuccaugacagugaug

SEQ ID NO: 48234 - RNA, 19 nt, Artificial Sequence
  Description of Artificial Sequence: Synthetic oligonucleotide
  Sense strand starting at position 3127 of SEQ ID NO: 579
ugagaaggcuucucugaac

SEQ ID NO: 48235 - RNA, 19 nt, Artificial Sequence
  Description of Artificial Sequence: Synthetic oligonucleotide
  Antisense strand to SEQ ID NO: 48154
guucagagaagccuucuca

SEQ ID NO: 48236 - RNA, 19 nt, Artificial Sequence
  Description of Artificial Sequence: Synthetic oligonucleotide
  Sense strand starting at position 3161 of SEQ ID NO: 579
cuuccagaaccuggaaauu

SEQ ID NO: 48237 - RNA, 19 nt, Artificial Sequence
  Description of Artificial Sequence: Synthetic oligonucleotide
  Antisense strand to SEQ ID NO: 48156
aauuuccagguucuggaag

SEQ ID NO: 48238 - RNA, 19 nt, Artificial Sequence
  Description of Artificial Sequence: Synthetic oligonucleotide
  Sense strand starting at position 3476 of SEQ ID NO: 579
ccagguacccaugguauaa

SEQ ID NO: 48239 - RNA, 19 nt, Artificial Sequence
  Description of Artificial Sequence: Synthetic oligonucleotide
  Antisense strand to SEQ ID NO: 48158
uuauaccauggguaccugg

SEQ ID NO: 48240 - RNA, 19 nt, Artificial Sequence
  Description of Artificial Sequence: Synthetic oligonucleotide
  Sense strand starting at position 3538 of SEQ ID NO: 579
cuaguaaccgcugaauaac

SEQ ID NO: 48241 - RNA, 19 nt, Artificial Sequence
  Description of Artificial Sequence: Synthetic oligonucleotide
  Antisense strand to SEQ ID NO: 48160
guuauucagcgguuacuag

SEQ ID NO: 48242 - RNA, 19 nt, Artificial Sequence
  Description of Artificial Sequence: Synthetic oligonucleotide
  Sense strand starting at position 3839 of SEQ ID NO: 579
gucuucuauuuagagagga

SEQ ID NO: 48243 - RNA, 19 nt, Artificial Sequence
  Description of Artificial Sequence: Synthetic oligonucleotide
  Antisense strand to SEQ ID NO: 48162
uccucucuaaauagaagac

SEQ ID NO: 48244 - RNA, 19 nt, Artificial Sequence
  Description of Artificial Sequence: Synthetic oligonucleotide
  Sense strand starting at position 3898 of SEQ ID NO: 579
acuggauacucaguuccua

SEQ ID NO: 48245 - RNA, 19 nt, Artificial Sequence
  Description of Artificial Sequence: Synthetic oligonucleotide
  Antisense strand to SEQ ID NO: 48164
uaggaacugaguauccagu

SEQ ID NO: 48246 - RNA, 19 nt, Artificial Sequence
  Description of Artificial Sequence: Synthetic oligonucleotide
  Sense strand starting at position 3940 of SEQ ID NO: 579
ccaagaacacuuggugauu

SEQ ID NO: 48247 - RNA, 19 nt, Artificial Sequence
  Description of Artificial Sequence: Synthetic oligonucleotide
  Antisense strand to SEQ ID NO: 48166
aaucaccaaguguucuugg

SEQ ID NO: 48248 - RNA, 19 nt, Artificial Sequence
  Description of Artificial Sequence: Synthetic oligonucleotide
  Sense strand starting at position 3946 of SEQ ID NO: 579
acacuuggugauugaauga

SEQ ID NO: 48249 - RNA, 19 nt, Artificial Sequence
  Description of Artificial Sequence: Synthetic oligonucleotide
  Antisense strand to SEQ ID NO: 48168
ucauucaaucaccaagugu

SEQ ID NO: 48250 - RNA, 19 nt, Artificial Sequence
  Description of Artificial Sequence: Synthetic oligonucleotide
  Sense strand starting at position 3969 of SEQ ID NO: 579
aguacauucguuuauacac

SEQ ID NO: 48251 - RNA, 19 nt, Artificial Sequence
  Description of Artificial Sequence: Synthetic oligonucleotide
  Antisense strand to SEQ ID NO: 48170
guguauaaacgaauguacu

SEQ ID NO: 48252 - RNA, 19 nt, Artificial Sequence
  Description of Artificial Sequence: Synthetic oligonucleotide
  Sense strand starting at position 3614 of SEQ ID NO: 580
ucuuuaauuucugaagugu

SEQ ID NO: 48253 - RNA, 19 nt, Artificial Sequence
  Description of Artificial Sequence: Synthetic oligonucleotide
  Antisense strand to SEQ ID NO: 48172
acacuucagaaauuaaaga

SEQ ID NO: 48254 - RNA, 19 nt, Artificial Sequence
  Description of Artificial Sequence: Synthetic oligonucleotide
  Sense strand starting at position 3538 of SEQ ID NO: 580
ugcugcucucaagaagaca

SEQ ID NO: 48255 - RNA, 19 nt, Artificial Sequence
  Description of Artificial Sequence: Synthetic oligonucleotide
  Antisense strand to SEQ ID NO: 48174
ugucuucuugagagcagca

SEQ ID NO: 48256 - RNA, 19 nt, Artificial Sequence
  Description of Artificial Sequence: Synthetic oligonucleotide
  Sense strand starting at position 3532 of SEQ ID NO: 580
ccuauaugcugcucucaag

SEQ ID NO: 48257 - RNA, 19 nt, Artificial Sequence
  Description of Artificial Sequence: Synthetic oligonucleotide
  Antisense strand to SEQ ID NO: 48176
cuugagagcagcauauagg

SEQ ID NO: 48258 - RNA, 19 nt, Artificial Sequence
  Description of Artificial Sequence: Synthetic oligonucleotide
  Sense strand starting at position 3380 of SEQ ID NO: 580
cuauaaauagugggauguu

SEQ ID NO: 48259 - RNA, 19 nt, Artificial Sequence
  Description of Artificial Sequence: Synthetic oligonucleotide
  Antisense strand to SEQ ID NO: 48178
aacaucccacuauuuauag

SEQ ID NO: 48260 - RNA, 19 nt, Artificial Sequence
  Description of Artificial Sequence: Synthetic oligonucleotide
  Sense strand starting at position 3379 of SEQ ID NO: 580
acuauaaauagugggaugu

SEQ ID NO: 48261 - RNA, 19 nt, Artificial Sequence
  Description of Artificial Sequence: Synthetic oligonucleotide
  Antisense strand to SEQ ID NO: 48180
acaucccacuauuuauagu

SEQ ID NO: 48262 - RNA, 19 nt, Artificial Sequence
  Description of Artificial Sequence: Synthetic oligonucleotide
  Sense strand starting at position 3288 of SEQ ID NO: 580
agaacaagauucuuugucu

SEQ ID NO: 48263 - RNA, 19 nt, Artificial Sequence
  Description of Artificial Sequence: Synthetic oligonucleotide
  Antisense strand to SEQ ID NO: 48182
agacaaagaaucuuguucu

SEQ ID NO: 48264 - RNA, 19 nt, Artificial Sequence
  Description of Artificial Sequence: Synthetic oligonucleotide
  Sense strand starting at position 3113 of SEQ ID NO: 580
aguauagccucuucuauau

SEQ ID NO: 48265 - RNA, 19 nt, Artificial Sequence
  Description of Artificial Sequence: Synthetic oligonucleotide
  Antisense strand to SEQ ID NO: 48184
auauagaagaggcuauacu

SEQ ID NO: 48266 - RNA, 19 nt, Artificial Sequence
  Description of Artificial Sequence: Synthetic oligonucleotide
  Sense strand starting at position 2925 of SEQ ID NO: 580
ggcucaucauaccuguaaa

SEQ ID NO: 48267 - RNA, 19 nt, Artificial Sequence
  Description of Artificial Sequence: Synthetic oligonucleotide
  Antisense strand to SEQ ID NO: 48186
uuuacagguaugaugagcc

SEQ ID NO: 48268 - RNA, 19 nt, Artificial Sequence
  Description of Artificial Sequence: Synthetic oligonucleotide
  Sense strand starting at position 2916 of SEQ ID NO: 580
aggcguuguggcucaucau

SEQ ID NO: 48269 - RNA, 19 nt, Artificial Sequence
  Description of Artificial Sequence: Synthetic oligonucleotide
  Antisense strand to SEQ ID NO: 48188
augaugagccacaacgccu

SEQ ID NO: 48270 - RNA, 19 nt, Artificial Sequence
  Description of Artificial Sequence: Synthetic oligonucleotide
  Sense strand starting at position 2848 of SEQ ID NO: 580
uaguaauaucaacaggugu

SEQ ID NO: 48271 - RNA, 19 nt, Artificial Sequence
  Description of Artificial Sequence: Synthetic oligonucleotide
  Antisense strand to SEQ ID NO: 48190
acaccuguugauauuacua

SEQ ID NO: 48272 - RNA, 19 nt, Artificial Sequence
  Description of Artificial Sequence: Synthetic oligonucleotide
  Sense strand starting at position 2836 of SEQ ID NO: 580
uuccauagugacuaguaau

SEQ ID NO: 48273 - RNA, 19 nt, Artificial Sequence
  Description of Artificial Sequence: Synthetic oligonucleotide
  Antisense strand to SEQ ID NO: 48192
auuacuagucacuauggaa

SEQ ID NO: 48274 - RNA, 19 nt, Artificial Sequence
  Description of Artificial Sequence: Synthetic oligonucleotide
  Sense strand starting at position 2718 of SEQ ID NO: 580
ggcauacaaugagcuauau

SEQ ID NO: 48275 - RNA, 19 nt, Artificial Sequence
  Description of Artificial Sequence: Synthetic oligonucleotide
  Antisense strand to SEQ ID NO: 48194
auauagcucauuguaugcc

SEQ ID NO: 48276 - RNA, 19 nt, Artificial Sequence
  Description of Artificial Sequence: Synthetic oligonucleotide
  Sense strand starting at position 2705 of SEQ ID NO: 580
aguggaaaugcauggcaua

SEQ ID NO: 48277 - RNA, 19 nt, Artificial Sequence
  Description of Artificial Sequence: Synthetic oligonucleotide
  Antisense strand to SEQ ID NO: 48196
uaugccaugcauuuccacu

SEQ ID NO: 48278 - RNA, 19 nt, Artificial Sequence
  Description of Artificial Sequence: Synthetic oligonucleotide
  Sense strand starting at position 2627 of SEQ ID NO: 580
guuacuugccuagaggcaa

SEQ ID NO: 48279 - RNA, 19 nt, Artificial Sequence
  Description of Artificial Sequence: Synthetic oligonucleotide
  Antisense strand to SEQ ID NO: 48198
uugccucuaggcaaguaac

SEQ ID NO: 48280 - RNA, 19 nt, Artificial Sequence
  Description of Artificial Sequence: Synthetic oligonucleotide
  Sense strand starting at position 2623 of SEQ ID NO: 580
agaaguuacuugccuagag

SEQ ID NO: 48281 - RNA, 19 nt, Artificial Sequence
  Description of Artificial Sequence: Synthetic oligonucleotide
  Antisense strand to SEQ ID NO: 48200
cucuaggcaaguaacuucu

SEQ ID NO: 48282 - RNA, 19 nt, Artificial Sequence
  Description of Artificial Sequence: Synthetic oligonucleotide
  Sense strand starting at position 2621 of SEQ ID NO: 580
agagaaguuacuugccuag

SEQ ID NO: 48283 - RNA, 19 nt, Artificial Sequence
  Description of Artificial Sequence: Synthetic oligonucleotide
  Antisense strand to SEQ ID NO: 48202
cuaggcaaguaacuucucu

SEQ ID NO: 48284 - RNA, 19 nt, Artificial Sequence
  Description of Artificial Sequence: Synthetic oligonucleotide
  Sense strand starting at position 2432 of SEQ ID NO: 580
gauugaaagugagaagaau

SEQ ID NO: 48285 - RNA, 19 nt, Artificial Sequence
  Description of Artificial Sequence: Synthetic oligonucleotide
  Antisense strand to SEQ ID NO: 48204
auucuucucacuuucaauc

SEQ ID NO: 48286 - RNA, 19 nt, Artificial Sequence
  Description of Artificial Sequence: Synthetic oligonucleotide
  Sense strand starting at position 2402 of SEQ ID NO: 580
cuuugcuauuccuuuagga

SEQ ID NO: 48287 - RNA, 19 nt, Artificial Sequence
  Description of Artificial Sequence: Synthetic oligonucleotide
  Antisense strand to SEQ ID NO: 48206
uccuaaaggaauagcaaag

SEQ ID NO: 48288 - RNA, 19 nt, Artificial Sequence
  Description of Artificial Sequence: Synthetic oligonucleotide
  Sense strand starting at position 2302 of SEQ ID NO: 580
gaaggaucgucucuacccu

SEQ ID NO: 48289 - RNA, 19 nt, Artificial Sequence
  Description of Artificial Sequence: Synthetic oligonucleotide
  Antisense strand to SEQ ID NO: 48208
aggguagagacgauccuuc

SEQ ID NO: 48290 - RNA, 19 nt, Artificial Sequence
  Description of Artificial Sequence: Synthetic oligonucleotide
  Sense strand starting at position 2299 of SEQ ID NO: 580
gaggaaggaucgucucuac

SEQ ID NO: 48291 - RNA, 19 nt, Artificial Sequence
  Description of Artificial Sequence: Synthetic oligonucleotide
  Antisense strand to SEQ ID NO: 48210
guagagacgauccuuccuc

SEQ ID NO: 48292 - RNA, 19 nt, Artificial Sequence
  Description of Artificial Sequence: Synthetic oligonucleotide
  Sense strand starting at position 1047 of SEQ ID NO: 580
cacgacuuaccuuguauga

SEQ ID NO: 48293 - RNA, 19 nt, Artificial Sequence
  Description of Artificial Sequence: Synthetic oligonucleotide
  Antisense strand to SEQ ID NO: 48212
ucauacaagguaagucgug

SEQ ID NO: 48294 - RNA, 19 nt, Artificial Sequence
  Description of Artificial Sequence: Synthetic oligonucleotide
  Sense strand starting at position 1005 of SEQ ID NO: 580
gcagacugcuacccuagaa

SEQ ID NO: 48295 - RNA, 19 nt, Artificial Sequence
  Description of Artificial Sequence: Synthetic oligonucleotide
  Antisense strand to SEQ ID NO: 48214
uucuaggguagcagucugc

SEQ ID NO: 48296 - RNA, 19 nt, Artificial Sequence
  Description of Artificial Sequence: Synthetic oligonucleotide
  Sense strand starting at position 946 of SEQ ID NO: 580
uuaaguuacuuaccaggga

SEQ ID NO: 48297 - RNA, 19 nt, Artificial Sequence
  Description of Artificial Sequence: Synthetic oligonucleotide
  Antisense strand to SEQ ID NO: 48216
ucccugguaaguaacuuaa

SEQ ID NO: 48298 - RNA, 19 nt, Artificial Sequence
  Description of Artificial Sequence: Synthetic oligonucleotide
  Sense strand starting at position 855 of SEQ ID NO: 580
auguauucgcuggaugaaa

SEQ ID NO: 48299 - RNA, 19 nt, Artificial Sequence
  Description of Artificial Sequence: Synthetic oligonucleotide
  Antisense strand to SEQ ID NO: 48218
uuucauccagcgaauacau

SEQ ID NO: 48300 - RNA, 19 nt, Artificial Sequence
  Description of Artificial Sequence: Synthetic oligonucleotide
  Sense strand starting at position 854 of SEQ ID NO: 580
cauguauucgcuggaugaa

SEQ ID NO: 48301 - RNA, 19 nt, Artificial Sequence
  Description of Artificial Sequence: Synthetic oligonucleotide
  Antisense strand to SEQ ID NO: 48220
uucauccagcgaauacaug

SEQ ID NO: 48302 - RNA, 19 nt, Artificial Sequence
  Description of Artificial Sequence: Synthetic oligonucleotide
  Sense strand starting at position 853 of SEQ ID NO: 580
acauguauucgcuggauga

SEQ ID NO: 48303 - RNA, 19 nt, Artificial Sequence
  Description of Artificial Sequence: Synthetic oligonucleotide
  Antisense strand to SEQ ID NO: 48222
ucauccagcgaauacaugu

SEQ ID NO: 48304 - RNA, 19 nt, Artificial Sequence
  Description of Artificial Sequence: Synthetic oligonucleotide
  Sense strand starting at position 851 of SEQ ID NO: 580
uuacauguauucgcuggau

SEQ ID NO: 48305 - RNA, 19 nt, Artificial Sequence
  Description of Artificial Sequence: Synthetic oligonucleotide
  Antisense strand to SEQ ID NO: 48224
auccagcgaauacauguaa

SEQ ID NO: 48306 - RNA, 19 nt, Artificial Sequence
  Description of Artificial Sequence: Synthetic oligonucleotide
  Sense strand starting at position 840 of SEQ ID NO: 580
guuugcacuccuuacaugu

SEQ ID NO: 48307 - RNA, 19 nt, Artificial Sequence
  Description of Artificial Sequence: Synthetic oligonucleotide
  Antisense strand to SEQ ID NO: 48226
acauguaaggagugcaaac

SEQ ID NO: 48308 - RNA, 19 nt, Artificial Sequence
  Description of Artificial Sequence: Synthetic oligonucleotide
  Sense strand starting at position 717 of SEQ ID NO: 580
uucugcguuccuuaauuau

SEQ ID NO: 48309 - RNA, 19 nt, Artificial Sequence
  Description of Artificial Sequence: Synthetic oligonucleotide
  Antisense strand to SEQ ID NO: 48228
auaauuaaggaacgcagaa

SEQ ID NO: 48310 - RNA, 19 nt, Artificial Sequence
  Description of Artificial Sequence: Synthetic oligonucleotide
  Sense strand starting at position 715 of SEQ ID NO: 580
auuucugcguuccuuaauu

SEQ ID NO: 48311 - RNA, 19 nt, Artificial Sequence
  Description of Artificial Sequence: Synthetic oligonucleotide
  Antisense strand to SEQ ID NO: 48230
aauuaaggaacgcagaaau

SEQ ID NO: 48312 - RNA, 19 nt, Artificial Sequence
  Description of Artificial Sequence: Synthetic oligonucleotide
  Sense strand starting at position 711 of SEQ ID NO: 580
gagaauuucugcguuccuu

SEQ ID NO: 48313 - RNA, 19 nt, Artificial Sequence
  Description of Artificial Sequence: Synthetic oligonucleotide
  Antisense strand to SEQ ID NO: 48232
aaggaacgcagaaauucuc

SEQ ID NO: 48314 - RNA, 19 nt, Artificial Sequence
  Description of Artificial Sequence: Synthetic oligonucleotide
  Sense strand starting at position 710 of SEQ ID NO: 580
ggagaauuucugcguuccu

SEQ ID NO: 48315 - RNA, 19 nt, Artificial Sequence
  Description of Artificial Sequence: Synthetic oligonucleotide
  Antisense strand to SEQ ID NO: 48234
aggaacgcagaaauucucc

SEQ ID NO: 48316 - RNA, 19 nt, Artificial Sequence
  Description of Artificial Sequence: Synthetic oligonucleotide
  Sense strand starting at position 679 of SEQ ID NO: 580
aguuccuccgucugaauuu

SEQ ID NO: 48317 - RNA, 19 nt, Artificial Sequence
  Description of Artificial Sequence: Synthetic oligonucleotide
  Antisense strand to SEQ ID NO: 48236
aaauucagacggaggaacu

SEQ ID NO: 48318 - RNA, 19 nt, Artificial Sequence
  Description of Artificial Sequence: Synthetic oligonucleotide
  Sense strand starting at position 676 of SEQ ID NO: 580
ugaaguuccuccgucugaa

SEQ ID NO: 48319 - RNA, 19 nt, Artificial Sequence
  Description of Artificial Sequence: Synthetic oligonucleotide
  Antisense strand to SEQ ID NO: 48238
uucagacggaggaacuuca

SEQ ID NO: 48320 - RNA, 19 nt, Artificial Sequence
  Description of Artificial Sequence: Synthetic oligonucleotide
  Sense strand starting at position 617 of SEQ ID NO: 580
uuuccucuacauuggugaa

SEQ ID NO: 48321 - RNA, 19 nt, Artificial Sequence
  Description of Artificial Sequence: Synthetic oligonucleotide
  Antisense strand to SEQ ID NO: 48240
uucaccaauguagaggaaa

SEQ ID NO: 48322 - RNA, 19 nt, Artificial Sequence
  Description of Artificial Sequence: Synthetic oligonucleotide
  Sense strand starting at position 560 of SEQ ID NO: 580
cguugaacacauuguaugu

SEQ ID NO: 48323 - RNA, 19 nt, Artificial Sequence
  Description of Artificial Sequence: Synthetic oligonucleotide
  Antisense strand to SEQ ID NO: 48242
acauacaauguguucaacg

SEQ ID NO: 48324 - RNA, 19 nt, Artificial Sequence
  Description of Artificial Sequence: Synthetic oligonucleotide
  Sense strand starting at position 466 of SEQ ID NO: 580
ggaguuauuugguaacuca

SEQ ID NO: 48325 - RNA, 19 nt, Artificial Sequence
  Description of Artificial Sequence: Synthetic oligonucleotide
  Antisense strand to SEQ ID NO: 48244
ugaguuaccaaauaacucc

SEQ ID NO: 48326 - RNA, 19 nt, Artificial Sequence
  Description of Artificial Sequence: Synthetic oligonucleotide
  Sense strand starting at position 148 of SEQ ID NO: 580
auauguuucuccucucuga

SEQ ID NO: 48327 - RNA, 19 nt, Artificial Sequence
  Description of Artificial Sequence: Synthetic oligonucleotide
  Antisense strand to SEQ ID NO: 48246
ucagagaggagaaacauau

SEQ ID NO: 48328 - RNA, 19 nt, Artificial Sequence
  Description of Artificial Sequence: Synthetic oligonucleotide
  Sense strand starting at position 144 of SEQ ID NO: 580
guaaauauguuucuccucu

SEQ ID NO: 48329 - RNA, 19 nt, Artificial Sequence
  Description of Artificial Sequence: Synthetic oligonucleotide
  Antisense strand to SEQ ID NO: 48248
agaggagaaacauauuuac

SEQ ID NO: 48330 - RNA, 19 nt, Artificial Sequence
  Description of Artificial Sequence: Synthetic oligonucleotide
  Sense strand starting at position 117 of SEQ ID NO: 580
agguacguucccgaaacau

SEQ ID NO: 48331 - RNA, 19 nt, Artificial Sequence
  Description of Artificial Sequence: Synthetic oligonucleotide
  Antisense strand to SEQ ID NO: 48250
auguuucgggaacguaccu

SEQ ID NO: 48332 - RNA, 19 nt, Artificial Sequence
  Description of Artificial Sequence: Synthetic oligonucleotide
  Sense strand starting at position 14 of SEQ ID NO: 581
guuguuuaaacugacaguu

SEQ ID NO: 48333 - RNA, 19 nt, Artificial Sequence
  Description of Artificial Sequence: Synthetic oligonucleotide
  Antisense strand to SEQ ID NO: 48252
aacugucaguuuaaacaac

SEQ ID NO: 48334 - RNA, 19 nt, Artificial Sequence
  Description of Artificial Sequence: Synthetic oligonucleotide
  Sense strand starting at position 46 of SEQ ID NO: 581
cuugaaaugguuuaccagu

SEQ ID NO: 48335 - RNA, 19 nt, Artificial Sequence
  Description of Artificial Sequence: Synthetic oligonucleotide
  Antisense strand to SEQ ID NO: 48254
acugguaaaccauuucaag

SEQ ID NO: 48336 - RNA, 19 nt, Artificial Sequence
  Description of Artificial Sequence: Synthetic oligonucleotide
  Sense strand starting at position 48 of SEQ ID NO: 581
ugaaaugguuuaccaguuu

SEQ ID NO: 48337 - RNA, 19 nt, Artificial Sequence
  Description of Artificial Sequence: Synthetic oligonucleotide
  Antisense strand to SEQ ID NO: 48256
aaacugguaaaccauuuca

SEQ ID NO: 48338 - RNA, 19 nt, Artificial Sequence
  Description of Artificial Sequence: Synthetic oligonucleotide
  Sense strand starting at position 67 of SEQ ID NO: 581
gcgaaugacaacugaggaa

SEQ ID NO: 48339 - RNA, 19 nt, Artificial Sequence
  Description of Artificial Sequence: Synthetic oligonucleotide
  Antisense strand to SEQ ID NO: 48258
uuccucaguugucauucgc

SEQ ID NO: 48340 - RNA, 19 nt, Artificial Sequence
  Description of Artificial Sequence: Synthetic oligonucleotide
  Sense strand starting at position 109 of SEQ ID NO: 581
gaagacuaauugucaaugu

SEQ ID NO: 48341 - RNA, 19 nt, Artificial Sequence
  Description of Artificial Sequence: Synthetic oligonucleotide
  Antisense strand to SEQ ID NO: 48260
acauugacaauuagucuuc

SEQ ID NO: 48342 - RNA, 19 nt, Artificial Sequence
  Description of Artificial Sequence: Synthetic oligonucleotide
  Sense strand starting at position 147 of SEQ ID NO: 581
gaaagcauugcugaguaau

SEQ ID NO: 48343 - RNA, 19 nt, Artificial Sequence
  Description of Artificial Sequence: Synthetic oligonucleotide
  Antisense strand to SEQ ID NO: 48262
auuacucagcaaugcuuuc

SEQ ID NO: 48344 - RNA, 19 nt, Artificial Sequence
  Description of Artificial Sequence: Synthetic oligonucleotide
  Sense strand starting at position 623 of SEQ ID NO: 581
uuugaaguucuaugaauca

SEQ ID NO: 48345 - RNA, 19 nt, Artificial Sequence
  Description of Artificial Sequence: Synthetic oligonucleotide
  Antisense strand to SEQ ID NO: 48264
ugauucauagaacuucaaa

SEQ ID NO: 48346 - RNA, 19 nt, Artificial Sequence
  Description of Artificial Sequence: Synthetic oligonucleotide
  Sense strand starting at position 672 of SEQ ID NO: 581
uuaaauacccgugguaaua

SEQ ID NO: 48347 - RNA, 19 nt, Artificial Sequence
  Description of Artificial Sequence: Synthetic oligonucleotide
  Antisense strand to SEQ ID NO: 48266
uauuaccacggguauuuaa

SEQ ID NO: 48348 - RNA, 19 nt, Artificial Sequence
  Description of Artificial Sequence: Synthetic oligonucleotide
  Sense strand starting at position 1003 of SEQ ID NO: 581
aguugcauuugguuacuga

SEQ ID NO: 48349 - RNA, 19 nt, Artificial Sequence
  Description of Artificial Sequence: Synthetic oligonucleotide
  Antisense strand to SEQ ID NO: 48268
ucaguaaccaaaugcaacu

SEQ ID NO: 48350 - RNA, 19 nt, Artificial Sequence
  Description of Artificial Sequence: Synthetic oligonucleotide
  Sense strand starting at position 1007 of SEQ ID NO: 581
gcauuugguuacugauuua

SEQ ID NO: 48351 - RNA, 19 nt, Artificial Sequence
  Description of Artificial Sequence: Synthetic oligonucleotide
  Antisense strand to SEQ ID NO: 48270
uaaaucaguaaccaaaugc

SEQ ID NO: 48352 - RNA, 19 nt, Artificial Sequence
  Description of Artificial Sequence: Synthetic oligonucleotide
  Sense strand starting at position 1083 of SEQ ID NO: 581
gauguauccuacuugaaag

SEQ ID NO: 48353 - RNA, 19 nt, Artificial Sequence
  Description of Artificial Sequence: Synthetic oligonucleotide
  Antisense strand to SEQ ID NO: 48272
cuuucaaguaggauacauc

SEQ ID NO: 48354 - RNA, 19 nt, Artificial Sequence
  Description of Artificial Sequence: Synthetic oligonucleotide
  Sense strand starting at position 1131 of SEQ ID NO: 581
auuuccuuucuguguggga

SEQ ID NO: 48355 - RNA, 19 nt, Artificial Sequence
  Description of Artificial Sequence: Synthetic oligonucleotide
  Antisense strand to SEQ ID NO: 48274
ucccacacagaaaggaaau

SEQ ID NO: 48356 - RNA, 19 nt, Artificial Sequence
  Description of Artificial Sequence: Synthetic oligonucleotide
  Sense strand starting at position 1205 of SEQ ID NO: 581
gucaccagggaucguaauu

SEQ ID NO: 48357 - RNA, 19 nt, Artificial Sequence
  Description of Artificial Sequence: Synthetic oligonucleotide
  Antisense strand to SEQ ID NO: 48276
aauuacgaucccuggugac

SEQ ID NO: 48358 - RNA, 19 nt, Artificial Sequence
  Description of Artificial Sequence: Synthetic oligonucleotide
  Sense strand starting at position 1305 of SEQ ID NO: 581
aggaacguguacucaauua

SEQ ID NO: 48359 - RNA, 19 nt, Artificial Sequence
  Description of Artificial Sequence: Synthetic oligonucleotide
  Antisense strand to SEQ ID NO: 48278
uaauugaguacacguuccu

SEQ ID NO: 48360 - RNA, 19 nt, Artificial Sequence
  Description of Artificial Sequence: Synthetic oligonucleotide
  Sense strand starting at position 1339 of SEQ ID NO: 581
gguugaagauucuugguaa

SEQ ID NO: 48361 - RNA, 19 nt, Artificial Sequence
  Description of Artificial Sequence: Synthetic oligonucleotide
  Antisense strand to SEQ ID NO: 48280
uuaccaagaaucuucaacc

SEQ ID NO: 48362 - RNA, 19 nt, Artificial Sequence
  Description of Artificial Sequence: Synthetic oligonucleotide
  Sense strand starting at position 1342 of SEQ ID NO: 581
ugaagauucuugguaacug

SEQ ID NO: 48363 - RNA, 19 nt, Artificial Sequence
  Description of Artificial Sequence: Synthetic oligonucleotide
  Antisense strand to SEQ ID NO: 48282
caguuaccaagaaucuuca

SEQ ID NO: 48364 - RNA, 19 nt, Artificial Sequence
  Description of Artificial Sequence: Synthetic oligonucleotide
  Sense strand starting at position 1812 of SEQ ID NO: 581
uucgacuuaccuuaccaga

SEQ ID NO: 48365 - RNA, 19 nt, Artificial Sequence
  Description of Artificial Sequence: Synthetic oligonucleotide
  Antisense strand to SEQ ID NO: 48284
ucugguaagguaagucgaa

SEQ ID NO: 48366 - RNA, 19 nt, Artificial Sequence
  Description of Artificial Sequence: Synthetic oligonucleotide
  Sense strand starting at position 1990 of SEQ ID NO: 581
acggcaaucgcgaaagugu

SEQ ID NO: 48367 - RNA, 19 nt, Artificial Sequence
  Description of Artificial Sequence: Synthetic oligonucleotide
  Antisense strand to SEQ ID NO: 48286
acacuuucgcgauugccgu

SEQ ID NO: 48368 - RNA, 19 nt, Artificial Sequence
  Description of Artificial Sequence: Synthetic oligonucleotide
  Sense strand starting at position 2125 of SEQ ID NO: 581
ggauuugaagggcguugua

SEQ ID NO: 48369 - RNA, 19 nt, Artificial Sequence
  Description of Artificial Sequence: Synthetic oligonucleotide
  Antisense strand to SEQ ID NO: 48288
uacaacgcccuucaaaucc

SEQ ID NO: 48370 - RNA, 19 nt, Artificial Sequence
  Description of Artificial Sequence: Synthetic oligonucleotide
  Sense strand starting at position 2179 of SEQ ID NO: 581
gggucauuaggauauagcu

SEQ ID NO: 48371 - RNA, 19 nt, Artificial Sequence
  Description of Artificial Sequence: Synthetic oligonucleotide
  Antisense strand to SEQ ID NO: 48290
agcuauauccuaaugaccc

SEQ ID NO: 48372 - RNA, 19 nt, Artificial Sequence
  Description of Artificial Sequence: Synthetic oligonucleotide
  Sense strand starting at position 2188 of SEQ ID NO: 581
ggauauagcuguguaugga

SEQ ID NO: 48373 - RNA, 19 nt, Artificial Sequence
  Description of Artificial Sequence: Synthetic oligonucleotide
  Antisense strand to SEQ ID NO: 48292
uccauacacagcuauaucc

SEQ ID NO: 48374 - RNA, 19 nt, Artificial Sequence
  Description of Artificial Sequence: Synthetic oligonucleotide
  Sense strand starting at position 2623 of SEQ ID NO: 581
cuauauugauaagcuguga

SEQ ID NO: 48375 - RNA, 19 nt, Artificial Sequence
  Description of Artificial Sequence: Synthetic oligonucleotide
  Antisense strand to SEQ ID NO: 48294
ucacagcuuaucaauauag

SEQ ID NO: 48376 - RNA, 19 nt, Artificial Sequence
  Description of Artificial Sequence: Synthetic oligonucleotide
  Sense strand starting at position 2627 of SEQ ID NO: 581
auugauaagcugugagauu

SEQ ID NO: 48377 - RNA, 19 nt, Artificial Sequence
  Description of Artificial Sequence: Synthetic oligonucleotide
  Antisense strand to SEQ ID NO: 48296
aaucucacagcuuaucaau

SEQ ID NO: 48378 - RNA, 19 nt, Artificial Sequence
  Description of Artificial Sequence: Synthetic oligonucleotide
  Sense strand starting at position 2642 of SEQ ID NO: 581
gauugcuagcuggcguuua

SEQ ID NO: 48379 - RNA, 19 nt, Artificial Sequence
  Description of Artificial Sequence: Synthetic oligonucleotide
  Antisense strand to SEQ ID NO: 48298
uaaacgccagcuagcaauc

SEQ ID NO: 48380 - RNA, 19 nt, Artificial Sequence
  Description of Artificial Sequence: Synthetic oligonucleotide
  Sense strand starting at position 2669 of SEQ ID NO: 581
gcauucuugcaaggagaaa

SEQ ID NO: 48381 - RNA, 19 nt, Artificial Sequence
  Description of Artificial Sequence: Synthetic oligonucleotide
  Antisense strand to SEQ ID NO: 48300
uuucuccuugcaagaaugc

SEQ ID NO: 48382 - RNA, 19 nt, Artificial Sequence
  Description of Artificial Sequence: Synthetic oligonucleotide
  Sense strand starting at position 2710 of SEQ ID NO: 581
uugccaguauucccagaaa

SEQ ID NO: 48383 - RNA, 19 nt, Artificial Sequence
  Description of Artificial Sequence: Synthetic oligonucleotide
  Antisense strand to SEQ ID NO: 48302
uuucugggaauacuggcaa

SEQ ID NO: 48384 - RNA, 19 nt, Artificial Sequence
  Description of Artificial Sequence: Synthetic oligonucleotide
  Sense strand starting at position 2741 of SEQ ID NO: 581
gggaucuuuagccauguuu

SEQ ID NO: 48385 - RNA, 19 nt, Artificial Sequence
  Description of Artificial Sequence: Synthetic oligonucleotide
  Antisense strand to SEQ ID NO: 48304
aaacauggcuaaagauccc

SEQ ID NO: 48386 - RNA, 19 nt, Artificial Sequence
  Description of Artificial Sequence: Synthetic oligonucleotide
  Sense strand starting at position 2858 of SEQ ID NO: 581
ucaguaaauccauaguaug

SEQ ID NO: 48387 - RNA, 19 nt, Artificial Sequence
  Description of Artificial Sequence: Synthetic oligonucleotide
  Antisense strand to SEQ ID NO: 48306
cauacuauggauuuacuga

SEQ ID NO: 48388 - RNA, 19 nt, Artificial Sequence
  Description of Artificial Sequence: Synthetic oligonucleotide
  Sense strand starting at position 2869 of SEQ ID NO: 581
auaguaugacaguaggcaa

SEQ ID NO: 48389 - RNA, 19 nt, Artificial Sequence
  Description of Artificial Sequence: Synthetic oligonucleotide
  Antisense strand to SEQ ID NO: 48308
uugccuacugucauacuau

SEQ ID NO: 48390 - RNA, 19 nt, Artificial Sequence
  Description of Artificial Sequence: Synthetic oligonucleotide
  Sense strand starting at position 2872 of SEQ ID NO: 581
guaugacaguaggcaaauu

SEQ ID NO: 48391 - RNA, 19 nt, Artificial Sequence
  Description of Artificial Sequence: Synthetic oligonucleotide
  Antisense strand to SEQ ID NO: 48310
aauuugccuacugucauac

SEQ ID NO: 48392 - RNA, 19 nt, Artificial Sequence
  Description of Artificial Sequence: Synthetic oligonucleotide
  Sense strand starting at position 2994 of SEQ ID NO: 581
uguugaguugaacgacuua

SEQ ID NO: 48393 - RNA, 19 nt, Artificial Sequence
  Description of Artificial Sequence: Synthetic oligonucleotide
  Antisense strand to SEQ ID NO: 48312
uaagucguucaacucaaca

SEQ ID NO: 48394 - RNA, 19 nt, Artificial Sequence
  Description of Artificial Sequence: Synthetic oligonucleotide
  Sense strand starting at position 3018 of SEQ ID NO: 581
caaguuagacuuugguaag

SEQ ID NO: 48395 - RNA, 19 nt, Artificial Sequence
  Description of Artificial Sequence: Synthetic oligonucleotide
  Antisense strand to SEQ ID NO: 48314
cuuaccaaagucuaacuug

SEQ ID NO: 48396 - RNA, 19 nt, Artificial Sequence
  Description of Artificial Sequence: Synthetic oligonucleotide
  Sense strand starting at position 3526 of SEQ ID NO: 581
guaaacuugcucuauguau

SEQ ID NO: 48397 - RNA, 19 nt, Artificial Sequence
  Description of Artificial Sequence: Synthetic oligonucleotide
  Antisense strand to SEQ ID NO: 48316
auacauagagcaaguuuac

SEQ ID NO: 48398 - RNA, 19 nt, Artificial Sequence
  Description of Artificial Sequence: Synthetic oligonucleotide
  Sense strand starting at position 3672 of SEQ ID NO: 581
uucuuuagguagccaauua

SEQ ID NO: 48399 - RNA, 19 nt, Artificial Sequence
  Description of Artificial Sequence: Synthetic oligonucleotide
  Antisense strand to SEQ ID NO: 48318
uaauuggcuaccuaaagaa

SEQ ID NO: 48400 - RNA, 19 nt, Artificial Sequence
  Description of Artificial Sequence: Synthetic oligonucleotide
  Sense strand starting at position 3716 of SEQ ID NO: 581
gcugaaucagugcagauca

SEQ ID NO: 48401 - RNA, 19 nt, Artificial Sequence
  Description of Artificial Sequence: Synthetic oligonucleotide
  Antisense strand to SEQ ID NO: 48320
ugaucugcacugauucagc

SEQ ID NO: 48402 - RNA, 19 nt, Artificial Sequence
  Description of Artificial Sequence: Synthetic oligonucleotide
  Sense strand starting at position 3762 of SEQ ID NO: 581
gauggaaauucuggaauuu

SEQ ID NO: 48403 - RNA, 19 nt, Artificial Sequence
  Description of Artificial Sequence: Synthetic oligonucleotide
  Antisense strand to SEQ ID NO: 48322
aaauuccagaauuuccauc

SEQ ID NO: 48404 - RNA, 19 nt, Artificial Sequence
  Description of Artificial Sequence: Synthetic oligonucleotide
  Sense strand starting at position 3821 of SEQ ID NO: 581
cugcucaggaguuagagau

SEQ ID NO: 48405 - RNA, 19 nt, Artificial Sequence
  Description of Artificial Sequence: Synthetic oligonucleotide
  Antisense strand to SEQ ID NO: 48324
aucucuaacuccugagcag

SEQ ID NO: 48406 - RNA, 19 nt, Artificial Sequence
  Description of Artificial Sequence: Synthetic oligonucleotide
  Sense strand starting at position 3851 of SEQ ID NO: 581
augugauacuugucagaca

SEQ ID NO: 48407 - RNA, 19 nt, Artificial Sequence
  Description of Artificial Sequence: Synthetic oligonucleotide
  Antisense strand to SEQ ID NO: 48326
ugucugacaaguaucacau

SEQ ID NO: 48408 - RNA, 19 nt, Artificial Sequence
  Description of Artificial Sequence: Synthetic oligonucleotide
  Sense strand starting at position 3893 of SEQ ID NO: 581
ggaauaauguagcccauau

SEQ ID NO: 48409 - RNA, 19 nt, Artificial Sequence
  Description of Artificial Sequence: Synthetic oligonucleotide
  Antisense strand to SEQ ID NO: 48328
auaugggcuacauuauucc

SEQ ID NO: 48410 - RNA, 19 nt, Artificial Sequence
  Description of Artificial Sequence: Synthetic oligonucleotide
  Sense strand starting at position 3911 of SEQ ID NO: 581
ugccauuauccucagcuga

SEQ ID NO: 48411 - RNA, 19 nt, Artificial Sequence
  Description of Artificial Sequence: Synthetic oligonucleotide
  Antisense strand to SEQ ID NO: 48330
ucagcugaggauaauggca

SEQ ID NO: 48412 - RNA, 19 nt, Artificial Sequence
  Description of Artificial Sequence: Synthetic oligonucleotide
  Sense strand starting at position 3861 of SEQ ID NO: 582
gggauaggaccauguuguu

SEQ ID NO: 48413 - RNA, 19 nt, Artificial Sequence
  Description of Artificial Sequence: Synthetic oligonucleotide
  Antisense strand to SEQ ID NO: 48332
aacaacaugguccuauccc

SEQ ID NO: 48414 - RNA, 19 nt, Artificial Sequence
  Description of Artificial Sequence: Synthetic oligonucleotide
  Sense strand starting at position 3812 of SEQ ID NO: 582
ggagaagagucagucugga

SEQ ID NO: 48415 - RNA, 19 nt, Artificial Sequence
  Description of Artificial Sequence: Synthetic oligonucleotide
  Antisense strand to SEQ ID NO: 48334
uccagacugacucuucucc

SEQ ID NO: 48416 - RNA, 19 nt, Artificial Sequence
  Description of Artificial Sequence: Synthetic oligonucleotide
  Sense strand starting at position 3803 of SEQ ID NO: 582
guguuugguggagaagagu

SEQ ID NO: 48417 - RNA, 19 nt, Artificial Sequence
  Description of Artificial Sequence: Synthetic oligonucleotide
  Antisense strand to SEQ ID NO: 48336
acucuucuccaccaaacac

SEQ ID NO: 48418 - RNA, 19 nt, Artificial Sequence
  Description of Artificial Sequence: Synthetic oligonucleotide
  Sense strand starting at position 3802 of SEQ ID NO: 582
uguguuugguggagaagag

SEQ ID NO: 48419 - RNA, 19 nt, Artificial Sequence
  Description of Artificial Sequence: Synthetic oligonucleotide
  Antisense strand to SEQ ID NO: 48338
cucuucuccaccaaacaca

SEQ ID NO: 48420 - RNA, 19 nt, Artificial Sequence
  Description of Artificial Sequence: Synthetic oligonucleotide
  Sense strand starting at position 3801 of SEQ ID NO: 582
guguguuugguggagaaga

SEQ ID NO: 48421 - RNA, 19 nt, Artificial Sequence
  Description of Artificial Sequence: Synthetic oligonucleotide
  Antisense strand to SEQ ID NO: 48340
ucuucuccaccaaacacac

SEQ ID NO: 48422 - RNA, 19 nt, Artificial Sequence
  Description of Artificial Sequence: Synthetic oligonucleotide
  Sense strand starting at position 3798 of SEQ ID NO: 582
uugguguguuugguggaga

SEQ ID NO: 48423 - RNA, 19 nt, Artificial Sequence
  Description of Artificial Sequence: Synthetic oligonucleotide
  Antisense strand to SEQ ID NO: 48342
ucuccaccaaacacaccaa

SEQ ID NO: 48424 - RNA, 19 nt, Artificial Sequence
  Description of Artificial Sequence: Synthetic oligonucleotide
  Sense strand starting at position 3579 of SEQ ID NO: 582
aaugaugucagguggugau

SEQ ID NO: 48425 - RNA, 19 nt, Artificial Sequence
  Description of Artificial Sequence: Synthetic oligonucleotide
  Antisense strand to SEQ ID NO: 48344
aucaccaccugacaucauu

SEQ ID NO: 48426 - RNA, 19 nt, Artificial Sequence
  Description of Artificial Sequence: Synthetic oligonucleotide
  Sense strand starting at position 3418 of SEQ ID NO: 582
cacugaaagguuugaguca

SEQ ID NO: 48427 - RNA, 19 nt, Artificial Sequence
  Description of Artificial Sequence: Synthetic oligonucleotide
  Antisense strand to SEQ ID NO: 48346
ugacucaaaccuuucagug

SEQ ID NO: 48428 - RNA, 19 nt, Artificial Sequence
  Description of Artificial Sequence: Synthetic oligonucleotide
  Sense strand starting at position 3387 of SEQ ID NO: 582
auggauugaugagaacacu

SEQ ID NO: 48429 - RNA, 19 nt, Artificial Sequence
  Description of Artificial Sequence: Synthetic oligonucleotide
  Antisense strand to SEQ ID NO: 48348
aguguucucaucaauccau

SEQ ID NO: 48430 - RNA, 19 nt, Artificial Sequence
  Description of Artificial Sequence: Synthetic oligonucleotide
  Sense strand starting at position 3358 of SEQ ID NO: 582
gugauauuauuagcuuggu

SEQ ID NO: 48431 - RNA, 19 nt, Artificial Sequence
  Description of Artificial Sequence: Synthetic oligonucleotide
  Antisense strand to SEQ ID NO: 48350
accaagcuaauaauaucac

SEQ ID NO: 48432 - RNA, 19 nt, Artificial Sequence
  Description of Artificial Sequence: Synthetic oligonucleotide
  Sense strand starting at position 3348 of SEQ ID NO: 582
cauuguuaccgugauauua

SEQ ID NO: 48433 - RNA, 19 nt, Artificial Sequence
  Description of Artificial Sequence: Synthetic oligonucleotide
  Antisense strand to SEQ ID NO: 48352
uaauaucacgguaacaaug

SEQ ID NO: 48434 - RNA, 19 nt, Artificial Sequence
  Description of Artificial Sequence: Synthetic oligonucleotide
  Sense strand starting at position 3293 of SEQ ID NO: 582
gagauaacguuucuaaggu

SEQ ID NO: 48435 - RNA, 19 nt, Artificial Sequence
  Description of Artificial Sequence: Synthetic oligonucleotide
  Antisense strand to SEQ ID NO: 48354
accuuagaaacguuaucuc

SEQ ID NO: 48436 - RNA, 19 nt, Artificial Sequence
  Description of Artificial Sequence: Synthetic oligonucleotide
  Sense strand starting at position 3285 of SEQ ID NO: 582
uguguaaggagauaacguu

SEQ ID NO: 48437 - RNA, 19 nt, Artificial Sequence
  Description of Artificial Sequence: Synthetic oligonucleotide
  Antisense strand to SEQ ID NO: 48356
aacguuaucuccuuacaca

SEQ ID NO: 48438 - RNA, 19 nt, Artificial Sequence
  Description of Artificial Sequence: Synthetic oligonucleotide
  Sense strand starting at position 3229 of SEQ ID NO: 582
cucugagcucaugauuaua

SEQ ID NO: 48439 - RNA, 19 nt, Artificial Sequence
  Description of Artificial Sequence: Synthetic oligonucleotide
  Antisense strand to SEQ ID NO: 48358
uauaaucaugagcucagag

SEQ ID NO: 48440 - RNA, 19 nt, Artificial Sequence
  Description of Artificial Sequence: Synthetic oligonucleotide
  Sense strand starting at position 3226 of SEQ ID NO: 582
gaccucugagcucaugauu

SEQ ID NO: 48441 - RNA, 19 nt, Artificial Sequence
  Description of Artificial Sequence: Synthetic oligonucleotide
  Antisense strand to SEQ ID NO: 48360
aaucaugagcucagagguc

SEQ ID NO: 48442 - RNA, 19 nt, Artificial Sequence
  Description of Artificial Sequence: Synthetic oligonucleotide
  Sense strand starting at position 3126 of SEQ ID NO: 582
aaauuaugacuuugagguu

SEQ ID NO: 48443 - RNA, 19 nt, Artificial Sequence
  Description of Artificial Sequence: Synthetic oligonucleotide
  Antisense strand to SEQ ID NO: 48362
aaccucaaagucauaauuu

SEQ ID NO: 48444 - RNA, 19 nt, Artificial Sequence
  Description of Artificial Sequence: Synthetic oligonucleotide
  Sense strand starting at position 3123 of SEQ ID NO: 582
ggcaaauuaugacuuugag

SEQ ID NO: 48445 - RNA, 19 nt, Artificial Sequence
  Description of Artificial Sequence: Synthetic oligonucleotide
  Antisense strand to SEQ ID NO: 48364
cucaaagucauaauuugcc

SEQ ID NO: 48446 - RNA, 19 nt, Artificial Sequence
  Description of Artificial Sequence: Synthetic oligonucleotide
  Sense strand starting at position 3000 of SEQ ID NO: 582
ggacgcugcaaagaucaaa

SEQ ID NO: 48447 - RNA, 19 nt, Artificial Sequence
  Description of Artificial Sequence: Synthetic oligonucleotide
  Antisense strand to SEQ ID NO: 48366
uuugaucuuugcagcgucc

SEQ ID NO: 48448 - RNA, 19 nt, Artificial Sequence
  Description of Artificial Sequence: Synthetic oligonucleotide
  Sense strand starting at position 2937 of SEQ ID NO: 582
cugagaaugcuggguuaug

SEQ ID NO: 48449 - RNA, 19 nt, Artificial Sequence
  Description of Artificial Sequence: Synthetic oligonucleotide
  Antisense strand to SEQ ID NO: 48368
cauaacccagcauucucag

SEQ ID NO: 48450 - RNA, 19 nt, Artificial Sequence
  Description of Artificial Sequence: Synthetic oligonucleotide
  Sense strand starting at position 2722 of SEQ ID NO: 582
ccucuuucccgguagggaa

SEQ ID NO: 48451 - RNA, 19 nt, Artificial Sequence
  Description of Artificial Sequence: Synthetic oligonucleotide
  Antisense strand to SEQ ID NO: 48370
uucccuaccgggaaagagg

SEQ ID NO: 48452 - RNA, 19 nt, Artificial Sequence
  Description of Artificial Sequence: Synthetic oligonucleotide
  Sense strand starting at position 2591 of SEQ ID NO: 582
gccuuuguagccgcagaaa

SEQ ID NO: 48453 - RNA, 19 nt, Artificial Sequence
  Description of Artificial Sequence: Synthetic oligonucleotide
  Antisense strand to SEQ ID NO: 48372
uuucugcggcuacaaaggc

SEQ ID NO: 48454 - RNA, 19 nt, Artificial Sequence
  Description of Artificial Sequence: Synthetic oligonucleotide
  Sense strand starting at position 2516 of SEQ ID NO: 582
gauuauuccgccuagacug

SEQ ID NO: 48455 - RNA, 19 nt, Artificial Sequence
  Description of Artificial Sequence: Synthetic oligonucleotide
  Antisense strand to SEQ ID NO: 48374
cagucuaggcggaauaauc

SEQ ID NO: 48456 - RNA, 19 nt, Artificial Sequence
  Description of Artificial Sequence: Synthetic oligonucleotide
  Sense strand starting at position 2513 of SEQ ID NO: 582
aaggauuauuccgccuaga

SEQ ID NO: 48457 - RNA, 19 nt, Artificial Sequence
  Description of Artificial Sequence: Synthetic oligonucleotide
  Antisense strand to SEQ ID NO: 48376
ucuaggcggaauaauccuu

SEQ ID NO: 48458 - RNA, 19 nt, Artificial Sequence
  Description of Artificial Sequence: Synthetic oligonucleotide
  Sense strand starting at position 1415 of SEQ ID NO: 582
uucgaagacuucuuccaac

SEQ ID NO: 48459 - RNA, 19 nt, Artificial Sequence
  Description of Artificial Sequence: Synthetic oligonucleotide
  Antisense strand to SEQ ID NO: 48378
guuggaagaagucuucgaa

SEQ ID NO: 48460 - RNA, 19 nt, Artificial Sequence
  Description of Artificial Sequence: Synthetic oligonucleotide
  Sense strand starting at position 1409 of SEQ ID NO: 582
ggagucuucgaagacuucu

SEQ ID NO: 48461 - RNA, 19 nt, Artificial Sequence
  Description of Artificial Sequence: Synthetic oligonucleotide
  Antisense strand to SEQ ID NO: 48380
agaagucuucgaagacucc

SEQ ID NO: 48462 - RNA, 19 nt, Artificial Sequence
  Description of Artificial Sequence: Synthetic oligonucleotide
  Sense strand starting at position 1260 of SEQ ID NO: 582
guaccuuccugggcacaga

SEQ ID NO: 48463 - RNA, 19 nt, Artificial Sequence
  Description of Artificial Sequence: Synthetic oligonucleotide
  Antisense strand to SEQ ID NO: 48382
ucugugcccaggaagguac

SEQ ID NO: 48464 - RNA, 19 nt, Artificial Sequence
  Description of Artificial Sequence: Synthetic oligonucleotide
  Sense strand starting at position 903 of SEQ ID NO: 582
uccuuuguccgagaucacu

SEQ ID NO: 48465 - RNA, 19 nt, Artificial Sequence
  Description of Artificial Sequence: Synthetic oligonucleotide
  Antisense strand to SEQ ID NO: 48384
agugaucucggacaaagga

SEQ ID NO: 48466 - RNA, 19 nt, Artificial Sequence
  Description of Artificial Sequence: Synthetic oligonucleotide
  Sense strand starting at position 900 of SEQ ID NO: 582
cauuccuuuguccgagauc

SEQ ID NO: 48467 - RNA, 19 nt, Artificial Sequence
  Description of Artificial Sequence: Synthetic oligonucleotide
  Antisense strand to SEQ ID NO: 48386
gaucucggacaaaggaaug

SEQ ID NO: 48468 - RNA, 19 nt, Artificial Sequence
  Description of Artificial Sequence: Synthetic oligonucleotide
  Sense strand starting at position 687 of SEQ ID NO: 582
gucucuaagccuugacuuu

SEQ ID NO: 48469 - RNA, 19 nt, Artificial Sequence
  Description of Artificial Sequence: Synthetic oligonucleotide
  Antisense strand to SEQ ID NO: 48388
aaagucaaggcuuagagac

SEQ ID NO: 48470 - RNA, 19 nt, Artificial Sequence
  Description of Artificial Sequence: Synthetic oligonucleotide
  Sense strand starting at position 579 of SEQ ID NO: 582
agagaagagugcuugcaag

SEQ ID NO: 48471 - RNA, 19 nt, Artificial Sequence
  Description of Artificial Sequence: Synthetic oligonucleotide
  Antisense strand to SEQ ID NO: 48390
cuugcaagcacucuucucu

SEQ ID NO: 48472 - RNA, 19 nt, Artificial Sequence
  Description of Artificial Sequence: Synthetic oligonucleotide
  Sense strand starting at position 461 of SEQ ID NO: 582
ugaucaguuguuggcaaca

SEQ ID NO: 48473 - RNA, 19 nt, Artificial Sequence
  Description of Artificial Sequence: Synthetic oligonucleotide
  Antisense strand to SEQ ID NO: 48392
uguugccaacaacugauca

SEQ ID NO: 48474 - RNA, 19 nt, Artificial Sequence
  Description of Artificial Sequence: Synthetic oligonucleotide
  Sense strand starting at position 459 of SEQ ID NO: 582
ggugaucaguuguuggcaa

SEQ ID NO: 48475 - RNA, 19 nt, Artificial Sequence
  Description of Artificial Sequence: Synthetic oligonucleotide
  Antisense strand to SEQ ID NO: 48394
uugccaacaacugaucacc

SEQ ID NO: 48476 - RNA, 19 nt, Artificial Sequence
  Description of Artificial Sequence: Synthetic oligonucleotide
  Sense strand starting at position 448 of SEQ ID NO: 582
gccuucugaugggugauca

SEQ ID NO: 48477 - RNA, 19 nt, Artificial Sequence
  Description of Artificial Sequence: Synthetic oligonucleotide
  Antisense strand to SEQ ID NO: 48396
ugaucacccaucagaaggc

SEQ ID NO: 48478 - RNA, 19 nt, Artificial Sequence
  Description of Artificial Sequence: Synthetic oligonucleotide
  Sense strand starting at position 218 of SEQ ID NO: 582
aguugcccucauuaagaca

SEQ ID NO: 48479 - RNA, 19 nt, Artificial Sequence
  Description of Artificial Sequence: Synthetic oligonucleotide
  Antisense strand to SEQ ID NO: 48398
ugucuuaaugagggcaacu

SEQ ID NO: 48480 - RNA, 19 nt, Artificial Sequence
  Description of Artificial Sequence: Synthetic oligonucleotide
  Sense strand starting at position 215 of SEQ ID NO: 582
ugaaguugcccucauuaag

SEQ ID NO: 48481 - RNA, 19 nt, Artificial Sequence
  Description of Artificial Sequence: Synthetic oligonucleotide
  Antisense strand to SEQ ID NO: 48400
cuuaaugagggcaacuuca

SEQ ID NO: 48482 - RNA, 19 nt, Artificial Sequence
  Description of Artificial Sequence: Synthetic oligonucleotide
  Sense strand starting at position 201 of SEQ ID NO: 582
agguuucccucuucugaag

SEQ ID NO: 48483 - RNA, 19 nt, Artificial Sequence
  Description of Artificial Sequence: Synthetic oligonucleotide
  Antisense strand to SEQ ID NO: 48402
cuucagaagagggaaaccu

SEQ ID NO: 48484 - RNA, 19 nt, Artificial Sequence
  Description of Artificial Sequence: Synthetic oligonucleotide
  Sense strand starting at position 145 of SEQ ID NO: 582
cuggcuguggcugaaauaa

SEQ ID NO: 48485 - RNA, 19 nt, Artificial Sequence
  Description of Artificial Sequence: Synthetic oligonucleotide
  Antisense strand to SEQ ID NO: 48404
uuauuucagccacagccag

SEQ ID NO: 48486 - RNA, 19 nt, Artificial Sequence
  Description of Artificial Sequence: Synthetic oligonucleotide
  Sense strand starting at position 144 of SEQ ID NO: 582
ccuggcuguggcugaaaua

SEQ ID NO: 48487 - RNA, 19 nt, Artificial Sequence
  Description of Artificial Sequence: Synthetic oligonucleotide
  Antisense strand to SEQ ID NO: 48406
uauuucagccacagccagg

SEQ ID NO: 48488 - RNA, 19 nt, Artificial Sequence
  Description of Artificial Sequence: Synthetic oligonucleotide
  Sense strand starting at position 106 of SEQ ID NO: 582
cguucuugccucuaaagag

SEQ ID NO: 48489 - RNA, 19 nt, Artificial Sequence
  Description of Artificial Sequence: Synthetic oligonucleotide
  Antisense strand to SEQ ID NO: 48408
cucuuuagaggcaagaacg

SEQ ID NO: 48490 - RNA, 19 nt, Artificial Sequence
  Description of Artificial Sequence: Synthetic oligonucleotide
  Sense strand starting at position 104 of SEQ ID NO: 582
gccguucuugccucuaaag

SEQ ID NO: 48491 - RNA, 19 nt, Artificial Sequence
  Description of Artificial Sequence: Synthetic oligonucleotide
  Antisense strand to SEQ ID NO: 48410
cuuuagaggcaagaacggc

SEQ ID NO: 48492 - RNA, 19 nt, Artificial Sequence
  Description of Artificial Sequence: Synthetic oligonucleotide
  Sense strand starting at position 62 of SEQ ID NO: 583
ugauacugucaugaucuua

SEQ ID NO: 48493 - RNA, 19 nt, Artificial Sequence
  Description of Artificial Sequence: Synthetic oligonucleotide
  Antisense strand to SEQ ID NO: 48412
uaagaucaugacaguauca

SEQ ID NO: 48494 - RNA, 19 nt, Artificial Sequence
  Description of Artificial Sequence: Synthetic oligonucleotide
  Sense strand starting at position 788 of SEQ ID NO: 583
caagauaucuaucuacgug

SEQ ID NO: 48495 - RNA, 19 nt, Artificial Sequence
  Description of Artificial Sequence: Synthetic oligonucleotide
  Antisense strand to SEQ ID NO: 48414
cacguagauagauaucuug

SEQ ID NO: 48496 - RNA, 19 nt, Artificial Sequence
  Description of Artificial Sequence: Synthetic oligonucleotide
  Sense strand starting at position 791 of SEQ ID NO: 583
gauaucuaucuacguggaa

SEQ ID NO: 48497 - RNA, 19 nt, Artificial Sequence
  Description of Artificial Sequence: Synthetic oligonucleotide
  Antisense strand to SEQ ID NO: 48416
uuccacguagauagauauc

SEQ ID NO: 48498 - RNA, 19 nt, Artificial Sequence
  Description of Artificial Sequence: Synthetic oligonucleotide
  Sense strand starting at position 792 of SEQ ID NO: 583
auaucuaucuacguggaau

SEQ ID NO: 48499 - RNA, 19 nt, Artificial Sequence
  Description of Artificial Sequence: Synthetic oligonucleotide
  Antisense strand to SEQ ID NO: 48418
auuccacguagauagauau

SEQ ID NO: 48500 - RNA, 19 nt, Artificial Sequence
  Description of Artificial Sequence: Synthetic oligonucleotide
  Sense strand starting at position 853 of SEQ ID NO: 583
agacgcaguaguuaacaaa

SEQ ID NO: 48501 - RNA, 19 nt, Artificial Sequence
  Description of Artificial Sequence: Synthetic oligonucleotide
  Antisense strand to SEQ ID NO: 48420
uuuguuaacuacugcgucu

SEQ ID NO: 48502 - RNA, 19 nt, Artificial Sequence
  Description of Artificial Sequence: Synthetic oligonucleotide
  Sense strand starting at position 863 of SEQ ID NO: 583
guuaacaaauccuccaguu

SEQ ID NO: 48503 - RNA, 19 nt, Artificial Sequence
  Description of Artificial Sequence: Synthetic oligonucleotide
  Antisense strand to SEQ ID NO: 48422
aacuggaggauuuguuaac

SEQ ID NO: 48504 - RNA, 19 nt, Artificial Sequence
  Description of Artificial Sequence: Synthetic oligonucleotide
  Sense strand starting at position 924 of SEQ ID NO: 583
gauuaaagacugcacgauu

SEQ ID NO: 48505 - RNA, 19 nt, Artificial Sequence
  Description of Artificial Sequence: Synthetic oligonucleotide
  Antisense strand to SEQ ID NO: 48424
aaucgugcagucuuuaauc

SEQ ID NO: 48506 - RNA, 19 nt, Artificial Sequence
  Description of Artificial Sequence: Synthetic oligonucleotide
  Sense strand starting at position 1053 of SEQ ID NO: 583
ucaccuuaagcaugagcaa

SEQ ID NO: 48507 - RNA, 19 nt, Artificial Sequence
  Description of Artificial Sequence: Synthetic oligonucleotide
  Antisense strand to SEQ ID NO: 48426
uugcucaugcuuaagguga

SEQ ID NO: 48508 - RNA, 19 nt, Artificial Sequence
  Description of Artificial Sequence: Synthetic oligonucleotide
  Sense strand starting at position 1087 of SEQ ID NO: 583
cguggcacccaucagauau

SEQ ID NO: 48509 - RNA, 19 nt, Artificial Sequence
  Description of Artificial Sequence: Synthetic oligonucleotide
  Antisense strand to SEQ ID NO: 48428
auaucugaugggugccacg

SEQ ID NO: 48510 - RNA, 19 nt, Artificial Sequence
  Description of Artificial Sequence: Synthetic oligonucleotide
  Sense strand starting at position 1103 of SEQ ID NO: 583
uaugauuuccucuggcgac

SEQ ID NO: 48511 - RNA, 19 nt, Artificial Sequence
  Description of Artificial Sequence: Synthetic oligonucleotide
  Antisense strand to SEQ ID NO: 48430
gucgccagaggaaaucaua

SEQ ID NO: 48512 - RNA, 19 nt, Artificial Sequence
  Description of Artificial Sequence: Synthetic oligonucleotide
  Sense strand starting at position 1165 of SEQ ID NO: 583
ucaugauuggugugaacac

SEQ ID NO: 48513 - RNA, 19 nt, Artificial Sequence
  Description of Artificial Sequence: Synthetic oligonucleotide
  Antisense strand to SEQ ID NO: 48432
guguucacaccaaucauga

SEQ ID NO: 48514 - RNA, 19 nt, Artificial Sequence
  Description of Artificial Sequence: Synthetic oligonucleotide
  Sense strand starting at position 1741 of SEQ ID NO: 583
aggagagacaagugugguu

SEQ ID NO: 48515 - RNA, 19 nt, Artificial Sequence
  Description of Artificial Sequence: Synthetic oligonucleotide
  Antisense strand to SEQ ID NO: 48434
aaccacacuugucucuccu

SEQ ID NO: 48516 - RNA, 19 nt, Artificial Sequence
  Description of Artificial Sequence: Synthetic oligonucleotide
  Sense strand starting at position 2412 of SEQ ID NO: 583
cgaaaucguagcgaaagau

SEQ ID NO: 48517 - RNA, 19 nt, Artificial Sequence
  Description of Artificial Sequence: Synthetic oligonucleotide
  Antisense strand to SEQ ID NO: 48436
aucuuucgcuacgauuucg

SEQ ID NO: 48518 - RNA, 19 nt, Artificial Sequence
  Description of Artificial Sequence: Synthetic oligonucleotide
  Sense strand starting at position 2463 of SEQ ID NO: 583
ugaagacagucaucuccau

SEQ ID NO: 48519 - RNA, 19 nt, Artificial Sequence
  Description of Artificial Sequence: Synthetic oligonucleotide
  Antisense strand to SEQ ID NO: 48438
auggagaugacugucuuca

SEQ ID NO: 48520 - RNA, 19 nt, Artificial Sequence
  Description of Artificial Sequence: Synthetic oligonucleotide
  Sense strand starting at position 2504 of SEQ ID NO: 583
guguuucggauacaguaga

SEQ ID NO: 48521 - RNA, 19 nt, Artificial Sequence
  Description of Artificial Sequence: Synthetic oligonucleotide
  Antisense strand to SEQ ID NO: 48440
ucuacuguauccgaaacac

SEQ ID NO: 48522 - RNA, 19 nt, Artificial Sequence
  Description of Artificial Sequence: Synthetic oligonucleotide
  Sense strand starting at position 2549 of SEQ ID NO: 583
uggaaaucggcugaaagua

SEQ ID NO: 48523 - RNA, 19 nt, Artificial Sequence
  Description of Artificial Sequence: Synthetic oligonucleotide
  Antisense strand to SEQ ID NO: 48442
uacuuucagccgauuucca

SEQ ID NO: 48524 - RNA, 19 nt, Artificial Sequence
  Description of Artificial Sequence: Synthetic oligonucleotide
  Sense strand starting at position 2559 of SEQ ID NO: 583
cugaaaguacccuggaaau

SEQ ID NO: 48525 - RNA, 19 nt, Artificial Sequence
  Description of Artificial Sequence: Synthetic oligonucleotide
  Antisense strand to SEQ ID NO: 48444
auuuccaggguacuuucag

SEQ ID NO: 48526 - RNA, 19 nt, Artificial Sequence
  Description of Artificial Sequence: Synthetic oligonucleotide
  Sense strand starting at position 2578 of SEQ ID NO: 583
agggaaaucucuuauauuu

SEQ ID NO: 48527 - RNA, 19 nt, Artificial Sequence
  Description of Artificial Sequence: Synthetic oligonucleotide
  Antisense strand to SEQ ID NO: 48446
aaauauaagagauuucccu

SEQ ID NO: 48528 - RNA, 19 nt, Artificial Sequence
  Description of Artificial Sequence: Synthetic oligonucleotide
  Sense strand starting at position 2757 of SEQ ID NO: 583
ugauuaucuuaacuugguu

SEQ ID NO: 48529 - RNA, 19 nt, Artificial Sequence
  Description of Artificial Sequence: Synthetic oligonucleotide
  Antisense strand to SEQ ID NO: 48448
aaccaaguuaagauaauca

SEQ ID NO: 48530 - RNA, 19 nt, Artificial Sequence
  Description of Artificial Sequence: Synthetic oligonucleotide
  Sense strand starting at position 2778 of SEQ ID NO: 583
ugcuaauauggaggacuuu

SEQ ID NO: 48531 - RNA, 19 nt, Artificial Sequence
  Description of Artificial Sequence: Synthetic oligonucleotide
  Antisense strand to SEQ ID NO: 48450
aaaguccuccauauuagca

SEQ ID NO: 48532 - RNA, 19 nt, Artificial Sequence
  Description of Artificial Sequence: Synthetic oligonucleotide
  Sense strand starting at position 2919 of SEQ ID NO: 583
ucuuucuugcuauagaaag

SEQ ID NO: 48533 - RNA, 19 nt, Artificial Sequence
  Description of Artificial Sequence: Synthetic oligonucleotide
  Antisense strand to SEQ ID NO: 48452
cuuucuauagcaagaaaga

SEQ ID NO: 48534 - RNA, 19 nt, Artificial Sequence
  Description of Artificial Sequence: Synthetic oligonucleotide
  Sense strand starting at position 2959 of SEQ ID NO: 583
agacuucuucucugauagg

SEQ ID NO: 48535 - RNA, 19 nt, Artificial Sequence
  Description of Artificial Sequence: Synthetic oligonucleotide
  Antisense strand to SEQ ID NO: 48454
ccuaucagagaagaagucu

SEQ ID NO: 48536 - RNA, 19 nt, Artificial Sequence
  Description of Artificial Sequence: Synthetic oligonucleotide
  Sense strand starting at position 2984 of SEQ ID NO: 583
gauguaguuccuugacuga

SEQ ID NO: 48537 - RNA, 19 nt, Artificial Sequence
  Description of Artificial Sequence: Synthetic oligonucleotide
  Antisense strand to SEQ ID NO: 48456
ucagucaaggaacuacauc

SEQ ID NO: 48538 - RNA, 19 nt, Artificial Sequence
  Description of Artificial Sequence: Synthetic oligonucleotide
  Sense strand starting at position 2987 of SEQ ID NO: 583
guaguuccuugacugaaau

SEQ ID NO: 48539 - RNA, 19 nt, Artificial Sequence
  Description of Artificial Sequence: Synthetic oligonucleotide
  Antisense strand to SEQ ID NO: 48458
auuucagucaaggaacuac

SEQ ID NO: 48540 - RNA, 19 nt, Artificial Sequence
  Description of Artificial Sequence: Synthetic oligonucleotide
  Sense strand starting at position 2997 of SEQ ID NO: 583
gacugaaauuaagaggaga

SEQ ID NO: 48541 - RNA, 19 nt, Artificial Sequence
  Description of Artificial Sequence: Synthetic oligonucleotide
  Antisense strand to SEQ ID NO: 48460
ucuccucuuaauuucaguc

SEQ ID NO: 48542 - RNA, 19 nt, Artificial Sequence
  Description of Artificial Sequence: Synthetic oligonucleotide
  Sense strand starting at position 3093 of SEQ ID NO: 583
aaggguuuagaauggcaga

SEQ ID NO: 48543 - RNA, 19 nt, Artificial Sequence
  Description of Artificial Sequence: Synthetic oligonucleotide
  Antisense strand to SEQ ID NO: 48462
ucugccauucuaaacccuu

SEQ ID NO: 48544 - RNA, 19 nt, Artificial Sequence
  Description of Artificial Sequence: Synthetic oligonucleotide
  Sense strand starting at position 3094 of SEQ ID NO: 583
aggguuuagaauggcagau

SEQ ID NO: 48545 - RNA, 19 nt, Artificial Sequence
  Description of Artificial Sequence: Synthetic oligonucleotide
  Antisense strand to SEQ ID NO: 48464
aucugccauucuaaacccu

SEQ ID NO: 48546 - RNA, 19 nt, Artificial Sequence
  Description of Artificial Sequence: Synthetic oligonucleotide
  Sense strand starting at position 3098 of SEQ ID NO: 583
uuuagaauggcagaucuuu

SEQ ID NO: 48547 - RNA, 19 nt, Artificial Sequence
  Description of Artificial Sequence: Synthetic oligonucleotide
  Antisense strand to SEQ ID NO: 48466
aaagaucugccauucuaaa

SEQ ID NO: 48548 - RNA, 19 nt, Artificial Sequence
  Description of Artificial Sequence: Synthetic oligonucleotide
  Sense strand starting at position 3196 of SEQ ID NO: 583
gguguucuuagccaaauga

SEQ ID NO: 48549 - RNA, 19 nt, Artificial Sequence
  Description of Artificial Sequence: Synthetic oligonucleotide
  Antisense strand to SEQ ID NO: 48468
ucauuuggcuaagaacacc

SEQ ID NO: 48550 - RNA, 19 nt, Artificial Sequence
  Description of Artificial Sequence: Synthetic oligonucleotide
  Sense strand starting at position 3215 of SEQ ID NO: 583
ugucgugauauuuggauua

SEQ ID NO: 48551 - RNA, 19 nt, Artificial Sequence
  Description of Artificial Sequence: Synthetic oligonucleotide
  Antisense strand to SEQ ID NO: 48470
uaauccaaauaucacgaca

SEQ ID NO: 48552 - RNA, 19 nt, Artificial Sequence
  Description of Artificial Sequence: Synthetic oligonucleotide
  Sense strand starting at position 3226 of SEQ ID NO: 583
uuggauuaauuguuguaag

SEQ ID NO: 48553 - RNA, 19 nt, Artificial Sequence
  Description of Artificial Sequence: Synthetic oligonucleotide
  Antisense strand to SEQ ID NO: 48472
cuuacaacaauuaauccaa

SEQ ID NO: 48554 - RNA, 19 nt, Artificial Sequence
  Description of Artificial Sequence: Synthetic oligonucleotide
  Sense strand starting at position 3234 of SEQ ID NO: 583
auuguuguaagaugugaag

SEQ ID NO: 48555 - RNA, 19 nt, Artificial Sequence
  Description of Artificial Sequence: Synthetic oligonucleotide
  Antisense strand to SEQ ID NO: 48474
cuucacaucuuacaacaau

SEQ ID NO: 48556 - RNA, 19 nt, Artificial Sequence
  Description of Artificial Sequence: Synthetic oligonucleotide
  Sense strand starting at position 3318 of SEQ ID NO: 583
uugauaaaugucugugagg

SEQ ID NO: 48557 - RNA, 19 nt, Artificial Sequence
  Description of Artificial Sequence: Synthetic oligonucleotide
  Antisense strand to SEQ ID NO: 48476
ccucacagacauuuaucaa

SEQ ID NO: 48558 - RNA, 19 nt, Artificial Sequence
  Description of Artificial Sequence: Synthetic oligonucleotide
  Sense strand starting at position 3545 of SEQ ID NO: 583
guaagaaagcaauguguaa

SEQ ID NO: 48559 - RNA, 19 nt, Artificial Sequence
  Description of Artificial Sequence: Synthetic oligonucleotide
  Antisense strand to SEQ ID NO: 48478
uuacacauugcuuucuuac

SEQ ID NO: 48560 - RNA, 19 nt, Artificial Sequence
  Description of Artificial Sequence: Synthetic oligonucleotide
  Sense strand starting at position 3549 of SEQ ID NO: 583
gaaagcaauguguaaugau

SEQ ID NO: 48561 - RNA, 19 nt, Artificial Sequence
  Description of Artificial Sequence: Synthetic oligonucleotide
  Antisense strand to SEQ ID NO: 48480
aucauuacacauugcuuuc

SEQ ID NO: 48562 - RNA, 19 nt, Artificial Sequence
  Description of Artificial Sequence: Synthetic oligonucleotide
  Sense strand starting at position 3610 of SEQ ID NO: 583
gcacucaagcuggaguuau

SEQ ID NO: 48563 - RNA, 19 nt, Artificial Sequence
  Description of Artificial Sequence: Synthetic oligonucleotide
  Antisense strand to SEQ ID NO: 48482
auaacuccagcuugagugc

SEQ ID NO: 48564 - RNA, 19 nt, Artificial Sequence
  Description of Artificial Sequence: Synthetic oligonucleotide
  Sense strand starting at position 3678 of SEQ ID NO: 583
aguaaucagagagggcauu

SEQ ID NO: 48565 - RNA, 19 nt, Artificial Sequence
  Description of Artificial Sequence: Synthetic oligonucleotide
  Antisense strand to SEQ ID NO: 48484
aaugcccucucugauuacu

SEQ ID NO: 48566 - RNA, 19 nt, Artificial Sequence
  Description of Artificial Sequence: Synthetic oligonucleotide
  Sense strand starting at position 3679 of SEQ ID NO: 583
guaaucagagagggcauua

SEQ ID NO: 48567 - RNA, 19 nt, Artificial Sequence
  Description of Artificial Sequence: Synthetic oligonucleotide
  Antisense strand to SEQ ID NO: 48486
uaaugcccucucugauuac

SEQ ID NO: 48568 - RNA, 19 nt, Artificial Sequence
  Description of Artificial Sequence: Synthetic oligonucleotide
  Sense strand starting at position 3739 of SEQ ID NO: 583
uccuuaguacuuugcauuu

SEQ ID NO: 48569 - RNA, 19 nt, Artificial Sequence
  Description of Artificial Sequence: Synthetic oligonucleotide
  Antisense strand to SEQ ID NO: 48488
aaaugcaaaguacuaagga

SEQ ID NO: 48570 - RNA, 19 nt, Artificial Sequence
  Description of Artificial Sequence: Synthetic oligonucleotide
  Sense strand starting at position 3888 of SEQ ID NO: 583
accacuguuguagauauaa

SEQ ID NO: 48571 - RNA, 19 nt, Artificial Sequence
  Description of Artificial Sequence: Synthetic oligonucleotide
  Antisense strand to SEQ ID NO: 48490
uuauaucuacaacaguggu

SEQ ID NO: 48572 - RNA, 19 nt, Artificial Sequence
  Description of Artificial Sequence: Synthetic oligonucleotide
  Sense strand starting at position 3959 of SEQ ID NO: 584
agucuagaaugguuuaauu

SEQ ID NO: 48573 - RNA, 19 nt, Artificial Sequence
  Description of Artificial Sequence: Synthetic oligonucleotide
  Antisense strand to SEQ ID NO: 48492
aauuaaaccauucuagacu

SEQ ID NO: 48574 - RNA, 19 nt, Artificial Sequence
  Description of Artificial Sequence: Synthetic oligonucleotide
  Sense strand starting at position 3957 of SEQ ID NO: 584
ggagucuagaaugguuuaa

SEQ ID NO: 48575 - RNA, 19 nt, Artificial Sequence
  Description of Artificial Sequence: Synthetic oligonucleotide
  Antisense strand to SEQ ID NO: 48494
uuaaaccauucuagacucc

SEQ ID NO: 48576 - RNA, 19 nt, Artificial Sequence
  Description of Artificial Sequence: Synthetic oligonucleotide
  Sense strand starting at position 3956 of SEQ ID NO: 584
aggagucuagaaugguuua

SEQ ID NO: 48577 - RNA, 19 nt, Artificial Sequence
  Description of Artificial Sequence: Synthetic oligonucleotide
  Antisense strand to SEQ ID NO: 48496
uaaaccauucuagacuccu

SEQ ID NO: 48578 - RNA, 19 nt, Artificial Sequence
  Description of Artificial Sequence: Synthetic oligonucleotide
  Sense strand starting at position 3921 of SEQ ID NO: 584
gguuguggaacagggauaa

SEQ ID NO: 48579 - RNA, 19 nt, Artificial Sequence
  Description of Artificial Sequence: Synthetic oligonucleotide
  Antisense strand to SEQ ID NO: 48498
uuaucccuguuccacaacc

SEQ ID NO: 48580 - RNA, 19 nt, Artificial Sequence
  Description of Artificial Sequence: Synthetic oligonucleotide
  Sense strand starting at position 3912 of SEQ ID NO: 584
uaggauagugguuguggaa

SEQ ID NO: 48581 - RNA, 19 nt, Artificial Sequence
  Description of Artificial Sequence: Synthetic oligonucleotide
  Antisense strand to SEQ ID NO: 48500
uuccacaaccacuauccua

SEQ ID NO: 48582 - RNA, 19 nt, Artificial Sequence
  Description of Artificial Sequence: Synthetic oligonucleotide
  Sense strand starting at position 3911 of SEQ ID NO: 584
auaggauagugguugugga

SEQ ID NO: 48583 - RNA, 19 nt, Artificial Sequence
  Description of Artificial Sequence: Synthetic oligonucleotide
  Antisense strand to SEQ ID NO: 48502
uccacaaccacuauccuau

SEQ ID NO: 48584 - RNA, 19 nt, Artificial Sequence
  Description of Artificial Sequence: Synthetic oligonucleotide
  Sense strand starting at position 3895 of SEQ ID NO: 584
uugucucaugcugacaaua

SEQ ID NO: 48585 - RNA, 19 nt, Artificial Sequence
  Description of Artificial Sequence: Synthetic oligonucleotide
  Antisense strand to SEQ ID NO: 48504
uauugucagcaugagacaa

SEQ ID NO: 48586 - RNA, 19 nt, Artificial Sequence
  Description of Artificial Sequence: Synthetic oligonucleotide
  Sense strand starting at position 3839 of SEQ ID NO: 584
aucuaauaucccuacgagu

SEQ ID NO: 48587 - RNA, 19 nt, Artificial Sequence
  Description of Artificial Sequence: Synthetic oligonucleotide
  Antisense strand to SEQ ID NO: 48506
acucguagggauauuagau

SEQ ID NO: 48588 - RNA, 19 nt, Artificial Sequence
  Description of Artificial Sequence: Synthetic oligonucleotide
  Sense strand starting at position 3803 of SEQ ID NO: 584
ucuuauuccucagugaaag

SEQ ID NO: 48589 - RNA, 19 nt, Artificial Sequence
  Description of Artificial Sequence: Synthetic oligonucleotide
  Antisense strand to SEQ ID NO: 48508
cuuucacugaggaauaaga

SEQ ID NO: 48590 - RNA, 19 nt, Artificial Sequence
  Description of Artificial Sequence: Synthetic oligonucleotide
  Sense strand starting at position 3317 of SEQ ID NO: 584
gggauauuccuuugguuga

SEQ ID NO: 48591 - RNA, 19 nt, Artificial Sequence
  Description of Artificial Sequence: Synthetic oligonucleotide
  Antisense strand to SEQ ID NO: 48510
ucaaccaaaggaauauccc

SEQ ID NO: 48592 - RNA, 19 nt, Artificial Sequence
  Description of Artificial Sequence: Synthetic oligonucleotide
  Sense strand starting at position 3315 of SEQ ID NO: 584
augggauauuccuuugguu

SEQ ID NO: 48593 - RNA, 19 nt, Artificial Sequence
  Description of Artificial Sequence: Synthetic oligonucleotide
  Antisense strand to SEQ ID NO: 48512
aaccaaaggaauaucccau

SEQ ID NO: 48594 - RNA, 19 nt, Artificial Sequence
  Description of Artificial Sequence: Synthetic oligonucleotide
  Sense strand starting at position 3161 of SEQ ID NO: 584
guuggacaugucuauuaac

SEQ ID NO: 48595 - RNA, 19 nt, Artificial Sequence
  Description of Artificial Sequence: Synthetic oligonucleotide
  Antisense strand to SEQ ID NO: 48514
guuaauagacauguccaac

SEQ ID NO: 48596 - RNA, 19 nt, Artificial Sequence
  Description of Artificial Sequence: Synthetic oligonucleotide
  Sense strand starting at position 3035 of SEQ ID NO: 584
uuuauuguacgggaaacau

SEQ ID NO: 48597 - RNA, 19 nt, Artificial Sequence
  Description of Artificial Sequence: Synthetic oligonucleotide
  Antisense strand to SEQ ID NO: 48516
auguuucccguacaauaaa

SEQ ID NO: 48598 - RNA, 19 nt, Artificial Sequence
  Description of Artificial Sequence: Synthetic oligonucleotide
  Sense strand starting at position 2985 of SEQ ID NO: 584
aguaaagaacucgacuagu

SEQ ID NO: 48599 - RNA, 19 nt, Artificial Sequence
  Description of Artificial Sequence: Synthetic oligonucleotide
  Antisense strand to SEQ ID NO: 48518
acuagucgaguucuuuacu

SEQ ID NO: 48600 - RNA, 19 nt, Artificial Sequence
  Description of Artificial Sequence: Synthetic oligonucleotide
  Sense strand starting at position 2962 of SEQ ID NO: 584
ggaggcaaggucggaaauu

SEQ ID NO: 48601 - RNA, 19 nt, Artificial Sequence
  Description of Artificial Sequence: Synthetic oligonucleotide
  Antisense strand to SEQ ID NO: 48520
aauuuccgaccuugccucc

SEQ ID NO: 48602 - RNA, 19 nt, Artificial Sequence
  Description of Artificial Sequence: Synthetic oligonucleotide
  Sense strand starting at position 2879 of SEQ ID NO: 584
uguauuaagugacuuaaug

SEQ ID NO: 48603 - RNA, 19 nt, Artificial Sequence
  Description of Artificial Sequence: Synthetic oligonucleotide
  Antisense strand to SEQ ID NO: 48522
cauuaagucacuuaauaca

SEQ ID NO: 48604 - RNA, 19 nt, Artificial Sequence
  Description of Artificial Sequence: Synthetic oligonucleotide
  Sense strand starting at position 2830 of SEQ ID NO: 584
ucggcuugucgucugcaaa

SEQ ID NO: 48605 - RNA, 19 nt, Artificial Sequence
  Description of Artificial Sequence: Synthetic oligonucleotide
  Antisense strand to SEQ ID NO: 48524
uuugcagacgacaagccga

SEQ ID NO: 48606 - RNA, 19 nt, Artificial Sequence
  Description of Artificial Sequence: Synthetic oligonucleotide
  Sense strand starting at position 2775 of SEQ ID NO: 584
guuacacugaguuaaguuu

SEQ ID NO: 48607 - RNA, 19 nt, Artificial Sequence
  Description of Artificial Sequence: Synthetic oligonucleotide
  Antisense strand to SEQ ID NO: 48526
aaacuuaacucaguguaac

SEQ ID NO: 48608 - RNA, 19 nt, Artificial Sequence
  Description of Artificial Sequence: Synthetic oligonucleotide
  Sense strand starting at position 2722 of SEQ ID NO: 584
ccaggaguucuguugccgu

SEQ ID NO: 48609 - RNA, 19 nt, Artificial Sequence
  Description of Artificial Sequence: Synthetic oligonucleotide
  Antisense strand to SEQ ID NO: 48528
acggcaacagaacuccugg

SEQ ID NO: 48610 - RNA, 19 nt, Artificial Sequence
  Description of Artificial Sequence: Synthetic oligonucleotide
  Sense strand starting at position 2713 of SEQ ID NO: 584
ggacaaguuccaggaguuc

SEQ ID NO: 48611 - RNA, 19 nt, Artificial Sequence
  Description of Artificial Sequence: Synthetic oligonucleotide
  Antisense strand to SEQ ID NO: 48530
gaacuccuggaacuugucc

SEQ ID NO: 48612 - RNA, 19 nt, Artificial Sequence
  Description of Artificial Sequence: Synthetic oligonucleotide
  Sense strand starting at position 2577 of SEQ ID NO: 584
aaaugugcugaauaguaau

SEQ ID NO: 48613 - RNA, 19 nt, Artificial Sequence
  Description of Artificial Sequence: Synthetic oligonucleotide
  Antisense strand to SEQ ID NO: 48532
auuacuauucagcacauuu

SEQ ID NO: 48614 - RNA, 19 nt, Artificial Sequence
  Description of Artificial Sequence: Synthetic oligonucleotide
  Sense strand starting at position 2574 of SEQ ID NO: 584
augaaaugugcugaauagu

SEQ ID NO: 48615 - RNA, 19 nt, Artificial Sequence
  Description of Artificial Sequence: Synthetic oligonucleotide
  Antisense strand to SEQ ID NO: 48534
acuauucagcacauuucau

SEQ ID NO: 48616 - RNA, 19 nt, Artificial Sequence
  Description of Artificial Sequence: Synthetic oligonucleotide
  Sense strand starting at position 2407 of SEQ ID NO: 584
ccuuauaccggcuaaacaa

SEQ ID NO: 48617 - RNA, 19 nt, Artificial Sequence
  Description of Artificial Sequence: Synthetic oligonucleotide
  Antisense strand to SEQ ID NO: 48536
uuguuuagccgguauaagg

SEQ ID NO: 48618 - RNA, 19 nt, Artificial Sequence
  Description of Artificial Sequence: Synthetic oligonucleotide
  Sense strand starting at position 1486 of SEQ ID NO: 584
uacccuugccaugggagaa

SEQ ID NO: 48619 - RNA, 19 nt, Artificial Sequence
  Description of Artificial Sequence: Synthetic oligonucleotide
  Antisense strand to SEQ ID NO: 48538
uucucccauggcaagggua

SEQ ID NO: 48620 - RNA, 19 nt, Artificial Sequence
  Description of Artificial Sequence: Synthetic oligonucleotide
  Sense strand starting at position 1413 of SEQ ID NO: 584
cccgauuacgauuacaagu

SEQ ID NO: 48621 - RNA, 19 nt, Artificial Sequence
  Description of Artificial Sequence: Synthetic oligonucleotide
  Antisense strand to SEQ ID NO: 48540
acuuguaaucguaaucggg

SEQ ID NO: 48622 - RNA, 19 nt, Artificial Sequence
  Description of Artificial Sequence: Synthetic oligonucleotide
  Sense strand starting at position 1278 of SEQ ID NO: 584
ucaaauaaccguugaagga

SEQ ID NO: 48623 - RNA, 19 nt, Artificial Sequence
  Description of Artificial Sequence: Synthetic oligonucleotide
  Antisense strand to SEQ ID NO: 48542
uccuucaacgguuauuuga

SEQ ID NO: 48624 - RNA, 19 nt, Artificial Sequence
  Description of Artificial Sequence: Synthetic oligonucleotide
  Sense strand starting at position 1192 of SEQ ID NO: 584
gguauauaccuauagcaca

SEQ ID NO: 48625 - RNA, 19 nt, Artificial Sequence
  Description of Artificial Sequence: Synthetic oligonucleotide
  Antisense strand to SEQ ID NO: 48544
ugugcuauagguauauacc

SEQ ID NO: 48626 - RNA, 19 nt, Artificial Sequence
  Description of Artificial Sequence: Synthetic oligonucleotide
  Sense strand starting at position 1157 of SEQ ID NO: 584
uugacugaguuccuuaaca

SEQ ID NO: 48627 - RNA, 19 nt, Artificial Sequence
  Description of Artificial Sequence: Synthetic oligonucleotide
  Antisense strand to SEQ ID NO: 48546
uguuaaggaacucagucaa

SEQ ID NO: 48628 - RNA, 19 nt, Artificial Sequence
  Description of Artificial Sequence: Synthetic oligonucleotide
  Sense strand starting at position 894 of SEQ ID NO: 584
cguauuaacaugggaauac

SEQ ID NO: 48629 - RNA, 19 nt, Artificial Sequence
  Description of Artificial Sequence: Synthetic oligonucleotide
  Antisense strand to SEQ ID NO: 48548
guauucccauguuaauacg

SEQ ID NO: 48630 - RNA, 19 nt, Artificial Sequence
  Description of Artificial Sequence: Synthetic oligonucleotide
  Sense strand starting at position 893 of SEQ ID NO: 584
acguauuaacaugggaaua

SEQ ID NO: 48631 - RNA, 19 nt, Artificial Sequence
  Description of Artificial Sequence: Synthetic oligonucleotide
  Antisense strand to SEQ ID NO: 48550
uauucccauguuaauacgu

SEQ ID NO: 48632 - RNA, 19 nt, Artificial Sequence
  Description of Artificial Sequence: Synthetic oligonucleotide
  Sense strand starting at position 882 of SEQ ID NO: 584
guuagauuucuacguauua

SEQ ID NO: 48633 - RNA, 19 nt, Artificial Sequence
  Description of Artificial Sequence: Synthetic oligonucleotide
  Antisense strand to SEQ ID NO: 48552
uaauacguagaaaucuaac

SEQ ID NO: 48634 - RNA, 19 nt, Artificial Sequence
  Description of Artificial Sequence: Synthetic oligonucleotide
  Sense strand starting at position 768 of SEQ ID NO: 584
gguuaaucuggguaguuag

SEQ ID NO: 48635 - RNA, 19 nt, Artificial Sequence
  Description of Artificial Sequence: Synthetic oligonucleotide
  Antisense strand to SEQ ID NO: 48554
cuaacuacccagauuaacc

SEQ ID NO: 48636 - RNA, 19 nt, Artificial Sequence
  Description of Artificial Sequence: Synthetic oligonucleotide
  Sense strand starting at position 648 of SEQ ID NO: 584
agacucaucgcugaauaua

SEQ ID NO: 48637 - RNA, 19 nt, Artificial Sequence
  Description of Artificial Sequence: Synthetic oligonucleotide
  Antisense strand to SEQ ID NO: 48556
uauauucagcgaugagucu

SEQ ID NO: 48638 - RNA, 19 nt, Artificial Sequence
  Description of Artificial Sequence: Synthetic oligonucleotide
  Sense strand starting at position 544 of SEQ ID NO: 584
aagauuaucuaagagggaa

SEQ ID NO: 48639 - RNA, 19 nt, Artificial Sequence
  Description of Artificial Sequence: Synthetic oligonucleotide
  Antisense strand to SEQ ID NO: 48558
uucccucuuagauaaucuu

SEQ ID NO: 48640 - RNA, 19 nt, Artificial Sequence
  Description of Artificial Sequence: Synthetic oligonucleotide
  Sense strand starting at position 431 of SEQ ID NO: 584
aagacagaguucuuagcca

SEQ ID NO: 48641 - RNA, 19 nt, Artificial Sequence
  Description of Artificial Sequence: Synthetic oligonucleotide
  Antisense strand to SEQ ID NO: 48560
uggcuaagaacucugucuu

SEQ ID NO: 48642 - RNA, 19 nt, Artificial Sequence
  Description of Artificial Sequence: Synthetic oligonucleotide
  Sense strand starting at position 386 of SEQ ID NO: 584
uaguaagguguggaaguau

SEQ ID NO: 48643 - RNA, 19 nt, Artificial Sequence
  Description of Artificial Sequence: Synthetic oligonucleotide
  Antisense strand to SEQ ID NO: 48562
auacuuccacaccuuacua

SEQ ID NO: 48644 - RNA, 19 nt, Artificial Sequence
  Description of Artificial Sequence: Synthetic oligonucleotide
  Sense strand starting at position 382 of SEQ ID NO: 584
cauauaguaagguguggaa

SEQ ID NO: 48645 - RNA, 19 nt, Artificial Sequence
  Description of Artificial Sequence: Synthetic oligonucleotide
  Antisense strand to SEQ ID NO: 48564
uuccacaccuuacuauaug

SEQ ID NO: 48646 - RNA, 19 nt, Artificial Sequence
  Description of Artificial Sequence: Synthetic oligonucleotide
  Sense strand starting at position 274 of SEQ ID NO: 584
acgaaugaguacuugagaa

SEQ ID NO: 48647 - RNA, 19 nt, Artificial Sequence
  Description of Artificial Sequence: Synthetic oligonucleotide
  Antisense strand to SEQ ID NO: 48566
uucucaaguacucauucgu

SEQ ID NO: 48648 - RNA, 19 nt, Artificial Sequence
  Description of Artificial Sequence: Synthetic oligonucleotide
  Sense strand starting at position 256 of SEQ ID NO: 584
agugacuauuauguaacaa

SEQ ID NO: 48649 - RNA, 19 nt, Artificial Sequence
  Description of Artificial Sequence: Synthetic oligonucleotide
  Antisense strand to SEQ ID NO: 48568
uuguuacauaauagucacu

SEQ ID NO: 48650 - RNA, 19 nt, Artificial Sequence
  Description of Artificial Sequence: Synthetic oligonucleotide
  Sense strand starting at position 110 of SEQ ID NO: 584
guauguagaaguggaagaa

SEQ ID NO: 48651 - RNA, 19 nt, Artificial Sequence
  Description of Artificial Sequence: Synthetic oligonucleotide
  Antisense strand to SEQ ID NO: 48570
uucuuccacuucuacauac

SEQ ID NO: 48652 - RNA, 19 nt, Artificial Sequence
  Description of Artificial Sequence: Synthetic oligonucleotide
  Sense strand starting at position 28 of SEQ ID NO: 585
cuugcaugcuugccauuua

SEQ ID NO: 48653 - RNA, 19 nt, Artificial Sequence
  Description of Artificial Sequence: Synthetic oligonucleotide
  Antisense strand to SEQ ID NO: 48572
uaaauggcaagcaugcaag

SEQ ID NO: 48654 - RNA, 19 nt, Artificial Sequence
  Description of Artificial Sequence: Synthetic oligonucleotide
  Sense strand starting at position 164 of SEQ ID NO: 585
agugaaucucuuuaacuug

SEQ ID NO: 48655 - RNA, 19 nt, Artificial Sequence
  Description of Artificial Sequence: Synthetic oligonucleotide
  Antisense strand to SEQ ID NO: 48574
caaguuaaagagauucacu

SEQ ID NO: 48656 - RNA, 19 nt, Artificial Sequence
  Description of Artificial Sequence: Synthetic oligonucleotide
  Sense strand starting at position 170 of SEQ ID NO: 585
ucucuuuaacuuggagcua

SEQ ID NO: 48657 - RNA, 19 nt, Artificial Sequence
  Description of Artificial Sequence: Synthetic oligonucleotide
  Antisense strand to SEQ ID NO: 48576
uagcuccaaguuaaagaga

SEQ ID NO: 48658 - RNA, 19 nt, Artificial Sequence
  Description of Artificial Sequence: Synthetic oligonucleotide
  Sense strand starting at position 413 of SEQ ID NO: 585
ccucauuccugccuggaaa

SEQ ID NO: 48659 - RNA, 19 nt, Artificial Sequence
  Description of Artificial Sequence: Synthetic oligonucleotide
  Antisense strand to SEQ ID NO: 48578
uuuccaggcaggaaugagg

SEQ ID NO: 48660 - RNA, 19 nt, Artificial Sequence
  Description of Artificial Sequence: Synthetic oligonucleotide
  Sense strand starting at position 414 of SEQ ID NO: 585
cucauuccugccuggaaag

SEQ ID NO: 48661 - RNA, 19 nt, Artificial Sequence
  Description of Artificial Sequence: Synthetic oligonucleotide
  Antisense strand to SEQ ID NO: 48580
cuuuccaggcaggaaugag

SEQ ID NO: 48662 - RNA, 19 nt, Artificial Sequence
  Description of Artificial Sequence: Synthetic oligonucleotide
  Sense strand starting at position 488 of SEQ ID NO: 585
ccuagagcuucucucaaug

SEQ ID NO: 48663 - RNA, 19 nt, Artificial Sequence
  Description of Artificial Sequence: Synthetic oligonucleotide
  Antisense strand to SEQ ID NO: 48582
cauugagagaagcucuagg

SEQ ID NO: 48664 - RNA, 19 nt, Artificial Sequence
  Description of Artificial Sequence: Synthetic oligonucleotide
  Sense strand starting at position 562 of SEQ ID NO: 585
aguacugauuccguaaaga

SEQ ID NO: 48665 - RNA, 19 nt, Artificial Sequence
  Description of Artificial Sequence: Synthetic oligonucleotide
  Antisense strand to SEQ ID NO: 48584
ucuuuacggaaucaguacu

SEQ ID NO: 48666 - RNA, 19 nt, Artificial Sequence
  Description of Artificial Sequence: Synthetic oligonucleotide
  Sense strand starting at position 595 of SEQ ID NO: 585
gccuguacucguugaaagg

SEQ ID NO: 48667 - RNA, 19 nt, Artificial Sequence
  Description of Artificial Sequence: Synthetic oligonucleotide
  Antisense strand to SEQ ID NO: 48586
ccuuucaacgaguacaggc

SEQ ID NO: 48668 - RNA, 19 nt, Artificial Sequence
  Description of Artificial Sequence: Synthetic oligonucleotide
  Sense strand starting at position 619 of SEQ ID NO: 585
ugaauuguugcccaccgga

SEQ ID NO: 48669 - RNA, 19 nt, Artificial Sequence
  Description of Artificial Sequence: Synthetic oligonucleotide
  Antisense strand to SEQ ID NO: 48588
uccggugggcaacaauuca

SEQ ID NO: 48670 - RNA, 19 nt, Artificial Sequence
  Description of Artificial Sequence: Synthetic oligonucleotide
  Sense strand starting at position 773 of SEQ ID NO: 585
ccaagagacgcucaccuaa

SEQ ID NO: 48671 - RNA, 19 nt, Artificial Sequence
  Description of Artificial Sequence: Synthetic oligonucleotide
  Antisense strand to SEQ ID NO: 48590
uuaggugagcgucucuugg

SEQ ID NO: 48672 - RNA, 19 nt, Artificial Sequence
  Description of Artificial Sequence: Synthetic oligonucleotide
  Sense strand starting at position 852 of SEQ ID NO: 585
ccauucucauccgucuaca

SEQ ID NO: 48673 - RNA, 19 nt, Artificial Sequence
  Description of Artificial Sequence: Synthetic oligonucleotide
  Antisense strand to SEQ ID NO: 48592
uguagacggaugagaaugg

SEQ ID NO: 48674 - RNA, 19 nt, Artificial Sequence
  Description of Artificial Sequence: Synthetic oligonucleotide
  Sense strand starting at position 878 of SEQ ID NO: 585
gucaccauucucugacaca

SEQ ID NO: 48675 - RNA, 19 nt, Artificial Sequence
  Description of Artificial Sequence: Synthetic oligonucleotide
  Antisense strand to SEQ ID NO: 48594
ugugucagagaauggugac

SEQ ID NO: 48676 - RNA, 19 nt, Artificial Sequence
  Description of Artificial Sequence: Synthetic oligonucleotide
  Sense strand starting at position 1060 of SEQ ID NO: 585
aguucuauuccagaagcua

SEQ ID NO: 48677 - RNA, 19 nt, Artificial Sequence
  Description of Artificial Sequence: Synthetic oligonucleotide
  Antisense strand to SEQ ID NO: 48596
uagcuucuggaauagaacu

SEQ ID NO: 48678 - RNA, 19 nt, Artificial Sequence
  Description of Artificial Sequence: Synthetic oligonucleotide
  Sense strand starting at position 1104 of SEQ ID NO: 585
ggugaaagucuuugcuauu

SEQ ID NO: 48679 - RNA, 19 nt, Artificial Sequence
  Description of Artificial Sequence: Synthetic oligonucleotide
  Antisense strand to SEQ ID NO: 48598
aauagcaaagacuuucacc

SEQ ID NO: 48680 - RNA, 19 nt, Artificial Sequence
  Description of Artificial Sequence: Synthetic oligonucleotide
  Sense strand starting at position 1105 of SEQ ID NO: 585
gugaaagucuuugcuauug

SEQ ID NO: 48681 - RNA, 19 nt, Artificial Sequence
  Description of Artificial Sequence: Synthetic oligonucleotide
  Antisense strand to SEQ ID NO: 48600
caauagcaaagacuuucac

SEQ ID NO: 48682 - RNA, 19 nt, Artificial Sequence
  Description of Artificial Sequence: Synthetic oligonucleotide
  Sense strand starting at position 1156 of SEQ ID NO: 585
uaccauuucuucugagagg

SEQ ID NO: 48683 - RNA, 19 nt, Artificial Sequence
  Description of Artificial Sequence: Synthetic oligonucleotide
  Antisense strand to SEQ ID NO: 48602
ccucucagaagaaauggua

SEQ ID NO: 48684 - RNA, 19 nt, Artificial Sequence
  Description of Artificial Sequence: Synthetic oligonucleotide
  Sense strand starting at position 1176 of SEQ ID NO: 585
acgcauaagcguguucaca

SEQ ID NO: 48685 - RNA, 19 nt, Artificial Sequence
  Description of Artificial Sequence: Synthetic oligonucleotide
  Antisense strand to SEQ ID NO: 48604
ugugaacacgcuuaugcgu

SEQ ID NO: 48686 - RNA, 19 nt, Artificial Sequence
  Description of Artificial Sequence: Synthetic oligonucleotide
  Sense strand starting at position 1177 of SEQ ID NO: 585
cgcauaagcguguucacag

SEQ ID NO: 48687 - RNA, 19 nt, Artificial Sequence
  Description of Artificial Sequence: Synthetic oligonucleotide
  Antisense strand to SEQ ID NO: 48606
cugugaacacgcuuaugcg

SEQ ID NO: 48688 - RNA, 19 nt, Artificial Sequence
  Description of Artificial Sequence: Synthetic oligonucleotide
  Sense strand starting at position 1298 of SEQ ID NO: 585
guacauacugcccgugaaa

SEQ ID NO: 48689 - RNA, 19 nt, Artificial Sequence
  Description of Artificial Sequence: Synthetic oligonucleotide
  Antisense strand to SEQ ID NO: 48608
uuucacgggcaguauguac

SEQ ID NO: 48690 - RNA, 19 nt, Artificial Sequence
  Description of Artificial Sequence: Synthetic oligonucleotide
  Sense strand starting at position 1778 of SEQ ID NO: 585
ggaguagucgcggugacuu

SEQ ID NO: 48691 - RNA, 19 nt, Artificial Sequence
  Description of Artificial Sequence: Synthetic oligonucleotide
  Antisense strand to SEQ ID NO: 48610
aagucaccgcgacuacucc

SEQ ID NO: 48692 - RNA, 19 nt, Artificial Sequence
  Description of Artificial Sequence: Synthetic oligonucleotide
  Sense strand starting at position 1815 of SEQ ID NO: 585
aguguauuccuccaccauc

SEQ ID NO: 48693 - RNA, 19 nt, Artificial Sequence
  Description of Artificial Sequence: Synthetic oligonucleotide
  Antisense strand to SEQ ID NO: 48612
gaugguggaggaauacacu

SEQ ID NO: 48694 - RNA, 19 nt, Artificial Sequence
  Description of Artificial Sequence: Synthetic oligonucleotide
  Sense strand starting at position 2072 of SEQ ID NO: 585
ggccucaucucuuuaagga

SEQ ID NO: 48695 - RNA, 19 nt, Artificial Sequence
  Description of Artificial Sequence: Synthetic oligonucleotide
  Antisense strand to SEQ ID NO: 48614
uccuuaaagagaugaggcc

SEQ ID NO: 48696 - RNA, 19 nt, Artificial Sequence
  Description of Artificial Sequence: Synthetic oligonucleotide
  Sense strand starting at position 2073 of SEQ ID NO: 585
gccucaucucuuuaaggag

SEQ ID NO: 48697 - RNA, 19 nt, Artificial Sequence
  Description of Artificial Sequence: Synthetic oligonucleotide
  Antisense strand to SEQ ID NO: 48616
cuccuuaaagagaugaggc

SEQ ID NO: 48698 - RNA, 19 nt, Artificial Sequence
  Description of Artificial Sequence: Synthetic oligonucleotide
  Sense strand starting at position 2079 of SEQ ID NO: 585
ucucuuuaaggaggguuua

SEQ ID NO: 48699 - RNA, 19 nt, Artificial Sequence
  Description of Artificial Sequence: Synthetic oligonucleotide
  Antisense strand to SEQ ID NO: 48618
uaaacccuccuuaaagaga

SEQ ID NO: 48700 - RNA, 19 nt, Artificial Sequence
  Description of Artificial Sequence: Synthetic oligonucleotide
  Sense strand starting at position 2080 of SEQ ID NO: 585
cucuuuaaggaggguuuau

SEQ ID NO: 48701 - RNA, 19 nt, Artificial Sequence
  Description of Artificial Sequence: Synthetic oligonucleotide
  Antisense strand to SEQ ID NO: 48620
auaaacccuccuuaaagag

SEQ ID NO: 48702 - RNA, 19 nt, Artificial Sequence
  Description of Artificial Sequence: Synthetic oligonucleotide
  Sense strand starting at position 2136 of SEQ ID NO: 585
cggugaugucauuggcaac

SEQ ID NO: 48703 - RNA, 19 nt, Artificial Sequence
  Description of Artificial Sequence: Synthetic oligonucleotide
  Antisense strand to SEQ ID NO: 48622
guugccaaugacaucaccg

SEQ ID NO: 48704 - RNA, 19 nt, Artificial Sequence
  Description of Artificial Sequence: Synthetic oligonucleotide
  Sense strand starting at position 2193 of SEQ ID NO: 585
agcagcugcucucuauuua

SEQ ID NO: 48705 - RNA, 19 nt, Artificial Sequence
  Description of Artificial Sequence: Synthetic oligonucleotide
  Antisense strand to SEQ ID NO: 48624
uaaauagagagcagcugcu

SEQ ID NO: 48706 - RNA, 19 nt, Artificial Sequence
  Description of Artificial Sequence: Synthetic oligonucleotide
  Sense strand starting at position 2385 of SEQ ID NO: 585
aaaguaucggaguaacuuu

SEQ ID NO: 48707 - RNA, 19 nt, Artificial Sequence
  Description of Artificial Sequence: Synthetic oligonucleotide
  Antisense strand to SEQ ID NO: 48626
aaaguuacuccgauacuuu

SEQ ID NO: 48708 - RNA, 19 nt, Artificial Sequence
  Description of Artificial Sequence: Synthetic oligonucleotide
  Sense strand starting at position 2392 of SEQ ID NO: 585
cggaguaacuuucuaaagg

SEQ ID NO: 48709 - RNA, 19 nt, Artificial Sequence
  Description of Artificial Sequence: Synthetic oligonucleotide
  Antisense strand to SEQ ID NO: 48628
ccuuuagaaaguuacuccg

SEQ ID NO: 48710 - RNA, 19 nt, Artificial Sequence
  Description of Artificial Sequence: Synthetic oligonucleotide
  Sense strand starting at position 2393 of SEQ ID NO: 585
ggaguaacuuucuaaagga

SEQ ID NO: 48711 - RNA, 19 nt, Artificial Sequence
  Description of Artificial Sequence: Synthetic oligonucleotide
  Antisense strand to SEQ ID NO: 48630
uccuuuagaaaguuacucc

SEQ ID NO: 48712 - RNA, 19 nt, Artificial Sequence
  Description of Artificial Sequence: Synthetic oligonucleotide
  Sense strand starting at position 3189 of SEQ ID NO: 585
ugcaaauagcuagauugaa

SEQ ID NO: 48713 - RNA, 19 nt, Artificial Sequence
  Description of Artificial Sequence: Synthetic oligonucleotide
  Antisense strand to SEQ ID NO: 48632
uucaaucuagcuauuugca

SEQ ID NO: 48714 - RNA, 19 nt, Artificial Sequence
  Description of Artificial Sequence: Synthetic oligonucleotide
  Sense strand starting at position 3373 of SEQ ID NO: 585
gaaaguugcccugggauac

SEQ ID NO: 48715 - RNA, 19 nt, Artificial Sequence
  Description of Artificial Sequence: Synthetic oligonucleotide
  Antisense strand to SEQ ID NO: 48634
guaucccagggcaacuuuc

SEQ ID NO: 48716 - RNA, 19 nt, Artificial Sequence
  Description of Artificial Sequence: Synthetic oligonucleotide
  Sense strand starting at position 3374 of SEQ ID NO: 585
aaaguugcccugggauaca

SEQ ID NO: 48717 - RNA, 19 nt, Artificial Sequence
  Description of Artificial Sequence: Synthetic oligonucleotide
  Antisense strand to SEQ ID NO: 48636
uguaucccagggcaacuuu

SEQ ID NO: 48718 - RNA, 19 nt, Artificial Sequence
  Description of Artificial Sequence: Synthetic oligonucleotide
  Sense strand starting at position 3611 of SEQ ID NO: 585
guaguauacugaguagcag

SEQ ID NO: 48719 - RNA, 19 nt, Artificial Sequence
  Description of Artificial Sequence: Synthetic oligonucleotide
  Antisense strand to SEQ ID NO: 48638
cugcuacucaguauacuac

SEQ ID NO: 48720 - RNA, 19 nt, Artificial Sequence
  Description of Artificial Sequence: Synthetic oligonucleotide
  Sense strand starting at position 3663 of SEQ ID NO: 585
cugaaaucaggagguguca

SEQ ID NO: 48721 - RNA, 19 nt, Artificial Sequence
  Description of Artificial Sequence: Synthetic oligonucleotide
  Antisense strand to SEQ ID NO: 48640
ugacaccuccugauuucag

SEQ ID NO: 48722 - RNA, 19 nt, Artificial Sequence
  Description of Artificial Sequence: Synthetic oligonucleotide
  Sense strand starting at position 3665 of SEQ ID NO: 585
gaaaucaggaggugucaga

SEQ ID NO: 48723 - RNA, 19 nt, Artificial Sequence
  Description of Artificial Sequence: Synthetic oligonucleotide
  Antisense strand to SEQ ID NO: 48642
ucugacaccuccugauuuc

SEQ ID NO: 48724 - RNA, 19 nt, Artificial Sequence
  Description of Artificial Sequence: Synthetic oligonucleotide
  Sense strand starting at position 3705 of SEQ ID NO: 585
ugcucaaugagcugugaag

SEQ ID NO: 48725 - RNA, 19 nt, Artificial Sequence
  Description of Artificial Sequence: Synthetic oligonucleotide
  Antisense strand to SEQ ID NO: 48644
cuucacagcucauugagca

SEQ ID NO: 48726 - RNA, 19 nt, Artificial Sequence
  Description of Artificial Sequence: Synthetic oligonucleotide
  Sense strand starting at position 3707 of SEQ ID NO: 585
cucaaugagcugugaagag

SEQ ID NO: 48727 - RNA, 19 nt, Artificial Sequence
  Description of Artificial Sequence: Synthetic oligonucleotide
  Antisense strand to SEQ ID NO: 48646
cucuucacagcucauugag

SEQ ID NO: 48728 - RNA, 19 nt, Artificial Sequence
  Description of Artificial Sequence: Synthetic oligonucleotide
  Sense strand starting at position 3809 of SEQ ID NO: 585
guacacauccgauagucuu

SEQ ID NO: 48729 - RNA, 19 nt, Artificial Sequence
  Description of Artificial Sequence: Synthetic oligonucleotide
  Antisense strand to SEQ ID NO: 48648
aagacuaucggauguguac

SEQ ID NO: 48730 - RNA, 19 nt, Artificial Sequence
  Description of Artificial Sequence: Synthetic oligonucleotide
  Sense strand starting at position 3845 of SEQ ID NO: 585
guguaacgucuguugucga

SEQ ID NO: 48731 - RNA, 19 nt, Artificial Sequence
  Description of Artificial Sequence: Synthetic oligonucleotide
  Antisense strand to SEQ ID NO: 48650
ucgacaacagacguuacac

SEQ ID NO: 48732 - RNA, 19 nt, Artificial Sequence
  Description of Artificial Sequence: Synthetic oligonucleotide
  Sense strand starting at position 3977 of SEQ ID NO: 586
cgccaauuacacgaagaau

SEQ ID NO: 48733 - RNA, 19 nt, Artificial Sequence
  Description of Artificial Sequence: Synthetic oligonucleotide
  Antisense strand to SEQ ID NO: 48652
auucuucguguaauuggcg

SEQ ID NO: 48734 - RNA, 19 nt, Artificial Sequence
  Description of Artificial Sequence: Synthetic oligonucleotide
  Sense strand starting at position 3924 of SEQ ID NO: 586
ggaguccacuguguauaua

SEQ ID NO: 48735 - RNA, 19 nt, Artificial Sequence
  Description of Artificial Sequence: Synthetic oligonucleotide
  Antisense strand to SEQ ID NO: 48654
uauauacacaguggacucc

SEQ ID NO: 48736 - RNA, 19 nt, Artificial Sequence
  Description of Artificial Sequence: Synthetic oligonucleotide
  Sense strand starting at position 3865 of SEQ ID NO: 586
uuuguaucacuguagguuu

SEQ ID NO: 48737 - RNA, 19 nt, Artificial Sequence
  Description of Artificial Sequence: Synthetic oligonucleotide
  Antisense strand to SEQ ID NO: 48656
aaaccuacagugauacaaa

SEQ ID NO: 48738 - RNA, 19 nt, Artificial Sequence
  Description of Artificial Sequence: Synthetic oligonucleotide
  Sense strand starting at position 3782 of SEQ ID NO: 586
gaauaaaucugucugugca

SEQ ID NO: 48739 - RNA, 19 nt, Artificial Sequence
  Description of Artificial Sequence: Synthetic oligonucleotide
  Antisense strand to SEQ ID NO: 48658
ugcacagacagauuuauuc

SEQ ID NO: 48740 - RNA, 19 nt, Artificial Sequence
  Description of Artificial Sequence: Synthetic oligonucleotide
  Sense strand starting at position 3765 of SEQ ID NO: 586
ugaguaacuucucuuauga

SEQ ID NO: 48741 - RNA, 19 nt, Artificial Sequence
  Description of Artificial Sequence: Synthetic oligonucleotide
  Antisense strand to SEQ ID NO: 48660
ucauaagagaaguuacuca

SEQ ID NO: 48742 - RNA, 19 nt, Artificial Sequence
  Description of Artificial Sequence: Synthetic oligonucleotide
  Sense strand starting at position 3764 of SEQ ID NO: 586
uugaguaacuucucuuaug

SEQ ID NO: 48743 - RNA, 19 nt, Artificial Sequence
  Description of Artificial Sequence: Synthetic oligonucleotide
  Antisense strand to SEQ ID NO: 48662
cauaagagaaguuacucaa

SEQ ID NO: 48744 - RNA, 19 nt, Artificial Sequence
  Description of Artificial Sequence: Synthetic oligonucleotide
  Sense strand starting at position 3756 of SEQ ID NO: 586
auaguuguuugaguaacuu

SEQ ID NO: 48745 - RNA, 19 nt, Artificial Sequence
  Description of Artificial Sequence: Synthetic oligonucleotide
  Antisense strand to SEQ ID NO: 48664
aaguuacucaaacaacuau

SEQ ID NO: 48746 - RNA, 19 nt, Artificial Sequence
  Description of Artificial Sequence: Synthetic oligonucleotide
  Sense strand starting at position 3753 of SEQ ID NO: 586
ucuauaguuguuugaguaa

SEQ ID NO: 48747 - RNA, 19 nt, Artificial Sequence
  Description of Artificial Sequence: Synthetic oligonucleotide
  Antisense strand to SEQ ID NO: 48666
uuacucaaacaacuauaga

SEQ ID NO: 48748 - RNA, 19 nt, Artificial Sequence
  Description of Artificial Sequence: Synthetic oligonucleotide
  Sense strand starting at position 3752 of SEQ ID NO: 586
cucuauaguuguuugagua

SEQ ID NO: 48749 - RNA, 19 nt, Artificial Sequence
  Description of Artificial Sequence: Synthetic oligonucleotide
  Antisense strand to SEQ ID NO: 48668
uacucaaacaacuauagag

SEQ ID NO: 48750 - RNA, 19 nt, Artificial Sequence
  Description of Artificial Sequence: Synthetic oligonucleotide
  Sense strand starting at position 3745 of SEQ ID NO: 586
cucucaucucuauaguugu

SEQ ID NO: 48751 - RNA, 19 nt, Artificial Sequence
  Description of Artificial Sequence: Synthetic oligonucleotide
  Antisense strand to SEQ ID NO: 48670
acaacuauagagaugagag

SEQ ID NO: 48752 - RNA, 19 nt, Artificial Sequence
  Description of Artificial Sequence: Synthetic oligonucleotide
  Sense strand starting at position 3587 of SEQ ID NO: 586
uugucuaacgaccgagaaa

SEQ ID NO: 48753 - RNA, 19 nt, Artificial Sequence
  Description of Artificial Sequence: Synthetic oligonucleotide
  Antisense strand to SEQ ID NO: 48672
uuucucggucguuagacaa

SEQ ID NO: 48754 - RNA, 19 nt, Artificial Sequence
  Description of Artificial Sequence: Synthetic oligonucleotide
  Sense strand starting at position 3579 of SEQ ID NO: 586
auccgaacuugucuaacga

SEQ ID NO: 48755 - RNA, 19 nt, Artificial Sequence
  Description of Artificial Sequence: Synthetic oligonucleotide
  Antisense strand to SEQ ID NO: 48674
ucguuagacaaguucggau

SEQ ID NO: 48756 - RNA, 19 nt, Artificial Sequence
  Description of Artificial Sequence: Synthetic oligonucleotide
  Sense strand starting at position 3548 of SEQ ID NO: 586
aaggguuaauggucucauu

SEQ ID NO: 48757 - RNA, 19 nt, Artificial Sequence
  Description of Artificial Sequence: Synthetic oligonucleotide
  Antisense strand to SEQ ID NO: 48676
aaugagaccauuaacccuu

SEQ ID NO: 48758 - RNA, 19 nt, Artificial Sequence
  Description of Artificial Sequence: Synthetic oligonucleotide
  Sense strand starting at position 3416 of SEQ ID NO: 586
ggaccuuuaccuuggacca

SEQ ID NO: 48759 - RNA, 19 nt, Artificial Sequence
  Description of Artificial Sequence: Synthetic oligonucleotide
  Antisense strand to SEQ ID NO: 48678
ugguccaagguaaaggucc

SEQ ID NO: 48760 - RNA, 19 nt, Artificial Sequence
  Description of Artificial Sequence: Synthetic oligonucleotide
  Sense strand starting at position 3229 of SEQ ID NO: 586
acaacuguguugguaaauu

SEQ ID NO: 48761 - RNA, 19 nt, Artificial Sequence
  Description of Artificial Sequence: Synthetic oligonucleotide
  Antisense strand to SEQ ID NO: 48680
aauuuaccaacacaguugu

SEQ ID NO: 48762 - RNA, 19 nt, Artificial Sequence
  Description of Artificial Sequence: Synthetic oligonucleotide
  Sense strand starting at position 3228 of SEQ ID NO: 586
uacaacuguguugguaaau

SEQ ID NO: 48763 - RNA, 19 nt, Artificial Sequence
  Description of Artificial Sequence: Synthetic oligonucleotide
  Antisense strand to SEQ ID NO: 48682
auuuaccaacacaguugua

SEQ ID NO: 48764 - RNA, 19 nt, Artificial Sequence
  Description of Artificial Sequence: Synthetic oligonucleotide
  Sense strand starting at position 2804 of SEQ ID NO: 586
gauagauacaucgacgugu

SEQ ID NO: 48765 - RNA, 19 nt, Artificial Sequence
  Description of Artificial Sequence: Synthetic oligonucleotide
  Antisense strand to SEQ ID NO: 48684
acacgucgauguaucuauc

SEQ ID NO: 48766 - RNA, 19 nt, Artificial Sequence
  Description of Artificial Sequence: Synthetic oligonucleotide
  Sense strand starting at position 2775 of SEQ ID NO: 586
agaaguagcagcuauagua

SEQ ID NO: 48767 - RNA, 19 nt, Artificial Sequence
  Description of Artificial Sequence: Synthetic oligonucleotide
  Antisense strand to SEQ ID NO: 48686
uacuauagcugcuacuucu

SEQ ID NO: 48768 - RNA, 19 nt, Artificial Sequence
  Description of Artificial Sequence: Synthetic oligonucleotide
  Sense strand starting at position 2764 of SEQ ID NO: 586
guaauuggucaagaaguag

SEQ ID NO: 48769 - RNA, 19 nt, Artificial Sequence
  Description of Artificial Sequence: Synthetic oligonucleotide
  Antisense strand to SEQ ID NO: 48688
cuacuucuugaccaauuac

SEQ ID NO: 48770 - RNA, 19 nt, Artificial Sequence
  Description of Artificial Sequence: Synthetic oligonucleotide
  Sense strand starting at position 2760 of SEQ ID NO: 586
agcuguaauuggucaagaa

SEQ ID NO: 48771 - RNA, 19 nt, Artificial Sequence
  Description of Artificial Sequence: Synthetic oligonucleotide
  Antisense strand to SEQ ID NO: 48690
uucuugaccaauuacagcu

SEQ ID NO: 48772 - RNA, 19 nt, Artificial Sequence
  Description of Artificial Sequence: Synthetic oligonucleotide
  Sense strand starting at position 2697 of SEQ ID NO: 586
ucaguacagugaguauauu

SEQ ID NO: 48773 - RNA, 19 nt, Artificial Sequence
  Description of Artificial Sequence: Synthetic oligonucleotide
  Antisense strand to SEQ ID NO: 48692
aauauacucacuguacuga

SEQ ID NO: 48774 - RNA, 19 nt, Artificial Sequence
  Description of Artificial Sequence: Synthetic oligonucleotide
  Sense strand starting at position 2694 of SEQ ID NO: 586
uacucaguacagugaguau

SEQ ID NO: 48775 - RNA, 19 nt, Artificial Sequence
  Description of Artificial Sequence: Synthetic oligonucleotide
  Antisense strand to SEQ ID NO: 48694
auacucacuguacugagua

SEQ ID NO: 48776 - RNA, 19 nt, Artificial Sequence
  Description of Artificial Sequence: Synthetic oligonucleotide
  Sense strand starting at position 2688 of SEQ ID NO: 586
ggaagauacucaguacagu

SEQ ID NO: 48777 - RNA, 19 nt, Artificial Sequence
  Description of Artificial Sequence: Synthetic oligonucleotide
  Antisense strand to SEQ ID NO: 48696
acuguacugaguaucuucc

SEQ ID NO: 48778 - RNA, 19 nt, Artificial Sequence
  Description of Artificial Sequence: Synthetic oligonucleotide
  Sense strand starting at position 2676 of SEQ ID NO: 586
cugaaugcugcaggaagau

SEQ ID NO: 48779 - RNA, 19 nt, Artificial Sequence
  Description of Artificial Sequence: Synthetic oligonucleotide
  Antisense strand to SEQ ID NO: 48698
aucuuccugcagcauucag

SEQ ID NO: 48780 - RNA, 19 nt, Artificial Sequence
  Description of Artificial Sequence: Synthetic oligonucleotide
  Sense strand starting at position 2662 of SEQ ID NO: 586
ggcuuugcuccagacugaa

SEQ ID NO: 48781 - RNA, 19 nt, Artificial Sequence
  Description of Artificial Sequence: Synthetic oligonucleotide
  Antisense strand to SEQ ID NO: 48700
uucagucuggagcaaagcc

SEQ ID NO: 48782 - RNA, 19 nt, Artificial Sequence
  Description of Artificial Sequence: Synthetic oligonucleotide
  Sense strand starting at position 2546 of SEQ ID NO: 586
uuacucagucaugaguuau

SEQ ID NO: 48783 - RNA, 19 nt, Artificial Sequence
  Description of Artificial Sequence: Synthetic oligonucleotide
  Antisense strand to SEQ ID NO: 48702
auaacucaugacugaguaa

SEQ ID NO: 48784 - RNA, 19 nt, Artificial Sequence
  Description of Artificial Sequence: Synthetic oligonucleotide
  Sense strand starting at position 2420 of SEQ ID NO: 586
gggugugaauccuuguuga

SEQ ID NO: 48785 - RNA, 19 nt, Artificial Sequence
  Description of Artificial Sequence: Synthetic oligonucleotide
  Antisense strand to SEQ ID NO: 48704
ucaacaaggauucacaccc

SEQ ID NO: 48786 - RNA, 19 nt, Artificial Sequence
  Description of Artificial Sequence: Synthetic oligonucleotide
  Sense strand starting at position 2281 of SEQ ID NO: 586
augugaaauaaaugucgca

SEQ ID NO: 48787 - RNA, 19 nt, Artificial Sequence
  Description of Artificial Sequence: Synthetic oligonucleotide
  Antisense strand to SEQ ID NO: 48706
ugcgacauuuauuucacau

SEQ ID NO: 48788 - RNA, 19 nt, Artificial Sequence
  Description of Artificial Sequence: Synthetic oligonucleotide
  Sense strand starting at position 2010 of SEQ ID NO: 586
guagacuccggcuagaaca

SEQ ID NO: 48789 - RNA, 19 nt, Artificial Sequence
  Description of Artificial Sequence: Synthetic oligonucleotide
  Antisense strand to SEQ ID NO: 48708
uguucuagccggagucuac

SEQ ID NO: 48790 - RNA, 19 nt, Artificial Sequence
  Description of Artificial Sequence: Synthetic oligonucleotide
  Sense strand starting at position 1358 of SEQ ID NO: 586
ugucauuuaucagaugaca

SEQ ID NO: 48791 - RNA, 19 nt, Artificial Sequence
  Description of Artificial Sequence: Synthetic oligonucleotide
  Antisense strand to SEQ ID NO: 48710
ugucaucugauaaaugaca

SEQ ID NO: 48792 - RNA, 19 nt, Artificial Sequence
  Description of Artificial Sequence: Synthetic oligonucleotide
  Sense strand starting at position 1356 of SEQ ID NO: 586
uuugucauuuaucagauga

SEQ ID NO: 48793 - RNA, 19 nt, Artificial Sequence
  Description of Artificial Sequence: Synthetic oligonucleotide
  Antisense strand to SEQ ID NO: 48712
ucaucugauaaaugacaaa

SEQ ID NO: 48794 - RNA, 19 nt, Artificial Sequence
  Description of Artificial Sequence: Synthetic oligonucleotide
  Sense strand starting at position 1344 of SEQ ID NO: 586
ggguguagguaauuuguca

SEQ ID NO: 48795 - RNA, 19 nt, Artificial Sequence
  Description of Artificial Sequence: Synthetic oligonucleotide
  Antisense strand to SEQ ID NO: 48714
ugacaaauuaccuacaccc

SEQ ID NO: 48796 - RNA, 19 nt, Artificial Sequence
  Description of Artificial Sequence: Synthetic oligonucleotide
  Sense strand starting at position 1250 of SEQ ID NO: 586
guaaaucccguuuacaaga

SEQ ID NO: 48797 - RNA, 19 nt, Artificial Sequence
  Description of Artificial Sequence: Synthetic oligonucleotide
  Antisense strand to SEQ ID NO: 48716
ucuuguaaacgggauuuac

SEQ ID NO: 48798 - RNA, 19 nt, Artificial Sequence
  Description of Artificial Sequence: Synthetic oligonucleotide
  Sense strand starting at position 592 of SEQ ID NO: 586
ccguaauuacgcuacuaca

SEQ ID NO: 48799 - RNA, 19 nt, Artificial Sequence
  Description of Artificial Sequence: Synthetic oligonucleotide
  Antisense strand to SEQ ID NO: 48718
uguaguagcguaauuacgg

SEQ ID NO: 48800 - RNA, 19 nt, Artificial Sequence
  Description of Artificial Sequence: Synthetic oligonucleotide
  Sense strand starting at position 591 of SEQ ID NO: 586
gccguaauuacgcuacuac

SEQ ID NO: 48801 - RNA, 19 nt, Artificial Sequence
  Description of Artificial Sequence: Synthetic oligonucleotide
  Antisense strand to SEQ ID NO: 48720
guaguagcguaauuacggc

SEQ ID NO: 48802 - RNA, 19 nt, Artificial Sequence
  Description of Artificial Sequence: Synthetic oligonucleotide
  Sense strand starting at position 387 of SEQ ID NO: 586
cuuaccuacgccugaaauc

SEQ ID NO: 48803 - RNA, 19 nt, Artificial Sequence
  Description of Artificial Sequence: Synthetic oligonucleotide
  Antisense strand to SEQ ID NO: 48722
gauuucaggcguagguaag

SEQ ID NO: 48804 - RNA, 19 nt, Artificial Sequence
  Description of Artificial Sequence: Synthetic oligonucleotide
  Sense strand starting at position 362 of SEQ ID NO: 586
ccaaacuccuggcuagaca

SEQ ID NO: 48805 - RNA, 19 nt, Artificial Sequence
  Description of Artificial Sequence: Synthetic oligonucleotide
  Antisense strand to SEQ ID NO: 48724
ugucuagccaggaguuugg

SEQ ID NO: 48806 - RNA, 19 nt, Artificial Sequence
  Description of Artificial Sequence: Synthetic oligonucleotide
  Sense strand starting at position 278 of SEQ ID NO: 586
ugaauucugaaccacguga

SEQ ID NO: 48807 - RNA, 19 nt, Artificial Sequence
  Description of Artificial Sequence: Synthetic oligonucleotide
  Antisense strand to SEQ ID NO: 48726
ucacgugguucagaauuca

SEQ ID NO: 48808 - RNA, 19 nt, Artificial Sequence
  Description of Artificial Sequence: Synthetic oligonucleotide
  Sense strand starting at position 233 of SEQ ID NO: 586
ucugaaauauuaucaaggu

SEQ ID NO: 48809 - RNA, 19 nt, Artificial Sequence
  Description of Artificial Sequence: Synthetic oligonucleotide
  Antisense strand to SEQ ID NO: 48728
accuugauaauauuucaga

SEQ ID NO: 48810 - RNA, 19 nt, Artificial Sequence
  Description of Artificial Sequence: Synthetic oligonucleotide
  Sense strand starting at position 223 of SEQ ID NO: 586
gcccauugccucugaaaua

SEQ ID NO: 48811 - RNA, 19 nt, Artificial Sequence
  Description of Artificial Sequence: Synthetic oligonucleotide
  Antisense strand to SEQ ID NO: 48730
uauuucagaggcaaugggc

SEQ ID NO: 48812 - RNA, 19 nt, Artificial Sequence
  Description of Artificial Sequence: Synthetic oligonucleotide
  Sense strand starting at position 3877 of SEQ ID NO: 587
gcccauauucuccagaaag

SEQ ID NO: 48813 - RNA, 19 nt, Artificial Sequence
  Description of Artificial Sequence: Synthetic oligonucleotide
  Antisense strand to SEQ ID NO: 48732
cuuucuggagaauaugggc

SEQ ID NO: 48814 - RNA, 19 nt, Artificial Sequence
  Description of Artificial Sequence: Synthetic oligonucleotide
  Sense strand starting at position 3731 of SEQ ID NO: 587
uagcauuuguucuuguaag

SEQ ID NO: 48815 - RNA, 19 nt, Artificial Sequence
  Description of Artificial Sequence: Synthetic oligonucleotide
  Antisense strand to SEQ ID NO: 48734
cuuacaagaacaaaugcua

SEQ ID NO: 48816 - RNA, 19 nt, Artificial Sequence
  Description of Artificial Sequence: Synthetic oligonucleotide
  Sense strand starting at position 3729 of SEQ ID NO: 587
ucuagcauuuguucuugua

SEQ ID NO: 48817 - RNA, 19 nt, Artificial Sequence
  Description of Artificial Sequence: Synthetic oligonucleotide
  Antisense strand to SEQ ID NO: 48736
uacaagaacaaaugcuaga

SEQ ID NO: 48818 - RNA, 19 nt, Artificial Sequence
  Description of Artificial Sequence: Synthetic oligonucleotide
  Sense strand starting at position 3288 of SEQ ID NO: 587
uggccaugaggauguauua

SEQ ID NO: 48819 - RNA, 19 nt, Artificial Sequence
  Description of Artificial Sequence: Synthetic oligonucleotide
  Antisense strand to SEQ ID NO: 48738
uaauacauccucauggcca

SEQ ID NO: 48820 - RNA, 19 nt, Artificial Sequence
  Description of Artificial Sequence: Synthetic oligonucleotide
  Sense strand starting at position 3282 of SEQ ID NO: 587
ggcacuuggccaugaggau

SEQ ID NO: 48821 - RNA, 19 nt, Artificial Sequence
  Description of Artificial Sequence: Synthetic oligonucleotide
  Antisense strand to SEQ ID NO: 48740
auccucauggccaagugcc

SEQ ID NO: 48822 - RNA, 19 nt, Artificial Sequence
  Description of Artificial Sequence: Synthetic oligonucleotide
  Sense strand starting at position 3244 of SEQ ID NO: 587
ugguuaacuuggccaagga

SEQ ID NO: 48823 - RNA, 19 nt, Artificial Sequence
  Description of Artificial Sequence: Synthetic oligonucleotide
  Antisense strand to SEQ ID NO: 48742
uccuuggccaaguuaacca

SEQ ID NO: 48824 - RNA, 19 nt, Artificial Sequence
  Description of Artificial Sequence: Synthetic oligonucleotide
  Sense strand starting at position 3235 of SEQ ID NO: 587
uaaagaaguugguuaacuu

SEQ ID NO: 48825 - RNA, 19 nt, Artificial Sequence
  Description of Artificial Sequence: Synthetic oligonucleotide
  Antisense strand to SEQ ID NO: 48744
aaguuaaccaacuucuuua

SEQ ID NO: 48826 - RNA, 19 nt, Artificial Sequence
  Description of Artificial Sequence: Synthetic oligonucleotide
  Sense strand starting at position 3232 of SEQ ID NO: 587
gcuuaaagaaguugguuaa

SEQ ID NO: 48827 - RNA, 19 nt, Artificial Sequence
  Description of Artificial Sequence: Synthetic oligonucleotide
  Antisense strand to SEQ ID NO: 48746
uuaaccaacuucuuuaagc

SEQ ID NO: 48828 - RNA, 19 nt, Artificial Sequence
  Description of Artificial Sequence: Synthetic oligonucleotide
  Sense strand starting at position 3163 of SEQ ID NO: 587
aagcgcuuucuggaagaac

SEQ ID NO: 48829 - RNA, 19 nt, Artificial Sequence
  Description of Artificial Sequence: Synthetic oligonucleotide
  Antisense strand to SEQ ID NO: 48748
guucuuccagaaagcgcuu

SEQ ID NO: 48830 - RNA, 19 nt, Artificial Sequence
  Description of Artificial Sequence: Synthetic oligonucleotide
  Sense strand starting at position 3095 of SEQ ID NO: 587
gcagacuaacuguaauuau

SEQ ID NO: 48831 - RNA, 19 nt, Artificial Sequence
  Description of Artificial Sequence: Synthetic oligonucleotide
  Antisense strand to SEQ ID NO: 48750
auaauuacaguuagucugc

SEQ ID NO: 48832 - RNA, 19 nt, Artificial Sequence
  Description of Artificial Sequence: Synthetic oligonucleotide
  Sense strand starting at position 3092 of SEQ ID NO: 587
gaugcagacuaacuguaau

SEQ ID NO: 48833 - RNA, 19 nt, Artificial Sequence
  Description of Artificial Sequence: Synthetic oligonucleotide
  Antisense strand to SEQ ID NO: 48752
auuacaguuagucugcauc

SEQ ID NO: 48834 - RNA, 19 nt, Artificial Sequence
  Description of Artificial Sequence: Synthetic oligonucleotide
  Sense strand starting at position 3071 of SEQ ID NO: 587
uuugaauaaugugcuucua

SEQ ID NO: 48835 - RNA, 19 nt, Artificial Sequence
  Description of Artificial Sequence: Synthetic oligonucleotide
  Antisense strand to SEQ ID NO: 48754
uagaagcacauuauucaaa

SEQ ID NO: 48836 - RNA, 19 nt, Artificial Sequence
  Description of Artificial Sequence: Synthetic oligonucleotide
  Sense strand starting at position 2982 of SEQ ID NO: 587
gcuagaguugauuaguguu

SEQ ID NO: 48837 - RNA, 19 nt, Artificial Sequence
  Description of Artificial Sequence: Synthetic oligonucleotide
  Antisense strand to SEQ ID NO: 48756
aacacuaaucaacucuagc

SEQ ID NO: 48838 - RNA, 19 nt, Artificial Sequence
  Description of Artificial Sequence: Synthetic oligonucleotide
  Sense strand starting at position 2979 of SEQ ID NO: 587
caggcuagaguugauuagu

SEQ ID NO: 48839 - RNA, 19 nt, Artificial Sequence
  Description of Artificial Sequence: Synthetic oligonucleotide
  Antisense strand to SEQ ID NO: 48758
acuaaucaacucuagccug

SEQ ID NO: 48840 - RNA, 19 nt, Artificial Sequence
  Description of Artificial Sequence: Synthetic oligonucleotide
  Sense strand starting at position 2869 of SEQ ID NO: 587
cccaaauauuaucuggguu

SEQ ID NO: 48841 - RNA, 19 nt, Artificial Sequence
  Description of Artificial Sequence: Synthetic oligonucleotide
  Antisense strand to SEQ ID NO: 48760
aacccagauaauauuuggg

SEQ ID NO: 48842 - RNA, 19 nt, Artificial Sequence
  Description of Artificial Sequence: Synthetic oligonucleotide
  Sense strand starting at position 2742 of SEQ ID NO: 587
aggcacuggagagguuaau

SEQ ID NO: 48843 - RNA, 19 nt, Artificial Sequence
  Description of Artificial Sequence: Synthetic oligonucleotide
  Antisense strand to SEQ ID NO: 48762
auuaaccucuccagugccu

SEQ ID NO: 48844 - RNA, 19 nt, Artificial Sequence
  Description of Artificial Sequence: Synthetic oligonucleotide
  Sense strand starting at position 2696 of SEQ ID NO: 587
uaagauaggugaucuagug

SEQ ID NO: 48845 - RNA, 19 nt, Artificial Sequence
  Description of Artificial Sequence: Synthetic oligonucleotide
  Antisense strand to SEQ ID NO: 48764
cacuagaucaccuaucuua

SEQ ID NO: 48846 - RNA, 19 nt, Artificial Sequence
  Description of Artificial Sequence: Synthetic oligonucleotide
  Sense strand starting at position 2692 of SEQ ID NO: 587
cuuauaagauaggugaucu

SEQ ID NO: 48847 - RNA, 19 nt, Artificial Sequence
  Description of Artificial Sequence: Synthetic oligonucleotide
  Antisense strand to SEQ ID NO: 48766
agaucaccuaucuuauaag

SEQ ID NO: 48848 - RNA, 19 nt, Artificial Sequence
  Description of Artificial Sequence: Synthetic oligonucleotide
  Sense strand starting at position 2627 of SEQ ID NO: 587
uauuaugugcuagauaguc

SEQ ID NO: 48849 - RNA, 19 nt, Artificial Sequence
  Description of Artificial Sequence: Synthetic oligonucleotide
  Antisense strand to SEQ ID NO: 48768
gacuaucuagcacauaaua

SEQ ID NO: 48850 - RNA, 19 nt, Artificial Sequence
  Description of Artificial Sequence: Synthetic oligonucleotide
  Sense strand starting at position 2468 of SEQ ID NO: 587
guuccaguaagagggaauu

SEQ ID NO: 48851 - RNA, 19 nt, Artificial Sequence
  Description of Artificial Sequence: Synthetic oligonucleotide
  Antisense strand to SEQ ID NO: 48770
aauucccucuuacuggaac

SEQ ID NO: 48852 - RNA, 19 nt, Artificial Sequence
  Description of Artificial Sequence: Synthetic oligonucleotide
  Sense strand starting at position 2432 of SEQ ID NO: 587
augauugacuggucguuau

SEQ ID NO: 48853 - RNA, 19 nt, Artificial Sequence
  Description of Artificial Sequence: Synthetic oligonucleotide
  Antisense strand to SEQ ID NO: 48772
auaacgaccagucaaucau

SEQ ID NO: 48854 - RNA, 19 nt, Artificial Sequence
  Description of Artificial Sequence: Synthetic oligonucleotide
  Sense strand starting at position 2430 of SEQ ID NO: 587
uaaugauugacuggucguu

SEQ ID NO: 48855 - RNA, 19 nt, Artificial Sequence
  Description of Artificial Sequence: Synthetic oligonucleotide
  Antisense strand to SEQ ID NO: 48774
aacgaccagucaaucauua

SEQ ID NO: 48856 - RNA, 19 nt, Artificial Sequence
  Description of Artificial Sequence: Synthetic oligonucleotide
  Sense strand starting at position 2417 of SEQ ID NO: 587
ggagucuccucucuaauga

SEQ ID NO: 48857 - RNA, 19 nt, Artificial Sequence
  Description of Artificial Sequence: Synthetic oligonucleotide
  Antisense strand to SEQ ID NO: 48776
ucauuagagaggagacucc

SEQ ID NO: 48858 - RNA, 19 nt, Artificial Sequence
  Description of Artificial Sequence: Synthetic oligonucleotide
  Sense strand starting at position 2414 of SEQ ID NO: 587
cgaggagucuccucucuaa

SEQ ID NO: 48859 - RNA, 19 nt, Artificial Sequence
  Description of Artificial Sequence: Synthetic oligonucleotide
  Antisense strand to SEQ ID NO: 48778
uuagagaggagacuccucg

SEQ ID NO: 48860 - RNA, 19 nt, Artificial Sequence
  Description of Artificial Sequence: Synthetic oligonucleotide
  Sense strand starting at position 2221 of SEQ ID NO: 587
ccuggagcgaguuaggaau

SEQ ID NO: 48861 - RNA, 19 nt, Artificial Sequence
  Description of Artificial Sequence: Synthetic oligonucleotide
  Antisense strand to SEQ ID NO: 48780
auuccuaacucgcuccagg

SEQ ID NO: 48862 - RNA, 19 nt, Artificial Sequence
  Description of Artificial Sequence: Synthetic oligonucleotide
  Sense strand starting at position 2151 of SEQ ID NO: 587
uuggcuggaucaucauaau

SEQ ID NO: 48863 - RNA, 19 nt, Artificial Sequence
  Description of Artificial Sequence: Synthetic oligonucleotide
  Antisense strand to SEQ ID NO: 48782
auuaugaugauccagccaa

SEQ ID NO: 48864 - RNA, 19 nt, Artificial Sequence
  Description of Artificial Sequence: Synthetic oligonucleotide
  Sense strand starting at position 2146 of SEQ ID NO: 587
ggugauuggcuggaucauc

SEQ ID NO: 48865 - RNA, 19 nt, Artificial Sequence
  Description of Artificial Sequence: Synthetic oligonucleotide
  Antisense strand to SEQ ID NO: 48784
gaugauccagccaaucacc

SEQ ID NO: 48866 - RNA, 19 nt, Artificial Sequence
  Description of Artificial Sequence: Synthetic oligonucleotide
  Sense strand starting at position 2145 of SEQ ID NO: 587
cggugauuggcuggaucau

SEQ ID NO: 48867 - RNA, 19 nt, Artificial Sequence
  Description of Artificial Sequence: Synthetic oligonucleotide
  Antisense strand to SEQ ID NO: 48786
augauccagccaaucaccg

SEQ ID NO: 48868 - RNA, 19 nt, Artificial Sequence
  Description of Artificial Sequence: Synthetic oligonucleotide
  Sense strand starting at position 1258 of SEQ ID NO: 587
ccauuauauuuggacagcu

SEQ ID NO: 48869 - RNA, 19 nt, Artificial Sequence
  Description of Artificial Sequence: Synthetic oligonucleotide
  Antisense strand to SEQ ID NO: 48788
agcuguccaaauauaaugg

SEQ ID NO: 48870 - RNA, 19 nt, Artificial Sequence
  Description of Artificial Sequence: Synthetic oligonucleotide
  Sense strand starting at position 1125 of SEQ ID NO: 587
aggguaugaagagguagua

SEQ ID NO: 48871 - RNA, 19 nt, Artificial Sequence
  Description of Artificial Sequence: Synthetic oligonucleotide
  Antisense strand to SEQ ID NO: 48790
uacuaccucuucauacccu

SEQ ID NO: 48872 - RNA, 19 nt, Artificial Sequence
  Description of Artificial Sequence: Synthetic oligonucleotide
  Sense strand starting at position 1068 of SEQ ID NO: 587
gcuacuguacucgaaaugu

SEQ ID NO: 48873 - RNA, 19 nt, Artificial Sequence
  Description of Artificial Sequence: Synthetic oligonucleotide
  Antisense strand to SEQ ID NO: 48792
acauuucgaguacaguagc

SEQ ID NO: 48874 - RNA, 19 nt, Artificial Sequence
  Description of Artificial Sequence: Synthetic oligonucleotide
  Sense strand starting at position 1067 of SEQ ID NO: 587
ggcuacuguacucgaaaug

SEQ ID NO: 48875 - RNA, 19 nt, Artificial Sequence
  Description of Artificial Sequence: Synthetic oligonucleotide
  Antisense strand to SEQ ID NO: 48794
cauuucgaguacaguagcc

SEQ ID NO: 48876 - RNA, 19 nt, Artificial Sequence
  Description of Artificial Sequence: Synthetic oligonucleotide
  Sense strand starting at position 1066 of SEQ ID NO: 587
uggcuacuguacucgaaau

SEQ ID NO: 48877 - RNA, 19 nt, Artificial Sequence
  Description of Artificial Sequence: Synthetic oligonucleotide
  Antisense strand to SEQ ID NO: 48796
auuucgaguacaguagcca

SEQ ID NO: 48878 - RNA, 19 nt, Artificial Sequence
  Description of Artificial Sequence: Synthetic oligonucleotide
  Sense strand starting at position 382 of SEQ ID NO: 587
uaaguuaaugugugggaau

SEQ ID NO: 48879 - RNA, 19 nt, Artificial Sequence
  Description of Artificial Sequence: Synthetic oligonucleotide
  Antisense strand to SEQ ID NO: 48798
auucccacacauuaacuua

SEQ ID NO: 48880 - RNA, 19 nt, Artificial Sequence
  Description of Artificial Sequence: Synthetic oligonucleotide
  Sense strand starting at position 381 of SEQ ID NO: 587
guaaguuaaugugugggaa

SEQ ID NO: 48881 - RNA, 19 nt, Artificial Sequence
  Description of Artificial Sequence: Synthetic oligonucleotide
  Antisense strand to SEQ ID NO: 48800
uucccacacauuaacuuac

SEQ ID NO: 48882 - RNA, 19 nt, Artificial Sequence
  Description of Artificial Sequence: Synthetic oligonucleotide
  Sense strand starting at position 366 of SEQ ID NO: 587
uacagugaggcugaaguaa

SEQ ID NO: 48883 - RNA, 19 nt, Artificial Sequence
  Description of Artificial Sequence: Synthetic oligonucleotide
  Antisense strand to SEQ ID NO: 48802
uuacuucagccucacugua

SEQ ID NO: 48884 - RNA, 19 nt, Artificial Sequence
  Description of Artificial Sequence: Synthetic oligonucleotide
  Sense strand starting at position 343 of SEQ ID NO: 587
cugucuuuccuguaucaca

SEQ ID NO: 48885 - RNA, 19 nt, Artificial Sequence
  Description of Artificial Sequence: Synthetic oligonucleotide
  Antisense strand to SEQ ID NO: 48804
ugugauacaggaaagacag

SEQ ID NO: 48886 - RNA, 19 nt, Artificial Sequence
  Description of Artificial Sequence: Synthetic oligonucleotide
  Sense strand starting at position 267 of SEQ ID NO: 587
uuccacuuucuagaagugu

SEQ ID NO: 48887 - RNA, 19 nt, Artificial Sequence
  Description of Artificial Sequence: Synthetic oligonucleotide
  Antisense strand to SEQ ID NO: 48806
acacuucuagaaaguggaa

SEQ ID NO: 48888 - RNA, 19 nt, Artificial Sequence
  Description of Artificial Sequence: Synthetic oligonucleotide
  Sense strand starting at position 183 of SEQ ID NO: 587
caucaaauauugucaggga

SEQ ID NO: 48889 - RNA, 19 nt, Artificial Sequence
  Description of Artificial Sequence: Synthetic oligonucleotide
  Antisense strand to SEQ ID NO: 48808
ucccugacaauauuugaug

SEQ ID NO: 48890 - RNA, 19 nt, Artificial Sequence
  Description of Artificial Sequence: Synthetic oligonucleotide
  Sense strand starting at position 102 of SEQ ID NO: 587
gcaucagagaccugggaau

SEQ ID NO: 48891 - RNA, 19 nt, Artificial Sequence
  Description of Artificial Sequence: Synthetic oligonucleotide
  Antisense strand to SEQ ID NO: 48810
auucccaggucucugaugc

SEQ ID NO: 48892 - RNA, 19 nt, Artificial Sequence
  Description of Artificial Sequence: Synthetic oligonucleotide
  Sense strand starting at position 3916 of SEQ ID NO: 588
uggaaugaugccugguaua

SEQ ID NO: 48893 - RNA, 19 nt, Artificial Sequence
  Description of Artificial Sequence: Synthetic oligonucleotide
  Antisense strand to SEQ ID NO: 48812
uauaccaggcaucauucca

SEQ ID NO: 48894 - RNA, 19 nt, Artificial Sequence
  Description of Artificial Sequence: Synthetic oligonucleotide
  Sense strand starting at position 3906 of SEQ ID NO: 588
ccuaguuagguggaaugau

SEQ ID NO: 48895 - RNA, 19 nt, Artificial Sequence
  Description of Artificial Sequence: Synthetic oligonucleotide
  Antisense strand to SEQ ID NO: 48814
aucauuccaccuaacuagg

SEQ ID NO: 48896 - RNA, 19 nt, Artificial Sequence
  Description of Artificial Sequence: Synthetic oligonucleotide
  Sense strand starting at position 3904 of SEQ ID NO: 588
uuccuaguuagguggaaug

SEQ ID NO: 48897 - RNA, 19 nt, Artificial Sequence
  Description of Artificial Sequence: Synthetic oligonucleotide
  Antisense strand to SEQ ID NO: 48816
cauuccaccuaacuaggaa

SEQ ID NO: 48898 - RNA, 19 nt, Artificial Sequence
  Description of Artificial Sequence: Synthetic oligonucleotide
  Sense strand starting at position 3903 of SEQ ID NO: 588
cuuccuaguuagguggaau

SEQ ID NO: 48899 - RNA, 19 nt, Artificial Sequence
  Description of Artificial Sequence: Synthetic oligonucleotide
  Antisense strand to SEQ ID NO: 48818
auuccaccuaacuaggaag

SEQ ID NO: 48900 - RNA, 19 nt, Artificial Sequence
  Description of Artificial Sequence: Synthetic oligonucleotide
  Sense strand starting at position 3663 of SEQ ID NO: 588
uuaagaauuccaugagcuu

SEQ ID NO: 48901 - RNA, 19 nt, Artificial Sequence
  Description of Artificial Sequence: Synthetic oligonucleotide
  Antisense strand to SEQ ID NO: 48820
aagcucauggaauucuuaa

SEQ ID NO: 48902 - RNA, 19 nt, Artificial Sequence
  Description of Artificial Sequence: Synthetic oligonucleotide
  Sense strand starting at position 3634 of SEQ ID NO: 588
gugauaauggauuggcaac

SEQ ID NO: 48903 - RNA, 19 nt, Artificial Sequence
  Description of Artificial Sequence: Synthetic oligonucleotide
  Antisense strand to SEQ ID NO: 48822
guugccaauccauuaucac

SEQ ID NO: 48904 - RNA, 19 nt, Artificial Sequence
  Description of Artificial Sequence: Synthetic oligonucleotide
  Sense strand starting at position 3225 of SEQ ID NO: 588
gcuugugaccaggauuaca

SEQ ID NO: 48905 - RNA, 19 nt, Artificial Sequence
  Description of Artificial Sequence: Synthetic oligonucleotide
  Antisense strand to SEQ ID NO: 48824
uguaauccuggucacaagc

SEQ ID NO: 48906 - RNA, 19 nt, Artificial Sequence
  Description of Artificial Sequence: Synthetic oligonucleotide
  Sense strand starting at position 3222 of SEQ ID NO: 588
auugcuugugaccaggauu

SEQ ID NO: 48907 - RNA, 19 nt, Artificial Sequence
  Description of Artificial Sequence: Synthetic oligonucleotide
  Antisense strand to SEQ ID NO: 48826
aauccuggucacaagcaau

SEQ ID NO: 48908 - RNA, 19 nt, Artificial Sequence
  Description of Artificial Sequence: Synthetic oligonucleotide
  Sense strand starting at position 3194 of SEQ ID NO: 588
agcacugugguacaauuaa

SEQ ID NO: 48909 - RNA, 19 nt, Artificial Sequence
  Description of Artificial Sequence: Synthetic oligonucleotide
  Antisense strand to SEQ ID NO: 48828
uuaauuguaccacagugcu

SEQ ID NO: 48910 - RNA, 19 nt, Artificial Sequence
  Description of Artificial Sequence: Synthetic oligonucleotide
  Sense strand starting at position 2971 of SEQ ID NO: 588
gugcuugguagauggagaa

SEQ ID NO: 48911 - RNA, 19 nt, Artificial Sequence
  Description of Artificial Sequence: Synthetic oligonucleotide
  Antisense strand to SEQ ID NO: 48830
uucuccaucuaccaagcac

SEQ ID NO: 48912 - RNA, 19 nt, Artificial Sequence
  Description of Artificial Sequence: Synthetic oligonucleotide
  Sense strand starting at position 2952 of SEQ ID NO: 588
gcagaauuggaagacguuu

SEQ ID NO: 48913 - RNA, 19 nt, Artificial Sequence
  Description of Artificial Sequence: Synthetic oligonucleotide
  Antisense strand to SEQ ID NO: 48832
aaacgucuuccaauucugc

SEQ ID NO: 48914 - RNA, 19 nt, Artificial Sequence
  Description of Artificial Sequence: Synthetic oligonucleotide
  Sense strand starting at position 2846 of SEQ ID NO: 588
gcagauuucugggaggaag

SEQ ID NO: 48915 - RNA, 19 nt, Artificial Sequence
  Description of Artificial Sequence: Synthetic oligonucleotide
  Antisense strand to SEQ ID NO: 48834
cuuccucccagaaaucugc

SEQ ID NO: 48916 - RNA, 19 nt, Artificial Sequence
  Description of Artificial Sequence: Synthetic oligonucleotide
  Sense strand starting at position 2372 of SEQ ID NO: 588
gaaauuauaggaugugcau

SEQ ID NO: 48917 - RNA, 19 nt, Artificial Sequence
  Description of Artificial Sequence: Synthetic oligonucleotide
  Antisense strand to SEQ ID NO: 48836
augcacauccuauaauuuc

SEQ ID NO: 48918 - RNA, 19 nt, Artificial Sequence
  Description of Artificial Sequence: Synthetic oligonucleotide
  Sense strand starting at position 2048 of SEQ ID NO: 588
ggaauuagguuccugaggu

SEQ ID NO: 48919 - RNA, 19 nt, Artificial Sequence
  Description of Artificial Sequence: Synthetic oligonucleotide
  Antisense strand to SEQ ID NO: 48838
accucaggaaccuaauucc

SEQ ID NO: 48920 - RNA, 19 nt, Artificial Sequence
  Description of Artificial Sequence: Synthetic oligonucleotide
  Sense strand starting at position 2017 of SEQ ID NO: 588
ucugaaaguuuggcaagaa

SEQ ID NO: 48921 - RNA, 19 nt, Artificial Sequence
  Description of Artificial Sequence: Synthetic oligonucleotide
  Antisense strand to SEQ ID NO: 48840
uucuugccaaacuuucaga

SEQ ID NO: 48922 - RNA, 19 nt, Artificial Sequence
  Description of Artificial Sequence: Synthetic oligonucleotide
  Sense strand starting at position 1872 of SEQ ID NO: 588
ggagauaaguggucacuua

SEQ ID NO: 48923 - RNA, 19 nt, Artificial Sequence
  Description of Artificial Sequence: Synthetic oligonucleotide
  Antisense strand to SEQ ID NO: 48842
uaagugaccacuuaucucc

SEQ ID NO: 48924 - RNA, 19 nt, Artificial Sequence
  Description of Artificial Sequence: Synthetic oligonucleotide
  Sense strand starting at position 1778 of SEQ ID NO: 588
uguuaaaugagugaaccga

SEQ ID NO: 48925 - RNA, 19 nt, Artificial Sequence
  Description of Artificial Sequence: Synthetic oligonucleotide
  Antisense strand to SEQ ID NO: 48844
ucgguucacucauuuaaca

SEQ ID NO: 48926 - RNA, 19 nt, Artificial Sequence
  Description of Artificial Sequence: Synthetic oligonucleotide
  Sense strand starting at position 1715 of SEQ ID NO: 588
ucagucuauuugcauauuu

SEQ ID NO: 48927 - RNA, 19 nt, Artificial Sequence
  Description of Artificial Sequence: Synthetic oligonucleotide
  Antisense strand to SEQ ID NO: 48846
aaauaugcaaauagacuga

SEQ ID NO: 48928 - RNA, 19 nt, Artificial Sequence
  Description of Artificial Sequence: Synthetic oligonucleotide
  Sense strand starting at position 1667 of SEQ ID NO: 588
cuagauccuggucauauua

SEQ ID NO: 48929 - RNA, 19 nt, Artificial Sequence
  Description of Artificial Sequence: Synthetic oligonucleotide
  Antisense strand to SEQ ID NO: 48848
uaauaugaccaggaucuag

SEQ ID NO: 48930 - RNA, 19 nt, Artificial Sequence
  Description of Artificial Sequence: Synthetic oligonucleotide
  Sense strand starting at position 1666 of SEQ ID NO: 588
acuagauccuggucauauu

SEQ ID NO: 48931 - RNA, 19 nt, Artificial Sequence
  Description of Artificial Sequence: Synthetic oligonucleotide
  Antisense strand to SEQ ID NO: 48850
aauaugaccaggaucuagu

SEQ ID NO: 48932 - RNA, 19 nt, Artificial Sequence
  Description of Artificial Sequence: Synthetic oligonucleotide
  Sense strand starting at position 1664 of SEQ ID NO: 588
auacuagauccuggucaua

SEQ ID NO: 48933 - RNA, 19 nt, Artificial Sequence
  Description of Artificial Sequence: Synthetic oligonucleotide
  Antisense strand to SEQ ID NO: 48852
uaugaccaggaucuaguau

SEQ ID NO: 48934 - RNA, 19 nt, Artificial Sequence
  Description of Artificial Sequence: Synthetic oligonucleotide
  Sense strand starting at position 1561 of SEQ ID NO: 588
cuacucauccucugagguu

SEQ ID NO: 48935 - RNA, 19 nt, Artificial Sequence
  Description of Artificial Sequence: Synthetic oligonucleotide
  Antisense strand to SEQ ID NO: 48854
aaccucagaggaugaguag

SEQ ID NO: 48936 - RNA, 19 nt, Artificial Sequence
  Description of Artificial Sequence: Synthetic oligonucleotide
  Sense strand starting at position 1413 of SEQ ID NO: 588
gacacagcuugauuaugga

SEQ ID NO: 48937 - RNA, 19 nt, Artificial Sequence
  Description of Artificial Sequence: Synthetic oligonucleotide
  Antisense strand to SEQ ID NO: 48856
uccauaaucaagcuguguc

SEQ ID NO: 48938 - RNA, 19 nt, Artificial Sequence
  Description of Artificial Sequence: Synthetic oligonucleotide
  Sense strand starting at position 1276 of SEQ ID NO: 588
uaacauaacgucgaugauu

SEQ ID NO: 48939 - RNA, 19 nt, Artificial Sequence
  Description of Artificial Sequence: Synthetic oligonucleotide
  Antisense strand to SEQ ID NO: 48858
aaucaucgacguuauguua

SEQ ID NO: 48940 - RNA, 19 nt, Artificial Sequence
  Description of Artificial Sequence: Synthetic oligonucleotide
  Sense strand starting at position 1275 of SEQ ID NO: 588
auaacauaacgucgaugau

SEQ ID NO: 48941 - RNA, 19 nt, Artificial Sequence
  Description of Artificial Sequence: Synthetic oligonucleotide
  Antisense strand to SEQ ID NO: 48860
aucaucgacguuauguuau

SEQ ID NO: 48942 - RNA, 19 nt, Artificial Sequence
  Description of Artificial Sequence: Synthetic oligonucleotide
  Sense strand starting at position 1208 of SEQ ID NO: 588
cacgacauuucuuuaacgu

SEQ ID NO: 48943 - RNA, 19 nt, Artificial Sequence
  Description of Artificial Sequence: Synthetic oligonucleotide
  Antisense strand to SEQ ID NO: 48862
acguuaaagaaaugucgug

SEQ ID NO: 48944 - RNA, 19 nt, Artificial Sequence
  Description of Artificial Sequence: Synthetic oligonucleotide
  Sense strand starting at position 1111 of SEQ ID NO: 588
gugacagagaugugauuaa

SEQ ID NO: 48945 - RNA, 19 nt, Artificial Sequence
  Description of Artificial Sequence: Synthetic oligonucleotide
  Antisense strand to SEQ ID NO: 48864
uuaaucacaucucugucac

SEQ ID NO: 48946 - RNA, 19 nt, Artificial Sequence
  Description of Artificial Sequence: Synthetic oligonucleotide
  Sense strand starting at position 1103 of SEQ ID NO: 588
ccaauuuggugacagagau

SEQ ID NO: 48947 - RNA, 19 nt, Artificial Sequence
  Description of Artificial Sequence: Synthetic oligonucleotide
  Antisense strand to SEQ ID NO: 48866
aucucugucaccaaauugg

SEQ ID NO: 48948 - RNA, 19 nt, Artificial Sequence
  Description of Artificial Sequence: Synthetic oligonucleotide
  Sense strand starting at position 854 of SEQ ID NO: 588
aggagaagucucuaagcuc

SEQ ID NO: 48949 - RNA, 19 nt, Artificial Sequence
  Description of Artificial Sequence: Synthetic oligonucleotide
  Antisense strand to SEQ ID NO: 48868
gagcuuagagacuucuccu

SEQ ID NO: 48950 - RNA, 19 nt, Artificial Sequence
  Description of Artificial Sequence: Synthetic oligonucleotide
  Sense strand starting at position 530 of SEQ ID NO: 588
ucucucaauccugagaguu

SEQ ID NO: 48951 - RNA, 19 nt, Artificial Sequence
  Description of Artificial Sequence: Synthetic oligonucleotide
  Antisense strand to SEQ ID NO: 48870
aacucucaggauugagaga

SEQ ID NO: 48952 - RNA, 19 nt, Artificial Sequence
  Description of Artificial Sequence: Synthetic oligonucleotide
  Sense strand starting at position 353 of SEQ ID NO: 588
uugaaucacugcucaggua

SEQ ID NO: 48953 - RNA, 19 nt, Artificial Sequence
  Description of Artificial Sequence: Synthetic oligonucleotide
  Antisense strand to SEQ ID NO: 48872
uaccugagcagugauucaa

SEQ ID NO: 48954 - RNA, 19 nt, Artificial Sequence
  Description of Artificial Sequence: Synthetic oligonucleotide
  Sense strand starting at position 343 of SEQ ID NO: 588
gucuuaguucuugaaucac

SEQ ID NO: 48955 - RNA, 19 nt, Artificial Sequence
  Description of Artificial Sequence: Synthetic oligonucleotide
  Antisense strand to SEQ ID NO: 48874
gugauucaagaacuaagac

SEQ ID NO: 48956 - RNA, 19 nt, Artificial Sequence
  Description of Artificial Sequence: Synthetic oligonucleotide
  Sense strand starting at position 341 of SEQ ID NO: 588
gagucuuaguucuugaauc

SEQ ID NO: 48957 - RNA, 19 nt, Artificial Sequence
  Description of Artificial Sequence: Synthetic oligonucleotide
  Antisense strand to SEQ ID NO: 48876
gauucaagaacuaagacuc

SEQ ID NO: 48958 - RNA, 19 nt, Artificial Sequence
  Description of Artificial Sequence: Synthetic oligonucleotide
  Sense strand starting at position 337 of SEQ ID NO: 588
gaaggagucuuaguucuug

SEQ ID NO: 48959 - RNA, 19 nt, Artificial Sequence
  Description of Artificial Sequence: Synthetic oligonucleotide
  Antisense strand to SEQ ID NO: 48878
caagaacuaagacuccuuc

SEQ ID NO: 48960 - RNA, 19 nt, Artificial Sequence
  Description of Artificial Sequence: Synthetic oligonucleotide
  Sense strand starting at position 285 of SEQ ID NO: 588
ugagcauugugacuuuaga

SEQ ID NO: 48961 - RNA, 19 nt, Artificial Sequence
  Description of Artificial Sequence: Synthetic oligonucleotide
  Antisense strand to SEQ ID NO: 48880
ucuaaagucacaaugcuca

SEQ ID NO: 48962 - RNA, 19 nt, Artificial Sequence
  Description of Artificial Sequence: Synthetic oligonucleotide
  Sense strand starting at position 280 of SEQ ID NO: 588
acugaugagcauugugacu

SEQ ID NO: 48963 - RNA, 19 nt, Artificial Sequence
  Description of Artificial Sequence: Synthetic oligonucleotide
  Antisense strand to SEQ ID NO: 48882
agucacaaugcucaucagu

SEQ ID NO: 48964 - RNA, 19 nt, Artificial Sequence
  Description of Artificial Sequence: Synthetic oligonucleotide
  Sense strand starting at position 274 of SEQ ID NO: 588
guuaauacugaugagcauu

SEQ ID NO: 48965 - RNA, 19 nt, Artificial Sequence
  Description of Artificial Sequence: Synthetic oligonucleotide
  Antisense strand to SEQ ID NO: 48884
aaugcucaucaguauuaac

SEQ ID NO: 48966 - RNA, 19 nt, Artificial Sequence
  Description of Artificial Sequence: Synthetic oligonucleotide
  Sense strand starting at position 172 of SEQ ID NO: 588
cugaguucuagacgauaga

SEQ ID NO: 48967 - RNA, 19 nt, Artificial Sequence
  Description of Artificial Sequence: Synthetic oligonucleotide
  Antisense strand to SEQ ID NO: 48886
ucuaucgucuagaacucag

SEQ ID NO: 48968 - RNA, 19 nt, Artificial Sequence
  Description of Artificial Sequence: Synthetic oligonucleotide
  Sense strand starting at position 170 of SEQ ID NO: 588
ugcugaguucuagacgaua

SEQ ID NO: 48969 - RNA, 19 nt, Artificial Sequence
  Description of Artificial Sequence: Synthetic oligonucleotide
  Antisense strand to SEQ ID NO: 48888
uaucgucuagaacucagca

SEQ ID NO: 48970 - RNA, 19 nt, Artificial Sequence
  Description of Artificial Sequence: Synthetic oligonucleotide
  Sense strand starting at position 145 of SEQ ID NO: 588
ccuucuuugcaagaaagca

SEQ ID NO: 48971 - RNA, 19 nt, Artificial Sequence
  Description of Artificial Sequence: Synthetic oligonucleotide
  Antisense strand to SEQ ID NO: 48890
ugcuuucuugcaaagaagg

SEQ ID NO: 48972 - RNA, 19 nt, Artificial Sequence
  Description of Artificial Sequence: Synthetic oligonucleotide
  Sense strand starting at position 431 of SEQ ID NO: 589
cgcauuuccugguggcaca

SEQ ID NO: 48973 - RNA, 19 nt, Artificial Sequence
  Description of Artificial Sequence: Synthetic oligonucleotide
  Antisense strand to SEQ ID NO: 48892
ugugccaccaggaaaugcg

SEQ ID NO: 48974 - RNA, 19 nt, Artificial Sequence
  Description of Artificial Sequence: Synthetic oligonucleotide
  Sense strand starting at position 467 of SEQ ID NO: 589
auuaguaacuuugguaacu

SEQ ID NO: 48975 - RNA, 19 nt, Artificial Sequence
  Description of Artificial Sequence: Synthetic oligonucleotide
  Antisense strand to SEQ ID NO: 48894
aguuaccaaaguuacuaau

SEQ ID NO: 48976 - RNA, 19 nt, Artificial Sequence
  Description of Artificial Sequence: Synthetic oligonucleotide
  Sense strand starting at position 468 of SEQ ID NO: 589
uuaguaacuuugguaacuu

SEQ ID NO: 48977 - RNA, 19 nt, Artificial Sequence
  Description of Artificial Sequence: Synthetic oligonucleotide
  Antisense strand to SEQ ID NO: 48896
aaguuaccaaaguuacuaa

SEQ ID NO: 48978 - RNA, 19 nt, Artificial Sequence
  Description of Artificial Sequence: Synthetic oligonucleotide
  Sense strand starting at position 476 of SEQ ID NO: 589
uuugguaacuuucguuaga

SEQ ID NO: 48979 - RNA, 19 nt, Artificial Sequence
  Description of Artificial Sequence: Synthetic oligonucleotide
  Antisense strand to SEQ ID NO: 48898
ucuaacgaaaguuaccaaa

SEQ ID NO: 48980 - RNA, 19 nt, Artificial Sequence
  Description of Artificial Sequence: Synthetic oligonucleotide
  Sense strand starting at position 477 of SEQ ID NO: 589
uugguaacuuucguuagaa

SEQ ID NO: 48981 - RNA, 19 nt, Artificial Sequence
  Description of Artificial Sequence: Synthetic oligonucleotide
  Antisense strand to SEQ ID NO: 48900
uucuaacgaaaguuaccaa

SEQ ID NO: 48982 - RNA, 19 nt, Artificial Sequence
  Description of Artificial Sequence: Synthetic oligonucleotide
  Sense strand starting at position 478 of SEQ ID NO: 589
ugguaacuuucguuagaau

SEQ ID NO: 48983 - RNA, 19 nt, Artificial Sequence
  Description of Artificial Sequence: Synthetic oligonucleotide
  Antisense strand to SEQ ID NO: 48902
auucuaacgaaaguuacca

SEQ ID NO: 48984 - RNA, 19 nt, Artificial Sequence
  Description of Artificial Sequence: Synthetic oligonucleotide
  Sense strand starting at position 479 of SEQ ID NO: 589
gguaacuuucguuagaaua

SEQ ID NO: 48985 - RNA, 19 nt, Artificial Sequence
  Description of Artificial Sequence: Synthetic oligonucleotide
  Antisense strand to SEQ ID NO: 48904
uauucuaacgaaaguuacc

SEQ ID NO: 48986 - RNA, 19 nt, Artificial Sequence
  Description of Artificial Sequence: Synthetic oligonucleotide
  Sense strand starting at position 973 of SEQ ID NO: 589
cacuguugagcugggacua

SEQ ID NO: 48987 - RNA, 19 nt, Artificial Sequence
  Description of Artificial Sequence: Synthetic oligonucleotide
  Antisense strand to SEQ ID NO: 48906
uagucccagcucaacagug

SEQ ID NO: 48988 - RNA, 19 nt, Artificial Sequence
  Description of Artificial Sequence: Synthetic oligonucleotide
  Sense strand starting at position 1189 of SEQ ID NO: 589
gcaagugcuuuguggcuca

SEQ ID NO: 48989 - RNA, 19 nt, Artificial Sequence
  Description of Artificial Sequence: Synthetic oligonucleotide
  Antisense strand to SEQ ID NO: 48908
ugagccacaaagcacuugc

SEQ ID NO: 48990 - RNA, 19 nt, Artificial Sequence
  Description of Artificial Sequence: Synthetic oligonucleotide
  Sense strand starting at position 1240 of SEQ ID NO: 589
cggguaggcgaauaaaguu

SEQ ID NO: 48991 - RNA, 19 nt, Artificial Sequence
  Description of Artificial Sequence: Synthetic oligonucleotide
  Antisense strand to SEQ ID NO: 48910
aacuuuauucgccuacccg

SEQ ID NO: 48992 - RNA, 19 nt, Artificial Sequence
  Description of Artificial Sequence: Synthetic oligonucleotide
  Sense strand starting at position 1339 of SEQ ID NO: 589
ucgggaagcuucugcaaac

SEQ ID NO: 48993 - RNA, 19 nt, Artificial Sequence
  Description of Artificial Sequence: Synthetic oligonucleotide
  Antisense strand to SEQ ID NO: 48912
guuugcagaagcuucccga

SEQ ID NO: 48994 - RNA, 19 nt, Artificial Sequence
  Description of Artificial Sequence: Synthetic oligonucleotide
  Sense strand starting at position 1782 of SEQ ID NO: 589
acccgaaguccugguccau

SEQ ID NO: 48995 - RNA, 19 nt, Artificial Sequence
  Description of Artificial Sequence: Synthetic oligonucleotide
  Antisense strand to SEQ ID NO: 48914
auggaccaggacuucgggu

SEQ ID NO: 48996 - RNA, 19 nt, Artificial Sequence
  Description of Artificial Sequence: Synthetic oligonucleotide
  Sense strand starting at position 1919 of SEQ ID NO: 589
ucguccaugugguagauaa

SEQ ID NO: 48997 - RNA, 19 nt, Artificial Sequence
  Description of Artificial Sequence: Synthetic oligonucleotide
  Antisense strand to SEQ ID NO: 48916
uuaucuaccacauggacga

SEQ ID NO: 48998 - RNA, 19 nt, Artificial Sequence
  Description of Artificial Sequence: Synthetic oligonucleotide
  Sense strand starting at position 1921 of SEQ ID NO: 589
guccaugugguagauaauc

SEQ ID NO: 48999 - RNA, 19 nt, Artificial Sequence
  Description of Artificial Sequence: Synthetic oligonucleotide
  Antisense strand to SEQ ID NO: 48918
gauuaucuaccacauggac

SEQ ID NO: 49000 - RNA, 19 nt, Artificial Sequence
  Description of Artificial Sequence: Synthetic oligonucleotide
  Sense strand starting at position 1929 of SEQ ID NO: 589
gguagauaaucuuggucuc

SEQ ID NO: 49001 - RNA, 19 nt, Artificial Sequence
  Description of Artificial Sequence: Synthetic oligonucleotide
  Antisense strand to SEQ ID NO: 48920
gagaccaagauuaucuacc

SEQ ID NO: 49002 - RNA, 19 nt, Artificial Sequence
  Description of Artificial Sequence: Synthetic oligonucleotide
  Sense strand starting at position 2431 of SEQ ID NO: 589
gcccgcgcuccauuaugau

SEQ ID NO: 49003 - RNA, 19 nt, Artificial Sequence
  Description of Artificial Sequence: Synthetic oligonucleotide
  Antisense strand to SEQ ID NO: 48922
aucauaauggagcgcgggc

SEQ ID NO: 49004 - RNA, 19 nt, Artificial Sequence
  Description of Artificial Sequence: Synthetic oligonucleotide
  Sense strand starting at position 2440 of SEQ ID NO: 589
ccauuaugauccggcgcau

SEQ ID NO: 49005 - RNA, 19 nt, Artificial Sequence
  Description of Artificial Sequence: Synthetic oligonucleotide
  Antisense strand to SEQ ID NO: 48924
augcgccggaucauaaugg

SEQ ID NO: 49006 - RNA, 19 nt, Artificial Sequence
  Description of Artificial Sequence: Synthetic oligonucleotide
  Sense strand starting at position 3898 of SEQ ID NO: 590
guuaacgucccauaaggga

SEQ ID NO: 49007 - RNA, 19 nt, Artificial Sequence
  Description of Artificial Sequence: Synthetic oligonucleotide
  Antisense strand to SEQ ID NO: 48926
ucccuuaugggacguuaac

SEQ ID NO: 49008 - RNA, 19 nt, Artificial Sequence
  Description of Artificial Sequence: Synthetic oligonucleotide
  Sense strand starting at position 3790 of SEQ ID NO: 590
uauuguucccauggucaag

SEQ ID NO: 49009 - RNA, 19 nt, Artificial Sequence
  Description of Artificial Sequence: Synthetic oligonucleotide
  Antisense strand to SEQ ID NO: 48928
cuugaccaugggaacaaua

SEQ ID NO: 49010 - RNA, 19 nt, Artificial Sequence
  Description of Artificial Sequence: Synthetic oligonucleotide
  Sense strand starting at position 3747 of SEQ ID NO: 590
gcuccuaaggugggaaaua

SEQ ID NO: 49011 - RNA, 19 nt, Artificial Sequence
  Description of Artificial Sequence: Synthetic oligonucleotide
  Antisense strand to SEQ ID NO: 48930
uauuucccaccuuaggagc

SEQ ID NO: 49012 - RNA, 19 nt, Artificial Sequence
  Description of Artificial Sequence: Synthetic oligonucleotide
  Sense strand starting at position 3686 of SEQ ID NO: 590
gcagucugugcuuaagaca

SEQ ID NO: 49013 - RNA, 19 nt, Artificial Sequence
  Description of Artificial Sequence: Synthetic oligonucleotide
  Antisense strand to SEQ ID NO: 48932
ugucuuaagcacagacugc

SEQ ID NO: 49014 - RNA, 19 nt, Artificial Sequence
  Description of Artificial Sequence: Synthetic oligonucleotide
  Sense strand starting at position 3656 of SEQ ID NO: 590
ugaaucacugcucgugaga

SEQ ID NO: 49015 - RNA, 19 nt, Artificial Sequence
  Description of Artificial Sequence: Synthetic oligonucleotide
  Antisense strand to SEQ ID NO: 48934
ucucacgagcagugauuca

SEQ ID NO: 49016 - RNA, 19 nt, Artificial Sequence
  Description of Artificial Sequence: Synthetic oligonucleotide
  Sense strand starting at position 3565 of SEQ ID NO: 590
cucaguacuuauguagaca

SEQ ID NO: 49017 - RNA, 19 nt, Artificial Sequence
  Description of Artificial Sequence: Synthetic oligonucleotide
  Antisense strand to SEQ ID NO: 48936
ugucuacauaaguacugag

SEQ ID NO: 49018 - RNA, 19 nt, Artificial Sequence
  Description of Artificial Sequence: Synthetic oligonucleotide
  Sense strand starting at position 3470 of SEQ ID NO: 590
gaaagaguuccauggcaac

SEQ ID NO: 49019 - RNA, 19 nt, Artificial Sequence
  Description of Artificial Sequence: Synthetic oligonucleotide
  Antisense strand to SEQ ID NO: 48938
guugccauggaacucuuuc

SEQ ID NO: 49020 - RNA, 19 nt, Artificial Sequence
  Description of Artificial Sequence: Synthetic oligonucleotide
  Sense strand starting at position 3434 of SEQ ID NO: 590
guuuguauuugggcucuua

SEQ ID NO: 49021 - RNA, 19 nt, Artificial Sequence
  Description of Artificial Sequence: Synthetic oligonucleotide
  Antisense strand to SEQ ID NO: 48940
uaagagcccaaauacaaac

SEQ ID NO: 49022 - RNA, 19 nt, Artificial Sequence
  Description of Artificial Sequence: Synthetic oligonucleotide
  Sense strand starting at position 3152 of SEQ ID NO: 590
cucauuuccgugugacuaa

SEQ ID NO: 49023 - RNA, 19 nt, Artificial Sequence
  Description of Artificial Sequence: Synthetic oligonucleotide
  Antisense strand to SEQ ID NO: 48942
uuagucacacggaaaugag

SEQ ID NO: 49024 - RNA, 19 nt, Artificial Sequence
  Description of Artificial Sequence: Synthetic oligonucleotide
  Sense strand starting at position 3150 of SEQ ID NO: 590
ggcucauuuccgugugacu

SEQ ID NO: 49025 - RNA, 19 nt, Artificial Sequence
  Description of Artificial Sequence: Synthetic oligonucleotide
  Antisense strand to SEQ ID NO: 48944
agucacacggaaaugagcc

SEQ ID NO: 49026 - RNA, 19 nt, Artificial Sequence
  Description of Artificial Sequence: Synthetic oligonucleotide
  Sense strand starting at position 2968 of SEQ ID NO: 590
ccagucagaguuuguaaac

SEQ ID NO: 49027 - RNA, 19 nt, Artificial Sequence
  Description of Artificial Sequence: Synthetic oligonucleotide
  Antisense strand to SEQ ID NO: 48946
guuuacaaacucugacugg

SEQ ID NO: 49028 - RNA, 19 nt, Artificial Sequence
  Description of Artificial Sequence: Synthetic oligonucleotide
  Sense strand starting at position 2961 of SEQ ID NO: 590
guaagaaccagucagaguu

SEQ ID NO: 49029 - RNA, 19 nt, Artificial Sequence
  Description of Artificial Sequence: Synthetic oligonucleotide
  Antisense strand to SEQ ID NO: 48948
aacucugacugguucuuac

SEQ ID NO: 49030 - RNA, 19 nt, Artificial Sequence
  Description of Artificial Sequence: Synthetic oligonucleotide
  Sense strand starting at position 2947 of SEQ ID NO: 590
cuguuagaugggugguaag

SEQ ID NO: 49031 - RNA, 19 nt, Artificial Sequence
  Description of Artificial Sequence: Synthetic oligonucleotide
  Antisense strand to SEQ ID NO: 48950
cuuaccacccaucuaacag

SEQ ID NO: 49032 - RNA, 19 nt, Artificial Sequence
  Description of Artificial Sequence: Synthetic oligonucleotide
  Sense strand starting at position 2946 of SEQ ID NO: 590
ccuguuagaugggugguaa

SEQ ID NO: 49033 - RNA, 19 nt, Artificial Sequence
  Description of Artificial Sequence: Synthetic oligonucleotide
  Antisense strand to SEQ ID NO: 48952
uuaccacccaucuaacagg

SEQ ID NO: 49034 - RNA, 19 nt, Artificial Sequence
  Description of Artificial Sequence: Synthetic oligonucleotide
  Sense strand starting at position 2945 of SEQ ID NO: 590
uccuguuagauggguggua

SEQ ID NO: 49035 - RNA, 19 nt, Artificial Sequence
  Description of Artificial Sequence: Synthetic oligonucleotide
  Antisense strand to SEQ ID NO: 48954
uaccacccaucuaacagga

SEQ ID NO: 49036 - RNA, 19 nt, Artificial Sequence
  Description of Artificial Sequence: Synthetic oligonucleotide
  Sense strand starting at position 2891 of SEQ ID NO: 590
guggcaucuggucagaugu

SEQ ID NO: 49037 - RNA, 19 nt, Artificial Sequence
  Description of Artificial Sequence: Synthetic oligonucleotide
  Antisense strand to SEQ ID NO: 48956
acaucugaccagaugccac

SEQ ID NO: 49038 - RNA, 19 nt, Artificial Sequence
  Description of Artificial Sequence: Synthetic oligonucleotide
  Sense strand starting at position 2844 of SEQ ID NO: 590
uccaucguuggagguuaaa

SEQ ID NO: 49039 - RNA, 19 nt, Artificial Sequence
  Description of Artificial Sequence: Synthetic oligonucleotide
  Antisense strand to SEQ ID NO: 48958
uuuaaccuccaacgaugga

SEQ ID NO: 49040 - RNA, 19 nt, Artificial Sequence
  Description of Artificial Sequence: Synthetic oligonucleotide
  Sense strand starting at position 2837 of SEQ ID NO: 590
gcagauuuccaucguugga

SEQ ID NO: 49041 - RNA, 19 nt, Artificial Sequence
  Description of Artificial Sequence: Synthetic oligonucleotide
  Antisense strand to SEQ ID NO: 48960
uccaacgauggaaaucugc

SEQ ID NO: 49042 - RNA, 19 nt, Artificial Sequence
  Description of Artificial Sequence: Synthetic oligonucleotide
  Sense strand starting at position 2769 of SEQ ID NO: 590
uuagaauguguguauaugu

SEQ ID NO: 49043 - RNA, 19 nt, Artificial Sequence
  Description of Artificial Sequence: Synthetic oligonucleotide
  Antisense strand to SEQ ID NO: 48962
acauauacacacauucuaa

SEQ ID NO: 49044 - RNA, 19 nt, Artificial Sequence
  Description of Artificial Sequence: Synthetic oligonucleotide
  Sense strand starting at position 2768 of SEQ ID NO: 590
cuuagaauguguguauaug

SEQ ID NO: 49045 - RNA, 19 nt, Artificial Sequence
  Description of Artificial Sequence: Synthetic oligonucleotide
  Antisense strand to SEQ ID NO: 48964
cauauacacacauucuaag

SEQ ID NO: 49046 - RNA, 19 nt, Artificial Sequence
  Description of Artificial Sequence: Synthetic oligonucleotide
  Sense strand starting at position 2766 of SEQ ID NO: 590
uccuuagaauguguguaua

SEQ ID NO: 49047 - RNA, 19 nt, Artificial Sequence
  Description of Artificial Sequence: Synthetic oligonucleotide
  Antisense strand to SEQ ID NO: 48966
uauacacacauucuaagga

SEQ ID NO: 49048 - RNA, 19 nt, Artificial Sequence
  Description of Artificial Sequence: Synthetic oligonucleotide
  Sense strand starting at position 2523 of SEQ ID NO: 590
ggagguacccgacgacuuu

SEQ ID NO: 49049 - RNA, 19 nt, Artificial Sequence
  Description of Artificial Sequence: Synthetic oligonucleotide
  Antisense strand to SEQ ID NO: 48968
aaagucgucggguaccucc

SEQ ID NO: 49050 - RNA, 19 nt, Artificial Sequence
  Description of Artificial Sequence: Synthetic oligonucleotide
  Sense strand starting at position 2306 of SEQ ID NO: 590
cccucacggucccuuaaua

SEQ ID NO: 49051 - RNA, 19 nt, Artificial Sequence
  Description of Artificial Sequence: Synthetic oligonucleotide
  Antisense strand to SEQ ID NO: 48970
uauuaagggaccgugaggg

SEQ ID NO: 49052 - RNA, 19 nt, Artificial Sequence
  Description of Artificial Sequence: Synthetic oligonucleotide
  Sense strand starting at position 2035 of SEQ ID NO: 590
cggucuggucgccuagcaa

SEQ ID NO: 49053 - RNA, 19 nt, Artificial Sequence
  Description of Artificial Sequence: Synthetic oligonucleotide
  Antisense strand to SEQ ID NO: 48972
uugcuaggcgaccagaccg

SEQ ID NO: 49054 - RNA, 19 nt, Artificial Sequence
  Description of Artificial Sequence: Synthetic oligonucleotide
  Sense strand starting at position 1514 of SEQ ID NO: 590
gguggaaauucuucuugcu

SEQ ID NO: 49055 - RNA, 19 nt, Artificial Sequence
  Description of Artificial Sequence: Synthetic oligonucleotide
  Antisense strand to SEQ ID NO: 48974
agcaagaagaauuuccacc

SEQ ID NO: 49056 - RNA, 19 nt, Artificial Sequence
  Description of Artificial Sequence: Synthetic oligonucleotide
  Sense strand starting at position 1171 of SEQ ID NO: 590
agaggaaauuaacaagagu

SEQ ID NO: 49057 - RNA, 19 nt, Artificial Sequence
  Description of Artificial Sequence: Synthetic oligonucleotide
  Antisense strand to SEQ ID NO: 48976
acucuuguuaauuuccucu

SEQ ID NO: 49058 - RNA, 19 nt, Artificial Sequence
  Description of Artificial Sequence: Synthetic oligonucleotide
  Sense strand starting at position 1107 of SEQ ID NO: 590
aggauaggcguccacauau

SEQ ID NO: 49059 - RNA, 19 nt, Artificial Sequence
  Description of Artificial Sequence: Synthetic oligonucleotide
  Antisense strand to SEQ ID NO: 48978
auauguggacgccuauccu

SEQ ID NO: 49060 - RNA, 19 nt, Artificial Sequence
  Description of Artificial Sequence: Synthetic oligonucleotide
  Sense strand starting at position 1081 of SEQ ID NO: 590
uugccauaagccugauaaa

SEQ ID NO: 49061 - RNA, 19 nt, Artificial Sequence
  Description of Artificial Sequence: Synthetic oligonucleotide
  Antisense strand to SEQ ID NO: 48980
uuuaucaggcuuauggcaa

SEQ ID NO: 49062 - RNA, 19 nt, Artificial Sequence
  Description of Artificial Sequence: Synthetic oligonucleotide
  Sense strand starting at position 1058 of SEQ ID NO: 590
auauucuggaugugacuga

SEQ ID NO: 49063 - RNA, 19 nt, Artificial Sequence
  Description of Artificial Sequence: Synthetic oligonucleotide
  Antisense strand to SEQ ID NO: 48982
ucagucacauccagaauau

SEQ ID NO: 49064 - RNA, 19 nt, Artificial Sequence
  Description of Artificial Sequence: Synthetic oligonucleotide
  Sense strand starting at position 1056 of SEQ ID NO: 590
aaauauucuggaugugacu

SEQ ID NO: 49065 - RNA, 19 nt, Artificial Sequence
  Description of Artificial Sequence: Synthetic oligonucleotide
  Antisense strand to SEQ ID NO: 48984
agucacauccagaauauuu

SEQ ID NO: 49066 - RNA, 19 nt, Artificial Sequence
  Description of Artificial Sequence: Synthetic oligonucleotide
  Sense strand starting at position 865 of SEQ ID NO: 590
ggaauauucuggucaccuu

SEQ ID NO: 49067 - RNA, 19 nt, Artificial Sequence
  Description of Artificial Sequence: Synthetic oligonucleotide
  Antisense strand to SEQ ID NO: 48986
aaggugaccagaauauucc

SEQ ID NO: 49068 - RNA, 19 nt, Artificial Sequence
  Description of Artificial Sequence: Synthetic oligonucleotide
  Sense strand starting at position 820 of SEQ ID NO: 590
ugauguugcagaggaauaa

SEQ ID NO: 49069 - RNA, 19 nt, Artificial Sequence
  Description of Artificial Sequence: Synthetic oligonucleotide
  Antisense strand to SEQ ID NO: 48988
uuauuccucugcaacauca

SEQ ID NO: 49070 - RNA, 19 nt, Artificial Sequence
  Description of Artificial Sequence: Synthetic oligonucleotide
  Sense strand starting at position 708 of SEQ ID NO: 590
gauggcccugaauaaugua

SEQ ID NO: 49071 - RNA, 19 nt, Artificial Sequence
  Description of Artificial Sequence: Synthetic oligonucleotide
  Antisense strand to SEQ ID NO: 48990
uacauuauucagggccauc

SEQ ID NO: 49072 - RNA, 19 nt, Artificial Sequence
  Description of Artificial Sequence: Synthetic oligonucleotide
  Sense strand starting at position 406 of SEQ ID NO: 590
cugggucuuacaggcaaga

SEQ ID NO: 49073 - RNA, 19 nt, Artificial Sequence
  Description of Artificial Sequence: Synthetic oligonucleotide
  Antisense strand to SEQ ID NO: 48992
ucuugccuguaagacccag

SEQ ID NO: 49074 - RNA, 19 nt, Artificial Sequence
  Description of Artificial Sequence: Synthetic oligonucleotide
  Sense strand starting at position 249 of SEQ ID NO: 590
gguaauaguuucucaaguc

SEQ ID NO: 49075 - RNA, 19 nt, Artificial Sequence
  Description of Artificial Sequence: Synthetic oligonucleotide
  Antisense strand to SEQ ID NO: 48994
gacuugagaaacuauuacc

SEQ ID NO: 49076 - RNA, 19 nt, Artificial Sequence
  Description of Artificial Sequence: Synthetic oligonucleotide
  Sense strand starting at position 248 of SEQ ID NO: 590
agguaauaguuucucaagu

SEQ ID NO: 49077 - RNA, 19 nt, Artificial Sequence
  Description of Artificial Sequence: Synthetic oligonucleotide
  Antisense strand to SEQ ID NO: 48996
acuugagaaacuauuaccu

SEQ ID NO: 49078 - RNA, 19 nt, Artificial Sequence
  Description of Artificial Sequence: Synthetic oligonucleotide
  Sense strand starting at position 144 of SEQ ID NO: 590
uaaggacuaucagaaggau

SEQ ID NO: 49079 - RNA, 19 nt, Artificial Sequence
  Description of Artificial Sequence: Synthetic oligonucleotide
  Antisense strand to SEQ ID NO: 48998
auccuucugauaguccuua

SEQ ID NO: 49080 - RNA, 19 nt, Artificial Sequence
  Description of Artificial Sequence: Synthetic oligonucleotide
  Sense strand starting at position 122 of SEQ ID NO: 590
uucugaauguuguuaaaca

SEQ ID NO: 49081 - RNA, 19 nt, Artificial Sequence
  Description of Artificial Sequence: Synthetic oligonucleotide
  Antisense strand to SEQ ID NO: 49000
uguuuaacaacauucagaa

SEQ ID NO: 49082 - RNA, 19 nt, Artificial Sequence
  Description of Artificial Sequence: Synthetic oligonucleotide
  Sense strand starting at position 110 of SEQ ID NO: 590
ugaaacaaguccuucugaa

SEQ ID NO: 49083 - RNA, 19 nt, Artificial Sequence
  Description of Artificial Sequence: Synthetic oligonucleotide
  Antisense strand to SEQ ID NO: 49002
uucagaaggacuuguuuca

SEQ ID NO: 49084 - RNA, 19 nt, Artificial Sequence
  Description of Artificial Sequence: Synthetic oligonucleotide
  Sense strand starting at position 79 of SEQ ID NO: 590
cagcauuucuagguuugua

SEQ ID NO: 49085 - RNA, 19 nt, Artificial Sequence
  Description of Artificial Sequence: Synthetic oligonucleotide
  Antisense strand to SEQ ID NO: 49004
uacaaaccuagaaaugcug

SEQ ID NO: 49086 - RNA, 19 nt, Artificial Sequence
  Description of Artificial Sequence: Synthetic oligonucleotide
  Sense strand starting at position 86 of SEQ ID NO: 591
cugcccuccuaguuagaaa

SEQ ID NO: 49087 - RNA, 19 nt, Artificial Sequence
  Description of Artificial Sequence: Synthetic oligonucleotide
  Antisense strand to SEQ ID NO: 49006
uuucuaacuaggagggcag

SEQ ID NO: 49088 - RNA, 19 nt, Artificial Sequence
  Description of Artificial Sequence: Synthetic oligonucleotide
  Sense strand starting at position 98 of SEQ ID NO: 591
uuagaaaucaugugcagga

SEQ ID NO: 49089 - RNA, 19 nt, Artificial Sequence
  Description of Artificial Sequence: Synthetic oligonucleotide
  Antisense strand to SEQ ID NO: 49008
uccugcacaugauuucuaa

SEQ ID NO: 49090 - RNA, 19 nt, Artificial Sequence
  Description of Artificial Sequence: Synthetic oligonucleotide
  Sense strand starting at position 99 of SEQ ID NO: 591
uagaaaucaugugcaggaa

SEQ ID NO: 49091 - RNA, 19 nt, Artificial Sequence
  Description of Artificial Sequence: Synthetic oligonucleotide
  Antisense strand to SEQ ID NO: 49010
uuccugcacaugauuucua

SEQ ID NO: 49092 - RNA, 19 nt, Artificial Sequence
  Description of Artificial Sequence: Synthetic oligonucleotide
  Sense strand starting at position 270 of SEQ ID NO: 591
gucuuaucccuguacccga

SEQ ID NO: 49093 - RNA, 19 nt, Artificial Sequence
  Description of Artificial Sequence: Synthetic oligonucleotide
  Antisense strand to SEQ ID NO: 49012
ucggguacagggauaagac

SEQ ID NO: 49094 - RNA, 19 nt, Artificial Sequence
  Description of Artificial Sequence: Synthetic oligonucleotide
  Sense strand starting at position 341 of SEQ ID NO: 591
ccuggagccugcuuccaaa

SEQ ID NO: 49095 - RNA, 19 nt, Artificial Sequence
  Description of Artificial Sequence: Synthetic oligonucleotide
  Antisense strand to SEQ ID NO: 49014
uuuggaagcaggcuccagg

SEQ ID NO: 49096 - RNA, 19 nt, Artificial Sequence
  Description of Artificial Sequence: Synthetic oligonucleotide
  Sense strand starting at position 373 of SEQ ID NO: 591
agcugaauguggcugagaa

SEQ ID NO: 49097 - RNA, 19 nt, Artificial Sequence
  Description of Artificial Sequence: Synthetic oligonucleotide
  Antisense strand to SEQ ID NO: 49016
uucucagccacauucagcu

SEQ ID NO: 49098 - RNA, 19 nt, Artificial Sequence
  Description of Artificial Sequence: Synthetic oligonucleotide
  Sense strand starting at position 374 of SEQ ID NO: 591
gcugaauguggcugagaag

SEQ ID NO: 49099 - RNA, 19 nt, Artificial Sequence
  Description of Artificial Sequence: Synthetic oligonucleotide
  Antisense strand to SEQ ID NO: 49018
cuucucagccacauucagc

SEQ ID NO: 49100 - RNA, 19 nt, Artificial Sequence
  Description of Artificial Sequence: Synthetic oligonucleotide
  Sense strand starting at position 422 of SEQ ID NO: 591
acgcauugugaaggagaga

SEQ ID NO: 49101 - RNA, 19 nt, Artificial Sequence
  Description of Artificial Sequence: Synthetic oligonucleotide
  Antisense strand to SEQ ID NO: 49020
ucucuccuucacaaugcgu

SEQ ID NO: 49102 - RNA, 19 nt, Artificial Sequence
  Description of Artificial Sequence: Synthetic oligonucleotide
  Sense strand starting at position 423 of SEQ ID NO: 591
cgcauugugaaggagagaa

SEQ ID NO: 49103 - RNA, 19 nt, Artificial Sequence
  Description of Artificial Sequence: Synthetic oligonucleotide
  Antisense strand to SEQ ID NO: 49022
uucucuccuucacaaugcg

SEQ ID NO: 49104 - RNA, 19 nt, Artificial Sequence
  Description of Artificial Sequence: Synthetic oligonucleotide
  Sense strand starting at position 458 of SEQ ID NO: 591
ggguccaagacuuguccaa

SEQ ID NO: 49105 - RNA, 19 nt, Artificial Sequence
  Description of Artificial Sequence: Synthetic oligonucleotide
  Antisense strand to SEQ ID NO: 49024
uuggacaagucuuggaccc

SEQ ID NO: 49106 - RNA, 19 nt, Artificial Sequence
  Description of Artificial Sequence: Synthetic oligonucleotide
  Sense strand starting at position 850 of SEQ ID NO: 591
ggagucuguccauggcaga

SEQ ID NO: 49107 - RNA, 19 nt, Artificial Sequence
  Description of Artificial Sequence: Synthetic oligonucleotide
  Antisense strand to SEQ ID NO: 49026
ucugccauggacagacucc

SEQ ID NO: 49108 - RNA, 19 nt, Artificial Sequence
  Description of Artificial Sequence: Synthetic oligonucleotide
  Sense strand starting at position 851 of SEQ ID NO: 591
gagucuguccauggcagau

SEQ ID NO: 49109 - RNA, 19 nt, Artificial Sequence
  Description of Artificial Sequence: Synthetic oligonucleotide
  Antisense strand to SEQ ID NO: 49028
aucugccauggacagacuc

SEQ ID NO: 49110 - RNA, 19 nt, Artificial Sequence
  Description of Artificial Sequence: Synthetic oligonucleotide
  Sense strand starting at position 864 of SEQ ID NO: 591
gcagauuggaugugagaga

SEQ ID NO: 49111 - RNA, 19 nt, Artificial Sequence
  Description of Artificial Sequence: Synthetic oligonucleotide
  Antisense strand to SEQ ID NO: 49030
ucucucacauccaaucugc

SEQ ID NO: 49112 - RNA, 19 nt, Artificial Sequence
  Description of Artificial Sequence: Synthetic oligonucleotide
  Sense strand starting at position 897 of SEQ ID NO: 591
cccucugucuuaccaaagu

SEQ ID NO: 49113 - RNA, 19 nt, Artificial Sequence
  Description of Artificial Sequence: Synthetic oligonucleotide
  Antisense strand to SEQ ID NO: 49032
acuuugguaagacagaggg

SEQ ID NO: 49114 - RNA, 19 nt, Artificial Sequence
  Description of Artificial Sequence: Synthetic oligonucleotide
  Sense strand starting at position 935 of SEQ ID NO: 591
auacucuuugccuggacaa

SEQ ID NO: 49115 - RNA, 19 nt, Artificial Sequence
  Description of Artificial Sequence: Synthetic oligonucleotide
  Antisense strand to SEQ ID NO: 49034
uuguccaggcaaagaguau

SEQ ID NO: 49116 - RNA, 19 nt, Artificial Sequence
  Description of Artificial Sequence: Synthetic oligonucleotide
  Sense strand starting at position 937 of SEQ ID NO: 591
acucuuugccuggacaaua

SEQ ID NO: 49117 - RNA, 19 nt, Artificial Sequence
  Description of Artificial Sequence: Synthetic oligonucleotide
  Antisense strand to SEQ ID NO: 49036
uauuguccaggcaaagagu

SEQ ID NO: 49118 - RNA, 19 nt, Artificial Sequence
  Description of Artificial Sequence: Synthetic oligonucleotide
  Sense strand starting at position 969 of SEQ ID NO: 591
acugguuucuggccaaaca

SEQ ID NO: 49119 - RNA, 19 nt, Artificial Sequence
  Description of Artificial Sequence: Synthetic oligonucleotide
  Antisense strand to SEQ ID NO: 49038
uguuuggccagaaaccagu

SEQ ID NO: 49120 - RNA, 19 nt, Artificial Sequence
  Description of Artificial Sequence: Synthetic oligonucleotide
  Sense strand starting at position 970 of SEQ ID NO: 591
cugguuucuggccaaacaa

SEQ ID NO: 49121 - RNA, 19 nt, Artificial Sequence
  Description of Artificial Sequence: Synthetic oligonucleotide
  Antisense strand to SEQ ID NO: 49040
uuguuuggccagaaaccag

SEQ ID NO: 49122 - RNA, 19 nt, Artificial Sequence
  Description of Artificial Sequence: Synthetic oligonucleotide
  Sense strand starting at position 1112 of SEQ ID NO: 591
uagaauggaugagauuauu

SEQ ID NO: 49123 - RNA, 19 nt, Artificial Sequence
  Description of Artificial Sequence: Synthetic oligonucleotide
  Antisense strand to SEQ ID NO: 49042
aauaaucucauccauucua

SEQ ID NO: 49124 - RNA, 19 nt, Artificial Sequence
  Description of Artificial Sequence: Synthetic oligonucleotide
  Sense strand starting at position 1747 of SEQ ID NO: 591
gagagcagcgcuuagagau

SEQ ID NO: 49125 - RNA, 19 nt, Artificial Sequence
  Description of Artificial Sequence: Synthetic oligonucleotide
  Antisense strand to SEQ ID NO: 49044
aucucuaagcgcugcucuc

SEQ ID NO: 49126 - RNA, 19 nt, Artificial Sequence
  Description of Artificial Sequence: Synthetic oligonucleotide
  Sense strand starting at position 1990 of SEQ ID NO: 591
ucucuaguccuugagucuu

SEQ ID NO: 49127 - RNA, 19 nt, Artificial Sequence
  Description of Artificial Sequence: Synthetic oligonucleotide
  Antisense strand to SEQ ID NO: 49046
aagacucaaggacuagaga

SEQ ID NO: 49128 - RNA, 19 nt, Artificial Sequence
  Description of Artificial Sequence: Synthetic oligonucleotide
  Sense strand starting at position 2053 of SEQ ID NO: 591
aaacgucgugccgcgaaau

SEQ ID NO: 49129 - RNA, 19 nt, Artificial Sequence
  Description of Artificial Sequence: Synthetic oligonucleotide
  Antisense strand to SEQ ID NO: 49048
auuucgcggcacgacguuu

SEQ ID NO: 49130 - RNA, 19 nt, Artificial Sequence
  Description of Artificial Sequence: Synthetic oligonucleotide
  Sense strand starting at position 2329 of SEQ ID NO: 591
gagaaaugggcccggauuc

SEQ ID NO: 49131 - RNA, 19 nt, Artificial Sequence
  Description of Artificial Sequence: Synthetic oligonucleotide
  Antisense strand to SEQ ID NO: 49050
gaauccgggcccauuucuc

SEQ ID NO: 49132 - RNA, 19 nt, Artificial Sequence
  Description of Artificial Sequence: Synthetic oligonucleotide
  Sense strand starting at position 2340 of SEQ ID NO: 591
ccggauucccugggauuga

SEQ ID NO: 49133 - RNA, 19 nt, Artificial Sequence
  Description of Artificial Sequence: Synthetic oligonucleotide
  Antisense strand to SEQ ID NO: 49052
ucaaucccagggaauccgg

SEQ ID NO: 49134 - RNA, 19 nt, Artificial Sequence
  Description of Artificial Sequence: Synthetic oligonucleotide
  Sense strand starting at position 2503 of SEQ ID NO: 591
ggaaccuguucccuuuaau

SEQ ID NO: 49135 - RNA, 19 nt, Artificial Sequence
  Description of Artificial Sequence: Synthetic oligonucleotide
  Antisense strand to SEQ ID NO: 49054
auuaaagggaacagguucc

SEQ ID NO: 49136 - RNA, 19 nt, Artificial Sequence
  Description of Artificial Sequence: Synthetic oligonucleotide
  Sense strand starting at position 2541 of SEQ ID NO: 591
gaggcaaacuagucuacuu

SEQ ID NO: 49137 - RNA, 19 nt, Artificial Sequence
  Description of Artificial Sequence: Synthetic oligonucleotide
  Antisense strand to SEQ ID NO: 49056
aaguagacuaguuugccuc

SEQ ID NO: 49138 - RNA, 19 nt, Artificial Sequence
  Description of Artificial Sequence: Synthetic oligonucleotide
  Sense strand starting at position 2552 of SEQ ID NO: 591
gucuacuucuuuguaggga

SEQ ID NO: 49139 - RNA, 19 nt, Artificial Sequence
  Description of Artificial Sequence: Synthetic oligonucleotide
  Antisense strand to SEQ ID NO: 49058
ucccuacaaagaaguagac

SEQ ID NO: 49140 - RNA, 19 nt, Artificial Sequence
  Description of Artificial Sequence: Synthetic oligonucleotide
  Sense strand starting at position 2906 of SEQ ID NO: 591
cccaauacucaguaaaugu

SEQ ID NO: 49141 - RNA, 19 nt, Artificial Sequence
  Description of Artificial Sequence: Synthetic oligonucleotide
  Antisense strand to SEQ ID NO: 49060
acauuuacugaguauuggg

SEQ ID NO: 49142 - RNA, 19 nt, Artificial Sequence
  Description of Artificial Sequence: Synthetic oligonucleotide
  Sense strand starting at position 2913 of SEQ ID NO: 591
cucaguaaauguuugaaca

SEQ ID NO: 49143 - RNA, 19 nt, Artificial Sequence
  Description of Artificial Sequence: Synthetic oligonucleotide
  Antisense strand to SEQ ID NO: 49062
uguucaaacauuuacugag

SEQ ID NO: 49144 - RNA, 19 nt, Artificial Sequence
  Description of Artificial Sequence: Synthetic oligonucleotide
  Sense strand starting at position 2914 of SEQ ID NO: 591
ucaguaaauguuugaacau

SEQ ID NO: 49145 - RNA, 19 nt, Artificial Sequence
  Description of Artificial Sequence: Synthetic oligonucleotide
  Antisense strand to SEQ ID NO: 49064
auguucaaacauuuacuga

SEQ ID NO: 49146 - RNA, 19 nt, Artificial Sequence
  Description of Artificial Sequence: Synthetic oligonucleotide
  Sense strand starting at position 2923 of SEQ ID NO: 591
guuugaacaucucuagguu

SEQ ID NO: 49147 - RNA, 19 nt, Artificial Sequence
  Description of Artificial Sequence: Synthetic oligonucleotide
  Antisense strand to SEQ ID NO: 49066
aaccuagagauguucaaac

SEQ ID NO: 49148 - RNA, 19 nt, Artificial Sequence
  Description of Artificial Sequence: Synthetic oligonucleotide
  Sense strand starting at position 2924 of SEQ ID NO: 591
uuugaacaucucuagguuu

SEQ ID NO: 49149 - RNA, 19 nt, Artificial Sequence
  Description of Artificial Sequence: Synthetic oligonucleotide
  Antisense strand to SEQ ID NO: 49068
aaaccuagagauguucaaa

SEQ ID NO: 49150 - RNA, 19 nt, Artificial Sequence
  Description of Artificial Sequence: Synthetic oligonucleotide
  Sense strand starting at position 3053 of SEQ ID NO: 591
uuggguagugagugguaaa

SEQ ID NO: 49151 - RNA, 19 nt, Artificial Sequence
  Description of Artificial Sequence: Synthetic oligonucleotide
  Antisense strand to SEQ ID NO: 49070
uuuaccacucacuacccaa

SEQ ID NO: 49152 - RNA, 19 nt, Artificial Sequence
  Description of Artificial Sequence: Synthetic oligonucleotide
  Sense strand starting at position 3217 of SEQ ID NO: 591
ggcaauaacccaugaugau

SEQ ID NO: 49153 - RNA, 19 nt, Artificial Sequence
  Description of Artificial Sequence: Synthetic oligonucleotide
  Antisense strand to SEQ ID NO: 49072
aucaucauggguuauugcc

SEQ ID NO: 49154 - RNA, 19 nt, Artificial Sequence
  Description of Artificial Sequence: Synthetic oligonucleotide
  Sense strand starting at position 3302 of SEQ ID NO: 591
uugugugaccaaggcaaau

SEQ ID NO: 49155 - RNA, 19 nt, Artificial Sequence
  Description of Artificial Sequence: Synthetic oligonucleotide
  Antisense strand to SEQ ID NO: 49074
auuugccuuggucacacaa

SEQ ID NO: 49156 - RNA, 19 nt, Artificial Sequence
  Description of Artificial Sequence: Synthetic oligonucleotide
  Sense strand starting at position 3467 of SEQ ID NO: 591
guuguuauaucucugacuu

SEQ ID NO: 49157 - RNA, 19 nt, Artificial Sequence
  Description of Artificial Sequence: Synthetic oligonucleotide
  Antisense strand to SEQ ID NO: 49076
aagucagagauauaacaac

SEQ ID NO: 49158 - RNA, 19 nt, Artificial Sequence
  Description of Artificial Sequence: Synthetic oligonucleotide
  Sense strand starting at position 3468 of SEQ ID NO: 591
uuguuauaucucugacuuu

SEQ ID NO: 49159 - RNA, 19 nt, Artificial Sequence
  Description of Artificial Sequence: Synthetic oligonucleotide
  Antisense strand to SEQ ID NO: 49078
aaagucagagauauaacaa

SEQ ID NO: 49160 - RNA, 19 nt, Artificial Sequence
  Description of Artificial Sequence: Synthetic oligonucleotide
  Sense strand starting at position 3928 of SEQ ID NO: 591
uguguucuaccucaacaaa

SEQ ID NO: 49161 - RNA, 19 nt, Artificial Sequence
  Description of Artificial Sequence: Synthetic oligonucleotide
  Antisense strand to SEQ ID NO: 49080
uuuguugagguagaacaca

SEQ ID NO: 49162 - RNA, 19 nt, Artificial Sequence
  Description of Artificial Sequence: Synthetic oligonucleotide
  Sense strand starting at position 3963 of SEQ ID NO: 591
auaccuuguuuaucaguua

SEQ ID NO: 49163 - RNA, 19 nt, Artificial Sequence
  Description of Artificial Sequence: Synthetic oligonucleotide
  Antisense strand to SEQ ID NO: 49082
uaacugauaaacaagguau

SEQ ID NO: 49164 - RNA, 19 nt, Artificial Sequence
  Description of Artificial Sequence: Synthetic oligonucleotide
  Sense strand starting at position 3968 of SEQ ID NO: 591
uuguuuaucaguuagguuc

SEQ ID NO: 49165 - RNA, 19 nt, Artificial Sequence
  Description of Artificial Sequence: Synthetic oligonucleotide
  Antisense strand to SEQ ID NO: 49084
gaaccuaacugauaaacaa

SEQ ID NO: 49166 - RNA, 19 nt, Artificial Sequence
  Description of Artificial Sequence: Synthetic oligonucleotide
  Sense strand starting at position 10 of SEQ ID NO: 592
ugcaucuaauuggugguaa

SEQ ID NO: 49167 - RNA, 19 nt, Artificial Sequence
  Description of Artificial Sequence: Synthetic oligonucleotide
  Antisense strand to SEQ ID NO: 49086
uuaccaccaauuagaugca

SEQ ID NO: 49168 - RNA, 19 nt, Artificial Sequence
  Description of Artificial Sequence: Synthetic oligonucleotide
  Sense strand starting at position 12 of SEQ ID NO: 592
caucuaauuggugguaacu

SEQ ID NO: 49169 - RNA, 19 nt, Artificial Sequence
  Description of Artificial Sequence: Synthetic oligonucleotide
  Antisense strand to SEQ ID NO: 49088
aguuaccaccaauuagaug

SEQ ID NO: 49170 - RNA, 19 nt, Artificial Sequence
  Description of Artificial Sequence: Synthetic oligonucleotide
  Sense strand starting at position 29 of SEQ ID NO: 592
cuggcaugacucugaagua

SEQ ID NO: 49171 - RNA, 19 nt, Artificial Sequence
  Description of Artificial Sequence: Synthetic oligonucleotide
  Antisense strand to SEQ ID NO: 49090
uacuucagagucaugccag

SEQ ID NO: 49172 - RNA, 19 nt, Artificial Sequence
  Description of Artificial Sequence: Synthetic oligonucleotide
  Sense strand starting at position 64 of SEQ ID NO: 592
gguaauaauuguccucuga

SEQ ID NO: 49173 - RNA, 19 nt, Artificial Sequence
  Description of Artificial Sequence: Synthetic oligonucleotide
  Antisense strand to SEQ ID NO: 49092
ucagaggacaauuauuacc

SEQ ID NO: 49174 - RNA, 19 nt, Artificial Sequence
  Description of Artificial Sequence: Synthetic oligonucleotide
  Sense strand starting at position 127 of SEQ ID NO: 592
agcugaauaugcuuaagua

SEQ ID NO: 49175 - RNA, 19 nt, Artificial Sequence
  Description of Artificial Sequence: Synthetic oligonucleotide
  Antisense strand to SEQ ID NO: 49094
uacuuaagcauauucagcu

SEQ ID NO: 49176 - RNA, 19 nt, Artificial Sequence
  Description of Artificial Sequence: Synthetic oligonucleotide
  Sense strand starting at position 128 of SEQ ID NO: 592
gcugaauaugcuuaaguac

SEQ ID NO: 49177 - RNA, 19 nt, Artificial Sequence
  Description of Artificial Sequence: Synthetic oligonucleotide
  Antisense strand to SEQ ID NO: 49096
guacuuaagcauauucagc

SEQ ID NO: 49178 - RNA, 19 nt, Artificial Sequence
  Description of Artificial Sequence: Synthetic oligonucleotide
  Sense strand starting at position 188 of SEQ ID NO: 592
ucugcaucugcagaucaga

SEQ ID NO: 49179 - RNA, 19 nt, Artificial Sequence
  Description of Artificial Sequence: Synthetic oligonucleotide
  Antisense strand to SEQ ID NO: 49098
ucugaucugcagaugcaga

SEQ ID NO: 49180 - RNA, 19 nt, Artificial Sequence
  Description of Artificial Sequence: Synthetic oligonucleotide
  Sense strand starting at position 247 of SEQ ID NO: 592
gggacuuugagcugaugga

SEQ ID NO: 49181 - RNA, 19 nt, Artificial Sequence
  Description of Artificial Sequence: Synthetic oligonucleotide
  Antisense strand to SEQ ID NO: 49100
uccaucagcucaaaguccc

SEQ ID NO: 49182 - RNA, 19 nt, Artificial Sequence
  Description of Artificial Sequence: Synthetic oligonucleotide
  Sense strand starting at position 310 of SEQ ID NO: 592
cugagaaucguaggacaaa

SEQ ID NO: 49183 - RNA, 19 nt, Artificial Sequence
  Description of Artificial Sequence: Synthetic oligonucleotide
  Antisense strand to SEQ ID NO: 49102
uuuguccuacgauucucag

SEQ ID NO: 49184 - RNA, 19 nt, Artificial Sequence
  Description of Artificial Sequence: Synthetic oligonucleotide
  Sense strand starting at position 330 of SEQ ID NO: 592
uguguaaugaggugaagga

SEQ ID NO: 49185 - RNA, 19 nt, Artificial Sequence
  Description of Artificial Sequence: Synthetic oligonucleotide
  Antisense strand to SEQ ID NO: 49104
uccuucaccucauuacaca

SEQ ID NO: 49186 - RNA, 19 nt, Artificial Sequence
  Description of Artificial Sequence: Synthetic oligonucleotide
  Sense strand starting at position 370 of SEQ ID NO: 592
accgccaaucaugaguuau

SEQ ID NO: 49187 - RNA, 19 nt, Artificial Sequence
  Description of Artificial Sequence: Synthetic oligonucleotide
  Antisense strand to SEQ ID NO: 49106
auaacucaugauuggcggu

SEQ ID NO: 49188 - RNA, 19 nt, Artificial Sequence
  Description of Artificial Sequence: Synthetic oligonucleotide
  Sense strand starting at position 471 of SEQ ID NO: 592
aaagaaauguagccguaua

SEQ ID NO: 49189 - RNA, 19 nt, Artificial Sequence
  Description of Artificial Sequence: Synthetic oligonucleotide
  Antisense strand to SEQ ID NO: 49108
uauacggcuacauuucuuu

SEQ ID NO: 49190 - RNA, 19 nt, Artificial Sequence
  Description of Artificial Sequence: Synthetic oligonucleotide
  Sense strand starting at position 568 of SEQ ID NO: 592
acgaaugucgauuauggau

SEQ ID NO: 49191 - RNA, 19 nt, Artificial Sequence
  Description of Artificial Sequence: Synthetic oligonucleotide
  Antisense strand to SEQ ID NO: 49110
auccauaaucgacauucgu

SEQ ID NO: 49192 - RNA, 19 nt, Artificial Sequence
  Description of Artificial Sequence: Synthetic oligonucleotide
  Sense strand starting at position 577 of SEQ ID NO: 592
gauuauggauucuuaugua

SEQ ID NO: 49193 - RNA, 19 nt, Artificial Sequence
  Description of Artificial Sequence: Synthetic oligonucleotide
  Antisense strand to SEQ ID NO: 49112
uacauaagaauccauaauc

SEQ ID NO: 49194 - RNA, 19 nt, Artificial Sequence
  Description of Artificial Sequence: Synthetic oligonucleotide
  Sense strand starting at position 865 of SEQ ID NO: 592
gcacaaggauccucaacuu

SEQ ID NO: 49195 - RNA, 19 nt, Artificial Sequence
  Description of Artificial Sequence: Synthetic oligonucleotide
  Antisense strand to SEQ ID NO: 49114
aaguugaggauccuugugc

SEQ ID NO: 49196 - RNA, 19 nt, Artificial Sequence
  Description of Artificial Sequence: Synthetic oligonucleotide
  Sense strand starting at position 928 of SEQ ID NO: 592
agucgucuucuggaucaac

SEQ ID NO: 49197 - RNA, 19 nt, Artificial Sequence
  Description of Artificial Sequence: Synthetic oligonucleotide
  Antisense strand to SEQ ID NO: 49116
guugauccagaagacgacu

SEQ ID NO: 49198 - RNA, 19 nt, Artificial Sequence
  Description of Artificial Sequence: Synthetic oligonucleotide
  Sense strand starting at position 1220 of SEQ ID NO: 592
ugcaucuuuccugggacaa

SEQ ID NO: 49199 - RNA, 19 nt, Artificial Sequence
  Description of Artificial Sequence: Synthetic oligonucleotide
  Antisense strand to SEQ ID NO: 49118
uugucccaggaaagaugca

SEQ ID NO: 49200 - RNA, 19 nt, Artificial Sequence
  Description of Artificial Sequence: Synthetic oligonucleotide
  Sense strand starting at position 1221 of SEQ ID NO: 592
gcaucuuuccugggacaag

SEQ ID NO: 49201 - RNA, 19 nt, Artificial Sequence
  Description of Artificial Sequence: Synthetic oligonucleotide
  Antisense strand to SEQ ID NO: 49120
cuugucccaggaaagaugc

SEQ ID NO: 49202 - RNA, 19 nt, Artificial Sequence
  Description of Artificial Sequence: Synthetic oligonucleotide
  Sense strand starting at position 1481 of SEQ ID NO: 592
accucucugucugugacaa

SEQ ID NO: 49203 - RNA, 19 nt, Artificial Sequence
  Description of Artificial Sequence: Synthetic oligonucleotide
  Antisense strand to SEQ ID NO: 49122
uugucacagacagagaggu

SEQ ID NO: 49204 - RNA, 19 nt, Artificial Sequence
  Description of Artificial Sequence: Synthetic oligonucleotide
  Sense strand starting at position 2374 of SEQ ID NO: 592
ugguaugugccacauauaa

SEQ ID NO: 49205 - RNA, 19 nt, Artificial Sequence
  Description of Artificial Sequence: Synthetic oligonucleotide
  Antisense strand to SEQ ID NO: 49124
uuauauguggcacauacca

SEQ ID NO: 49206 - RNA, 19 nt, Artificial Sequence
  Description of Artificial Sequence: Synthetic oligonucleotide
  Sense strand starting at position 2395 of SEQ ID NO: 592
ccauaaucccagcaugaug

SEQ ID NO: 49207 - RNA, 19 nt, Artificial Sequence
  Description of Artificial Sequence: Synthetic oligonucleotide
  Antisense strand to SEQ ID NO: 49126
caucaugcugggauuaugg

SEQ ID NO: 49208 - RNA, 19 nt, Artificial Sequence
  Description of Artificial Sequence: Synthetic oligonucleotide
  Sense strand starting at position 2403 of SEQ ID NO: 592
ccagcaugaugauuggaaa

SEQ ID NO: 49209 - RNA, 19 nt, Artificial Sequence
  Description of Artificial Sequence: Synthetic oligonucleotide
  Antisense strand to SEQ ID NO: 49128
uuuccaaucaucaugcugg

SEQ ID NO: 49210 - RNA, 19 nt, Artificial Sequence
  Description of Artificial Sequence: Synthetic oligonucleotide
  Sense strand starting at position 2471 of SEQ ID NO: 592
gaaauaaauggcgacuugu

SEQ ID NO: 49211 - RNA, 19 nt, Artificial Sequence
  Description of Artificial Sequence: Synthetic oligonucleotide
  Antisense strand to SEQ ID NO: 49130
acaagucgccauuuauuuc

SEQ ID NO: 49212 - RNA, 19 nt, Artificial Sequence
  Description of Artificial Sequence: Synthetic oligonucleotide
  Sense strand starting at position 2624 of SEQ ID NO: 592
ugccuuugucaucaccaga

SEQ ID NO: 49213 - RNA, 19 nt, Artificial Sequence
  Description of Artificial Sequence: Synthetic oligonucleotide
  Antisense strand to SEQ ID NO: 49132
ucuggugaugacaaaggca

SEQ ID NO: 49214 - RNA, 19 nt, Artificial Sequence
  Description of Artificial Sequence: Synthetic oligonucleotide
  Sense strand starting at position 2687 of SEQ ID NO: 592
ucauuauaucaccguuuga

SEQ ID NO: 49215 - RNA, 19 nt, Artificial Sequence
  Description of Artificial Sequence: Synthetic oligonucleotide
  Antisense strand to SEQ ID NO: 49134
ucaaacggugauauaauga

SEQ ID NO: 49216 - RNA, 19 nt, Artificial Sequence
  Description of Artificial Sequence: Synthetic oligonucleotide
  Sense strand starting at position 2727 of SEQ ID NO: 592
uguaaacuuuaucccaagu

SEQ ID NO: 49217 - RNA, 19 nt, Artificial Sequence
  Description of Artificial Sequence: Synthetic oligonucleotide
  Antisense strand to SEQ ID NO: 49136
acuugggauaaaguuuaca

SEQ ID NO: 49218 - RNA, 19 nt, Artificial Sequence
  Description of Artificial Sequence: Synthetic oligonucleotide
  Sense strand starting at position 3147 of SEQ ID NO: 592
gagggacauuugggaaaua

SEQ ID NO: 49219 - RNA, 19 nt, Artificial Sequence
  Description of Artificial Sequence: Synthetic oligonucleotide
  Antisense strand to SEQ ID NO: 49138
uauuucccaaaugucccuc

SEQ ID NO: 49220 - RNA, 19 nt, Artificial Sequence
  Description of Artificial Sequence: Synthetic oligonucleotide
  Sense strand starting at position 3235 of SEQ ID NO: 592
gcagauucucuagggcaca

SEQ ID NO: 49221 - RNA, 19 nt, Artificial Sequence
  Description of Artificial Sequence: Synthetic oligonucleotide
  Antisense strand to SEQ ID NO: 49140
ugugcccuagagaaucugc

SEQ ID NO: 49222 - RNA, 19 nt, Artificial Sequence
  Description of Artificial Sequence: Synthetic oligonucleotide
  Sense strand starting at position 3305 of SEQ ID NO: 592
acuagaagugcauaagagu

SEQ ID NO: 49223 - RNA, 19 nt, Artificial Sequence
  Description of Artificial Sequence: Synthetic oligonucleotide
  Antisense strand to SEQ ID NO: 49142
acucuuaugcacuucuagu

SEQ ID NO: 49224 - RNA, 19 nt, Artificial Sequence
  Description of Artificial Sequence: Synthetic oligonucleotide
  Sense strand starting at position 3314 of SEQ ID NO: 592
gcauaagaguucuuauucc

SEQ ID NO: 49225 - RNA, 19 nt, Artificial Sequence
  Description of Artificial Sequence: Synthetic oligonucleotide
  Antisense strand to SEQ ID NO: 49144
ggaauaagaacucuuaugc

SEQ ID NO: 49226 - RNA, 19 nt, Artificial Sequence
  Description of Artificial Sequence: Synthetic oligonucleotide
  Sense strand starting at position 3358 of SEQ ID NO: 592
uuguccaacuucguaauuu

SEQ ID NO: 49227 - RNA, 19 nt, Artificial Sequence
  Description of Artificial Sequence: Synthetic oligonucleotide
  Antisense strand to SEQ ID NO: 49146
aaauuacgaaguuggacaa

SEQ ID NO: 49228 - RNA, 19 nt, Artificial Sequence
  Description of Artificial Sequence: Synthetic oligonucleotide
  Sense strand starting at position 3378 of SEQ ID NO: 592
uugcuaacccaaugguuga

SEQ ID NO: 49229 - RNA, 19 nt, Artificial Sequence
  Description of Artificial Sequence: Synthetic oligonucleotide
  Antisense strand to SEQ ID NO: 49148
ucaaccauuggguuagcaa

SEQ ID NO: 49230 - RNA, 19 nt, Artificial Sequence
  Description of Artificial Sequence: Synthetic oligonucleotide
  Sense strand starting at position 3440 of SEQ ID NO: 592
gaugaugaguaucuguuua

SEQ ID NO: 49231 - RNA, 19 nt, Artificial Sequence
  Description of Artificial Sequence: Synthetic oligonucleotide
  Antisense strand to SEQ ID NO: 49150
uaaacagauacucaucauc

SEQ ID NO: 49232 - RNA, 19 nt, Artificial Sequence
  Description of Artificial Sequence: Synthetic oligonucleotide
  Sense strand starting at position 3442 of SEQ ID NO: 592
ugaugaguaucuguuuaug

SEQ ID NO: 49233 - RNA, 19 nt, Artificial Sequence
  Description of Artificial Sequence: Synthetic oligonucleotide
  Antisense strand to SEQ ID NO: 49152
cauaaacagauacucauca

SEQ ID NO: 49234 - RNA, 19 nt, Artificial Sequence
  Description of Artificial Sequence: Synthetic oligonucleotide
  Sense strand starting at position 3466 of SEQ ID NO: 592
uuccuauuuagucguaugu

SEQ ID NO: 49235 - RNA, 19 nt, Artificial Sequence
  Description of Artificial Sequence: Synthetic oligonucleotide
  Antisense strand to SEQ ID NO: 49154
acauacgacuaaauaggaa

SEQ ID NO: 49236 - RNA, 19 nt, Artificial Sequence
  Description of Artificial Sequence: Synthetic oligonucleotide
  Sense strand starting at position 3520 of SEQ ID NO: 592
caguuuguugugcaggaua

SEQ ID NO: 49237 - RNA, 19 nt, Artificial Sequence
  Description of Artificial Sequence: Synthetic oligonucleotide
  Antisense strand to SEQ ID NO: 49156
uauccugcacaacaaacug

SEQ ID NO: 49238 - RNA, 19 nt, Artificial Sequence
  Description of Artificial Sequence: Synthetic oligonucleotide
  Sense strand starting at position 3721 of SEQ ID NO: 592
acauaauauucuguuggaa

SEQ ID NO: 49239 - RNA, 19 nt, Artificial Sequence
  Description of Artificial Sequence: Synthetic oligonucleotide
  Antisense strand to SEQ ID NO: 49158
uuccaacagaauauuaugu

SEQ ID NO: 49240 - RNA, 19 nt, Artificial Sequence
  Description of Artificial Sequence: Synthetic oligonucleotide
  Sense strand starting at position 3733 of SEQ ID NO: 592
guuggaauaagcuguauua

SEQ ID NO: 49241 - RNA, 19 nt, Artificial Sequence
  Description of Artificial Sequence: Synthetic oligonucleotide
  Antisense strand to SEQ ID NO: 49160
uaauacagcuuauuccaac

SEQ ID NO: 49242 - RNA, 19 nt, Artificial Sequence
  Description of Artificial Sequence: Synthetic oligonucleotide
  Sense strand starting at position 3774 of SEQ ID NO: 592
ugauguuuauuuccagcau

SEQ ID NO: 49243 - RNA, 19 nt, Artificial Sequence
  Description of Artificial Sequence: Synthetic oligonucleotide
  Antisense strand to SEQ ID NO: 49162
augcuggaaauaaacauca

SEQ ID NO: 49244 - RNA, 19 nt, Artificial Sequence
  Description of Artificial Sequence: Synthetic oligonucleotide
  Sense strand starting at position 3826 of SEQ ID NO: 592
ucuauagauuaugcagaga

SEQ ID NO: 49245 - RNA, 19 nt, Artificial Sequence
  Description of Artificial Sequence: Synthetic oligonucleotide
  Antisense strand to SEQ ID NO: 49164
ucucugcauaaucuauaga

SEQ ID NO: 49246 - RNA, 19 nt, Artificial Sequence
  Description of Artificial Sequence: Synthetic oligonucleotide
  Sense strand starting at position 79 of SEQ ID NO: 593
aguaauugucuacaaguuc

SEQ ID NO: 49247 - RNA, 19 nt, Artificial Sequence
  Description of Artificial Sequence: Synthetic oligonucleotide
  Antisense strand to SEQ ID NO: 49166
gaacuuguagacaauuacu

SEQ ID NO: 49248 - RNA, 19 nt, Artificial Sequence
  Description of Artificial Sequence: Synthetic oligonucleotide
  Sense strand starting at position 92 of SEQ ID NO: 593
aaguucuagcacugacagu

SEQ ID NO: 49249 - RNA, 19 nt, Artificial Sequence
  Description of Artificial Sequence: Synthetic oligonucleotide
  Antisense strand to SEQ ID NO: 49168
acugucagugcuagaacuu

SEQ ID NO: 49250 - RNA, 19 nt, Artificial Sequence
  Description of Artificial Sequence: Synthetic oligonucleotide
  Sense strand starting at position 265 of SEQ ID NO: 593
ugcaucuaauuggugguaa

SEQ ID NO: 49251 - RNA, 19 nt, Artificial Sequence
  Description of Artificial Sequence: Synthetic oligonucleotide
  Antisense strand to SEQ ID NO: 49170
uuaccaccaauuagaugca

SEQ ID NO: 49252 - RNA, 19 nt, Artificial Sequence
  Description of Artificial Sequence: Synthetic oligonucleotide
  Sense strand starting at position 267 of SEQ ID NO: 593
caucuaauuggugguaacu

SEQ ID NO: 49253 - RNA, 19 nt, Artificial Sequence
  Description of Artificial Sequence: Synthetic oligonucleotide
  Antisense strand to SEQ ID NO: 49172
aguuaccaccaauuagaug

SEQ ID NO: 49254 - RNA, 19 nt, Artificial Sequence
  Description of Artificial Sequence: Synthetic oligonucleotide
  Sense strand starting at position 284 of SEQ ID NO: 593
cuggcaugacucugaagua

SEQ ID NO: 49255 - RNA, 19 nt, Artificial Sequence
  Description of Artificial Sequence: Synthetic oligonucleotide
  Antisense strand to SEQ ID NO: 49174
uacuucagagucaugccag

SEQ ID NO: 49256 - RNA, 19 nt, Artificial Sequence
  Description of Artificial Sequence: Synthetic oligonucleotide
  Sense strand starting at position 319 of SEQ ID NO: 593
gguaauaauuguccucuga

SEQ ID NO: 49257 - RNA, 19 nt, Artificial Sequence
  Description of Artificial Sequence: Synthetic oligonucleotide
  Antisense strand to SEQ ID NO: 49176
ucagaggacaauuauuacc

SEQ ID NO: 49258 - RNA, 19 nt, Artificial Sequence
  Description of Artificial Sequence: Synthetic oligonucleotide
  Sense strand starting at position 382 of SEQ ID NO: 593
agcugaauaugcuuaagua

SEQ ID NO: 49259 - RNA, 19 nt, Artificial Sequence
  Description of Artificial Sequence: Synthetic oligonucleotide
  Antisense strand to SEQ ID NO: 49178
uacuuaagcauauucagcu

SEQ ID NO: 49260 - RNA, 19 nt, Artificial Sequence
  Description of Artificial Sequence: Synthetic oligonucleotide
  Sense strand starting at position 383 of SEQ ID NO: 593
gcugaauaugcuuaaguac

SEQ ID NO: 49261 - RNA, 19 nt, Artificial Sequence
  Description of Artificial Sequence: Synthetic oligonucleotide
  Antisense strand to SEQ ID NO: 49180
guacuuaagcauauucagc

SEQ ID NO: 49262 - RNA, 19 nt, Artificial Sequence
  Description of Artificial Sequence: Synthetic oligonucleotide
  Sense strand starting at position 443 of SEQ ID NO: 593
ucugcaucugcagaucaga

SEQ ID NO: 49263 - RNA, 19 nt, Artificial Sequence
  Description of Artificial Sequence: Synthetic oligonucleotide
  Antisense strand to SEQ ID NO: 49182
ucugaucugcagaugcaga

SEQ ID NO: 49264 - RNA, 19 nt, Artificial Sequence
  Description of Artificial Sequence: Synthetic oligonucleotide
  Sense strand starting at position 502 of SEQ ID NO: 593
gggacuuugagcugaugga

SEQ ID NO: 49265 - RNA, 19 nt, Artificial Sequence
  Description of Artificial Sequence: Synthetic oligonucleotide
  Antisense strand to SEQ ID NO: 49184
uccaucagcucaaaguccc

SEQ ID NO: 49266 - RNA, 19 nt, Artificial Sequence
  Description of Artificial Sequence: Synthetic oligonucleotide
  Sense strand starting at position 565 of SEQ ID NO: 593
cugagaaucguaggacaaa

SEQ ID NO: 49267 - RNA, 19 nt, Artificial Sequence
  Description of Artificial Sequence: Synthetic oligonucleotide
  Antisense strand to SEQ ID NO: 49186
uuuguccuacgauucucag

SEQ ID NO: 49268 - RNA, 19 nt, Artificial Sequence
  Description of Artificial Sequence: Synthetic oligonucleotide
  Sense strand starting at position 585 of SEQ ID NO: 593
uguguaaugaggugaagga

SEQ ID NO: 49269 - RNA, 19 nt, Artificial Sequence
  Description of Artificial Sequence: Synthetic oligonucleotide
  Antisense strand to SEQ ID NO: 49188
uccuucaccucauuacaca

SEQ ID NO: 49270 - RNA, 19 nt, Artificial Sequence
  Description of Artificial Sequence: Synthetic oligonucleotide
  Sense strand starting at position 625 of SEQ ID NO: 593
accgccaaucaugaguuau

SEQ ID NO: 49271 - RNA, 19 nt, Artificial Sequence
  Description of Artificial Sequence: Synthetic oligonucleotide
  Antisense strand to SEQ ID NO: 49190
auaacucaugauuggcggu

SEQ ID NO: 49272 - RNA, 19 nt, Artificial Sequence
  Description of Artificial Sequence: Synthetic oligonucleotide
  Sense strand starting at position 726 of SEQ ID NO: 593
aaagaaauguagccguaua

SEQ ID NO: 49273 - RNA, 19 nt, Artificial Sequence
  Description of Artificial Sequence: Synthetic oligonucleotide
  Antisense strand to SEQ ID NO: 49192
uauacggcuacauuucuuu

SEQ ID NO: 49274 - RNA, 19 nt, Artificial Sequence
  Description of Artificial Sequence: Synthetic oligonucleotide
  Sense strand starting at position 823 of SEQ ID NO: 593
acgaaugucgauuauggau

SEQ ID NO: 49275 - RNA, 19 nt, Artificial Sequence
  Description of Artificial Sequence: Synthetic oligonucleotide
  Antisense strand to SEQ ID NO: 49194
auccauaaucgacauucgu

SEQ ID NO: 49276 - RNA, 19 nt, Artificial Sequence
  Description of Artificial Sequence: Synthetic oligonucleotide
  Sense strand starting at position 832 of SEQ ID NO: 593
gauuauggauucuuaugua

SEQ ID NO: 49277 - RNA, 19 nt, Artificial Sequence
  Description of Artificial Sequence: Synthetic oligonucleotide
  Antisense strand to SEQ ID NO: 49196
uacauaagaauccauaauc

SEQ ID NO: 49278 - RNA, 19 nt, Artificial Sequence
  Description of Artificial Sequence: Synthetic oligonucleotide
  Sense strand starting at position 1120 of SEQ ID NO: 593
gcacaaggauccucaacuu

SEQ ID NO: 49279 - RNA, 19 nt, Artificial Sequence
  Description of Artificial Sequence: Synthetic oligonucleotide
  Antisense strand to SEQ ID NO: 49198
aaguugaggauccuugugc

SEQ ID NO: 49280 - RNA, 19 nt, Artificial Sequence
  Description of Artificial Sequence: Synthetic oligonucleotide
  Sense strand starting at position 1183 of SEQ ID NO: 593
agucgucuucuggaucaac

SEQ ID NO: 49281 - RNA, 19 nt, Artificial Sequence
  Description of Artificial Sequence: Synthetic oligonucleotide
  Antisense strand to SEQ ID NO: 49200
guugauccagaagacgacu

SEQ ID NO: 49282 - RNA, 19 nt, Artificial Sequence
  Description of Artificial Sequence: Synthetic oligonucleotide
  Sense strand starting at position 1370 of SEQ ID NO: 593
gaacucugaguuugucuuu

SEQ ID NO: 49283 - RNA, 19 nt, Artificial Sequence
  Description of Artificial Sequence: Synthetic oligonucleotide
  Antisense strand to SEQ ID NO: 49202
aaagacaaacucagaguuc

SEQ ID NO: 49284 - RNA, 19 nt, Artificial Sequence
  Description of Artificial Sequence: Synthetic oligonucleotide
  Sense strand starting at position 1475 of SEQ ID NO: 593
ugcaucuuuccugggacaa

SEQ ID NO: 49285 - RNA, 19 nt, Artificial Sequence
  Description of Artificial Sequence: Synthetic oligonucleotide
  Antisense strand to SEQ ID NO: 49204
uugucccaggaaagaugca

SEQ ID NO: 49286 - RNA, 19 nt, Artificial Sequence
  Description of Artificial Sequence: Synthetic oligonucleotide
  Sense strand starting at position 1476 of SEQ ID NO: 593
gcaucuuuccugggacaag

SEQ ID NO: 49287 - RNA, 19 nt, Artificial Sequence
  Description of Artificial Sequence: Synthetic oligonucleotide
  Antisense strand to SEQ ID NO: 49206
cuugucccaggaaagaugc

SEQ ID NO: 49288 - RNA, 19 nt, Artificial Sequence
  Description of Artificial Sequence: Synthetic oligonucleotide
  Sense strand starting at position 1736 of SEQ ID NO: 593
accucucugucugugacaa

SEQ ID NO: 49289 - RNA, 19 nt, Artificial Sequence
  Description of Artificial Sequence: Synthetic oligonucleotide
  Antisense strand to SEQ ID NO: 49208
uugucacagacagagaggu

SEQ ID NO: 49290 - RNA, 19 nt, Artificial Sequence
  Description of Artificial Sequence: Synthetic oligonucleotide
  Sense strand starting at position 2629 of SEQ ID NO: 593
ugguaugugccacauauaa

SEQ ID NO: 49291 - RNA, 19 nt, Artificial Sequence
  Description of Artificial Sequence: Synthetic oligonucleotide
  Antisense strand to SEQ ID NO: 49210
uuauauguggcacauacca

SEQ ID NO: 49292 - RNA, 19 nt, Artificial Sequence
  Description of Artificial Sequence: Synthetic oligonucleotide
  Sense strand starting at position 2650 of SEQ ID NO: 593
ccauaaucccagcaugaug

SEQ ID NO: 49293 - RNA, 19 nt, Artificial Sequence
  Description of Artificial Sequence: Synthetic oligonucleotide
  Antisense strand to SEQ ID NO: 49212
caucaugcugggauuaugg

SEQ ID NO: 49294 - RNA, 19 nt, Artificial Sequence
  Description of Artificial Sequence: Synthetic oligonucleotide
  Sense strand starting at position 2658 of SEQ ID NO: 593
ccagcaugaugauuggaaa

SEQ ID NO: 49295 - RNA, 19 nt, Artificial Sequence
  Description of Artificial Sequence: Synthetic oligonucleotide
  Antisense strand to SEQ ID NO: 49214
uuuccaaucaucaugcugg

SEQ ID NO: 49296 - RNA, 19 nt, Artificial Sequence
  Description of Artificial Sequence: Synthetic oligonucleotide
  Sense strand starting at position 2726 of SEQ ID NO: 593
gaaauaaauggcgacuugu

SEQ ID NO: 49297 - RNA, 19 nt, Artificial Sequence
  Description of Artificial Sequence: Synthetic oligonucleotide
  Antisense strand to SEQ ID NO: 49216
acaagucgccauuuauuuc

SEQ ID NO: 49298 - RNA, 19 nt, Artificial Sequence
  Description of Artificial Sequence: Synthetic oligonucleotide
  Sense strand starting at position 2879 of SEQ ID NO: 593
ugccuuugucaucaccaga

SEQ ID NO: 49299 - RNA, 19 nt, Artificial Sequence
  Description of Artificial Sequence: Synthetic oligonucleotide
  Antisense strand to SEQ ID NO: 49218
ucuggugaugacaaaggca

SEQ ID NO: 49300 - RNA, 19 nt, Artificial Sequence
  Description of Artificial Sequence: Synthetic oligonucleotide
  Sense strand starting at position 2942 of SEQ ID NO: 593
ucauuauaucaccguuuga

SEQ ID NO: 49301 - RNA, 19 nt, Artificial Sequence
  Description of Artificial Sequence: Synthetic oligonucleotide
  Antisense strand to SEQ ID NO: 49220
ucaaacggugauauaauga

SEQ ID NO: 49302 - RNA, 19 nt, Artificial Sequence
  Description of Artificial Sequence: Synthetic oligonucleotide
  Sense strand starting at position 2982 of SEQ ID NO: 593
uguaaacuuuaucccaagu

SEQ ID NO: 49303 - RNA, 19 nt, Artificial Sequence
  Description of Artificial Sequence: Synthetic oligonucleotide
  Antisense strand to SEQ ID NO: 49222
acuugggauaaaguuuaca

SEQ ID NO: 49304 - RNA, 19 nt, Artificial Sequence
  Description of Artificial Sequence: Synthetic oligonucleotide
  Sense strand starting at position 3402 of SEQ ID NO: 593
gagggacauuugggaaaua

SEQ ID NO: 49305 - RNA, 19 nt, Artificial Sequence
  Description of Artificial Sequence: Synthetic oligonucleotide
  Antisense strand to SEQ ID NO: 49224
uauuucccaaaugucccuc

SEQ ID NO: 49306 - RNA, 19 nt, Artificial Sequence
  Description of Artificial Sequence: Synthetic oligonucleotide
  Sense strand starting at position 3490 of SEQ ID NO: 593
gcagauucucuagggcaca

SEQ ID NO: 49307 - RNA, 19 nt, Artificial Sequence
  Description of Artificial Sequence: Synthetic oligonucleotide
  Antisense strand to SEQ ID NO: 49226
ugugcccuagagaaucugc

SEQ ID NO: 49308 - RNA, 19 nt, Artificial Sequence
  Description of Artificial Sequence: Synthetic oligonucleotide
  Sense strand starting at position 3560 of SEQ ID NO: 593
acuagaagugcauaagagu

SEQ ID NO: 49309 - RNA, 19 nt, Artificial Sequence
  Description of Artificial Sequence: Synthetic oligonucleotide
  Antisense strand to SEQ ID NO: 49228
acucuuaugcacuucuagu

SEQ ID NO: 49310 - RNA, 19 nt, Artificial Sequence
  Description of Artificial Sequence: Synthetic oligonucleotide
  Sense strand starting at position 3569 of SEQ ID NO: 593
gcauaagaguucuuauucc

SEQ ID NO: 49311 - RNA, 19 nt, Artificial Sequence
  Description of Artificial Sequence: Synthetic oligonucleotide
  Antisense strand to SEQ ID NO: 49230
ggaauaagaacucuuaugc

SEQ ID NO: 49312 - RNA, 19 nt, Artificial Sequence
  Description of Artificial Sequence: Synthetic oligonucleotide
  Sense strand starting at position 3613 of SEQ ID NO: 593
uuguccaacuucguaauuu

SEQ ID NO: 49313 - RNA, 19 nt, Artificial Sequence
  Description of Artificial Sequence: Synthetic oligonucleotide
  Antisense strand to SEQ ID NO: 49232
aaauuacgaaguuggacaa

SEQ ID NO: 49314 - RNA, 19 nt, Artificial Sequence
  Description of Artificial Sequence: Synthetic oligonucleotide
  Sense strand starting at position 3633 of SEQ ID NO: 593
uugcuaacccaaugguuga

SEQ ID NO: 49315 - RNA, 19 nt, Artificial Sequence
  Description of Artificial Sequence: Synthetic oligonucleotide
  Antisense strand to SEQ ID NO: 49234
ucaaccauuggguuagcaa

SEQ ID NO: 49316 - RNA, 19 nt, Artificial Sequence
  Description of Artificial Sequence: Synthetic oligonucleotide
  Sense strand starting at position 3695 of SEQ ID NO: 593
gaugaugaguaucuguuua

SEQ ID NO: 49317 - RNA, 19 nt, Artificial Sequence
  Description of Artificial Sequence: Synthetic oligonucleotide
  Antisense strand to SEQ ID NO: 49236
uaaacagauacucaucauc

SEQ ID NO: 49318 - RNA, 19 nt, Artificial Sequence
  Description of Artificial Sequence: Synthetic oligonucleotide
  Sense strand starting at position 3697 of SEQ ID NO: 593
ugaugaguaucuguuuaug

SEQ ID NO: 49319 - RNA, 19 nt, Artificial Sequence
  Description of Artificial Sequence: Synthetic oligonucleotide
  Antisense strand to SEQ ID NO: 49238
cauaaacagauacucauca

SEQ ID NO: 49320 - RNA, 19 nt, Artificial Sequence
  Description of Artificial Sequence: Synthetic oligonucleotide
  Sense strand starting at position 3721 of SEQ ID NO: 593
uuccuauuuagucguaugu

SEQ ID NO: 49321 - RNA, 19 nt, Artificial Sequence
  Description of Artificial Sequence: Synthetic oligonucleotide
  Antisense strand to SEQ ID NO: 49240
acauacgacuaaauaggaa

SEQ ID NO: 49322 - RNA, 19 nt, Artificial Sequence
  Description of Artificial Sequence: Synthetic oligonucleotide
  Sense strand starting at position 3775 of SEQ ID NO: 593
caguuuguugugcaggaua

SEQ ID NO: 49323 - RNA, 19 nt, Artificial Sequence
  Description of Artificial Sequence: Synthetic oligonucleotide
  Antisense strand to SEQ ID NO: 49242
uauccugcacaacaaacug

SEQ ID NO: 49324 - RNA, 19 nt, Artificial Sequence
  Description of Artificial Sequence: Synthetic oligonucleotide
  Sense strand starting at position 3976 of SEQ ID NO: 593
acauaauauucuguuggaa

SEQ ID NO: 49325 - RNA, 19 nt, Artificial Sequence
  Description of Artificial Sequence: Synthetic oligonucleotide
  Antisense strand to SEQ ID NO: 49244
uuccaacagaauauuaugu

SEQ ID NO: 49326 - RNA, 19 nt, Artificial Sequence
  Description of Artificial Sequence: Synthetic oligonucleotide
  Sense strand starting at position 65 of SEQ ID NO: 597
acuagucauuaauuaguca

SEQ ID NO: 49327 - RNA, 19 nt, Artificial Sequence
  Description of Artificial Sequence: Synthetic oligonucleotide
  Antisense strand to SEQ ID NO: 49246
ugacuaauuaaugacuagu

SEQ ID NO: 49328 - RNA, 19 nt, Artificial Sequence
  Description of Artificial Sequence: Synthetic oligonucleotide
  Sense strand starting at position 175 of SEQ ID NO: 597
acaaccuaucuuuguggaa

SEQ ID NO: 49329 - RNA, 19 nt, Artificial Sequence
  Description of Artificial Sequence: Synthetic oligonucleotide
  Antisense strand to SEQ ID NO: 49248
uuccacaaagauagguugu

SEQ ID NO: 49330 - RNA, 19 nt, Artificial Sequence
  Description of Artificial Sequence: Synthetic oligonucleotide
  Sense strand starting at position 198 of SEQ ID NO: 597
ugaauaccugugugccuua

SEQ ID NO: 49331 - RNA, 19 nt, Artificial Sequence
  Description of Artificial Sequence: Synthetic oligonucleotide
  Antisense strand to SEQ ID NO: 49250
uaaggcacacagguauuca

SEQ ID NO: 49332 - RNA, 19 nt, Artificial Sequence
  Description of Artificial Sequence: Synthetic oligonucleotide
  Sense strand starting at position 210 of SEQ ID NO: 597
ugccuuacccaggagggau

SEQ ID NO: 49333 - RNA, 19 nt, Artificial Sequence
  Description of Artificial Sequence: Synthetic oligonucleotide
  Antisense strand to SEQ ID NO: 49252
aucccuccuggguaaggca

SEQ ID NO: 49334 - RNA, 19 nt, Artificial Sequence
  Description of Artificial Sequence: Synthetic oligonucleotide
  Sense strand starting at position 350 of SEQ ID NO: 597
uguaguggauguuccaaga

SEQ ID NO: 49335 - RNA, 19 nt, Artificial Sequence
  Description of Artificial Sequence: Synthetic oligonucleotide
  Antisense strand to SEQ ID NO: 49254
ucuuggaacauccacuaca

SEQ ID NO: 49336 - RNA, 19 nt, Artificial Sequence
  Description of Artificial Sequence: Synthetic oligonucleotide
  Sense strand starting at position 569 of SEQ ID NO: 597
cuucuuaaguguuuacuga

SEQ ID NO: 49337 - RNA, 19 nt, Artificial Sequence
  Description of Artificial Sequence: Synthetic oligonucleotide
  Antisense strand to SEQ ID NO: 49256
ucaguaaacacuuaagaag

SEQ ID NO: 49338 - RNA, 19 nt, Artificial Sequence
  Description of Artificial Sequence: Synthetic oligonucleotide
  Sense strand starting at position 576 of SEQ ID NO: 597
aguguuuacugagcaucaa

SEQ ID NO: 49339 - RNA, 19 nt, Artificial Sequence
  Description of Artificial Sequence: Synthetic oligonucleotide
  Antisense strand to SEQ ID NO: 49258
uugaugcucaguaaacacu

SEQ ID NO: 49340 - RNA, 19 nt, Artificial Sequence
  Description of Artificial Sequence: Synthetic oligonucleotide
  Sense strand starting at position 577 of SEQ ID NO: 597
guguuuacugagcaucaac

SEQ ID NO: 49341 - RNA, 19 nt, Artificial Sequence
  Description of Artificial Sequence: Synthetic oligonucleotide
  Antisense strand to SEQ ID NO: 49260
guugaugcucaguaaacac

SEQ ID NO: 49342 - RNA, 19 nt, Artificial Sequence
  Description of Artificial Sequence: Synthetic oligonucleotide
  Sense strand starting at position 586 of SEQ ID NO: 597
gagcaucaacucuguguga

SEQ ID NO: 49343 - RNA, 19 nt, Artificial Sequence
  Description of Artificial Sequence: Synthetic oligonucleotide
  Antisense strand to SEQ ID NO: 49262
ucacacagaguugaugcuc

SEQ ID NO: 49344 - RNA, 19 nt, Artificial Sequence
  Description of Artificial Sequence: Synthetic oligonucleotide
  Sense strand starting at position 664 of SEQ ID NO: 597
ggaucagaguggcccaauu

SEQ ID NO: 49345 - RNA, 19 nt, Artificial Sequence
  Description of Artificial Sequence: Synthetic oligonucleotide
  Antisense strand to SEQ ID NO: 49264
aauugggccacucugaucc

SEQ ID NO: 49346 - RNA, 19 nt, Artificial Sequence
  Description of Artificial Sequence: Synthetic oligonucleotide
  Sense strand starting at position 949 of SEQ ID NO: 597
aggaaaugagauugcaucu

SEQ ID NO: 49347 - RNA, 19 nt, Artificial Sequence
  Description of Artificial Sequence: Synthetic oligonucleotide
  Antisense strand to SEQ ID NO: 49266
agaugcaaucucauuuccu

SEQ ID NO: 49348 - RNA, 19 nt, Artificial Sequence
  Description of Artificial Sequence: Synthetic oligonucleotide
  Sense strand starting at position 976 of SEQ ID NO: 597
gggugugguauuuggguau

SEQ ID NO: 49349 - RNA, 19 nt, Artificial Sequence
  Description of Artificial Sequence: Synthetic oligonucleotide
  Antisense strand to SEQ ID NO: 49268
auacccaaauaccacaccc

SEQ ID NO: 49350 - RNA, 19 nt, Artificial Sequence
  Description of Artificial Sequence: Synthetic oligonucleotide
  Sense strand starting at position 990 of SEQ ID NO: 597
gguauuugguccgaggaaa

SEQ ID NO: 49351 - RNA, 19 nt, Artificial Sequence
  Description of Artificial Sequence: Synthetic oligonucleotide
  Antisense strand to SEQ ID NO: 49270
uuuccucggaccaaauacc

SEQ ID NO: 49352 - RNA, 19 nt, Artificial Sequence
  Description of Artificial Sequence: Synthetic oligonucleotide
  Sense strand starting at position 1069 of SEQ ID NO: 597
ucagccuauguguguaauu

SEQ ID NO: 49353 - RNA, 19 nt, Artificial Sequence
  Description of Artificial Sequence: Synthetic oligonucleotide
  Antisense strand to SEQ ID NO: 49272
aauuacacacauaggcuga

SEQ ID NO: 49354 - RNA, 19 nt, Artificial Sequence
  Description of Artificial Sequence: Synthetic oligonucleotide
  Sense strand starting at position 1070 of SEQ ID NO: 597
cagccuauguguguaauua

SEQ ID NO: 49355 - RNA, 19 nt, Artificial Sequence
  Description of Artificial Sequence: Synthetic oligonucleotide
  Antisense strand to SEQ ID NO: 49274
uaauuacacacauaggcug

SEQ ID NO: 49356 - RNA, 19 nt, Artificial Sequence
  Description of Artificial Sequence: Synthetic oligonucleotide
  Sense strand starting at position 1071 of SEQ ID NO: 597
agccuauguguguaauuac

SEQ ID NO: 49357 - RNA, 19 nt, Artificial Sequence
  Description of Artificial Sequence: Synthetic oligonucleotide
  Antisense strand to SEQ ID NO: 49276
guaauuacacacauaggcu

SEQ ID NO: 49358 - RNA, 19 nt, Artificial Sequence
  Description of Artificial Sequence: Synthetic oligonucleotide
  Sense strand starting at position 1128 of SEQ ID NO: 597
gaagaaguccuacgaggca

SEQ ID NO: 49359 - RNA, 19 nt, Artificial Sequence
  Description of Artificial Sequence: Synthetic oligonucleotide
  Antisense strand to SEQ ID NO: 49278
ugccucguaggacuucuuc

SEQ ID NO: 49360 - RNA, 19 nt, Artificial Sequence
  Description of Artificial Sequence: Synthetic oligonucleotide
  Sense strand starting at position 1144 of SEQ ID NO: 597
gcaccagcuaugggacaua

SEQ ID NO: 49361 - RNA, 19 nt, Artificial Sequence
  Description of Artificial Sequence: Synthetic oligonucleotide
  Antisense strand to SEQ ID NO: 49280
uaugucccauagcuggugc

SEQ ID NO: 49362 - RNA, 19 nt, Artificial Sequence
  Description of Artificial Sequence: Synthetic oligonucleotide
  Sense strand starting at position 1149 of SEQ ID NO: 597
agcuaugggacauauguua

SEQ ID NO: 49363 - RNA, 19 nt, Artificial Sequence
  Description of Artificial Sequence: Synthetic oligonucleotide
  Antisense strand to SEQ ID NO: 49282
uaacauaugucccauagcu

SEQ ID NO: 49364 - RNA, 19 nt, Artificial Sequence
  Description of Artificial Sequence: Synthetic oligonucleotide
  Sense strand starting at position 1156 of SEQ ID NO: 597
ggacauauguuaucucuag

SEQ ID NO: 49365 - RNA, 19 nt, Artificial Sequence
  Description of Artificial Sequence: Synthetic oligonucleotide
  Antisense strand to SEQ ID NO: 49284
cuagagauaacauaugucc

SEQ ID NO: 49366 - RNA, 19 nt, Artificial Sequence
  Description of Artificial Sequence: Synthetic oligonucleotide
  Sense strand starting at position 1303 of SEQ ID NO: 597
gugcgagaccuuuauauca

SEQ ID NO: 49367 - RNA, 19 nt, Artificial Sequence
  Description of Artificial Sequence: Synthetic oligonucleotide
  Antisense strand to SEQ ID NO: 49286
ugauauaaaggucucgcac

SEQ ID NO: 49368 - RNA, 19 nt, Artificial Sequence
  Description of Artificial Sequence: Synthetic oligonucleotide
  Sense strand starting at position 1492 of SEQ ID NO: 597
ggcaccuacuugucuggua

SEQ ID NO: 49369 - RNA, 19 nt, Artificial Sequence
  Description of Artificial Sequence: Synthetic oligonucleotide
  Antisense strand to SEQ ID NO: 49288
uaccagacaaguaggugcc

SEQ ID NO: 49370 - RNA, 19 nt, Artificial Sequence
  Description of Artificial Sequence: Synthetic oligonucleotide
  Sense strand starting at position 1768 of SEQ ID NO: 597
guggucugguucccacaga

SEQ ID NO: 49371 - RNA, 19 nt, Artificial Sequence
  Description of Artificial Sequence: Synthetic oligonucleotide
  Antisense strand to SEQ ID NO: 49290
ucugugggaaccagaccac

SEQ ID NO: 49372 - RNA, 19 nt, Artificial Sequence
  Description of Artificial Sequence: Synthetic oligonucleotide
  Sense strand starting at position 1891 of SEQ ID NO: 597
ugugucacucgauaugagu

SEQ ID NO: 49373 - RNA, 19 nt, Artificial Sequence
  Description of Artificial Sequence: Synthetic oligonucleotide
  Antisense strand to SEQ ID NO: 49292
acucauaucgagugacaca

SEQ ID NO: 49374 - RNA, 19 nt, Artificial Sequence
  Description of Artificial Sequence: Synthetic oligonucleotide
  Sense strand starting at position 1898 of SEQ ID NO: 597
cucgauaugaguggaagga

SEQ ID NO: 49375 - RNA, 19 nt, Artificial Sequence
  Description of Artificial Sequence: Synthetic oligonucleotide
  Antisense strand to SEQ ID NO: 49294
uccuuccacucauaucgag

SEQ ID NO: 49376 - RNA, 19 nt, Artificial Sequence
  Description of Artificial Sequence: Synthetic oligonucleotide
  Sense strand starting at position 1935 of SEQ ID NO: 597
cuguuucuccagugaggag

SEQ ID NO: 49377 - RNA, 19 nt, Artificial Sequence
  Description of Artificial Sequence: Synthetic oligonucleotide
  Antisense strand to SEQ ID NO: 49296
cuccucacuggagaaacag

SEQ ID NO: 49378 - RNA, 19 nt, Artificial Sequence
  Description of Artificial Sequence: Synthetic oligonucleotide
  Sense strand starting at position 1936 of SEQ ID NO: 597
uguuucuccagugaggagu

SEQ ID NO: 49379 - RNA, 19 nt, Artificial Sequence
  Description of Artificial Sequence: Synthetic oligonucleotide
  Antisense strand to SEQ ID NO: 49298
acuccucacuggagaaaca

SEQ ID NO: 49380 - RNA, 19 nt, Artificial Sequence
  Description of Artificial Sequence: Synthetic oligonucleotide
  Sense strand starting at position 2130 of SEQ ID NO: 597
acgcgagccaccuuguuau

SEQ ID NO: 49381 - RNA, 19 nt, Artificial Sequence
  Description of Artificial Sequence: Synthetic oligonucleotide
  Antisense strand to SEQ ID NO: 49300
auaacaagguggcucgcgu

SEQ ID NO: 49382 - RNA, 19 nt, Artificial Sequence
  Description of Artificial Sequence: Synthetic oligonucleotide
  Sense strand starting at position 2276 of SEQ ID NO: 597
agagguggauccugggaga

SEQ ID NO: 49383 - RNA, 19 nt, Artificial Sequence
  Description of Artificial Sequence: Synthetic oligonucleotide
  Antisense strand to SEQ ID NO: 49302
ucucccaggauccaccucu

SEQ ID NO: 49384 - RNA, 19 nt, Artificial Sequence
  Description of Artificial Sequence: Synthetic oligonucleotide
  Sense strand starting at position 2289 of SEQ ID NO: 597
gggagauguuggcagagau

SEQ ID NO: 49385 - RNA, 19 nt, Artificial Sequence
  Description of Artificial Sequence: Synthetic oligonucleotide
  Antisense strand to SEQ ID NO: 49304
aucucugccaacaucuccc

SEQ ID NO: 49386 - RNA, 19 nt, Artificial Sequence
  Description of Artificial Sequence: Synthetic oligonucleotide
  Sense strand starting at position 2293 of SEQ ID NO: 597
gauguuggcagagaugcaa

SEQ ID NO: 49387 - RNA, 19 nt, Artificial Sequence
  Description of Artificial Sequence: Synthetic oligonucleotide
  Antisense strand to SEQ ID NO: 49306
uugcaucucugccaacauc

SEQ ID NO: 49388 - RNA, 19 nt, Artificial Sequence
  Description of Artificial Sequence: Synthetic oligonucleotide
  Sense strand starting at position 2504 of SEQ ID NO: 597
ggguucuccucuguuccaa

SEQ ID NO: 49389 - RNA, 19 nt, Artificial Sequence
  Description of Artificial Sequence: Synthetic oligonucleotide
  Antisense strand to SEQ ID NO: 49308
uuggaacagaggagaaccc

SEQ ID NO: 49390 - RNA, 19 nt, Artificial Sequence
  Description of Artificial Sequence: Synthetic oligonucleotide
  Sense strand starting at position 2506 of SEQ ID NO: 597
guucuccucuguuccaaga

SEQ ID NO: 49391 - RNA, 19 nt, Artificial Sequence
  Description of Artificial Sequence: Synthetic oligonucleotide
  Antisense strand to SEQ ID NO: 49310
ucuuggaacagaggagaac

SEQ ID NO: 49392 - RNA, 19 nt, Artificial Sequence
  Description of Artificial Sequence: Synthetic oligonucleotide
  Sense strand starting at position 2757 of SEQ ID NO: 597
guaggagcuggccagauaa

SEQ ID NO: 49393 - RNA, 19 nt, Artificial Sequence
  Description of Artificial Sequence: Synthetic oligonucleotide
  Antisense strand to SEQ ID NO: 49312
uuaucuggccagcuccuac

SEQ ID NO: 49394 - RNA, 19 nt, Artificial Sequence
  Description of Artificial Sequence: Synthetic oligonucleotide
  Sense strand starting at position 2833 of SEQ ID NO: 597
agguuaagagccuggacuu

SEQ ID NO: 49395 - RNA, 19 nt, Artificial Sequence
  Description of Artificial Sequence: Synthetic oligonucleotide
  Antisense strand to SEQ ID NO: 49314
aaguccaggcucuuaaccu

SEQ ID NO: 49396 - RNA, 19 nt, Artificial Sequence
  Description of Artificial Sequence: Synthetic oligonucleotide
  Sense strand starting at position 2868 of SEQ ID NO: 597
gugacaugauuagauuuac

SEQ ID NO: 49397 - RNA, 19 nt, Artificial Sequence
  Description of Artificial Sequence: Synthetic oligonucleotide
  Antisense strand to SEQ ID NO: 49316
guaaaucuaaucaugucac

SEQ ID NO: 49398 - RNA, 19 nt, Artificial Sequence
  Description of Artificial Sequence: Synthetic oligonucleotide
  Sense strand starting at position 2934 of SEQ ID NO: 597
ggaagcugucagggaagau

SEQ ID NO: 49399 - RNA, 19 nt, Artificial Sequence
  Description of Artificial Sequence: Synthetic oligonucleotide
  Antisense strand to SEQ ID NO: 49318
aucuucccugacagcuucc

SEQ ID NO: 49400 - RNA, 19 nt, Artificial Sequence
  Description of Artificial Sequence: Synthetic oligonucleotide
  Sense strand starting at position 3166 of SEQ ID NO: 597
caagcacuuucuguggaaa

SEQ ID NO: 49401 - RNA, 19 nt, Artificial Sequence
  Description of Artificial Sequence: Synthetic oligonucleotide
  Antisense strand to SEQ ID NO: 49320
uuuccacagaaagugcuug

SEQ ID NO: 49402 - RNA, 19 nt, Artificial Sequence
  Description of Artificial Sequence: Synthetic oligonucleotide
  Sense strand starting at position 3727 of SEQ ID NO: 597
gagagacagccugguauga

SEQ ID NO: 49403 - RNA, 19 nt, Artificial Sequence
  Description of Artificial Sequence: Synthetic oligonucleotide
  Antisense strand to SEQ ID NO: 49322
ucauaccaggcugucucuc

SEQ ID NO: 49404 - RNA, 19 nt, Artificial Sequence
  Description of Artificial Sequence: Synthetic oligonucleotide
  Sense strand starting at position 3793 of SEQ ID NO: 597
aguaaucaguuaucucaca

SEQ ID NO: 49405 - RNA, 19 nt, Artificial Sequence
  Description of Artificial Sequence: Synthetic oligonucleotide
  Antisense strand to SEQ ID NO: 49324
ugugagauaacugauuacu

SEQ ID NO: 49406 - RNA, 19 nt, Artificial Sequence
  Description of Artificial Sequence: Synthetic oligonucleotide
  Sense strand starting at position 24 of SEQ ID NO: 594
gcacucucacuuggguuau

SEQ ID NO: 49407 - RNA, 19 nt, Artificial Sequence
  Description of Artificial Sequence: Synthetic oligonucleotide
  Antisense strand to SEQ ID NO: 49326
auaacccaagugagagugc

SEQ ID NO: 49408 - RNA, 19 nt, Artificial Sequence
  Description of Artificial Sequence: Synthetic oligonucleotide
  Sense strand starting at position 55 of SEQ ID NO: 594
agguaaguguuaucaucuc

SEQ ID NO: 49409 - RNA, 19 nt, Artificial Sequence
  Description of Artificial Sequence: Synthetic oligonucleotide
  Antisense strand to SEQ ID NO: 49328
gagaugauaacacuuaccu

SEQ ID NO: 49410 - RNA, 19 nt, Artificial Sequence
  Description of Artificial Sequence: Synthetic oligonucleotide
  Sense strand starting at position 177 of SEQ ID NO: 594
cgucaaagccuggacucuu

SEQ ID NO: 49411 - RNA, 19 nt, Artificial Sequence
  Description of Artificial Sequence: Synthetic oligonucleotide
  Antisense strand to SEQ ID NO: 49330
aagaguccaggcuuugacg

SEQ ID NO: 49412 - RNA, 19 nt, Artificial Sequence
  Description of Artificial Sequence: Synthetic oligonucleotide
  Sense strand starting at position 394 of SEQ ID NO: 594
cuuuaaauccagugcuggu

SEQ ID NO: 49413 - RNA, 19 nt, Artificial Sequence
  Description of Artificial Sequence: Synthetic oligonucleotide
  Antisense strand to SEQ ID NO: 49332
accagcacuggauuuaaag

SEQ ID NO: 49414 - RNA, 19 nt, Artificial Sequence
  Description of Artificial Sequence: Synthetic oligonucleotide
  Sense strand starting at position 466 of SEQ ID NO: 594
ggagauuccuaauggagga

SEQ ID NO: 49415 - RNA, 19 nt, Artificial Sequence
  Description of Artificial Sequence: Synthetic oligonucleotide
  Antisense strand to SEQ ID NO: 49334
uccuccauuaggaaucucc

SEQ ID NO: 49416 - RNA, 19 nt, Artificial Sequence
  Description of Artificial Sequence: Synthetic oligonucleotide
  Sense strand starting at position 482 of SEQ ID NO: 594
ggagguagguugagucuca

SEQ ID NO: 49417 - RNA, 19 nt, Artificial Sequence
  Description of Artificial Sequence: Synthetic oligonucleotide
  Antisense strand to SEQ ID NO: 49336
ugagacucaaccuaccucc

SEQ ID NO: 49418 - RNA, 19 nt, Artificial Sequence
  Description of Artificial Sequence: Synthetic oligonucleotide
  Sense strand starting at position 494 of SEQ ID NO: 594
agucucacguggucucuaa

SEQ ID NO: 49419 - RNA, 19 nt, Artificial Sequence
  Description of Artificial Sequence: Synthetic oligonucleotide
  Antisense strand to SEQ ID NO: 49338
uuagagaccacgugagacu

SEQ ID NO: 49420 - RNA, 19 nt, Artificial Sequence
  Description of Artificial Sequence: Synthetic oligonucleotide
  Sense strand starting at position 894 of SEQ ID NO: 594
guggcucgucuauagggaa

SEQ ID NO: 49421 - RNA, 19 nt, Artificial Sequence
  Description of Artificial Sequence: Synthetic oligonucleotide
  Antisense strand to SEQ ID NO: 49340
uucccuauagacgagccac

SEQ ID NO: 49422 - RNA, 19 nt, Artificial Sequence
  Description of Artificial Sequence: Synthetic oligonucleotide
  Sense strand starting at position 935 of SEQ ID NO: 594
gcucccuucccgugaugga

SEQ ID NO: 49423 - RNA, 19 nt, Artificial Sequence
  Description of Artificial Sequence: Synthetic oligonucleotide
  Antisense strand to SEQ ID NO: 49342
uccaucacgggaagggagc

SEQ ID NO: 49424 - RNA, 19 nt, Artificial Sequence
  Description of Artificial Sequence: Synthetic oligonucleotide
  Sense strand starting at position 1181 of SEQ ID NO: 594
ggacccaucaccgggagau

SEQ ID NO: 49425 - RNA, 19 nt, Artificial Sequence
  Description of Artificial Sequence: Synthetic oligonucleotide
  Antisense strand to SEQ ID NO: 49344
aucucccggugaugggucc

SEQ ID NO: 49426 - RNA, 19 nt, Artificial Sequence
  Description of Artificial Sequence: Synthetic oligonucleotide
  Sense strand starting at position 2465 of SEQ ID NO: 594
ugugcuuaugugugaagga

SEQ ID NO: 49427 - RNA, 19 nt, Artificial Sequence
  Description of Artificial Sequence: Synthetic oligonucleotide
  Antisense strand to SEQ ID NO: 49346
uccuucacacauaagcaca

SEQ ID NO: 49428 - RNA, 19 nt, Artificial Sequence
  Description of Artificial Sequence: Synthetic oligonucleotide
  Sense strand starting at position 2501 of SEQ ID NO: 594
gggauuuguugcucugugu

SEQ ID NO: 49429 - RNA, 19 nt, Artificial Sequence
  Description of Artificial Sequence: Synthetic oligonucleotide
  Antisense strand to SEQ ID NO: 49348
acacagagcaacaaauccc

SEQ ID NO: 49430 - RNA, 19 nt, Artificial Sequence
  Description of Artificial Sequence: Synthetic oligonucleotide
  Sense strand starting at position 2504 of SEQ ID NO: 594
auuuguugcucugugugua

SEQ ID NO: 49431 - RNA, 19 nt, Artificial Sequence
  Description of Artificial Sequence: Synthetic oligonucleotide
  Antisense strand to SEQ ID NO: 49350
uacacacagagcaacaaau

SEQ ID NO: 49432 - RNA, 19 nt, Artificial Sequence
  Description of Artificial Sequence: Synthetic oligonucleotide
  Sense strand starting at position 2568 of SEQ ID NO: 594
guguguccgcuguauuuga

SEQ ID NO: 49433 - RNA, 19 nt, Artificial Sequence
  Description of Artificial Sequence: Synthetic oligonucleotide
  Antisense strand to SEQ ID NO: 49352
ucaaauacagcggacacac

SEQ ID NO: 49434 - RNA, 19 nt, Artificial Sequence
  Description of Artificial Sequence: Synthetic oligonucleotide
  Sense strand starting at position 2733 of SEQ ID NO: 594
uguguuuauaugugaagga

SEQ ID NO: 49435 - RNA, 19 nt, Artificial Sequence
  Description of Artificial Sequence: Synthetic oligonucleotide
  Antisense strand to SEQ ID NO: 49354
uccuucacauauaaacaca

SEQ ID NO: 49436 - RNA, 19 nt, Artificial Sequence
  Description of Artificial Sequence: Synthetic oligonucleotide
  Sense strand starting at position 2762 of SEQ ID NO: 594
ugauuuauuugggauucgu

SEQ ID NO: 49437 - RNA, 19 nt, Artificial Sequence
  Description of Artificial Sequence: Synthetic oligonucleotide
  Antisense strand to SEQ ID NO: 49356
acgaaucccaaauaaauca

SEQ ID NO: 49438 - RNA, 19 nt, Artificial Sequence
  Description of Artificial Sequence: Synthetic oligonucleotide
  Sense strand starting at position 2801 of SEQ ID NO: 594
acaaccuguguccgcuaua

SEQ ID NO: 49439 - RNA, 19 nt, Artificial Sequence
  Description of Artificial Sequence: Synthetic oligonucleotide
  Antisense strand to SEQ ID NO: 49358
uauagcggacacagguugu

SEQ ID NO: 49440 - RNA, 19 nt, Artificial Sequence
  Description of Artificial Sequence: Synthetic oligonucleotide
  Sense strand starting at position 2804 of SEQ ID NO: 594
accuguguccgcuauauuu

SEQ ID NO: 49441 - RNA, 19 nt, Artificial Sequence
  Description of Artificial Sequence: Synthetic oligonucleotide
  Antisense strand to SEQ ID NO: 49360
aaauauagcggacacaggu

SEQ ID NO: 49442 - RNA, 19 nt, Artificial Sequence
  Description of Artificial Sequence: Synthetic oligonucleotide
  Sense strand starting at position 2806 of SEQ ID NO: 594
cuguguccgcuauauuuga

SEQ ID NO: 49443 - RNA, 19 nt, Artificial Sequence
  Description of Artificial Sequence: Synthetic oligonucleotide
  Antisense strand to SEQ ID NO: 49362
ucaaauauagcggacacag

SEQ ID NO: 49444 - RNA, 19 nt, Artificial Sequence
  Description of Artificial Sequence: Synthetic oligonucleotide
  Sense strand starting at position 2810 of SEQ ID NO: 594
guccgcuauauuugagguu

SEQ ID NO: 49445 - RNA, 19 nt, Artificial Sequence
  Description of Artificial Sequence: Synthetic oligonucleotide
  Antisense strand to SEQ ID NO: 49364
aaccucaaauauagcggac

SEQ ID NO: 49446 - RNA, 19 nt, Artificial Sequence
  Description of Artificial Sequence: Synthetic oligonucleotide
  Sense strand starting at position 2873 of SEQ ID NO: 594
gugagugucuacuauauuu

SEQ ID NO: 49447 - RNA, 19 nt, Artificial Sequence
  Description of Artificial Sequence: Synthetic oligonucleotide
  Antisense strand to SEQ ID NO: 49366
aaauauaguagacacucac

SEQ ID NO: 49448 - RNA, 19 nt, Artificial Sequence
  Description of Artificial Sequence: Synthetic oligonucleotide
  Sense strand starting at position 2942 of SEQ ID NO: 594
gugugucugcuauauuuga

SEQ ID NO: 49449 - RNA, 19 nt, Artificial Sequence
  Description of Artificial Sequence: Synthetic oligonucleotide
  Antisense strand to SEQ ID NO: 49368
ucaaauauagcagacacac

SEQ ID NO: 49450 - RNA, 19 nt, Artificial Sequence
  Description of Artificial Sequence: Synthetic oligonucleotide
  Sense strand starting at position 2946 of SEQ ID NO: 594
gucugcuauauuugagguu

SEQ ID NO: 49451 - RNA, 19 nt, Artificial Sequence
  Description of Artificial Sequence: Synthetic oligonucleotide
  Antisense strand to SEQ ID NO: 49370
aaccucaaauauagcagac

SEQ ID NO: 49452 - RNA, 19 nt, Artificial Sequence
  Description of Artificial Sequence: Synthetic oligonucleotide
  Sense strand starting at position 2976 of SEQ ID NO: 594
gugugucuccgcuauauuu

SEQ ID NO: 49453 - RNA, 19 nt, Artificial Sequence
  Description of Artificial Sequence: Synthetic oligonucleotide
  Antisense strand to SEQ ID NO: 49372
aaauauagcggagacacac

SEQ ID NO: 49454 - RNA, 19 nt, Artificial Sequence
  Description of Artificial Sequence: Synthetic oligonucleotide
  Sense strand starting at position 2996 of SEQ ID NO: 594
ggguucauugcuguguguu

SEQ ID NO: 49455 - RNA, 19 nt, Artificial Sequence
  Description of Artificial Sequence: Synthetic oligonucleotide
  Antisense strand to SEQ ID NO: 49374
aacacacagcaaugaaccc

SEQ ID NO: 49456 - RNA, 19 nt, Artificial Sequence
  Description of Artificial Sequence: Synthetic oligonucleotide
  Sense strand starting at position 3009 of SEQ ID NO: 594
uguguuugugugucugcua

SEQ ID NO: 49457 - RNA, 19 nt, Artificial Sequence
  Description of Artificial Sequence: Synthetic oligonucleotide
  Antisense strand to SEQ ID NO: 49376
uagcagacacacaaacaca

SEQ ID NO: 49458 - RNA, 19 nt, Artificial Sequence
  Description of Artificial Sequence: Synthetic oligonucleotide
  Sense strand starting at position 3155 of SEQ ID NO: 594
ucucuaggcgugugaauuu

SEQ ID NO: 49459 - RNA, 19 nt, Artificial Sequence
  Description of Artificial Sequence: Synthetic oligonucleotide
  Antisense strand to SEQ ID NO: 49378
aaauucacacgccuagaga

SEQ ID NO: 49460 - RNA, 19 nt, Artificial Sequence
  Description of Artificial Sequence: Synthetic oligonucleotide
  Sense strand starting at position 3295 of SEQ ID NO: 594
guuguacaugcauguuaau

SEQ ID NO: 49461 - RNA, 19 nt, Artificial Sequence
  Description of Artificial Sequence: Synthetic oligonucleotide
  Antisense strand to SEQ ID NO: 49380
auuaacaugcauguacaac

SEQ ID NO: 49462 - RNA, 19 nt, Artificial Sequence
  Description of Artificial Sequence: Synthetic oligonucleotide
  Sense strand starting at position 3328 of SEQ ID NO: 594
uguggugucccuguuguaa

SEQ ID NO: 49463 - RNA, 19 nt, Artificial Sequence
  Description of Artificial Sequence: Synthetic oligonucleotide
  Antisense strand to SEQ ID NO: 49382
uuacaacagggacaccaca

SEQ ID NO: 49464 - RNA, 19 nt, Artificial Sequence
  Description of Artificial Sequence: Synthetic oligonucleotide
  Sense strand starting at position 3414 of SEQ ID NO: 594
gagggacauggcugugauu

SEQ ID NO: 49465 - RNA, 19 nt, Artificial Sequence
  Description of Artificial Sequence: Synthetic oligonucleotide
  Antisense strand to SEQ ID NO: 49384
aaucacagccaugucccuc

SEQ ID NO: 49466 - RNA, 19 nt, Artificial Sequence
  Description of Artificial Sequence: Synthetic oligonucleotide
  Sense strand starting at position 3421 of SEQ ID NO: 594
auggcugugauuugguaca

SEQ ID NO: 49467 - RNA, 19 nt, Artificial Sequence
  Description of Artificial Sequence: Synthetic oligonucleotide
  Antisense strand to SEQ ID NO: 49386
uguaccaaaucacagccau

SEQ ID NO: 49468 - RNA, 19 nt, Artificial Sequence
  Description of Artificial Sequence: Synthetic oligonucleotide
  Sense strand starting at position 3435 of SEQ ID NO: 594
guacaacuuuguguguaac

SEQ ID NO: 49469 - RNA, 19 nt, Artificial Sequence
  Description of Artificial Sequence: Synthetic oligonucleotide
  Antisense strand to SEQ ID NO: 49388
guuacacacaaaguuguac

SEQ ID NO: 49470 - RNA, 19 nt, Artificial Sequence
  Description of Artificial Sequence: Synthetic oligonucleotide
  Sense strand starting at position 3453 of SEQ ID NO: 594
cccaguuugcaagagacau

SEQ ID NO: 49471 - RNA, 19 nt, Artificial Sequence
  Description of Artificial Sequence: Synthetic oligonucleotide
  Antisense strand to SEQ ID NO: 49390
augucucuugcaaacuggg

SEQ ID NO: 49472 - RNA, 19 nt, Artificial Sequence
  Description of Artificial Sequence: Synthetic oligonucleotide
  Sense strand starting at position 3587 of SEQ ID NO: 594
gggcauaaugaguguaugu

SEQ ID NO: 49473 - RNA, 19 nt, Artificial Sequence
  Description of Artificial Sequence: Synthetic oligonucleotide
  Antisense strand to SEQ ID NO: 49392
acauacacucauuaugccc

SEQ ID NO: 49474 - RNA, 19 nt, Artificial Sequence
  Description of Artificial Sequence: Synthetic oligonucleotide
  Sense strand starting at position 3589 of SEQ ID NO: 594
gcauaaugaguguauguuc

SEQ ID NO: 49475 - RNA, 19 nt, Artificial Sequence
  Description of Artificial Sequence: Synthetic oligonucleotide
  Antisense strand to SEQ ID NO: 49394
gaacauacacucauuaugc

SEQ ID NO: 49476 - RNA, 19 nt, Artificial Sequence
  Description of Artificial Sequence: Synthetic oligonucleotide
  Sense strand starting at position 3598 of SEQ ID NO: 594
guguauguucaggagaaag

SEQ ID NO: 49477 - RNA, 19 nt, Artificial Sequence
  Description of Artificial Sequence: Synthetic oligonucleotide
  Antisense strand to SEQ ID NO: 49396
cuuucuccugaacauacac

SEQ ID NO: 49478 - RNA, 19 nt, Artificial Sequence
  Description of Artificial Sequence: Synthetic oligonucleotide
  Sense strand starting at position 3641 of SEQ ID NO: 594
ggcuuugaaggaugucuaa

SEQ ID NO: 49479 - RNA, 19 nt, Artificial Sequence
  Description of Artificial Sequence: Synthetic oligonucleotide
  Antisense strand to SEQ ID NO: 49398
uuagacauccuucaaagcc

SEQ ID NO: 49480 - RNA, 19 nt, Artificial Sequence
  Description of Artificial Sequence: Synthetic oligonucleotide
  Sense strand starting at position 3754 of SEQ ID NO: 594
gugggugaccagggugaau

SEQ ID NO: 49481 - RNA, 19 nt, Artificial Sequence
  Description of Artificial Sequence: Synthetic oligonucleotide
  Antisense strand to SEQ ID NO: 49400
auucacccuggucacccac

SEQ ID NO: 49482 - RNA, 19 nt, Artificial Sequence
  Description of Artificial Sequence: Synthetic oligonucleotide
  Sense strand starting at position 3763 of SEQ ID NO: 594
cagggugaauuuggaaaca

SEQ ID NO: 49483 - RNA, 19 nt, Artificial Sequence
  Description of Artificial Sequence: Synthetic oligonucleotide
  Antisense strand to SEQ ID NO: 49402
uguuuccaaauucacccug

SEQ ID NO: 49484 - RNA, 19 nt, Artificial Sequence
  Description of Artificial Sequence: Synthetic oligonucleotide
  Sense strand starting at position 3905 of SEQ ID NO: 594
ugggcaguuuguuugggaa

SEQ ID NO: 49485 - RNA, 19 nt, Artificial Sequence
  Description of Artificial Sequence: Synthetic oligonucleotide
  Antisense strand to SEQ ID NO: 49404
uucccaaacaaacugccca

SEQ ID NO: 49486 - RNA, 19 nt, Artificial Sequence
  Description of Artificial Sequence: Synthetic oligonucleotide
  Sense strand starting at position 118 of SEQ ID NO: 596
ggccaucaccacugaaaga

SEQ ID NO: 49487 - RNA, 19 nt, Artificial Sequence
  Description of Artificial Sequence: Synthetic oligonucleotide
  Antisense strand to SEQ ID NO: 49406
ucuuucaguggugauggcc

SEQ ID NO: 49488 - RNA, 19 nt, Artificial Sequence
  Description of Artificial Sequence: Synthetic oligonucleotide
  Sense strand starting at position 153 of SEQ ID NO: 596
caaggucgugaguggagua

SEQ ID NO: 49489 - RNA, 19 nt, Artificial Sequence
  Description of Artificial Sequence: Synthetic oligonucleotide
  Antisense strand to SEQ ID NO: 49408
uacuccacucacgaccuug

SEQ ID NO: 49490 - RNA, 19 nt, Artificial Sequence
  Description of Artificial Sequence: Synthetic oligonucleotide
  Sense strand starting at position 156 of SEQ ID NO: 596
ggucgugaguggaguaaga

SEQ ID NO: 49491 - RNA, 19 nt, Artificial Sequence
  Description of Artificial Sequence: Synthetic oligonucleotide
  Antisense strand to SEQ ID NO: 49410
ucuuacuccacucacgacc

SEQ ID NO: 49492 - RNA, 19 nt, Artificial Sequence
  Description of Artificial Sequence: Synthetic oligonucleotide
  Sense strand starting at position 282 of SEQ ID NO: 596
ggcugcugugaggauaaca

SEQ ID NO: 49493 - RNA, 19 nt, Artificial Sequence
  Description of Artificial Sequence: Synthetic oligonucleotide
  Antisense strand to SEQ ID NO: 49412
uguuauccucacagcagcc

SEQ ID NO: 49494 - RNA, 19 nt, Artificial Sequence
  Description of Artificial Sequence: Synthetic oligonucleotide
  Sense strand starting at position 301 of SEQ ID NO: 596
gcaacauggcauuauuacu

SEQ ID NO: 49495 - RNA, 19 nt, Artificial Sequence
  Description of Artificial Sequence: Synthetic oligonucleotide
  Antisense strand to SEQ ID NO: 49414
aguaauaaugccauguugc

SEQ ID NO: 49496 - RNA, 19 nt, Artificial Sequence
  Description of Artificial Sequence: Synthetic oligonucleotide
  Sense strand starting at position 311 of SEQ ID NO: 596
auuauuacuuugcugugaa

SEQ ID NO: 49497 - RNA, 19 nt, Artificial Sequence
  Description of Artificial Sequence: Synthetic oligonucleotide
  Antisense strand to SEQ ID NO: 49416
uucacagcaaaguaauaau

SEQ ID NO: 49498 - RNA, 19 nt, Artificial Sequence
  Description of Artificial Sequence: Synthetic oligonucleotide
  Sense strand starting at position 314 of SEQ ID NO: 596
auuacuuugcugugaauuc

SEQ ID NO: 49499 - RNA, 19 nt, Artificial Sequence
  Description of Artificial Sequence: Synthetic oligonucleotide
  Antisense strand to SEQ ID NO: 49418
gaauucacagcaaaguaau

SEQ ID NO: 49500 - RNA, 19 nt, Artificial Sequence
  Description of Artificial Sequence: Synthetic oligonucleotide
  Sense strand starting at position 489 of SEQ ID NO: 596
ggaagagguuugagacaga

SEQ ID NO: 49501 - RNA, 19 nt, Artificial Sequence
  Description of Artificial Sequence: Synthetic oligonucleotide
  Antisense strand to SEQ ID NO: 49420
ucugucucaaaccucuucc

SEQ ID NO: 49502 - RNA, 19 nt, Artificial Sequence
  Description of Artificial Sequence: Synthetic oligonucleotide
  Sense strand starting at position 515 of SEQ ID NO: 596
ugacgugucgcucucggau

SEQ ID NO: 49503 - RNA, 19 nt, Artificial Sequence
  Description of Artificial Sequence: Synthetic oligonucleotide
  Antisense strand to SEQ ID NO: 49422
auccgagagcgacacguca

SEQ ID NO: 49504 - RNA, 19 nt, Artificial Sequence
  Description of Artificial Sequence: Synthetic oligonucleotide
  Sense strand starting at position 603 of SEQ ID NO: 596
gacaguaaucccuacaggu

SEQ ID NO: 49505 - RNA, 19 nt, Artificial Sequence
  Description of Artificial Sequence: Synthetic oligonucleotide
  Antisense strand to SEQ ID NO: 49424
accuguagggauuacuguc

SEQ ID NO: 49506 - RNA, 19 nt, Artificial Sequence
  Description of Artificial Sequence: Synthetic oligonucleotide
  Sense strand starting at position 628 of SEQ ID NO: 596
gguguuccugaagguuaag

SEQ ID NO: 49507 - RNA, 19 nt, Artificial Sequence
  Description of Artificial Sequence: Synthetic oligonucleotide
  Antisense strand to SEQ ID NO: 49426
cuuaaccuucaggaacacc

SEQ ID NO: 49508 - RNA, 19 nt, Artificial Sequence
  Description of Artificial Sequence: Synthetic oligonucleotide
  Sense strand starting at position 758 of SEQ ID NO: 596
ggaggauuauucccgcuuc

SEQ ID NO: 49509 - RNA, 19 nt, Artificial Sequence
  Description of Artificial Sequence: Synthetic oligonucleotide
  Antisense strand to SEQ ID NO: 49428
gaagcgggaauaauccucc

SEQ ID NO: 49510 - RNA, 19 nt, Artificial Sequence
  Description of Artificial Sequence: Synthetic oligonucleotide
  Sense strand starting at position 774 of SEQ ID NO: 596
uucuaagaggcguaucuga

SEQ ID NO: 49511 - RNA, 19 nt, Artificial Sequence
  Description of Artificial Sequence: Synthetic oligonucleotide
  Antisense strand to SEQ ID NO: 49430
ucagauacgccucuuagaa

SEQ ID NO: 49512 - RNA, 19 nt, Artificial Sequence
  Description of Artificial Sequence: Synthetic oligonucleotide
  Sense strand starting at position 781 of SEQ ID NO: 596
aggcguaucugaguggagu

SEQ ID NO: 49513 - RNA, 19 nt, Artificial Sequence
  Description of Artificial Sequence: Synthetic oligonucleotide
  Antisense strand to SEQ ID NO: 49432
acuccacucagauacgccu

SEQ ID NO: 49514 - RNA, 19 nt, Artificial Sequence
  Description of Artificial Sequence: Synthetic oligonucleotide
  Sense strand starting at position 898 of SEQ ID NO: 596
cuuggucuaccuggcagaa

SEQ ID NO: 49515 - RNA, 19 nt, Artificial Sequence
  Description of Artificial Sequence: Synthetic oligonucleotide
  Antisense strand to SEQ ID NO: 49434
uucugccagguagaccaag

SEQ ID NO: 49516 - RNA, 19 nt, Artificial Sequence
  Description of Artificial Sequence: Synthetic oligonucleotide
  Sense strand starting at position 911 of SEQ ID NO: 596
gcagaaguccuccgagaau

SEQ ID NO: 49517 - RNA, 19 nt, Artificial Sequence
  Description of Artificial Sequence: Synthetic oligonucleotide
  Antisense strand to SEQ ID NO: 49436
auucucggaggacuucugc

SEQ ID NO: 49518 - RNA, 19 nt, Artificial Sequence
  Description of Artificial Sequence: Synthetic oligonucleotide
  Sense strand starting at position 1055 of SEQ ID NO: 596
ugaggucuuggccacaacu

SEQ ID NO: 49519 - RNA, 19 nt, Artificial Sequence
  Description of Artificial Sequence: Synthetic oligonucleotide
  Antisense strand to SEQ ID NO: 49438
aguuguggccaagaccuca

SEQ ID NO: 49520 - RNA, 19 nt, Artificial Sequence
  Description of Artificial Sequence: Synthetic oligonucleotide
  Sense strand starting at position 1392 of SEQ ID NO: 596
cagggcuuuccacgcuaaa

SEQ ID NO: 49521 - RNA, 19 nt, Artificial Sequence
  Description of Artificial Sequence: Synthetic oligonucleotide
  Antisense strand to SEQ ID NO: 49440
uuuagcguggaaagcccug

SEQ ID NO: 49522 - RNA, 19 nt, Artificial Sequence
  Description of Artificial Sequence: Synthetic oligonucleotide
  Sense strand starting at position 1865 of SEQ ID NO: 596
cccgcuuguacgucgacau

SEQ ID NO: 49523 - RNA, 19 nt, Artificial Sequence
  Description of Artificial Sequence: Synthetic oligonucleotide
  Antisense strand to SEQ ID NO: 49442
augucgacguacaagcggg

SEQ ID NO: 49524 - RNA, 19 nt, Artificial Sequence
  Description of Artificial Sequence: Synthetic oligonucleotide
  Sense strand starting at position 1878 of SEQ ID NO: 596
cgacaucugcaaggccaaa

SEQ ID NO: 49525 - RNA, 19 nt, Artificial Sequence
  Description of Artificial Sequence: Synthetic oligonucleotide
  Antisense strand to SEQ ID NO: 49444
uuuggccuugcagaugucg

SEQ ID NO: 49526 - RNA, 19 nt, Artificial Sequence
  Description of Artificial Sequence: Synthetic oligonucleotide
  Sense strand starting at position 2475 of SEQ ID NO: 596
cgauguggcccagagcaau

SEQ ID NO: 49527 - RNA, 19 nt, Artificial Sequence
  Description of Artificial Sequence: Synthetic oligonucleotide
  Antisense strand to SEQ ID NO: 49446
auugcucugggccacaucg

SEQ ID NO: 49528 - RNA, 19 nt, Artificial Sequence
  Description of Artificial Sequence: Synthetic oligonucleotide
  Sense strand starting at position 2617 of SEQ ID NO: 596
aggccuuuaagccagaguu

SEQ ID NO: 49529 - RNA, 19 nt, Artificial Sequence
  Description of Artificial Sequence: Synthetic oligonucleotide
  Antisense strand to SEQ ID NO: 49448
aacucuggcuuaaaggccu

SEQ ID NO: 49530 - RNA, 19 nt, Artificial Sequence
  Description of Artificial Sequence: Synthetic oligonucleotide
  Sense strand starting at position 2624 of SEQ ID NO: 596
uaagccagaguucgugaau

SEQ ID NO: 49531 - RNA, 19 nt, Artificial Sequence
  Description of Artificial Sequence: Synthetic oligonucleotide
  Antisense strand to SEQ ID NO: 49450
auucacgaacucuggcuua

SEQ ID NO: 49532 - RNA, 19 nt, Artificial Sequence
  Description of Artificial Sequence: Synthetic oligonucleotide
  Sense strand starting at position 2625 of SEQ ID NO: 596
aagccagaguucgugaaug

SEQ ID NO: 49533 - RNA, 19 nt, Artificial Sequence
  Description of Artificial Sequence: Synthetic oligonucleotide
  Antisense strand to SEQ ID NO: 49452
cauucacgaacucuggcuu

SEQ ID NO: 49534 - RNA, 19 nt, Artificial Sequence
  Description of Artificial Sequence: Synthetic oligonucleotide
  Sense strand starting at position 2627 of SEQ ID NO: 596
gccagaguucgugaaugag

SEQ ID NO: 49535 - RNA, 19 nt, Artificial Sequence
  Description of Artificial Sequence: Synthetic oligonucleotide
  Antisense strand to SEQ ID NO: 49454
cucauucacgaacucuggc

SEQ ID NO: 49536 - RNA, 19 nt, Artificial Sequence
  Description of Artificial Sequence: Synthetic oligonucleotide
  Sense strand starting at position 2630 of SEQ ID NO: 596
agaguucgugaaugaguuu

SEQ ID NO: 49537 - RNA, 19 nt, Artificial Sequence
  Description of Artificial Sequence: Synthetic oligonucleotide
  Antisense strand to SEQ ID NO: 49456
aaacucauucacgaacucu

SEQ ID NO: 49538 - RNA, 19 nt, Artificial Sequence
  Description of Artificial Sequence: Synthetic oligonucleotide
  Sense strand starting at position 2925 of SEQ ID NO: 596
auaugagguguucaguuag

SEQ ID NO: 49539 - RNA, 19 nt, Artificial Sequence
  Description of Artificial Sequence: Synthetic oligonucleotide
  Antisense strand to SEQ ID NO: 49458
cuaacugaacaccucauau

SEQ ID NO: 49540 - RNA, 19 nt, Artificial Sequence
  Description of Artificial Sequence: Synthetic oligonucleotide
  Sense strand starting at position 2993 of SEQ ID NO: 596
ccagcagauuuccaaagga

SEQ ID NO: 49541 - RNA, 19 nt, Artificial Sequence
  Description of Artificial Sequence: Synthetic oligonucleotide
  Antisense strand to SEQ ID NO: 49460
uccuuuggaaaucugcugg

SEQ ID NO: 49542 - RNA, 19 nt, Artificial Sequence
  Description of Artificial Sequence: Synthetic oligonucleotide
  Sense strand starting at position 3040 of SEQ ID NO: 596
cugcauuuaugcguacuuu

SEQ ID NO: 49543 - RNA, 19 nt, Artificial Sequence
  Description of Artificial Sequence: Synthetic oligonucleotide
  Antisense strand to SEQ ID NO: 49462
aaaguacgcauaaaugcag

SEQ ID NO: 49544 - RNA, 19 nt, Artificial Sequence
  Description of Artificial Sequence: Synthetic oligonucleotide
  Sense strand starting at position 3107 of SEQ ID NO: 596
gucacacauaugugugaau

SEQ ID NO: 49545 - RNA, 19 nt, Artificial Sequence
  Description of Artificial Sequence: Synthetic oligonucleotide
  Antisense strand to SEQ ID NO: 49464
auucacacauaugugugac

SEQ ID NO: 49546 - RNA, 19 nt, Artificial Sequence
  Description of Artificial Sequence: Synthetic oligonucleotide
  Sense strand starting at position 3108 of SEQ ID NO: 596
ucacacauaugugugaaua

SEQ ID NO: 49547 - RNA, 19 nt, Artificial Sequence
  Description of Artificial Sequence: Synthetic oligonucleotide
  Antisense strand to SEQ ID NO: 49466
uauucacacauauguguga

SEQ ID NO: 49548 - RNA, 19 nt, Artificial Sequence
  Description of Artificial Sequence: Synthetic oligonucleotide
  Sense strand starting at position 3110 of SEQ ID NO: 596
acacauaugugugaauaaa

SEQ ID NO: 49549 - RNA, 19 nt, Artificial Sequence
  Description of Artificial Sequence: Synthetic oligonucleotide
  Antisense strand to SEQ ID NO: 49468
uuuauucacacauaugugu

SEQ ID NO: 49550 - RNA, 19 nt, Artificial Sequence
  Description of Artificial Sequence: Synthetic oligonucleotide
  Sense strand starting at position 3281 of SEQ ID NO: 596
gcucgcucgcgccuguaau

SEQ ID NO: 49551 - RNA, 19 nt, Artificial Sequence
  Description of Artificial Sequence: Synthetic oligonucleotide
  Antisense strand to SEQ ID NO: 49470
auuacaggcgcgagcgagc

SEQ ID NO: 49552 - RNA, 19 nt, Artificial Sequence
  Description of Artificial Sequence: Synthetic oligonucleotide
  Sense strand starting at position 3567 of SEQ ID NO: 596
acagaaaucuggcuggguu

SEQ ID NO: 49553 - RNA, 19 nt, Artificial Sequence
  Description of Artificial Sequence: Synthetic oligonucleotide
  Antisense strand to SEQ ID NO: 49472
aacccagccagauuucugu

SEQ ID NO: 49554 - RNA, 19 nt, Artificial Sequence
  Description of Artificial Sequence: Synthetic oligonucleotide
  Sense strand starting at position 3632 of SEQ ID NO: 596
gagaucacuugagucuaau

SEQ ID NO: 49555 - RNA, 19 nt, Artificial Sequence
  Description of Artificial Sequence: Synthetic oligonucleotide
  Antisense strand to SEQ ID NO: 49474
auuagacucaagugaucuc

SEQ ID NO: 49556 - RNA, 19 nt, Artificial Sequence
  Description of Artificial Sequence: Synthetic oligonucleotide
  Sense strand starting at position 3868 of SEQ ID NO: 596
acaagaucuugucugagua

SEQ ID NO: 49557 - RNA, 19 nt, Artificial Sequence
  Description of Artificial Sequence: Synthetic oligonucleotide
  Antisense strand to SEQ ID NO: 49476
uacucagacaagaucuugu

SEQ ID NO: 49558 - RNA, 19 nt, Artificial Sequence
  Description of Artificial Sequence: Synthetic oligonucleotide
  Sense strand starting at position 3869 of SEQ ID NO: 596
caagaucuugucugaguaa

SEQ ID NO: 49559 - RNA, 19 nt, Artificial Sequence
  Description of Artificial Sequence: Synthetic oligonucleotide
  Antisense strand to SEQ ID NO: 49478
uuacucagacaagaucuug

SEQ ID NO: 49560 - RNA, 19 nt, Artificial Sequence
  Description of Artificial Sequence: Synthetic oligonucleotide
  Sense strand starting at position 3870 of SEQ ID NO: 596
aagaucuugucugaguaaa

SEQ ID NO: 49561 - RNA, 19 nt, Artificial Sequence
  Description of Artificial Sequence: Synthetic oligonucleotide
  Antisense strand to SEQ ID NO: 49480
uuuacucagacaagaucuu

SEQ ID NO: 49562 - RNA, 19 nt, Artificial Sequence
  Description of Artificial Sequence: Synthetic oligonucleotide
  Sense strand starting at position 3872 of SEQ ID NO: 596
gaucuugucugaguaaaua

SEQ ID NO: 49563 - RNA, 19 nt, Artificial Sequence
  Description of Artificial Sequence: Synthetic oligonucleotide
  Antisense strand to SEQ ID NO: 49482
uauuuacucagacaagauc

SEQ ID NO: 49564 - RNA, 19 nt, Artificial Sequence
  Description of Artificial Sequence: Synthetic oligonucleotide
  Sense strand starting at position 3940 of SEQ ID NO: 596
cuccacuguccuggaauga

SEQ ID NO: 49565 - RNA, 19 nt, Artificial Sequence
  Description of Artificial Sequence: Synthetic oligonucleotide
  Antisense strand to SEQ ID NO: 49484
ucauuccaggacaguggag

SEQ ID NO: 49566 - RNA, 19 nt, Artificial Sequence
  Description of Artificial Sequence: Synthetic oligonucleotide
  Sense strand starting at position 66 of SEQ ID NO: 595
ggcugcugugaggauaaca

SEQ ID NO: 49567 - RNA, 19 nt, Artificial Sequence
  Description of Artificial Sequence: Synthetic oligonucleotide
  Antisense strand to SEQ ID NO: 49486
uguuauccucacagcagcc

SEQ ID NO: 49568 - RNA, 19 nt, Artificial Sequence
  Description of Artificial Sequence: Synthetic oligonucleotide
  Sense strand starting at position 85 of SEQ ID NO: 595
gcaacauggcauuauuacu

SEQ ID NO: 49569 - RNA, 19 nt, Artificial Sequence
  Description of Artificial Sequence: Synthetic oligonucleotide
  Antisense strand to SEQ ID NO: 49488
aguaauaaugccauguugc

SEQ ID NO: 49570 - RNA, 19 nt, Artificial Sequence
  Description of Artificial Sequence: Synthetic oligonucleotide
  Sense strand starting at position 95 of SEQ ID NO: 595
auuauuacuuugcugugaa

SEQ ID NO: 49571 - RNA, 19 nt, Artificial Sequence
  Description of Artificial Sequence: Synthetic oligonucleotide
  Antisense strand to SEQ ID NO: 49490
uucacagcaaaguaauaau

SEQ ID NO: 49572 - RNA, 19 nt, Artificial Sequence
  Description of Artificial Sequence: Synthetic oligonucleotide
  Sense strand starting at position 98 of SEQ ID NO: 595
auuacuuugcugugaauuc

SEQ ID NO: 49573 - RNA, 19 nt, Artificial Sequence
  Description of Artificial Sequence: Synthetic oligonucleotide
  Antisense strand to SEQ ID NO: 49492
gaauucacagcaaaguaau

SEQ ID NO: 49574 - RNA, 19 nt, Artificial Sequence
  Description of Artificial Sequence: Synthetic oligonucleotide
  Sense strand starting at position 140 of SEQ ID NO: 595
uuuagacccuucuguggaa

SEQ ID NO: 49575 - RNA, 19 nt, Artificial Sequence
  Description of Artificial Sequence: Synthetic oligonucleotide
  Antisense strand to SEQ ID NO: 49494
uuccacagaagggucuaaa

SEQ ID NO: 49576 - RNA, 19 nt, Artificial Sequence
  Description of Artificial Sequence: Synthetic oligonucleotide
  Sense strand starting at position 273 of SEQ ID NO: 595
ggaagagguuugagacaga

SEQ ID NO: 49577 - RNA, 19 nt, Artificial Sequence
  Description of Artificial Sequence: Synthetic oligonucleotide
  Antisense strand to SEQ ID NO: 49496
ucugucucaaaccucuucc

SEQ ID NO: 49578 - RNA, 19 nt, Artificial Sequence
  Description of Artificial Sequence: Synthetic oligonucleotide
  Sense strand starting at position 299 of SEQ ID NO: 595
ugacgugucgcucucggau

SEQ ID NO: 49579 - RNA, 19 nt, Artificial Sequence
  Description of Artificial Sequence: Synthetic oligonucleotide
  Antisense strand to SEQ ID NO: 49498
auccgagagcgacacguca

SEQ ID NO: 49580 - RNA, 19 nt, Artificial Sequence
  Description of Artificial Sequence: Synthetic oligonucleotide
  Sense strand starting at position 387 of SEQ ID NO: 595
gacaguaaucccuacaggu

SEQ ID NO: 49581 - RNA, 19 nt, Artificial Sequence
  Description of Artificial Sequence: Synthetic oligonucleotide
  Antisense strand to SEQ ID NO: 49500
accuguagggauuacuguc

SEQ ID NO: 49582 - RNA, 19 nt, Artificial Sequence
  Description of Artificial Sequence: Synthetic oligonucleotide
  Sense strand starting at position 412 of SEQ ID NO: 595
gguguuccugaagguuaag

SEQ ID NO: 49583 - RNA, 19 nt, Artificial Sequence
  Description of Artificial Sequence: Synthetic oligonucleotide
  Antisense strand to SEQ ID NO: 49502
cuuaaccuucaggaacacc

SEQ ID NO: 49584 - RNA, 19 nt, Artificial Sequence
  Description of Artificial Sequence: Synthetic oligonucleotide
  Sense strand starting at position 542 of SEQ ID NO: 595
ggaggauuauucccgcuuc

SEQ ID NO: 49585 - RNA, 19 nt, Artificial Sequence
  Description of Artificial Sequence: Synthetic oligonucleotide
  Antisense strand to SEQ ID NO: 49504
gaagcgggaauaauccucc

SEQ ID NO: 49586 - RNA, 19 nt, Artificial Sequence
  Description of Artificial Sequence: Synthetic oligonucleotide
  Sense strand starting at position 558 of SEQ ID NO: 595
uucuaagaggcguaucuga

SEQ ID NO: 49587 - RNA, 19 nt, Artificial Sequence
  Description of Artificial Sequence: Synthetic oligonucleotide
  Antisense strand to SEQ ID NO: 49506
ucagauacgccucuuagaa

SEQ ID NO: 49588 - RNA, 19 nt, Artificial Sequence
  Description of Artificial Sequence: Synthetic oligonucleotide
  Sense strand starting at position 565 of SEQ ID NO: 595
aggcguaucugaguggagu

SEQ ID NO: 49589 - RNA, 19 nt, Artificial Sequence
  Description of Artificial Sequence: Synthetic oligonucleotide
  Antisense strand to SEQ ID NO: 49508
acuccacucagauacgccu

SEQ ID NO: 49590 - RNA, 19 nt, Artificial Sequence
  Description of Artificial Sequence: Synthetic oligonucleotide
  Sense strand starting at position 682 of SEQ ID NO: 595
cuuggucuaccuggcagaa

SEQ ID NO: 49591 - RNA, 19 nt, Artificial Sequence
  Description of Artificial Sequence: Synthetic oligonucleotide
  Antisense strand to SEQ ID NO: 49510
uucugccagguagaccaag

SEQ ID NO: 49592 - RNA, 19 nt, Artificial Sequence
  Description of Artificial Sequence: Synthetic oligonucleotide
  Sense strand starting at position 695 of SEQ ID NO: 595
gcagaaguccuccgagaau

SEQ ID NO: 49593 - RNA, 19 nt, Artificial Sequence
  Description of Artificial Sequence: Synthetic oligonucleotide
  Antisense strand to SEQ ID NO: 49512
auucucggaggacuucugc

SEQ ID NO: 49594 - RNA, 19 nt, Artificial Sequence
  Description of Artificial Sequence: Synthetic oligonucleotide
  Sense strand starting at position 839 of SEQ ID NO: 595
ugaggucuuggccacaacu

SEQ ID NO: 49595 - RNA, 19 nt, Artificial Sequence
  Description of Artificial Sequence: Synthetic oligonucleotide
  Antisense strand to SEQ ID NO: 49514
aguuguggccaagaccuca

SEQ ID NO: 49596 - RNA, 19 nt, Artificial Sequence
  Description of Artificial Sequence: Synthetic oligonucleotide
  Sense strand starting at position 1064 of SEQ ID NO: 595
ccaggaaacucagguauug

SEQ ID NO: 49597 - RNA, 19 nt, Artificial Sequence
  Description of Artificial Sequence: Synthetic oligonucleotide
  Antisense strand to SEQ ID NO: 49516
caauaccugaguuuccugg

SEQ ID NO: 49598 - RNA, 19 nt, Artificial Sequence
  Description of Artificial Sequence: Synthetic oligonucleotide
  Sense strand starting at position 1176 of SEQ ID NO: 595
cagggcuuuccacgcuaaa

SEQ ID NO: 49599 - RNA, 19 nt, Artificial Sequence
  Description of Artificial Sequence: Synthetic oligonucleotide
  Antisense strand to SEQ ID NO: 49518
uuuagcguggaaagcccug

SEQ ID NO: 49600 - RNA, 19 nt, Artificial Sequence
  Description of Artificial Sequence: Synthetic oligonucleotide
  Sense strand starting at position 1649 of SEQ ID NO: 595
cccgcuuguacgucgacau

SEQ ID NO: 49601 - RNA, 19 nt, Artificial Sequence
  Description of Artificial Sequence: Synthetic oligonucleotide
  Antisense strand to SEQ ID NO: 49520
augucgacguacaagcggg

SEQ ID NO: 49602 - RNA, 19 nt, Artificial Sequence
  Description of Artificial Sequence: Synthetic oligonucleotide
  Sense strand starting at position 1662 of SEQ ID NO: 595
cgacaucugcaaggccaaa

SEQ ID NO: 49603 - RNA, 19 nt, Artificial Sequence
  Description of Artificial Sequence: Synthetic oligonucleotide
  Antisense strand to SEQ ID NO: 49522
uuuggccuugcagaugucg

SEQ ID NO: 49604 - RNA, 19 nt, Artificial Sequence
  Description of Artificial Sequence: Synthetic oligonucleotide
  Sense strand starting at position 2259 of SEQ ID NO: 595
cgauguggcccagagcaau

SEQ ID NO: 49605 - RNA, 19 nt, Artificial Sequence
  Description of Artificial Sequence: Synthetic oligonucleotide
  Antisense strand to SEQ ID NO: 49524
auugcucugggccacaucg

SEQ ID NO: 49606 - RNA, 19 nt, Artificial Sequence
  Description of Artificial Sequence: Synthetic oligonucleotide
  Sense strand starting at position 2401 of SEQ ID NO: 595
aggccuuuaagccagaguu

SEQ ID NO: 49607 - RNA, 19 nt, Artificial Sequence
  Description of Artificial Sequence: Synthetic oligonucleotide
  Antisense strand to SEQ ID NO: 49526
aacucuggcuuaaaggccu

SEQ ID NO: 49608 - RNA, 19 nt, Artificial Sequence
  Description of Artificial Sequence: Synthetic oligonucleotide
  Sense strand starting at position 2408 of SEQ ID NO: 595
uaagccagaguucgugaau

SEQ ID NO: 49609 - RNA, 19 nt, Artificial Sequence
  Description of Artificial Sequence: Synthetic oligonucleotide
  Antisense strand to SEQ ID NO: 49528
auucacgaacucuggcuua

SEQ ID NO: 49610 - RNA, 19 nt, Artificial Sequence
  Description of Artificial Sequence: Synthetic oligonucleotide
  Sense strand starting at position 2409 of SEQ ID NO: 595
aagccagaguucgugaaug

SEQ ID NO: 49611 - RNA, 19 nt, Artificial Sequence
  Description of Artificial Sequence: Synthetic oligonucleotide
  Antisense strand to SEQ ID NO: 49530
cauucacgaacucuggcuu

SEQ ID NO: 49612 - RNA, 19 nt, Artificial Sequence
  Description of Artificial Sequence: Synthetic oligonucleotide
  Sense strand starting at position 2411 of SEQ ID NO: 595
gccagaguucgugaaugag

SEQ ID NO: 49613 - RNA, 19 nt, Artificial Sequence
  Description of Artificial Sequence: Synthetic oligonucleotide
  Antisense strand to SEQ ID NO: 49532
cucauucacgaacucuggc

SEQ ID NO: 49614 - RNA, 19 nt, Artificial Sequence
  Description of Artificial Sequence: Synthetic oligonucleotide
  Sense strand starting at position 2414 of SEQ ID NO: 595
agaguucgugaaugaguuu

SEQ ID NO: 49615 - RNA, 19 nt, Artificial Sequence
  Description of Artificial Sequence: Synthetic oligonucleotide
  Antisense strand to SEQ ID NO: 49534
aaacucauucacgaacucu

SEQ ID NO: 49616 - RNA, 19 nt, Artificial Sequence
  Description of Artificial Sequence: Synthetic oligonucleotide
  Sense strand starting at position 2709 of SEQ ID NO: 595
auaugagguguucaguuag

SEQ ID NO: 49617 - RNA, 19 nt, Artificial Sequence
  Description of Artificial Sequence: Synthetic oligonucleotide
  Antisense strand to SEQ ID NO: 49536
cuaacugaacaccucauau

SEQ ID NO: 49618 - RNA, 19 nt, Artificial Sequence
  Description of Artificial Sequence: Synthetic oligonucleotide
  Sense strand starting at position 2777 of SEQ ID NO: 595
ccagcagauuuccaaagga

SEQ ID NO: 49619 - RNA, 19 nt, Artificial Sequence
  Description of Artificial Sequence: Synthetic oligonucleotide
  Antisense strand to SEQ ID NO: 49538
uccuuuggaaaucugcugg

SEQ ID NO: 49620 - RNA, 19 nt, Artificial Sequence
  Description of Artificial Sequence: Synthetic oligonucleotide
  Sense strand starting at position 2824 of SEQ ID NO: 595
cugcauuuaugcguacuuu

SEQ ID NO: 49621 - RNA, 19 nt, Artificial Sequence
  Description of Artificial Sequence: Synthetic oligonucleotide
  Antisense strand to SEQ ID NO: 49540
aaaguacgcauaaaugcag

SEQ ID NO: 49622 - RNA, 19 nt, Artificial Sequence
  Description of Artificial Sequence: Synthetic oligonucleotide
  Sense strand starting at position 2891 of SEQ ID NO: 595
gucacacauaugugugaau

SEQ ID NO: 49623 - RNA, 19 nt, Artificial Sequence
  Description of Artificial Sequence: Synthetic oligonucleotide
  Antisense strand to SEQ ID NO: 49542
auucacacauaugugugac

SEQ ID NO: 49624 - RNA, 19 nt, Artificial Sequence
  Description of Artificial Sequence: Synthetic oligonucleotide
  Sense strand starting at position 2892 of SEQ ID NO: 595
ucacacauaugugugaaua

SEQ ID NO: 49625 - RNA, 19 nt, Artificial Sequence
  Description of Artificial Sequence: Synthetic oligonucleotide
  Antisense strand to SEQ ID NO: 49544
uauucacacauauguguga

SEQ ID NO: 49626 - RNA, 19 nt, Artificial Sequence
  Description of Artificial Sequence: Synthetic oligonucleotide
  Sense strand starting at position 2894 of SEQ ID NO: 595
acacauaugugugaauaaa

SEQ ID NO: 49627 - RNA, 19 nt, Artificial Sequence
  Description of Artificial Sequence: Synthetic oligonucleotide
  Antisense strand to SEQ ID NO: 49546
uuuauucacacauaugugu

SEQ ID NO: 49628 - RNA, 19 nt, Artificial Sequence
  Description of Artificial Sequence: Synthetic oligonucleotide
  Sense strand starting at position 3065 of SEQ ID NO: 595
gcucgcucgcgccuguaau

SEQ ID NO: 49629 - RNA, 19 nt, Artificial Sequence
  Description of Artificial Sequence: Synthetic oligonucleotide
  Antisense strand to SEQ ID NO: 49548
auuacaggcgcgagcgagc

SEQ ID NO: 49630 - RNA, 19 nt, Artificial Sequence
  Description of Artificial Sequence: Synthetic oligonucleotide
  Sense strand starting at position 3351 of SEQ ID NO: 595
acagaaaucuggcuggguu

SEQ ID NO: 49631 - RNA, 19 nt, Artificial Sequence
  Description of Artificial Sequence: Synthetic oligonucleotide
  Antisense strand to SEQ ID NO: 49550
aacccagccagauuucugu

SEQ ID NO: 49632 - RNA, 19 nt, Artificial Sequence
  Description of Artificial Sequence: Synthetic oligonucleotide
  Sense strand starting at position 3416 of SEQ ID NO: 595
gagaucacuugagucuaau

SEQ ID NO: 49633 - RNA, 19 nt, Artificial Sequence
  Description of Artificial Sequence: Synthetic oligonucleotide
  Antisense strand to SEQ ID NO: 49552
auuagacucaagugaucuc

SEQ ID NO: 49634 - RNA, 19 nt, Artificial Sequence
  Description of Artificial Sequence: Synthetic oligonucleotide
  Sense strand starting at position 3652 of SEQ ID NO: 595
acaagaucuugucugagua

SEQ ID NO: 49635 - RNA, 19 nt, Artificial Sequence
  Description of Artificial Sequence: Synthetic oligonucleotide
  Antisense strand to SEQ ID NO: 49554
uacucagacaagaucuugu

SEQ ID NO: 49636 - RNA, 19 nt, Artificial Sequence
  Description of Artificial Sequence: Synthetic oligonucleotide
  Sense strand starting at position 3653 of SEQ ID NO: 595
caagaucuugucugaguaa

SEQ ID NO: 49637 - RNA, 19 nt, Artificial Sequence
  Description of Artificial Sequence: Synthetic oligonucleotide
  Antisense strand to SEQ ID NO: 49556
uuacucagacaagaucuug

SEQ ID NO: 49638 - RNA, 19 nt, Artificial Sequence
  Description of Artificial Sequence: Synthetic oligonucleotide
  Sense strand starting at position 3654 of SEQ ID NO: 595
aagaucuugucugaguaaa

SEQ ID NO: 49639 - RNA, 19 nt, Artificial Sequence
  Description of Artificial Sequence: Synthetic oligonucleotide
  Antisense strand to SEQ ID NO: 49558
uuuacucagacaagaucuu

SEQ ID NO: 49640 - RNA, 19 nt, Artificial Sequence
  Description of Artificial Sequence: Synthetic oligonucleotide
  Sense strand starting at position 3656 of SEQ ID NO: 595
gaucuugucugaguaaaua

SEQ ID NO: 49641 - RNA, 19 nt, Artificial Sequence
  Description of Artificial Sequence: Synthetic oligonucleotide
  Antisense strand to SEQ ID NO: 49560
uauuuacucagacaagauc

SEQ ID NO: 49642 - RNA, 19 nt, Artificial Sequence
  Description of Artificial Sequence: Synthetic oligonucleotide
  Sense strand starting at position 3724 of SEQ ID NO: 595
cuccacuguccuggaauga

SEQ ID NO: 49643 - RNA, 19 nt, Artificial Sequence
  Description of Artificial Sequence: Synthetic oligonucleotide
  Antisense strand to SEQ ID NO: 49562
ucauuccaggacaguggag

SEQ ID NO: 49644 - RNA, 19 nt, Artificial Sequence
  Description of Artificial Sequence: Synthetic oligonucleotide
  Sense strand starting at position 3891 of SEQ ID NO: 595
ugucucuaucuggaacauu

SEQ ID NO: 49645 - RNA, 19 nt, Artificial Sequence
  Description of Artificial Sequence: Synthetic oligonucleotide
  Antisense strand to SEQ ID NO: 49564
aauguuccagauagagaca

SEQ ID NO: 49646 - RNA, 19 nt, Artificial Sequence
  Description of Artificial Sequence: Synthetic oligonucleotide
  Sense strand starting at position 91 of SEQ ID NO: 598
agaggcuuaaucugcugau

SEQ ID NO: 49647 - RNA, 19 nt, Artificial Sequence
  Description of Artificial Sequence: Synthetic oligonucleotide
  Antisense strand to SEQ ID NO: 49566
aucagcagauuaagccucu

SEQ ID NO: 49648 - RNA, 19 nt, Artificial Sequence
  Description of Artificial Sequence: Synthetic oligonucleotide
  Sense strand starting at position 92 of SEQ ID NO: 598
gaggcuuaaucugcugauc

SEQ ID NO: 49649 - RNA, 19 nt, Artificial Sequence
  Description of Artificial Sequence: Synthetic oligonucleotide
  Antisense strand to SEQ ID NO: 49568
gaucagcagauuaagccuc

SEQ ID NO: 49650 - RNA, 19 nt, Artificial Sequence
  Description of Artificial Sequence: Synthetic oligonucleotide
  Sense strand starting at position 95 of SEQ ID NO: 598
gcuuaaucugcugauccuu

SEQ ID NO: 49651 - RNA, 19 nt, Artificial Sequence
  Description of Artificial Sequence: Synthetic oligonucleotide
  Antisense strand to SEQ ID NO: 49570
aaggaucagcagauuaagc

SEQ ID NO: 49652 - RNA, 19 nt, Artificial Sequence
  Description of Artificial Sequence: Synthetic oligonucleotide
  Sense strand starting at position 236 of SEQ ID NO: 598
agagccagugauuaccuaa

SEQ ID NO: 49653 - RNA, 19 nt, Artificial Sequence
  Description of Artificial Sequence: Synthetic oligonucleotide
  Antisense strand to SEQ ID NO: 49572
uuagguaaucacuggcucu

SEQ ID NO: 49654 - RNA, 19 nt, Artificial Sequence
  Description of Artificial Sequence: Synthetic oligonucleotide
  Sense strand starting at position 246 of SEQ ID NO: 598
auuaccuaaugguugagaa

SEQ ID NO: 49655 - RNA, 19 nt, Artificial Sequence
  Description of Artificial Sequence: Synthetic oligonucleotide
  Antisense strand to SEQ ID NO: 49574
uucucaaccauuagguaau

SEQ ID NO: 49656 - RNA, 19 nt, Artificial Sequence
  Description of Artificial Sequence: Synthetic oligonucleotide
  Sense strand starting at position 247 of SEQ ID NO: 598
uuaccuaaugguugagaac

SEQ ID NO: 49657 - RNA, 19 nt, Artificial Sequence
  Description of Artificial Sequence: Synthetic oligonucleotide
  Antisense strand to SEQ ID NO: 49576
guucucaaccauuagguaa

SEQ ID NO: 49658 - RNA, 19 nt, Artificial Sequence
  Description of Artificial Sequence: Synthetic oligonucleotide
  Sense strand starting at position 368 of SEQ ID NO: 598
uugccaguuggguagugaa

SEQ ID NO: 49659 - RNA, 19 nt, Artificial Sequence
  Description of Artificial Sequence: Synthetic oligonucleotide
  Antisense strand to SEQ ID NO: 49578
uucacuacccaacuggcaa

SEQ ID NO: 49660 - RNA, 19 nt, Artificial Sequence
  Description of Artificial Sequence: Synthetic oligonucleotide
  Sense strand starting at position 376 of SEQ ID NO: 598
uggguagugaacuaagcau

SEQ ID NO: 49661 - RNA, 19 nt, Artificial Sequence
  Description of Artificial Sequence: Synthetic oligonucleotide
  Antisense strand to SEQ ID NO: 49580
augcuuaguucacuaccca

SEQ ID NO: 49662 - RNA, 19 nt, Artificial Sequence
  Description of Artificial Sequence: Synthetic oligonucleotide
  Sense strand starting at position 382 of SEQ ID NO: 598
gugaacuaagcaugagauu

SEQ ID NO: 49663 - RNA, 19 nt, Artificial Sequence
  Description of Artificial Sequence: Synthetic oligonucleotide
  Antisense strand to SEQ ID NO: 49582
aaucucaugcuuaguucac

SEQ ID NO: 49664 - RNA, 19 nt, Artificial Sequence
  Description of Artificial Sequence: Synthetic oligonucleotide
  Sense strand starting at position 403 of SEQ ID NO: 598
ggguauaagguucagcaau

SEQ ID NO: 49665 - RNA, 19 nt, Artificial Sequence
  Description of Artificial Sequence: Synthetic oligonucleotide
  Antisense strand to SEQ ID NO: 49584
auugcugaaccuuauaccc

SEQ ID NO: 49666 - RNA, 19 nt, Artificial Sequence
  Description of Artificial Sequence: Synthetic oligonucleotide
  Sense strand starting at position 434 of SEQ ID NO: 598
aggaaauucucaccaagug

SEQ ID NO: 49667 - RNA, 19 nt, Artificial Sequence
  Description of Artificial Sequence: Synthetic oligonucleotide
  Antisense strand to SEQ ID NO: 49586
cacuuggugagaauuuccu

SEQ ID NO: 49668 - RNA, 19 nt, Artificial Sequence
  Description of Artificial Sequence: Synthetic oligonucleotide
  Sense strand starting at position 650 of SEQ ID NO: 598
gcaagaagccacugaaaca

SEQ ID NO: 49669 - RNA, 19 nt, Artificial Sequence
  Description of Artificial Sequence: Synthetic oligonucleotide
  Antisense strand to SEQ ID NO: 49588
uguuucaguggcuucuugc

SEQ ID NO: 49670 - RNA, 19 nt, Artificial Sequence
  Description of Artificial Sequence: Synthetic oligonucleotide
  Sense strand starting at position 907 of SEQ ID NO: 598
ccaccuauggcuggaauua

SEQ ID NO: 49671 - RNA, 19 nt, Artificial Sequence
  Description of Artificial Sequence: Synthetic oligonucleotide
  Antisense strand to SEQ ID NO: 49590
uaauuccagccauaggugg

SEQ ID NO: 49672 - RNA, 19 nt, Artificial Sequence
  Description of Artificial Sequence: Synthetic oligonucleotide
  Sense strand starting at position 992 of SEQ ID NO: 598
caacgaaauguacaguaca

SEQ ID NO: 49673 - RNA, 19 nt, Artificial Sequence
  Description of Artificial Sequence: Synthetic oligonucleotide
  Antisense strand to SEQ ID NO: 49592
uguacuguacauuucguug

SEQ ID NO: 49674 - RNA, 19 nt, Artificial Sequence
  Description of Artificial Sequence: Synthetic oligonucleotide
  Sense strand starting at position 995 of SEQ ID NO: 598
cgaaauguacaguacaaug

SEQ ID NO: 49675 - RNA, 19 nt, Artificial Sequence
  Description of Artificial Sequence: Synthetic oligonucleotide
  Antisense strand to SEQ ID NO: 49594
cauuguacuguacauuucg

SEQ ID NO: 49676 - RNA, 19 nt, Artificial Sequence
  Description of Artificial Sequence: Synthetic oligonucleotide
  Sense strand starting at position 1011 of SEQ ID NO: 598
augccaucuguguaucaaa

SEQ ID NO: 49677 - RNA, 19 nt, Artificial Sequence
  Description of Artificial Sequence: Synthetic oligonucleotide
  Antisense strand to SEQ ID NO: 49596
uuugauacacagauggcau

SEQ ID NO: 49678 - RNA, 19 nt, Artificial Sequence
  Description of Artificial Sequence: Synthetic oligonucleotide
  Sense strand starting at position 1018 of SEQ ID NO: 598
cuguguaucaaaugcagga

SEQ ID NO: 49679 - RNA, 19 nt, Artificial Sequence
  Description of Artificial Sequence: Synthetic oligonucleotide
  Antisense strand to SEQ ID NO: 49598
uccugcauuugauacacag

SEQ ID NO: 49680 - RNA, 19 nt, Artificial Sequence
  Description of Artificial Sequence: Synthetic oligonucleotide
  Sense strand starting at position 1128 of SEQ ID NO: 598
accacugaaugcuccagaa

SEQ ID NO: 49681 - RNA, 19 nt, Artificial Sequence
  Description of Artificial Sequence: Synthetic oligonucleotide
  Antisense strand to SEQ ID NO: 49600
uucuggagcauucaguggu

SEQ ID NO: 49682 - RNA, 19 nt, Artificial Sequence
  Description of Artificial Sequence: Synthetic oligonucleotide
  Sense strand starting at position 1130 of SEQ ID NO: 598
cacugaaugcuccagaagu

SEQ ID NO: 49683 - RNA, 19 nt, Artificial Sequence
  Description of Artificial Sequence: Synthetic oligonucleotide
  Antisense strand to SEQ ID NO: 49602
acuucuggagcauucagug

SEQ ID NO: 49684 - RNA, 19 nt, Artificial Sequence
  Description of Artificial Sequence: Synthetic oligonucleotide
  Sense strand starting at position 1132 of SEQ ID NO: 598
cugaaugcuccagaaguuc

SEQ ID NO: 49685 - RNA, 19 nt, Artificial Sequence
  Description of Artificial Sequence: Synthetic oligonucleotide
  Antisense strand to SEQ ID NO: 49604
gaacuucuggagcauucag

SEQ ID NO: 49686 - RNA, 19 nt, Artificial Sequence
  Description of Artificial Sequence: Synthetic oligonucleotide
  Sense strand starting at position 1249 of SEQ ID NO: 598
auccuugaucuuggccaaa

SEQ ID NO: 49687 - RNA, 19 nt, Artificial Sequence
  Description of Artificial Sequence: Synthetic oligonucleotide
  Antisense strand to SEQ ID NO: 49606
uuuggccaagaucaaggau

SEQ ID NO: 49688 - RNA, 19 nt, Artificial Sequence
  Description of Artificial Sequence: Synthetic oligonucleotide
  Sense strand starting at position 1271 of SEQ ID NO: 598
cggagaaacagcgaacuuu

SEQ ID NO: 49689 - RNA, 19 nt, Artificial Sequence
  Description of Artificial Sequence: Synthetic oligonucleotide
  Antisense strand to SEQ ID NO: 49608
aaaguucgcuguuucuccg

SEQ ID NO: 49690 - RNA, 19 nt, Artificial Sequence
  Description of Artificial Sequence: Synthetic oligonucleotide
  Sense strand starting at position 2087 of SEQ ID NO: 598
cagcuccucugugugauuu

SEQ ID NO: 49691 - RNA, 19 nt, Artificial Sequence
  Description of Artificial Sequence: Synthetic oligonucleotide
  Antisense strand to SEQ ID NO: 49610
aaaucacacagaggagcug

SEQ ID NO: 49692 - RNA, 19 nt, Artificial Sequence
  Description of Artificial Sequence: Synthetic oligonucleotide
  Sense strand starting at position 2093 of SEQ ID NO: 598
cucugugugauuuggugua

SEQ ID NO: 49693 - RNA, 19 nt, Artificial Sequence
  Description of Artificial Sequence: Synthetic oligonucleotide
  Antisense strand to SEQ ID NO: 49612
uacaccaaaucacacagag

SEQ ID NO: 49694 - RNA, 19 nt, Artificial Sequence
  Description of Artificial Sequence: Synthetic oligonucleotide
  Sense strand starting at position 2095 of SEQ ID NO: 598
cugugugauuugguguaac

SEQ ID NO: 49695 - RNA, 19 nt, Artificial Sequence
  Description of Artificial Sequence: Synthetic oligonucleotide
  Antisense strand to SEQ ID NO: 49614
guuacaccaaaucacacag

SEQ ID NO: 49696 - RNA, 19 nt, Artificial Sequence
  Description of Artificial Sequence: Synthetic oligonucleotide
  Sense strand starting at position 2272 of SEQ ID NO: 598
gcgugucuacacuugcgaa

SEQ ID NO: 49697 - RNA, 19 nt, Artificial Sequence
  Description of Artificial Sequence: Synthetic oligonucleotide
  Antisense strand to SEQ ID NO: 49616
uucgcaaguguagacacgc

SEQ ID NO: 49698 - RNA, 19 nt, Artificial Sequence
  Description of Artificial Sequence: Synthetic oligonucleotide
  Sense strand starting at position 2519 of SEQ ID NO: 598
aggguuucaccaugacgaa

SEQ ID NO: 49699 - RNA, 19 nt, Artificial Sequence
  Description of Artificial Sequence: Synthetic oligonucleotide
  Antisense strand to SEQ ID NO: 49618
uucgucauggugaaacccu

SEQ ID NO: 49700 - RNA, 19 nt, Artificial Sequence
  Description of Artificial Sequence: Synthetic oligonucleotide
  Sense strand starting at position 2768 of SEQ ID NO: 598
ugaugugaaugucuuuaaa

SEQ ID NO: 49701 - RNA, 19 nt, Artificial Sequence
  Description of Artificial Sequence: Synthetic oligonucleotide
  Antisense strand to SEQ ID NO: 49620
uuuaaagacauucacauca

SEQ ID NO: 49702 - RNA, 19 nt, Artificial Sequence
  Description of Artificial Sequence: Synthetic oligonucleotide
  Sense strand starting at position 2770 of SEQ ID NO: 598
augugaaugucuuuaaaug

SEQ ID NO: 49703 - RNA, 19 nt, Artificial Sequence
  Description of Artificial Sequence: Synthetic oligonucleotide
  Antisense strand to SEQ ID NO: 49622
cauuuaaagacauucacau

SEQ ID NO: 49704 - RNA, 19 nt, Artificial Sequence
  Description of Artificial Sequence: Synthetic oligonucleotide
  Sense strand starting at position 2771 of SEQ ID NO: 598
ugugaaugucuuuaaauga

SEQ ID NO: 49705 - RNA, 19 nt, Artificial Sequence
  Description of Artificial Sequence: Synthetic oligonucleotide
  Antisense strand to SEQ ID NO: 49624
ucauuuaaagacauucaca

SEQ ID NO: 49706 - RNA, 19 nt, Artificial Sequence
  Description of Artificial Sequence: Synthetic oligonucleotide
  Sense strand starting at position 3030 of SEQ ID NO: 598
augucacauggcgagaaua

SEQ ID NO: 49707 - RNA, 19 nt, Artificial Sequence
  Description of Artificial Sequence: Synthetic oligonucleotide
  Antisense strand to SEQ ID NO: 49626
uauucucgccaugugacau

SEQ ID NO: 49708 - RNA, 19 nt, Artificial Sequence
  Description of Artificial Sequence: Synthetic oligonucleotide
  Sense strand starting at position 3184 of SEQ ID NO: 598
acgugagauuuggagggau

SEQ ID NO: 49709 - RNA, 19 nt, Artificial Sequence
  Description of Artificial Sequence: Synthetic oligonucleotide
  Antisense strand to SEQ ID NO: 49628
aucccuccaaaucucacgu

SEQ ID NO: 49710 - RNA, 19 nt, Artificial Sequence
  Description of Artificial Sequence: Synthetic oligonucleotide
  Sense strand starting at position 3238 of SEQ ID NO: 598
ucaauagaggguugguuaa

SEQ ID NO: 49711 - RNA, 19 nt, Artificial Sequence
  Description of Artificial Sequence: Synthetic oligonucleotide
  Antisense strand to SEQ ID NO: 49630
uuaaccaacccucuauuga

SEQ ID NO: 49712 - RNA, 19 nt, Artificial Sequence
  Description of Artificial Sequence: Synthetic oligonucleotide
  Sense strand starting at position 3278 of SEQ ID NO: 598
gguggcucacccuauuauu

SEQ ID NO: 49713 - RNA, 19 nt, Artificial Sequence
  Description of Artificial Sequence: Synthetic oligonucleotide
  Antisense strand to SEQ ID NO: 49632
aauaauagggugagccacc

SEQ ID NO: 49714 - RNA, 19 nt, Artificial Sequence
  Description of Artificial Sequence: Synthetic oligonucleotide
  Sense strand starting at position 3415 of SEQ ID NO: 598
ucugaauacuaugcagcua

SEQ ID NO: 49715 - RNA, 19 nt, Artificial Sequence
  Description of Artificial Sequence: Synthetic oligonucleotide
  Antisense strand to SEQ ID NO: 49634
uagcugcauaguauucaga

SEQ ID NO: 49716 - RNA, 19 nt, Artificial Sequence
  Description of Artificial Sequence: Synthetic oligonucleotide
  Sense strand starting at position 3443 of SEQ ID NO: 598
acaggaaacuguuuaugca

SEQ ID NO: 49717 - RNA, 19 nt, Artificial Sequence
  Description of Artificial Sequence: Synthetic oligonucleotide
  Antisense strand to SEQ ID NO: 49636
ugcauaaacaguuuccugu

SEQ ID NO: 49718 - RNA, 19 nt, Artificial Sequence
  Description of Artificial Sequence: Synthetic oligonucleotide
  Sense strand starting at position 3444 of SEQ ID NO: 598
caggaaacuguuuaugcau

SEQ ID NO: 49719 - RNA, 19 nt, Artificial Sequence
  Description of Artificial Sequence: Synthetic oligonucleotide
  Antisense strand to SEQ ID NO: 49638
augcauaaacaguuuccug

SEQ ID NO: 49720 - RNA, 19 nt, Artificial Sequence
  Description of Artificial Sequence: Synthetic oligonucleotide
  Sense strand starting at position 3447 of SEQ ID NO: 598
gaaacuguuuaugcauuga

SEQ ID NO: 49721 - RNA, 19 nt, Artificial Sequence
  Description of Artificial Sequence: Synthetic oligonucleotide
  Antisense strand to SEQ ID NO: 49640
ucaaugcauaaacaguuuc

SEQ ID NO: 49722 - RNA, 19 nt, Artificial Sequence
  Description of Artificial Sequence: Synthetic oligonucleotide
  Sense strand starting at position 3705 of SEQ ID NO: 598
gggauaagaguaugcaugu

SEQ ID NO: 49723 - RNA, 19 nt, Artificial Sequence
  Description of Artificial Sequence: Synthetic oligonucleotide
  Antisense strand to SEQ ID NO: 49642
acaugcauacucuuauccc

SEQ ID NO: 49724 - RNA, 19 nt, Artificial Sequence
  Description of Artificial Sequence: Synthetic oligonucleotide
  Sense strand starting at position 3962 of SEQ ID NO: 598
agguacaugccacaacauu

SEQ ID NO: 49725 - RNA, 19 nt, Artificial Sequence
  Description of Artificial Sequence: Synthetic oligonucleotide
  Antisense strand to SEQ ID NO: 49644
aauguuguggcauguaccu

SEQ ID NO: 49726 - RNA, 19 nt, Artificial Sequence
  Description of Artificial Sequence: Synthetic oligonucleotide
  Sense strand starting at position 3962 of SEQ ID NO: 599
ugauuccaucuaggucuaa

SEQ ID NO: 49727 - RNA, 19 nt, Artificial Sequence
  Description of Artificial Sequence: Synthetic oligonucleotide
  Antisense strand to SEQ ID NO: 49646
uuagaccuagauggaauca

SEQ ID NO: 49728 - RNA, 19 nt, Artificial Sequence
  Description of Artificial Sequence: Synthetic oligonucleotide
  Sense strand starting at position 3858 of SEQ ID NO: 599
gcuccucaccuuugagaua

SEQ ID NO: 49729 - RNA, 19 nt, Artificial Sequence
  Description of Artificial Sequence: Synthetic oligonucleotide
  Antisense strand to SEQ ID NO: 49648
uaucucaaaggugaggagc

SEQ ID NO: 49730 - RNA, 19 nt, Artificial Sequence
  Description of Artificial Sequence: Synthetic oligonucleotide
  Sense strand starting at position 3835 of SEQ ID NO: 599
gguaaucuggcugaggagu

SEQ ID NO: 49731 - RNA, 19 nt, Artificial Sequence
  Description of Artificial Sequence: Synthetic oligonucleotide
  Antisense strand to SEQ ID NO: 49650
acuccucagccagauuacc

SEQ ID NO: 49732 - RNA, 19 nt, Artificial Sequence
  Description of Artificial Sequence: Synthetic oligonucleotide
  Sense strand starting at position 3834 of SEQ ID NO: 599
agguaaucuggcugaggag

SEQ ID NO: 49733 - RNA, 19 nt, Artificial Sequence
  Description of Artificial Sequence: Synthetic oligonucleotide
  Antisense strand to SEQ ID NO: 49652
cuccucagccagauuaccu

SEQ ID NO: 49734 - RNA, 19 nt, Artificial Sequence
  Description of Artificial Sequence: Synthetic oligonucleotide
  Sense strand starting at position 3833 of SEQ ID NO: 599
cagguaaucuggcugagga

SEQ ID NO: 49735 - RNA, 19 nt, Artificial Sequence
  Description of Artificial Sequence: Synthetic oligonucleotide
  Antisense strand to SEQ ID NO: 49654
uccucagccagauuaccug

SEQ ID NO: 49736 - RNA, 19 nt, Artificial Sequence
  Description of Artificial Sequence: Synthetic oligonucleotide
  Sense strand starting at position 3823 of SEQ ID NO: 599
acucaagaaucagguaauc

SEQ ID NO: 49737 - RNA, 19 nt, Artificial Sequence
  Description of Artificial Sequence: Synthetic oligonucleotide
  Antisense strand to SEQ ID NO: 49656
gauuaccugauucuugagu

SEQ ID NO: 49738 - RNA, 19 nt, Artificial Sequence
  Description of Artificial Sequence: Synthetic oligonucleotide
  Sense strand starting at position 3757 of SEQ ID NO: 599
guacaagucccugggauug

SEQ ID NO: 49739 - RNA, 19 nt, Artificial Sequence
  Description of Artificial Sequence: Synthetic oligonucleotide
  Antisense strand to SEQ ID NO: 49658
caaucccagggacuuguac

SEQ ID NO: 49740 - RNA, 19 nt, Artificial Sequence
  Description of Artificial Sequence: Synthetic oligonucleotide
  Sense strand starting at position 3756 of SEQ ID NO: 599
uguacaagucccugggauu

SEQ ID NO: 49741 - RNA, 19 nt, Artificial Sequence
  Description of Artificial Sequence: Synthetic oligonucleotide
  Antisense strand to SEQ ID NO: 49660
aaucccagggacuuguaca

SEQ ID NO: 49742 - RNA, 19 nt, Artificial Sequence
  Description of Artificial Sequence: Synthetic oligonucleotide
  Sense strand starting at position 3665 of SEQ ID NO: 599
ucuguuagggcuggauuca

SEQ ID NO: 49743 - RNA, 19 nt, Artificial Sequence
  Description of Artificial Sequence: Synthetic oligonucleotide
  Antisense strand to SEQ ID NO: 49662
ugaauccagcccuaacaga

SEQ ID NO: 49744 - RNA, 19 nt, Artificial Sequence
  Description of Artificial Sequence: Synthetic oligonucleotide
  Sense strand starting at position 3432 of SEQ ID NO: 599
gugugucagagacauuaga

SEQ ID NO: 49745 - RNA, 19 nt, Artificial Sequence
  Description of Artificial Sequence: Synthetic oligonucleotide
  Antisense strand to SEQ ID NO: 49664
ucuaaugucucugacacac

SEQ ID NO: 49746 - RNA, 19 nt, Artificial Sequence
  Description of Artificial Sequence: Synthetic oligonucleotide
  Sense strand starting at position 3315 of SEQ ID NO: 599
gccuuaucgcuucugguca

SEQ ID NO: 49747 - RNA, 19 nt, Artificial Sequence
  Description of Artificial Sequence: Synthetic oligonucleotide
  Antisense strand to SEQ ID NO: 49666
ugaccagaagcgauaaggc

SEQ ID NO: 49748 - RNA, 19 nt, Artificial Sequence
  Description of Artificial Sequence: Synthetic oligonucleotide
  Sense strand starting at position 3247 of SEQ ID NO: 599
gucugcuaauacuaaauga

SEQ ID NO: 49749 - RNA, 19 nt, Artificial Sequence
  Description of Artificial Sequence: Synthetic oligonucleotide
  Antisense strand to SEQ ID NO: 49668
ucauuuaguauuagcagac

SEQ ID NO: 49750 - RNA, 19 nt, Artificial Sequence
  Description of Artificial Sequence: Synthetic oligonucleotide
  Sense strand starting at position 3239 of SEQ ID NO: 599
ucagcugugucugcuaaua

SEQ ID NO: 49751 - RNA, 19 nt, Artificial Sequence
  Description of Artificial Sequence: Synthetic oligonucleotide
  Antisense strand to SEQ ID NO: 49670
uauuagcagacacagcuga

SEQ ID NO: 49752 - RNA, 19 nt, Artificial Sequence
  Description of Artificial Sequence: Synthetic oligonucleotide
  Sense strand starting at position 3200 of SEQ ID NO: 599
gggagcagagcccagauau

SEQ ID NO: 49753 - RNA, 19 nt, Artificial Sequence
  Description of Artificial Sequence: Synthetic oligonucleotide
  Antisense strand to SEQ ID NO: 49672
auaucugggcucugcuccc

SEQ ID NO: 49754 - RNA, 19 nt, Artificial Sequence
  Description of Artificial Sequence: Synthetic oligonucleotide
  Sense strand starting at position 3161 of SEQ ID NO: 599
ucugcagaaacuugagaga

SEQ ID NO: 49755 - RNA, 19 nt, Artificial Sequence
  Description of Artificial Sequence: Synthetic oligonucleotide
  Antisense strand to SEQ ID NO: 49674
ucucucaaguuucugcaga

SEQ ID NO: 49756 - RNA, 19 nt, Artificial Sequence
  Description of Artificial Sequence: Synthetic oligonucleotide
  Sense strand starting at position 2373 of SEQ ID NO: 599
ucuccagagucagagauga

SEQ ID NO: 49757 - RNA, 19 nt, Artificial Sequence
  Description of Artificial Sequence: Synthetic oligonucleotide
  Antisense strand to SEQ ID NO: 49676
ucaucucugacucuggaga

SEQ ID NO: 49758 - RNA, 19 nt, Artificial Sequence
  Description of Artificial Sequence: Synthetic oligonucleotide
  Sense strand starting at position 2316 of SEQ ID NO: 599
ccuaacucucugggacaaa

SEQ ID NO: 49759 - RNA, 19 nt, Artificial Sequence
  Description of Artificial Sequence: Synthetic oligonucleotide
  Antisense strand to SEQ ID NO: 49678
uuugucccagagaguuagg

SEQ ID NO: 49760 - RNA, 19 nt, Artificial Sequence
  Description of Artificial Sequence: Synthetic oligonucleotide
  Sense strand starting at position 2315 of SEQ ID NO: 599
cccuaacucucugggacaa

SEQ ID NO: 49761 - RNA, 19 nt, Artificial Sequence
  Description of Artificial Sequence: Synthetic oligonucleotide
  Antisense strand to SEQ ID NO: 49680
uugucccagagaguuaggg

SEQ ID NO: 49762 - RNA, 19 nt, Artificial Sequence
  Description of Artificial Sequence: Synthetic oligonucleotide
  Sense strand starting at position 2314 of SEQ ID NO: 599
ucccuaacucucugggaca

SEQ ID NO: 49763 - RNA, 19 nt, Artificial Sequence
  Description of Artificial Sequence: Synthetic oligonucleotide
  Antisense strand to SEQ ID NO: 49682
ugucccagagaguuaggga

SEQ ID NO: 49764 - RNA, 19 nt, Artificial Sequence
  Description of Artificial Sequence: Synthetic oligonucleotide
  Sense strand starting at position 2139 of SEQ ID NO: 599
cuaguuugugccucaguuu

SEQ ID NO: 49765 - RNA, 19 nt, Artificial Sequence
  Description of Artificial Sequence: Synthetic oligonucleotide
  Antisense strand to SEQ ID NO: 49684
aaacugaggcacaaacuag

SEQ ID NO: 49766 - RNA, 19 nt, Artificial Sequence
  Description of Artificial Sequence: Synthetic oligonucleotide
  Sense strand starting at position 2138 of SEQ ID NO: 599
ccuaguuugugccucaguu

SEQ ID NO: 49767 - RNA, 19 nt, Artificial Sequence
  Description of Artificial Sequence: Synthetic oligonucleotide
  Antisense strand to SEQ ID NO: 49686
aacugaggcacaaacuagg

SEQ ID NO: 49768 - RNA, 19 nt, Artificial Sequence
  Description of Artificial Sequence: Synthetic oligonucleotide
  Sense strand starting at position 2070 of SEQ ID NO: 599
ggagaacauucuuaugacc

SEQ ID NO: 49769 - RNA, 19 nt, Artificial Sequence
  Description of Artificial Sequence: Synthetic oligonucleotide
  Antisense strand to SEQ ID NO: 49688
ggucauaagaauguucucc

SEQ ID NO: 49770 - RNA, 19 nt, Artificial Sequence
  Description of Artificial Sequence: Synthetic oligonucleotide
  Sense strand starting at position 2047 of SEQ ID NO: 599
ugagaagaaugggacugau

SEQ ID NO: 49771 - RNA, 19 nt, Artificial Sequence
  Description of Artificial Sequence: Synthetic oligonucleotide
  Antisense strand to SEQ ID NO: 49690
aucagucccauucuucuca

SEQ ID NO: 49772 - RNA, 19 nt, Artificial Sequence
  Description of Artificial Sequence: Synthetic oligonucleotide
  Sense strand starting at position 2029 of SEQ ID NO: 599
gaagccuccucagaggauu

SEQ ID NO: 49773 - RNA, 19 nt, Artificial Sequence
  Description of Artificial Sequence: Synthetic oligonucleotide
  Antisense strand to SEQ ID NO: 49692
aauccucugaggaggcuuc

SEQ ID NO: 49774 - RNA, 19 nt, Artificial Sequence
  Description of Artificial Sequence: Synthetic oligonucleotide
  Sense strand starting at position 1635 of SEQ ID NO: 599
gaaucacucugcuagugau

SEQ ID NO: 49775 - RNA, 19 nt, Artificial Sequence
  Description of Artificial Sequence: Synthetic oligonucleotide
  Antisense strand to SEQ ID NO: 49694
aucacuagcagagugauuc

SEQ ID NO: 49776 - RNA, 19 nt, Artificial Sequence
  Description of Artificial Sequence: Synthetic oligonucleotide
  Sense strand starting at position 1633 of SEQ ID NO: 599
gagaaucacucugcuagug

SEQ ID NO: 49777 - RNA, 19 nt, Artificial Sequence
  Description of Artificial Sequence: Synthetic oligonucleotide
  Antisense strand to SEQ ID NO: 49696
cacuagcagagugauucuc

SEQ ID NO: 49778 - RNA, 19 nt, Artificial Sequence
  Description of Artificial Sequence: Synthetic oligonucleotide
  Sense strand starting at position 1632 of SEQ ID NO: 599
ggagaaucacucugcuagu

SEQ ID NO: 49779 - RNA, 19 nt, Artificial Sequence
  Description of Artificial Sequence: Synthetic oligonucleotide
  Antisense strand to SEQ ID NO: 49698
acuagcagagugauucucc

SEQ ID NO: 49780 - RNA, 19 nt, Artificial Sequence
  Description of Artificial Sequence: Synthetic oligonucleotide
  Sense strand starting at position 1478 of SEQ ID NO: 599
cccacucaguugucuauuu

SEQ ID NO: 49781 - RNA, 19 nt, Artificial Sequence
  Description of Artificial Sequence: Synthetic oligonucleotide
  Antisense strand to SEQ ID NO: 49700
aaauagacaacugaguggg

SEQ ID NO: 49782 - RNA, 19 nt, Artificial Sequence
  Description of Artificial Sequence: Synthetic oligonucleotide
  Sense strand starting at position 1274 of SEQ ID NO: 599
gaauguguuugugcuggau

SEQ ID NO: 49783 - RNA, 19 nt, Artificial Sequence
  Description of Artificial Sequence: Synthetic oligonucleotide
  Antisense strand to SEQ ID NO: 49702
auccagcacaaacacauuc

SEQ ID NO: 49784 - RNA, 19 nt, Artificial Sequence
  Description of Artificial Sequence: Synthetic oligonucleotide
  Sense strand starting at position 1267 of SEQ ID NO: 599
agauaaagaauguguuugu

SEQ ID NO: 49785 - RNA, 19 nt, Artificial Sequence
  Description of Artificial Sequence: Synthetic oligonucleotide
  Antisense strand to SEQ ID NO: 49704
acaaacacauucuuuaucu

SEQ ID NO: 49786 - RNA, 19 nt, Artificial Sequence
  Description of Artificial Sequence: Synthetic oligonucleotide
  Sense strand starting at position 1216 of SEQ ID NO: 599
aguuuccacccauagcauu

SEQ ID NO: 49787 - RNA, 19 nt, Artificial Sequence
  Description of Artificial Sequence: Synthetic oligonucleotide
  Antisense strand to SEQ ID NO: 49706
aaugcuauggguggaaacu

SEQ ID NO: 49788 - RNA, 19 nt, Artificial Sequence
  Description of Artificial Sequence: Synthetic oligonucleotide
  Sense strand starting at position 1002 of SEQ ID NO: 599
gccuuaguuuaggucucaa

SEQ ID NO: 49789 - RNA, 19 nt, Artificial Sequence
  Description of Artificial Sequence: Synthetic oligonucleotide
  Antisense strand to SEQ ID NO: 49708
uugagaccuaaacuaaggc

SEQ ID NO: 49790 - RNA, 19 nt, Artificial Sequence
  Description of Artificial Sequence: Synthetic oligonucleotide
  Sense strand starting at position 994 of SEQ ID NO: 599
ucagcuccgccuuaguuua

SEQ ID NO: 49791 - RNA, 19 nt, Artificial Sequence
  Description of Artificial Sequence: Synthetic oligonucleotide
  Antisense strand to SEQ ID NO: 49710
uaaacuaaggcggagcuga

SEQ ID NO: 49792 - RNA, 19 nt, Artificial Sequence
  Description of Artificial Sequence: Synthetic oligonucleotide
  Sense strand starting at position 934 of SEQ ID NO: 599
ucuuuaggccuuugguuaa

SEQ ID NO: 49793 - RNA, 19 nt, Artificial Sequence
  Description of Artificial Sequence: Synthetic oligonucleotide
  Antisense strand to SEQ ID NO: 49712
uuaaccaaaggccuaaaga

SEQ ID NO: 49794 - RNA, 19 nt, Artificial Sequence
  Description of Artificial Sequence: Synthetic oligonucleotide
  Sense strand starting at position 768 of SEQ ID NO: 599
ccucauuuccucugccagu

SEQ ID NO: 49795 - RNA, 19 nt, Artificial Sequence
  Description of Artificial Sequence: Synthetic oligonucleotide
  Antisense strand to SEQ ID NO: 49714
acuggcagaggaaaugagg

SEQ ID NO: 49796 - RNA, 19 nt, Artificial Sequence
  Description of Artificial Sequence: Synthetic oligonucleotide
  Sense strand starting at position 737 of SEQ ID NO: 599
gaguauggcauacgggauu

SEQ ID NO: 49797 - RNA, 19 nt, Artificial Sequence
  Description of Artificial Sequence: Synthetic oligonucleotide
  Antisense strand to SEQ ID NO: 49716
aaucccguaugccauacuc

SEQ ID NO: 49798 - RNA, 19 nt, Artificial Sequence
  Description of Artificial Sequence: Synthetic oligonucleotide
  Sense strand starting at position 735 of SEQ ID NO: 599
gggaguauggcauacggga

SEQ ID NO: 49799 - RNA, 19 nt, Artificial Sequence
  Description of Artificial Sequence: Synthetic oligonucleotide
  Antisense strand to SEQ ID NO: 49718
ucccguaugccauacuccc

SEQ ID NO: 49800 - RNA, 19 nt, Artificial Sequence
  Description of Artificial Sequence: Synthetic oligonucleotide
  Sense strand starting at position 692 of SEQ ID NO: 599
gucugauagcuccaccucu

SEQ ID NO: 49801 - RNA, 19 nt, Artificial Sequence
  Description of Artificial Sequence: Synthetic oligonucleotide
  Antisense strand to SEQ ID NO: 49720
agagguggagcuaucagac

SEQ ID NO: 49802 - RNA, 19 nt, Artificial Sequence
  Description of Artificial Sequence: Synthetic oligonucleotide
  Sense strand starting at position 554 of SEQ ID NO: 599
uguggagaucaagagugua

SEQ ID NO: 49803 - RNA, 19 nt, Artificial Sequence
  Description of Artificial Sequence: Synthetic oligonucleotide
  Antisense strand to SEQ ID NO: 49722
uacacucuugaucuccaca

SEQ ID NO: 49804 - RNA, 19 nt, Artificial Sequence
  Description of Artificial Sequence: Synthetic oligonucleotide
  Sense strand starting at position 551 of SEQ ID NO: 599
ggcuguggagaucaagagu

SEQ ID NO: 49805 - RNA, 19 nt, Artificial Sequence
  Description of Artificial Sequence: Synthetic oligonucleotide
  Antisense strand to SEQ ID NO: 49724
acucuugaucuccacagcc

SEQ ID NO: 49806 - RNA, 19 nt, Artificial Sequence
  Description of Artificial Sequence: Synthetic oligonucleotide
  Sense strand starting at position 3672 of SEQ ID NO: 601
uuugcuguccaagaguguu

SEQ ID NO: 49807 - RNA, 19 nt, Artificial Sequence
  Description of Artificial Sequence: Synthetic oligonucleotide
  Antisense strand to SEQ ID NO: 49726
aacacucuuggacagcaaa

SEQ ID NO: 49808 - RNA, 19 nt, Artificial Sequence
  Description of Artificial Sequence: Synthetic oligonucleotide
  Sense strand starting at position 3614 of SEQ ID NO: 601
ucaccagaguucccauaca

SEQ ID NO: 49809 - RNA, 19 nt, Artificial Sequence
  Description of Artificial Sequence: Synthetic oligonucleotide
  Antisense strand to SEQ ID NO: 49728
uguaugggaacucugguga

SEQ ID NO: 49810 - RNA, 19 nt, Artificial Sequence
  Description of Artificial Sequence: Synthetic oligonucleotide
  Sense strand starting at position 3529 of SEQ ID NO: 601
cuuugcgaacuauaaagua

SEQ ID NO: 49811 - RNA, 19 nt, Artificial Sequence
  Description of Artificial Sequence: Synthetic oligonucleotide
  Antisense strand to SEQ ID NO: 49730
uacuuuauaguucgcaaag

SEQ ID NO: 49812 - RNA, 19 nt, Artificial Sequence
  Description of Artificial Sequence: Synthetic oligonucleotide
  Sense strand starting at position 3519 of SEQ ID NO: 601
uucccaugugcuuugcgaa

SEQ ID NO: 49813 - RNA, 19 nt, Artificial Sequence
  Description of Artificial Sequence: Synthetic oligonucleotide
  Antisense strand to SEQ ID NO: 49732
uucgcaaagcacaugggaa

SEQ ID NO: 49814 - RNA, 19 nt, Artificial Sequence
  Description of Artificial Sequence: Synthetic oligonucleotide
  Sense strand starting at position 3470 of SEQ ID NO: 601
gugccuccuuuccuaugaa

SEQ ID NO: 49815 - RNA, 19 nt, Artificial Sequence
  Description of Artificial Sequence: Synthetic oligonucleotide
  Antisense strand to SEQ ID NO: 49734
uucauaggaaaggaggcac

SEQ ID NO: 49816 - RNA, 19 nt, Artificial Sequence
  Description of Artificial Sequence: Synthetic oligonucleotide
  Sense strand starting at position 3426 of SEQ ID NO: 601
ugacuaguuacguaguuau

SEQ ID NO: 49817 - RNA, 19 nt, Artificial Sequence
  Description of Artificial Sequence: Synthetic oligonucleotide
  Antisense strand to SEQ ID NO: 49736
auaacuacguaacuaguca

SEQ ID NO: 49818 - RNA, 19 nt, Artificial Sequence
  Description of Artificial Sequence: Synthetic oligonucleotide
  Sense strand starting at position 3421 of SEQ ID NO: 601
aagauugacuaguuacgua

SEQ ID NO: 49819 - RNA, 19 nt, Artificial Sequence
  Description of Artificial Sequence: Synthetic oligonucleotide
  Antisense strand to SEQ ID NO: 49738
uacguaacuagucaaucuu

SEQ ID NO: 49820 - RNA, 19 nt, Artificial Sequence
  Description of Artificial Sequence: Synthetic oligonucleotide
  Sense strand starting at position 3381 of SEQ ID NO: 601
agaagauggugguauauuu

SEQ ID NO: 49821 - RNA, 19 nt, Artificial Sequence
  Description of Artificial Sequence: Synthetic oligonucleotide
  Antisense strand to SEQ ID NO: 49740
aaauauaccaccaucuucu

SEQ ID NO: 49822 - RNA, 19 nt, Artificial Sequence
  Description of Artificial Sequence: Synthetic oligonucleotide
  Sense strand starting at position 3379 of SEQ ID NO: 601
auagaagauggugguauau

SEQ ID NO: 49823 - RNA, 19 nt, Artificial Sequence
  Description of Artificial Sequence: Synthetic oligonucleotide
  Antisense strand to SEQ ID NO: 49742
auauaccaccaucuucuau

SEQ ID NO: 49824 - RNA, 19 nt, Artificial Sequence
  Description of Artificial Sequence: Synthetic oligonucleotide
  Sense strand starting at position 3259 of SEQ ID NO: 601
acacuaguugagugagcuu

SEQ ID NO: 49825 - RNA, 19 nt, Artificial Sequence
  Description of Artificial Sequence: Synthetic oligonucleotide
  Antisense strand to SEQ ID NO: 49744
aagcucacucaacuagugu

SEQ ID NO: 49826 - RNA, 19 nt, Artificial Sequence
  Description of Artificial Sequence: Synthetic oligonucleotide
  Sense strand starting at position 3255 of SEQ ID NO: 601
ggaaacacuaguugaguga

SEQ ID NO: 49827 - RNA, 19 nt, Artificial Sequence
  Description of Artificial Sequence: Synthetic oligonucleotide
  Antisense strand to SEQ ID NO: 49746
ucacucaacuaguguuucc

SEQ ID NO: 49828 - RNA, 19 nt, Artificial Sequence
  Description of Artificial Sequence: Synthetic oligonucleotide
  Sense strand starting at position 3241 of SEQ ID NO: 601
gacguuggccgucaggaaa

SEQ ID NO: 49829 - RNA, 19 nt, Artificial Sequence
  Description of Artificial Sequence: Synthetic oligonucleotide
  Antisense strand to SEQ ID NO: 49748
uuuccugacggccaacguc

SEQ ID NO: 49830 - RNA, 19 nt, Artificial Sequence
  Description of Artificial Sequence: Synthetic oligonucleotide
  Sense strand starting at position 3212 of SEQ ID NO: 601
uguacuucucauggagaug

SEQ ID NO: 49831 - RNA, 19 nt, Artificial Sequence
  Description of Artificial Sequence: Synthetic oligonucleotide
  Antisense strand to SEQ ID NO: 49750
caucuccaugagaaguaca

SEQ ID NO: 49832 - RNA, 19 nt, Artificial Sequence
  Description of Artificial Sequence: Synthetic oligonucleotide
  Sense strand starting at position 3177 of SEQ ID NO: 601
agaaucaauuuggagguuu

SEQ ID NO: 49833 - RNA, 19 nt, Artificial Sequence
  Description of Artificial Sequence: Synthetic oligonucleotide
  Antisense strand to SEQ ID NO: 49752
aaaccuccaaauugauucu

SEQ ID NO: 49834 - RNA, 19 nt, Artificial Sequence
  Description of Artificial Sequence: Synthetic oligonucleotide
  Sense strand starting at position 3111 of SEQ ID NO: 601
ggauaaacuuccucuuggu

SEQ ID NO: 49835 - RNA, 19 nt, Artificial Sequence
  Description of Artificial Sequence: Synthetic oligonucleotide
  Antisense strand to SEQ ID NO: 49754
accaagaggaaguuuaucc

SEQ ID NO: 49836 - RNA, 19 nt, Artificial Sequence
  Description of Artificial Sequence: Synthetic oligonucleotide
  Sense strand starting at position 3097 of SEQ ID NO: 601
auuuguaggugggaggaua

SEQ ID NO: 49837 - RNA, 19 nt, Artificial Sequence
  Description of Artificial Sequence: Synthetic oligonucleotide
  Antisense strand to SEQ ID NO: 49756
uauccucccaccuacaaau

SEQ ID NO: 49838 - RNA, 19 nt, Artificial Sequence
  Description of Artificial Sequence: Synthetic oligonucleotide
  Sense strand starting at position 3051 of SEQ ID NO: 601
guugucuggccagagucaa

SEQ ID NO: 49839 - RNA, 19 nt, Artificial Sequence
  Description of Artificial Sequence: Synthetic oligonucleotide
  Antisense strand to SEQ ID NO: 49758
uugacucuggccagacaac

SEQ ID NO: 49840 - RNA, 19 nt, Artificial Sequence
  Description of Artificial Sequence: Synthetic oligonucleotide
  Sense strand starting at position 2829 of SEQ ID NO: 601
auccaagaauuaucguaaa

SEQ ID NO: 49841 - RNA, 19 nt, Artificial Sequence
  Description of Artificial Sequence: Synthetic oligonucleotide
  Antisense strand to SEQ ID NO: 49760
uuuacgauaauucuuggau

SEQ ID NO: 49842 - RNA, 19 nt, Artificial Sequence
  Description of Artificial Sequence: Synthetic oligonucleotide
  Sense strand starting at position 2619 of SEQ ID NO: 601
ggaauugguuaugaagaau

SEQ ID NO: 49843 - RNA, 19 nt, Artificial Sequence
  Description of Artificial Sequence: Synthetic oligonucleotide
  Antisense strand to SEQ ID NO: 49762
auucuucauaaccaauucc

SEQ ID NO: 49844 - RNA, 19 nt, Artificial Sequence
  Description of Artificial Sequence: Synthetic oligonucleotide
  Sense strand starting at position 2612 of SEQ ID NO: 601
acacguuggaauugguuau

SEQ ID NO: 49845 - RNA, 19 nt, Artificial Sequence
  Description of Artificial Sequence: Synthetic oligonucleotide
  Antisense strand to SEQ ID NO: 49764
auaaccaauuccaacgugu

SEQ ID NO: 49846 - RNA, 19 nt, Artificial Sequence
  Description of Artificial Sequence: Synthetic oligonucleotide
  Sense strand starting at position 2606 of SEQ ID NO: 601
gugagaacacguuggaauu

SEQ ID NO: 49847 - RNA, 19 nt, Artificial Sequence
  Description of Artificial Sequence: Synthetic oligonucleotide
  Antisense strand to SEQ ID NO: 49766
aauuccaacguguucucac

SEQ ID NO: 49848 - RNA, 19 nt, Artificial Sequence
  Description of Artificial Sequence: Synthetic oligonucleotide
  Sense strand starting at position 2594 of SEQ ID NO: 601
cccauuacuuaagugagaa

SEQ ID NO: 49849 - RNA, 19 nt, Artificial Sequence
  Description of Artificial Sequence: Synthetic oligonucleotide
  Antisense strand to SEQ ID NO: 49768
uucucacuuaaguaauggg

SEQ ID NO: 49850 - RNA, 19 nt, Artificial Sequence
  Description of Artificial Sequence: Synthetic oligonucleotide
  Sense strand starting at position 2482 of SEQ ID NO: 601
acagaagucgcccaauaca

SEQ ID NO: 49851 - RNA, 19 nt, Artificial Sequence
  Description of Artificial Sequence: Synthetic oligonucleotide
  Antisense strand to SEQ ID NO: 49770
uguauugggcgacuucugu

SEQ ID NO: 49852 - RNA, 19 nt, Artificial Sequence
  Description of Artificial Sequence: Synthetic oligonucleotide
  Sense strand starting at position 1340 of SEQ ID NO: 601
gaguaaugagaaggcaugu

SEQ ID NO: 49853 - RNA, 19 nt, Artificial Sequence
  Description of Artificial Sequence: Synthetic oligonucleotide
  Antisense strand to SEQ ID NO: 49772
acaugccuucucauuacuc

SEQ ID NO: 49854 - RNA, 19 nt, Artificial Sequence
  Description of Artificial Sequence: Synthetic oligonucleotide
  Sense strand starting at position 1252 of SEQ ID NO: 601
gcggauacuaucugaugaa

SEQ ID NO: 49855 - RNA, 19 nt, Artificial Sequence
  Description of Artificial Sequence: Synthetic oligonucleotide
  Antisense strand to SEQ ID NO: 49774
uucaucagauaguauccgc

SEQ ID NO: 49856 - RNA, 19 nt, Artificial Sequence
  Description of Artificial Sequence: Synthetic oligonucleotide
  Sense strand starting at position 1251 of SEQ ID NO: 601
ugcggauacuaucugauga

SEQ ID NO: 49857 - RNA, 19 nt, Artificial Sequence
  Description of Artificial Sequence: Synthetic oligonucleotide
  Antisense strand to SEQ ID NO: 49776
ucaucagauaguauccgca

SEQ ID NO: 49858 - RNA, 19 nt, Artificial Sequence
  Description of Artificial Sequence: Synthetic oligonucleotide
  Sense strand starting at position 1243 of SEQ ID NO: 601
cucgauucugcggauacua

SEQ ID NO: 49859 - RNA, 19 nt, Artificial Sequence
  Description of Artificial Sequence: Synthetic oligonucleotide
  Antisense strand to SEQ ID NO: 49778
uaguauccgcagaaucgag

SEQ ID NO: 49860 - RNA, 19 nt, Artificial Sequence
  Description of Artificial Sequence: Synthetic oligonucleotide
  Sense strand starting at position 1198 of SEQ ID NO: 601
aggccauucuaaucacaga

SEQ ID NO: 49861 - RNA, 19 nt, Artificial Sequence
  Description of Artificial Sequence: Synthetic oligonucleotide
  Antisense strand to SEQ ID NO: 49780
ucugugauuagaauggccu

SEQ ID NO: 49862 - RNA, 19 nt, Artificial Sequence
  Description of Artificial Sequence: Synthetic oligonucleotide
  Sense strand starting at position 1043 of SEQ ID NO: 601
gaugucaccgucuagguua

SEQ ID NO: 49863 - RNA, 19 nt, Artificial Sequence
  Description of Artificial Sequence: Synthetic oligonucleotide
  Antisense strand to SEQ ID NO: 49782
uaaccuagacggugacauc

SEQ ID NO: 49864 - RNA, 19 nt, Artificial Sequence
  Description of Artificial Sequence: Synthetic oligonucleotide
  Sense strand starting at position 992 of SEQ ID NO: 601
guguacucugagggauaga

SEQ ID NO: 49865 - RNA, 19 nt, Artificial Sequence
  Description of Artificial Sequence: Synthetic oligonucleotide
  Antisense strand to SEQ ID NO: 49784
ucuaucccucagaguacac

SEQ ID NO: 49866 - RNA, 19 nt, Artificial Sequence
  Description of Artificial Sequence: Synthetic oligonucleotide
  Sense strand starting at position 988 of SEQ ID NO: 601
cccaguguacucugaggga

SEQ ID NO: 49867 - RNA, 19 nt, Artificial Sequence
  Description of Artificial Sequence: Synthetic oligonucleotide
  Antisense strand to SEQ ID NO: 49786
ucccucagaguacacuggg

SEQ ID NO: 49868 - RNA, 19 nt, Artificial Sequence
  Description of Artificial Sequence: Synthetic oligonucleotide
  Sense strand starting at position 932 of SEQ ID NO: 601
ucagguucuguguaacucu

SEQ ID NO: 49869 - RNA, 19 nt, Artificial Sequence
  Description of Artificial Sequence: Synthetic oligonucleotide
  Antisense strand to SEQ ID NO: 49788
agaguuacacagaaccuga

SEQ ID NO: 49870 - RNA, 19 nt, Artificial Sequence
  Description of Artificial Sequence: Synthetic oligonucleotide
  Sense strand starting at position 904 of SEQ ID NO: 601
aggaaacgcguuuaucuaa

SEQ ID NO: 49871 - RNA, 19 nt, Artificial Sequence
  Description of Artificial Sequence: Synthetic oligonucleotide
  Antisense strand to SEQ ID NO: 49790
uuagauaaacgcguuuccu

SEQ ID NO: 49872 - RNA, 19 nt, Artificial Sequence
  Description of Artificial Sequence: Synthetic oligonucleotide
  Sense strand starting at position 882 of SEQ ID NO: 601
gcccaagcucaagaaauga

SEQ ID NO: 49873 - RNA, 19 nt, Artificial Sequence
  Description of Artificial Sequence: Synthetic oligonucleotide
  Antisense strand to SEQ ID NO: 49792
ucauuucuugagcuugggc

SEQ ID NO: 49874 - RNA, 19 nt, Artificial Sequence
  Description of Artificial Sequence: Synthetic oligonucleotide
  Sense strand starting at position 844 of SEQ ID NO: 601
gccacaauuuaaggaugga

SEQ ID NO: 49875 - RNA, 19 nt, Artificial Sequence
  Description of Artificial Sequence: Synthetic oligonucleotide
  Antisense strand to SEQ ID NO: 49794
uccauccuuaaauuguggc

SEQ ID NO: 49876 - RNA, 19 nt, Artificial Sequence
  Description of Artificial Sequence: Synthetic oligonucleotide
  Sense strand starting at position 779 of SEQ ID NO: 601
aacuuaguuguugggugua

SEQ ID NO: 49877 - RNA, 19 nt, Artificial Sequence
  Description of Artificial Sequence: Synthetic oligonucleotide
  Antisense strand to SEQ ID NO: 49796
uacacccaacaacuaaguu

SEQ ID NO: 49878 - RNA, 19 nt, Artificial Sequence
  Description of Artificial Sequence: Synthetic oligonucleotide
  Sense strand starting at position 722 of SEQ ID NO: 601
guagaucuuucuuugaagu

SEQ ID NO: 49879 - RNA, 19 nt, Artificial Sequence
  Description of Artificial Sequence: Synthetic oligonucleotide
  Antisense strand to SEQ ID NO: 49798
acuucaaagaaagaucuac

SEQ ID NO: 49880 - RNA, 19 nt, Artificial Sequence
  Description of Artificial Sequence: Synthetic oligonucleotide
  Sense strand starting at position 721 of SEQ ID NO: 601
gguagaucuuucuuugaag

SEQ ID NO: 49881 - RNA, 19 nt, Artificial Sequence
  Description of Artificial Sequence: Synthetic oligonucleotide
  Antisense strand to SEQ ID NO: 49800
cuucaaagaaagaucuacc

SEQ ID NO: 49882 - RNA, 19 nt, Artificial Sequence
  Description of Artificial Sequence: Synthetic oligonucleotide
  Sense strand starting at position 584 of SEQ ID NO: 601
gaggguuucucccuuuguu

SEQ ID NO: 49883 - RNA, 19 nt, Artificial Sequence
  Description of Artificial Sequence: Synthetic oligonucleotide
  Antisense strand to SEQ ID NO: 49802
aacaaagggagaaacccuc

SEQ ID NO: 49884 - RNA, 19 nt, Artificial Sequence
  Description of Artificial Sequence: Synthetic oligonucleotide
  Sense strand starting at position 455 of SEQ ID NO: 601
aucauuuaaugagaucuga

SEQ ID NO: 49885 - RNA, 19 nt, Artificial Sequence
  Description of Artificial Sequence: Synthetic oligonucleotide
  Antisense strand to SEQ ID NO: 49804
ucagaucucauuaaaugau

SEQ ID NO: 49886 - RNA, 19 nt, Artificial Sequence
  Description of Artificial Sequence: Synthetic oligonucleotide
  Sense strand starting at position 3629 of SEQ ID NO: 600
ggaucagugagcugagauc

SEQ ID NO: 49887 - RNA, 19 nt, Artificial Sequence
  Description of Artificial Sequence: Synthetic oligonucleotide
  Antisense strand to SEQ ID NO: 49806
gaucucagcucacugaucc

SEQ ID NO: 49888 - RNA, 19 nt, Artificial Sequence
  Description of Artificial Sequence: Synthetic oligonucleotide
  Sense strand starting at position 3627 of SEQ ID NO: 600
gaggaucagugagcugaga

SEQ ID NO: 49889 - RNA, 19 nt, Artificial Sequence
  Description of Artificial Sequence: Synthetic oligonucleotide
  Antisense strand to SEQ ID NO: 49808
ucucagcucacugauccuc

SEQ ID NO: 49890 - RNA, 19 nt, Artificial Sequence
  Description of Artificial Sequence: Synthetic oligonucleotide
  Sense strand starting at position 3270 of SEQ ID NO: 600
cugaaauaauguuuaugug

SEQ ID NO: 49891 - RNA, 19 nt, Artificial Sequence
  Description of Artificial Sequence: Synthetic oligonucleotide
  Antisense strand to SEQ ID NO: 49810
cacauaaacauuauuucag

SEQ ID NO: 49892 - RNA, 19 nt, Artificial Sequence
  Description of Artificial Sequence: Synthetic oligonucleotide
  Sense strand starting at position 3207 of SEQ ID NO: 600
guguuacauuaaguaagaa

SEQ ID NO: 49893 - RNA, 19 nt, Artificial Sequence
  Description of Artificial Sequence: Synthetic oligonucleotide
  Antisense strand to SEQ ID NO: 49812
uucuuacuuaauguaacac

SEQ ID NO: 49894 - RNA, 19 nt, Artificial Sequence
  Description of Artificial Sequence: Synthetic oligonucleotide
  Sense strand starting at position 3197 of SEQ ID NO: 600
cucuaagguuguguuacau

SEQ ID NO: 49895 - RNA, 19 nt, Artificial Sequence
  Description of Artificial Sequence: Synthetic oligonucleotide
  Antisense strand to SEQ ID NO: 49814
auguaacacaaccuuagag

SEQ ID NO: 49896 - RNA, 19 nt, Artificial Sequence
  Description of Artificial Sequence: Synthetic oligonucleotide
  Sense strand starting at position 3194 of SEQ ID NO: 600
ucacucuaagguuguguua

SEQ ID NO: 49897 - RNA, 19 nt, Artificial Sequence
  Description of Artificial Sequence: Synthetic oligonucleotide
  Antisense strand to SEQ ID NO: 49816
uaacacaaccuuagaguga

SEQ ID NO: 49898 - RNA, 19 nt, Artificial Sequence
  Description of Artificial Sequence: Synthetic oligonucleotide
  Sense strand starting at position 3180 of SEQ ID NO: 600
cgcugauggaccugucacu

SEQ ID NO: 49899 - RNA, 19 nt, Artificial Sequence
  Description of Artificial Sequence: Synthetic oligonucleotide
  Antisense strand to SEQ ID NO: 49818
agugacagguccaucagcg

SEQ ID NO: 49900 - RNA, 19 nt, Artificial Sequence
  Description of Artificial Sequence: Synthetic oligonucleotide
  Sense strand starting at position 3171 of SEQ ID NO: 600
gcuggauuucgcugaugga

SEQ ID NO: 49901 - RNA, 19 nt, Artificial Sequence
  Description of Artificial Sequence: Synthetic oligonucleotide
  Antisense strand to SEQ ID NO: 49820
uccaucagcgaaauccagc

SEQ ID NO: 49902 - RNA, 19 nt, Artificial Sequence
  Description of Artificial Sequence: Synthetic oligonucleotide
  Sense strand starting at position 3147 of SEQ ID NO: 600
uuugguaaucauggaguca

SEQ ID NO: 49903 - RNA, 19 nt, Artificial Sequence
  Description of Artificial Sequence: Synthetic oligonucleotide
  Antisense strand to SEQ ID NO: 49822
ugacuccaugauuaccaaa

SEQ ID NO: 49904 - RNA, 19 nt, Artificial Sequence
  Description of Artificial Sequence: Synthetic oligonucleotide
  Sense strand starting at position 3097 of SEQ ID NO: 600
cucuuugagugaccuccaa

SEQ ID NO: 49905 - RNA, 19 nt, Artificial Sequence
  Description of Artificial Sequence: Synthetic oligonucleotide
  Antisense strand to SEQ ID NO: 49824
uuggaggucacucaaagag

SEQ ID NO: 49906 - RNA, 19 nt, Artificial Sequence
  Description of Artificial Sequence: Synthetic oligonucleotide
  Sense strand starting at position 2636 of SEQ ID NO: 600
uuugcuguccaagaguguu

SEQ ID NO: 49907 - RNA, 19 nt, Artificial Sequence
  Description of Artificial Sequence: Synthetic oligonucleotide
  Antisense strand to SEQ ID NO: 49826
aacacucuuggacagcaaa

SEQ ID NO: 49908 - RNA, 19 nt, Artificial Sequence
  Description of Artificial Sequence: Synthetic oligonucleotide
  Sense strand starting at position 2578 of SEQ ID NO: 600
ucaccagaguucccauaca

SEQ ID NO: 49909 - RNA, 19 nt, Artificial Sequence
  Description of Artificial Sequence: Synthetic oligonucleotide
  Antisense strand to SEQ ID NO: 49828
uguaugggaacucugguga

SEQ ID NO: 49910 - RNA, 19 nt, Artificial Sequence
  Description of Artificial Sequence: Synthetic oligonucleotide
  Sense strand starting at position 2493 of SEQ ID NO: 600
cuuugcgaacuauaaagua

SEQ ID NO: 49911 - RNA, 19 nt, Artificial Sequence
  Description of Artificial Sequence: Synthetic oligonucleotide
  Antisense strand to SEQ ID NO: 49830
uacuuuauaguucgcaaag

SEQ ID NO: 49912 - RNA, 19 nt, Artificial Sequence
  Description of Artificial Sequence: Synthetic oligonucleotide
  Sense strand starting at position 2483 of SEQ ID NO: 600
uucccaugugcuuugcgaa

SEQ ID NO: 49913 - RNA, 19 nt, Artificial Sequence
  Description of Artificial Sequence: Synthetic oligonucleotide
  Antisense strand to SEQ ID NO: 49832
uucgcaaagcacaugggaa

SEQ ID NO: 49914 - RNA, 19 nt, Artificial Sequence
  Description of Artificial Sequence: Synthetic oligonucleotide
  Sense strand starting at position 2434 of SEQ ID NO: 600
gugccuccuuuccuaugaa

SEQ ID NO: 49915 - RNA, 19 nt, Artificial Sequence
  Description of Artificial Sequence: Synthetic oligonucleotide
  Antisense strand to SEQ ID NO: 49834
uucauaggaaaggaggcac

SEQ ID NO: 49916 - RNA, 19 nt, Artificial Sequence
  Description of Artificial Sequence: Synthetic oligonucleotide
  Sense strand starting at position 2390 of SEQ ID NO: 600
ugacuaguuacguaguuau

SEQ ID NO: 49917 - RNA, 19 nt, Artificial Sequence
  Description of Artificial Sequence: Synthetic oligonucleotide
  Antisense strand to SEQ ID NO: 49836
auaacuacguaacuaguca

SEQ ID NO: 49918 - RNA, 19 nt, Artificial Sequence
  Description of Artificial Sequence: Synthetic oligonucleotide
  Sense strand starting at position 2389 of SEQ ID NO: 600
uugacuaguuacguaguua

SEQ ID NO: 49919 - RNA, 19 nt, Artificial Sequence
  Description of Artificial Sequence: Synthetic oligonucleotide
  Antisense strand to SEQ ID NO: 49838
uaacuacguaacuagucaa

SEQ ID NO: 49920 - RNA, 19 nt, Artificial Sequence
  Description of Artificial Sequence: Synthetic oligonucleotide
  Sense strand starting at position 2385 of SEQ ID NO: 600
aagauugacuaguuacgua

SEQ ID NO: 49921 - RNA, 19 nt, Artificial Sequence
  Description of Artificial Sequence: Synthetic oligonucleotide
  Antisense strand to SEQ ID NO: 49840
uacguaacuagucaaucuu

SEQ ID NO: 49922 - RNA, 19 nt, Artificial Sequence
  Description of Artificial Sequence: Synthetic oligonucleotide
  Sense strand starting at position 2345 of SEQ ID NO: 600
agaagauggugguauauuu

SEQ ID NO: 49923 - RNA, 19 nt, Artificial Sequence
  Description of Artificial Sequence: Synthetic oligonucleotide
  Antisense strand to SEQ ID NO: 49842
aaauauaccaccaucuucu

SEQ ID NO: 49924 - RNA, 19 nt, Artificial Sequence
  Description of Artificial Sequence: Synthetic oligonucleotide
  Sense strand starting at position 2343 of SEQ ID NO: 600
auagaagauggugguauau

SEQ ID NO: 49925 - RNA, 19 nt, Artificial Sequence
  Description of Artificial Sequence: Synthetic oligonucleotide
  Antisense strand to SEQ ID NO: 49844
auauaccaccaucuucuau

SEQ ID NO: 49926 - RNA, 19 nt, Artificial Sequence
  Description of Artificial Sequence: Synthetic oligonucleotide
  Sense strand starting at position 2223 of SEQ ID NO: 600
acacuaguugagugagcuu

SEQ ID NO: 49927 - RNA, 19 nt, Artificial Sequence
  Description of Artificial Sequence: Synthetic oligonucleotide
  Antisense strand to SEQ ID NO: 49846
aagcucacucaacuagugu

SEQ ID NO: 49928 - RNA, 19 nt, Artificial Sequence
  Description of Artificial Sequence: Synthetic oligonucleotide
  Sense strand starting at position 2219 of SEQ ID NO: 600
ggaaacacuaguugaguga

SEQ ID NO: 49929 - RNA, 19 nt, Artificial Sequence
  Description of Artificial Sequence: Synthetic oligonucleotide
  Antisense strand to SEQ ID NO: 49848
ucacucaacuaguguuucc

SEQ ID NO: 49930 - RNA, 19 nt, Artificial Sequence
  Description of Artificial Sequence: Synthetic oligonucleotide
  Sense strand starting at position 2205 of SEQ ID NO: 600
gacguuggccgucaggaaa

SEQ ID NO: 49931 - RNA, 19 nt, Artificial Sequence
  Description of Artificial Sequence: Synthetic oligonucleotide
  Antisense strand to SEQ ID NO: 49850
uuuccugacggccaacguc

SEQ ID NO: 49932 - RNA, 19 nt, Artificial Sequence
  Description of Artificial Sequence: Synthetic oligonucleotide
  Sense strand starting at position 2176 of SEQ ID NO: 600
uguacuucucauggagaug

SEQ ID NO: 49933 - RNA, 19 nt, Artificial Sequence
  Description of Artificial Sequence: Synthetic oligonucleotide
  Antisense strand to SEQ ID NO: 49852
caucuccaugagaaguaca

SEQ ID NO: 49934 - RNA, 19 nt, Artificial Sequence
  Description of Artificial Sequence: Synthetic oligonucleotide
  Sense strand starting at position 2141 of SEQ ID NO: 600
agaaucaauuuggagguuu

SEQ ID NO: 49935 - RNA, 19 nt, Artificial Sequence
  Description of Artificial Sequence: Synthetic oligonucleotide
  Antisense strand to SEQ ID NO: 49854
aaaccuccaaauugauucu

SEQ ID NO: 49936 - RNA, 19 nt, Artificial Sequence
  Description of Artificial Sequence: Synthetic oligonucleotide
  Sense strand starting at position 2075 of SEQ ID NO: 600
ggauaaacuuccucuuggu

SEQ ID NO: 49937 - RNA, 19 nt, Artificial Sequence
  Description of Artificial Sequence: Synthetic oligonucleotide
  Antisense strand to SEQ ID NO: 49856
accaagaggaaguuuaucc

SEQ ID NO: 49938 - RNA, 19 nt, Artificial Sequence
  Description of Artificial Sequence: Synthetic oligonucleotide
  Sense strand starting at position 2061 of SEQ ID NO: 600
auuuguaggugggaggaua

SEQ ID NO: 49939 - RNA, 19 nt, Artificial Sequence
  Description of Artificial Sequence: Synthetic oligonucleotide
  Antisense strand to SEQ ID NO: 49858
uauccucccaccuacaaau

SEQ ID NO: 49940 - RNA, 19 nt, Artificial Sequence
  Description of Artificial Sequence: Synthetic oligonucleotide
  Sense strand starting at position 2015 of SEQ ID NO: 600
guugucuggccagagucaa

SEQ ID NO: 49941 - RNA, 19 nt, Artificial Sequence
  Description of Artificial Sequence: Synthetic oligonucleotide
  Antisense strand to SEQ ID NO: 49860
uugacucuggccagacaac

SEQ ID NO: 49942 - RNA, 19 nt, Artificial Sequence
  Description of Artificial Sequence: Synthetic oligonucleotide
  Sense strand starting at position 1793 of SEQ ID NO: 600
auccaagaauuaucguaaa

SEQ ID NO: 49943 - RNA, 19 nt, Artificial Sequence
  Description of Artificial Sequence: Synthetic oligonucleotide
  Antisense strand to SEQ ID NO: 49862
uuuacgauaauucuuggau

SEQ ID NO: 49944 - RNA, 19 nt, Artificial Sequence
  Description of Artificial Sequence: Synthetic oligonucleotide
  Sense strand starting at position 1583 of SEQ ID NO: 600
ggaauugguuaugaagaau

SEQ ID NO: 49945 - RNA, 19 nt, Artificial Sequence
  Description of Artificial Sequence: Synthetic oligonucleotide
  Antisense strand to SEQ ID NO: 49864
auucuucauaaccaauucc

SEQ ID NO: 49946 - RNA, 19 nt, Artificial Sequence
  Description of Artificial Sequence: Synthetic oligonucleotide
  Sense strand starting at position 1576 of SEQ ID NO: 600
acacguuggaauugguuau

SEQ ID NO: 49947 - RNA, 19 nt, Artificial Sequence
  Description of Artificial Sequence: Synthetic oligonucleotide
  Antisense strand to SEQ ID NO: 49866
auaaccaauuccaacgugu

SEQ ID NO: 49948 - RNA, 19 nt, Artificial Sequence
  Description of Artificial Sequence: Synthetic oligonucleotide
  Sense strand starting at position 1570 of SEQ ID NO: 600
gugagaacacguuggaauu

SEQ ID NO: 49949 - RNA, 19 nt, Artificial Sequence
  Description of Artificial Sequence: Synthetic oligonucleotide
  Antisense strand to SEQ ID NO: 49868
aauuccaacguguucucac

SEQ ID NO: 49950 - RNA, 19 nt, Artificial Sequence
  Description of Artificial Sequence: Synthetic oligonucleotide
  Sense strand starting at position 1558 of SEQ ID NO: 600
cccauuacuuaagugagaa

SEQ ID NO: 49951 - RNA, 19 nt, Artificial Sequence
  Description of Artificial Sequence: Synthetic oligonucleotide
  Antisense strand to SEQ ID NO: 49870
uucucacuuaaguaauggg

SEQ ID NO: 49952 - RNA, 19 nt, Artificial Sequence
  Description of Artificial Sequence: Synthetic oligonucleotide
  Sense strand starting at position 1446 of SEQ ID NO: 600
acagaagucgcccaauaca

SEQ ID NO: 49953 - RNA, 19 nt, Artificial Sequence
  Description of Artificial Sequence: Synthetic oligonucleotide
  Antisense strand to SEQ ID NO: 49872
uguauugggcgacuucugu

SEQ ID NO: 49954 - RNA, 19 nt, Artificial Sequence
  Description of Artificial Sequence: Synthetic oligonucleotide
  Sense strand starting at position 304 of SEQ ID NO: 600
gaguaaugagaaggcaugu

SEQ ID NO: 49955 - RNA, 19 nt, Artificial Sequence
  Description of Artificial Sequence: Synthetic oligonucleotide
  Antisense strand to SEQ ID NO: 49874
acaugccuucucauuacuc

SEQ ID NO: 49956 - RNA, 19 nt, Artificial Sequence
  Description of Artificial Sequence: Synthetic oligonucleotide
  Sense strand starting at position 216 of SEQ ID NO: 600
gcggauacuaucugaugaa

SEQ ID NO: 49957 - RNA, 19 nt, Artificial Sequence
  Description of Artificial Sequence: Synthetic oligonucleotide
  Antisense strand to SEQ ID NO: 49876
uucaucagauaguauccgc

SEQ ID NO: 49958 - RNA, 19 nt, Artificial Sequence
  Description of Artificial Sequence: Synthetic oligonucleotide
  Sense strand starting at position 215 of SEQ ID NO: 600
ugcggauacuaucugauga

SEQ ID NO: 49959 - RNA, 19 nt, Artificial Sequence
  Description of Artificial Sequence: Synthetic oligonucleotide
  Antisense strand to SEQ ID NO: 49878
ucaucagauaguauccgca

SEQ ID NO: 49960 - RNA, 19 nt, Artificial Sequence
  Description of Artificial Sequence: Synthetic oligonucleotide
  Sense strand starting at position 207 of SEQ ID NO: 600
cucgauucugcggauacua

SEQ ID NO: 49961 - RNA, 19 nt, Artificial Sequence
  Description of Artificial Sequence: Synthetic oligonucleotide
  Antisense strand to SEQ ID NO: 49880
uaguauccgcagaaucgag

SEQ ID NO: 49962 - RNA, 19 nt, Artificial Sequence
  Description of Artificial Sequence: Synthetic oligonucleotide
  Sense strand starting at position 162 of SEQ ID NO: 600
aggccauucuaaucacaga

SEQ ID NO: 49963 - RNA, 19 nt, Artificial Sequence
  Description of Artificial Sequence: Synthetic oligonucleotide
  Antisense strand to SEQ ID NO: 49882
ucugugauuagaauggccu

SEQ ID NO: 49964 - RNA, 19 nt, Artificial Sequence
  Description of Artificial Sequence: Synthetic oligonucleotide
  Sense strand starting at position 7 of SEQ ID NO: 600
gaugucaccgucuagguua

SEQ ID NO: 49965 - RNA, 19 nt, Artificial Sequence
  Description of Artificial Sequence: Synthetic oligonucleotide
  Antisense strand to SEQ ID NO: 49884
uaaccuagacggugacauc

SEQ ID NO: 49966 - RNA, 19 nt, Artificial Sequence
  Description of Artificial Sequence: Synthetic oligonucleotide
  Sense strand starting at position 149 of SEQ ID NO: 602
ucaagugaccuuuauugcu

SEQ ID NO: 49967 - RNA, 19 nt, Artificial Sequence
  Description of Artificial Sequence: Synthetic oligonucleotide
  Antisense strand to SEQ ID NO: 49886
agcaauaaaggucacuuga

SEQ ID NO: 49968 - RNA, 19 nt, Artificial Sequence
  Description of Artificial Sequence: Synthetic oligonucleotide
  Sense strand starting at position 182 of SEQ ID NO: 602
acaagacucuuugcaauga

SEQ ID NO: 49969 - RNA, 19 nt, Artificial Sequence
  Description of Artificial Sequence: Synthetic oligonucleotide
  Antisense strand to SEQ ID NO: 49888
ucauugcaaagagucuugu

SEQ ID NO: 49970 - RNA, 19 nt, Artificial Sequence
  Description of Artificial Sequence: Synthetic oligonucleotide
  Sense strand starting at position 257 of SEQ ID NO: 602
ugagauaaucuucguucca

SEQ ID NO: 49971 - RNA, 19 nt, Artificial Sequence
  Description of Artificial Sequence: Synthetic oligonucleotide
  Antisense strand to SEQ ID NO: 49890
uggaacgaagauuaucuca

SEQ ID NO: 49972 - RNA, 19 nt, Artificial Sequence
  Description of Artificial Sequence: Synthetic oligonucleotide
  Sense strand starting at position 258 of SEQ ID NO: 602
gagauaaucuucguuccac

SEQ ID NO: 49973 - RNA, 19 nt, Artificial Sequence
  Description of Artificial Sequence: Synthetic oligonucleotide
  Antisense strand to SEQ ID NO: 49892
guggaacgaagauuaucuc

SEQ ID NO: 49974 - RNA, 19 nt, Artificial Sequence
  Description of Artificial Sequence: Synthetic oligonucleotide
  Sense strand starting at position 376 of SEQ ID NO: 602
auauauucuggauaggcuu

SEQ ID NO: 49975 - RNA, 19 nt, Artificial Sequence
  Description of Artificial Sequence: Synthetic oligonucleotide
  Antisense strand to SEQ ID NO: 49894
aagccuauccagaauauau

SEQ ID NO: 49976 - RNA, 19 nt, Artificial Sequence
  Description of Artificial Sequence: Synthetic oligonucleotide
  Sense strand starting at position 443 of SEQ ID NO: 602
augaacguacccuauugaa

SEQ ID NO: 49977 - RNA, 19 nt, Artificial Sequence
  Description of Artificial Sequence: Synthetic oligonucleotide
  Antisense strand to SEQ ID NO: 49896
uucaauaggguacguucau

SEQ ID NO: 49978 - RNA, 19 nt, Artificial Sequence
  Description of Artificial Sequence: Synthetic oligonucleotide
  Sense strand starting at position 548 of SEQ ID NO: 602
uggaucuaucucugcauua

SEQ ID NO: 49979 - RNA, 19 nt, Artificial Sequence
  Description of Artificial Sequence: Synthetic oligonucleotide
  Antisense strand to SEQ ID NO: 49898
uaaugcagagauagaucca

SEQ ID NO: 49980 - RNA, 19 nt, Artificial Sequence
  Description of Artificial Sequence: Synthetic oligonucleotide
  Sense strand starting at position 549 of SEQ ID NO: 602
ggaucuaucucugcauuaa

SEQ ID NO: 49981 - RNA, 19 nt, Artificial Sequence
  Description of Artificial Sequence: Synthetic oligonucleotide
  Antisense strand to SEQ ID NO: 49900
uuaaugcagagauagaucc

SEQ ID NO: 49982 - RNA, 19 nt, Artificial Sequence
  Description of Artificial Sequence: Synthetic oligonucleotide
  Sense strand starting at position 553 of SEQ ID NO: 602
cuaucucugcauuaagagu

SEQ ID NO: 49983 - RNA, 19 nt, Artificial Sequence
  Description of Artificial Sequence: Synthetic oligonucleotide
  Antisense strand to SEQ ID NO: 49902
acucuuaaugcagagauag

SEQ ID NO: 49984 - RNA, 19 nt, Artificial Sequence
  Description of Artificial Sequence: Synthetic oligonucleotide
  Sense strand starting at position 614 of SEQ ID NO: 602
gaaucaaagugugcacaau

SEQ ID NO: 49985 - RNA, 19 nt, Artificial Sequence
  Description of Artificial Sequence: Synthetic oligonucleotide
  Antisense strand to SEQ ID NO: 49904
auugugcacacuuugauuc

SEQ ID NO: 49986 - RNA, 19 nt, Artificial Sequence
  Description of Artificial Sequence: Synthetic oligonucleotide
  Sense strand starting at position 801 of SEQ ID NO: 602
guuuauggagguugaguaa

SEQ ID NO: 49987 - RNA, 19 nt, Artificial Sequence
  Description of Artificial Sequence: Synthetic oligonucleotide
  Antisense strand to SEQ ID NO: 49906
uuacucaaccuccauaaac

SEQ ID NO: 49988 - RNA, 19 nt, Artificial Sequence
  Description of Artificial Sequence: Synthetic oligonucleotide
  Sense strand starting at position 1138 of SEQ ID NO: 602
ccguaacagguguaaacau

SEQ ID NO: 49989 - RNA, 19 nt, Artificial Sequence
  Description of Artificial Sequence: Synthetic oligonucleotide
  Antisense strand to SEQ ID NO: 49908
auguuuacaccuguuacgg

SEQ ID NO: 49990 - RNA, 19 nt, Artificial Sequence
  Description of Artificial Sequence: Synthetic oligonucleotide
  Sense strand starting at position 1162 of SEQ ID NO: 602
ccuuaacuacugugagauc

SEQ ID NO: 49991 - RNA, 19 nt, Artificial Sequence
  Description of Artificial Sequence: Synthetic oligonucleotide
  Antisense strand to SEQ ID NO: 49910
gaucucacaguaguuaagg

SEQ ID NO: 49992 - RNA, 19 nt, Artificial Sequence
  Description of Artificial Sequence: Synthetic oligonucleotide
  Sense strand starting at position 1449 of SEQ ID NO: 602
uaggguucucgcgcgggaa

SEQ ID NO: 49993 - RNA, 19 nt, Artificial Sequence
  Description of Artificial Sequence: Synthetic oligonucleotide
  Antisense strand to SEQ ID NO: 49912
uucccgcgcgagaacccua

SEQ ID NO: 49994 - RNA, 19 nt, Artificial Sequence
  Description of Artificial Sequence: Synthetic oligonucleotide
  Sense strand starting at position 2087 of SEQ ID NO: 602
ggcauuggccaggagaagu

SEQ ID NO: 49995 - RNA, 19 nt, Artificial Sequence
  Description of Artificial Sequence: Synthetic oligonucleotide
  Antisense strand to SEQ ID NO: 49914
acuucuccuggccaaugcc

SEQ ID NO: 49996 - RNA, 19 nt, Artificial Sequence
  Description of Artificial Sequence: Synthetic oligonucleotide
  Sense strand starting at position 2100 of SEQ ID NO: 602
agaagugagacguggacaa

SEQ ID NO: 49997 - RNA, 19 nt, Artificial Sequence
  Description of Artificial Sequence: Synthetic oligonucleotide
  Antisense strand to SEQ ID NO: 49916
uuguccacgucucacuucu

SEQ ID NO: 49998 - RNA, 19 nt, Artificial Sequence
  Description of Artificial Sequence: Synthetic oligonucleotide
  Sense strand starting at position 2418 of SEQ ID NO: 602
cucagaaaguuguuuccca

SEQ ID NO: 49999 - RNA, 19 nt, Artificial Sequence
  Description of Artificial Sequence: Synthetic oligonucleotide
  Antisense strand to SEQ ID NO: 49918
ugggaaacaacuuucugag

SEQ ID NO: 50000 - RNA, 19 nt, Artificial Sequence
  Description of Artificial Sequence: Synthetic oligonucleotide
  Sense strand starting at position 2422 of SEQ ID NO: 602
gaaaguuguuucccagaga

SEQ ID NO: 50001 - RNA, 19 nt, Artificial Sequence
  Description of Artificial Sequence: Synthetic oligonucleotide
  Antisense strand to SEQ ID NO: 49920
ucucugggaaacaacuuuc

SEQ ID NO: 50002 - RNA, 19 nt, Artificial Sequence
  Description of Artificial Sequence: Synthetic oligonucleotide
  Sense strand starting at position 2425 of SEQ ID NO: 602
aguuguuucccagagagcu

SEQ ID NO: 50003 - RNA, 19 nt, Artificial Sequence
  Description of Artificial Sequence: Synthetic oligonucleotide
  Antisense strand to SEQ ID NO: 49922
agcucucugggaaacaacu

SEQ ID NO: 50004 - RNA, 19 nt, Artificial Sequence
  Description of Artificial Sequence: Synthetic oligonucleotide
  Sense strand starting at position 2435 of SEQ ID NO: 602
cagagagcuggcugaauga

SEQ ID NO: 50005 - RNA, 19 nt, Artificial Sequence
  Description of Artificial Sequence: Synthetic oligonucleotide
  Antisense strand to SEQ ID NO: 49924
ucauucagccagcucucug

SEQ ID NO: 50006 - RNA, 19 nt, Artificial Sequence
  Description of Artificial Sequence: Synthetic oligonucleotide
  Sense strand starting at position 2475 of SEQ ID NO: 602
ugcugcugcguuagggaau

SEQ ID NO: 50007 - RNA, 19 nt, Artificial Sequence
  Description of Artificial Sequence: Synthetic oligonucleotide
  Antisense strand to SEQ ID NO: 49926
auucccuaacgcagcagca

SEQ ID NO: 50008 - RNA, 19 nt, Artificial Sequence
  Description of Artificial Sequence: Synthetic oligonucleotide
  Sense strand starting at position 2488 of SEQ ID NO: 602
gggaauaguguuggaguag

SEQ ID NO: 50009 - RNA, 19 nt, Artificial Sequence
  Description of Artificial Sequence: Synthetic oligonucleotide
  Antisense strand to SEQ ID NO: 49928
cuacuccaacacuauuccc

SEQ ID NO: 50010 - RNA, 19 nt, Artificial Sequence
  Description of Artificial Sequence: Synthetic oligonucleotide
  Sense strand starting at position 2506 of SEQ ID NO: 602
gucgucuacccucagggaa

SEQ ID NO: 50011 - RNA, 19 nt, Artificial Sequence
  Description of Artificial Sequence: Synthetic oligonucleotide
  Antisense strand to SEQ ID NO: 49930
uucccugaggguagacgac

SEQ ID NO: 50012 - RNA, 19 nt, Artificial Sequence
  Description of Artificial Sequence: Synthetic oligonucleotide
  Sense strand starting at position 2509 of SEQ ID NO: 602
gucuacccucagggaaauu

SEQ ID NO: 50013 - RNA, 19 nt, Artificial Sequence
  Description of Artificial Sequence: Synthetic oligonucleotide
  Antisense strand to SEQ ID NO: 49932
aauuucccugaggguagac

SEQ ID NO: 50014 - RNA, 19 nt, Artificial Sequence
  Description of Artificial Sequence: Synthetic oligonucleotide
  Sense strand starting at position 2696 of SEQ ID NO: 602
gucacacugcuguauuaga

SEQ ID NO: 50015 - RNA, 19 nt, Artificial Sequence
  Description of Artificial Sequence: Synthetic oligonucleotide
  Antisense strand to SEQ ID NO: 49934
ucuaauacagcagugugac

SEQ ID NO: 50016 - RNA, 19 nt, Artificial Sequence
  Description of Artificial Sequence: Synthetic oligonucleotide
  Sense strand starting at position 2732 of SEQ ID NO: 602
uucggaagcccuugcauuu

SEQ ID NO: 50017 - RNA, 19 nt, Artificial Sequence
  Description of Artificial Sequence: Synthetic oligonucleotide
  Antisense strand to SEQ ID NO: 49936
aaaugcaagggcuuccgaa

SEQ ID NO: 50018 - RNA, 19 nt, Artificial Sequence
  Description of Artificial Sequence: Synthetic oligonucleotide
  Sense strand starting at position 2760 of SEQ ID NO: 602
gcaguacuacaaggaugaa

SEQ ID NO: 50019 - RNA, 19 nt, Artificial Sequence
  Description of Artificial Sequence: Synthetic oligonucleotide
  Antisense strand to SEQ ID NO: 49938
uucauccuuguaguacugc

SEQ ID NO: 50020 - RNA, 19 nt, Artificial Sequence
  Description of Artificial Sequence: Synthetic oligonucleotide
  Sense strand starting at position 2787 of SEQ ID NO: 602
uggguccucguacaugauu

SEQ ID NO: 50021 - RNA, 19 nt, Artificial Sequence
  Description of Artificial Sequence: Synthetic oligonucleotide
  Antisense strand to SEQ ID NO: 49940
aaucauguacgaggaccca

SEQ ID NO: 50022 - RNA, 19 nt, Artificial Sequence
  Description of Artificial Sequence: Synthetic oligonucleotide
  Sense strand starting at position 2790 of SEQ ID NO: 602
guccucguacaugauuaau

SEQ ID NO: 50023 - RNA, 19 nt, Artificial Sequence
  Description of Artificial Sequence: Synthetic oligonucleotide
  Antisense strand to SEQ ID NO: 49942
auuaaucauguacgaggac

SEQ ID NO: 50024 - RNA, 19 nt, Artificial Sequence
  Description of Artificial Sequence: Synthetic oligonucleotide
  Sense strand starting at position 2792 of SEQ ID NO: 602
ccucguacaugauuaauaa

SEQ ID NO: 50025 - RNA, 19 nt, Artificial Sequence
  Description of Artificial Sequence: Synthetic oligonucleotide
  Antisense strand to SEQ ID NO: 49944
uuauuaaucauguacgagg

SEQ ID NO: 50026 - RNA, 19 nt, Artificial Sequence
  Description of Artificial Sequence: Synthetic oligonucleotide
  Sense strand starting at position 2793 of SEQ ID NO: 602
cucguacaugauuaauaau

SEQ ID NO: 50027 - RNA, 19 nt, Artificial Sequence
  Description of Artificial Sequence: Synthetic oligonucleotide
  Antisense strand to SEQ ID NO: 49946
auuauuaaucauguacgag

SEQ ID NO: 50028 - RNA, 19 nt, Artificial Sequence
  Description of Artificial Sequence: Synthetic oligonucleotide
  Sense strand starting at position 2982 of SEQ ID NO: 602
ucaauaggugcggaguuua

SEQ ID NO: 50029 - RNA, 19 nt, Artificial Sequence
  Description of Artificial Sequence: Synthetic oligonucleotide
  Antisense strand to SEQ ID NO: 49948
uaaacuccgcaccuauuga

SEQ ID NO: 50030 - RNA, 19 nt, Artificial Sequence
  Description of Artificial Sequence: Synthetic oligonucleotide
  Sense strand starting at position 3014 of SEQ ID NO: 602
gaucucugugaccacagua

SEQ ID NO: 50031 - RNA, 19 nt, Artificial Sequence
  Description of Artificial Sequence: Synthetic oligonucleotide
  Antisense strand to SEQ ID NO: 49950
uacuguggucacagagauc

SEQ ID NO: 50032 - RNA, 19 nt, Artificial Sequence
  Description of Artificial Sequence: Synthetic oligonucleotide
  Sense strand starting at position 3019 of SEQ ID NO: 602
cugugaccacaguaaauua

SEQ ID NO: 50033 - RNA, 19 nt, Artificial Sequence
  Description of Artificial Sequence: Synthetic oligonucleotide
  Antisense strand to SEQ ID NO: 49952
uaauuuacuguggucacag

SEQ ID NO: 50034 - RNA, 19 nt, Artificial Sequence
  Description of Artificial Sequence: Synthetic oligonucleotide
  Sense strand starting at position 3232 of SEQ ID NO: 602
ucuaauuauuccuugguga

SEQ ID NO: 50035 - RNA, 19 nt, Artificial Sequence
  Description of Artificial Sequence: Synthetic oligonucleotide
  Antisense strand to SEQ ID NO: 49954
ucaccaaggaauaauuaga

SEQ ID NO: 50036 - RNA, 19 nt, Artificial Sequence
  Description of Artificial Sequence: Synthetic oligonucleotide
  Sense strand starting at position 3233 of SEQ ID NO: 602
cuaauuauuccuuggugau

SEQ ID NO: 50037 - RNA, 19 nt, Artificial Sequence
  Description of Artificial Sequence: Synthetic oligonucleotide
  Antisense strand to SEQ ID NO: 49956
aucaccaaggaauaauuag

SEQ ID NO: 50038 - RNA, 19 nt, Artificial Sequence
  Description of Artificial Sequence: Synthetic oligonucleotide
  Sense strand starting at position 3274 of SEQ ID NO: 602
aacauaucucugugguuga

SEQ ID NO: 50039 - RNA, 19 nt, Artificial Sequence
  Description of Artificial Sequence: Synthetic oligonucleotide
  Antisense strand to SEQ ID NO: 49958
ucaaccacagagauauguu

SEQ ID NO: 50040 - RNA, 19 nt, Artificial Sequence
  Description of Artificial Sequence: Synthetic oligonucleotide
  Sense strand starting at position 3306 of SEQ ID NO: 602
aucuguccugaucauuaga

SEQ ID NO: 50041 - RNA, 19 nt, Artificial Sequence
  Description of Artificial Sequence: Synthetic oligonucleotide
  Antisense strand to SEQ ID NO: 49960
ucuaaugaucaggacagau

SEQ ID NO: 50042 - RNA, 19 nt, Artificial Sequence
  Description of Artificial Sequence: Synthetic oligonucleotide
  Sense strand starting at position 3374 of SEQ ID NO: 602
guagcucaaacguaagaug

SEQ ID NO: 50043 - RNA, 19 nt, Artificial Sequence
  Description of Artificial Sequence: Synthetic oligonucleotide
  Antisense strand to SEQ ID NO: 49962
caucuuacguuugagcuac

SEQ ID NO: 50044 - RNA, 19 nt, Artificial Sequence
  Description of Artificial Sequence: Synthetic oligonucleotide
  Sense strand starting at position 3415 of SEQ ID NO: 602
ucggaaucauugucaacuc

SEQ ID NO: 50045 - RNA, 19 nt, Artificial Sequence
  Description of Artificial Sequence: Synthetic oligonucleotide
  Antisense strand to SEQ ID NO: 49964
gaguugacaaugauuccga

SEQ ID NO: 50046 - RNA, 19 nt, Artificial Sequence
  Description of Artificial Sequence: Synthetic oligonucleotide
  Sense strand starting at position 206 of SEQ ID NO: 603
caaggaaaucugugauccu

SEQ ID NO: 50047 - RNA, 19 nt, Artificial Sequence
  Description of Artificial Sequence: Synthetic oligonucleotide
  Antisense strand to SEQ ID NO: 49966
aggaucacagauuuccuug

SEQ ID NO: 50048 - RNA, 19 nt, Artificial Sequence
  Description of Artificial Sequence: Synthetic oligonucleotide
  Sense strand starting at position 215 of SEQ ID NO: 603
cugugauccuaccugaagu

SEQ ID NO: 50049 - RNA, 19 nt, Artificial Sequence
  Description of Artificial Sequence: Synthetic oligonucleotide
  Antisense strand to SEQ ID NO: 49968
acuucagguaggaucacag

SEQ ID NO: 50050 - RNA, 19 nt, Artificial Sequence
  Description of Artificial Sequence: Synthetic oligonucleotide
  Sense strand starting at position 402 of SEQ ID NO: 603
ggguaacacaugugccuua

SEQ ID NO: 50051 - RNA, 19 nt, Artificial Sequence
  Description of Artificial Sequence: Synthetic oligonucleotide
  Antisense strand to SEQ ID NO: 49970
uaaggcacauguguuaccc

SEQ ID NO: 50052 - RNA, 19 nt, Artificial Sequence
  Description of Artificial Sequence: Synthetic oligonucleotide
  Sense strand starting at position 420 of SEQ ID NO: 603
agaggcuugacuugaaagu

SEQ ID NO: 50053 - RNA, 19 nt, Artificial Sequence
  Description of Artificial Sequence: Synthetic oligonucleotide
  Antisense strand to SEQ ID NO: 49972
acuuucaagucaagccucu

SEQ ID NO: 50054 - RNA, 19 nt, Artificial Sequence
  Description of Artificial Sequence: Synthetic oligonucleotide
  Sense strand starting at position 456 of SEQ ID NO: 603
guguguucagaugggauua

SEQ ID NO: 50055 - RNA, 19 nt, Artificial Sequence
  Description of Artificial Sequence: Synthetic oligonucleotide
  Antisense strand to SEQ ID NO: 49974
uaaucccaucugaacacac

SEQ ID NO: 50056 - RNA, 19 nt, Artificial Sequence
  Description of Artificial Sequence: Synthetic oligonucleotide
  Sense strand starting at position 541 of SEQ ID NO: 603
agcacuuucgagugacaga

SEQ ID NO: 50057 - RNA, 19 nt, Artificial Sequence
  Description of Artificial Sequence: Synthetic oligonucleotide
  Antisense strand to SEQ ID NO: 49976
ucugucacucgaaagugcu

SEQ ID NO: 50058 - RNA, 19 nt, Artificial Sequence
  Description of Artificial Sequence: Synthetic oligonucleotide
  Sense strand starting at position 542 of SEQ ID NO: 603
gcacuuucgagugacagag

SEQ ID NO: 50059 - RNA, 19 nt, Artificial Sequence
  Description of Artificial Sequence: Synthetic oligonucleotide
  Antisense strand to SEQ ID NO: 49978
cucugucacucgaaagugc

SEQ ID NO: 50060 - RNA, 19 nt, Artificial Sequence
  Description of Artificial Sequence: Synthetic oligonucleotide
  Sense strand starting at position 546 of SEQ ID NO: 603
uuucgagugacagagcuaa

SEQ ID NO: 50061 - RNA, 19 nt, Artificial Sequence
  Description of Artificial Sequence: Synthetic oligonucleotide
  Antisense strand to SEQ ID NO: 49980
uuagcucugucacucgaaa

SEQ ID NO: 50062 - RNA, 19 nt, Artificial Sequence
  Description of Artificial Sequence: Synthetic oligonucleotide
  Sense strand starting at position 642 of SEQ ID NO: 603
gcaaguguuuggaugcgga

SEQ ID NO: 50063 - RNA, 19 nt, Artificial Sequence
  Description of Artificial Sequence: Synthetic oligonucleotide
  Antisense strand to SEQ ID NO: 49982
uccgcauccaaacacuugc

SEQ ID NO: 50064 - RNA, 19 nt, Artificial Sequence
  Description of Artificial Sequence: Synthetic oligonucleotide
  Sense strand starting at position 848 of SEQ ID NO: 603
ucaucugucguuugaggga

SEQ ID NO: 50065 - RNA, 19 nt, Artificial Sequence
  Description of Artificial Sequence: Synthetic oligonucleotide
  Antisense strand to SEQ ID NO: 49984
ucccucaaacgacagauga

SEQ ID NO: 50066 - RNA, 19 nt, Artificial Sequence
  Description of Artificial Sequence: Synthetic oligonucleotide
  Sense strand starting at position 894 of SEQ ID NO: 603
gggcuccugagaugaucau

SEQ ID NO: 50067 - RNA, 19 nt, Artificial Sequence
  Description of Artificial Sequence: Synthetic oligonucleotide
  Antisense strand to SEQ ID NO: 49986
augaucaucucaggagccc

SEQ ID NO: 50068 - RNA, 19 nt, Artificial Sequence
  Description of Artificial Sequence: Synthetic oligonucleotide
  Sense strand starting at position 927 of SEQ ID NO: 603
uggcaaagagccuggcaua

SEQ ID NO: 50069 - RNA, 19 nt, Artificial Sequence
  Description of Artificial Sequence: Synthetic oligonucleotide
  Antisense strand to SEQ ID NO: 49988
uaugccaggcucuuugcca

SEQ ID NO: 50070 - RNA, 19 nt, Artificial Sequence
  Description of Artificial Sequence: Synthetic oligonucleotide
  Sense strand starting at position 970 of SEQ ID NO: 603
aucguauuauuauuggaag

SEQ ID NO: 50071 - RNA, 19 nt, Artificial Sequence
  Description of Artificial Sequence: Synthetic oligonucleotide
  Antisense strand to SEQ ID NO: 49990
cuuccaauaauaauacgau

SEQ ID NO: 50072 - RNA, 19 nt, Artificial Sequence
  Description of Artificial Sequence: Synthetic oligonucleotide
  Sense strand starting at position 972 of SEQ ID NO: 603
cguauuauuauuggaagag

SEQ ID NO: 50073 - RNA, 19 nt, Artificial Sequence
  Description of Artificial Sequence: Synthetic oligonucleotide
  Antisense strand to SEQ ID NO: 49992
cucuuccaauaauaauacg

SEQ ID NO: 50074 - RNA, 19 nt, Artificial Sequence
  Description of Artificial Sequence: Synthetic oligonucleotide
  Sense strand starting at position 1046 of SEQ ID NO: 603
ggugccuacccuuacaauu

SEQ ID NO: 50075 - RNA, 19 nt, Artificial Sequence
  Description of Artificial Sequence: Synthetic oligonucleotide
  Antisense strand to SEQ ID NO: 49994
aauuguaaggguaggcacc

SEQ ID NO: 50076 - RNA, 19 nt, Artificial Sequence
  Description of Artificial Sequence: Synthetic oligonucleotide
  Sense strand starting at position 1059 of SEQ ID NO: 603
acaauuaccugugugaucu

SEQ ID NO: 50077 - RNA, 19 nt, Artificial Sequence
  Description of Artificial Sequence: Synthetic oligonucleotide
  Antisense strand to SEQ ID NO: 49996
agaucacacagguaauugu

SEQ ID NO: 50078 - RNA, 19 nt, Artificial Sequence
  Description of Artificial Sequence: Synthetic oligonucleotide
  Sense strand starting at position 1143 of SEQ ID NO: 603
uuaccaggcugucuuaaga

SEQ ID NO: 50079 - RNA, 19 nt, Artificial Sequence
  Description of Artificial Sequence: Synthetic oligonucleotide
  Antisense strand to SEQ ID NO: 49998
ucuuaagacagccugguaa

SEQ ID NO: 50080 - RNA, 19 nt, Artificial Sequence
  Description of Artificial Sequence: Synthetic oligonucleotide
  Sense strand starting at position 1460 of SEQ ID NO: 603
gugccuugggcaugagaug

SEQ ID NO: 50081 - RNA, 19 nt, Artificial Sequence
  Description of Artificial Sequence: Synthetic oligonucleotide
  Antisense strand to SEQ ID NO: 50000
caucucaugcccaaggcac

SEQ ID NO: 50082 - RNA, 19 nt, Artificial Sequence
  Description of Artificial Sequence: Synthetic oligonucleotide
  Sense strand starting at position 1602 of SEQ ID NO: 603
ccuccucuugcauaaucga

SEQ ID NO: 50083 - RNA, 19 nt, Artificial Sequence
  Description of Artificial Sequence: Synthetic oligonucleotide
  Antisense strand to SEQ ID NO: 50002
ucgauuaugcaagaggagg

SEQ ID NO: 50084 - RNA, 19 nt, Artificial Sequence
  Description of Artificial Sequence: Synthetic oligonucleotide
  Sense strand starting at position 1609 of SEQ ID NO: 603
uugcauaaucgagggaguu

SEQ ID NO: 50085 - RNA, 19 nt, Artificial Sequence
  Description of Artificial Sequence: Synthetic oligonucleotide
  Antisense strand to SEQ ID NO: 50004
aacucccucgauuaugcaa

SEQ ID NO: 50086 - RNA, 19 nt, Artificial Sequence
  Description of Artificial Sequence: Synthetic oligonucleotide
  Sense strand starting at position 1610 of SEQ ID NO: 603
ugcauaaucgagggaguug

SEQ ID NO: 50087 - RNA, 19 nt, Artificial Sequence
  Description of Artificial Sequence: Synthetic oligonucleotide
  Antisense strand to SEQ ID NO: 50006
caacucccucgauuaugca

SEQ ID NO: 50088 - RNA, 19 nt, Artificial Sequence
  Description of Artificial Sequence: Synthetic oligonucleotide
  Sense strand starting at position 1695 of SEQ ID NO: 603
gcaccucuguauuugcaga

SEQ ID NO: 50089 - RNA, 19 nt, Artificial Sequence
  Description of Artificial Sequence: Synthetic oligonucleotide
  Antisense strand to SEQ ID NO: 50008
ucugcaaauacagaggugc

SEQ ID NO: 50090 - RNA, 19 nt, Artificial Sequence
  Description of Artificial Sequence: Synthetic oligonucleotide
  Sense strand starting at position 1976 of SEQ ID NO: 603
ugcuauuaagcugagcaga

SEQ ID NO: 50091 - RNA, 19 nt, Artificial Sequence
  Description of Artificial Sequence: Synthetic oligonucleotide
  Antisense strand to SEQ ID NO: 50010
ucugcucagcuuaauagca

SEQ ID NO: 50092 - RNA, 19 nt, Artificial Sequence
  Description of Artificial Sequence: Synthetic oligonucleotide
  Sense strand starting at position 1978 of SEQ ID NO: 603
cuauuaagcugagcagaua

SEQ ID NO: 50093 - RNA, 19 nt, Artificial Sequence
  Description of Artificial Sequence: Synthetic oligonucleotide
  Antisense strand to SEQ ID NO: 50012
uaucugcucagcuuaauag

SEQ ID NO: 50094 - RNA, 19 nt, Artificial Sequence
  Description of Artificial Sequence: Synthetic oligonucleotide
  Sense strand starting at position 2248 of SEQ ID NO: 603
gcuggacuuccucaaguca

SEQ ID NO: 50095 - RNA, 19 nt, Artificial Sequence
  Description of Artificial Sequence: Synthetic oligonucleotide
  Antisense strand to SEQ ID NO: 50014
ugacuugaggaaguccagc

SEQ ID NO: 50096 - RNA, 19 nt, Artificial Sequence
  Description of Artificial Sequence: Synthetic oligonucleotide
  Sense strand starting at position 2378 of SEQ ID NO: 603
ggagaagacucugccaucu

SEQ ID NO: 50097 - RNA, 19 nt, Artificial Sequence
  Description of Artificial Sequence: Synthetic oligonucleotide
  Antisense strand to SEQ ID NO: 50016
agauggcagagucuucucc

SEQ ID NO: 50098 - RNA, 19 nt, Artificial Sequence
  Description of Artificial Sequence: Synthetic oligonucleotide
  Sense strand starting at position 2438 of SEQ ID NO: 603
uguugugugggaugugaaa

SEQ ID NO: 50099 - RNA, 19 nt, Artificial Sequence
  Description of Artificial Sequence: Synthetic oligonucleotide
  Antisense strand to SEQ ID NO: 50018
uuucacaucccacacaaca

SEQ ID NO: 50100 - RNA, 19 nt, Artificial Sequence
  Description of Artificial Sequence: Synthetic oligonucleotide
  Sense strand starting at position 2475 of SEQ ID NO: 603
uggccuugggcgagucaga

SEQ ID NO: 50101 - RNA, 19 nt, Artificial Sequence
  Description of Artificial Sequence: Synthetic oligonucleotide
  Antisense strand to SEQ ID NO: 50020
ucugacucgcccaaggcca

SEQ ID NO: 50102 - RNA, 19 nt, Artificial Sequence
  Description of Artificial Sequence: Synthetic oligonucleotide
  Sense strand starting at position 2531 of SEQ ID NO: 603
gcucaugccugacuucuga

SEQ ID NO: 50103 - RNA, 19 nt, Artificial Sequence
  Description of Artificial Sequence: Synthetic oligonucleotide
  Antisense strand to SEQ ID NO: 50022
ucagaagucaggcaugagc

SEQ ID NO: 50104 - RNA, 19 nt, Artificial Sequence
  Description of Artificial Sequence: Synthetic oligonucleotide
  Sense strand starting at position 2696 of SEQ ID NO: 603
gccuguuuccuuguuugca

SEQ ID NO: 50105 - RNA, 19 nt, Artificial Sequence
  Description of Artificial Sequence: Synthetic oligonucleotide
  Antisense strand to SEQ ID NO: 50024
ugcaaacaaggaaacaggc

SEQ ID NO: 50106 - RNA, 19 nt, Artificial Sequence
  Description of Artificial Sequence: Synthetic oligonucleotide
  Sense strand starting at position 2752 of SEQ ID NO: 603
cuuacaggcuccuuugaga

SEQ ID NO: 50107 - RNA, 19 nt, Artificial Sequence
  Description of Artificial Sequence: Synthetic oligonucleotide
  Antisense strand to SEQ ID NO: 50026
ucucaaaggagccuguaag

SEQ ID NO: 50108 - RNA, 19 nt, Artificial Sequence
  Description of Artificial Sequence: Synthetic oligonucleotide
  Sense strand starting at position 3074 of SEQ ID NO: 603
gcuggagucuucucaggga

SEQ ID NO: 50109 - RNA, 19 nt, Artificial Sequence
  Description of Artificial Sequence: Synthetic oligonucleotide
  Antisense strand to SEQ ID NO: 50028
ucccugagaagacuccagc

SEQ ID NO: 50110 - RNA, 19 nt, Artificial Sequence
  Description of Artificial Sequence: Synthetic oligonucleotide
  Sense strand starting at position 3364 of SEQ ID NO: 603
cuccuuuguccuuggacau

SEQ ID NO: 50111 - RNA, 19 nt, Artificial Sequence
  Description of Artificial Sequence: Synthetic oligonucleotide
  Antisense strand to SEQ ID NO: 50030
auguccaaggacaaaggag

SEQ ID NO: 50112 - RNA, 19 nt, Artificial Sequence
  Description of Artificial Sequence: Synthetic oligonucleotide
  Sense strand starting at position 3365 of SEQ ID NO: 603
uccuuuguccuuggacauu

SEQ ID NO: 50113 - RNA, 19 nt, Artificial Sequence
  Description of Artificial Sequence: Synthetic oligonucleotide
  Antisense strand to SEQ ID NO: 50032
aauguccaaggacaaagga

SEQ ID NO: 50114 - RNA, 19 nt, Artificial Sequence
  Description of Artificial Sequence: Synthetic oligonucleotide
  Sense strand starting at position 3462 of SEQ ID NO: 603
gugugaaauccuggagaaa

SEQ ID NO: 50115 - RNA, 19 nt, Artificial Sequence
  Description of Artificial Sequence: Synthetic oligonucleotide
  Antisense strand to SEQ ID NO: 50034
uuucuccaggauuucacac

SEQ ID NO: 50116 - RNA, 19 nt, Artificial Sequence
  Description of Artificial Sequence: Synthetic oligonucleotide
  Sense strand starting at position 3509 of SEQ ID NO: 603
ggaucuuccuuccuggaga

SEQ ID NO: 50117 - RNA, 19 nt, Artificial Sequence
  Description of Artificial Sequence: Synthetic oligonucleotide
  Antisense strand to SEQ ID NO: 50036
ucuccaggaaggaagaucc

SEQ ID NO: 50118 - RNA, 19 nt, Artificial Sequence
  Description of Artificial Sequence: Synthetic oligonucleotide
  Sense strand starting at position 3711 of SEQ ID NO: 603
gguggcuuggucuaucaag

SEQ ID NO: 50119 - RNA, 19 nt, Artificial Sequence
  Description of Artificial Sequence: Synthetic oligonucleotide
  Antisense strand to SEQ ID NO: 50038
cuugauagaccaagccacc

SEQ ID NO: 50120 - RNA, 19 nt, Artificial Sequence
  Description of Artificial Sequence: Synthetic oligonucleotide
  Sense strand starting at position 3797 of SEQ ID NO: 603
aagaguauuucuggaauga

SEQ ID NO: 50121 - RNA, 19 nt, Artificial Sequence
  Description of Artificial Sequence: Synthetic oligonucleotide
  Antisense strand to SEQ ID NO: 50040
ucauuccagaaauacucuu

SEQ ID NO: 50122 - RNA, 19 nt, Artificial Sequence
  Description of Artificial Sequence: Synthetic oligonucleotide
  Sense strand starting at position 3839 of SEQ ID NO: 603
ucuaucagccucugcaaga

SEQ ID NO: 50123 - RNA, 19 nt, Artificial Sequence
  Description of Artificial Sequence: Synthetic oligonucleotide
  Antisense strand to SEQ ID NO: 50042
ucuugcagaggcugauaga

SEQ ID NO: 50124 - RNA, 19 nt, Artificial Sequence
  Description of Artificial Sequence: Synthetic oligonucleotide
  Sense strand starting at position 3840 of SEQ ID NO: 603
cuaucagccucugcaagaa

SEQ ID NO: 50125 - RNA, 19 nt, Artificial Sequence
  Description of Artificial Sequence: Synthetic oligonucleotide
  Antisense strand to SEQ ID NO: 50044
uucuugcagaggcugauag

SEQ ID NO: 50126 - RNA, 19 nt, Artificial Sequence
  Description of Artificial Sequence: Synthetic oligonucleotide
  Sense strand starting at position 63 of SEQ ID NO: 604
gcugacaaagcucauuaga

SEQ ID NO: 50127 - RNA, 19 nt, Artificial Sequence
  Description of Artificial Sequence: Synthetic oligonucleotide
  Antisense strand to SEQ ID NO: 50046
ucuaaugagcuuugucagc

SEQ ID NO: 50128 - RNA, 19 nt, Artificial Sequence
  Description of Artificial Sequence: Synthetic oligonucleotide
  Sense strand starting at position 204 of SEQ ID NO: 604
ugugcucugagagagucaa

SEQ ID NO: 50129 - RNA, 19 nt, Artificial Sequence
  Description of Artificial Sequence: Synthetic oligonucleotide
  Antisense strand to SEQ ID NO: 50048
uugacucucucagagcaca

SEQ ID NO: 50130 - RNA, 19 nt, Artificial Sequence
  Description of Artificial Sequence: Synthetic oligonucleotide
  Sense strand starting at position 457 of SEQ ID NO: 604
acgaaauaaucugcagucu

SEQ ID NO: 50131 - RNA, 19 nt, Artificial Sequence
  Description of Artificial Sequence: Synthetic oligonucleotide
  Antisense strand to SEQ ID NO: 50050
agacugcagauuauuucgu

SEQ ID NO: 50132 - RNA, 19 nt, Artificial Sequence
  Description of Artificial Sequence: Synthetic oligonucleotide
  Sense strand starting at position 458 of SEQ ID NO: 604
cgaaauaaucugcagucuu

SEQ ID NO: 50133 - RNA, 19 nt, Artificial Sequence
  Description of Artificial Sequence: Synthetic oligonucleotide
  Antisense strand to SEQ ID NO: 50052
aagacugcagauuauuucg

SEQ ID NO: 50134 - RNA, 19 nt, Artificial Sequence
  Description of Artificial Sequence: Synthetic oligonucleotide
  Sense strand starting at position 553 of SEQ ID NO: 604
auucuuugcuucuuuagga

SEQ ID NO: 50135 - RNA, 19 nt, Artificial Sequence
  Description of Artificial Sequence: Synthetic oligonucleotide
  Antisense strand to SEQ ID NO: 50054
uccuaaagaagcaaagaau

SEQ ID NO: 50136 - RNA, 19 nt, Artificial Sequence
  Description of Artificial Sequence: Synthetic oligonucleotide
  Sense strand starting at position 798 of SEQ ID NO: 604
ggagaugccuucuucccau

SEQ ID NO: 50137 - RNA, 19 nt, Artificial Sequence
  Description of Artificial Sequence: Synthetic oligonucleotide
  Antisense strand to SEQ ID NO: 50056
augggaagaaggcaucucc

SEQ ID NO: 50138 - RNA, 19 nt, Artificial Sequence
  Description of Artificial Sequence: Synthetic oligonucleotide
  Sense strand starting at position 840 of SEQ ID NO: 604
uggcaaagcgagagcgauu

SEQ ID NO: 50139 - RNA, 19 nt, Artificial Sequence
  Description of Artificial Sequence: Synthetic oligonucleotide
  Antisense strand to SEQ ID NO: 50058
aaucgcucucgcuuugcca

SEQ ID NO: 50140 - RNA, 19 nt, Artificial Sequence
  Description of Artificial Sequence: Synthetic oligonucleotide
  Sense strand starting at position 1119 of SEQ ID NO: 604
uugggaauccugggccaga

SEQ ID NO: 50141 - RNA, 19 nt, Artificial Sequence
  Description of Artificial Sequence: Synthetic oligonucleotide
  Antisense strand to SEQ ID NO: 50060
ucuggcccaggauucccaa

SEQ ID NO: 50142 - RNA, 19 nt, Artificial Sequence
  Description of Artificial Sequence: Synthetic oligonucleotide
  Sense strand starting at position 1316 of SEQ ID NO: 604
ggaccuuuaucucccaaag

SEQ ID NO: 50143 - RNA, 19 nt, Artificial Sequence
  Description of Artificial Sequence: Synthetic oligonucleotide
  Antisense strand to SEQ ID NO: 50062
cuuugggagauaaaggucc

SEQ ID NO: 50144 - RNA, 19 nt, Artificial Sequence
  Description of Artificial Sequence: Synthetic oligonucleotide
  Sense strand starting at position 1361 of SEQ ID NO: 604
gaaggauucucagcccgga

SEQ ID NO: 50145 - RNA, 19 nt, Artificial Sequence
  Description of Artificial Sequence: Synthetic oligonucleotide
  Antisense strand to SEQ ID NO: 50064
uccgggcugagaauccuuc

SEQ ID NO: 50146 - RNA, 19 nt, Artificial Sequence
  Description of Artificial Sequence: Synthetic oligonucleotide
  Sense strand starting at position 1364 of SEQ ID NO: 604
ggauucucagcccggauaa

SEQ ID NO: 50147 - RNA, 19 nt, Artificial Sequence
  Description of Artificial Sequence: Synthetic oligonucleotide
  Antisense strand to SEQ ID NO: 50066
uuauccgggcugagaaucc

SEQ ID NO: 50148 - RNA, 19 nt, Artificial Sequence
  Description of Artificial Sequence: Synthetic oligonucleotide
  Sense strand starting at position 1366 of SEQ ID NO: 604
auucucagcccggauaagu

SEQ ID NO: 50149 - RNA, 19 nt, Artificial Sequence
  Description of Artificial Sequence: Synthetic oligonucleotide
  Antisense strand to SEQ ID NO: 50068
acuuauccgggcugagaau

SEQ ID NO: 50150 - RNA, 19 nt, Artificial Sequence
  Description of Artificial Sequence: Synthetic oligonucleotide
  Sense strand starting at position 1374 of SEQ ID NO: 604
cccggauaaguaggcaaua

SEQ ID NO: 50151 - RNA, 19 nt, Artificial Sequence
  Description of Artificial Sequence: Synthetic oligonucleotide
  Antisense strand to SEQ ID NO: 50070
uauugccuacuuauccggg

SEQ ID NO: 50152 - RNA, 19 nt, Artificial Sequence
  Description of Artificial Sequence: Synthetic oligonucleotide
  Sense strand starting at position 1376 of SEQ ID NO: 604
cggauaaguaggcaauacu

SEQ ID NO: 50153 - RNA, 19 nt, Artificial Sequence
  Description of Artificial Sequence: Synthetic oligonucleotide
  Antisense strand to SEQ ID NO: 50072
aguauugccuacuuauccg

SEQ ID NO: 50154 - RNA, 19 nt, Artificial Sequence
  Description of Artificial Sequence: Synthetic oligonucleotide
  Sense strand starting at position 1446 of SEQ ID NO: 604
ggaccuccggagcaagauu

SEQ ID NO: 50155 - RNA, 19 nt, Artificial Sequence
  Description of Artificial Sequence: Synthetic oligonucleotide
  Antisense strand to SEQ ID NO: 50074
aaucuugcuccggaggucc

SEQ ID NO: 50156 - RNA, 19 nt, Artificial Sequence
  Description of Artificial Sequence: Synthetic oligonucleotide
  Sense strand starting at position 1455 of SEQ ID NO: 604
gagcaagauuuccaaugga

SEQ ID NO: 50157 - RNA, 19 nt, Artificial Sequence
  Description of Artificial Sequence: Synthetic oligonucleotide
  Antisense strand to SEQ ID NO: 50076
uccauuggaaaucuugcuc

SEQ ID NO: 50158 - RNA, 19 nt, Artificial Sequence
  Description of Artificial Sequence: Synthetic oligonucleotide
  Sense strand starting at position 1477 of SEQ ID NO: 604
ggaagagaaacucguucuu

SEQ ID NO: 50159 - RNA, 19 nt, Artificial Sequence
  Description of Artificial Sequence: Synthetic oligonucleotide
  Antisense strand to SEQ ID NO: 50078
aagaacgaguuucucuucc

SEQ ID NO: 50160 - RNA, 19 nt, Artificial Sequence
  Description of Artificial Sequence: Synthetic oligonucleotide
  Sense strand starting at position 1479 of SEQ ID NO: 604
aagagaaacucguucuuga

SEQ ID NO: 50161 - RNA, 19 nt, Artificial Sequence
  Description of Artificial Sequence: Synthetic oligonucleotide
  Antisense strand to SEQ ID NO: 50080
ucaagaacgaguuucucuu

SEQ ID NO: 50162 - RNA, 19 nt, Artificial Sequence
  Description of Artificial Sequence: Synthetic oligonucleotide
  Sense strand starting at position 1482 of SEQ ID NO: 604
agaaacucguucuugaaug

SEQ ID NO: 50163 - RNA, 19 nt, Artificial Sequence
  Description of Artificial Sequence: Synthetic oligonucleotide
  Antisense strand to SEQ ID NO: 50082
cauucaagaacgaguuucu

SEQ ID NO: 50164 - RNA, 19 nt, Artificial Sequence
  Description of Artificial Sequence: Synthetic oligonucleotide
  Sense strand starting at position 1488 of SEQ ID NO: 604
ucguucuugaaugggaaga

SEQ ID NO: 50165 - RNA, 19 nt, Artificial Sequence
  Description of Artificial Sequence: Synthetic oligonucleotide
  Antisense strand to SEQ ID NO: 50084
ucuucccauucaagaacga

SEQ ID NO: 50166 - RNA, 19 nt, Artificial Sequence
  Description of Artificial Sequence: Synthetic oligonucleotide
  Sense strand starting at position 1734 of SEQ ID NO: 604
aagggucggccugagagaa

SEQ ID NO: 50167 - RNA, 19 nt, Artificial Sequence
  Description of Artificial Sequence: Synthetic oligonucleotide
  Antisense strand to SEQ ID NO: 50086
uucucucaggccgacccuu

SEQ ID NO: 50168 - RNA, 19 nt, Artificial Sequence
  Description of Artificial Sequence: Synthetic oligonucleotide
  Sense strand starting at position 2408 of SEQ ID NO: 604
aguuuaggcgcguuucaga

SEQ ID NO: 50169 - RNA, 19 nt, Artificial Sequence
  Description of Artificial Sequence: Synthetic oligonucleotide
  Antisense strand to SEQ ID NO: 50088
ucugaaacgcgccuaaacu

SEQ ID NO: 50170 - RNA, 19 nt, Artificial Sequence
  Description of Artificial Sequence: Synthetic oligonucleotide
  Sense strand starting at position 2691 of SEQ ID NO: 604
guaugugaaaugcaaguuu

SEQ ID NO: 50171 - RNA, 19 nt, Artificial Sequence
  Description of Artificial Sequence: Synthetic oligonucleotide
  Antisense strand to SEQ ID NO: 50090
aaacuugcauuucacauac

SEQ ID NO: 50172 - RNA, 19 nt, Artificial Sequence
  Description of Artificial Sequence: Synthetic oligonucleotide
  Sense strand starting at position 2807 of SEQ ID NO: 604
ggaggugauaaguguuaug

SEQ ID NO: 50173 - RNA, 19 nt, Artificial Sequence
  Description of Artificial Sequence: Synthetic oligonucleotide
  Antisense strand to SEQ ID NO: 50092
cauaacacuuaucaccucc

SEQ ID NO: 50174 - RNA, 19 nt, Artificial Sequence
  Description of Artificial Sequence: Synthetic oligonucleotide
  Sense strand starting at position 3027 of SEQ ID NO: 604
gcuuuagggccuuauggau

SEQ ID NO: 50175 - RNA, 19 nt, Artificial Sequence
  Description of Artificial Sequence: Synthetic oligonucleotide
  Antisense strand to SEQ ID NO: 50094
auccauaaggcccuaaagc

SEQ ID NO: 50176 - RNA, 19 nt, Artificial Sequence
  Description of Artificial Sequence: Synthetic oligonucleotide
  Sense strand starting at position 3074 of SEQ ID NO: 604
gggcuuuaagcugagaggu

SEQ ID NO: 50177 - RNA, 19 nt, Artificial Sequence
  Description of Artificial Sequence: Synthetic oligonucleotide
  Antisense strand to SEQ ID NO: 50096
accucucagcuuaaagccc

SEQ ID NO: 50178 - RNA, 19 nt, Artificial Sequence
  Description of Artificial Sequence: Synthetic oligonucleotide
  Sense strand starting at position 3508 of SEQ ID NO: 604
ucuggcuacuuuguagaaa

SEQ ID NO: 50179 - RNA, 19 nt, Artificial Sequence
  Description of Artificial Sequence: Synthetic oligonucleotide
  Antisense strand to SEQ ID NO: 50098
uuucuacaaaguagccaga

SEQ ID NO: 50180 - RNA, 19 nt, Artificial Sequence
  Description of Artificial Sequence: Synthetic oligonucleotide
  Sense strand starting at position 3552 of SEQ ID NO: 604
aggagagcaguuuguuaca

SEQ ID NO: 50181 - RNA, 19 nt, Artificial Sequence
  Description of Artificial Sequence: Synthetic oligonucleotide
  Antisense strand to SEQ ID NO: 50100
uguaacaaacugcucuccu

SEQ ID NO: 50182 - RNA, 19 nt, Artificial Sequence
  Description of Artificial Sequence: Synthetic oligonucleotide
  Sense strand starting at position 3592 of SEQ ID NO: 604
auagauuagagaggcagua

SEQ ID NO: 50183 - RNA, 19 nt, Artificial Sequence
  Description of Artificial Sequence: Synthetic oligonucleotide
  Antisense strand to SEQ ID NO: 50102
uacugccucucuaaucuau

SEQ ID NO: 50184 - RNA, 19 nt, Artificial Sequence
  Description of Artificial Sequence: Synthetic oligonucleotide
  Sense strand starting at position 3620 of SEQ ID NO: 604
gagagcauucuggauguuu

SEQ ID NO: 50185 - RNA, 19 nt, Artificial Sequence
  Description of Artificial Sequence: Synthetic oligonucleotide
  Antisense strand to SEQ ID NO: 50104
aaacauccagaaugcucuc

SEQ ID NO: 50186 - RNA, 19 nt, Artificial Sequence
  Description of Artificial Sequence: Synthetic oligonucleotide
  Sense strand starting at position 3628 of SEQ ID NO: 604
ucuggauguuucuugaaga

SEQ ID NO: 50187 - RNA, 19 nt, Artificial Sequence
  Description of Artificial Sequence: Synthetic oligonucleotide
  Antisense strand to SEQ ID NO: 50106
ucuucaagaaacauccaga

SEQ ID NO: 50188 - RNA, 19 nt, Artificial Sequence
  Description of Artificial Sequence: Synthetic oligonucleotide
  Sense strand starting at position 3758 of SEQ ID NO: 604
gcaaguuugggacaaguuu

SEQ ID NO: 50189 - RNA, 19 nt, Artificial Sequence
  Description of Artificial Sequence: Synthetic oligonucleotide
  Antisense strand to SEQ ID NO: 50108
aaacuugucccaaacuugc

SEQ ID NO: 50190 - RNA, 19 nt, Artificial Sequence
  Description of Artificial Sequence: Synthetic oligonucleotide
  Sense strand starting at position 3798 of SEQ ID NO: 604
aauggaggcuguuugguau

SEQ ID NO: 50191 - RNA, 19 nt, Artificial Sequence
  Description of Artificial Sequence: Synthetic oligonucleotide
  Antisense strand to SEQ ID NO: 50110
auaccaaacagccuccauu

SEQ ID NO: 50192 - RNA, 19 nt, Artificial Sequence
  Description of Artificial Sequence: Synthetic oligonucleotide
  Sense strand starting at position 3804 of SEQ ID NO: 604
ggcuguuugguauacccau

SEQ ID NO: 50193 - RNA, 19 nt, Artificial Sequence
  Description of Artificial Sequence: Synthetic oligonucleotide
  Antisense strand to SEQ ID NO: 50112
auggguauaccaaacagcc

SEQ ID NO: 50194 - RNA, 19 nt, Artificial Sequence
  Description of Artificial Sequence: Synthetic oligonucleotide
  Sense strand starting at position 3811 of SEQ ID NO: 604
ugguauacccauugagagu

SEQ ID NO: 50195 - RNA, 19 nt, Artificial Sequence
  Description of Artificial Sequence: Synthetic oligonucleotide
  Antisense strand to SEQ ID NO: 50114
acucucaauggguauacca

SEQ ID NO: 50196 - RNA, 19 nt, Artificial Sequence
  Description of Artificial Sequence: Synthetic oligonucleotide
  Sense strand starting at position 3812 of SEQ ID NO: 604
gguauacccauugagaguu

SEQ ID NO: 50197 - RNA, 19 nt, Artificial Sequence
  Description of Artificial Sequence: Synthetic oligonucleotide
  Antisense strand to SEQ ID NO: 50116
aacucucaauggguauacc

SEQ ID NO: 50198 - RNA, 19 nt, Artificial Sequence
  Description of Artificial Sequence: Synthetic oligonucleotide
  Sense strand starting at position 3822 of SEQ ID NO: 604
uugagaguucucugggcac

SEQ ID NO: 50199 - RNA, 19 nt, Artificial Sequence
  Description of Artificial Sequence: Synthetic oligonucleotide
  Antisense strand to SEQ ID NO: 50118
gugcccagagaacucucaa

SEQ ID NO: 50200 - RNA, 19 nt, Artificial Sequence
  Description of Artificial Sequence: Synthetic oligonucleotide
  Sense strand starting at position 3824 of SEQ ID NO: 604
gagaguucucugggcacag

SEQ ID NO: 50201 - RNA, 19 nt, Artificial Sequence
  Description of Artificial Sequence: Synthetic oligonucleotide
  Antisense strand to SEQ ID NO: 50120
cugugcccagagaacucuc

SEQ ID NO: 50202 - RNA, 19 nt, Artificial Sequence
  Description of Artificial Sequence: Synthetic oligonucleotide
  Sense strand starting at position 3904 of SEQ ID NO: 604
cuuugagcuacuuggaaga

SEQ ID NO: 50203 - RNA, 19 nt, Artificial Sequence
  Description of Artificial Sequence: Synthetic oligonucleotide
  Antisense strand to SEQ ID NO: 50122
ucuuccaaguagcucaaag

SEQ ID NO: 50204 - RNA, 19 nt, Artificial Sequence
  Description of Artificial Sequence: Synthetic oligonucleotide
  Sense strand starting at position 3981 of SEQ ID NO: 604
guccaaggauucucgcaaa

SEQ ID NO: 50205 - RNA, 19 nt, Artificial Sequence
  Description of Artificial Sequence: Synthetic oligonucleotide
  Antisense strand to SEQ ID NO: 50124
uuugcgagaauccuuggac

SEQ ID NO: 50206 - RNA, 19 nt, Artificial Sequence
  Description of Artificial Sequence: Synthetic oligonucleotide
  Sense strand starting at position 3948 of SEQ ID NO: 606
ucaccuagucauugaagcu

SEQ ID NO: 50207 - RNA, 19 nt, Artificial Sequence
  Description of Artificial Sequence: Synthetic oligonucleotide
  Antisense strand to SEQ ID NO: 50126
agcuucaaugacuagguga

SEQ ID NO: 50208 - RNA, 19 nt, Artificial Sequence
  Description of Artificial Sequence: Synthetic oligonucleotide
  Sense strand starting at position 3944 of SEQ ID NO: 606
gaagucaccuagucauuga

SEQ ID NO: 50209 - RNA, 19 nt, Artificial Sequence
  Description of Artificial Sequence: Synthetic oligonucleotide
  Antisense strand to SEQ ID NO: 50128
ucaaugacuaggugacuuc

SEQ ID NO: 50210 - RNA, 19 nt, Artificial Sequence
  Description of Artificial Sequence: Synthetic oligonucleotide
  Sense strand starting at position 3431 of SEQ ID NO: 606
cuuugaaauaaguguagga

SEQ ID NO: 50211 - RNA, 19 nt, Artificial Sequence
  Description of Artificial Sequence: Synthetic oligonucleotide
  Antisense strand to SEQ ID NO: 50130
uccuacacuuauuucaaag

SEQ ID NO: 50212 - RNA, 19 nt, Artificial Sequence
  Description of Artificial Sequence: Synthetic oligonucleotide
  Sense strand starting at position 3427 of SEQ ID NO: 606
agggcuuugaaauaagugu

SEQ ID NO: 50213 - RNA, 19 nt, Artificial Sequence
  Description of Artificial Sequence: Synthetic oligonucleotide
  Antisense strand to SEQ ID NO: 50132
acacuuauuucaaagcccu

SEQ ID NO: 50214 - RNA, 19 nt, Artificial Sequence
  Description of Artificial Sequence: Synthetic oligonucleotide
  Sense strand starting at position 3205 of SEQ ID NO: 606
cgcugugaucagcauucua

SEQ ID NO: 50215 - RNA, 19 nt, Artificial Sequence
  Description of Artificial Sequence: Synthetic oligonucleotide
  Antisense strand to SEQ ID NO: 50134
uagaaugcugaucacagcg

SEQ ID NO: 50216 - RNA, 19 nt, Artificial Sequence
  Description of Artificial Sequence: Synthetic oligonucleotide
  Sense strand starting at position 3196 of SEQ ID NO: 606
cccauuuggcgcugugauc

SEQ ID NO: 50217 - RNA, 19 nt, Artificial Sequence
  Description of Artificial Sequence: Synthetic oligonucleotide
  Antisense strand to SEQ ID NO: 50136
gaucacagcgccaaauggg

SEQ ID NO: 50218 - RNA, 19 nt, Artificial Sequence
  Description of Artificial Sequence: Synthetic oligonucleotide
  Sense strand starting at position 3081 of SEQ ID NO: 606
acucguauuuaaugacuua

SEQ ID NO: 50219 - RNA, 19 nt, Artificial Sequence
  Description of Artificial Sequence: Synthetic oligonucleotide
  Antisense strand to SEQ ID NO: 50138
uaagucauuaaauacgagu

SEQ ID NO: 50220 - RNA, 19 nt, Artificial Sequence
  Description of Artificial Sequence: Synthetic oligonucleotide
  Sense strand starting at position 2963 of SEQ ID NO: 606
aaugaugugguugaaacga

SEQ ID NO: 50221 - RNA, 19 nt, Artificial Sequence
  Description of Artificial Sequence: Synthetic oligonucleotide
  Antisense strand to SEQ ID NO: 50140
ucguuucaaccacaucauu

SEQ ID NO: 50222 - RNA, 19 nt, Artificial Sequence
  Description of Artificial Sequence: Synthetic oligonucleotide
  Sense strand starting at position 2962 of SEQ ID NO: 606
uaaugaugugguugaaacg

SEQ ID NO: 50223 - RNA, 19 nt, Artificial Sequence
  Description of Artificial Sequence: Synthetic oligonucleotide
  Antisense strand to SEQ ID NO: 50142
cguuucaaccacaucauua

SEQ ID NO: 50224 - RNA, 19 nt, Artificial Sequence
  Description of Artificial Sequence: Synthetic oligonucleotide
  Sense strand starting at position 2897 of SEQ ID NO: 606
uggauaaguuuacuauacu

SEQ ID NO: 50225 - RNA, 19 nt, Artificial Sequence
  Description of Artificial Sequence: Synthetic oligonucleotide
  Antisense strand to SEQ ID NO: 50144
aguauaguaaacuuaucca

SEQ ID NO: 50226 - RNA, 19 nt, Artificial Sequence
  Description of Artificial Sequence: Synthetic oligonucleotide
  Sense strand starting at position 2860 of SEQ ID NO: 606
cagcuauagcaugaaguua

SEQ ID NO: 50227 - RNA, 19 nt, Artificial Sequence
  Description of Artificial Sequence: Synthetic oligonucleotide
  Antisense strand to SEQ ID NO: 50146
uaacuucaugcuauagcug

SEQ ID NO: 50228 - RNA, 19 nt, Artificial Sequence
  Description of Artificial Sequence: Synthetic oligonucleotide
  Sense strand starting at position 2859 of SEQ ID NO: 606
gcagcuauagcaugaaguu

SEQ ID NO: 50229 - RNA, 19 nt, Artificial Sequence
  Description of Artificial Sequence: Synthetic oligonucleotide
  Antisense strand to SEQ ID NO: 50148
aacuucaugcuauagcugc

SEQ ID NO: 50230 - RNA, 19 nt, Artificial Sequence
  Description of Artificial Sequence: Synthetic oligonucleotide
  Sense strand starting at position 2802 of SEQ ID NO: 606
caugaccgcuaguuaaagu

SEQ ID NO: 50231 - RNA, 19 nt, Artificial Sequence
  Description of Artificial Sequence: Synthetic oligonucleotide
  Antisense strand to SEQ ID NO: 50150
acuuuaacuagcggucaug

SEQ ID NO: 50232 - RNA, 19 nt, Artificial Sequence
  Description of Artificial Sequence: Synthetic oligonucleotide
  Sense strand starting at position 2799 of SEQ ID NO: 606
ugacaugaccgcuaguuaa

SEQ ID NO: 50233 - RNA, 19 nt, Artificial Sequence
  Description of Artificial Sequence: Synthetic oligonucleotide
  Antisense strand to SEQ ID NO: 50152
uuaacuagcggucauguca

SEQ ID NO: 50234 - RNA, 19 nt, Artificial Sequence
  Description of Artificial Sequence: Synthetic oligonucleotide
  Sense strand starting at position 2781 of SEQ ID NO: 606
guucuuaguugugaaauuu

SEQ ID NO: 50235 - RNA, 19 nt, Artificial Sequence
  Description of Artificial Sequence: Synthetic oligonucleotide
  Antisense strand to SEQ ID NO: 50154
aaauuucacaacuaagaac

SEQ ID NO: 50236 - RNA, 19 nt, Artificial Sequence
  Description of Artificial Sequence: Synthetic oligonucleotide
  Sense strand starting at position 2751 of SEQ ID NO: 606
uguugugcucaguauuaca

SEQ ID NO: 50237 - RNA, 19 nt, Artificial Sequence
  Description of Artificial Sequence: Synthetic oligonucleotide
  Antisense strand to SEQ ID NO: 50156
uguaauacugagcacaaca

SEQ ID NO: 50238 - RNA, 19 nt, Artificial Sequence
  Description of Artificial Sequence: Synthetic oligonucleotide
  Sense strand starting at position 2748 of SEQ ID NO: 606
ccauguugugcucaguauu

SEQ ID NO: 50239 - RNA, 19 nt, Artificial Sequence
  Description of Artificial Sequence: Synthetic oligonucleotide
  Antisense strand to SEQ ID NO: 50158
aauacugagcacaacaugg

SEQ ID NO: 50240 - RNA, 19 nt, Artificial Sequence
  Description of Artificial Sequence: Synthetic oligonucleotide
  Sense strand starting at position 2746 of SEQ ID NO: 606
gcccauguugugcucagua

SEQ ID NO: 50241 - RNA, 19 nt, Artificial Sequence
  Description of Artificial Sequence: Synthetic oligonucleotide
  Antisense strand to SEQ ID NO: 50160
uacugagcacaacaugggc

SEQ ID NO: 50242 - RNA, 19 nt, Artificial Sequence
  Description of Artificial Sequence: Synthetic oligonucleotide
  Sense strand starting at position 2696 of SEQ ID NO: 606
ggcugcaaugucuaauaca

SEQ ID NO: 50243 - RNA, 19 nt, Artificial Sequence
  Description of Artificial Sequence: Synthetic oligonucleotide
  Antisense strand to SEQ ID NO: 50162
uguauuagacauugcagcc

SEQ ID NO: 50244 - RNA, 19 nt, Artificial Sequence
  Description of Artificial Sequence: Synthetic oligonucleotide
  Sense strand starting at position 2617 of SEQ ID NO: 606
gagccauucgacuauugcu

SEQ ID NO: 50245 - RNA, 19 nt, Artificial Sequence
  Description of Artificial Sequence: Synthetic oligonucleotide
  Antisense strand to SEQ ID NO: 50164
agcaauagucgaauggcuc

SEQ ID NO: 50246 - RNA, 19 nt, Artificial Sequence
  Description of Artificial Sequence: Synthetic oligonucleotide
  Sense strand starting at position 2532 of SEQ ID NO: 606
cguccuuucccagagaaag

SEQ ID NO: 50247 - RNA, 19 nt, Artificial Sequence
  Description of Artificial Sequence: Synthetic oligonucleotide
  Antisense strand to SEQ ID NO: 50166
cuuucucugggaaaggacg

SEQ ID NO: 50248 - RNA, 19 nt, Artificial Sequence
  Description of Artificial Sequence: Synthetic oligonucleotide
  Sense strand starting at position 1309 of SEQ ID NO: 606
agaggaucccgucagauuc

SEQ ID NO: 50249 - RNA, 19 nt, Artificial Sequence
  Description of Artificial Sequence: Synthetic oligonucleotide
  Antisense strand to SEQ ID NO: 50168
gaaucugacgggauccucu

SEQ ID NO: 50250 - RNA, 19 nt, Artificial Sequence
  Description of Artificial Sequence: Synthetic oligonucleotide
  Sense strand starting at position 913 of SEQ ID NO: 606
ggcuucuccgcacagacaa

SEQ ID NO: 50251 - RNA, 19 nt, Artificial Sequence
  Description of Artificial Sequence: Synthetic oligonucleotide
  Antisense strand to SEQ ID NO: 50170
uugucugugcggagaagcc

SEQ ID NO: 50252 - RNA, 19 nt, Artificial Sequence
  Description of Artificial Sequence: Synthetic oligonucleotide
  Sense strand starting at position 883 of SEQ ID NO: 606
cggucuugcaaauaaacgu

SEQ ID NO: 50253 - RNA, 19 nt, Artificial Sequence
  Description of Artificial Sequence: Synthetic oligonucleotide
  Antisense strand to SEQ ID NO: 50172
acguuuauuugcaagaccg

SEQ ID NO: 50254 - RNA, 19 nt, Artificial Sequence
  Description of Artificial Sequence: Synthetic oligonucleotide
  Sense strand starting at position 833 of SEQ ID NO: 606
guaacaaaggaucggguuu

SEQ ID NO: 50255 - RNA, 19 nt, Artificial Sequence
  Description of Artificial Sequence: Synthetic oligonucleotide
  Antisense strand to SEQ ID NO: 50174
aaacccgauccuuuguuac

SEQ ID NO: 50256 - RNA, 19 nt, Artificial Sequence
  Description of Artificial Sequence: Synthetic oligonucleotide
  Sense strand starting at position 672 of SEQ ID NO: 606
aaugguuugagaggguguu

SEQ ID NO: 50257 - RNA, 19 nt, Artificial Sequence
  Description of Artificial Sequence: Synthetic oligonucleotide
  Antisense strand to SEQ ID NO: 50176
aacacccucucaaaccauu

SEQ ID NO: 50258 - RNA, 19 nt, Artificial Sequence
  Description of Artificial Sequence: Synthetic oligonucleotide
  Sense strand starting at position 633 of SEQ ID NO: 606
agcuguuaaccugaccaca

SEQ ID NO: 50259 - RNA, 19 nt, Artificial Sequence
  Description of Artificial Sequence: Synthetic oligonucleotide
  Antisense strand to SEQ ID NO: 50178
uguggucagguuaacagcu

SEQ ID NO: 50260 - RNA, 19 nt, Artificial Sequence
  Description of Artificial Sequence: Synthetic oligonucleotide
  Sense strand starting at position 595 of SEQ ID NO: 606
uaaauaucucaggguucgu

SEQ ID NO: 50261 - RNA, 19 nt, Artificial Sequence
  Description of Artificial Sequence: Synthetic oligonucleotide
  Antisense strand to SEQ ID NO: 50180
acgaacccugagauauuua

SEQ ID NO: 50262 - RNA, 19 nt, Artificial Sequence
  Description of Artificial Sequence: Synthetic oligonucleotide
  Sense strand starting at position 570 of SEQ ID NO: 606
uucugugaucaccggaaca

SEQ ID NO: 50263 - RNA, 19 nt, Artificial Sequence
  Description of Artificial Sequence: Synthetic oligonucleotide
  Antisense strand to SEQ ID NO: 50182
uguuccggugaucacagaa

SEQ ID NO: 50264 - RNA, 19 nt, Artificial Sequence
  Description of Artificial Sequence: Synthetic oligonucleotide
  Sense strand starting at position 552 of SEQ ID NO: 606
uguguuucuucgccgauuu

SEQ ID NO: 50265 - RNA, 19 nt, Artificial Sequence
  Description of Artificial Sequence: Synthetic oligonucleotide
  Antisense strand to SEQ ID NO: 50184
aaaucggcgaagaaacaca

SEQ ID NO: 50266 - RNA, 19 nt, Artificial Sequence
  Description of Artificial Sequence: Synthetic oligonucleotide
  Sense strand starting at position 531 of SEQ ID NO: 606
gagagaucguuggcaguuu

SEQ ID NO: 50267 - RNA, 19 nt, Artificial Sequence
  Description of Artificial Sequence: Synthetic oligonucleotide
  Antisense strand to SEQ ID NO: 50186
aaacugccaacgaucucuc

SEQ ID NO: 50268 - RNA, 19 nt, Artificial Sequence
  Description of Artificial Sequence: Synthetic oligonucleotide
  Sense strand starting at position 529 of SEQ ID NO: 606
uagagagaucguuggcagu

SEQ ID NO: 50269 - RNA, 19 nt, Artificial Sequence
  Description of Artificial Sequence: Synthetic oligonucleotide
  Antisense strand to SEQ ID NO: 50188
acugccaacgaucucucua

SEQ ID NO: 50270 - RNA, 19 nt, Artificial Sequence
  Description of Artificial Sequence: Synthetic oligonucleotide
  Sense strand starting at position 513 of SEQ ID NO: 606
guauccuuguuaucaauag

SEQ ID NO: 50271 - RNA, 19 nt, Artificial Sequence
  Description of Artificial Sequence: Synthetic oligonucleotide
  Antisense strand to SEQ ID NO: 50190
cuauugauaacaaggauac

SEQ ID NO: 50272 - RNA, 19 nt, Artificial Sequence
  Description of Artificial Sequence: Synthetic oligonucleotide
  Sense strand starting at position 510 of SEQ ID NO: 606
acgguauccuuguuaucaa

SEQ ID NO: 50273 - RNA, 19 nt, Artificial Sequence
  Description of Artificial Sequence: Synthetic oligonucleotide
  Antisense strand to SEQ ID NO: 50192
uugauaacaaggauaccgu

SEQ ID NO: 50274 - RNA, 19 nt, Artificial Sequence
  Description of Artificial Sequence: Synthetic oligonucleotide
  Sense strand starting at position 480 of SEQ ID NO: 606
ggcuucucagauuaauauu

SEQ ID NO: 50275 - RNA, 19 nt, Artificial Sequence
  Description of Artificial Sequence: Synthetic oligonucleotide
  Antisense strand to SEQ ID NO: 50194
aauauuaaucugagaagcc

SEQ ID NO: 50276 - RNA, 19 nt, Artificial Sequence
  Description of Artificial Sequence: Synthetic oligonucleotide
  Sense strand starting at position 333 of SEQ ID NO: 606
gcuaguuuaucuccuaaug

SEQ ID NO: 50277 - RNA, 19 nt, Artificial Sequence
  Description of Artificial Sequence: Synthetic oligonucleotide
  Antisense strand to SEQ ID NO: 50196
cauuaggagauaaacuagc

SEQ ID NO: 50278 - RNA, 19 nt, Artificial Sequence
  Description of Artificial Sequence: Synthetic oligonucleotide
  Sense strand starting at position 136 of SEQ ID NO: 606
uucuaugaguuaucgacaa

SEQ ID NO: 50279 - RNA, 19 nt, Artificial Sequence
  Description of Artificial Sequence: Synthetic oligonucleotide
  Antisense strand to SEQ ID NO: 50198
uugucgauaacucauagaa

SEQ ID NO: 50280 - RNA, 19 nt, Artificial Sequence
  Description of Artificial Sequence: Synthetic oligonucleotide
  Sense strand starting at position 129 of SEQ ID NO: 606
ucauuacuucuaugaguua

SEQ ID NO: 50281 - RNA, 19 nt, Artificial Sequence
  Description of Artificial Sequence: Synthetic oligonucleotide
  Antisense strand to SEQ ID NO: 50200
uaacucauagaaguaauga

SEQ ID NO: 50282 - RNA, 19 nt, Artificial Sequence
  Description of Artificial Sequence: Synthetic oligonucleotide
  Sense strand starting at position 74 of SEQ ID NO: 606
acauaauggcauugaauau

SEQ ID NO: 50283 - RNA, 19 nt, Artificial Sequence
  Description of Artificial Sequence: Synthetic oligonucleotide
  Antisense strand to SEQ ID NO: 50202
auauucaaugccauuaugu

SEQ ID NO: 50284 - RNA, 19 nt, Artificial Sequence
  Description of Artificial Sequence: Synthetic oligonucleotide
  Sense strand starting at position 57 of SEQ ID NO: 606
aguagaaugccuuaucuac

SEQ ID NO: 50285 - RNA, 19 nt, Artificial Sequence
  Description of Artificial Sequence: Synthetic oligonucleotide
  Antisense strand to SEQ ID NO: 50204
guagauaaggcauucuacu

SEQ ID NO: 50286 - RNA, 19 nt, Artificial Sequence
  Description of Artificial Sequence: Synthetic oligonucleotide
  Sense strand starting at position 3754 of SEQ ID NO: 605
gcacuuauuguauguaaga

SEQ ID NO: 50287 - RNA, 19 nt, Artificial Sequence
  Description of Artificial Sequence: Synthetic oligonucleotide
  Antisense strand to SEQ ID NO: 50206
ucuuacauacaauaagugc

SEQ ID NO: 50288 - RNA, 19 nt, Artificial Sequence
  Description of Artificial Sequence: Synthetic oligonucleotide
  Sense strand starting at position 3709 of SEQ ID NO: 605
gaguaagucuucucaauga

SEQ ID NO: 50289 - RNA, 19 nt, Artificial Sequence
  Description of Artificial Sequence: Synthetic oligonucleotide
  Antisense strand to SEQ ID NO: 50208
ucauugagaagacuuacuc

SEQ ID NO: 50290 - RNA, 19 nt, Artificial Sequence
  Description of Artificial Sequence: Synthetic oligonucleotide
  Sense strand starting at position 3707 of SEQ ID NO: 605
aggaguaagucuucucaau

SEQ ID NO: 50291 - RNA, 19 nt, Artificial Sequence
  Description of Artificial Sequence: Synthetic oligonucleotide
  Antisense strand to SEQ ID NO: 50210
auugagaagacuuacuccu

SEQ ID NO: 50292 - RNA, 19 nt, Artificial Sequence
  Description of Artificial Sequence: Synthetic oligonucleotide
  Sense strand starting at position 3627 of SEQ ID NO: 605
acggcauuauucguuuaua

SEQ ID NO: 50293 - RNA, 19 nt, Artificial Sequence
  Description of Artificial Sequence: Synthetic oligonucleotide
  Antisense strand to SEQ ID NO: 50212
uauaaacgaauaaugccgu

SEQ ID NO: 50294 - RNA, 19 nt, Artificial Sequence
  Description of Artificial Sequence: Synthetic oligonucleotide
  Sense strand starting at position 3488 of SEQ ID NO: 605
ucaccuagucauugaagcu

SEQ ID NO: 50295 - RNA, 19 nt, Artificial Sequence
  Description of Artificial Sequence: Synthetic oligonucleotide
  Antisense strand to SEQ ID NO: 50214
agcuucaaugacuagguga

SEQ ID NO: 50296 - RNA, 19 nt, Artificial Sequence
  Description of Artificial Sequence: Synthetic oligonucleotide
  Sense strand starting at position 3484 of SEQ ID NO: 605
gaagucaccuagucauuga

SEQ ID NO: 50297 - RNA, 19 nt, Artificial Sequence
  Description of Artificial Sequence: Synthetic oligonucleotide
  Antisense strand to SEQ ID NO: 50216
ucaaugacuaggugacuuc

SEQ ID NO: 50298 - RNA, 19 nt, Artificial Sequence
  Description of Artificial Sequence: Synthetic oligonucleotide
  Sense strand starting at position 2971 of SEQ ID NO: 605
cuuugaaauaaguguagga

SEQ ID NO: 50299 - RNA, 19 nt, Artificial Sequence
  Description of Artificial Sequence: Synthetic oligonucleotide
  Antisense strand to SEQ ID NO: 50218
uccuacacuuauuucaaag

SEQ ID NO: 50300 - RNA, 19 nt, Artificial Sequence
  Description of Artificial Sequence: Synthetic oligonucleotide
  Sense strand starting at position 2967 of SEQ ID NO: 605
agggcuuugaaauaagugu

SEQ ID NO: 50301 - RNA, 19 nt, Artificial Sequence
  Description of Artificial Sequence: Synthetic oligonucleotide
  Antisense strand to SEQ ID NO: 50220
acacuuauuucaaagcccu

SEQ ID NO: 50302 - RNA, 19 nt, Artificial Sequence
  Description of Artificial Sequence: Synthetic oligonucleotide
  Sense strand starting at position 2745 of SEQ ID NO: 605
cgcugugaucagcauucua

SEQ ID NO: 50303 - RNA, 19 nt, Artificial Sequence
  Description of Artificial Sequence: Synthetic oligonucleotide
  Antisense strand to SEQ ID NO: 50222
uagaaugcugaucacagcg

SEQ ID NO: 50304 - RNA, 19 nt, Artificial Sequence
  Description of Artificial Sequence: Synthetic oligonucleotide
  Sense strand starting at position 2736 of SEQ ID NO: 605
cccauuuggcgcugugauc

SEQ ID NO: 50305 - RNA, 19 nt, Artificial Sequence
  Description of Artificial Sequence: Synthetic oligonucleotide
  Antisense strand to SEQ ID NO: 50224
gaucacagcgccaaauggg

SEQ ID NO: 50306 - RNA, 19 nt, Artificial Sequence
  Description of Artificial Sequence: Synthetic oligonucleotide
  Sense strand starting at position 2621 of SEQ ID NO: 605
acucguauuuaaugacuua

SEQ ID NO: 50307 - RNA, 19 nt, Artificial Sequence
  Description of Artificial Sequence: Synthetic oligonucleotide
  Antisense strand to SEQ ID NO: 50226
uaagucauuaaauacgagu

SEQ ID NO: 50308 - RNA, 19 nt, Artificial Sequence
  Description of Artificial Sequence: Synthetic oligonucleotide
  Sense strand starting at position 2503 of SEQ ID NO: 605
aaugaugugguugaaacga

SEQ ID NO: 50309 - RNA, 19 nt, Artificial Sequence
  Description of Artificial Sequence: Synthetic oligonucleotide
  Antisense strand to SEQ ID NO: 50228
ucguuucaaccacaucauu

SEQ ID NO: 50310 - RNA, 19 nt, Artificial Sequence
  Description of Artificial Sequence: Synthetic oligonucleotide
  Sense strand starting at position 2502 of SEQ ID NO: 605
uaaugaugugguugaaacg

SEQ ID NO: 50311 - RNA, 19 nt, Artificial Sequence
  Description of Artificial Sequence: Synthetic oligonucleotide
  Antisense strand to SEQ ID NO: 50230
cguuucaaccacaucauua

SEQ ID NO: 50312 - RNA, 19 nt, Artificial Sequence
  Description of Artificial Sequence: Synthetic oligonucleotide
  Sense strand starting at position 2437 of SEQ ID NO: 605
uggauaaguuuacuauacu

SEQ ID NO: 50313 - RNA, 19 nt, Artificial Sequence
  Description of Artificial Sequence: Synthetic oligonucleotide
  Antisense strand to SEQ ID NO: 50232
aguauaguaaacuuaucca

SEQ ID NO: 50314 - RNA, 19 nt, Artificial Sequence
  Description of Artificial Sequence: Synthetic oligonucleotide
  Sense strand starting at position 2400 of SEQ ID NO: 605
cagcuauagcaugaaguua

SEQ ID NO: 50315 - RNA, 19 nt, Artificial Sequence
  Description of Artificial Sequence: Synthetic oligonucleotide
  Antisense strand to SEQ ID NO: 50234
uaacuucaugcuauagcug

SEQ ID NO: 50316 - RNA, 19 nt, Artificial Sequence
  Description of Artificial Sequence: Synthetic oligonucleotide
  Sense strand starting at position 2399 of SEQ ID NO: 605
gcagcuauagcaugaaguu

SEQ ID NO: 50317 - RNA, 19 nt, Artificial Sequence
  Description of Artificial Sequence: Synthetic oligonucleotide
  Antisense strand to SEQ ID NO: 50236
aacuucaugcuauagcugc

SEQ ID NO: 50318 - RNA, 19 nt, Artificial Sequence
  Description of Artificial Sequence: Synthetic oligonucleotide
  Sense strand starting at position 2342 of SEQ ID NO: 605
caugaccgcuaguuaaagu

SEQ ID NO: 50319 - RNA, 19 nt, Artificial Sequence
  Description of Artificial Sequence: Synthetic oligonucleotide
  Antisense strand to SEQ ID NO: 50238
acuuuaacuagcggucaug

SEQ ID NO: 50320 - RNA, 19 nt, Artificial Sequence
  Description of Artificial Sequence: Synthetic oligonucleotide
  Sense strand starting at position 2339 of SEQ ID NO: 605
ugacaugaccgcuaguuaa

SEQ ID NO: 50321 - RNA, 19 nt, Artificial Sequence
  Description of Artificial Sequence: Synthetic oligonucleotide
  Antisense strand to SEQ ID NO: 50240
uuaacuagcggucauguca

SEQ ID NO: 50322 - RNA, 19 nt, Artificial Sequence
  Description of Artificial Sequence: Synthetic oligonucleotide
  Sense strand starting at position 2321 of SEQ ID NO: 605
guucuuaguugugaaauuu

SEQ ID NO: 50323 - RNA, 19 nt, Artificial Sequence
  Description of Artificial Sequence: Synthetic oligonucleotide
  Antisense strand to SEQ ID NO: 50242
aaauuucacaacuaagaac

SEQ ID NO: 50324 - RNA, 19 nt, Artificial Sequence
  Description of Artificial Sequence: Synthetic oligonucleotide
  Sense strand starting at position 2291 of SEQ ID NO: 605
uguugugcucaguauuaca

SEQ ID NO: 50325 - RNA, 19 nt, Artificial Sequence
  Description of Artificial Sequence: Synthetic oligonucleotide
  Antisense strand to SEQ ID NO: 50244
uguaauacugagcacaaca

SEQ ID NO: 50326 - RNA, 19 nt, Artificial Sequence
  Description of Artificial Sequence: Synthetic oligonucleotide
  Sense strand starting at position 2288 of SEQ ID NO: 605
ccauguugugcucaguauu

SEQ ID NO: 50327 - RNA, 19 nt, Artificial Sequence
  Description of Artificial Sequence: Synthetic oligonucleotide
  Antisense strand to SEQ ID NO: 50246
aauacugagcacaacaugg

SEQ ID NO: 50328 - RNA, 19 nt, Artificial Sequence
  Description of Artificial Sequence: Synthetic oligonucleotide
  Sense strand starting at position 2286 of SEQ ID NO: 605
gcccauguugugcucagua

SEQ ID NO: 50329 - RNA, 19 nt, Artificial Sequence
  Description of Artificial Sequence: Synthetic oligonucleotide
  Antisense strand to SEQ ID NO: 50248
uacugagcacaacaugggc

SEQ ID NO: 50330 - RNA, 19 nt, Artificial Sequence
  Description of Artificial Sequence: Synthetic oligonucleotide
  Sense strand starting at position 2236 of SEQ ID NO: 605
ggcugcaaugucuaauaca

SEQ ID NO: 50331 - RNA, 19 nt, Artificial Sequence
  Description of Artificial Sequence: Synthetic oligonucleotide
  Antisense strand to SEQ ID NO: 50250
uguauuagacauugcagcc

SEQ ID NO: 50332 - RNA, 19 nt, Artificial Sequence
  Description of Artificial Sequence: Synthetic oligonucleotide
  Sense strand starting at position 2157 of SEQ ID NO: 605
gagccauucgacuauugcu

SEQ ID NO: 50333 - RNA, 19 nt, Artificial Sequence
  Description of Artificial Sequence: Synthetic oligonucleotide
  Antisense strand to SEQ ID NO: 50252
agcaauagucgaauggcuc

SEQ ID NO: 50334 - RNA, 19 nt, Artificial Sequence
  Description of Artificial Sequence: Synthetic oligonucleotide
  Sense strand starting at position 2072 of SEQ ID NO: 605
cguccuuucccagagaaag

SEQ ID NO: 50335 - RNA, 19 nt, Artificial Sequence
  Description of Artificial Sequence: Synthetic oligonucleotide
  Antisense strand to SEQ ID NO: 50254
cuuucucugggaaaggacg

SEQ ID NO: 50336 - RNA, 19 nt, Artificial Sequence
  Description of Artificial Sequence: Synthetic oligonucleotide
  Sense strand starting at position 849 of SEQ ID NO: 605
agaggaucccgucagauuc

SEQ ID NO: 50337 - RNA, 19 nt, Artificial Sequence
  Description of Artificial Sequence: Synthetic oligonucleotide
  Antisense strand to SEQ ID NO: 50256
gaaucugacgggauccucu

SEQ ID NO: 50338 - RNA, 19 nt, Artificial Sequence
  Description of Artificial Sequence: Synthetic oligonucleotide
  Sense strand starting at position 453 of SEQ ID NO: 605
ggcuucuccgcacagacaa

SEQ ID NO: 50339 - RNA, 19 nt, Artificial Sequence
  Description of Artificial Sequence: Synthetic oligonucleotide
  Antisense strand to SEQ ID NO: 50258
uugucugugcggagaagcc

SEQ ID NO: 50340 - RNA, 19 nt, Artificial Sequence
  Description of Artificial Sequence: Synthetic oligonucleotide
  Sense strand starting at position 423 of SEQ ID NO: 605
cggucuugcaaauaaacgu

SEQ ID NO: 50341 - RNA, 19 nt, Artificial Sequence
  Description of Artificial Sequence: Synthetic oligonucleotide
  Antisense strand to SEQ ID NO: 50260
acguuuauuugcaagaccg

SEQ ID NO: 50342 - RNA, 19 nt, Artificial Sequence
  Description of Artificial Sequence: Synthetic oligonucleotide
  Sense strand starting at position 373 of SEQ ID NO: 605
guaacaaaggaucggguuu

SEQ ID NO: 50343 - RNA, 19 nt, Artificial Sequence
  Description of Artificial Sequence: Synthetic oligonucleotide
  Antisense strand to SEQ ID NO: 50262
aaacccgauccuuuguuac

SEQ ID NO: 50344 - RNA, 19 nt, Artificial Sequence
  Description of Artificial Sequence: Synthetic oligonucleotide
  Sense strand starting at position 212 of SEQ ID NO: 605
aaugguuugagaggguguu

SEQ ID NO: 50345 - RNA, 19 nt, Artificial Sequence
  Description of Artificial Sequence: Synthetic oligonucleotide
  Antisense strand to SEQ ID NO: 50264
aacacccucucaaaccauu

SEQ ID NO: 50346 - RNA, 19 nt, Artificial Sequence
  Description of Artificial Sequence: Synthetic oligonucleotide
  Sense strand starting at position 173 of SEQ ID NO: 605
agcuguuaaccugaccaca

SEQ ID NO: 50347 - RNA, 19 nt, Artificial Sequence
  Description of Artificial Sequence: Synthetic oligonucleotide
  Antisense strand to SEQ ID NO: 50266
uguggucagguuaacagcu

SEQ ID NO: 50348 - RNA, 19 nt, Artificial Sequence
  Description of Artificial Sequence: Synthetic oligonucleotide
  Sense strand starting at position 151 of SEQ ID NO: 605
cguuucuucccuuguaaau

SEQ ID NO: 50349 - RNA, 19 nt, Artificial Sequence
  Description of Artificial Sequence: Synthetic oligonucleotide
  Antisense strand to SEQ ID NO: 50268
auuuacaagggaagaaacg

SEQ ID NO: 50350 - RNA, 19 nt, Artificial Sequence
  Description of Artificial Sequence: Synthetic oligonucleotide
  Sense strand starting at position 135 of SEQ ID NO: 605
uaaauaucucaggguucgu

SEQ ID NO: 50351 - RNA, 19 nt, Artificial Sequence
  Description of Artificial Sequence: Synthetic oligonucleotide
  Antisense strand to SEQ ID NO: 50270
acgaacccugagauauuua

SEQ ID NO: 50352 - RNA, 19 nt, Artificial Sequence
  Description of Artificial Sequence: Synthetic oligonucleotide
  Sense strand starting at position 110 of SEQ ID NO: 605
uucugugaucaccggaaca

SEQ ID NO: 50353 - RNA, 19 nt, Artificial Sequence
  Description of Artificial Sequence: Synthetic oligonucleotide
  Antisense strand to SEQ ID NO: 50272
uguuccggugaucacagaa

SEQ ID NO: 50354 - RNA, 19 nt, Artificial Sequence
  Description of Artificial Sequence: Synthetic oligonucleotide
  Sense strand starting at position 92 of SEQ ID NO: 605
uguguuucuucgccgauuu

SEQ ID NO: 50355 - RNA, 19 nt, Artificial Sequence
  Description of Artificial Sequence: Synthetic oligonucleotide
  Antisense strand to SEQ ID NO: 50274
aaaucggcgaagaaacaca

SEQ ID NO: 50356 - RNA, 19 nt, Artificial Sequence
  Description of Artificial Sequence: Synthetic oligonucleotide
  Sense strand starting at position 71 of SEQ ID NO: 605
gagagaucguuggcaguuu

SEQ ID NO: 50357 - RNA, 19 nt, Artificial Sequence
  Description of Artificial Sequence: Synthetic oligonucleotide
  Antisense strand to SEQ ID NO: 50276
aaacugccaacgaucucuc

SEQ ID NO: 50358 - RNA, 19 nt, Artificial Sequence
  Description of Artificial Sequence: Synthetic oligonucleotide
  Sense strand starting at position 69 of SEQ ID NO: 605
uagagagaucguuggcagu

SEQ ID NO: 50359 - RNA, 19 nt, Artificial Sequence
  Description of Artificial Sequence: Synthetic oligonucleotide
  Antisense strand to SEQ ID NO: 50278
acugccaacgaucucucua

SEQ ID NO: 50360 - RNA, 19 nt, Artificial Sequence
  Description of Artificial Sequence: Synthetic oligonucleotide
  Sense strand starting at position 53 of SEQ ID NO: 605
guauccuuguuaucaauag

SEQ ID NO: 50361 - RNA, 19 nt, Artificial Sequence
  Description of Artificial Sequence: Synthetic oligonucleotide
  Antisense strand to SEQ ID NO: 50280
cuauugauaacaaggauac

SEQ ID NO: 50362 - RNA, 19 nt, Artificial Sequence
  Description of Artificial Sequence: Synthetic oligonucleotide
  Sense strand starting at position 50 of SEQ ID NO: 605
acgguauccuuguuaucaa

SEQ ID NO: 50363 - RNA, 19 nt, Artificial Sequence
  Description of Artificial Sequence: Synthetic oligonucleotide
  Antisense strand to SEQ ID NO: 50282
uugauaacaaggauaccgu

SEQ ID NO: 50364 - RNA, 19 nt, Artificial Sequence
  Description of Artificial Sequence: Synthetic oligonucleotide
  Sense strand starting at position 20 of SEQ ID NO: 605
ggcuucucagauuaauauu

SEQ ID NO: 50365 - RNA, 19 nt, Artificial Sequence
  Description of Artificial Sequence: Synthetic oligonucleotide
  Antisense strand to SEQ ID NO: 50284
aauauuaaucugagaagcc

SEQ ID NO: 50366 - RNA, 19 nt, Artificial Sequence
  Description of Artificial Sequence: Synthetic oligonucleotide
  Sense strand starting at position 3860 of SEQ ID NO: 607
agauaaguauauucuggua

SEQ ID NO: 50367 - RNA, 19 nt, Artificial Sequence
  Description of Artificial Sequence: Synthetic oligonucleotide
  Antisense strand to SEQ ID NO: 50286
uaccagaauauacuuaucu

SEQ ID NO: 50368 - RNA, 19 nt, Artificial Sequence
  Description of Artificial Sequence: Synthetic oligonucleotide
  Sense strand starting at position 3494 of SEQ ID NO: 607
uguguaucuguguauagga

SEQ ID NO: 50369 - RNA, 19 nt, Artificial Sequence
  Description of Artificial Sequence: Synthetic oligonucleotide
  Antisense strand to SEQ ID NO: 50288
uccuauacacagauacaca

SEQ ID NO: 50370 - RNA, 19 nt, Artificial Sequence
  Description of Artificial Sequence: Synthetic oligonucleotide
  Sense strand starting at position 3476 of SEQ ID NO: 607
guaauaccuccugaacugu

SEQ ID NO: 50371 - RNA, 19 nt, Artificial Sequence
  Description of Artificial Sequence: Synthetic oligonucleotide
  Antisense strand to SEQ ID NO: 50290
acaguucaggagguauuac

SEQ ID NO: 50372 - RNA, 19 nt, Artificial Sequence
  Description of Artificial Sequence: Synthetic oligonucleotide
  Sense strand starting at position 3337 of SEQ ID NO: 607
agacuuguuucccuacucu

SEQ ID NO: 50373 - RNA, 19 nt, Artificial Sequence
  Description of Artificial Sequence: Synthetic oligonucleotide
  Antisense strand to SEQ ID NO: 50292
agaguagggaaacaagucu

SEQ ID NO: 50374 - RNA, 19 nt, Artificial Sequence
  Description of Artificial Sequence: Synthetic oligonucleotide
  Sense strand starting at position 3335 of SEQ ID NO: 607
agagacuuguuucccuacu

SEQ ID NO: 50375 - RNA, 19 nt, Artificial Sequence
  Description of Artificial Sequence: Synthetic oligonucleotide
  Antisense strand to SEQ ID NO: 50294
aguagggaaacaagucucu

SEQ ID NO: 50376 - RNA, 19 nt, Artificial Sequence
  Description of Artificial Sequence: Synthetic oligonucleotide
  Sense strand starting at position 2859 of SEQ ID NO: 607
guugcuacccuauagaaac

SEQ ID NO: 50377 - RNA, 19 nt, Artificial Sequence
  Description of Artificial Sequence: Synthetic oligonucleotide
  Antisense strand to SEQ ID NO: 50296
guuucuauaggguagcaac

SEQ ID NO: 50378 - RNA, 19 nt, Artificial Sequence
  Description of Artificial Sequence: Synthetic oligonucleotide
  Sense strand starting at position 2788 of SEQ ID NO: 607
ggcauugugcuagauaaga

SEQ ID NO: 50379 - RNA, 19 nt, Artificial Sequence
  Description of Artificial Sequence: Synthetic oligonucleotide
  Antisense strand to SEQ ID NO: 50298
ucuuaucuagcacaaugcc

SEQ ID NO: 50380 - RNA, 19 nt, Artificial Sequence
  Description of Artificial Sequence: Synthetic oligonucleotide
  Sense strand starting at position 2781 of SEQ ID NO: 607
gggaauaggcauugugcua

SEQ ID NO: 50381 - RNA, 19 nt, Artificial Sequence
  Description of Artificial Sequence: Synthetic oligonucleotide
  Antisense strand to SEQ ID NO: 50300
uagcacaaugccuauuccc

SEQ ID NO: 50382 - RNA, 19 nt, Artificial Sequence
  Description of Artificial Sequence: Synthetic oligonucleotide
  Sense strand starting at position 2762 of SEQ ID NO: 607
uauugagaaugaccauagu

SEQ ID NO: 50383 - RNA, 19 nt, Artificial Sequence
  Description of Artificial Sequence: Synthetic oligonucleotide
  Antisense strand to SEQ ID NO: 50302
acuauggucauucucaaua

SEQ ID NO: 50384 - RNA, 19 nt, Artificial Sequence
  Description of Artificial Sequence: Synthetic oligonucleotide
  Sense strand starting at position 2716 of SEQ ID NO: 607
uguacugcaugaucucuaa

SEQ ID NO: 50385 - RNA, 19 nt, Artificial Sequence
  Description of Artificial Sequence: Synthetic oligonucleotide
  Antisense strand to SEQ ID NO: 50304
uuagagaucaugcaguaca

SEQ ID NO: 50386 - RNA, 19 nt, Artificial Sequence
  Description of Artificial Sequence: Synthetic oligonucleotide
  Sense strand starting at position 2660 of SEQ ID NO: 607
gggcaagucacuuaucgac

SEQ ID NO: 50387 - RNA, 19 nt, Artificial Sequence
  Description of Artificial Sequence: Synthetic oligonucleotide
  Antisense strand to SEQ ID NO: 50306
gucgauaagugacuugccc

SEQ ID NO: 50388 - RNA, 19 nt, Artificial Sequence
  Description of Artificial Sequence: Synthetic oligonucleotide
  Sense strand starting at position 2619 of SEQ ID NO: 607
ggucuagauaccuggauuc

SEQ ID NO: 50389 - RNA, 19 nt, Artificial Sequence
  Description of Artificial Sequence: Synthetic oligonucleotide
  Antisense strand to SEQ ID NO: 50308
gaauccagguaucuagacc

SEQ ID NO: 50390 - RNA, 19 nt, Artificial Sequence
  Description of Artificial Sequence: Synthetic oligonucleotide
  Sense strand starting at position 2618 of SEQ ID NO: 607
gggucuagauaccuggauu

SEQ ID NO: 50391 - RNA, 19 nt, Artificial Sequence
  Description of Artificial Sequence: Synthetic oligonucleotide
  Antisense strand to SEQ ID NO: 50310
aauccagguaucuagaccc

SEQ ID NO: 50392 - RNA, 19 nt, Artificial Sequence
  Description of Artificial Sequence: Synthetic oligonucleotide
  Sense strand starting at position 2585 of SEQ ID NO: 607
guguaaacccgugggagaa

SEQ ID NO: 50393 - RNA, 19 nt, Artificial Sequence
  Description of Artificial Sequence: Synthetic oligonucleotide
  Antisense strand to SEQ ID NO: 50312
uucucccacggguuuacac

SEQ ID NO: 50394 - RNA, 19 nt, Artificial Sequence
  Description of Artificial Sequence: Synthetic oligonucleotide
  Sense strand starting at position 2469 of SEQ ID NO: 607
ggugaugucuaacuugaaa

SEQ ID NO: 50395 - RNA, 19 nt, Artificial Sequence
  Description of Artificial Sequence: Synthetic oligonucleotide
  Antisense strand to SEQ ID NO: 50314
uuucaaguuagacaucacc

SEQ ID NO: 50396 - RNA, 19 nt, Artificial Sequence
  Description of Artificial Sequence: Synthetic oligonucleotide
  Sense strand starting at position 2459 of SEQ ID NO: 607
gcuguauuuaggugauguc

SEQ ID NO: 50397 - RNA, 19 nt, Artificial Sequence
  Description of Artificial Sequence: Synthetic oligonucleotide
  Antisense strand to SEQ ID NO: 50316
gacaucaccuaaauacagc

SEQ ID NO: 50398 - RNA, 19 nt, Artificial Sequence
  Description of Artificial Sequence: Synthetic oligonucleotide
  Sense strand starting at position 2458 of SEQ ID NO: 607
ggcuguauuuaggugaugu

SEQ ID NO: 50399 - RNA, 19 nt, Artificial Sequence
  Description of Artificial Sequence: Synthetic oligonucleotide
  Antisense strand to SEQ ID NO: 50318
acaucaccuaaauacagcc

SEQ ID NO: 50400 - RNA, 19 nt, Artificial Sequence
  Description of Artificial Sequence: Synthetic oligonucleotide
  Sense strand starting at position 2449 of SEQ ID NO: 607
uaaacugugggcuguauuu

SEQ ID NO: 50401 - RNA, 19 nt, Artificial Sequence
  Description of Artificial Sequence: Synthetic oligonucleotide
  Antisense strand to SEQ ID NO: 50320
aaauacagcccacaguuua

SEQ ID NO: 50402 - RNA, 19 nt, Artificial Sequence
  Description of Artificial Sequence: Synthetic oligonucleotide
  Sense strand starting at position 2412 of SEQ ID NO: 607
ucgcuuucuguuucuacga

SEQ ID NO: 50403 - RNA, 19 nt, Artificial Sequence
  Description of Artificial Sequence: Synthetic oligonucleotide
  Antisense strand to SEQ ID NO: 50322
ucguagaaacagaaagcga

SEQ ID NO: 50404 - RNA, 19 nt, Artificial Sequence
  Description of Artificial Sequence: Synthetic oligonucleotide
  Sense strand starting at position 2270 of SEQ ID NO: 607
gauauuauguggcccagua

SEQ ID NO: 50405 - RNA, 19 nt, Artificial Sequence
  Description of Artificial Sequence: Synthetic oligonucleotide
  Antisense strand to SEQ ID NO: 50324
uacugggccacauaauauc

SEQ ID NO: 50406 - RNA, 19 nt, Artificial Sequence
  Description of Artificial Sequence: Synthetic oligonucleotide
  Sense strand starting at position 2204 of SEQ ID NO: 607
cucagaaugccguagguau

SEQ ID NO: 50407 - RNA, 19 nt, Artificial Sequence
  Description of Artificial Sequence: Synthetic oligonucleotide
  Antisense strand to SEQ ID NO: 50326
auaccuacggcauucugag

SEQ ID NO: 50408 - RNA, 19 nt, Artificial Sequence
  Description of Artificial Sequence: Synthetic oligonucleotide
  Sense strand starting at position 1689 of SEQ ID NO: 607
gacagcgagcuguuugcua

SEQ ID NO: 50409 - RNA, 19 nt, Artificial Sequence
  Description of Artificial Sequence: Synthetic oligonucleotide
  Antisense strand to SEQ ID NO: 50328
uagcaaacagcucgcuguc

SEQ ID NO: 50410 - RNA, 19 nt, Artificial Sequence
  Description of Artificial Sequence: Synthetic oligonucleotide
  Sense strand starting at position 1545 of SEQ ID NO: 607
uuuguauuccucuggaaau

SEQ ID NO: 50411 - RNA, 19 nt, Artificial Sequence
  Description of Artificial Sequence: Synthetic oligonucleotide
  Antisense strand to SEQ ID NO: 50330
auuuccagaggaauacaaa

SEQ ID NO: 50412 - RNA, 19 nt, Artificial Sequence
  Description of Artificial Sequence: Synthetic oligonucleotide
  Sense strand starting at position 1502 of SEQ ID NO: 607
gugaaauaccgucacaggu

SEQ ID NO: 50413 - RNA, 19 nt, Artificial Sequence
  Description of Artificial Sequence: Synthetic oligonucleotide
  Antisense strand to SEQ ID NO: 50332
accugugacgguauuucac

SEQ ID NO: 50414 - RNA, 19 nt, Artificial Sequence
  Description of Artificial Sequence: Synthetic oligonucleotide
  Sense strand starting at position 1491 of SEQ ID NO: 607
gucccuacacagugaaaua

SEQ ID NO: 50415 - RNA, 19 nt, Artificial Sequence
  Description of Artificial Sequence: Synthetic oligonucleotide
  Antisense strand to SEQ ID NO: 50334
uauuucacuguguagggac

SEQ ID NO: 50416 - RNA, 19 nt, Artificial Sequence
  Description of Artificial Sequence: Synthetic oligonucleotide
  Sense strand starting at position 1380 of SEQ ID NO: 607
agcaaacggcuccauaaau

SEQ ID NO: 50417 - RNA, 19 nt, Artificial Sequence
  Description of Artificial Sequence: Synthetic oligonucleotide
  Antisense strand to SEQ ID NO: 50336
auuuauggagccguuugcu

SEQ ID NO: 50418 - RNA, 19 nt, Artificial Sequence
  Description of Artificial Sequence: Synthetic oligonucleotide
  Sense strand starting at position 1163 of SEQ ID NO: 607
uaggaucguccucaaauau

SEQ ID NO: 50419 - RNA, 19 nt, Artificial Sequence
  Description of Artificial Sequence: Synthetic oligonucleotide
  Antisense strand to SEQ ID NO: 50338
auauuugaggacgauccua

SEQ ID NO: 50420 - RNA, 19 nt, Artificial Sequence
  Description of Artificial Sequence: Synthetic oligonucleotide
  Sense strand starting at position 1162 of SEQ ID NO: 607
uuaggaucguccucaaaua

SEQ ID NO: 50421 - RNA, 19 nt, Artificial Sequence
  Description of Artificial Sequence: Synthetic oligonucleotide
  Antisense strand to SEQ ID NO: 50340
uauuugaggacgauccuaa

SEQ ID NO: 50422 - RNA, 19 nt, Artificial Sequence
  Description of Artificial Sequence: Synthetic oligonucleotide
  Sense strand starting at position 999 of SEQ ID NO: 607
acagucugguuacugcaaa

SEQ ID NO: 50423 - RNA, 19 nt, Artificial Sequence
  Description of Artificial Sequence: Synthetic oligonucleotide
  Antisense strand to SEQ ID NO: 50342
uuugcaguaaccagacugu

SEQ ID NO: 50424 - RNA, 19 nt, Artificial Sequence
  Description of Artificial Sequence: Synthetic oligonucleotide
  Sense strand starting at position 898 of SEQ ID NO: 607
gcuuaucauggaugaagua

SEQ ID NO: 50425 - RNA, 19 nt, Artificial Sequence
  Description of Artificial Sequence: Synthetic oligonucleotide
  Antisense strand to SEQ ID NO: 50344
uacuucauccaugauaagc

SEQ ID NO: 50426 - RNA, 19 nt, Artificial Sequence
  Description of Artificial Sequence: Synthetic oligonucleotide
  Sense strand starting at position 895 of SEQ ID NO: 607
auugcuuaucauggaugaa

SEQ ID NO: 50427 - RNA, 19 nt, Artificial Sequence
  Description of Artificial Sequence: Synthetic oligonucleotide
  Antisense strand to SEQ ID NO: 50346
uucauccaugauaagcaau

SEQ ID NO: 50428 - RNA, 19 nt, Artificial Sequence
  Description of Artificial Sequence: Synthetic oligonucleotide
  Sense strand starting at position 677 of SEQ ID NO: 607
uucuacugguggucuaaca

SEQ ID NO: 50429 - RNA, 19 nt, Artificial Sequence
  Description of Artificial Sequence: Synthetic oligonucleotide
  Antisense strand to SEQ ID NO: 50348
uguuagaccaccaguagaa

SEQ ID NO: 50430 - RNA, 19 nt, Artificial Sequence
  Description of Artificial Sequence: Synthetic oligonucleotide
  Sense strand starting at position 675 of SEQ ID NO: 607
gauucuacugguggucuaa

SEQ ID NO: 50431 - RNA, 19 nt, Artificial Sequence
  Description of Artificial Sequence: Synthetic oligonucleotide
  Antisense strand to SEQ ID NO: 50350
uuagaccaccaguagaauc

SEQ ID NO: 50432 - RNA, 19 nt, Artificial Sequence
  Description of Artificial Sequence: Synthetic oligonucleotide
  Sense strand starting at position 629 of SEQ ID NO: 607
uguuaauguggauauagua

SEQ ID NO: 50433 - RNA, 19 nt, Artificial Sequence
  Description of Artificial Sequence: Synthetic oligonucleotide
  Antisense strand to SEQ ID NO: 50352
uacuauauccacauuaaca

SEQ ID NO: 50434 - RNA, 19 nt, Artificial Sequence
  Description of Artificial Sequence: Synthetic oligonucleotide
  Sense strand starting at position 279 of SEQ ID NO: 607
cgggauaugagugguaguu

SEQ ID NO: 50435 - RNA, 19 nt, Artificial Sequence
  Description of Artificial Sequence: Synthetic oligonucleotide
  Antisense strand to SEQ ID NO: 50354
aacuaccacucauaucccg

SEQ ID NO: 50436 - RNA, 19 nt, Artificial Sequence
  Description of Artificial Sequence: Synthetic oligonucleotide
  Sense strand starting at position 278 of SEQ ID NO: 607
ucgggauaugagugguagu

SEQ ID NO: 50437 - RNA, 19 nt, Artificial Sequence
  Description of Artificial Sequence: Synthetic oligonucleotide
  Antisense strand to SEQ ID NO: 50356
acuaccacucauaucccga

SEQ ID NO: 50438 - RNA, 19 nt, Artificial Sequence
  Description of Artificial Sequence: Synthetic oligonucleotide
  Sense strand starting at position 214 of SEQ ID NO: 607
uugcuugacacguaguaag

SEQ ID NO: 50439 - RNA, 19 nt, Artificial Sequence
  Description of Artificial Sequence: Synthetic oligonucleotide
  Antisense strand to SEQ ID NO: 50358
cuuacuacgugucaagcaa

SEQ ID NO: 50440 - RNA, 19 nt, Artificial Sequence
  Description of Artificial Sequence: Synthetic oligonucleotide
  Sense strand starting at position 208 of SEQ ID NO: 607
acaauauugcuugacacgu

SEQ ID NO: 50441 - RNA, 19 nt, Artificial Sequence
  Description of Artificial Sequence: Synthetic oligonucleotide
  Antisense strand to SEQ ID NO: 50360
acgugucaagcaauauugu

SEQ ID NO: 50442 - RNA, 19 nt, Artificial Sequence
  Description of Artificial Sequence: Synthetic oligonucleotide
  Sense strand starting at position 175 of SEQ ID NO: 607
aggagcaaaucaguuaaua

SEQ ID NO: 50443 - RNA, 19 nt, Artificial Sequence
  Description of Artificial Sequence: Synthetic oligonucleotide
  Antisense strand to SEQ ID NO: 50362
uauuaacugauuugcuccu

SEQ ID NO: 50444 - RNA, 19 nt, Artificial Sequence
  Description of Artificial Sequence: Synthetic oligonucleotide
  Sense strand starting at position 138 of SEQ ID NO: 607
acgaaagucagaugacagu

SEQ ID NO: 50445 - RNA, 19 nt, Artificial Sequence
  Description of Artificial Sequence: Synthetic oligonucleotide
  Antisense strand to SEQ ID NO: 50364
acugucaucugacuuucgu

SEQ ID NO: 50446 - RNA, 19 nt, Artificial Sequence
  Description of Artificial Sequence: Synthetic oligonucleotide
  Sense strand starting at position 3964 of SEQ ID NO: 608
gcucauuaccuauaguauc

SEQ ID NO: 50447 - RNA, 19 nt, Artificial Sequence
  Description of Artificial Sequence: Synthetic oligonucleotide
  Antisense strand to SEQ ID NO: 50366
gauacuauagguaaugagc

SEQ ID NO: 50448 - RNA, 19 nt, Artificial Sequence
  Description of Artificial Sequence: Synthetic oligonucleotide
  Sense strand starting at position 3954 of SEQ ID NO: 608
uggaauuccugcucauuac

SEQ ID NO: 50449 - RNA, 19 nt, Artificial Sequence
  Description of Artificial Sequence: Synthetic oligonucleotide
  Antisense strand to SEQ ID NO: 50368
guaaugagcaggaauucca

SEQ ID NO: 50450 - RNA, 19 nt, Artificial Sequence
  Description of Artificial Sequence: Synthetic oligonucleotide
  Sense strand starting at position 3898 of SEQ ID NO: 608
ucuggucaguuaccuauuu

SEQ ID NO: 50451 - RNA, 19 nt, Artificial Sequence
  Description of Artificial Sequence: Synthetic oligonucleotide
  Antisense strand to SEQ ID NO: 50370
aaauagguaacugaccaga

SEQ ID NO: 50452 - RNA, 19 nt, Artificial Sequence
  Description of Artificial Sequence: Synthetic oligonucleotide
  Sense strand starting at position 3861 of SEQ ID NO: 608
guuugaauuauguggacug

SEQ ID NO: 50453 - RNA, 19 nt, Artificial Sequence
  Description of Artificial Sequence: Synthetic oligonucleotide
  Antisense strand to SEQ ID NO: 50372
caguccacauaauucaaac

SEQ ID NO: 50454 - RNA, 19 nt, Artificial Sequence
  Description of Artificial Sequence: Synthetic oligonucleotide
  Sense strand starting at position 3742 of SEQ ID NO: 608
uuaugaaauuguuugcauc

SEQ ID NO: 50455 - RNA, 19 nt, Artificial Sequence
  Description of Artificial Sequence: Synthetic oligonucleotide
  Antisense strand to SEQ ID NO: 50374
gaugcaaacaauuucauaa

SEQ ID NO: 50456 - RNA, 19 nt, Artificial Sequence
  Description of Artificial Sequence: Synthetic oligonucleotide
  Sense strand starting at position 3709 of SEQ ID NO: 608
uccaaugguucugcauaaa

SEQ ID NO: 50457 - RNA, 19 nt, Artificial Sequence
  Description of Artificial Sequence: Synthetic oligonucleotide
  Antisense strand to SEQ ID NO: 50376
uuuaugcagaaccauugga

SEQ ID NO: 50458 - RNA, 19 nt, Artificial Sequence
  Description of Artificial Sequence: Synthetic oligonucleotide
  Sense strand starting at position 3615 of SEQ ID NO: 608
gaugcuuaaguuuguugaa

SEQ ID NO: 50459 - RNA, 19 nt, Artificial Sequence
  Description of Artificial Sequence: Synthetic oligonucleotide
  Antisense strand to SEQ ID NO: 50378
uucaacaaacuuaagcauc

SEQ ID NO: 50460 - RNA, 19 nt, Artificial Sequence
  Description of Artificial Sequence: Synthetic oligonucleotide
  Sense strand starting at position 3609 of SEQ ID NO: 608
uuuguagaugcuuaaguuu

SEQ ID NO: 50461 - RNA, 19 nt, Artificial Sequence
  Description of Artificial Sequence: Synthetic oligonucleotide
  Antisense strand to SEQ ID NO: 50380
aaacuuaagcaucuacaaa

SEQ ID NO: 50462 - RNA, 19 nt, Artificial Sequence
  Description of Artificial Sequence: Synthetic oligonucleotide
  Sense strand starting at position 3599 of SEQ ID NO: 608
gcagaugauguuuguagau

SEQ ID NO: 50463 - RNA, 19 nt, Artificial Sequence
  Description of Artificial Sequence: Synthetic oligonucleotide
  Antisense strand to SEQ ID NO: 50382
aucuacaaacaucaucugc

SEQ ID NO: 50464 - RNA, 19 nt, Artificial Sequence
  Description of Artificial Sequence: Synthetic oligonucleotide
  Sense strand starting at position 3598 of SEQ ID NO: 608
ugcagaugauguuuguaga

SEQ ID NO: 50465 - RNA, 19 nt, Artificial Sequence
  Description of Artificial Sequence: Synthetic oligonucleotide
  Antisense strand to SEQ ID NO: 50384
ucuacaaacaucaucugca

SEQ ID NO: 50466 - RNA, 19 nt, Artificial Sequence
  Description of Artificial Sequence: Synthetic oligonucleotide
  Sense strand starting at position 3586 of SEQ ID NO: 608
uaagaugaugucugcagau

SEQ ID NO: 50467 - RNA, 19 nt, Artificial Sequence
  Description of Artificial Sequence: Synthetic oligonucleotide
  Antisense strand to SEQ ID NO: 50386
aucugcagacaucaucuua

SEQ ID NO: 50468 - RNA, 19 nt, Artificial Sequence
  Description of Artificial Sequence: Synthetic oligonucleotide
  Sense strand starting at position 3585 of SEQ ID NO: 608
uuaagaugaugucugcaga

SEQ ID NO: 50469 - RNA, 19 nt, Artificial Sequence
  Description of Artificial Sequence: Synthetic oligonucleotide
  Antisense strand to SEQ ID NO: 50388
ucugcagacaucaucuuaa

SEQ ID NO: 50470 - RNA, 19 nt, Artificial Sequence
  Description of Artificial Sequence: Synthetic oligonucleotide
  Sense strand starting at position 3429 of SEQ ID NO: 608
agaauuaaguuucucuuag

SEQ ID NO: 50471 - RNA, 19 nt, Artificial Sequence
  Description of Artificial Sequence: Synthetic oligonucleotide
  Antisense strand to SEQ ID NO: 50390
cuaagagaaacuuaauucu

SEQ ID NO: 50472 - RNA, 19 nt, Artificial Sequence
  Description of Artificial Sequence: Synthetic oligonucleotide
  Sense strand starting at position 3348 of SEQ ID NO: 608
guucucauuuacuuguuua

SEQ ID NO: 50473 - RNA, 19 nt, Artificial Sequence
  Description of Artificial Sequence: Synthetic oligonucleotide
  Antisense strand to SEQ ID NO: 50392
uaaacaaguaaaugagaac

SEQ ID NO: 50474 - RNA, 19 nt, Artificial Sequence
  Description of Artificial Sequence: Synthetic oligonucleotide
  Sense strand starting at position 3263 of SEQ ID NO: 608
uuaagaaccuugcugaauu

SEQ ID NO: 50475 - RNA, 19 nt, Artificial Sequence
  Description of Artificial Sequence: Synthetic oligonucleotide
  Antisense strand to SEQ ID NO: 50394
aauucagcaagguucuuaa

SEQ ID NO: 50476 - RNA, 19 nt, Artificial Sequence
  Description of Artificial Sequence: Synthetic oligonucleotide
  Sense strand starting at position 3261 of SEQ ID NO: 608
guuuaagaaccuugcugaa

SEQ ID NO: 50477 - RNA, 19 nt, Artificial Sequence
  Description of Artificial Sequence: Synthetic oligonucleotide
  Antisense strand to SEQ ID NO: 50396
uucagcaagguucuuaaac

SEQ ID NO: 50478 - RNA, 19 nt, Artificial Sequence
  Description of Artificial Sequence: Synthetic oligonucleotide
  Sense strand starting at position 3249 of SEQ ID NO: 608
ucaauuugcuguguuuaag

SEQ ID NO: 50479 - RNA, 19 nt, Artificial Sequence
  Description of Artificial Sequence: Synthetic oligonucleotide
  Antisense strand to SEQ ID NO: 50398
cuuaaacacagcaaauuga

SEQ ID NO: 50480 - RNA, 19 nt, Artificial Sequence
  Description of Artificial Sequence: Synthetic oligonucleotide
  Sense strand starting at position 3248 of SEQ ID NO: 608
gucaauuugcuguguuuaa

SEQ ID NO: 50481 - RNA, 19 nt, Artificial Sequence
  Description of Artificial Sequence: Synthetic oligonucleotide
  Antisense strand to SEQ ID NO: 50400
uuaaacacagcaaauugac

SEQ ID NO: 50482 - RNA, 19 nt, Artificial Sequence
  Description of Artificial Sequence: Synthetic oligonucleotide
  Sense strand starting at position 3238 of SEQ ID NO: 608
guugauauuugucaauuug

SEQ ID NO: 50483 - RNA, 19 nt, Artificial Sequence
  Description of Artificial Sequence: Synthetic oligonucleotide
  Antisense strand to SEQ ID NO: 50402
caaauugacaaauaucaac

SEQ ID NO: 50484 - RNA, 19 nt, Artificial Sequence
  Description of Artificial Sequence: Synthetic oligonucleotide
  Sense strand starting at position 3209 of SEQ ID NO: 608
cagagugauuugcacagaa

SEQ ID NO: 50485 - RNA, 19 nt, Artificial Sequence
  Description of Artificial Sequence: Synthetic oligonucleotide
  Antisense strand to SEQ ID NO: 50404
uucugugcaaaucacucug

SEQ ID NO: 50486 - RNA, 19 nt, Artificial Sequence
  Description of Artificial Sequence: Synthetic oligonucleotide
  Sense strand starting at position 3202 of SEQ ID NO: 608
gcuguuacagagugauuug

SEQ ID NO: 50487 - RNA, 19 nt, Artificial Sequence
  Description of Artificial Sequence: Synthetic oligonucleotide
  Antisense strand to SEQ ID NO: 50406
caaaucacucuguaacagc

SEQ ID NO: 50488 - RNA, 19 nt, Artificial Sequence
  Description of Artificial Sequence: Synthetic oligonucleotide
  Sense strand starting at position 3173 of SEQ ID NO: 608
gggagcccucgagaaugua

SEQ ID NO: 50489 - RNA, 19 nt, Artificial Sequence
  Description of Artificial Sequence: Synthetic oligonucleotide
  Antisense strand to SEQ ID NO: 50408
uacauucucgagggcuccc

SEQ ID NO: 50490 - RNA, 19 nt, Artificial Sequence
  Description of Artificial Sequence: Synthetic oligonucleotide
  Sense strand starting at position 3171 of SEQ ID NO: 608
cagggagcccucgagaaug

SEQ ID NO: 50491 - RNA, 19 nt, Artificial Sequence
  Description of Artificial Sequence: Synthetic oligonucleotide
  Antisense strand to SEQ ID NO: 50410
cauucucgagggcucccug

SEQ ID NO: 50492 - RNA, 19 nt, Artificial Sequence
  Description of Artificial Sequence: Synthetic oligonucleotide
  Sense strand starting at position 3067 of SEQ ID NO: 608
cugaaauguugggucaauc

SEQ ID NO: 50493 - RNA, 19 nt, Artificial Sequence
  Description of Artificial Sequence: Synthetic oligonucleotide
  Antisense strand to SEQ ID NO: 50412
gauugacccaacauuucag

SEQ ID NO: 50494 - RNA, 19 nt, Artificial Sequence
  Description of Artificial Sequence: Synthetic oligonucleotide
  Sense strand starting at position 3065 of SEQ ID NO: 608
cucugaaauguugggucaa

SEQ ID NO: 50495 - RNA, 19 nt, Artificial Sequence
  Description of Artificial Sequence: Synthetic oligonucleotide
  Antisense strand to SEQ ID NO: 50414
uugacccaacauuucagag

SEQ ID NO: 50496 - RNA, 19 nt, Artificial Sequence
  Description of Artificial Sequence: Synthetic oligonucleotide
  Sense strand starting at position 3002 of SEQ ID NO: 608
aguucugcucacugaaauu

SEQ ID NO: 50497 - RNA, 19 nt, Artificial Sequence
  Description of Artificial Sequence: Synthetic oligonucleotide
  Antisense strand to SEQ ID NO: 50416
aauuucagugagcagaacu

SEQ ID NO: 50498 - RNA, 19 nt, Artificial Sequence
  Description of Artificial Sequence: Synthetic oligonucleotide
  Sense strand starting at position 3001 of SEQ ID NO: 608
gaguucugcucacugaaau

SEQ ID NO: 50499 - RNA, 19 nt, Artificial Sequence
  Description of Artificial Sequence: Synthetic oligonucleotide
  Antisense strand to SEQ ID NO: 50418
auuucagugagcagaacuc

SEQ ID NO: 50500 - RNA, 19 nt, Artificial Sequence
  Description of Artificial Sequence: Synthetic oligonucleotide
  Sense strand starting at position 2999 of SEQ ID NO: 608
gggaguucugcucacugaa

SEQ ID NO: 50501 - RNA, 19 nt, Artificial Sequence
  Description of Artificial Sequence: Synthetic oligonucleotide
  Antisense strand to SEQ ID NO: 50420
uucagugagcagaacuccc

SEQ ID NO: 50502 - RNA, 19 nt, Artificial Sequence
  Description of Artificial Sequence: Synthetic oligonucleotide
  Sense strand starting at position 2972 of SEQ ID NO: 608
ggaaucuacguguaaacaa

SEQ ID NO: 50503 - RNA, 19 nt, Artificial Sequence
  Description of Artificial Sequence: Synthetic oligonucleotide
  Antisense strand to SEQ ID NO: 50422
uuguuuacacguagauucc

SEQ ID NO: 50504 - RNA, 19 nt, Artificial Sequence
  Description of Artificial Sequence: Synthetic oligonucleotide
  Sense strand starting at position 2969 of SEQ ID NO: 608
ccaggaaucuacguguaaa

SEQ ID NO: 50505 - RNA, 19 nt, Artificial Sequence
  Description of Artificial Sequence: Synthetic oligonucleotide
  Antisense strand to SEQ ID NO: 50424
uuuacacguagauuccugg

SEQ ID NO: 50506 - RNA, 19 nt, Artificial Sequence
  Description of Artificial Sequence: Synthetic oligonucleotide
  Sense strand starting at position 2825 of SEQ ID NO: 608
agauaaguaucucuguggu

SEQ ID NO: 50507 - RNA, 19 nt, Artificial Sequence
  Description of Artificial Sequence: Synthetic oligonucleotide
  Antisense strand to SEQ ID NO: 50426
accacagagauacuuaucu

SEQ ID NO: 50508 - RNA, 19 nt, Artificial Sequence
  Description of Artificial Sequence: Synthetic oligonucleotide
  Sense strand starting at position 2710 of SEQ ID NO: 608
gugacuguacuuuagggaa

SEQ ID NO: 50509 - RNA, 19 nt, Artificial Sequence
  Description of Artificial Sequence: Synthetic oligonucleotide
  Antisense strand to SEQ ID NO: 50428
uucccuaaaguacagucac

SEQ ID NO: 50510 - RNA, 19 nt, Artificial Sequence
  Description of Artificial Sequence: Synthetic oligonucleotide
  Sense strand starting at position 2666 of SEQ ID NO: 608
acggaugacuuggcacaau

SEQ ID NO: 50511 - RNA, 19 nt, Artificial Sequence
  Description of Artificial Sequence: Synthetic oligonucleotide
  Antisense strand to SEQ ID NO: 50430
auugugccaagucauccgu

SEQ ID NO: 50512 - RNA, 19 nt, Artificial Sequence
  Description of Artificial Sequence: Synthetic oligonucleotide
  Sense strand starting at position 2665 of SEQ ID NO: 608
cacggaugacuuggcacaa

SEQ ID NO: 50513 - RNA, 19 nt, Artificial Sequence
  Description of Artificial Sequence: Synthetic oligonucleotide
  Antisense strand to SEQ ID NO: 50432
uugugccaagucauccgug

SEQ ID NO: 50514 - RNA, 19 nt, Artificial Sequence
  Description of Artificial Sequence: Synthetic oligonucleotide
  Sense strand starting at position 2440 of SEQ ID NO: 608
ggcguucucaaugaggguu

SEQ ID NO: 50515 - RNA, 19 nt, Artificial Sequence
  Description of Artificial Sequence: Synthetic oligonucleotide
  Antisense strand to SEQ ID NO: 50434
aacccucauugagaacgcc

SEQ ID NO: 50516 - RNA, 19 nt, Artificial Sequence
  Description of Artificial Sequence: Synthetic oligonucleotide
  Sense strand starting at position 1609 of SEQ ID NO: 608
gcacuuacugcuugaacau

SEQ ID NO: 50517 - RNA, 19 nt, Artificial Sequence
  Description of Artificial Sequence: Synthetic oligonucleotide
  Antisense strand to SEQ ID NO: 50436
auguucaagcaguaagugc

SEQ ID NO: 50518 - RNA, 19 nt, Artificial Sequence
  Description of Artificial Sequence: Synthetic oligonucleotide
  Sense strand starting at position 1608 of SEQ ID NO: 608
ggcacuuacugcuugaaca

SEQ ID NO: 50519 - RNA, 19 nt, Artificial Sequence
  Description of Artificial Sequence: Synthetic oligonucleotide
  Antisense strand to SEQ ID NO: 50438
uguucaagcaguaagugcc

SEQ ID NO: 50520 - RNA, 19 nt, Artificial Sequence
  Description of Artificial Sequence: Synthetic oligonucleotide
  Sense strand starting at position 1081 of SEQ ID NO: 608
gagggaaugugguuggcau

SEQ ID NO: 50521 - RNA, 19 nt, Artificial Sequence
  Description of Artificial Sequence: Synthetic oligonucleotide
  Antisense strand to SEQ ID NO: 50440
augccaaccacauucccuc

SEQ ID NO: 50522 - RNA, 19 nt, Artificial Sequence
  Description of Artificial Sequence: Synthetic oligonucleotide
  Sense strand starting at position 900 of SEQ ID NO: 608
ccacuugugagugaaggau

SEQ ID NO: 50523 - RNA, 19 nt, Artificial Sequence
  Description of Artificial Sequence: Synthetic oligonucleotide
  Antisense strand to SEQ ID NO: 50442
auccuucacucacaagugg

SEQ ID NO: 50524 - RNA, 19 nt, Artificial Sequence
  Description of Artificial Sequence: Synthetic oligonucleotide
  Sense strand starting at position 899 of SEQ ID NO: 608
accacuugugagugaagga

SEQ ID NO: 50525 - RNA, 19 nt, Artificial Sequence
  Description of Artificial Sequence: Synthetic oligonucleotide
  Antisense strand to SEQ ID NO: 50444
uccuucacucacaaguggu

SEQ ID NO: 50526 - RNA, 19 nt, Artificial Sequence
  Description of Artificial Sequence: Synthetic oligonucleotide
  Sense strand starting at position 3936 of SEQ ID NO: 609
gggcauuccauagagucaa

SEQ ID NO: 50527 - RNA, 19 nt, Artificial Sequence
  Description of Artificial Sequence: Synthetic oligonucleotide
  Antisense strand to SEQ ID NO: 50446
uugacucuauggaaugccc

SEQ ID NO: 50528 - RNA, 19 nt, Artificial Sequence
  Description of Artificial Sequence: Synthetic oligonucleotide
  Sense strand starting at position 3649 of SEQ ID NO: 609
cugcguuuacaauaaacau

SEQ ID NO: 50529 - RNA, 19 nt, Artificial Sequence
  Description of Artificial Sequence: Synthetic oligonucleotide
  Antisense strand to SEQ ID NO: 50448
auguuuauuguaaacgcag

SEQ ID NO: 50530 - RNA, 19 nt, Artificial Sequence
  Description of Artificial Sequence: Synthetic oligonucleotide
  Sense strand starting at position 3642 of SEQ ID NO: 609
guauucgcugcguuuacaa

SEQ ID NO: 50531 - RNA, 19 nt, Artificial Sequence
  Description of Artificial Sequence: Synthetic oligonucleotide
  Antisense strand to SEQ ID NO: 50450
uuguaaacgcagcgaauac

SEQ ID NO: 50532 - RNA, 19 nt, Artificial Sequence
  Description of Artificial Sequence: Synthetic oligonucleotide
  Sense strand starting at position 3245 of SEQ ID NO: 609
uuugauuaggcucacgagu

SEQ ID NO: 50533 - RNA, 19 nt, Artificial Sequence
  Description of Artificial Sequence: Synthetic oligonucleotide
  Antisense strand to SEQ ID NO: 50452
acucgugagccuaaucaaa

SEQ ID NO: 50534 - RNA, 19 nt, Artificial Sequence
  Description of Artificial Sequence: Synthetic oligonucleotide
  Sense strand starting at position 2936 of SEQ ID NO: 609
augcuaauguuugugaaca

SEQ ID NO: 50535 - RNA, 19 nt, Artificial Sequence
  Description of Artificial Sequence: Synthetic oligonucleotide
  Antisense strand to SEQ ID NO: 50454
uguucacaaacauuagcau

SEQ ID NO: 50536 - RNA, 19 nt, Artificial Sequence
  Description of Artificial Sequence: Synthetic oligonucleotide
  Sense strand starting at position 2925 of SEQ ID NO: 609
uugacagacguaugcuaau

SEQ ID NO: 50537 - RNA, 19 nt, Artificial Sequence
  Description of Artificial Sequence: Synthetic oligonucleotide
  Antisense strand to SEQ ID NO: 50456
auuagcauacgucugucaa

SEQ ID NO: 50538 - RNA, 19 nt, Artificial Sequence
  Description of Artificial Sequence: Synthetic oligonucleotide
  Sense strand starting at position 2923 of SEQ ID NO: 609
cuuugacagacguaugcua

SEQ ID NO: 50539 - RNA, 19 nt, Artificial Sequence
  Description of Artificial Sequence: Synthetic oligonucleotide
  Antisense strand to SEQ ID NO: 50458
uagcauacgucugucaaag

SEQ ID NO: 50540 - RNA, 19 nt, Artificial Sequence
  Description of Artificial Sequence: Synthetic oligonucleotide
  Sense strand starting at position 2914 of SEQ ID NO: 609
ugugaaacucuuugacaga

SEQ ID NO: 50541 - RNA, 19 nt, Artificial Sequence
  Description of Artificial Sequence: Synthetic oligonucleotide
  Antisense strand to SEQ ID NO: 50460
ucugucaaagaguuucaca

SEQ ID NO: 50542 - RNA, 19 nt, Artificial Sequence
  Description of Artificial Sequence: Synthetic oligonucleotide
  Sense strand starting at position 2913 of SEQ ID NO: 609
gugugaaacucuuugacag

SEQ ID NO: 50543 - RNA, 19 nt, Artificial Sequence
  Description of Artificial Sequence: Synthetic oligonucleotide
  Antisense strand to SEQ ID NO: 50462
cugucaaagaguuucacac

SEQ ID NO: 50544 - RNA, 19 nt, Artificial Sequence
  Description of Artificial Sequence: Synthetic oligonucleotide
  Sense strand starting at position 2873 of SEQ ID NO: 609
aagcauuugugaguaguau

SEQ ID NO: 50545 - RNA, 19 nt, Artificial Sequence
  Description of Artificial Sequence: Synthetic oligonucleotide
  Antisense strand to SEQ ID NO: 50464
auacuacucacaaaugcuu

SEQ ID NO: 50546 - RNA, 19 nt, Artificial Sequence
  Description of Artificial Sequence: Synthetic oligonucleotide
  Sense strand starting at position 2840 of SEQ ID NO: 609
acaugaaauacgugugaug

SEQ ID NO: 50547 - RNA, 19 nt, Artificial Sequence
  Description of Artificial Sequence: Synthetic oligonucleotide
  Antisense strand to SEQ ID NO: 50466
caucacacguauuucaugu

SEQ ID NO: 50548 - RNA, 19 nt, Artificial Sequence
  Description of Artificial Sequence: Synthetic oligonucleotide
  Sense strand starting at position 2811 of SEQ ID NO: 609
gggcaugaagggugacaaa

SEQ ID NO: 50549 - RNA, 19 nt, Artificial Sequence
  Description of Artificial Sequence: Synthetic oligonucleotide
  Antisense strand to SEQ ID NO: 50468
uuugucacccuucaugccc

SEQ ID NO: 50550 - RNA, 19 nt, Artificial Sequence
  Description of Artificial Sequence: Synthetic oligonucleotide
  Sense strand starting at position 2741 of SEQ ID NO: 609
accugaguauauguaacaa

SEQ ID NO: 50551 - RNA, 19 nt, Artificial Sequence
  Description of Artificial Sequence: Synthetic oligonucleotide
  Antisense strand to SEQ ID NO: 50470
uuguuacauauacucaggu

SEQ ID NO: 50552 - RNA, 19 nt, Artificial Sequence
  Description of Artificial Sequence: Synthetic oligonucleotide
  Sense strand starting at position 2735 of SEQ ID NO: 609
cuaauaaccugaguauaug

SEQ ID NO: 50553 - RNA, 19 nt, Artificial Sequence
  Description of Artificial Sequence: Synthetic oligonucleotide
  Antisense strand to SEQ ID NO: 50472
cauauacucagguuauuag

SEQ ID NO: 50554 - RNA, 19 nt, Artificial Sequence
  Description of Artificial Sequence: Synthetic oligonucleotide
  Sense strand starting at position 2733 of SEQ ID NO: 609
cgcuaauaaccugaguaua

SEQ ID NO: 50555 - RNA, 19 nt, Artificial Sequence
  Description of Artificial Sequence: Synthetic oligonucleotide
  Antisense strand to SEQ ID NO: 50474
uauacucagguuauuagcg

SEQ ID NO: 50556 - RNA, 19 nt, Artificial Sequence
  Description of Artificial Sequence: Synthetic oligonucleotide
  Sense strand starting at position 2724 of SEQ ID NO: 609
gucaaagagcgcuaauaac

SEQ ID NO: 50557 - RNA, 19 nt, Artificial Sequence
  Description of Artificial Sequence: Synthetic oligonucleotide
  Antisense strand to SEQ ID NO: 50476
guuauuagcgcucuuugac

SEQ ID NO: 50558 - RNA, 19 nt, Artificial Sequence
  Description of Artificial Sequence: Synthetic oligonucleotide
  Sense strand starting at position 2595 of SEQ ID NO: 609
uugugugaucgagugugua

SEQ ID NO: 50559 - RNA, 19 nt, Artificial Sequence
  Description of Artificial Sequence: Synthetic oligonucleotide
  Antisense strand to SEQ ID NO: 50478
uacacacucgaucacacaa

SEQ ID NO: 50560 - RNA, 19 nt, Artificial Sequence
  Description of Artificial Sequence: Synthetic oligonucleotide
  Sense strand starting at position 2539 of SEQ ID NO: 609
gucuuuguucuggagauug

SEQ ID NO: 50561 - RNA, 19 nt, Artificial Sequence
  Description of Artificial Sequence: Synthetic oligonucleotide
  Antisense strand to SEQ ID NO: 50480
caaucuccagaacaaagac

SEQ ID NO: 50562 - RNA, 19 nt, Artificial Sequence
  Description of Artificial Sequence: Synthetic oligonucleotide
  Sense strand starting at position 2180 of SEQ ID NO: 609
cgcagaucugcucagagau

SEQ ID NO: 50563 - RNA, 19 nt, Artificial Sequence
  Description of Artificial Sequence: Synthetic oligonucleotide
  Antisense strand to SEQ ID NO: 50482
aucucugagcagaucugcg

SEQ ID NO: 50564 - RNA, 19 nt, Artificial Sequence
  Description of Artificial Sequence: Synthetic oligonucleotide
  Sense strand starting at position 1797 of SEQ ID NO: 609
aggcuuacuugggauuuga

SEQ ID NO: 50565 - RNA, 19 nt, Artificial Sequence
  Description of Artificial Sequence: Synthetic oligonucleotide
  Antisense strand to SEQ ID NO: 50484
ucaaaucccaaguaagccu

SEQ ID NO: 50566 - RNA, 19 nt, Artificial Sequence
  Description of Artificial Sequence: Synthetic oligonucleotide
  Sense strand starting at position 1726 of SEQ ID NO: 609
ggguuuggccgggacaguu

SEQ ID NO: 50567 - RNA, 19 nt, Artificial Sequence
  Description of Artificial Sequence: Synthetic oligonucleotide
  Antisense strand to SEQ ID NO: 50486
aacugucccggccaaaccc

SEQ ID NO: 50568 - RNA, 19 nt, Artificial Sequence
  Description of Artificial Sequence: Synthetic oligonucleotide
  Sense strand starting at position 1597 of SEQ ID NO: 609
gauauaagcccaugcaagu

SEQ ID NO: 50569 - RNA, 19 nt, Artificial Sequence
  Description of Artificial Sequence: Synthetic oligonucleotide
  Antisense strand to SEQ ID NO: 50488
acuugcaugggcuuauauc

SEQ ID NO: 50570 - RNA, 19 nt, Artificial Sequence
  Description of Artificial Sequence: Synthetic oligonucleotide
  Sense strand starting at position 1545 of SEQ ID NO: 609
agucccucacuuuagagua

SEQ ID NO: 50571 - RNA, 19 nt, Artificial Sequence
  Description of Artificial Sequence: Synthetic oligonucleotide
  Antisense strand to SEQ ID NO: 50490
uacucuaaagugagggacu

SEQ ID NO: 50572 - RNA, 19 nt, Artificial Sequence
  Description of Artificial Sequence: Synthetic oligonucleotide
  Sense strand starting at position 1542 of SEQ ID NO: 609
augagucccucacuuuaga

SEQ ID NO: 50573 - RNA, 19 nt, Artificial Sequence
  Description of Artificial Sequence: Synthetic oligonucleotide
  Antisense strand to SEQ ID NO: 50492
ucuaaagugagggacucau

SEQ ID NO: 50574 - RNA, 19 nt, Artificial Sequence
  Description of Artificial Sequence: Synthetic oligonucleotide
  Sense strand starting at position 1540 of SEQ ID NO: 609
gcaugagucccucacuuua

SEQ ID NO: 50575 - RNA, 19 nt, Artificial Sequence
  Description of Artificial Sequence: Synthetic oligonucleotide
  Antisense strand to SEQ ID NO: 50494
uaaagugagggacucaugc

SEQ ID NO: 50576 - RNA, 19 nt, Artificial Sequence
  Description of Artificial Sequence: Synthetic oligonucleotide
  Sense strand starting at position 1395 of SEQ ID NO: 609
acaccagguaucugucagu

SEQ ID NO: 50577 - RNA, 19 nt, Artificial Sequence
  Description of Artificial Sequence: Synthetic oligonucleotide
  Antisense strand to SEQ ID NO: 50496
acugacagauaccuggugu

SEQ ID NO: 50578 - RNA, 19 nt, Artificial Sequence
  Description of Artificial Sequence: Synthetic oligonucleotide
  Sense strand starting at position 1360 of SEQ ID NO: 609
ggguuaccuugagcauucu

SEQ ID NO: 50579 - RNA, 19 nt, Artificial Sequence
  Description of Artificial Sequence: Synthetic oligonucleotide
  Antisense strand to SEQ ID NO: 50498
agaaugcucaagguaaccc

SEQ ID NO: 50580 - RNA, 19 nt, Artificial Sequence
  Description of Artificial Sequence: Synthetic oligonucleotide
  Sense strand starting at position 1358 of SEQ ID NO: 609
caggguuaccuugagcauu

SEQ ID NO: 50581 - RNA, 19 nt, Artificial Sequence
  Description of Artificial Sequence: Synthetic oligonucleotide
  Antisense strand to SEQ ID NO: 50500
aaugcucaagguaacccug

SEQ ID NO: 50582 - RNA, 19 nt, Artificial Sequence
  Description of Artificial Sequence: Synthetic oligonucleotide
  Sense strand starting at position 1334 of SEQ ID NO: 609
cagcucucuccugagaggu

SEQ ID NO: 50583 - RNA, 19 nt, Artificial Sequence
  Description of Artificial Sequence: Synthetic oligonucleotide
  Antisense strand to SEQ ID NO: 50502
accucucaggagagagcug

SEQ ID NO: 50584 - RNA, 19 nt, Artificial Sequence
  Description of Artificial Sequence: Synthetic oligonucleotide
  Sense strand starting at position 1294 of SEQ ID NO: 609
cuuuaaauacagggugaau

SEQ ID NO: 50585 - RNA, 19 nt, Artificial Sequence
  Description of Artificial Sequence: Synthetic oligonucleotide
  Antisense strand to SEQ ID NO: 50504
auucacccuguauuuaaag

SEQ ID NO: 50586 - RNA, 19 nt, Artificial Sequence
  Description of Artificial Sequence: Synthetic oligonucleotide
  Sense strand starting at position 1293 of SEQ ID NO: 609
gcuuuaaauacagggugaa

SEQ ID NO: 50587 - RNA, 19 nt, Artificial Sequence
  Description of Artificial Sequence: Synthetic oligonucleotide
  Antisense strand to SEQ ID NO: 50506
uucacccuguauuuaaagc

SEQ ID NO: 50588 - RNA, 19 nt, Artificial Sequence
  Description of Artificial Sequence: Synthetic oligonucleotide
  Sense strand starting at position 1207 of SEQ ID NO: 609
aggugauucccucagccua

SEQ ID NO: 50589 - RNA, 19 nt, Artificial Sequence
  Description of Artificial Sequence: Synthetic oligonucleotide
  Antisense strand to SEQ ID NO: 50508
uaggcugagggaaucaccu

SEQ ID NO: 50590 - RNA, 19 nt, Artificial Sequence
  Description of Artificial Sequence: Synthetic oligonucleotide
  Sense strand starting at position 1141 of SEQ ID NO: 609
ucugaagcuuucccaugau

SEQ ID NO: 50591 - RNA, 19 nt, Artificial Sequence
  Description of Artificial Sequence: Synthetic oligonucleotide
  Antisense strand to SEQ ID NO: 50510
aucaugggaaagcuucaga

SEQ ID NO: 50592 - RNA, 19 nt, Artificial Sequence
  Description of Artificial Sequence: Synthetic oligonucleotide
  Sense strand starting at position 1140 of SEQ ID NO: 609
uucugaagcuuucccauga

SEQ ID NO: 50593 - RNA, 19 nt, Artificial Sequence
  Description of Artificial Sequence: Synthetic oligonucleotide
  Antisense strand to SEQ ID NO: 50512
ucaugggaaagcuucagaa

SEQ ID NO: 50594 - RNA, 19 nt, Artificial Sequence
  Description of Artificial Sequence: Synthetic oligonucleotide
  Sense strand starting at position 906 of SEQ ID NO: 609
gauggcuuucgugauacca

SEQ ID NO: 50595 - RNA, 19 nt, Artificial Sequence
  Description of Artificial Sequence: Synthetic oligonucleotide
  Antisense strand to SEQ ID NO: 50514
ugguaucacgaaagccauc

SEQ ID NO: 50596 - RNA, 19 nt, Artificial Sequence
  Description of Artificial Sequence: Synthetic oligonucleotide
  Sense strand starting at position 510 of SEQ ID NO: 609
agaggaaaccugggagcuu

SEQ ID NO: 50597 - RNA, 19 nt, Artificial Sequence
  Description of Artificial Sequence: Synthetic oligonucleotide
  Antisense strand to SEQ ID NO: 50516
aagcucccagguuuccucu

SEQ ID NO: 50598 - RNA, 19 nt, Artificial Sequence
  Description of Artificial Sequence: Synthetic oligonucleotide
  Sense strand starting at position 488 of SEQ ID NO: 609
ggaagaggcuccuuccuga

SEQ ID NO: 50599 - RNA, 19 nt, Artificial Sequence
  Description of Artificial Sequence: Synthetic oligonucleotide
  Antisense strand to SEQ ID NO: 50518
ucaggaaggagccucuucc

SEQ ID NO: 50600 - RNA, 19 nt, Artificial Sequence
  Description of Artificial Sequence: Synthetic oligonucleotide
  Sense strand starting at position 299 of SEQ ID NO: 609
uuuaguccuggguaugaua

SEQ ID NO: 50601 - RNA, 19 nt, Artificial Sequence
  Description of Artificial Sequence: Synthetic oligonucleotide
  Antisense strand to SEQ ID NO: 50520
uaucauacccaggacuaaa

SEQ ID NO: 50602 - RNA, 19 nt, Artificial Sequence
  Description of Artificial Sequence: Synthetic oligonucleotide
  Sense strand starting at position 297 of SEQ ID NO: 609
ucuuuaguccuggguauga

SEQ ID NO: 50603 - RNA, 19 nt, Artificial Sequence
  Description of Artificial Sequence: Synthetic oligonucleotide
  Antisense strand to SEQ ID NO: 50522
ucauacccaggacuaaaga

SEQ ID NO: 50604 - RNA, 19 nt, Artificial Sequence
  Description of Artificial Sequence: Synthetic oligonucleotide
  Sense strand starting at position 52 of SEQ ID NO: 609
ccaacaguguccuccaaac

SEQ ID NO: 50605 - RNA, 19 nt, Artificial Sequence
  Description of Artificial Sequence: Synthetic oligonucleotide
  Antisense strand to SEQ ID NO: 50524
guuuggaggacacuguugg

SEQ ID NO: 50606 - RNA, 19 nt, Artificial Sequence
  Description of Artificial Sequence: Synthetic oligonucleotide
  Sense strand starting at position 3936 of SEQ ID NO: 610
gagcccucucuacaggauu

SEQ ID NO: 50607 - RNA, 19 nt, Artificial Sequence
  Description of Artificial Sequence: Synthetic oligonucleotide
  Antisense strand to SEQ ID NO: 50526
aauccuguagagagggcuc

SEQ ID NO: 50608 - RNA, 19 nt, Artificial Sequence
  Description of Artificial Sequence: Synthetic oligonucleotide
  Sense strand starting at position 3913 of SEQ ID NO: 610
cugagcccuucucuuagaa

SEQ ID NO: 50609 - RNA, 19 nt, Artificial Sequence
  Description of Artificial Sequence: Synthetic oligonucleotide
  Antisense strand to SEQ ID NO: 50528
uucuaagagaagggcucag

SEQ ID NO: 50610 - RNA, 19 nt, Artificial Sequence
  Description of Artificial Sequence: Synthetic oligonucleotide
  Sense strand starting at position 3863 of SEQ ID NO: 610
cuggguacucuuuagaauc

SEQ ID NO: 50611 - RNA, 19 nt, Artificial Sequence
  Description of Artificial Sequence: Synthetic oligonucleotide
  Antisense strand to SEQ ID NO: 50530
gauucuaaagaguacccag

SEQ ID NO: 50612 - RNA, 19 nt, Artificial Sequence
  Description of Artificial Sequence: Synthetic oligonucleotide
  Sense strand starting at position 3823 of SEQ ID NO: 610
cuagguucugcuuaagaau

SEQ ID NO: 50613 - RNA, 19 nt, Artificial Sequence
  Description of Artificial Sequence: Synthetic oligonucleotide
  Antisense strand to SEQ ID NO: 50532
auucuuaagcagaaccuag

SEQ ID NO: 50614 - RNA, 19 nt, Artificial Sequence
  Description of Artificial Sequence: Synthetic oligonucleotide
  Sense strand starting at position 3802 of SEQ ID NO: 610
auauaucccuguuuaucga

SEQ ID NO: 50615 - RNA, 19 nt, Artificial Sequence
  Description of Artificial Sequence: Synthetic oligonucleotide
  Antisense strand to SEQ ID NO: 50534
ucgauaaacagggauauau

SEQ ID NO: 50616 - RNA, 19 nt, Artificial Sequence
  Description of Artificial Sequence: Synthetic oligonucleotide
  Sense strand starting at position 3764 of SEQ ID NO: 610
ugguuuggucuaggacuuu

SEQ ID NO: 50617 - RNA, 19 nt, Artificial Sequence
  Description of Artificial Sequence: Synthetic oligonucleotide
  Antisense strand to SEQ ID NO: 50536
aaaguccuagaccaaacca

SEQ ID NO: 50618 - RNA, 19 nt, Artificial Sequence
  Description of Artificial Sequence: Synthetic oligonucleotide
  Sense strand starting at position 3762 of SEQ ID NO: 610
gcugguuuggucuaggacu

SEQ ID NO: 50619 - RNA, 19 nt, Artificial Sequence
  Description of Artificial Sequence: Synthetic oligonucleotide
  Antisense strand to SEQ ID NO: 50538
aguccuagaccaaaccagc

SEQ ID NO: 50620 - RNA, 19 nt, Artificial Sequence
  Description of Artificial Sequence: Synthetic oligonucleotide
  Sense strand starting at position 3737 of SEQ ID NO: 610
ucauauugauagugaacag

SEQ ID NO: 50621 - RNA, 19 nt, Artificial Sequence
  Description of Artificial Sequence: Synthetic oligonucleotide
  Antisense strand to SEQ ID NO: 50540
cuguucacuaucaauauga

SEQ ID NO: 50622 - RNA, 19 nt, Artificial Sequence
  Description of Artificial Sequence: Synthetic oligonucleotide
  Sense strand starting at position 3734 of SEQ ID NO: 610
ugcucauauugauagugaa

SEQ ID NO: 50623 - RNA, 19 nt, Artificial Sequence
  Description of Artificial Sequence: Synthetic oligonucleotide
  Antisense strand to SEQ ID NO: 50542
uucacuaucaauaugagca

SEQ ID NO: 50624 - RNA, 19 nt, Artificial Sequence
  Description of Artificial Sequence: Synthetic oligonucleotide
  Sense strand starting at position 3725 of SEQ ID NO: 610
cagagacgcugcucauauu

SEQ ID NO: 50625 - RNA, 19 nt, Artificial Sequence
  Description of Artificial Sequence: Synthetic oligonucleotide
  Antisense strand to SEQ ID NO: 50544
aauaugagcagcgucucug

SEQ ID NO: 50626 - RNA, 19 nt, Artificial Sequence
  Description of Artificial Sequence: Synthetic oligonucleotide
  Sense strand starting at position 3445 of SEQ ID NO: 610
aggugagaguagucucugu

SEQ ID NO: 50627 - RNA, 19 nt, Artificial Sequence
  Description of Artificial Sequence: Synthetic oligonucleotide
  Antisense strand to SEQ ID NO: 50546
acagagacuacucucaccu

SEQ ID NO: 50628 - RNA, 19 nt, Artificial Sequence
  Description of Artificial Sequence: Synthetic oligonucleotide
  Sense strand starting at position 3404 of SEQ ID NO: 610
ggcggugcuauccagaaua

SEQ ID NO: 50629 - RNA, 19 nt, Artificial Sequence
  Description of Artificial Sequence: Synthetic oligonucleotide
  Antisense strand to SEQ ID NO: 50548
uauucuggauagcaccgcc

SEQ ID NO: 50630 - RNA, 19 nt, Artificial Sequence
  Description of Artificial Sequence: Synthetic oligonucleotide
  Sense strand starting at position 3359 of SEQ ID NO: 610
gagucuugaccacaaguca

SEQ ID NO: 50631 - RNA, 19 nt, Artificial Sequence
  Description of Artificial Sequence: Synthetic oligonucleotide
  Antisense strand to SEQ ID NO: 50550
ugacuuguggucaagacuc

SEQ ID NO: 50632 - RNA, 19 nt, Artificial Sequence
  Description of Artificial Sequence: Synthetic oligonucleotide
  Sense strand starting at position 3357 of SEQ ID NO: 610
cagagucuugaccacaagu

SEQ ID NO: 50633 - RNA, 19 nt, Artificial Sequence
  Description of Artificial Sequence: Synthetic oligonucleotide
  Antisense strand to SEQ ID NO: 50552
acuuguggucaagacucug

SEQ ID NO: 50634 - RNA, 19 nt, Artificial Sequence
  Description of Artificial Sequence: Synthetic oligonucleotide
  Sense strand starting at position 3260 of SEQ ID NO: 610
accuguguccagggagaca

SEQ ID NO: 50635 - RNA, 19 nt, Artificial Sequence
  Description of Artificial Sequence: Synthetic oligonucleotide
  Antisense strand to SEQ ID NO: 50554
ugucucccuggacacaggu

SEQ ID NO: 50636 - RNA, 19 nt, Artificial Sequence
  Description of Artificial Sequence: Synthetic oligonucleotide
  Sense strand starting at position 3172 of SEQ ID NO: 610
ggcuaucugucccuuaucu

SEQ ID NO: 50637 - RNA, 19 nt, Artificial Sequence
  Description of Artificial Sequence: Synthetic oligonucleotide
  Antisense strand to SEQ ID NO: 50556
agauaagggacagauagcc

SEQ ID NO: 50638 - RNA, 19 nt, Artificial Sequence
  Description of Artificial Sequence: Synthetic oligonucleotide
  Sense strand starting at position 3170 of SEQ ID NO: 610
agggcuaucugucccuuau

SEQ ID NO: 50639 - RNA, 19 nt, Artificial Sequence
  Description of Artificial Sequence: Synthetic oligonucleotide
  Antisense strand to SEQ ID NO: 50558
auaagggacagauagcccu

SEQ ID NO: 50640 - RNA, 19 nt, Artificial Sequence
  Description of Artificial Sequence: Synthetic oligonucleotide
  Sense strand starting at position 3118 of SEQ ID NO: 610
ucucucuuucuaggaagua

SEQ ID NO: 50641 - RNA, 19 nt, Artificial Sequence
  Description of Artificial Sequence: Synthetic oligonucleotide
  Antisense strand to SEQ ID NO: 50560
uacuuccuagaaagagaga

SEQ ID NO: 50642 - RNA, 19 nt, Artificial Sequence
  Description of Artificial Sequence: Synthetic oligonucleotide
  Sense strand starting at position 2999 of SEQ ID NO: 610
cuaucagacugcuagagau

SEQ ID NO: 50643 - RNA, 19 nt, Artificial Sequence
  Description of Artificial Sequence: Synthetic oligonucleotide
  Antisense strand to SEQ ID NO: 50562
aucucuagcagucugauag

SEQ ID NO: 50644 - RNA, 19 nt, Artificial Sequence
  Description of Artificial Sequence: Synthetic oligonucleotide
  Sense strand starting at position 2996 of SEQ ID NO: 610
guacuaucagacugcuaga

SEQ ID NO: 50645 - RNA, 19 nt, Artificial Sequence
  Description of Artificial Sequence: Synthetic oligonucleotide
  Antisense strand to SEQ ID NO: 50564
ucuagcagucugauaguac

SEQ ID NO: 50646 - RNA, 19 nt, Artificial Sequence
  Description of Artificial Sequence: Synthetic oligonucleotide
  Sense strand starting at position 2988 of SEQ ID NO: 610
aggaaaggguacuaucaga

SEQ ID NO: 50647 - RNA, 19 nt, Artificial Sequence
  Description of Artificial Sequence: Synthetic oligonucleotide
  Antisense strand to SEQ ID NO: 50566
ucugauaguacccuuuccu

SEQ ID NO: 50648 - RNA, 19 nt, Artificial Sequence
  Description of Artificial Sequence: Synthetic oligonucleotide
  Sense strand starting at position 2585 of SEQ ID NO: 610
cccugagaaugucaauacu

SEQ ID NO: 50649 - RNA, 19 nt, Artificial Sequence
  Description of Artificial Sequence: Synthetic oligonucleotide
  Antisense strand to SEQ ID NO: 50568
aguauugacauucucaggg

SEQ ID NO: 50650 - RNA, 19 nt, Artificial Sequence
  Description of Artificial Sequence: Synthetic oligonucleotide
  Sense strand starting at position 2554 of SEQ ID NO: 610
uuaucuuggaggcagagua

SEQ ID NO: 50651 - RNA, 19 nt, Artificial Sequence
  Description of Artificial Sequence: Synthetic oligonucleotide
  Antisense strand to SEQ ID NO: 50570
uacucugccuccaagauaa

SEQ ID NO: 50652 - RNA, 19 nt, Artificial Sequence
  Description of Artificial Sequence: Synthetic oligonucleotide
  Sense strand starting at position 2549 of SEQ ID NO: 610
cuuguuuaucuuggaggca

SEQ ID NO: 50653 - RNA, 19 nt, Artificial Sequence
  Description of Artificial Sequence: Synthetic oligonucleotide
  Antisense strand to SEQ ID NO: 50572
ugccuccaagauaaacaag

SEQ ID NO: 50654 - RNA, 19 nt, Artificial Sequence
  Description of Artificial Sequence: Synthetic oligonucleotide
  Sense strand starting at position 2545 of SEQ ID NO: 610
gaggcuuguuuaucuugga

SEQ ID NO: 50655 - RNA, 19 nt, Artificial Sequence
  Description of Artificial Sequence: Synthetic oligonucleotide
  Antisense strand to SEQ ID NO: 50574
uccaagauaaacaagccuc

SEQ ID NO: 50656 - RNA, 19 nt, Artificial Sequence
  Description of Artificial Sequence: Synthetic oligonucleotide
  Sense strand starting at position 2541 of SEQ ID NO: 610
gcaugaggcuuguuuaucu

SEQ ID NO: 50657 - RNA, 19 nt, Artificial Sequence
  Description of Artificial Sequence: Synthetic oligonucleotide
  Antisense strand to SEQ ID NO: 50576
agauaaacaagccucaugc

SEQ ID NO: 50658 - RNA, 19 nt, Artificial Sequence
  Description of Artificial Sequence: Synthetic oligonucleotide
  Sense strand starting at position 2539 of SEQ ID NO: 610
gagcaugaggcuuguuuau

SEQ ID NO: 50659 - RNA, 19 nt, Artificial Sequence
  Description of Artificial Sequence: Synthetic oligonucleotide
  Antisense strand to SEQ ID NO: 50578
auaaacaagccucaugcuc

SEQ ID NO: 50660 - RNA, 19 nt, Artificial Sequence
  Description of Artificial Sequence: Synthetic oligonucleotide
  Sense strand starting at position 2363 of SEQ ID NO: 610
caggaccucuuaguaagua

SEQ ID NO: 50661 - RNA, 19 nt, Artificial Sequence
  Description of Artificial Sequence: Synthetic oligonucleotide
  Antisense strand to SEQ ID NO: 50580
uacuuacuaagagguccug

SEQ ID NO: 50662 - RNA, 19 nt, Artificial Sequence
  Description of Artificial Sequence: Synthetic oligonucleotide
  Sense strand starting at position 2310 of SEQ ID NO: 610
aaucaucucugggaaugag

SEQ ID NO: 50663 - RNA, 19 nt, Artificial Sequence
  Description of Artificial Sequence: Synthetic oligonucleotide
  Antisense strand to SEQ ID NO: 50582
cucauucccagagaugauu

SEQ ID NO: 50664 - RNA, 19 nt, Artificial Sequence
  Description of Artificial Sequence: Synthetic oligonucleotide
  Sense strand starting at position 2308 of SEQ ID NO: 610
ccaaucaucucugggaaug

SEQ ID NO: 50665 - RNA, 19 nt, Artificial Sequence
  Description of Artificial Sequence: Synthetic oligonucleotide
  Antisense strand to SEQ ID NO: 50584
cauucccagagaugauugg

SEQ ID NO: 50666 - RNA, 19 nt, Artificial Sequence
  Description of Artificial Sequence: Synthetic oligonucleotide
  Sense strand starting at position 2307 of SEQ ID NO: 610
cccaaucaucucugggaau

SEQ ID NO: 50667 - RNA, 19 nt, Artificial Sequence
  Description of Artificial Sequence: Synthetic oligonucleotide
  Antisense strand to SEQ ID NO: 50586
auucccagagaugauuggg

SEQ ID NO: 50668 - RNA, 19 nt, Artificial Sequence
  Description of Artificial Sequence: Synthetic oligonucleotide
  Sense strand starting at position 2306 of SEQ ID NO: 610
gcccaaucaucucugggaa

SEQ ID NO: 50669 - RNA, 19 nt, Artificial Sequence
  Description of Artificial Sequence: Synthetic oligonucleotide
  Antisense strand to SEQ ID NO: 50588
uucccagagaugauugggc

SEQ ID NO: 50670 - RNA, 19 nt, Artificial Sequence
  Description of Artificial Sequence: Synthetic oligonucleotide
  Sense strand starting at position 2287 of SEQ ID NO: 610
ggaucucgaucucagggaa

SEQ ID NO: 50671 - RNA, 19 nt, Artificial Sequence
  Description of Artificial Sequence: Synthetic oligonucleotide
  Antisense strand to SEQ ID NO: 50590
uucccugagaucgagaucc

SEQ ID NO: 50672 - RNA, 19 nt, Artificial Sequence
  Description of Artificial Sequence: Synthetic oligonucleotide
  Sense strand starting at position 2249 of SEQ ID NO: 610
ggcugaauuucccagaagg

SEQ ID NO: 50673 - RNA, 19 nt, Artificial Sequence
  Description of Artificial Sequence: Synthetic oligonucleotide
  Antisense strand to SEQ ID NO: 50592
ccuucugggaaauucagcc

SEQ ID NO: 50674 - RNA, 19 nt, Artificial Sequence
  Description of Artificial Sequence: Synthetic oligonucleotide
  Sense strand starting at position 2192 of SEQ ID NO: 610
cgucucuccuucuugaguu

SEQ ID NO: 50675 - RNA, 19 nt, Artificial Sequence
  Description of Artificial Sequence: Synthetic oligonucleotide
  Antisense strand to SEQ ID NO: 50594
aacucaagaaggagagacg

SEQ ID NO: 50676 - RNA, 19 nt, Artificial Sequence
  Description of Artificial Sequence: Synthetic oligonucleotide
  Sense strand starting at position 1593 of SEQ ID NO: 610
ccgagcgcuccuuacuaua

SEQ ID NO: 50677 - RNA, 19 nt, Artificial Sequence
  Description of Artificial Sequence: Synthetic oligonucleotide
  Antisense strand to SEQ ID NO: 50596
uauaguaaggagcgcucgg

SEQ ID NO: 50678 - RNA, 19 nt, Artificial Sequence
  Description of Artificial Sequence: Synthetic oligonucleotide
  Sense strand starting at position 1591 of SEQ ID NO: 610
gcccgagcgcuccuuacua

SEQ ID NO: 50679 - RNA, 19 nt, Artificial Sequence
  Description of Artificial Sequence: Synthetic oligonucleotide
  Antisense strand to SEQ ID NO: 50598
uaguaaggagcgcucgggc

SEQ ID NO: 50680 - RNA, 19 nt, Artificial Sequence
  Description of Artificial Sequence: Synthetic oligonucleotide
  Sense strand starting at position 784 of SEQ ID NO: 610
ugauguggccagggagaua

SEQ ID NO: 50681 - RNA, 19 nt, Artificial Sequence
  Description of Artificial Sequence: Synthetic oligonucleotide
  Antisense strand to SEQ ID NO: 50600
uaucucccuggccacauca

SEQ ID NO: 50682 - RNA, 19 nt, Artificial Sequence
  Description of Artificial Sequence: Synthetic oligonucleotide
  Sense strand starting at position 366 of SEQ ID NO: 610
cuagauagagcuggaaagu

SEQ ID NO: 50683 - RNA, 19 nt, Artificial Sequence
  Description of Artificial Sequence: Synthetic oligonucleotide
  Antisense strand to SEQ ID NO: 50602
acuuuccagcucuaucuag

SEQ ID NO: 50684 - RNA, 19 nt, Artificial Sequence
  Description of Artificial Sequence: Synthetic oligonucleotide
  Sense strand starting at position 365 of SEQ ID NO: 610
gcuagauagagcuggaaag

SEQ ID NO: 50685 - RNA, 19 nt, Artificial Sequence
  Description of Artificial Sequence: Synthetic oligonucleotide
  Antisense strand to SEQ ID NO: 50604
cuuuccagcucuaucuagc

SEQ ID NO: 50686 - RNA, 19 nt, Artificial Sequence
  Description of Artificial Sequence: Synthetic oligonucleotide
  Sense strand starting at position 2768 of SEQ ID NO: 611
uugacagauugcgccgaaa

SEQ ID NO: 50687 - RNA, 19 nt, Artificial Sequence
  Description of Artificial Sequence: Synthetic oligonucleotide
  Antisense strand to SEQ ID NO: 50606
uuucggcgcaaucugucaa

SEQ ID NO: 50688 - RNA, 19 nt, Artificial Sequence
  Description of Artificial Sequence: Synthetic oligonucleotide
  Sense strand starting at position 2758 of SEQ ID NO: 611
guccaacagcuugacagau

SEQ ID NO: 50689 - RNA, 19 nt, Artificial Sequence
  Description of Artificial Sequence: Synthetic oligonucleotide
  Antisense strand to SEQ ID NO: 50608
aucugucaagcuguuggac

SEQ ID NO: 50690 - RNA, 19 nt, Artificial Sequence
  Description of Artificial Sequence: Synthetic oligonucleotide
  Sense strand starting at position 2757 of SEQ ID NO: 611
gguccaacagcuugacaga

SEQ ID NO: 50691 - RNA, 19 nt, Artificial Sequence
  Description of Artificial Sequence: Synthetic oligonucleotide
  Antisense strand to SEQ ID NO: 50610
ucugucaagcuguuggacc

SEQ ID NO: 50692 - RNA, 19 nt, Artificial Sequence
  Description of Artificial Sequence: Synthetic oligonucleotide
  Sense strand starting at position 2569 of SEQ ID NO: 611
gugguugcggccuguacaa

SEQ ID NO: 50693 - RNA, 19 nt, Artificial Sequence
  Description of Artificial Sequence: Synthetic oligonucleotide
  Antisense strand to SEQ ID NO: 50612
uuguacaggccgcaaccac

SEQ ID NO: 50694 - RNA, 19 nt, Artificial Sequence
  Description of Artificial Sequence: Synthetic oligonucleotide
  Sense strand starting at position 2469 of SEQ ID NO: 611
agaugcucacuuuaggauu

SEQ ID NO: 50695 - RNA, 19 nt, Artificial Sequence
  Description of Artificial Sequence: Synthetic oligonucleotide
  Antisense strand to SEQ ID NO: 50614
aauccuaaagugagcaucu

SEQ ID NO: 50696 - RNA, 19 nt, Artificial Sequence
  Description of Artificial Sequence: Synthetic oligonucleotide
  Sense strand starting at position 2464 of SEQ ID NO: 611
gcgcuagaugcucacuuua

SEQ ID NO: 50697 - RNA, 19 nt, Artificial Sequence
  Description of Artificial Sequence: Synthetic oligonucleotide
  Antisense strand to SEQ ID NO: 50616
uaaagugagcaucuagcgc

SEQ ID NO: 50698 - RNA, 19 nt, Artificial Sequence
  Description of Artificial Sequence: Synthetic oligonucleotide
  Sense strand starting at position 2266 of SEQ ID NO: 611
auuagaaguuuggaagauu

SEQ ID NO: 50699 - RNA, 19 nt, Artificial Sequence
  Description of Artificial Sequence: Synthetic oligonucleotide
  Antisense strand to SEQ ID NO: 50618
aaucuuccaaacuucuaau

SEQ ID NO: 50700 - RNA, 19 nt, Artificial Sequence
  Description of Artificial Sequence: Synthetic oligonucleotide
  Sense strand starting at position 2253 of SEQ ID NO: 611
gguagacugccuuauuaga

SEQ ID NO: 50701 - RNA, 19 nt, Artificial Sequence
  Description of Artificial Sequence: Synthetic oligonucleotide
  Antisense strand to SEQ ID NO: 50620
ucuaauaaggcagucuacc

SEQ ID NO: 50702 - RNA, 19 nt, Artificial Sequence
  Description of Artificial Sequence: Synthetic oligonucleotide
  Sense strand starting at position 2251 of SEQ ID NO: 611
aggguagacugccuuauua

SEQ ID NO: 50703 - RNA, 19 nt, Artificial Sequence
  Description of Artificial Sequence: Synthetic oligonucleotide
  Antisense strand to SEQ ID NO: 50622
uaauaaggcagucuacccu

SEQ ID NO: 50704 - RNA, 19 nt, Artificial Sequence
  Description of Artificial Sequence: Synthetic oligonucleotide
  Sense strand starting at position 2240 of SEQ ID NO: 611
ugcuuuagugcaggguaga

SEQ ID NO: 50705 - RNA, 19 nt, Artificial Sequence
  Description of Artificial Sequence: Synthetic oligonucleotide
  Antisense strand to SEQ ID NO: 50624
ucuacccugcacuaaagca

SEQ ID NO: 50706 - RNA, 19 nt, Artificial Sequence
  Description of Artificial Sequence: Synthetic oligonucleotide
  Sense strand starting at position 2220 of SEQ ID NO: 611
gaggucaucucuuucgugu

SEQ ID NO: 50707 - RNA, 19 nt, Artificial Sequence
  Description of Artificial Sequence: Synthetic oligonucleotide
  Antisense strand to SEQ ID NO: 50626
acacgaaagagaugaccuc

SEQ ID NO: 50708 - RNA, 19 nt, Artificial Sequence
  Description of Artificial Sequence: Synthetic oligonucleotide
  Sense strand starting at position 2192 of SEQ ID NO: 611
gacguauuccaacagcagu

SEQ ID NO: 50709 - RNA, 19 nt, Artificial Sequence
  Description of Artificial Sequence: Synthetic oligonucleotide
  Antisense strand to SEQ ID NO: 50628
acugcuguuggaauacguc

SEQ ID NO: 50710 - RNA, 19 nt, Artificial Sequence
  Description of Artificial Sequence: Synthetic oligonucleotide
  Sense strand starting at position 2046 of SEQ ID NO: 611
cugaauaacuuuccgccaa

SEQ ID NO: 50711 - RNA, 19 nt, Artificial Sequence
  Description of Artificial Sequence: Synthetic oligonucleotide
  Antisense strand to SEQ ID NO: 50630
uuggcggaaaguuauucag

SEQ ID NO: 50712 - RNA, 19 nt, Artificial Sequence
  Description of Artificial Sequence: Synthetic oligonucleotide
  Sense strand starting at position 1399 of SEQ ID NO: 611
gagaguaacccacgcucuu

SEQ ID NO: 50713 - RNA, 19 nt, Artificial Sequence
  Description of Artificial Sequence: Synthetic oligonucleotide
  Antisense strand to SEQ ID NO: 50632
aagagcguggguuacucuc

SEQ ID NO: 50714 - RNA, 19 nt, Artificial Sequence
  Description of Artificial Sequence: Synthetic oligonucleotide
  Sense strand starting at position 1266 of SEQ ID NO: 611
aggugauucggcuagaagg

SEQ ID NO: 50715 - RNA, 19 nt, Artificial Sequence
  Description of Artificial Sequence: Synthetic oligonucleotide
  Antisense strand to SEQ ID NO: 50634
ccuucuagccgaaucaccu

SEQ ID NO: 50716 - RNA, 19 nt, Artificial Sequence
  Description of Artificial Sequence: Synthetic oligonucleotide
  Sense strand starting at position 1264 of SEQ ID NO: 611
agaggugauucggcuagaa

SEQ ID NO: 50717 - RNA, 19 nt, Artificial Sequence
  Description of Artificial Sequence: Synthetic oligonucleotide
  Antisense strand to SEQ ID NO: 50636
uucuagccgaaucaccucu

SEQ ID NO: 50718 - RNA, 19 nt, Artificial Sequence
  Description of Artificial Sequence: Synthetic oligonucleotide
  Sense strand starting at position 1253 of SEQ ID NO: 611
gagacuugcccagagguga

SEQ ID NO: 50719 - RNA, 19 nt, Artificial Sequence
  Description of Artificial Sequence: Synthetic oligonucleotide
  Antisense strand to SEQ ID NO: 50638
ucaccucugggcaagucuc

SEQ ID NO: 50720 - RNA, 19 nt, Artificial Sequence
  Description of Artificial Sequence: Synthetic oligonucleotide
  Sense strand starting at position 1217 of SEQ ID NO: 611
uuauacaggugagauaaau

SEQ ID NO: 50721 - RNA, 19 nt, Artificial Sequence
  Description of Artificial Sequence: Synthetic oligonucleotide
  Antisense strand to SEQ ID NO: 50640
auuuaucucaccuguauaa

SEQ ID NO: 50722 - RNA, 19 nt, Artificial Sequence
  Description of Artificial Sequence: Synthetic oligonucleotide
  Sense strand starting at position 1203 of SEQ ID NO: 611
guauuauuagcccauuaua

SEQ ID NO: 50723 - RNA, 19 nt, Artificial Sequence
  Description of Artificial Sequence: Synthetic oligonucleotide
  Antisense strand to SEQ ID NO: 50642
uauaaugggcuaauaauac

SEQ ID NO: 50724 - RNA, 19 nt, Artificial Sequence
  Description of Artificial Sequence: Synthetic oligonucleotide
  Sense strand starting at position 1201 of SEQ ID NO: 611
agguauuauuagcccauua

SEQ ID NO: 50725 - RNA, 19 nt, Artificial Sequence
  Description of Artificial Sequence: Synthetic oligonucleotide
  Antisense strand to SEQ ID NO: 50644
uaaugggcuaauaauaccu

SEQ ID NO: 50726 - RNA, 19 nt, Artificial Sequence
  Description of Artificial Sequence: Synthetic oligonucleotide
  Sense strand starting at position 1183 of SEQ ID NO: 611
cagacuucccaggguacua

SEQ ID NO: 50727 - RNA, 19 nt, Artificial Sequence
  Description of Artificial Sequence: Synthetic oligonucleotide
  Antisense strand to SEQ ID NO: 50646
uaguacccugggaagucug

SEQ ID NO: 50728 - RNA, 19 nt, Artificial Sequence
  Description of Artificial Sequence: Synthetic oligonucleotide
  Sense strand starting at position 1182 of SEQ ID NO: 611
ccagacuucccaggguacu

SEQ ID NO: 50729 - RNA, 19 nt, Artificial Sequence
  Description of Artificial Sequence: Synthetic oligonucleotide
  Antisense strand to SEQ ID NO: 50648
aguacccugggaagucugg

SEQ ID NO: 50730 - RNA, 19 nt, Artificial Sequence
  Description of Artificial Sequence: Synthetic oligonucleotide
  Sense strand starting at position 987 of SEQ ID NO: 611
cacagauugucucaaguag

SEQ ID NO: 50731 - RNA, 19 nt, Artificial Sequence
  Description of Artificial Sequence: Synthetic oligonucleotide
  Antisense strand to SEQ ID NO: 50650
cuacuugagacaaucugug

SEQ ID NO: 50732 - RNA, 19 nt, Artificial Sequence
  Description of Artificial Sequence: Synthetic oligonucleotide
  Sense strand starting at position 985 of SEQ ID NO: 611
gucacagauugucucaagu

SEQ ID NO: 50733 - RNA, 19 nt, Artificial Sequence
  Description of Artificial Sequence: Synthetic oligonucleotide
  Antisense strand to SEQ ID NO: 50652
acuugagacaaucugugac

SEQ ID NO: 50734 - RNA, 19 nt, Artificial Sequence
  Description of Artificial Sequence: Synthetic oligonucleotide
  Sense strand starting at position 977 of SEQ ID NO: 611
aaugaauagucacagauug

SEQ ID NO: 50735 - RNA, 19 nt, Artificial Sequence
  Description of Artificial Sequence: Synthetic oligonucleotide
  Antisense strand to SEQ ID NO: 50654
caaucugugacuauucauu

SEQ ID NO: 50736 - RNA, 19 nt, Artificial Sequence
  Description of Artificial Sequence: Synthetic oligonucleotide
  Sense strand starting at position 959 of SEQ ID NO: 611
aauguuagugagugaagaa

SEQ ID NO: 50737 - RNA, 19 nt, Artificial Sequence
  Description of Artificial Sequence: Synthetic oligonucleotide
  Antisense strand to SEQ ID NO: 50656
uucuucacucacuaacauu

SEQ ID NO: 50738 - RNA, 19 nt, Artificial Sequence
  Description of Artificial Sequence: Synthetic oligonucleotide
  Sense strand starting at position 958 of SEQ ID NO: 611
aaauguuagugagugaaga

SEQ ID NO: 50739 - RNA, 19 nt, Artificial Sequence
  Description of Artificial Sequence: Synthetic oligonucleotide
  Antisense strand to SEQ ID NO: 50658
ucuucacucacuaacauuu

SEQ ID NO: 50740 - RNA, 19 nt, Artificial Sequence
  Description of Artificial Sequence: Synthetic oligonucleotide
  Sense strand starting at position 846 of SEQ ID NO: 611
uccagagagucuguggaau

SEQ ID NO: 50741 - RNA, 19 nt, Artificial Sequence
  Description of Artificial Sequence: Synthetic oligonucleotide
  Antisense strand to SEQ ID NO: 50660
auuccacagacucucugga

SEQ ID NO: 50742 - RNA, 19 nt, Artificial Sequence
  Description of Artificial Sequence: Synthetic oligonucleotide
  Sense strand starting at position 835 of SEQ ID NO: 611
ugcgccuguucuccagaga

SEQ ID NO: 50743 - RNA, 19 nt, Artificial Sequence
  Description of Artificial Sequence: Synthetic oligonucleotide
  Antisense strand to SEQ ID NO: 50662
ucucuggagaacaggcgca

SEQ ID NO: 50744 - RNA, 19 nt, Artificial Sequence
  Description of Artificial Sequence: Synthetic oligonucleotide
  Sense strand starting at position 729 of SEQ ID NO: 611
uuuggucugugacagagau

SEQ ID NO: 50745 - RNA, 19 nt, Artificial Sequence
  Description of Artificial Sequence: Synthetic oligonucleotide
  Antisense strand to SEQ ID NO: 50664
aucucugucacagaccaaa

SEQ ID NO: 50746 - RNA, 19 nt, Artificial Sequence
  Description of Artificial Sequence: Synthetic oligonucleotide
  Sense strand starting at position 726 of SEQ ID NO: 611
agcuuuggucugugacaga

SEQ ID NO: 50747 - RNA, 19 nt, Artificial Sequence
  Description of Artificial Sequence: Synthetic oligonucleotide
  Antisense strand to SEQ ID NO: 50666
ucugucacagaccaaagcu

SEQ ID NO: 50748 - RNA, 19 nt, Artificial Sequence
  Description of Artificial Sequence: Synthetic oligonucleotide
  Sense strand starting at position 724 of SEQ ID NO: 611
gaagcuuuggucugugaca

SEQ ID NO: 50749 - RNA, 19 nt, Artificial Sequence
  Description of Artificial Sequence: Synthetic oligonucleotide
  Antisense strand to SEQ ID NO: 50668
ugucacagaccaaagcuuc

SEQ ID NO: 50750 - RNA, 19 nt, Artificial Sequence
  Description of Artificial Sequence: Synthetic oligonucleotide
  Sense strand starting at position 505 of SEQ ID NO: 611
ugaagauuccugggcucag

SEQ ID NO: 50751 - RNA, 19 nt, Artificial Sequence
  Description of Artificial Sequence: Synthetic oligonucleotide
  Antisense strand to SEQ ID NO: 50670
cugagcccaggaaucuuca

SEQ ID NO: 50752 - RNA, 19 nt, Artificial Sequence
  Description of Artificial Sequence: Synthetic oligonucleotide
  Sense strand starting at position 489 of SEQ ID NO: 611
caguucugauuagaaauga

SEQ ID NO: 50753 - RNA, 19 nt, Artificial Sequence
  Description of Artificial Sequence: Synthetic oligonucleotide
  Antisense strand to SEQ ID NO: 50672
ucauuucuaaucagaacug

SEQ ID NO: 50754 - RNA, 19 nt, Artificial Sequence
  Description of Artificial Sequence: Synthetic oligonucleotide
  Sense strand starting at position 484 of SEQ ID NO: 611
uguaucaguucugauuaga

SEQ ID NO: 50755 - RNA, 19 nt, Artificial Sequence
  Description of Artificial Sequence: Synthetic oligonucleotide
  Antisense strand to SEQ ID NO: 50674
ucuaaucagaacugauaca

SEQ ID NO: 50756 - RNA, 19 nt, Artificial Sequence
  Description of Artificial Sequence: Synthetic oligonucleotide
  Sense strand starting at position 479 of SEQ ID NO: 611
cgaccuguaucaguucuga

SEQ ID NO: 50757 - RNA, 19 nt, Artificial Sequence
  Description of Artificial Sequence: Synthetic oligonucleotide
  Antisense strand to SEQ ID NO: 50676
ucagaacugauacaggucg

SEQ ID NO: 50758 - RNA, 19 nt, Artificial Sequence
  Description of Artificial Sequence: Synthetic oligonucleotide
  Sense strand starting at position 128 of SEQ ID NO: 611
cuauuaugccaccgcacua

SEQ ID NO: 50759 - RNA, 19 nt, Artificial Sequence
  Description of Artificial Sequence: Synthetic oligonucleotide
  Antisense strand to SEQ ID NO: 50678
uagugcgguggcauaauag

SEQ ID NO: 50760 - RNA, 19 nt, Artificial Sequence
  Description of Artificial Sequence: Synthetic oligonucleotide
  Sense strand starting at position 117 of SEQ ID NO: 611
ccuguagugagcuauuaug

SEQ ID NO: 50761 - RNA, 19 nt, Artificial Sequence
  Description of Artificial Sequence: Synthetic oligonucleotide
  Antisense strand to SEQ ID NO: 50680
cauaauagcucacuacagg

SEQ ID NO: 50762 - RNA, 19 nt, Artificial Sequence
  Description of Artificial Sequence: Synthetic oligonucleotide
  Sense strand starting at position 98 of SEQ ID NO: 611
uccuuagaguccgcaaguu

SEQ ID NO: 50763 - RNA, 19 nt, Artificial Sequence
  Description of Artificial Sequence: Synthetic oligonucleotide
  Antisense strand to SEQ ID NO: 50682
aacuugcggacucuaagga

SEQ ID NO: 50764 - RNA, 19 nt, Artificial Sequence
  Description of Artificial Sequence: Synthetic oligonucleotide
  Sense strand starting at position 89 of SEQ ID NO: 611
gcgggaggauccuuagagu

SEQ ID NO: 50765 - RNA, 19 nt, Artificial Sequence
  Description of Artificial Sequence: Synthetic oligonucleotide
  Antisense strand to SEQ ID NO: 50684
acucuaaggauccucccgc

SEQ ID NO: 50766 - RNA, 19 nt, Artificial Sequence
  Description of Artificial Sequence: Synthetic oligonucleotide
  Sense strand starting at position 12 of SEQ ID NO: 612
gggcuaccaaguuaaaugu

SEQ ID NO: 50767 - RNA, 19 nt, Artificial Sequence
  Description of Artificial Sequence: Synthetic oligonucleotide
  Antisense strand to SEQ ID NO: 50686
acauuuaacuugguagccc

SEQ ID NO: 50768 - RNA, 19 nt, Artificial Sequence
  Description of Artificial Sequence: Synthetic oligonucleotide
  Sense strand starting at position 97 of SEQ ID NO: 612
guaaaugagcaguacuaca

SEQ ID NO: 50769 - RNA, 19 nt, Artificial Sequence
  Description of Artificial Sequence: Synthetic oligonucleotide
  Antisense strand to SEQ ID NO: 50688
uguaguacugcucauuuac

SEQ ID NO: 50770 - RNA, 19 nt, Artificial Sequence
  Description of Artificial Sequence: Synthetic oligonucleotide
  Sense strand starting at position 230 of SEQ ID NO: 612
gcugcuauuugucuuaaga

SEQ ID NO: 50771 - RNA, 19 nt, Artificial Sequence
  Description of Artificial Sequence: Synthetic oligonucleotide
  Antisense strand to SEQ ID NO: 50690
ucuuaagacaaauagcagc

SEQ ID NO: 50772 - RNA, 19 nt, Artificial Sequence
  Description of Artificial Sequence: Synthetic oligonucleotide
  Sense strand starting at position 284 of SEQ ID NO: 612
uaucgaacacuauguggaa

SEQ ID NO: 50773 - RNA, 19 nt, Artificial Sequence
  Description of Artificial Sequence: Synthetic oligonucleotide
  Antisense strand to SEQ ID NO: 50692
uuccacauaguguucgaua

SEQ ID NO: 50774 - RNA, 19 nt, Artificial Sequence
  Description of Artificial Sequence: Synthetic oligonucleotide
  Sense strand starting at position 319 of SEQ ID NO: 612
uguguaucacuugaguaua

SEQ ID NO: 50775 - RNA, 19 nt, Artificial Sequence
  Description of Artificial Sequence: Synthetic oligonucleotide
  Antisense strand to SEQ ID NO: 50694
uauacucaagugauacaca

SEQ ID NO: 50776 - RNA, 19 nt, Artificial Sequence
  Description of Artificial Sequence: Synthetic oligonucleotide
  Sense strand starting at position 644 of SEQ ID NO: 612
auccaaguuucuguaaaga

SEQ ID NO: 50777 - RNA, 19 nt, Artificial Sequence
  Description of Artificial Sequence: Synthetic oligonucleotide
  Antisense strand to SEQ ID NO: 50696
ucuuuacagaaacuuggau

SEQ ID NO: 50778 - RNA, 19 nt, Artificial Sequence
  Description of Artificial Sequence: Synthetic oligonucleotide
  Sense strand starting at position 733 of SEQ ID NO: 612
uguugcagacauuacuaau

SEQ ID NO: 50779 - RNA, 19 nt, Artificial Sequence
  Description of Artificial Sequence: Synthetic oligonucleotide
  Antisense strand to SEQ ID NO: 50698
auuaguaaugucugcaaca

SEQ ID NO: 50780 - RNA, 19 nt, Artificial Sequence
  Description of Artificial Sequence: Synthetic oligonucleotide
  Sense strand starting at position 761 of SEQ ID NO: 612
caacaaaugcauugagagu

SEQ ID NO: 50781 - RNA, 19 nt, Artificial Sequence
  Description of Artificial Sequence: Synthetic oligonucleotide
  Antisense strand to SEQ ID NO: 50700
acucucaaugcauuuguug

SEQ ID NO: 50782 - RNA, 19 nt, Artificial Sequence
  Description of Artificial Sequence: Synthetic oligonucleotide
  Sense strand starting at position 770 of SEQ ID NO: 612
cauugagaguccuugacaa

SEQ ID NO: 50783 - RNA, 19 nt, Artificial Sequence
  Description of Artificial Sequence: Synthetic oligonucleotide
  Antisense strand to SEQ ID NO: 50702
uugucaaggacucucaaug

SEQ ID NO: 50784 - RNA, 19 nt, Artificial Sequence
  Description of Artificial Sequence: Synthetic oligonucleotide
  Sense strand starting at position 833 of SEQ ID NO: 612
gcaggaggcagguauguaa

SEQ ID NO: 50785 - RNA, 19 nt, Artificial Sequence
  Description of Artificial Sequence: Synthetic oligonucleotide
  Antisense strand to SEQ ID NO: 50704
uuacauaccugccuccugc

SEQ ID NO: 50786 - RNA, 19 nt, Artificial Sequence
  Description of Artificial Sequence: Synthetic oligonucleotide
  Sense strand starting at position 844 of SEQ ID NO: 612
guauguaaacaaggacaau

SEQ ID NO: 50787 - RNA, 19 nt, Artificial Sequence
  Description of Artificial Sequence: Synthetic oligonucleotide
  Antisense strand to SEQ ID NO: 50706
auuguccuuguuuacauac

SEQ ID NO: 50788 - RNA, 19 nt, Artificial Sequence
  Description of Artificial Sequence: Synthetic oligonucleotide
  Sense strand starting at position 1113 of SEQ ID NO: 612
guaauuauacaugaggcuu

SEQ ID NO: 50789 - RNA, 19 nt, Artificial Sequence
  Description of Artificial Sequence: Synthetic oligonucleotide
  Antisense strand to SEQ ID NO: 50708
aagccucauguauaauuac

SEQ ID NO: 50790 - RNA, 19 nt, Artificial Sequence
  Description of Artificial Sequence: Synthetic oligonucleotide
  Sense strand starting at position 1547 of SEQ ID NO: 612
ccauaugcuggugaacaau

SEQ ID NO: 50791 - RNA, 19 nt, Artificial Sequence
  Description of Artificial Sequence: Synthetic oligonucleotide
  Antisense strand to SEQ ID NO: 50710
auuguucaccagcauaugg

SEQ ID NO: 50792 - RNA, 19 nt, Artificial Sequence
  Description of Artificial Sequence: Synthetic oligonucleotide
  Sense strand starting at position 1565 of SEQ ID NO: 612
ucuugucaccaacacgauu

SEQ ID NO: 50793 - RNA, 19 nt, Artificial Sequence
  Description of Artificial Sequence: Synthetic oligonucleotide
  Antisense strand to SEQ ID NO: 50712
aaucguguuggugacaaga

SEQ ID NO: 50794 - RNA, 19 nt, Artificial Sequence
  Description of Artificial Sequence: Synthetic oligonucleotide
  Sense strand starting at position 1584 of SEQ ID NO: 612
cuggaacuccaguagcauu

SEQ ID NO: 50795 - RNA, 19 nt, Artificial Sequence
  Description of Artificial Sequence: Synthetic oligonucleotide
  Antisense strand to SEQ ID NO: 50714
aaugcuacuggaguuccag

SEQ ID NO: 50796 - RNA, 19 nt, Artificial Sequence
  Description of Artificial Sequence: Synthetic oligonucleotide
  Sense strand starting at position 1816 of SEQ ID NO: 612
ggguacuauuauucuacca

SEQ ID NO: 50797 - RNA, 19 nt, Artificial Sequence
  Description of Artificial Sequence: Synthetic oligonucleotide
  Antisense strand to SEQ ID NO: 50716
ugguagaauaauaguaccc

SEQ ID NO: 50798 - RNA, 19 nt, Artificial Sequence
  Description of Artificial Sequence: Synthetic oligonucleotide
  Sense strand starting at position 2012 of SEQ ID NO: 612
gcaacuguucuagaaacug

SEQ ID NO: 50799 - RNA, 19 nt, Artificial Sequence
  Description of Artificial Sequence: Synthetic oligonucleotide
  Antisense strand to SEQ ID NO: 50718
caguuucuagaacaguugc

SEQ ID NO: 50800 - RNA, 19 nt, Artificial Sequence
  Description of Artificial Sequence: Synthetic oligonucleotide
  Sense strand starting at position 2125 of SEQ ID NO: 612
ggcaguauuuaguuaagcu

SEQ ID NO: 50801 - RNA, 19 nt, Artificial Sequence
  Description of Artificial Sequence: Synthetic oligonucleotide
  Antisense strand to SEQ ID NO: 50720
agcuuaacuaaauacugcc

SEQ ID NO: 50802 - RNA, 19 nt, Artificial Sequence
  Description of Artificial Sequence: Synthetic oligonucleotide
  Sense strand starting at position 2181 of SEQ ID NO: 612
agaggcaaagcuuauguua

SEQ ID NO: 50803 - RNA, 19 nt, Artificial Sequence
  Description of Artificial Sequence: Synthetic oligonucleotide
  Antisense strand to SEQ ID NO: 50722
uaacauaagcuuugccucu

SEQ ID NO: 50804 - RNA, 19 nt, Artificial Sequence
  Description of Artificial Sequence: Synthetic oligonucleotide
  Sense strand starting at position 2361 of SEQ ID NO: 612
ucgaacaucugauuguuaa

SEQ ID NO: 50805 - RNA, 19 nt, Artificial Sequence
  Description of Artificial Sequence: Synthetic oligonucleotide
  Antisense strand to SEQ ID NO: 50724
uuaacaaucagauguucga

SEQ ID NO: 50806 - RNA, 19 nt, Artificial Sequence
  Description of Artificial Sequence: Synthetic oligonucleotide
  Sense strand starting at position 2362 of SEQ ID NO: 612
cgaacaucugauuguuaac

SEQ ID NO: 50807 - RNA, 19 nt, Artificial Sequence
  Description of Artificial Sequence: Synthetic oligonucleotide
  Antisense strand to SEQ ID NO: 50726
guuaacaaucagauguucg

SEQ ID NO: 50808 - RNA, 19 nt, Artificial Sequence
  Description of Artificial Sequence: Synthetic oligonucleotide
  Sense strand starting at position 2368 of SEQ ID NO: 612
ucugauuguuaacuaauga

SEQ ID NO: 50809 - RNA, 19 nt, Artificial Sequence
  Description of Artificial Sequence: Synthetic oligonucleotide
  Antisense strand to SEQ ID NO: 50728
ucauuaguuaacaaucaga

SEQ ID NO: 50810 - RNA, 19 nt, Artificial Sequence
  Description of Artificial Sequence: Synthetic oligonucleotide
  Sense strand starting at position 2482 of SEQ ID NO: 612
ggaagacaaucuuugaguu

SEQ ID NO: 50811 - RNA, 19 nt, Artificial Sequence
  Description of Artificial Sequence: Synthetic oligonucleotide
  Antisense strand to SEQ ID NO: 50730
aacucaaagauugucuucc

SEQ ID NO: 50812 - RNA, 19 nt, Artificial Sequence
  Description of Artificial Sequence: Synthetic oligonucleotide
  Sense strand starting at position 2483 of SEQ ID NO: 612
gaagacaaucuuugaguuc

SEQ ID NO: 50813 - RNA, 19 nt, Artificial Sequence
  Description of Artificial Sequence: Synthetic oligonucleotide
  Antisense strand to SEQ ID NO: 50732
gaacucaaagauugucuuc

SEQ ID NO: 50814 - RNA, 19 nt, Artificial Sequence
  Description of Artificial Sequence: Synthetic oligonucleotide
  Sense strand starting at position 2661 of SEQ ID NO: 612
uguacuuuccaccaagguu

SEQ ID NO: 50815 - RNA, 19 nt, Artificial Sequence
  Description of Artificial Sequence: Synthetic oligonucleotide
  Antisense strand to SEQ ID NO: 50734
aaccuugguggaaaguaca

SEQ ID NO: 50816 - RNA, 19 nt, Artificial Sequence
  Description of Artificial Sequence: Synthetic oligonucleotide
  Sense strand starting at position 2727 of SEQ ID NO: 612
ggcgauuuaucagucauca

SEQ ID NO: 50817 - RNA, 19 nt, Artificial Sequence
  Description of Artificial Sequence: Synthetic oligonucleotide
  Antisense strand to SEQ ID NO: 50736
ugaugacugauaaaucgcc

SEQ ID NO: 50818 - RNA, 19 nt, Artificial Sequence
  Description of Artificial Sequence: Synthetic oligonucleotide
  Sense strand starting at position 2739 of SEQ ID NO: 612
gucaucaaacuuuaucagu

SEQ ID NO: 50819 - RNA, 19 nt, Artificial Sequence
  Description of Artificial Sequence: Synthetic oligonucleotide
  Antisense strand to SEQ ID NO: 50738
acugauaaaguuugaugac

SEQ ID NO: 50820 - RNA, 19 nt, Artificial Sequence
  Description of Artificial Sequence: Synthetic oligonucleotide
  Sense strand starting at position 2881 of SEQ ID NO: 612
aaauaacgugucgaucuaa

SEQ ID NO: 50821 - RNA, 19 nt, Artificial Sequence
  Description of Artificial Sequence: Synthetic oligonucleotide
  Antisense strand to SEQ ID NO: 50740
uuagaucgacacguuauuu

SEQ ID NO: 50822 - RNA, 19 nt, Artificial Sequence
  Description of Artificial Sequence: Synthetic oligonucleotide
  Sense strand starting at position 2949 of SEQ ID NO: 612
agucacaaucagugacuua

SEQ ID NO: 50823 - RNA, 19 nt, Artificial Sequence
  Description of Artificial Sequence: Synthetic oligonucleotide
  Antisense strand to SEQ ID NO: 50742
uaagucacugauugugacu

SEQ ID NO: 50824 - RNA, 19 nt, Artificial Sequence
  Description of Artificial Sequence: Synthetic oligonucleotide
  Sense strand starting at position 3526 of SEQ ID NO: 612
cggaaugucccauauucua

SEQ ID NO: 50825 - RNA, 19 nt, Artificial Sequence
  Description of Artificial Sequence: Synthetic oligonucleotide
  Antisense strand to SEQ ID NO: 50744
uagaauaugggacauuccg

SEQ ID NO: 50826 - RNA, 19 nt, Artificial Sequence
  Description of Artificial Sequence: Synthetic oligonucleotide
  Sense strand starting at position 3553 of SEQ ID NO: 612
ugauuacuuccuugugaua

SEQ ID NO: 50827 - RNA, 19 nt, Artificial Sequence
  Description of Artificial Sequence: Synthetic oligonucleotide
  Antisense strand to SEQ ID NO: 50746
uaucacaaggaaguaauca

SEQ ID NO: 50828 - RNA, 19 nt, Artificial Sequence
  Description of Artificial Sequence: Synthetic oligonucleotide
  Sense strand starting at position 3649 of SEQ ID NO: 612
gugguaguugccguguauu

SEQ ID NO: 50829 - RNA, 19 nt, Artificial Sequence
  Description of Artificial Sequence: Synthetic oligonucleotide
  Antisense strand to SEQ ID NO: 50748
aauacacggcaacuaccac

SEQ ID NO: 50830 - RNA, 19 nt, Artificial Sequence
  Description of Artificial Sequence: Synthetic oligonucleotide
  Sense strand starting at position 3721 of SEQ ID NO: 612
cgaaauauugcucaugggu

SEQ ID NO: 50831 - RNA, 19 nt, Artificial Sequence
  Description of Artificial Sequence: Synthetic oligonucleotide
  Antisense strand to SEQ ID NO: 50750
acccaugagcaauauuucg

SEQ ID NO: 50832 - RNA, 19 nt, Artificial Sequence
  Description of Artificial Sequence: Synthetic oligonucleotide
  Sense strand starting at position 3753 of SEQ ID NO: 612
gccugauuccuacauuacg

SEQ ID NO: 50833 - RNA, 19 nt, Artificial Sequence
  Description of Artificial Sequence: Synthetic oligonucleotide
  Antisense strand to SEQ ID NO: 50752
cguaauguaggaaucaggc

SEQ ID NO: 50834 - RNA, 19 nt, Artificial Sequence
  Description of Artificial Sequence: Synthetic oligonucleotide
  Sense strand starting at position 3921 of SEQ ID NO: 612
acucuuugguuauccugaa

SEQ ID NO: 50835 - RNA, 19 nt, Artificial Sequence
  Description of Artificial Sequence: Synthetic oligonucleotide
  Antisense strand to SEQ ID NO: 50754
uucaggauaaccaaagagu

SEQ ID NO: 50836 - RNA, 19 nt, Artificial Sequence
  Description of Artificial Sequence: Synthetic oligonucleotide
  Sense strand starting at position 3922 of SEQ ID NO: 612
cucuuugguuauccugaaa

SEQ ID NO: 50837 - RNA, 19 nt, Artificial Sequence
  Description of Artificial Sequence: Synthetic oligonucleotide
  Antisense strand to SEQ ID NO: 50756
uuucaggauaaccaaagag

SEQ ID NO: 50838 - RNA, 19 nt, Artificial Sequence
  Description of Artificial Sequence: Synthetic oligonucleotide
  Sense strand starting at position 3925 of SEQ ID NO: 612
uuugguuauccugaaauau

SEQ ID NO: 50839 - RNA, 19 nt, Artificial Sequence
  Description of Artificial Sequence: Synthetic oligonucleotide
  Antisense strand to SEQ ID NO: 50758
auauuucaggauaaccaaa

SEQ ID NO: 50840 - RNA, 19 nt, Artificial Sequence
  Description of Artificial Sequence: Synthetic oligonucleotide
  Sense strand starting at position 3934 of SEQ ID NO: 612
ccugaaauauaguuuguag

SEQ ID NO: 50841 - RNA, 19 nt, Artificial Sequence
  Description of Artificial Sequence: Synthetic oligonucleotide
  Antisense strand to SEQ ID NO: 50760
cuacaaacuauauuucagg

SEQ ID NO: 50842 - RNA, 19 nt, Artificial Sequence
  Description of Artificial Sequence: Synthetic oligonucleotide
  Sense strand starting at position 3937 of SEQ ID NO: 612
gaaauauaguuuguagaug

SEQ ID NO: 50843 - RNA, 19 nt, Artificial Sequence
  Description of Artificial Sequence: Synthetic oligonucleotide
  Antisense strand to SEQ ID NO: 50762
caucuacaaacuauauuuc

SEQ ID NO: 50844 - RNA, 19 nt, Artificial Sequence
  Description of Artificial Sequence: Synthetic oligonucleotide
  Sense strand starting at position 3942 of SEQ ID NO: 612
auaguuuguagaugaaaga

SEQ ID NO: 50845 - RNA, 19 nt, Artificial Sequence
  Description of Artificial Sequence: Synthetic oligonucleotide
  Antisense strand to SEQ ID NO: 50764
ucuuucaucuacaaacuau

SEQ ID NO: 50846 - RNA, 19 nt, Artificial Sequence
  Description of Artificial Sequence: Synthetic oligonucleotide
  Sense strand starting at position 37 of SEQ ID NO: 613
uuuguuauucuacguaaag

SEQ ID NO: 50847 - RNA, 19 nt, Artificial Sequence
  Description of Artificial Sequence: Synthetic oligonucleotide
  Antisense strand to SEQ ID NO: 50766
cuuuacguagaauaacaaa

SEQ ID NO: 50848 - RNA, 19 nt, Artificial Sequence
  Description of Artificial Sequence: Synthetic oligonucleotide
  Sense strand starting at position 38 of SEQ ID NO: 613
uuguuauucuacguaaagc

SEQ ID NO: 50849 - RNA, 19 nt, Artificial Sequence
  Description of Artificial Sequence: Synthetic oligonucleotide
  Antisense strand to SEQ ID NO: 50768
gcuuuacguagaauaacaa

SEQ ID NO: 50850 - RNA, 19 nt, Artificial Sequence
  Description of Artificial Sequence: Synthetic oligonucleotide
  Sense strand starting at position 380 of SEQ ID NO: 613
ggccaauaauguccaucuu

SEQ ID NO: 50851 - RNA, 19 nt, Artificial Sequence
  Description of Artificial Sequence: Synthetic oligonucleotide
  Antisense strand to SEQ ID NO: 50770
aagauggacauuauuggcc

SEQ ID NO: 50852 - RNA, 19 nt, Artificial Sequence
  Description of Artificial Sequence: Synthetic oligonucleotide
  Sense strand starting at position 524 of SEQ ID NO: 613
ugccuuucucuugugucua

SEQ ID NO: 50853 - RNA, 19 nt, Artificial Sequence
  Description of Artificial Sequence: Synthetic oligonucleotide
  Antisense strand to SEQ ID NO: 50772
uagacacaagagaaaggca

SEQ ID NO: 50854 - RNA, 19 nt, Artificial Sequence
  Description of Artificial Sequence: Synthetic oligonucleotide
  Sense strand starting at position 528 of SEQ ID NO: 613
uuucucuugugucuaguaa

SEQ ID NO: 50855 - RNA, 19 nt, Artificial Sequence
  Description of Artificial Sequence: Synthetic oligonucleotide
  Antisense strand to SEQ ID NO: 50774
uuacuagacacaagagaaa

SEQ ID NO: 50856 - RNA, 19 nt, Artificial Sequence
  Description of Artificial Sequence: Synthetic oligonucleotide
  Sense strand starting at position 529 of SEQ ID NO: 613
uucucuugugucuaguaau

SEQ ID NO: 50857 - RNA, 19 nt, Artificial Sequence
  Description of Artificial Sequence: Synthetic oligonucleotide
  Antisense strand to SEQ ID NO: 50776
auuacuagacacaagagaa

SEQ ID NO: 50858 - RNA, 19 nt, Artificial Sequence
  Description of Artificial Sequence: Synthetic oligonucleotide
  Sense strand starting at position 535 of SEQ ID NO: 613
ugugucuaguaaucaccua

SEQ ID NO: 50859 - RNA, 19 nt, Artificial Sequence
  Description of Artificial Sequence: Synthetic oligonucleotide
  Antisense strand to SEQ ID NO: 50778
uaggugauuacuagacaca

SEQ ID NO: 50860 - RNA, 19 nt, Artificial Sequence
  Description of Artificial Sequence: Synthetic oligonucleotide
  Sense strand starting at position 695 of SEQ ID NO: 613
gcacguauguguuuaaaug

SEQ ID NO: 50861 - RNA, 19 nt, Artificial Sequence
  Description of Artificial Sequence: Synthetic oligonucleotide
  Antisense strand to SEQ ID NO: 50780
cauuuaaacacauacgugc

SEQ ID NO: 50862 - RNA, 19 nt, Artificial Sequence
  Description of Artificial Sequence: Synthetic oligonucleotide
  Sense strand starting at position 696 of SEQ ID NO: 613
cacguauguguuuaaaugu

SEQ ID NO: 50863 - RNA, 19 nt, Artificial Sequence
  Description of Artificial Sequence: Synthetic oligonucleotide
  Antisense strand to SEQ ID NO: 50782
acauuuaaacacauacgug

SEQ ID NO: 50864 - RNA, 19 nt, Artificial Sequence
  Description of Artificial Sequence: Synthetic oligonucleotide
  Sense strand starting at position 703 of SEQ ID NO: 613
guguuuaaaugucuacuua

SEQ ID NO: 50865 - RNA, 19 nt, Artificial Sequence
  Description of Artificial Sequence: Synthetic oligonucleotide
  Antisense strand to SEQ ID NO: 50784
uaaguagacauuuaaacac

SEQ ID NO: 50866 - RNA, 19 nt, Artificial Sequence
  Description of Artificial Sequence: Synthetic oligonucleotide
  Sense strand starting at position 707 of SEQ ID NO: 613
uuaaaugucuacuuaagug

SEQ ID NO: 50867 - RNA, 19 nt, Artificial Sequence
  Description of Artificial Sequence: Synthetic oligonucleotide
  Antisense strand to SEQ ID NO: 50786
cacuuaaguagacauuuaa

SEQ ID NO: 50868 - RNA, 19 nt, Artificial Sequence
  Description of Artificial Sequence: Synthetic oligonucleotide
  Sense strand starting at position 714 of SEQ ID NO: 613
ucuacuuaaguguaacauu

SEQ ID NO: 50869 - RNA, 19 nt, Artificial Sequence
  Description of Artificial Sequence: Synthetic oligonucleotide
  Antisense strand to SEQ ID NO: 50788
aauguuacacuuaaguaga

SEQ ID NO: 50870 - RNA, 19 nt, Artificial Sequence
  Description of Artificial Sequence: Synthetic oligonucleotide
  Sense strand starting at position 748 of SEQ ID NO: 613
ucuacauaagaguguaaga

SEQ ID NO: 50871 - RNA, 19 nt, Artificial Sequence
  Description of Artificial Sequence: Synthetic oligonucleotide
  Antisense strand to SEQ ID NO: 50790
ucuuacacucuuauguaga

SEQ ID NO: 50872 - RNA, 19 nt, Artificial Sequence
  Description of Artificial Sequence: Synthetic oligonucleotide
  Sense strand starting at position 759 of SEQ ID NO: 613
guguaagagugacuuucuu

SEQ ID NO: 50873 - RNA, 19 nt, Artificial Sequence
  Description of Artificial Sequence: Synthetic oligonucleotide
  Antisense strand to SEQ ID NO: 50792
aagaaagucacucuuacac

SEQ ID NO: 50874 - RNA, 19 nt, Artificial Sequence
  Description of Artificial Sequence: Synthetic oligonucleotide
  Sense strand starting at position 786 of SEQ ID NO: 613
ugugcaucaucacuguauu

SEQ ID NO: 50875 - RNA, 19 nt, Artificial Sequence
  Description of Artificial Sequence: Synthetic oligonucleotide
  Antisense strand to SEQ ID NO: 50794
aauacagugaugaugcaca

SEQ ID NO: 50876 - RNA, 19 nt, Artificial Sequence
  Description of Artificial Sequence: Synthetic oligonucleotide
  Sense strand starting at position 787 of SEQ ID NO: 613
gugcaucaucacuguauuc

SEQ ID NO: 50877 - RNA, 19 nt, Artificial Sequence
  Description of Artificial Sequence: Synthetic oligonucleotide
  Antisense strand to SEQ ID NO: 50796
gaauacagugaugaugcac

SEQ ID NO: 50878 - RNA, 19 nt, Artificial Sequence
  Description of Artificial Sequence: Synthetic oligonucleotide
  Sense strand starting at position 1015 of SEQ ID NO: 613
cugucaaaugcucauguca

SEQ ID NO: 50879 - RNA, 19 nt, Artificial Sequence
  Description of Artificial Sequence: Synthetic oligonucleotide
  Antisense strand to SEQ ID NO: 50798
ugacaugagcauuugacag

SEQ ID NO: 50880 - RNA, 19 nt, Artificial Sequence
  Description of Artificial Sequence: Synthetic oligonucleotide
  Sense strand starting at position 1056 of SEQ ID NO: 613
gaaucauggcaacgagucu

SEQ ID NO: 50881 - RNA, 19 nt, Artificial Sequence
  Description of Artificial Sequence: Synthetic oligonucleotide
  Antisense strand to SEQ ID NO: 50800
agacucguugccaugauuc

SEQ ID NO: 50882 - RNA, 19 nt, Artificial Sequence
  Description of Artificial Sequence: Synthetic oligonucleotide
  Sense strand starting at position 1098 of SEQ ID NO: 613
ggguguucaccgcaucuca

SEQ ID NO: 50883 - RNA, 19 nt, Artificial Sequence
  Description of Artificial Sequence: Synthetic oligonucleotide
  Antisense strand to SEQ ID NO: 50802
ugagaugcggugaacaccc

SEQ ID NO: 50884 - RNA, 19 nt, Artificial Sequence
  Description of Artificial Sequence: Synthetic oligonucleotide
  Sense strand starting at position 1113 of SEQ ID NO: 613
cucagacuugccugcauca

SEQ ID NO: 50885 - RNA, 19 nt, Artificial Sequence
  Description of Artificial Sequence: Synthetic oligonucleotide
  Antisense strand to SEQ ID NO: 50804
ugaugcaggcaagucugag

SEQ ID NO: 50886 - RNA, 19 nt, Artificial Sequence
  Description of Artificial Sequence: Synthetic oligonucleotide
  Sense strand starting at position 1322 of SEQ ID NO: 613
gugcuaaaggcgucuggua

SEQ ID NO: 50887 - RNA, 19 nt, Artificial Sequence
  Description of Artificial Sequence: Synthetic oligonucleotide
  Antisense strand to SEQ ID NO: 50806
uaccagacgccuuuagcac

SEQ ID NO: 50888 - RNA, 19 nt, Artificial Sequence
  Description of Artificial Sequence: Synthetic oligonucleotide
  Sense strand starting at position 1387 of SEQ ID NO: 613
cccgaaacuucguuucuuu

SEQ ID NO: 50889 - RNA, 19 nt, Artificial Sequence
  Description of Artificial Sequence: Synthetic oligonucleotide
  Antisense strand to SEQ ID NO: 50808
aaagaaacgaaguuucggg

SEQ ID NO: 50890 - RNA, 19 nt, Artificial Sequence
  Description of Artificial Sequence: Synthetic oligonucleotide
  Sense strand starting at position 1438 of SEQ ID NO: 613
cggagagucucacuauguu

SEQ ID NO: 50891 - RNA, 19 nt, Artificial Sequence
  Description of Artificial Sequence: Synthetic oligonucleotide
  Antisense strand to SEQ ID NO: 50810
aacauagugagacucuccg

SEQ ID NO: 50892 - RNA, 19 nt, Artificial Sequence
  Description of Artificial Sequence: Synthetic oligonucleotide
  Sense strand starting at position 1479 of SEQ ID NO: 613
gcgaauuaggcucacugca

SEQ ID NO: 50893 - RNA, 19 nt, Artificial Sequence
  Description of Artificial Sequence: Synthetic oligonucleotide
  Antisense strand to SEQ ID NO: 50812
ugcagugagccuaauucgc

SEQ ID NO: 50894 - RNA, 19 nt, Artificial Sequence
  Description of Artificial Sequence: Synthetic oligonucleotide
  Sense strand starting at position 1898 of SEQ ID NO: 613
gcgcgauggccgagaaacu

SEQ ID NO: 50895 - RNA, 19 nt, Artificial Sequence
  Description of Artificial Sequence: Synthetic oligonucleotide
  Antisense strand to SEQ ID NO: 50814
aguuucucggccaucgcgc

SEQ ID NO: 50896 - RNA, 19 nt, Artificial Sequence
  Description of Artificial Sequence: Synthetic oligonucleotide
  Sense strand starting at position 2052 of SEQ ID NO: 613
gugucccucuguccauuaa

SEQ ID NO: 50897 - RNA, 19 nt, Artificial Sequence
  Description of Artificial Sequence: Synthetic oligonucleotide
  Antisense strand to SEQ ID NO: 50816
uuaauggacagagggacac

SEQ ID NO: 50898 - RNA, 19 nt, Artificial Sequence
  Description of Artificial Sequence: Synthetic oligonucleotide
  Sense strand starting at position 2141 of SEQ ID NO: 613
cucuuuccucagggaguaa

SEQ ID NO: 50899 - RNA, 19 nt, Artificial Sequence
  Description of Artificial Sequence: Synthetic oligonucleotide
  Antisense strand to SEQ ID NO: 50818
uuacucccugaggaaagag

SEQ ID NO: 50900 - RNA, 19 nt, Artificial Sequence
  Description of Artificial Sequence: Synthetic oligonucleotide
  Sense strand starting at position 2176 of SEQ ID NO: 613
cgaguacauucggugaaag

SEQ ID NO: 50901 - RNA, 19 nt, Artificial Sequence
  Description of Artificial Sequence: Synthetic oligonucleotide
  Antisense strand to SEQ ID NO: 50820
cuuucaccgaauguacucg

SEQ ID NO: 50902 - RNA, 19 nt, Artificial Sequence
  Description of Artificial Sequence: Synthetic oligonucleotide
  Sense strand starting at position 2177 of SEQ ID NO: 613
gaguacauucggugaaaga

SEQ ID NO: 50903 - RNA, 19 nt, Artificial Sequence
  Description of Artificial Sequence: Synthetic oligonucleotide
  Antisense strand to SEQ ID NO: 50822
ucuuucaccgaauguacuc

SEQ ID NO: 50904 - RNA, 19 nt, Artificial Sequence
  Description of Artificial Sequence: Synthetic oligonucleotide
  Sense strand starting at position 2631 of SEQ ID NO: 613
ggccacucacguuaacuuu

SEQ ID NO: 50905 - RNA, 19 nt, Artificial Sequence
  Description of Artificial Sequence: Synthetic oligonucleotide
  Antisense strand to SEQ ID NO: 50824
aaaguuaacgugaguggcc

SEQ ID NO: 50906 - RNA, 19 nt, Artificial Sequence
  Description of Artificial Sequence: Synthetic oligonucleotide
  Sense strand starting at position 2637 of SEQ ID NO: 613
ucacguuaacuuuagccau

SEQ ID NO: 50907 - RNA, 19 nt, Artificial Sequence
  Description of Artificial Sequence: Synthetic oligonucleotide
  Antisense strand to SEQ ID NO: 50826
auggcuaaaguuaacguga

SEQ ID NO: 50908 - RNA, 19 nt, Artificial Sequence
  Description of Artificial Sequence: Synthetic oligonucleotide
  Sense strand starting at position 2640 of SEQ ID NO: 613
cguuaacuuuagccaucaa

SEQ ID NO: 50909 - RNA, 19 nt, Artificial Sequence
  Description of Artificial Sequence: Synthetic oligonucleotide
  Antisense strand to SEQ ID NO: 50828
uugauggcuaaaguuaacg

SEQ ID NO: 50910 - RNA, 19 nt, Artificial Sequence
  Description of Artificial Sequence: Synthetic oligonucleotide
  Sense strand starting at position 2997 of SEQ ID NO: 613
uccaguuaggcauggaaag

SEQ ID NO: 50911 - RNA, 19 nt, Artificial Sequence
  Description of Artificial Sequence: Synthetic oligonucleotide
  Antisense strand to SEQ ID NO: 50830
cuuuccaugccuaacugga

SEQ ID NO: 50912 - RNA, 19 nt, Artificial Sequence
  Description of Artificial Sequence: Synthetic oligonucleotide
  Sense strand starting at position 3450 of SEQ ID NO: 613
gugcucuucugagcuacaa

SEQ ID NO: 50913 - RNA, 19 nt, Artificial Sequence
  Description of Artificial Sequence: Synthetic oligonucleotide
  Antisense strand to SEQ ID NO: 50832
uuguagcucagaagagcac

SEQ ID NO: 50914 - RNA, 19 nt, Artificial Sequence
  Description of Artificial Sequence: Synthetic oligonucleotide
  Sense strand starting at position 3500 of SEQ ID NO: 613
aagccaaacuuguuagagu

SEQ ID NO: 50915 - RNA, 19 nt, Artificial Sequence
  Description of Artificial Sequence: Synthetic oligonucleotide
  Antisense strand to SEQ ID NO: 50834
acucuaacaaguuuggcuu

SEQ ID NO: 50916 - RNA, 19 nt, Artificial Sequence
  Description of Artificial Sequence: Synthetic oligonucleotide
  Sense strand starting at position 3507 of SEQ ID NO: 613
acuuguuagaguuguccac

SEQ ID NO: 50917 - RNA, 19 nt, Artificial Sequence
  Description of Artificial Sequence: Synthetic oligonucleotide
  Antisense strand to SEQ ID NO: 50836
guggacaacucuaacaagu

SEQ ID NO: 50918 - RNA, 19 nt, Artificial Sequence
  Description of Artificial Sequence: Synthetic oligonucleotide
  Sense strand starting at position 3712 of SEQ ID NO: 613
acaagaugccaggaugugu

SEQ ID NO: 50919 - RNA, 19 nt, Artificial Sequence
  Description of Artificial Sequence: Synthetic oligonucleotide
  Antisense strand to SEQ ID NO: 50838
acacauccuggcaucuugu

SEQ ID NO: 50920 - RNA, 19 nt, Artificial Sequence
  Description of Artificial Sequence: Synthetic oligonucleotide
  Sense strand starting at position 3720 of SEQ ID NO: 613
ccaggauguguaugcuuua

SEQ ID NO: 50921 - RNA, 19 nt, Artificial Sequence
  Description of Artificial Sequence: Synthetic oligonucleotide
  Antisense strand to SEQ ID NO: 50840
uaaagcauacacauccugg

SEQ ID NO: 50922 - RNA, 19 nt, Artificial Sequence
  Description of Artificial Sequence: Synthetic oligonucleotide
  Sense strand starting at position 3723 of SEQ ID NO: 613
ggauguguaugcuuuagga

SEQ ID NO: 50923 - RNA, 19 nt, Artificial Sequence
  Description of Artificial Sequence: Synthetic oligonucleotide
  Antisense strand to SEQ ID NO: 50842
uccuaaagcauacacaucc

SEQ ID NO: 50924 - RNA, 19 nt, Artificial Sequence
  Description of Artificial Sequence: Synthetic oligonucleotide
  Sense strand starting at position 3742 of SEQ ID NO: 613
cgaagcucucgucaucaaa

SEQ ID NO: 50925 - RNA, 19 nt, Artificial Sequence
  Description of Artificial Sequence: Synthetic oligonucleotide
  Antisense strand to SEQ ID NO: 50844
uuugaugacgagagcuucg

SEQ ID NO: 50926 - RNA, 19 nt, Artificial Sequence
  Description of Artificial Sequence: Synthetic oligonucleotide
  Sense strand starting at position 523 of SEQ ID NO: 614
gagauuucgugcuugcuua

SEQ ID NO: 50927 - RNA, 19 nt, Artificial Sequence
  Description of Artificial Sequence: Synthetic oligonucleotide
  Antisense strand to SEQ ID NO: 50846
uaagcaagcacgaaaucuc

SEQ ID NO: 50928 - RNA, 19 nt, Artificial Sequence
  Description of Artificial Sequence: Synthetic oligonucleotide
  Sense strand starting at position 524 of SEQ ID NO: 614
agauuucgugcuugcuuau

SEQ ID NO: 50929 - RNA, 19 nt, Artificial Sequence
  Description of Artificial Sequence: Synthetic oligonucleotide
  Antisense strand to SEQ ID NO: 50848
auaagcaagcacgaaaucu

SEQ ID NO: 50930 - RNA, 19 nt, Artificial Sequence
  Description of Artificial Sequence: Synthetic oligonucleotide
  Sense strand starting at position 574 of SEQ ID NO: 614
agcagauguuaggcaagaa

SEQ ID NO: 50931 - RNA, 19 nt, Artificial Sequence
  Description of Artificial Sequence: Synthetic oligonucleotide
  Antisense strand to SEQ ID NO: 50850
uucuugccuaacaucugcu

SEQ ID NO: 50932 - RNA, 19 nt, Artificial Sequence
  Description of Artificial Sequence: Synthetic oligonucleotide
  Sense strand starting at position 575 of SEQ ID NO: 614
gcagauguuaggcaagaac

SEQ ID NO: 50933 - RNA, 19 nt, Artificial Sequence
  Description of Artificial Sequence: Synthetic oligonucleotide
  Antisense strand to SEQ ID NO: 50852
guucuugccuaacaucugc

SEQ ID NO: 50934 - RNA, 19 nt, Artificial Sequence
  Description of Artificial Sequence: Synthetic oligonucleotide
  Sense strand starting at position 622 of SEQ ID NO: 614
uguugucauaccuguugga

SEQ ID NO: 50935 - RNA, 19 nt, Artificial Sequence
  Description of Artificial Sequence: Synthetic oligonucleotide
  Antisense strand to SEQ ID NO: 50854
uccaacagguaugacaaca

SEQ ID NO: 50936 - RNA, 19 nt, Artificial Sequence
  Description of Artificial Sequence: Synthetic oligonucleotide
  Sense strand starting at position 626 of SEQ ID NO: 614
gucauaccuguuggauaca

SEQ ID NO: 50937 - RNA, 19 nt, Artificial Sequence
  Description of Artificial Sequence: Synthetic oligonucleotide
  Antisense strand to SEQ ID NO: 50856
uguauccaacagguaugac

SEQ ID NO: 50938 - RNA, 19 nt, Artificial Sequence
  Description of Artificial Sequence: Synthetic oligonucleotide
  Sense strand starting at position 764 of SEQ ID NO: 614
gagacuugaucaguuccaa

SEQ ID NO: 50939 - RNA, 19 nt, Artificial Sequence
  Description of Artificial Sequence: Synthetic oligonucleotide
  Antisense strand to SEQ ID NO: 50858
uuggaacugaucaagucuc

SEQ ID NO: 50940 - RNA, 19 nt, Artificial Sequence
  Description of Artificial Sequence: Synthetic oligonucleotide
  Sense strand starting at position 833 of SEQ ID NO: 614
gcacaccagcacugugaau

SEQ ID NO: 50941 - RNA, 19 nt, Artificial Sequence
  Description of Artificial Sequence: Synthetic oligonucleotide
  Antisense strand to SEQ ID NO: 50860
auucacagugcuggugugc

SEQ ID NO: 50942 - RNA, 19 nt, Artificial Sequence
  Description of Artificial Sequence: Synthetic oligonucleotide
  Sense strand starting at position 845 of SEQ ID NO: 614
ugugaaugcugccuggaca

SEQ ID NO: 50943 - RNA, 19 nt, Artificial Sequence
  Description of Artificial Sequence: Synthetic oligonucleotide
  Antisense strand to SEQ ID NO: 50862
uguccaggcagcauucaca

SEQ ID NO: 50944 - RNA, 19 nt, Artificial Sequence
  Description of Artificial Sequence: Synthetic oligonucleotide
  Sense strand starting at position 923 of SEQ ID NO: 614
aaagaaagauugccugguu

SEQ ID NO: 50945 - RNA, 19 nt, Artificial Sequence
  Description of Artificial Sequence: Synthetic oligonucleotide
  Antisense strand to SEQ ID NO: 50864
aaccaggcaaucuuucuuu

SEQ ID NO: 50946 - RNA, 19 nt, Artificial Sequence
  Description of Artificial Sequence: Synthetic oligonucleotide
  Sense strand starting at position 924 of SEQ ID NO: 614
aagaaagauugccugguuu

SEQ ID NO: 50947 - RNA, 19 nt, Artificial Sequence
  Description of Artificial Sequence: Synthetic oligonucleotide
  Antisense strand to SEQ ID NO: 50866
aaaccaggcaaucuuucuu

SEQ ID NO: 50948 - RNA, 19 nt, Artificial Sequence
  Description of Artificial Sequence: Synthetic oligonucleotide
  Sense strand starting at position 926 of SEQ ID NO: 614
gaaagauugccugguuuau

SEQ ID NO: 50949 - RNA, 19 nt, Artificial Sequence
  Description of Artificial Sequence: Synthetic oligonucleotide
  Antisense strand to SEQ ID NO: 50868
auaaaccaggcaaucuuuc

SEQ ID NO: 50950 - RNA, 19 nt, Artificial Sequence
  Description of Artificial Sequence: Synthetic oligonucleotide
  Sense strand starting at position 928 of SEQ ID NO: 614
aagauugccugguuuauga

SEQ ID NO: 50951 - RNA, 19 nt, Artificial Sequence
  Description of Artificial Sequence: Synthetic oligonucleotide
  Antisense strand to SEQ ID NO: 50870
ucauaaaccaggcaaucuu

SEQ ID NO: 50952 - RNA, 19 nt, Artificial Sequence
  Description of Artificial Sequence: Synthetic oligonucleotide
  Sense strand starting at position 938 of SEQ ID NO: 614
gguuuaugauguccuaguc

SEQ ID NO: 50953 - RNA, 19 nt, Artificial Sequence
  Description of Artificial Sequence: Synthetic oligonucleotide
  Antisense strand to SEQ ID NO: 50872
gacuaggacaucauaaacc

SEQ ID NO: 50954 - RNA, 19 nt, Artificial Sequence
  Description of Artificial Sequence: Synthetic oligonucleotide
  Sense strand starting at position 1147 of SEQ ID NO: 614
ucauacaugcuucgcaaau

SEQ ID NO: 50955 - RNA, 19 nt, Artificial Sequence
  Description of Artificial Sequence: Synthetic oligonucleotide
  Antisense strand to SEQ ID NO: 50874
auuugcgaagcauguauga

SEQ ID NO: 50956 - RNA, 19 nt, Artificial Sequence
  Description of Artificial Sequence: Synthetic oligonucleotide
  Sense strand starting at position 1168 of SEQ ID NO: 614
gccaguuuaugauuaaaua

SEQ ID NO: 50957 - RNA, 19 nt, Artificial Sequence
  Description of Artificial Sequence: Synthetic oligonucleotide
  Antisense strand to SEQ ID NO: 50876
uauuuaaucauaaacuggc

SEQ ID NO: 50958 - RNA, 19 nt, Artificial Sequence
  Description of Artificial Sequence: Synthetic oligonucleotide
  Sense strand starting at position 1430 of SEQ ID NO: 614
gcaagaauucuguauuccu

SEQ ID NO: 50959 - RNA, 19 nt, Artificial Sequence
  Description of Artificial Sequence: Synthetic oligonucleotide
  Antisense strand to SEQ ID NO: 50878
aggaauacagaauucuugc

SEQ ID NO: 50960 - RNA, 19 nt, Artificial Sequence
  Description of Artificial Sequence: Synthetic oligonucleotide
  Sense strand starting at position 1473 of SEQ ID NO: 614
cuuaaauagucugcaguca

SEQ ID NO: 50961 - RNA, 19 nt, Artificial Sequence
  Description of Artificial Sequence: Synthetic oligonucleotide
  Antisense strand to SEQ ID NO: 50880
ugacugcagacuauuuaag

SEQ ID NO: 50962 - RNA, 19 nt, Artificial Sequence
  Description of Artificial Sequence: Synthetic oligonucleotide
  Sense strand starting at position 1478 of SEQ ID NO: 614
auagucugcagucaguaaa

SEQ ID NO: 50963 - RNA, 19 nt, Artificial Sequence
  Description of Artificial Sequence: Synthetic oligonucleotide
  Antisense strand to SEQ ID NO: 50882
uuuacugacugcagacuau

SEQ ID NO: 50964 - RNA, 19 nt, Artificial Sequence
  Description of Artificial Sequence: Synthetic oligonucleotide
  Sense strand starting at position 1488 of SEQ ID NO: 614
gucaguaaacucugacuua

SEQ ID NO: 50965 - RNA, 19 nt, Artificial Sequence
  Description of Artificial Sequence: Synthetic oligonucleotide
  Antisense strand to SEQ ID NO: 50884
uaagucagaguuuacugac

SEQ ID NO: 50966 - RNA, 19 nt, Artificial Sequence
  Description of Artificial Sequence: Synthetic oligonucleotide
  Sense strand starting at position 1640 of SEQ ID NO: 614
gaggaugucggccaagaau

SEQ ID NO: 50967 - RNA, 19 nt, Artificial Sequence
  Description of Artificial Sequence: Synthetic oligonucleotide
  Antisense strand to SEQ ID NO: 50886
auucuuggccgacauccuc

SEQ ID NO: 50968 - RNA, 19 nt, Artificial Sequence
  Description of Artificial Sequence: Synthetic oligonucleotide
  Sense strand starting at position 1652 of SEQ ID NO: 614
caagaauagcgagggcuau

SEQ ID NO: 50969 - RNA, 19 nt, Artificial Sequence
  Description of Artificial Sequence: Synthetic oligonucleotide
  Antisense strand to SEQ ID NO: 50888
auagcccucgcuauucuug

SEQ ID NO: 50970 - RNA, 19 nt, Artificial Sequence
  Description of Artificial Sequence: Synthetic oligonucleotide
  Sense strand starting at position 1684 of SEQ ID NO: 614
ccaagaggugucugguugu

SEQ ID NO: 50971 - RNA, 19 nt, Artificial Sequence
  Description of Artificial Sequence: Synthetic oligonucleotide
  Antisense strand to SEQ ID NO: 50890
acaaccagacaccucuugg

SEQ ID NO: 50972 - RNA, 19 nt, Artificial Sequence
  Description of Artificial Sequence: Synthetic oligonucleotide
  Sense strand starting at position 1770 of SEQ ID NO: 614
cccgaaaggccuuggcaaa

SEQ ID NO: 50973 - RNA, 19 nt, Artificial Sequence
  Description of Artificial Sequence: Synthetic oligonucleotide
  Antisense strand to SEQ ID NO: 50892
uuugccaaggccuuucggg

SEQ ID NO: 50974 - RNA, 19 nt, Artificial Sequence
  Description of Artificial Sequence: Synthetic oligonucleotide
  Sense strand starting at position 2125 of SEQ ID NO: 614
cgccaauagcuguucuguu

SEQ ID NO: 50975 - RNA, 19 nt, Artificial Sequence
  Description of Artificial Sequence: Synthetic oligonucleotide
  Antisense strand to SEQ ID NO: 50894
aacagaacagcuauuggcg

SEQ ID NO: 50976 - RNA, 19 nt, Artificial Sequence
  Description of Artificial Sequence: Synthetic oligonucleotide
  Sense strand starting at position 2182 of SEQ ID NO: 614
aguagaagcucucugcaag

SEQ ID NO: 50977 - RNA, 19 nt, Artificial Sequence
  Description of Artificial Sequence: Synthetic oligonucleotide
  Antisense strand to SEQ ID NO: 50896
cuugcagagagcuucuacu

SEQ ID NO: 50978 - RNA, 19 nt, Artificial Sequence
  Description of Artificial Sequence: Synthetic oligonucleotide
  Sense strand starting at position 3249 of SEQ ID NO: 614
ggcauucuaugauuaaggu

SEQ ID NO: 50979 - RNA, 19 nt, Artificial Sequence
  Description of Artificial Sequence: Synthetic oligonucleotide
  Antisense strand to SEQ ID NO: 50898
accuuaaucauagaaugcc

SEQ ID NO: 50980 - RNA, 19 nt, Artificial Sequence
  Description of Artificial Sequence: Synthetic oligonucleotide
  Sense strand starting at position 3274 of SEQ ID NO: 614
auuguacuauaagcuagaa

SEQ ID NO: 50981 - RNA, 19 nt, Artificial Sequence
  Description of Artificial Sequence: Synthetic oligonucleotide
  Antisense strand to SEQ ID NO: 50900
uucuagcuuauaguacaau

SEQ ID NO: 50982 - RNA, 19 nt, Artificial Sequence
  Description of Artificial Sequence: Synthetic oligonucleotide
  Sense strand starting at position 3287 of SEQ ID NO: 614
cuagaagccucagcuagaa

SEQ ID NO: 50983 - RNA, 19 nt, Artificial Sequence
  Description of Artificial Sequence: Synthetic oligonucleotide
  Antisense strand to SEQ ID NO: 50902
uucuagcugaggcuucuag

SEQ ID NO: 50984 - RNA, 19 nt, Artificial Sequence
  Description of Artificial Sequence: Synthetic oligonucleotide
  Sense strand starting at position 3338 of SEQ ID NO: 614
uaguuuacuugggugguaa

SEQ ID NO: 50985 - RNA, 19 nt, Artificial Sequence
  Description of Artificial Sequence: Synthetic oligonucleotide
  Antisense strand to SEQ ID NO: 50904
uuaccacccaaguaaacua

SEQ ID NO: 50986 - RNA, 19 nt, Artificial Sequence
  Description of Artificial Sequence: Synthetic oligonucleotide
  Sense strand starting at position 3339 of SEQ ID NO: 614
aguuuacuugggugguaau

SEQ ID NO: 50987 - RNA, 19 nt, Artificial Sequence
  Description of Artificial Sequence: Synthetic oligonucleotide
  Antisense strand to SEQ ID NO: 50906
auuaccacccaaguaaacu

SEQ ID NO: 50988 - RNA, 19 nt, Artificial Sequence
  Description of Artificial Sequence: Synthetic oligonucleotide
  Sense strand starting at position 3340 of SEQ ID NO: 614
guuuacuugggugguaaua

SEQ ID NO: 50989 - RNA, 19 nt, Artificial Sequence
  Description of Artificial Sequence: Synthetic oligonucleotide
  Antisense strand to SEQ ID NO: 50908
uauuaccacccaaguaaac

SEQ ID NO: 50990 - RNA, 19 nt, Artificial Sequence
  Description of Artificial Sequence: Synthetic oligonucleotide
  Sense strand starting at position 3385 of SEQ ID NO: 614
ccagauuugucccaaaguc

SEQ ID NO: 50991 - RNA, 19 nt, Artificial Sequence
  Description of Artificial Sequence: Synthetic oligonucleotide
  Antisense strand to SEQ ID NO: 50910
gacuuugggacaaaucugg

SEQ ID NO: 50992 - RNA, 19 nt, Artificial Sequence
  Description of Artificial Sequence: Synthetic oligonucleotide
  Sense strand starting at position 3447 of SEQ ID NO: 614
cuguguucccuggagacaa

SEQ ID NO: 50993 - RNA, 19 nt, Artificial Sequence
  Description of Artificial Sequence: Synthetic oligonucleotide
  Antisense strand to SEQ ID NO: 50912
uugucuccagggaacacag

SEQ ID NO: 50994 - RNA, 19 nt, Artificial Sequence
  Description of Artificial Sequence: Synthetic oligonucleotide
  Sense strand starting at position 3482 of SEQ ID NO: 614
aauccuggcucuucguaaa

SEQ ID NO: 50995 - RNA, 19 nt, Artificial Sequence
  Description of Artificial Sequence: Synthetic oligonucleotide
  Antisense strand to SEQ ID NO: 50914
uuuacgaagagccaggauu

SEQ ID NO: 50996 - RNA, 19 nt, Artificial Sequence
  Description of Artificial Sequence: Synthetic oligonucleotide
  Sense strand starting at position 3849 of SEQ ID NO: 614
ccacucuucggaugugcaa

SEQ ID NO: 50997 - RNA, 19 nt, Artificial Sequence
  Description of Artificial Sequence: Synthetic oligonucleotide
  Antisense strand to SEQ ID NO: 50916
uugcacauccgaagagugg

SEQ ID NO: 50998 - RNA, 19 nt, Artificial Sequence
  Description of Artificial Sequence: Synthetic oligonucleotide
  Sense strand starting at position 3851 of SEQ ID NO: 614
acucuucggaugugcaaua

SEQ ID NO: 50999 - RNA, 19 nt, Artificial Sequence
  Description of Artificial Sequence: Synthetic oligonucleotide
  Antisense strand to SEQ ID NO: 50918
uauugcacauccgaagagu

SEQ ID NO: 51000 - RNA, 19 nt, Artificial Sequence
  Description of Artificial Sequence: Synthetic oligonucleotide
  Sense strand starting at position 3902 of SEQ ID NO: 614
gaagccucuuucuuaggga

SEQ ID NO: 51001 - RNA, 19 nt, Artificial Sequence
  Description of Artificial Sequence: Synthetic oligonucleotide
  Antisense strand to SEQ ID NO: 50920
ucccuaagaaagaggcuuc

SEQ ID NO: 51002 - RNA, 19 nt, Artificial Sequence
  Description of Artificial Sequence: Synthetic oligonucleotide
  Sense strand starting at position 3978 of SEQ ID NO: 614
accagauguccuuggauaa

SEQ ID NO: 51003 - RNA, 19 nt, Artificial Sequence
  Description of Artificial Sequence: Synthetic oligonucleotide
  Antisense strand to SEQ ID NO: 50922
uuauccaaggacaucuggu

SEQ ID NO: 51004 - RNA, 19 nt, Artificial Sequence
  Description of Artificial Sequence: Synthetic oligonucleotide
  Sense strand starting at position 3979 of SEQ ID NO: 614
ccagauguccuuggauaag

SEQ ID NO: 51005 - RNA, 19 nt, Artificial Sequence
  Description of Artificial Sequence: Synthetic oligonucleotide
  Antisense strand to SEQ ID NO: 50924
cuuauccaaggacaucugg

SEQ ID NO: 51006 - RNA, 19 nt, Artificial Sequence
  Description of Artificial Sequence: Synthetic oligonucleotide
  Sense strand starting at position 3847 of SEQ ID NO: 615
gaugucagugcagaaggau

SEQ ID NO: 51007 - RNA, 19 nt, Artificial Sequence
  Description of Artificial Sequence: Synthetic oligonucleotide
  Antisense strand to SEQ ID NO: 50926
auccuucugcacugacauc

SEQ ID NO: 51008 - RNA, 19 nt, Artificial Sequence
  Description of Artificial Sequence: Synthetic oligonucleotide
  Sense strand starting at position 3843 of SEQ ID NO: 615
acaggaugucagugcagaa

SEQ ID NO: 51009 - RNA, 19 nt, Artificial Sequence
  Description of Artificial Sequence: Synthetic oligonucleotide
  Antisense strand to SEQ ID NO: 50928
uucugcacugacauccugu

SEQ ID NO: 51010 - RNA, 19 nt, Artificial Sequence
  Description of Artificial Sequence: Synthetic oligonucleotide
  Sense strand starting at position 3664 of SEQ ID NO: 615
gucagagcuccauauacau

SEQ ID NO: 51011 - RNA, 19 nt, Artificial Sequence
  Description of Artificial Sequence: Synthetic oligonucleotide
  Antisense strand to SEQ ID NO: 50930
auguauauggagcucugac

SEQ ID NO: 51012 - RNA, 19 nt, Artificial Sequence
  Description of Artificial Sequence: Synthetic oligonucleotide
  Sense strand starting at position 3623 of SEQ ID NO: 615
uuuaaugaaugggaaacau

SEQ ID NO: 51013 - RNA, 19 nt, Artificial Sequence
  Description of Artificial Sequence: Synthetic oligonucleotide
  Antisense strand to SEQ ID NO: 50932
auguuucccauucauuaaa

SEQ ID NO: 51014 - RNA, 19 nt, Artificial Sequence
  Description of Artificial Sequence: Synthetic oligonucleotide
  Sense strand starting at position 3329 of SEQ ID NO: 615
cauucccaucagugagaga

SEQ ID NO: 51015 - RNA, 19 nt, Artificial Sequence
  Description of Artificial Sequence: Synthetic oligonucleotide
  Antisense strand to SEQ ID NO: 50934
ucucucacugaugggaaug

SEQ ID NO: 51016 - RNA, 19 nt, Artificial Sequence
  Description of Artificial Sequence: Synthetic oligonucleotide
  Sense strand starting at position 3202 of SEQ ID NO: 615
guggaucccuucucuauua

SEQ ID NO: 51017 - RNA, 19 nt, Artificial Sequence
  Description of Artificial Sequence: Synthetic oligonucleotide
  Antisense strand to SEQ ID NO: 50936
uaauagagaagggauccac

SEQ ID NO: 51018 - RNA, 19 nt, Artificial Sequence
  Description of Artificial Sequence: Synthetic oligonucleotide
  Sense strand starting at position 3100 of SEQ ID NO: 615
ucgcuaggagcucaaagaa

SEQ ID NO: 51019 - RNA, 19 nt, Artificial Sequence
  Description of Artificial Sequence: Synthetic oligonucleotide
  Antisense strand to SEQ ID NO: 50938
uucuuugagcuccuagcga

SEQ ID NO: 51020 - RNA, 19 nt, Artificial Sequence
  Description of Artificial Sequence: Synthetic oligonucleotide
  Sense strand starting at position 3091 of SEQ ID NO: 615
gaaagacauucgcuaggag

SEQ ID NO: 51021 - RNA, 19 nt, Artificial Sequence
  Description of Artificial Sequence: Synthetic oligonucleotide
  Antisense strand to SEQ ID NO: 50940
cuccuagcgaaugucuuuc

SEQ ID NO: 51022 - RNA, 19 nt, Artificial Sequence
  Description of Artificial Sequence: Synthetic oligonucleotide
  Sense strand starting at position 3017 of SEQ ID NO: 615
cucuuugcccuggaaggau

SEQ ID NO: 51023 - RNA, 19 nt, Artificial Sequence
  Description of Artificial Sequence: Synthetic oligonucleotide
  Antisense strand to SEQ ID NO: 50942
auccuuccagggcaaagag

SEQ ID NO: 51024 - RNA, 19 nt, Artificial Sequence
  Description of Artificial Sequence: Synthetic oligonucleotide
  Sense strand starting at position 2742 of SEQ ID NO: 615
auaguaagugcucaaucua

SEQ ID NO: 51025 - RNA, 19 nt, Artificial Sequence
  Description of Artificial Sequence: Synthetic oligonucleotide
  Antisense strand to SEQ ID NO: 50944
uagauugagcacuuacuau

SEQ ID NO: 51026 - RNA, 19 nt, Artificial Sequence
  Description of Artificial Sequence: Synthetic oligonucleotide
  Sense strand starting at position 2726 of SEQ ID NO: 615
gcauuaggccuagaacaua

SEQ ID NO: 51027 - RNA, 19 nt, Artificial Sequence
  Description of Artificial Sequence: Synthetic oligonucleotide
  Antisense strand to SEQ ID NO: 50946
uauguucuaggccuaaugc

SEQ ID NO: 51028 - RNA, 19 nt, Artificial Sequence
  Description of Artificial Sequence: Synthetic oligonucleotide
  Sense strand starting at position 2705 of SEQ ID NO: 615
gugagauacguagagcacu

SEQ ID NO: 51029 - RNA, 19 nt, Artificial Sequence
  Description of Artificial Sequence: Synthetic oligonucleotide
  Antisense strand to SEQ ID NO: 50948
agugcucuacguaucucac

SEQ ID NO: 51030 - RNA, 19 nt, Artificial Sequence
  Description of Artificial Sequence: Synthetic oligonucleotide
  Sense strand starting at position 2703 of SEQ ID NO: 615
aggugagauacguagagca

SEQ ID NO: 51031 - RNA, 19 nt, Artificial Sequence
  Description of Artificial Sequence: Synthetic oligonucleotide
  Antisense strand to SEQ ID NO: 50950
ugcucuacguaucucaccu

SEQ ID NO: 51032 - RNA, 19 nt, Artificial Sequence
  Description of Artificial Sequence: Synthetic oligonucleotide
  Sense strand starting at position 2694 of SEQ ID NO: 615
gcaggaauuaggugagaua

SEQ ID NO: 51033 - RNA, 19 nt, Artificial Sequence
  Description of Artificial Sequence: Synthetic oligonucleotide
  Antisense strand to SEQ ID NO: 50952
uaucucaccuaauuccugc

SEQ ID NO: 51034 - RNA, 19 nt, Artificial Sequence
  Description of Artificial Sequence: Synthetic oligonucleotide
  Sense strand starting at position 2685 of SEQ ID NO: 615
aggucaguugcaggaauua

SEQ ID NO: 51035 - RNA, 19 nt, Artificial Sequence
  Description of Artificial Sequence: Synthetic oligonucleotide
  Antisense strand to SEQ ID NO: 50954
uaauuccugcaacugaccu

SEQ ID NO: 51036 - RNA, 19 nt, Artificial Sequence
  Description of Artificial Sequence: Synthetic oligonucleotide
  Sense strand starting at position 2653 of SEQ ID NO: 615
guaaauggcgauuauaaua

SEQ ID NO: 51037 - RNA, 19 nt, Artificial Sequence
  Description of Artificial Sequence: Synthetic oligonucleotide
  Antisense strand to SEQ ID NO: 50956
uauuauaaucgccauuuac

SEQ ID NO: 51038 - RNA, 19 nt, Artificial Sequence
  Description of Artificial Sequence: Synthetic oligonucleotide
  Sense strand starting at position 2650 of SEQ ID NO: 615
ucuguaaauggcgauuaua

SEQ ID NO: 51039 - RNA, 19 nt, Artificial Sequence
  Description of Artificial Sequence: Synthetic oligonucleotide
  Antisense strand to SEQ ID NO: 50958
uauaaucgccauuuacaga

SEQ ID NO: 51040 - RNA, 19 nt, Artificial Sequence
  Description of Artificial Sequence: Synthetic oligonucleotide
  Sense strand starting at position 2556 of SEQ ID NO: 615
ggucuuuggagucaaacag

SEQ ID NO: 51041 - RNA, 19 nt, Artificial Sequence
  Description of Artificial Sequence: Synthetic oligonucleotide
  Antisense strand to SEQ ID NO: 50960
cuguuugacuccaaagacc

SEQ ID NO: 51042 - RNA, 19 nt, Artificial Sequence
  Description of Artificial Sequence: Synthetic oligonucleotide
  Sense strand starting at position 2535 of SEQ ID NO: 615
uggaguugccgccaagaau

SEQ ID NO: 51043 - RNA, 19 nt, Artificial Sequence
  Description of Artificial Sequence: Synthetic oligonucleotide
  Antisense strand to SEQ ID NO: 50962
auucuuggcggcaacucca

SEQ ID NO: 51044 - RNA, 19 nt, Artificial Sequence
  Description of Artificial Sequence: Synthetic oligonucleotide
  Sense strand starting at position 2479 of SEQ ID NO: 615
ugaagacccucuucuugaa

SEQ ID NO: 51045 - RNA, 19 nt, Artificial Sequence
  Description of Artificial Sequence: Synthetic oligonucleotide
  Antisense strand to SEQ ID NO: 50964
uucaagaagagggucuuca

SEQ ID NO: 51046 - RNA, 19 nt, Artificial Sequence
  Description of Artificial Sequence: Synthetic oligonucleotide
  Sense strand starting at position 1984 of SEQ ID NO: 615
aggucacuuccggauuaug

SEQ ID NO: 51047 - RNA, 19 nt, Artificial Sequence
  Description of Artificial Sequence: Synthetic oligonucleotide
  Antisense strand to SEQ ID NO: 50966
cauaauccggaagugaccu

SEQ ID NO: 51048 - RNA, 19 nt, Artificial Sequence
  Description of Artificial Sequence: Synthetic oligonucleotide
  Sense strand starting at position 1585 of SEQ ID NO: 615
agaauacuuucgccaaccu

SEQ ID NO: 51049 - RNA, 19 nt, Artificial Sequence
  Description of Artificial Sequence: Synthetic oligonucleotide
  Antisense strand to SEQ ID NO: 50968
agguuggcgaaaguauucu

SEQ ID NO: 51050 - RNA, 19 nt, Artificial Sequence
  Description of Artificial Sequence: Synthetic oligonucleotide
  Sense strand starting at position 1572 of SEQ ID NO: 615
caccuuucccgguagaaua

SEQ ID NO: 51051 - RNA, 19 nt, Artificial Sequence
  Description of Artificial Sequence: Synthetic oligonucleotide
  Antisense strand to SEQ ID NO: 50970
uauucuaccgggaaaggug

SEQ ID NO: 51052 - RNA, 19 nt, Artificial Sequence
  Description of Artificial Sequence: Synthetic oligonucleotide
  Sense strand starting at position 1570 of SEQ ID NO: 615
cccaccuuucccgguagaa

SEQ ID NO: 51053 - RNA, 19 nt, Artificial Sequence
  Description of Artificial Sequence: Synthetic oligonucleotide
  Antisense strand to SEQ ID NO: 50972
uucuaccgggaaagguggg

SEQ ID NO: 51054 - RNA, 19 nt, Artificial Sequence
  Description of Artificial Sequence: Synthetic oligonucleotide
  Sense strand starting at position 1547 of SEQ ID NO: 615
gcacucggccaauagaguu

SEQ ID NO: 51055 - RNA, 19 nt, Artificial Sequence
  Description of Artificial Sequence: Synthetic oligonucleotide
  Antisense strand to SEQ ID NO: 50974
aacucuauuggccgagugc

SEQ ID NO: 51056 - RNA, 19 nt, Artificial Sequence
  Description of Artificial Sequence: Synthetic oligonucleotide
  Sense strand starting at position 1436 of SEQ ID NO: 615
uguguagagaugggucuua

SEQ ID NO: 51057 - RNA, 19 nt, Artificial Sequence
  Description of Artificial Sequence: Synthetic oligonucleotide
  Antisense strand to SEQ ID NO: 50976
uaagacccaucucuacaca

SEQ ID NO: 51058 - RNA, 19 nt, Artificial Sequence
  Description of Artificial Sequence: Synthetic oligonucleotide
  Sense strand starting at position 1213 of SEQ ID NO: 615
ugcaccuauccugguagaa

SEQ ID NO: 51059 - RNA, 19 nt, Artificial Sequence
  Description of Artificial Sequence: Synthetic oligonucleotide
  Antisense strand to SEQ ID NO: 50978
uucuaccaggauaggugca

SEQ ID NO: 51060 - RNA, 19 nt, Artificial Sequence
  Description of Artificial Sequence: Synthetic oligonucleotide
  Sense strand starting at position 1141 of SEQ ID NO: 615
gcaggaugggauugacuua

SEQ ID NO: 51061 - RNA, 19 nt, Artificial Sequence
  Description of Artificial Sequence: Synthetic oligonucleotide
  Antisense strand to SEQ ID NO: 50980
uaagucaaucccauccugc

SEQ ID NO: 51062 - RNA, 19 nt, Artificial Sequence
  Description of Artificial Sequence: Synthetic oligonucleotide
  Sense strand starting at position 1123 of SEQ ID NO: 615
auuguuuggcauugaguag

SEQ ID NO: 51063 - RNA, 19 nt, Artificial Sequence
  Description of Artificial Sequence: Synthetic oligonucleotide
  Antisense strand to SEQ ID NO: 50982
cuacucaaugccaaacaau

SEQ ID NO: 51064 - RNA, 19 nt, Artificial Sequence
  Description of Artificial Sequence: Synthetic oligonucleotide
  Sense strand starting at position 1119 of SEQ ID NO: 615
agggauuguuuggcauuga

SEQ ID NO: 51065 - RNA, 19 nt, Artificial Sequence
  Description of Artificial Sequence: Synthetic oligonucleotide
  Antisense strand to SEQ ID NO: 50984
ucaaugccaaacaaucccu

SEQ ID NO: 51066 - RNA, 19 nt, Artificial Sequence
  Description of Artificial Sequence: Synthetic oligonucleotide
  Sense strand starting at position 1110 of SEQ ID NO: 615
aguaucaugagggauuguu

SEQ ID NO: 51067 - RNA, 19 nt, Artificial Sequence
  Description of Artificial Sequence: Synthetic oligonucleotide
  Antisense strand to SEQ ID NO: 50986
aacaaucccucaugauacu

SEQ ID NO: 51068 - RNA, 19 nt, Artificial Sequence
  Description of Artificial Sequence: Synthetic oligonucleotide
  Sense strand starting at position 1109 of SEQ ID NO: 615
caguaucaugagggauugu

SEQ ID NO: 51069 - RNA, 19 nt, Artificial Sequence
  Description of Artificial Sequence: Synthetic oligonucleotide
  Antisense strand to SEQ ID NO: 50988
acaaucccucaugauacug

SEQ ID NO: 51070 - RNA, 19 nt, Artificial Sequence
  Description of Artificial Sequence: Synthetic oligonucleotide
  Sense strand starting at position 645 of SEQ ID NO: 615
ucugaugucuuauccaagu

SEQ ID NO: 51071 - RNA, 19 nt, Artificial Sequence
  Description of Artificial Sequence: Synthetic oligonucleotide
  Antisense strand to SEQ ID NO: 50990
acuuggauaagacaucaga

SEQ ID NO: 51072 - RNA, 19 nt, Artificial Sequence
  Description of Artificial Sequence: Synthetic oligonucleotide
  Sense strand starting at position 130 of SEQ ID NO: 615
gggaguaggagguaucguu

SEQ ID NO: 51073 - RNA, 19 nt, Artificial Sequence
  Description of Artificial Sequence: Synthetic oligonucleotide
  Antisense strand to SEQ ID NO: 50992
aacgauaccuccuacuccc

SEQ ID NO: 51074 - RNA, 19 nt, Artificial Sequence
  Description of Artificial Sequence: Synthetic oligonucleotide
  Sense strand starting at position 106 of SEQ ID NO: 615
uuuccucagucagugaaga

SEQ ID NO: 51075 - RNA, 19 nt, Artificial Sequence
  Description of Artificial Sequence: Synthetic oligonucleotide
  Antisense strand to SEQ ID NO: 50994
ucuucacugacugaggaaa

SEQ ID NO: 51076 - RNA, 19 nt, Artificial Sequence
  Description of Artificial Sequence: Synthetic oligonucleotide
  Sense strand starting at position 104 of SEQ ID NO: 615
uguuuccucagucagugaa

SEQ ID NO: 51077 - RNA, 19 nt, Artificial Sequence
  Description of Artificial Sequence: Synthetic oligonucleotide
  Antisense strand to SEQ ID NO: 50996
uucacugacugaggaaaca

SEQ ID NO: 51078 - RNA, 19 nt, Artificial Sequence
  Description of Artificial Sequence: Synthetic oligonucleotide
  Sense strand starting at position 99 of SEQ ID NO: 615
cugaauguuuccucaguca

SEQ ID NO: 51079 - RNA, 19 nt, Artificial Sequence
  Description of Artificial Sequence: Synthetic oligonucleotide
  Antisense strand to SEQ ID NO: 50998
ugacugaggaaacauucag

SEQ ID NO: 51080 - RNA, 19 nt, Artificial Sequence
  Description of Artificial Sequence: Synthetic oligonucleotide
  Sense strand starting at position 97 of SEQ ID NO: 615
uccugaauguuuccucagu

SEQ ID NO: 51081 - RNA, 19 nt, Artificial Sequence
  Description of Artificial Sequence: Synthetic oligonucleotide
  Antisense strand to SEQ ID NO: 51000
acugaggaaacauucagga

SEQ ID NO: 51082 - RNA, 19 nt, Artificial Sequence
  Description of Artificial Sequence: Synthetic oligonucleotide
  Sense strand starting at position 23 of SEQ ID NO: 615
agugaaucaucucccuguu

SEQ ID NO: 51083 - RNA, 19 nt, Artificial Sequence
  Description of Artificial Sequence: Synthetic oligonucleotide
  Antisense strand to SEQ ID NO: 51002
aacagggagaugauucacu

SEQ ID NO: 51084 - RNA, 19 nt, Artificial Sequence
  Description of Artificial Sequence: Synthetic oligonucleotide
  Sense strand starting at position 13 of SEQ ID NO: 615
ugggaugccaagugaauca

SEQ ID NO: 51085 - RNA, 19 nt, Artificial Sequence
  Description of Artificial Sequence: Synthetic oligonucleotide
  Antisense strand to SEQ ID NO: 51004
ugauucacuuggcauccca

SEQ ID NO: 51086 - RNA, 19 nt, Artificial Sequence
  Description of Artificial Sequence: Synthetic oligonucleotide
  Sense strand starting at position 279 of SEQ ID NO: 616
ggaggugaugcaugaugaa

SEQ ID NO: 51087 - RNA, 19 nt, Artificial Sequence
  Description of Artificial Sequence: Synthetic oligonucleotide
  Antisense strand to SEQ ID NO: 51006
uucaucaugcaucaccucc

SEQ ID NO: 51088 - RNA, 19 nt, Artificial Sequence
  Description of Artificial Sequence: Synthetic oligonucleotide
  Sense strand starting at position 292 of SEQ ID NO: 616
gaugaaauguuauucucag

SEQ ID NO: 51089 - RNA, 19 nt, Artificial Sequence
  Description of Artificial Sequence: Synthetic oligonucleotide
  Antisense strand to SEQ ID NO: 51008
cugagaauaacauuucauc

SEQ ID NO: 51090 - RNA, 19 nt, Artificial Sequence
  Description of Artificial Sequence: Synthetic oligonucleotide
  Sense strand starting at position 323 of SEQ ID NO: 616
uuucuaaaucuccguggaa

SEQ ID NO: 51091 - RNA, 19 nt, Artificial Sequence
  Description of Artificial Sequence: Synthetic oligonucleotide
  Antisense strand to SEQ ID NO: 51010
uuccacggagauuuagaaa

SEQ ID NO: 51092 - RNA, 19 nt, Artificial Sequence
  Description of Artificial Sequence: Synthetic oligonucleotide
  Sense strand starting at position 324 of SEQ ID NO: 616
uucuaaaucuccguggaau

SEQ ID NO: 51093 - RNA, 19 nt, Artificial Sequence
  Description of Artificial Sequence: Synthetic oligonucleotide
  Antisense strand to SEQ ID NO: 51012
auuccacggagauuuagaa

SEQ ID NO: 51094 - RNA, 19 nt, Artificial Sequence
  Description of Artificial Sequence: Synthetic oligonucleotide
  Sense strand starting at position 325 of SEQ ID NO: 616
ucuaaaucuccguggaaua

SEQ ID NO: 51095 - RNA, 19 nt, Artificial Sequence
  Description of Artificial Sequence: Synthetic oligonucleotide
  Antisense strand to SEQ ID NO: 51014
uauuccacggagauuuaga

SEQ ID NO: 51096 - RNA, 19 nt, Artificial Sequence
  Description of Artificial Sequence: Synthetic oligonucleotide
  Sense strand starting at position 326 of SEQ ID NO: 616
cuaaaucuccguggaauac

SEQ ID NO: 51097 - RNA, 19 nt, Artificial Sequence
  Description of Artificial Sequence: Synthetic oligonucleotide
  Antisense strand to SEQ ID NO: 51016
guauuccacggagauuuag

SEQ ID NO: 51098 - RNA, 19 nt, Artificial Sequence
  Description of Artificial Sequence: Synthetic oligonucleotide
  Sense strand starting at position 327 of SEQ ID NO: 616
uaaaucuccguggaauaca

SEQ ID NO: 51099 - RNA, 19 nt, Artificial Sequence
  Description of Artificial Sequence: Synthetic oligonucleotide
  Antisense strand to SEQ ID NO: 51018
uguauuccacggagauuua

SEQ ID NO: 51100 - RNA, 19 nt, Artificial Sequence
  Description of Artificial Sequence: Synthetic oligonucleotide
  Sense strand starting at position 332 of SEQ ID NO: 616
cuccguggaauacaugaau

SEQ ID NO: 51101 - RNA, 19 nt, Artificial Sequence
  Description of Artificial Sequence: Synthetic oligonucleotide
  Antisense strand to SEQ ID NO: 51020
auucauguauuccacggag

SEQ ID NO: 51102 - RNA, 19 nt, Artificial Sequence
  Description of Artificial Sequence: Synthetic oligonucleotide
  Sense strand starting at position 483 of SEQ ID NO: 616
uccagaagcccugguaacu

SEQ ID NO: 51103 - RNA, 19 nt, Artificial Sequence
  Description of Artificial Sequence: Synthetic oligonucleotide
  Antisense strand to SEQ ID NO: 51022
aguuaccagggcuucugga

SEQ ID NO: 51104 - RNA, 19 nt, Artificial Sequence
  Description of Artificial Sequence: Synthetic oligonucleotide
  Sense strand starting at position 492 of SEQ ID NO: 616
ccugguaacucucuagaca

SEQ ID NO: 51105 - RNA, 19 nt, Artificial Sequence
  Description of Artificial Sequence: Synthetic oligonucleotide
  Antisense strand to SEQ ID NO: 51024
ugucuagagaguuaccagg

SEQ ID NO: 51106 - RNA, 19 nt, Artificial Sequence
  Description of Artificial Sequence: Synthetic oligonucleotide
  Sense strand starting at position 493 of SEQ ID NO: 616
cugguaacucucuagacau

SEQ ID NO: 51107 - RNA, 19 nt, Artificial Sequence
  Description of Artificial Sequence: Synthetic oligonucleotide
  Antisense strand to SEQ ID NO: 51026
augucuagagaguuaccag

SEQ ID NO: 51108 - RNA, 19 nt, Artificial Sequence
  Description of Artificial Sequence: Synthetic oligonucleotide
  Sense strand starting at position 595 of SEQ ID NO: 616
auggguaaugucggugaac

SEQ ID NO: 51109 - RNA, 19 nt, Artificial Sequence
  Description of Artificial Sequence: Synthetic oligonucleotide
  Antisense strand to SEQ ID NO: 51028
guucaccgacauuacccau

SEQ ID NO: 51110 - RNA, 19 nt, Artificial Sequence
  Description of Artificial Sequence: Synthetic oligonucleotide
  Sense strand starting at position 598 of SEQ ID NO: 616
gguaaugucggugaacuuc

SEQ ID NO: 51111 - RNA, 19 nt, Artificial Sequence
  Description of Artificial Sequence: Synthetic oligonucleotide
  Antisense strand to SEQ ID NO: 51030
gaaguucaccgacauuacc

SEQ ID NO: 51112 - RNA, 19 nt, Artificial Sequence
  Description of Artificial Sequence: Synthetic oligonucleotide
  Sense strand starting at position 729 of SEQ ID NO: 616
aggaacugcuuucuguaca

SEQ ID NO: 51113 - RNA, 19 nt, Artificial Sequence
  Description of Artificial Sequence: Synthetic oligonucleotide
  Antisense strand to SEQ ID NO: 51032
uguacagaaagcaguuccu

SEQ ID NO: 51114 - RNA, 19 nt, Artificial Sequence
  Description of Artificial Sequence: Synthetic oligonucleotide
  Sense strand starting at position 785 of SEQ ID NO: 616
acgagcugauugguuucaa

SEQ ID NO: 51115 - RNA, 19 nt, Artificial Sequence
  Description of Artificial Sequence: Synthetic oligonucleotide
  Antisense strand to SEQ ID NO: 51034
uugaaaccaaucagcucgu

SEQ ID NO: 51116 - RNA, 19 nt, Artificial Sequence
  Description of Artificial Sequence: Synthetic oligonucleotide
  Sense strand starting at position 786 of SEQ ID NO: 616
cgagcugauugguuucaaa

SEQ ID NO: 51117 - RNA, 19 nt, Artificial Sequence
  Description of Artificial Sequence: Synthetic oligonucleotide
  Antisense strand to SEQ ID NO: 51036
uuugaaaccaaucagcucg

SEQ ID NO: 51118 - RNA, 19 nt, Artificial Sequence
  Description of Artificial Sequence: Synthetic oligonucleotide
  Sense strand starting at position 904 of SEQ ID NO: 616
ggguguaauccucacaaca

SEQ ID NO: 51119 - RNA, 19 nt, Artificial Sequence
  Description of Artificial Sequence: Synthetic oligonucleotide
  Antisense strand to SEQ ID NO: 51038
uguugugaggauuacaccc

SEQ ID NO: 51120 - RNA, 19 nt, Artificial Sequence
  Description of Artificial Sequence: Synthetic oligonucleotide
  Sense strand starting at position 1461 of SEQ ID NO: 616
gucgcugugccugauuuca

SEQ ID NO: 51121 - RNA, 19 nt, Artificial Sequence
  Description of Artificial Sequence: Synthetic oligonucleotide
  Antisense strand to SEQ ID NO: 51040
ugaaaucaggcacagcgac

SEQ ID NO: 51122 - RNA, 19 nt, Artificial Sequence
  Description of Artificial Sequence: Synthetic oligonucleotide
  Sense strand starting at position 1463 of SEQ ID NO: 616
cgcugugccugauuucaga

SEQ ID NO: 51123 - RNA, 19 nt, Artificial Sequence
  Description of Artificial Sequence: Synthetic oligonucleotide
  Antisense strand to SEQ ID NO: 51042
ucugaaaucaggcacagcg

SEQ ID NO: 51124 - RNA, 19 nt, Artificial Sequence
  Description of Artificial Sequence: Synthetic oligonucleotide
  Sense strand starting at position 1483 of SEQ ID NO: 616
ccgguuucugcgguaaacu

SEQ ID NO: 51125 - RNA, 19 nt, Artificial Sequence
  Description of Artificial Sequence: Synthetic oligonucleotide
  Antisense strand to SEQ ID NO: 51044
aguuuaccgcagaaaccgg

SEQ ID NO: 51126 - RNA, 19 nt, Artificial Sequence
  Description of Artificial Sequence: Synthetic oligonucleotide
  Sense strand starting at position 1493 of SEQ ID NO: 616
cgguaaacucauggcaaag

SEQ ID NO: 51127 - RNA, 19 nt, Artificial Sequence
  Description of Artificial Sequence: Synthetic oligonucleotide
  Antisense strand to SEQ ID NO: 51046
cuuugccaugaguuuaccg

SEQ ID NO: 51128 - RNA, 19 nt, Artificial Sequence
  Description of Artificial Sequence: Synthetic oligonucleotide
  Sense strand starting at position 1923 of SEQ ID NO: 616
aggcgaugccgguggauuu

SEQ ID NO: 51129 - RNA, 19 nt, Artificial Sequence
  Description of Artificial Sequence: Synthetic oligonucleotide
  Antisense strand to SEQ ID NO: 51048
aaauccaccggcaucgccu

SEQ ID NO: 51130 - RNA, 19 nt, Artificial Sequence
  Description of Artificial Sequence: Synthetic oligonucleotide
  Sense strand starting at position 2031 of SEQ ID NO: 616
uucggaauggcucgggaaa

SEQ ID NO: 51131 - RNA, 19 nt, Artificial Sequence
  Description of Artificial Sequence: Synthetic oligonucleotide
  Antisense strand to SEQ ID NO: 51050
uuucccgagccauuccgaa

SEQ ID NO: 51132 - RNA, 19 nt, Artificial Sequence
  Description of Artificial Sequence: Synthetic oligonucleotide
  Sense strand starting at position 2094 of SEQ ID NO: 616
ggucgggauucuucggaga

SEQ ID NO: 51133 - RNA, 19 nt, Artificial Sequence
  Description of Artificial Sequence: Synthetic oligonucleotide
  Antisense strand to SEQ ID NO: 51052
ucuccgaagaaucccgacc

SEQ ID NO: 51134 - RNA, 19 nt, Artificial Sequence
  Description of Artificial Sequence: Synthetic oligonucleotide
  Sense strand starting at position 2282 of SEQ ID NO: 616
cucgaagaacaaugguaau

SEQ ID NO: 51135 - RNA, 19 nt, Artificial Sequence
  Description of Artificial Sequence: Synthetic oligonucleotide
  Antisense strand to SEQ ID NO: 51054
auuaccauuguucuucgag

SEQ ID NO: 51136 - RNA, 19 nt, Artificial Sequence
  Description of Artificial Sequence: Synthetic oligonucleotide
  Sense strand starting at position 2502 of SEQ ID NO: 616
gacgcucugagaggugaau

SEQ ID NO: 51137 - RNA, 19 nt, Artificial Sequence
  Description of Artificial Sequence: Synthetic oligonucleotide
  Antisense strand to SEQ ID NO: 51056
auucaccucucagagcguc

SEQ ID NO: 51138 - RNA, 19 nt, Artificial Sequence
  Description of Artificial Sequence: Synthetic oligonucleotide
  Sense strand starting at position 2688 of SEQ ID NO: 616
uuaacugagcucuguggau

SEQ ID NO: 51139 - RNA, 19 nt, Artificial Sequence
  Description of Artificial Sequence: Synthetic oligonucleotide
  Antisense strand to SEQ ID NO: 51058
auccacagagcucaguuaa

SEQ ID NO: 51140 - RNA, 19 nt, Artificial Sequence
  Description of Artificial Sequence: Synthetic oligonucleotide
  Sense strand starting at position 2791 of SEQ ID NO: 616
gacauuuguugauaaggau

SEQ ID NO: 51141 - RNA, 19 nt, Artificial Sequence
  Description of Artificial Sequence: Synthetic oligonucleotide
  Antisense strand to SEQ ID NO: 51060
auccuuaucaacaaauguc

SEQ ID NO: 51142 - RNA, 19 nt, Artificial Sequence
  Description of Artificial Sequence: Synthetic oligonucleotide
  Sense strand starting at position 2895 of SEQ ID NO: 616
aguggcauugagugggaaa

SEQ ID NO: 51143 - RNA, 19 nt, Artificial Sequence
  Description of Artificial Sequence: Synthetic oligonucleotide
  Antisense strand to SEQ ID NO: 51062
uuucccacucaaugccacu

SEQ ID NO: 51144 - RNA, 19 nt, Artificial Sequence
  Description of Artificial Sequence: Synthetic oligonucleotide
  Sense strand starting at position 2897 of SEQ ID NO: 616
uggcauugagugggaaaga

SEQ ID NO: 51145 - RNA, 19 nt, Artificial Sequence
  Description of Artificial Sequence: Synthetic oligonucleotide
  Antisense strand to SEQ ID NO: 51064
ucuuucccacucaaugcca

SEQ ID NO: 51146 - RNA, 19 nt, Artificial Sequence
  Description of Artificial Sequence: Synthetic oligonucleotide
  Sense strand starting at position 3224 of SEQ ID NO: 616
ggcgucauggagcaaucaa

SEQ ID NO: 51147 - RNA, 19 nt, Artificial Sequence
  Description of Artificial Sequence: Synthetic oligonucleotide
  Antisense strand to SEQ ID NO: 51066
uugauugcuccaugacgcc

SEQ ID NO: 51148 - RNA, 19 nt, Artificial Sequence
  Description of Artificial Sequence: Synthetic oligonucleotide
  Sense strand starting at position 3298 of SEQ ID NO: 616
caagcaguccugugaaaua

SEQ ID NO: 51149 - RNA, 19 nt, Artificial Sequence
  Description of Artificial Sequence: Synthetic oligonucleotide
  Antisense strand to SEQ ID NO: 51068
uauuucacaggacugcuug

SEQ ID NO: 51150 - RNA, 19 nt, Artificial Sequence
  Description of Artificial Sequence: Synthetic oligonucleotide
  Sense strand starting at position 3305 of SEQ ID NO: 616
uccugugaaauagguagua

SEQ ID NO: 51151 - RNA, 19 nt, Artificial Sequence
  Description of Artificial Sequence: Synthetic oligonucleotide
  Antisense strand to SEQ ID NO: 51070
uacuaccuauuucacagga

SEQ ID NO: 51152 - RNA, 19 nt, Artificial Sequence
  Description of Artificial Sequence: Synthetic oligonucleotide
  Sense strand starting at position 3307 of SEQ ID NO: 616
cugugaaauagguaguauc

SEQ ID NO: 51153 - RNA, 19 nt, Artificial Sequence
  Description of Artificial Sequence: Synthetic oligonucleotide
  Antisense strand to SEQ ID NO: 51072
gauacuaccuauuucacag

SEQ ID NO: 51154 - RNA, 19 nt, Artificial Sequence
  Description of Artificial Sequence: Synthetic oligonucleotide
  Sense strand starting at position 3458 of SEQ ID NO: 616
aagauuagagucuaguucu

SEQ ID NO: 51155 - RNA, 19 nt, Artificial Sequence
  Description of Artificial Sequence: Synthetic oligonucleotide
  Antisense strand to SEQ ID NO: 51074
agaacuagacucuaaucuu

SEQ ID NO: 51156 - RNA, 19 nt, Artificial Sequence
  Description of Artificial Sequence: Synthetic oligonucleotide
  Sense strand starting at position 3461 of SEQ ID NO: 616
auuagagucuaguucugac

SEQ ID NO: 51157 - RNA, 19 nt, Artificial Sequence
  Description of Artificial Sequence: Synthetic oligonucleotide
  Antisense strand to SEQ ID NO: 51076
gucagaacuagacucuaau

SEQ ID NO: 51158 - RNA, 19 nt, Artificial Sequence
  Description of Artificial Sequence: Synthetic oligonucleotide
  Sense strand starting at position 3855 of SEQ ID NO: 616
gaugcuuaauucgugacaa

SEQ ID NO: 51159 - RNA, 19 nt, Artificial Sequence
  Description of Artificial Sequence: Synthetic oligonucleotide
  Antisense strand to SEQ ID NO: 51078
uugucacgaauuaagcauc

SEQ ID NO: 51160 - RNA, 19 nt, Artificial Sequence
  Description of Artificial Sequence: Synthetic oligonucleotide
  Sense strand starting at position 3857 of SEQ ID NO: 616
ugcuuaauucgugacaauc

SEQ ID NO: 51161 - RNA, 19 nt, Artificial Sequence
  Description of Artificial Sequence: Synthetic oligonucleotide
  Antisense strand to SEQ ID NO: 51080
gauugucacgaauuaagca

SEQ ID NO: 51162 - RNA, 19 nt, Artificial Sequence
  Description of Artificial Sequence: Synthetic oligonucleotide
  Sense strand starting at position 3890 of SEQ ID NO: 616
augcuccuucuaggauaaa

SEQ ID NO: 51163 - RNA, 19 nt, Artificial Sequence
  Description of Artificial Sequence: Synthetic oligonucleotide
  Antisense strand to SEQ ID NO: 51082
uuuauccuagaaggagcau

SEQ ID NO: 51164 - RNA, 19 nt, Artificial Sequence
  Description of Artificial Sequence: Synthetic oligonucleotide
  Sense strand starting at position 3957 of SEQ ID NO: 616
uagcuagagcuccacaguu

SEQ ID NO: 51165 - RNA, 19 nt, Artificial Sequence
  Description of Artificial Sequence: Synthetic oligonucleotide
  Antisense strand to SEQ ID NO: 51084
aacuguggagcucuagcua

SEQ ID NO: 51166 - RNA, 19 nt, Artificial Sequence
  Description of Artificial Sequence: Synthetic oligonucleotide
  Sense strand starting at position 81 of SEQ ID NO: 617
ugacuuaagaugugguucu

SEQ ID NO: 51167 - RNA, 19 nt, Artificial Sequence
  Description of Artificial Sequence: Synthetic oligonucleotide
  Antisense strand to SEQ ID NO: 51086
agaaccacaucuuaaguca

SEQ ID NO: 51168 - RNA, 19 nt, Artificial Sequence
  Description of Artificial Sequence: Synthetic oligonucleotide
  Sense strand starting at position 834 of SEQ ID NO: 617
gcaugagaauggcuggaau

SEQ ID NO: 51169 - RNA, 19 nt, Artificial Sequence
  Description of Artificial Sequence: Synthetic oligonucleotide
  Antisense strand to SEQ ID NO: 51088
auuccagccauucucaugc

SEQ ID NO: 51170 - RNA, 19 nt, Artificial Sequence
  Description of Artificial Sequence: Synthetic oligonucleotide
  Sense strand starting at position 1053 of SEQ ID NO: 617
cugccaagaugcuuaaaug

SEQ ID NO: 51171 - RNA, 19 nt, Artificial Sequence
  Description of Artificial Sequence: Synthetic oligonucleotide
  Antisense strand to SEQ ID NO: 51090
cauuuaagcaucuuggcag

SEQ ID NO: 51172 - RNA, 19 nt, Artificial Sequence
  Description of Artificial Sequence: Synthetic oligonucleotide
  Sense strand starting at position 1054 of SEQ ID NO: 617
ugccaagaugcuuaaaugu

SEQ ID NO: 51173 - RNA, 19 nt, Artificial Sequence
  Description of Artificial Sequence: Synthetic oligonucleotide
  Antisense strand to SEQ ID NO: 51092
acauuuaagcaucuuggca

SEQ ID NO: 51174 - RNA, 19 nt, Artificial Sequence
  Description of Artificial Sequence: Synthetic oligonucleotide
  Sense strand starting at position 1401 of SEQ ID NO: 617
guaaguguuccauaugacu

SEQ ID NO: 51175 - RNA, 19 nt, Artificial Sequence
  Description of Artificial Sequence: Synthetic oligonucleotide
  Antisense strand to SEQ ID NO: 51094
agucauauggaacacuuac

SEQ ID NO: 51176 - RNA, 19 nt, Artificial Sequence
  Description of Artificial Sequence: Synthetic oligonucleotide
  Sense strand starting at position 1514 of SEQ ID NO: 617
uuguaacuacuugaauguu

SEQ ID NO: 51177 - RNA, 19 nt, Artificial Sequence
  Description of Artificial Sequence: Synthetic oligonucleotide
  Antisense strand to SEQ ID NO: 51096
aacauucaaguaguuacaa

SEQ ID NO: 51178 - RNA, 19 nt, Artificial Sequence
  Description of Artificial Sequence: Synthetic oligonucleotide
  Sense strand starting at position 1745 of SEQ ID NO: 617
ugaguaauuuacgugguag

SEQ ID NO: 51179 - RNA, 19 nt, Artificial Sequence
  Description of Artificial Sequence: Synthetic oligonucleotide
  Antisense strand to SEQ ID NO: 51098
cuaccacguaaauuacuca

SEQ ID NO: 51180 - RNA, 19 nt, Artificial Sequence
  Description of Artificial Sequence: Synthetic oligonucleotide
  Sense strand starting at position 1746 of SEQ ID NO: 617
gaguaauuuacgugguagc

SEQ ID NO: 51181 - RNA, 19 nt, Artificial Sequence
  Description of Artificial Sequence: Synthetic oligonucleotide
  Antisense strand to SEQ ID NO: 51100
gcuaccacguaaauuacuc

SEQ ID NO: 51182 - RNA, 19 nt, Artificial Sequence
  Description of Artificial Sequence: Synthetic oligonucleotide
  Sense strand starting at position 1747 of SEQ ID NO: 617
aguaauuuacgugguagca

SEQ ID NO: 51183 - RNA, 19 nt, Artificial Sequence
  Description of Artificial Sequence: Synthetic oligonucleotide
  Antisense strand to SEQ ID NO: 51102
ugcuaccacguaaauuacu

SEQ ID NO: 51184 - RNA, 19 nt, Artificial Sequence
  Description of Artificial Sequence: Synthetic oligonucleotide
  Sense strand starting at position 1794 of SEQ ID NO: 617
aguauaggcaaucaaggua

SEQ ID NO: 51185 - RNA, 19 nt, Artificial Sequence
  Description of Artificial Sequence: Synthetic oligonucleotide
  Antisense strand to SEQ ID NO: 51104
uaccuugauugccuauacu

SEQ ID NO: 51186 - RNA, 19 nt, Artificial Sequence
  Description of Artificial Sequence: Synthetic oligonucleotide
  Sense strand starting at position 1881 of SEQ ID NO: 617
acugaacucugccuuuaag

SEQ ID NO: 51187 - RNA, 19 nt, Artificial Sequence
  Description of Artificial Sequence: Synthetic oligonucleotide
  Antisense strand to SEQ ID NO: 51106
cuuaaaggcagaguucagu

SEQ ID NO: 51188 - RNA, 19 nt, Artificial Sequence
  Description of Artificial Sequence: Synthetic oligonucleotide
  Sense strand starting at position 1884 of SEQ ID NO: 617
gaacucugccuuuaaguag

SEQ ID NO: 51189 - RNA, 19 nt, Artificial Sequence
  Description of Artificial Sequence: Synthetic oligonucleotide
  Antisense strand to SEQ ID NO: 51108
cuacuuaaaggcagaguuc

SEQ ID NO: 51190 - RNA, 19 nt, Artificial Sequence
  Description of Artificial Sequence: Synthetic oligonucleotide
  Sense strand starting at position 1984 of SEQ ID NO: 617
cacacuuucucaucgguga

SEQ ID NO: 51191 - RNA, 19 nt, Artificial Sequence
  Description of Artificial Sequence: Synthetic oligonucleotide
  Antisense strand to SEQ ID NO: 51110
ucaccgaugagaaagugug

SEQ ID NO: 51192 - RNA, 19 nt, Artificial Sequence
  Description of Artificial Sequence: Synthetic oligonucleotide
  Sense strand starting at position 1985 of SEQ ID NO: 617
acacuuucucaucggugaa

SEQ ID NO: 51193 - RNA, 19 nt, Artificial Sequence
  Description of Artificial Sequence: Synthetic oligonucleotide
  Antisense strand to SEQ ID NO: 51112
uucaccgaugagaaagugu

SEQ ID NO: 51194 - RNA, 19 nt, Artificial Sequence
  Description of Artificial Sequence: Synthetic oligonucleotide
  Sense strand starting at position 1987 of SEQ ID NO: 617
acuuucucaucggugaaca

SEQ ID NO: 51195 - RNA, 19 nt, Artificial Sequence
  Description of Artificial Sequence: Synthetic oligonucleotide
  Antisense strand to SEQ ID NO: 51114
uguucaccgaugagaaagu

SEQ ID NO: 51196 - RNA, 19 nt, Artificial Sequence
  Description of Artificial Sequence: Synthetic oligonucleotide
  Sense strand starting at position 1988 of SEQ ID NO: 617
cuuucucaucggugaacaa

SEQ ID NO: 51197 - RNA, 19 nt, Artificial Sequence
  Description of Artificial Sequence: Synthetic oligonucleotide
  Antisense strand to SEQ ID NO: 51116
uuguucaccgaugagaaag

SEQ ID NO: 51198 - RNA, 19 nt, Artificial Sequence
  Description of Artificial Sequence: Synthetic oligonucleotide
  Sense strand starting at position 1989 of SEQ ID NO: 617
uuucucaucggugaacaau

SEQ ID NO: 51199 - RNA, 19 nt, Artificial Sequence
  Description of Artificial Sequence: Synthetic oligonucleotide
  Antisense strand to SEQ ID NO: 51118
auuguucaccgaugagaaa

SEQ ID NO: 51200 - RNA, 19 nt, Artificial Sequence
  Description of Artificial Sequence: Synthetic oligonucleotide
  Sense strand starting at position 1998 of SEQ ID NO: 617
ggugaacaauuccuaauug

SEQ ID NO: 51201 - RNA, 19 nt, Artificial Sequence
  Description of Artificial Sequence: Synthetic oligonucleotide
  Antisense strand to SEQ ID NO: 51120
caauuaggaauuguucacc

SEQ ID NO: 51202 - RNA, 19 nt, Artificial Sequence
  Description of Artificial Sequence: Synthetic oligonucleotide
  Sense strand starting at position 2096 of SEQ ID NO: 617
cgcggugccuggauugaaa

SEQ ID NO: 51203 - RNA, 19 nt, Artificial Sequence
  Description of Artificial Sequence: Synthetic oligonucleotide
  Antisense strand to SEQ ID NO: 51122
uuucaauccaggcaccgcg

SEQ ID NO: 51204 - RNA, 19 nt, Artificial Sequence
  Description of Artificial Sequence: Synthetic oligonucleotide
  Sense strand starting at position 2409 of SEQ ID NO: 617
ggaggugaugcaugaugaa

SEQ ID NO: 51205 - RNA, 19 nt, Artificial Sequence
  Description of Artificial Sequence: Synthetic oligonucleotide
  Antisense strand to SEQ ID NO: 51124
uucaucaugcaucaccucc

SEQ ID NO: 51206 - RNA, 19 nt, Artificial Sequence
  Description of Artificial Sequence: Synthetic oligonucleotide
  Sense strand starting at position 2422 of SEQ ID NO: 617
gaugaaauguuauucucag

SEQ ID NO: 51207 - RNA, 19 nt, Artificial Sequence
  Description of Artificial Sequence: Synthetic oligonucleotide
  Antisense strand to SEQ ID NO: 51126
cugagaauaacauuucauc

SEQ ID NO: 51208 - RNA, 19 nt, Artificial Sequence
  Description of Artificial Sequence: Synthetic oligonucleotide
  Sense strand starting at position 2453 of SEQ ID NO: 617
uuucuaaaucuccguggaa

SEQ ID NO: 51209 - RNA, 19 nt, Artificial Sequence
  Description of Artificial Sequence: Synthetic oligonucleotide
  Antisense strand to SEQ ID NO: 51128
uuccacggagauuuagaaa

SEQ ID NO: 51210 - RNA, 19 nt, Artificial Sequence
  Description of Artificial Sequence: Synthetic oligonucleotide
  Sense strand starting at position 2454 of SEQ ID NO: 617
uucuaaaucuccguggaau

SEQ ID NO: 51211 - RNA, 19 nt, Artificial Sequence
  Description of Artificial Sequence: Synthetic oligonucleotide
  Antisense strand to SEQ ID NO: 51130
auuccacggagauuuagaa

SEQ ID NO: 51212 - RNA, 19 nt, Artificial Sequence
  Description of Artificial Sequence: Synthetic oligonucleotide
  Sense strand starting at position 2455 of SEQ ID NO: 617
ucuaaaucuccguggaaua

SEQ ID NO: 51213 - RNA, 19 nt, Artificial Sequence
  Description of Artificial Sequence: Synthetic oligonucleotide
  Antisense strand to SEQ ID NO: 51132
uauuccacggagauuuaga

SEQ ID NO: 51214 - RNA, 19 nt, Artificial Sequence
  Description of Artificial Sequence: Synthetic oligonucleotide
  Sense strand starting at position 2456 of SEQ ID NO: 617
cuaaaucuccguggaauac

SEQ ID NO: 51215 - RNA, 19 nt, Artificial Sequence
  Description of Artificial Sequence: Synthetic oligonucleotide
  Antisense strand to SEQ ID NO: 51134
guauuccacggagauuuag

SEQ ID NO: 51216 - RNA, 19 nt, Artificial Sequence
  Description of Artificial Sequence: Synthetic oligonucleotide
  Sense strand starting at position 2457 of SEQ ID NO: 617
uaaaucuccguggaauaca

SEQ ID NO: 51217 - RNA, 19 nt, Artificial Sequence
  Description of Artificial Sequence: Synthetic oligonucleotide
  Antisense strand to SEQ ID NO: 51136
uguauuccacggagauuua

SEQ ID NO: 51218 - RNA, 19 nt, Artificial Sequence
  Description of Artificial Sequence: Synthetic oligonucleotide
  Sense strand starting at position 2462 of SEQ ID NO: 617
cuccguggaauacaugaau

SEQ ID NO: 51219 - RNA, 19 nt, Artificial Sequence
  Description of Artificial Sequence: Synthetic oligonucleotide
  Antisense strand to SEQ ID NO: 51138
auucauguauuccacggag

SEQ ID NO: 51220 - RNA, 19 nt, Artificial Sequence
  Description of Artificial Sequence: Synthetic oligonucleotide
  Sense strand starting at position 2613 of SEQ ID NO: 617
uccagaagcccugguaacu

SEQ ID NO: 51221 - RNA, 19 nt, Artificial Sequence
  Description of Artificial Sequence: Synthetic oligonucleotide
  Antisense strand to SEQ ID NO: 51140
aguuaccagggcuucugga

SEQ ID NO: 51222 - RNA, 19 nt, Artificial Sequence
  Description of Artificial Sequence: Synthetic oligonucleotide
  Sense strand starting at position 2622 of SEQ ID NO: 617
ccugguaacucucuagaca

SEQ ID NO: 51223 - RNA, 19 nt, Artificial Sequence
  Description of Artificial Sequence: Synthetic oligonucleotide
  Antisense strand to SEQ ID NO: 51142
ugucuagagaguuaccagg

SEQ ID NO: 51224 - RNA, 19 nt, Artificial Sequence
  Description of Artificial Sequence: Synthetic oligonucleotide
  Sense strand starting at position 2623 of SEQ ID NO: 617
cugguaacucucuagacau

SEQ ID NO: 51225 - RNA, 19 nt, Artificial Sequence
  Description of Artificial Sequence: Synthetic oligonucleotide
  Antisense strand to SEQ ID NO: 51144
augucuagagaguuaccag

SEQ ID NO: 51226 - RNA, 19 nt, Artificial Sequence
  Description of Artificial Sequence: Synthetic oligonucleotide
  Sense strand starting at position 2725 of SEQ ID NO: 617
auggguaaugucggugaac

SEQ ID NO: 51227 - RNA, 19 nt, Artificial Sequence
  Description of Artificial Sequence: Synthetic oligonucleotide
  Antisense strand to SEQ ID NO: 51146
guucaccgacauuacccau

SEQ ID NO: 51228 - RNA, 19 nt, Artificial Sequence
  Description of Artificial Sequence: Synthetic oligonucleotide
  Sense strand starting at position 2728 of SEQ ID NO: 617
gguaaugucggugaacuuc

SEQ ID NO: 51229 - RNA, 19 nt, Artificial Sequence
  Description of Artificial Sequence: Synthetic oligonucleotide
  Antisense strand to SEQ ID NO: 51148
gaaguucaccgacauuacc

SEQ ID NO: 51230 - RNA, 19 nt, Artificial Sequence
  Description of Artificial Sequence: Synthetic oligonucleotide
  Sense strand starting at position 2859 of SEQ ID NO: 617
aggaacugcuuucuguaca

SEQ ID NO: 51231 - RNA, 19 nt, Artificial Sequence
  Description of Artificial Sequence: Synthetic oligonucleotide
  Antisense strand to SEQ ID NO: 51150
uguacagaaagcaguuccu

SEQ ID NO: 51232 - RNA, 19 nt, Artificial Sequence
  Description of Artificial Sequence: Synthetic oligonucleotide
  Sense strand starting at position 2915 of SEQ ID NO: 617
acgagcugauugguuucaa

SEQ ID NO: 51233 - RNA, 19 nt, Artificial Sequence
  Description of Artificial Sequence: Synthetic oligonucleotide
  Antisense strand to SEQ ID NO: 51152
uugaaaccaaucagcucgu

SEQ ID NO: 51234 - RNA, 19 nt, Artificial Sequence
  Description of Artificial Sequence: Synthetic oligonucleotide
  Sense strand starting at position 2916 of SEQ ID NO: 617
cgagcugauugguuucaaa

SEQ ID NO: 51235 - RNA, 19 nt, Artificial Sequence
  Description of Artificial Sequence: Synthetic oligonucleotide
  Antisense strand to SEQ ID NO: 51154
uuugaaaccaaucagcucg

SEQ ID NO: 51236 - RNA, 19 nt, Artificial Sequence
  Description of Artificial Sequence: Synthetic oligonucleotide
  Sense strand starting at position 3034 of SEQ ID NO: 617
ggguguaauccucacaaca

SEQ ID NO: 51237 - RNA, 19 nt, Artificial Sequence
  Description of Artificial Sequence: Synthetic oligonucleotide
  Antisense strand to SEQ ID NO: 51156
uguugugaggauuacaccc

SEQ ID NO: 51238 - RNA, 19 nt, Artificial Sequence
  Description of Artificial Sequence: Synthetic oligonucleotide
  Sense strand starting at position 3591 of SEQ ID NO: 617
gucgcugugccugauuuca

SEQ ID NO: 51239 - RNA, 19 nt, Artificial Sequence
  Description of Artificial Sequence: Synthetic oligonucleotide
  Antisense strand to SEQ ID NO: 51158
ugaaaucaggcacagcgac

SEQ ID NO: 51240 - RNA, 19 nt, Artificial Sequence
  Description of Artificial Sequence: Synthetic oligonucleotide
  Sense strand starting at position 3593 of SEQ ID NO: 617
cgcugugccugauuucaga

SEQ ID NO: 51241 - RNA, 19 nt, Artificial Sequence
  Description of Artificial Sequence: Synthetic oligonucleotide
  Antisense strand to SEQ ID NO: 51160
ucugaaaucaggcacagcg

SEQ ID NO: 51242 - RNA, 19 nt, Artificial Sequence
  Description of Artificial Sequence: Synthetic oligonucleotide
  Sense strand starting at position 3613 of SEQ ID NO: 617
ccgguuucugcgguaaacu

SEQ ID NO: 51243 - RNA, 19 nt, Artificial Sequence
  Description of Artificial Sequence: Synthetic oligonucleotide
  Antisense strand to SEQ ID NO: 51162
aguuuaccgcagaaaccgg

SEQ ID NO: 51244 - RNA, 19 nt, Artificial Sequence
  Description of Artificial Sequence: Synthetic oligonucleotide
  Sense strand starting at position 3623 of SEQ ID NO: 617
cgguaaacucauggcaaag

SEQ ID NO: 51245 - RNA, 19 nt, Artificial Sequence
  Description of Artificial Sequence: Synthetic oligonucleotide
  Antisense strand to SEQ ID NO: 51164
cuuugccaugaguuuaccg

SEQ ID NO: 51246 - RNA, 19 nt, Artificial Sequence
  Description of Artificial Sequence: Synthetic oligonucleotide
  Sense strand starting at position 179 of SEQ ID NO: 618
agacuagcagucuauaaau

SEQ ID NO: 51247 - RNA, 19 nt, Artificial Sequence
  Description of Artificial Sequence: Synthetic oligonucleotide
  Antisense strand to SEQ ID NO: 51166
auuuauagacugcuagucu

SEQ ID NO: 51248 - RNA, 19 nt, Artificial Sequence
  Description of Artificial Sequence: Synthetic oligonucleotide
  Sense strand starting at position 297 of SEQ ID NO: 618
agaggaagcaucugaaugu

SEQ ID NO: 51249 - RNA, 19 nt, Artificial Sequence
  Description of Artificial Sequence: Synthetic oligonucleotide
  Antisense strand to SEQ ID NO: 51168
acauucagaugcuuccucu

SEQ ID NO: 51250 - RNA, 19 nt, Artificial Sequence
  Description of Artificial Sequence: Synthetic oligonucleotide
  Sense strand starting at position 301 of SEQ ID NO: 618
gaagcaucugaauguagca

SEQ ID NO: 51251 - RNA, 19 nt, Artificial Sequence
  Description of Artificial Sequence: Synthetic oligonucleotide
  Antisense strand to SEQ ID NO: 51170
ugcuacauucagaugcuuc

SEQ ID NO: 51252 - RNA, 19 nt, Artificial Sequence
  Description of Artificial Sequence: Synthetic oligonucleotide
  Sense strand starting at position 317 of SEQ ID NO: 618
gcaguuccucuaggaauua

SEQ ID NO: 51253 - RNA, 19 nt, Artificial Sequence
  Description of Artificial Sequence: Synthetic oligonucleotide
  Antisense strand to SEQ ID NO: 51172
uaauuccuagaggaacugc

SEQ ID NO: 51254 - RNA, 19 nt, Artificial Sequence
  Description of Artificial Sequence: Synthetic oligonucleotide
  Sense strand starting at position 1639 of SEQ ID NO: 618
cuaagacuguacuuugaac

SEQ ID NO: 51255 - RNA, 19 nt, Artificial Sequence
  Description of Artificial Sequence: Synthetic oligonucleotide
  Antisense strand to SEQ ID NO: 51174
guucaaaguacagucuuag

SEQ ID NO: 51256 - RNA, 19 nt, Artificial Sequence
  Description of Artificial Sequence: Synthetic oligonucleotide
  Sense strand starting at position 1739 of SEQ ID NO: 618
uuaauuacaugggcuauaa

SEQ ID NO: 51257 - RNA, 19 nt, Artificial Sequence
  Description of Artificial Sequence: Synthetic oligonucleotide
  Antisense strand to SEQ ID NO: 51176
uuauagcccauguaauuaa

SEQ ID NO: 51258 - RNA, 19 nt, Artificial Sequence
  Description of Artificial Sequence: Synthetic oligonucleotide
  Sense strand starting at position 1743 of SEQ ID NO: 618
uuacaugggcuauaaacuu

SEQ ID NO: 51259 - RNA, 19 nt, Artificial Sequence
  Description of Artificial Sequence: Synthetic oligonucleotide
  Antisense strand to SEQ ID NO: 51178
aaguuuauagcccauguaa

SEQ ID NO: 51260 - RNA, 19 nt, Artificial Sequence
  Description of Artificial Sequence: Synthetic oligonucleotide
  Sense strand starting at position 1759 of SEQ ID NO: 618
cuuaaucugucacugaaug

SEQ ID NO: 51261 - RNA, 19 nt, Artificial Sequence
  Description of Artificial Sequence: Synthetic oligonucleotide
  Antisense strand to SEQ ID NO: 51180
cauucagugacagauuaag

SEQ ID NO: 51262 - RNA, 19 nt, Artificial Sequence
  Description of Artificial Sequence: Synthetic oligonucleotide
  Sense strand starting at position 1760 of SEQ ID NO: 618
uuaaucugucacugaaugu

SEQ ID NO: 51263 - RNA, 19 nt, Artificial Sequence
  Description of Artificial Sequence: Synthetic oligonucleotide
  Antisense strand to SEQ ID NO: 51182
acauucagugacagauuaa

SEQ ID NO: 51264 - RNA, 19 nt, Artificial Sequence
  Description of Artificial Sequence: Synthetic oligonucleotide
  Sense strand starting at position 1806 of SEQ ID NO: 618
ugaacaauuucuguugcuu

SEQ ID NO: 51265 - RNA, 19 nt, Artificial Sequence
  Description of Artificial Sequence: Synthetic oligonucleotide
  Antisense strand to SEQ ID NO: 51184
aagcaacagaaauuguuca

SEQ ID NO: 51266 - RNA, 19 nt, Artificial Sequence
  Description of Artificial Sequence: Synthetic oligonucleotide
  Sense strand starting at position 1835 of SEQ ID NO: 618
uugcacauuccugaguacu

SEQ ID NO: 51267 - RNA, 19 nt, Artificial Sequence
  Description of Artificial Sequence: Synthetic oligonucleotide
  Antisense strand to SEQ ID NO: 51186
aguacucaggaaugugcaa

SEQ ID NO: 51268 - RNA, 19 nt, Artificial Sequence
  Description of Artificial Sequence: Synthetic oligonucleotide
  Sense strand starting at position 1837 of SEQ ID NO: 618
gcacauuccugaguacuaa

SEQ ID NO: 51269 - RNA, 19 nt, Artificial Sequence
  Description of Artificial Sequence: Synthetic oligonucleotide
  Antisense strand to SEQ ID NO: 51188
uuaguacucaggaaugugc

SEQ ID NO: 51270 - RNA, 19 nt, Artificial Sequence
  Description of Artificial Sequence: Synthetic oligonucleotide
  Sense strand starting at position 1919 of SEQ ID NO: 618
uucguuugccagcuagauu

SEQ ID NO: 51271 - RNA, 19 nt, Artificial Sequence
  Description of Artificial Sequence: Synthetic oligonucleotide
  Antisense strand to SEQ ID NO: 51190
aaucuagcuggcaaacgaa

SEQ ID NO: 51272 - RNA, 19 nt, Artificial Sequence
  Description of Artificial Sequence: Synthetic oligonucleotide
  Sense strand starting at position 1930 of SEQ ID NO: 618
gcuagauuaccuugggaaa

SEQ ID NO: 51273 - RNA, 19 nt, Artificial Sequence
  Description of Artificial Sequence: Synthetic oligonucleotide
  Antisense strand to SEQ ID NO: 51192
uuucccaagguaaucuagc

SEQ ID NO: 51274 - RNA, 19 nt, Artificial Sequence
  Description of Artificial Sequence: Synthetic oligonucleotide
  Sense strand starting at position 1947 of SEQ ID NO: 618
aaaugaugugaucgcucca

SEQ ID NO: 51275 - RNA, 19 nt, Artificial Sequence
  Description of Artificial Sequence: Synthetic oligonucleotide
  Antisense strand to SEQ ID NO: 51194
uggagcgaucacaucauuu

SEQ ID NO: 51276 - RNA, 19 nt, Artificial Sequence
  Description of Artificial Sequence: Synthetic oligonucleotide
  Sense strand starting at position 1952 of SEQ ID NO: 618
augugaucgcuccaaacuu

SEQ ID NO: 51277 - RNA, 19 nt, Artificial Sequence
  Description of Artificial Sequence: Synthetic oligonucleotide
  Antisense strand to SEQ ID NO: 51196
aaguuuggagcgaucacau

SEQ ID NO: 51278 - RNA, 19 nt, Artificial Sequence
  Description of Artificial Sequence: Synthetic oligonucleotide
  Sense strand starting at position 1979 of SEQ ID NO: 618
ucaucaauacucuguggga

SEQ ID NO: 51279 - RNA, 19 nt, Artificial Sequence
  Description of Artificial Sequence: Synthetic oligonucleotide
  Antisense strand to SEQ ID NO: 51198
ucccacagaguauugauga

SEQ ID NO: 51280 - RNA, 19 nt, Artificial Sequence
  Description of Artificial Sequence: Synthetic oligonucleotide
  Sense strand starting at position 1980 of SEQ ID NO: 618
caucaauacucugugggau

SEQ ID NO: 51281 - RNA, 19 nt, Artificial Sequence
  Description of Artificial Sequence: Synthetic oligonucleotide
  Antisense strand to SEQ ID NO: 51200
aucccacagaguauugaug

SEQ ID NO: 51282 - RNA, 19 nt, Artificial Sequence
  Description of Artificial Sequence: Synthetic oligonucleotide
  Sense strand starting at position 1981 of SEQ ID NO: 618
aucaauacucugugggauu

SEQ ID NO: 51283 - RNA, 19 nt, Artificial Sequence
  Description of Artificial Sequence: Synthetic oligonucleotide
  Antisense strand to SEQ ID NO: 51202
aaucccacagaguauugau

SEQ ID NO: 51284 - RNA, 19 nt, Artificial Sequence
  Description of Artificial Sequence: Synthetic oligonucleotide
  Sense strand starting at position 2026 of SEQ ID NO: 618
uuaugaugggcuuagcaca

SEQ ID NO: 51285 - RNA, 19 nt, Artificial Sequence
  Description of Artificial Sequence: Synthetic oligonucleotide
  Antisense strand to SEQ ID NO: 51204
ugugcuaagcccaucauaa

SEQ ID NO: 51286 - RNA, 19 nt, Artificial Sequence
  Description of Artificial Sequence: Synthetic oligonucleotide
  Sense strand starting at position 2107 of SEQ ID NO: 618
guggacuauccaggugaca

SEQ ID NO: 51287 - RNA, 19 nt, Artificial Sequence
  Description of Artificial Sequence: Synthetic oligonucleotide
  Antisense strand to SEQ ID NO: 51206
ugucaccuggauaguccac

SEQ ID NO: 51288 - RNA, 19 nt, Artificial Sequence
  Description of Artificial Sequence: Synthetic oligonucleotide
  Sense strand starting at position 2109 of SEQ ID NO: 618
ggacuauccaggugacaca

SEQ ID NO: 51289 - RNA, 19 nt, Artificial Sequence
  Description of Artificial Sequence: Synthetic oligonucleotide
  Antisense strand to SEQ ID NO: 51208
ugugucaccuggauagucc

SEQ ID NO: 51290 - RNA, 19 nt, Artificial Sequence
  Description of Artificial Sequence: Synthetic oligonucleotide
  Sense strand starting at position 2404 of SEQ ID NO: 618
gaaugucucucugccauga

SEQ ID NO: 51291 - RNA, 19 nt, Artificial Sequence
  Description of Artificial Sequence: Synthetic oligonucleotide
  Antisense strand to SEQ ID NO: 51210
ucauggcagagagacauuc

SEQ ID NO: 51292 - RNA, 19 nt, Artificial Sequence
  Description of Artificial Sequence: Synthetic oligonucleotide
  Sense strand starting at position 2421 of SEQ ID NO: 618
gaaagcuguuaauucugau

SEQ ID NO: 51293 - RNA, 19 nt, Artificial Sequence
  Description of Artificial Sequence: Synthetic oligonucleotide
  Antisense strand to SEQ ID NO: 51212
aucagaauuaacagcuuuc

SEQ ID NO: 51294 - RNA, 19 nt, Artificial Sequence
  Description of Artificial Sequence: Synthetic oligonucleotide
  Sense strand starting at position 2685 of SEQ ID NO: 618
gcaagacucuucuccaaag

SEQ ID NO: 51295 - RNA, 19 nt, Artificial Sequence
  Description of Artificial Sequence: Synthetic oligonucleotide
  Antisense strand to SEQ ID NO: 51214
cuuuggagaagagucuugc

SEQ ID NO: 51296 - RNA, 19 nt, Artificial Sequence
  Description of Artificial Sequence: Synthetic oligonucleotide
  Sense strand starting at position 2751 of SEQ ID NO: 618
gaaugaucugaugguuauc

SEQ ID NO: 51297 - RNA, 19 nt, Artificial Sequence
  Description of Artificial Sequence: Synthetic oligonucleotide
  Antisense strand to SEQ ID NO: 51216
gauaaccaucagaucauuc

SEQ ID NO: 51298 - RNA, 19 nt, Artificial Sequence
  Description of Artificial Sequence: Synthetic oligonucleotide
  Sense strand starting at position 2753 of SEQ ID NO: 618
augaucugaugguuaucaa

SEQ ID NO: 51299 - RNA, 19 nt, Artificial Sequence
  Description of Artificial Sequence: Synthetic oligonucleotide
  Antisense strand to SEQ ID NO: 51218
uugauaaccaucagaucau

SEQ ID NO: 51300 - RNA, 19 nt, Artificial Sequence
  Description of Artificial Sequence: Synthetic oligonucleotide
  Sense strand starting at position 2756 of SEQ ID NO: 618
aucugaugguuaucaacag

SEQ ID NO: 51301 - RNA, 19 nt, Artificial Sequence
  Description of Artificial Sequence: Synthetic oligonucleotide
  Antisense strand to SEQ ID NO: 51220
cuguugauaaccaucagau

SEQ ID NO: 51302 - RNA, 19 nt, Artificial Sequence
  Description of Artificial Sequence: Synthetic oligonucleotide
  Sense strand starting at position 2969 of SEQ ID NO: 618
caggucuuccagugaacag

SEQ ID NO: 51303 - RNA, 19 nt, Artificial Sequence
  Description of Artificial Sequence: Synthetic oligonucleotide
  Antisense strand to SEQ ID NO: 51222
cuguucacuggaagaccug

SEQ ID NO: 51304 - RNA, 19 nt, Artificial Sequence
  Description of Artificial Sequence: Synthetic oligonucleotide
  Sense strand starting at position 2979 of SEQ ID NO: 618
agugaacagcaaugaauaa

SEQ ID NO: 51305 - RNA, 19 nt, Artificial Sequence
  Description of Artificial Sequence: Synthetic oligonucleotide
  Antisense strand to SEQ ID NO: 51224
uuauucauugcuguucacu

SEQ ID NO: 51306 - RNA, 19 nt, Artificial Sequence
  Description of Artificial Sequence: Synthetic oligonucleotide
  Sense strand starting at position 3190 of SEQ ID NO: 618
uggauacccaugugaaguc

SEQ ID NO: 51307 - RNA, 19 nt, Artificial Sequence
  Description of Artificial Sequence: Synthetic oligonucleotide
  Antisense strand to SEQ ID NO: 51226
gacuucacauggguaucca

SEQ ID NO: 51308 - RNA, 19 nt, Artificial Sequence
  Description of Artificial Sequence: Synthetic oligonucleotide
  Sense strand starting at position 3400 of SEQ ID NO: 618
agcacauucuauguucuua

SEQ ID NO: 51309 - RNA, 19 nt, Artificial Sequence
  Description of Artificial Sequence: Synthetic oligonucleotide
  Antisense strand to SEQ ID NO: 51228
uaagaacauagaaugugcu

SEQ ID NO: 51310 - RNA, 19 nt, Artificial Sequence
  Description of Artificial Sequence: Synthetic oligonucleotide
  Sense strand starting at position 3408 of SEQ ID NO: 618
cuauguucuuauguagaag

SEQ ID NO: 51311 - RNA, 19 nt, Artificial Sequence
  Description of Artificial Sequence: Synthetic oligonucleotide
  Antisense strand to SEQ ID NO: 51230
cuucuacauaagaacauag

SEQ ID NO: 51312 - RNA, 19 nt, Artificial Sequence
  Description of Artificial Sequence: Synthetic oligonucleotide
  Sense strand starting at position 3477 of SEQ ID NO: 618
cuacuuauccaguaucgua

SEQ ID NO: 51313 - RNA, 19 nt, Artificial Sequence
  Description of Artificial Sequence: Synthetic oligonucleotide
  Antisense strand to SEQ ID NO: 51232
uacgauacuggauaaguag

SEQ ID NO: 51314 - RNA, 19 nt, Artificial Sequence
  Description of Artificial Sequence: Synthetic oligonucleotide
  Sense strand starting at position 3579 of SEQ ID NO: 618
aaauaaaugugagugguaa

SEQ ID NO: 51315 - RNA, 19 nt, Artificial Sequence
  Description of Artificial Sequence: Synthetic oligonucleotide
  Antisense strand to SEQ ID NO: 51234
uuaccacucacauuuauuu

SEQ ID NO: 51316 - RNA, 19 nt, Artificial Sequence
  Description of Artificial Sequence: Synthetic oligonucleotide
  Sense strand starting at position 3580 of SEQ ID NO: 618
aauaaaugugagugguaaa

SEQ ID NO: 51317 - RNA, 19 nt, Artificial Sequence
  Description of Artificial Sequence: Synthetic oligonucleotide
  Antisense strand to SEQ ID NO: 51236
uuuaccacucacauuuauu

SEQ ID NO: 51318 - RNA, 19 nt, Artificial Sequence
  Description of Artificial Sequence: Synthetic oligonucleotide
  Sense strand starting at position 3856 of SEQ ID NO: 618
ucaugucugguuuaauggu

SEQ ID NO: 51319 - RNA, 19 nt, Artificial Sequence
  Description of Artificial Sequence: Synthetic oligonucleotide
  Antisense strand to SEQ ID NO: 51238
accauuaaaccagacauga

SEQ ID NO: 51320 - RNA, 19 nt, Artificial Sequence
  Description of Artificial Sequence: Synthetic oligonucleotide
  Sense strand starting at position 3910 of SEQ ID NO: 618
gcuuucuuaggcugaauga

SEQ ID NO: 51321 - RNA, 19 nt, Artificial Sequence
  Description of Artificial Sequence: Synthetic oligonucleotide
  Antisense strand to SEQ ID NO: 51240
ucauucagccuaagaaagc

SEQ ID NO: 51322 - RNA, 19 nt, Artificial Sequence
  Description of Artificial Sequence: Synthetic oligonucleotide
  Sense strand starting at position 3911 of SEQ ID NO: 618
cuuucuuaggcugaaugau

SEQ ID NO: 51323 - RNA, 19 nt, Artificial Sequence
  Description of Artificial Sequence: Synthetic oligonucleotide
  Antisense strand to SEQ ID NO: 51242
aucauucagccuaagaaag

SEQ ID NO: 51324 - RNA, 19 nt, Artificial Sequence
  Description of Artificial Sequence: Synthetic oligonucleotide
  Sense strand starting at position 3979 of SEQ ID NO: 618
acaugugcuucugcauuua

SEQ ID NO: 51325 - RNA, 19 nt, Artificial Sequence
  Description of Artificial Sequence: Synthetic oligonucleotide
  Antisense strand to SEQ ID NO: 51244
uaaaugcagaagcacaugu

SEQ ID NO: 51326 - RNA, 19 nt, Artificial Sequence
  Description of Artificial Sequence: Synthetic oligonucleotide
  Sense strand starting at position 3821 of SEQ ID NO: 621
auaaacucugagugcaauu

SEQ ID NO: 51327 - RNA, 19 nt, Artificial Sequence
  Description of Artificial Sequence: Synthetic oligonucleotide
  Antisense strand to SEQ ID NO: 51246
aauugcacucagaguuuau

SEQ ID NO: 51328 - RNA, 19 nt, Artificial Sequence
  Description of Artificial Sequence: Synthetic oligonucleotide
  Sense strand starting at position 3753 of SEQ ID NO: 621
agguuaaaguguucuaaau

SEQ ID NO: 51329 - RNA, 19 nt, Artificial Sequence
  Description of Artificial Sequence: Synthetic oligonucleotide
  Antisense strand to SEQ ID NO: 51248
auuuagaacacuuuaaccu

SEQ ID NO: 51330 - RNA, 19 nt, Artificial Sequence
  Description of Artificial Sequence: Synthetic oligonucleotide
  Sense strand starting at position 3730 of SEQ ID NO: 621
cuguguacugagggugaau

SEQ ID NO: 51331 - RNA, 19 nt, Artificial Sequence
  Description of Artificial Sequence: Synthetic oligonucleotide
  Antisense strand to SEQ ID NO: 51250
auucacccucaguacacag

SEQ ID NO: 51332 - RNA, 19 nt, Artificial Sequence
  Description of Artificial Sequence: Synthetic oligonucleotide
  Sense strand starting at position 3691 of SEQ ID NO: 621
uguccugugagucacaaua

SEQ ID NO: 51333 - RNA, 19 nt, Artificial Sequence
  Description of Artificial Sequence: Synthetic oligonucleotide
  Antisense strand to SEQ ID NO: 51252
uauugugacucacaggaca

SEQ ID NO: 51334 - RNA, 19 nt, Artificial Sequence
  Description of Artificial Sequence: Synthetic oligonucleotide
  Sense strand starting at position 3632 of SEQ ID NO: 621
guggaacaauacucaguua

SEQ ID NO: 51335 - RNA, 19 nt, Artificial Sequence
  Description of Artificial Sequence: Synthetic oligonucleotide
  Antisense strand to SEQ ID NO: 51254
uaacugaguauuguuccac

SEQ ID NO: 51336 - RNA, 19 nt, Artificial Sequence
  Description of Artificial Sequence: Synthetic oligonucleotide
  Sense strand starting at position 3545 of SEQ ID NO: 621
uagacuugaguaugaauac

SEQ ID NO: 51337 - RNA, 19 nt, Artificial Sequence
  Description of Artificial Sequence: Synthetic oligonucleotide
  Antisense strand to SEQ ID NO: 51256
guauucauacucaagucua

SEQ ID NO: 51338 - RNA, 19 nt, Artificial Sequence
  Description of Artificial Sequence: Synthetic oligonucleotide
  Sense strand starting at position 3513 of SEQ ID NO: 621
acaauauguguuggguaca

SEQ ID NO: 51339 - RNA, 19 nt, Artificial Sequence
  Description of Artificial Sequence: Synthetic oligonucleotide
  Antisense strand to SEQ ID NO: 51258
uguacccaacacauauugu

SEQ ID NO: 51340 - RNA, 19 nt, Artificial Sequence
  Description of Artificial Sequence: Synthetic oligonucleotide
  Sense strand starting at position 3279 of SEQ ID NO: 621
uagaguugacagugagaca

SEQ ID NO: 51341 - RNA, 19 nt, Artificial Sequence
  Description of Artificial Sequence: Synthetic oligonucleotide
  Antisense strand to SEQ ID NO: 51260
ugucucacugucaacucua

SEQ ID NO: 51342 - RNA, 19 nt, Artificial Sequence
  Description of Artificial Sequence: Synthetic oligonucleotide
  Sense strand starting at position 3273 of SEQ ID NO: 621
uuugacuagaguugacagu

SEQ ID NO: 51343 - RNA, 19 nt, Artificial Sequence
  Description of Artificial Sequence: Synthetic oligonucleotide
  Antisense strand to SEQ ID NO: 51262
acugucaacucuagucaaa

SEQ ID NO: 51344 - RNA, 19 nt, Artificial Sequence
  Description of Artificial Sequence: Synthetic oligonucleotide
  Sense strand starting at position 3267 of SEQ ID NO: 621
uuaaucuuugacuagaguu

SEQ ID NO: 51345 - RNA, 19 nt, Artificial Sequence
  Description of Artificial Sequence: Synthetic oligonucleotide
  Antisense strand to SEQ ID NO: 51264
aacucuagucaaagauuaa

SEQ ID NO: 51346 - RNA, 19 nt, Artificial Sequence
  Description of Artificial Sequence: Synthetic oligonucleotide
  Sense strand starting at position 3266 of SEQ ID NO: 621
uuuaaucuuugacuagagu

SEQ ID NO: 51347 - RNA, 19 nt, Artificial Sequence
  Description of Artificial Sequence: Synthetic oligonucleotide
  Antisense strand to SEQ ID NO: 51266
acucuagucaaagauuaaa

SEQ ID NO: 51348 - RNA, 19 nt, Artificial Sequence
  Description of Artificial Sequence: Synthetic oligonucleotide
  Sense strand starting at position 3121 of SEQ ID NO: 621
aguggcuuaccugagaagu

SEQ ID NO: 51349 - RNA, 19 nt, Artificial Sequence
  Description of Artificial Sequence: Synthetic oligonucleotide
  Antisense strand to SEQ ID NO: 51268
acuucucagguaagccacu

SEQ ID NO: 51350 - RNA, 19 nt, Artificial Sequence
  Description of Artificial Sequence: Synthetic oligonucleotide
  Sense strand starting at position 3118 of SEQ ID NO: 621
uuaaguggcuuaccugaga

SEQ ID NO: 51351 - RNA, 19 nt, Artificial Sequence
  Description of Artificial Sequence: Synthetic oligonucleotide
  Antisense strand to SEQ ID NO: 51270
ucucagguaagccacuuaa

SEQ ID NO: 51352 - RNA, 19 nt, Artificial Sequence
  Description of Artificial Sequence: Synthetic oligonucleotide
  Sense strand starting at position 3020 of SEQ ID NO: 621
uauggugagguauacaguu

SEQ ID NO: 51353 - RNA, 19 nt, Artificial Sequence
  Description of Artificial Sequence: Synthetic oligonucleotide
  Antisense strand to SEQ ID NO: 51272
aacuguauaccucaccaua

SEQ ID NO: 51354 - RNA, 19 nt, Artificial Sequence
  Description of Artificial Sequence: Synthetic oligonucleotide
  Sense strand starting at position 3002 of SEQ ID NO: 621
agagacauuuagcaagugu

SEQ ID NO: 51355 - RNA, 19 nt, Artificial Sequence
  Description of Artificial Sequence: Synthetic oligonucleotide
  Antisense strand to SEQ ID NO: 51274
acacuugcuaaaugucucu

SEQ ID NO: 51356 - RNA, 19 nt, Artificial Sequence
  Description of Artificial Sequence: Synthetic oligonucleotide
  Sense strand starting at position 2987 of SEQ ID NO: 621
uuaagagauuugcaaagag

SEQ ID NO: 51357 - RNA, 19 nt, Artificial Sequence
  Description of Artificial Sequence: Synthetic oligonucleotide
  Antisense strand to SEQ ID NO: 51276
cucuuugcaaaucucuuaa

SEQ ID NO: 51358 - RNA, 19 nt, Artificial Sequence
  Description of Artificial Sequence: Synthetic oligonucleotide
  Sense strand starting at position 2979 of SEQ ID NO: 621
uuggccucuuaagagauuu

SEQ ID NO: 51359 - RNA, 19 nt, Artificial Sequence
  Description of Artificial Sequence: Synthetic oligonucleotide
  Antisense strand to SEQ ID NO: 51278
aaaucucuuaagaggccaa

SEQ ID NO: 51360 - RNA, 19 nt, Artificial Sequence
  Description of Artificial Sequence: Synthetic oligonucleotide
  Sense strand starting at position 2636 of SEQ ID NO: 621
auacaaguuugucucagaa

SEQ ID NO: 51361 - RNA, 19 nt, Artificial Sequence
  Description of Artificial Sequence: Synthetic oligonucleotide
  Antisense strand to SEQ ID NO: 51280
uucugagacaaacuuguau

SEQ ID NO: 51362 - RNA, 19 nt, Artificial Sequence
  Description of Artificial Sequence: Synthetic oligonucleotide
  Sense strand starting at position 2416 of SEQ ID NO: 621
ucuagacaguugcuuucua

SEQ ID NO: 51363 - RNA, 19 nt, Artificial Sequence
  Description of Artificial Sequence: Synthetic oligonucleotide
  Antisense strand to SEQ ID NO: 51282
uagaaagcaacugucuaga

SEQ ID NO: 51364 - RNA, 19 nt, Artificial Sequence
  Description of Artificial Sequence: Synthetic oligonucleotide
  Sense strand starting at position 2408 of SEQ ID NO: 621
cuuaucuuucuagacaguu

SEQ ID NO: 51365 - RNA, 19 nt, Artificial Sequence
  Description of Artificial Sequence: Synthetic oligonucleotide
  Antisense strand to SEQ ID NO: 51284
aacugucuagaaagauaag

SEQ ID NO: 51366 - RNA, 19 nt, Artificial Sequence
  Description of Artificial Sequence: Synthetic oligonucleotide
  Sense strand starting at position 2142 of SEQ ID NO: 621
uuuggugaccucuacaaca

SEQ ID NO: 51367 - RNA, 19 nt, Artificial Sequence
  Description of Artificial Sequence: Synthetic oligonucleotide
  Antisense strand to SEQ ID NO: 51286
uguuguagaggucaccaaa

SEQ ID NO: 51368 - RNA, 19 nt, Artificial Sequence
  Description of Artificial Sequence: Synthetic oligonucleotide
  Sense strand starting at position 2121 of SEQ ID NO: 621
ccagauugacgauguuaau

SEQ ID NO: 51369 - RNA, 19 nt, Artificial Sequence
  Description of Artificial Sequence: Synthetic oligonucleotide
  Antisense strand to SEQ ID NO: 51288
auuaacaucgucaaucugg

SEQ ID NO: 51370 - RNA, 19 nt, Artificial Sequence
  Description of Artificial Sequence: Synthetic oligonucleotide
  Sense strand starting at position 1990 of SEQ ID NO: 621
ugaaauuggcucgaagcuu

SEQ ID NO: 51371 - RNA, 19 nt, Artificial Sequence
  Description of Artificial Sequence: Synthetic oligonucleotide
  Antisense strand to SEQ ID NO: 51290
aagcuucgagccaauuuca

SEQ ID NO: 51372 - RNA, 19 nt, Artificial Sequence
  Description of Artificial Sequence: Synthetic oligonucleotide
  Sense strand starting at position 1643 of SEQ ID NO: 621
gcauaagacuggucaaggu

SEQ ID NO: 51373 - RNA, 19 nt, Artificial Sequence
  Description of Artificial Sequence: Synthetic oligonucleotide
  Antisense strand to SEQ ID NO: 51292
accuugaccagucuuaugc

SEQ ID NO: 51374 - RNA, 19 nt, Artificial Sequence
  Description of Artificial Sequence: Synthetic oligonucleotide
  Sense strand starting at position 1485 of SEQ ID NO: 621
ugccuuuauguugaaggga

SEQ ID NO: 51375 - RNA, 19 nt, Artificial Sequence
  Description of Artificial Sequence: Synthetic oligonucleotide
  Antisense strand to SEQ ID NO: 51294
ucccuucaacauaaaggca

SEQ ID NO: 51376 - RNA, 19 nt, Artificial Sequence
  Description of Artificial Sequence: Synthetic oligonucleotide
  Sense strand starting at position 831 of SEQ ID NO: 621
aaacgaucagcacagugau

SEQ ID NO: 51377 - RNA, 19 nt, Artificial Sequence
  Description of Artificial Sequence: Synthetic oligonucleotide
  Antisense strand to SEQ ID NO: 51296
aucacugugcugaucguuu

SEQ ID NO: 51378 - RNA, 19 nt, Artificial Sequence
  Description of Artificial Sequence: Synthetic oligonucleotide
  Sense strand starting at position 756 of SEQ ID NO: 621
gccauuacacuuggagaug

SEQ ID NO: 51379 - RNA, 19 nt, Artificial Sequence
  Description of Artificial Sequence: Synthetic oligonucleotide
  Antisense strand to SEQ ID NO: 51298
caucuccaaguguaauggc

SEQ ID NO: 51380 - RNA, 19 nt, Artificial Sequence
  Description of Artificial Sequence: Synthetic oligonucleotide
  Sense strand starting at position 711 of SEQ ID NO: 621
guguuugcuggaagaggca

SEQ ID NO: 51381 - RNA, 19 nt, Artificial Sequence
  Description of Artificial Sequence: Synthetic oligonucleotide
  Antisense strand to SEQ ID NO: 51300
ugccucuuccagcaaacac

SEQ ID NO: 51382 - RNA, 19 nt, Artificial Sequence
  Description of Artificial Sequence: Synthetic oligonucleotide
  Sense strand starting at position 709 of SEQ ID NO: 621
guguguuugcuggaagagg

SEQ ID NO: 51383 - RNA, 19 nt, Artificial Sequence
  Description of Artificial Sequence: Synthetic oligonucleotide
  Antisense strand to SEQ ID NO: 51302
ccucuuccagcaaacacac

SEQ ID NO: 51384 - RNA, 19 nt, Artificial Sequence
  Description of Artificial Sequence: Synthetic oligonucleotide
  Sense strand starting at position 662 of SEQ ID NO: 621
ggugacauugauugucaaa

SEQ ID NO: 51385 - RNA, 19 nt, Artificial Sequence
  Description of Artificial Sequence: Synthetic oligonucleotide
  Antisense strand to SEQ ID NO: 51304
uuugacaaucaaugucacc

SEQ ID NO: 51386 - RNA, 19 nt, Artificial Sequence
  Description of Artificial Sequence: Synthetic oligonucleotide
  Sense strand starting at position 661 of SEQ ID NO: 621
cggugacauugauugucaa

SEQ ID NO: 51387 - RNA, 19 nt, Artificial Sequence
  Description of Artificial Sequence: Synthetic oligonucleotide
  Antisense strand to SEQ ID NO: 51306
uugacaaucaaugucaccg

SEQ ID NO: 51388 - RNA, 19 nt, Artificial Sequence
  Description of Artificial Sequence: Synthetic oligonucleotide
  Sense strand starting at position 604 of SEQ ID NO: 621
agucguguaauuccguuga

SEQ ID NO: 51389 - RNA, 19 nt, Artificial Sequence
  Description of Artificial Sequence: Synthetic oligonucleotide
  Antisense strand to SEQ ID NO: 51308
ucaacggaauuacacgacu

SEQ ID NO: 51390 - RNA, 19 nt, Artificial Sequence
  Description of Artificial Sequence: Synthetic oligonucleotide
  Sense strand starting at position 598 of SEQ ID NO: 621
uuuagcagucguguaauuc

SEQ ID NO: 51391 - RNA, 19 nt, Artificial Sequence
  Description of Artificial Sequence: Synthetic oligonucleotide
  Antisense strand to SEQ ID NO: 51310
gaauuacacgacugcuaaa

SEQ ID NO: 51392 - RNA, 19 nt, Artificial Sequence
  Description of Artificial Sequence: Synthetic oligonucleotide
  Sense strand starting at position 440 of SEQ ID NO: 621
acuacuucggcagaaaggu

SEQ ID NO: 51393 - RNA, 19 nt, Artificial Sequence
  Description of Artificial Sequence: Synthetic oligonucleotide
  Antisense strand to SEQ ID NO: 51312
accuuucugccgaaguagu

SEQ ID NO: 51394 - RNA, 19 nt, Artificial Sequence
  Description of Artificial Sequence: Synthetic oligonucleotide
  Sense strand starting at position 438 of SEQ ID NO: 621
uuacuacuucggcagaaag

SEQ ID NO: 51395 - RNA, 19 nt, Artificial Sequence
  Description of Artificial Sequence: Synthetic oligonucleotide
  Antisense strand to SEQ ID NO: 51314
cuuucugccgaaguaguaa

SEQ ID NO: 51396 - RNA, 19 nt, Artificial Sequence
  Description of Artificial Sequence: Synthetic oligonucleotide
  Sense strand starting at position 437 of SEQ ID NO: 621
uuuacuacuucggcagaaa

SEQ ID NO: 51397 - RNA, 19 nt, Artificial Sequence
  Description of Artificial Sequence: Synthetic oligonucleotide
  Antisense strand to SEQ ID NO: 51316
uuucugccgaaguaguaaa

SEQ ID NO: 51398 - RNA, 19 nt, Artificial Sequence
  Description of Artificial Sequence: Synthetic oligonucleotide
  Sense strand starting at position 277 of SEQ ID NO: 621
aaaccuauugcuggugaaa

SEQ ID NO: 51399 - RNA, 19 nt, Artificial Sequence
  Description of Artificial Sequence: Synthetic oligonucleotide
  Antisense strand to SEQ ID NO: 51318
uuucaccagcaauagguuu

SEQ ID NO: 51400 - RNA, 19 nt, Artificial Sequence
  Description of Artificial Sequence: Synthetic oligonucleotide
  Sense strand starting at position 219 of SEQ ID NO: 621
uaaguaagaugguuaugaa

SEQ ID NO: 51401 - RNA, 19 nt, Artificial Sequence
  Description of Artificial Sequence: Synthetic oligonucleotide
  Antisense strand to SEQ ID NO: 51320
uucauaaccaucuuacuua

SEQ ID NO: 51402 - RNA, 19 nt, Artificial Sequence
  Description of Artificial Sequence: Synthetic oligonucleotide
  Sense strand starting at position 152 of SEQ ID NO: 621
agaccacagcuuuguuaua

SEQ ID NO: 51403 - RNA, 19 nt, Artificial Sequence
  Description of Artificial Sequence: Synthetic oligonucleotide
  Antisense strand to SEQ ID NO: 51322
uauaacaaagcuguggucu

SEQ ID NO: 51404 - RNA, 19 nt, Artificial Sequence
  Description of Artificial Sequence: Synthetic oligonucleotide
  Sense strand starting at position 79 of SEQ ID NO: 621
ggucuaaucuuauuuguuu

SEQ ID NO: 51405 - RNA, 19 nt, Artificial Sequence
  Description of Artificial Sequence: Synthetic oligonucleotide
  Antisense strand to SEQ ID NO: 51324
aaacaaauaagauuagacc

SEQ ID NO: 51406 - RNA, 19 nt, Artificial Sequence
  Description of Artificial Sequence: Synthetic oligonucleotide
  Sense strand starting at position 3946 of SEQ ID NO: 620
auguaaucagccuaguaaa

SEQ ID NO: 51407 - RNA, 19 nt, Artificial Sequence
  Description of Artificial Sequence: Synthetic oligonucleotide
  Antisense strand to SEQ ID NO: 51326
uuuacuaggcugauuacau

SEQ ID NO: 51408 - RNA, 19 nt, Artificial Sequence
  Description of Artificial Sequence: Synthetic oligonucleotide
  Sense strand starting at position 3863 of SEQ ID NO: 620
gguuguaugaaauaagcua

SEQ ID NO: 51409 - RNA, 19 nt, Artificial Sequence
  Description of Artificial Sequence: Synthetic oligonucleotide
  Antisense strand to SEQ ID NO: 51328
uagcuuauuucauacaacc

SEQ ID NO: 51410 - RNA, 19 nt, Artificial Sequence
  Description of Artificial Sequence: Synthetic oligonucleotide
  Sense strand starting at position 3854 of SEQ ID NO: 620
ucaaauucugguuguauga

SEQ ID NO: 51411 - RNA, 19 nt, Artificial Sequence
  Description of Artificial Sequence: Synthetic oligonucleotide
  Antisense strand to SEQ ID NO: 51330
ucauacaaccagaauuuga

SEQ ID NO: 51412 - RNA, 19 nt, Artificial Sequence
  Description of Artificial Sequence: Synthetic oligonucleotide
  Sense strand starting at position 3853 of SEQ ID NO: 620
aucaaauucugguuguaug

SEQ ID NO: 51413 - RNA, 19 nt, Artificial Sequence
  Description of Artificial Sequence: Synthetic oligonucleotide
  Antisense strand to SEQ ID NO: 51332
cauacaaccagaauuugau

SEQ ID NO: 51414 - RNA, 19 nt, Artificial Sequence
  Description of Artificial Sequence: Synthetic oligonucleotide
  Sense strand starting at position 3708 of SEQ ID NO: 620
ggccguauuuagccauaca

SEQ ID NO: 51415 - RNA, 19 nt, Artificial Sequence
  Description of Artificial Sequence: Synthetic oligonucleotide
  Antisense strand to SEQ ID NO: 51334
uguauggcuaaauacggcc

SEQ ID NO: 51416 - RNA, 19 nt, Artificial Sequence
  Description of Artificial Sequence: Synthetic oligonucleotide
  Sense strand starting at position 3674 of SEQ ID NO: 620
agguguugacaguaauauu

SEQ ID NO: 51417 - RNA, 19 nt, Artificial Sequence
  Description of Artificial Sequence: Synthetic oligonucleotide
  Antisense strand to SEQ ID NO: 51336
aauauuacugucaacaccu

SEQ ID NO: 51418 - RNA, 19 nt, Artificial Sequence
  Description of Artificial Sequence: Synthetic oligonucleotide
  Sense strand starting at position 3501 of SEQ ID NO: 620
auuguuauauggccugauu

SEQ ID NO: 51419 - RNA, 19 nt, Artificial Sequence
  Description of Artificial Sequence: Synthetic oligonucleotide
  Antisense strand to SEQ ID NO: 51338
aaucaggccauauaacaau

SEQ ID NO: 51420 - RNA, 19 nt, Artificial Sequence
  Description of Artificial Sequence: Synthetic oligonucleotide
  Sense strand starting at position 3423 of SEQ ID NO: 620
aguugaaagcuccaaguga

SEQ ID NO: 51421 - RNA, 19 nt, Artificial Sequence
  Description of Artificial Sequence: Synthetic oligonucleotide
  Antisense strand to SEQ ID NO: 51340
ucacuuggagcuuucaacu

SEQ ID NO: 51422 - RNA, 19 nt, Artificial Sequence
  Description of Artificial Sequence: Synthetic oligonucleotide
  Sense strand starting at position 3311 of SEQ ID NO: 620
uggaacauuucugucguau

SEQ ID NO: 51423 - RNA, 19 nt, Artificial Sequence
  Description of Artificial Sequence: Synthetic oligonucleotide
  Antisense strand to SEQ ID NO: 51342
auacgacagaaauguucca

SEQ ID NO: 51424 - RNA, 19 nt, Artificial Sequence
  Description of Artificial Sequence: Synthetic oligonucleotide
  Sense strand starting at position 3294 of SEQ ID NO: 620
gaagaucugccucgaagug

SEQ ID NO: 51425 - RNA, 19 nt, Artificial Sequence
  Description of Artificial Sequence: Synthetic oligonucleotide
  Antisense strand to SEQ ID NO: 51344
cacuucgaggcagaucuuc

SEQ ID NO: 51426 - RNA, 19 nt, Artificial Sequence
  Description of Artificial Sequence: Synthetic oligonucleotide
  Sense strand starting at position 3124 of SEQ ID NO: 620
uaaugugggucuuuccuga

SEQ ID NO: 51427 - RNA, 19 nt, Artificial Sequence
  Description of Artificial Sequence: Synthetic oligonucleotide
  Antisense strand to SEQ ID NO: 51346
ucaggaaagacccacauua

SEQ ID NO: 51428 - RNA, 19 nt, Artificial Sequence
  Description of Artificial Sequence: Synthetic oligonucleotide
  Sense strand starting at position 3105 of SEQ ID NO: 620
gguagaaauuagguuuauu

SEQ ID NO: 51429 - RNA, 19 nt, Artificial Sequence
  Description of Artificial Sequence: Synthetic oligonucleotide
  Antisense strand to SEQ ID NO: 51348
aauaaaccuaauuucuacc

SEQ ID NO: 51430 - RNA, 19 nt, Artificial Sequence
  Description of Artificial Sequence: Synthetic oligonucleotide
  Sense strand starting at position 3077 of SEQ ID NO: 620
agaguuuaagggugcaacu

SEQ ID NO: 51431 - RNA, 19 nt, Artificial Sequence
  Description of Artificial Sequence: Synthetic oligonucleotide
  Antisense strand to SEQ ID NO: 51350
aguugcacccuuaaacucu

SEQ ID NO: 51432 - RNA, 19 nt, Artificial Sequence
  Description of Artificial Sequence: Synthetic oligonucleotide
  Sense strand starting at position 2869 of SEQ ID NO: 620
uaauaagaacugcgaagaa

SEQ ID NO: 51433 - RNA, 19 nt, Artificial Sequence
  Description of Artificial Sequence: Synthetic oligonucleotide
  Antisense strand to SEQ ID NO: 51352
uucuucgcaguucuuauua

SEQ ID NO: 51434 - RNA, 19 nt, Artificial Sequence
  Description of Artificial Sequence: Synthetic oligonucleotide
  Sense strand starting at position 2761 of SEQ ID NO: 620
gcaagauugucucucacua

SEQ ID NO: 51435 - RNA, 19 nt, Artificial Sequence
  Description of Artificial Sequence: Synthetic oligonucleotide
  Antisense strand to SEQ ID NO: 51354
uagugagagacaaucuugc

SEQ ID NO: 51436 - RNA, 19 nt, Artificial Sequence
  Description of Artificial Sequence: Synthetic oligonucleotide
  Sense strand starting at position 2758 of SEQ ID NO: 620
caggcaagauugucucuca

SEQ ID NO: 51437 - RNA, 19 nt, Artificial Sequence
  Description of Artificial Sequence: Synthetic oligonucleotide
  Antisense strand to SEQ ID NO: 51356
ugagagacaaucuugccug

SEQ ID NO: 51438 - RNA, 19 nt, Artificial Sequence
  Description of Artificial Sequence: Synthetic oligonucleotide
  Sense strand starting at position 2593 of SEQ ID NO: 620
auggcugguguuuaaacua

SEQ ID NO: 51439 - RNA, 19 nt, Artificial Sequence
  Description of Artificial Sequence: Synthetic oligonucleotide
  Antisense strand to SEQ ID NO: 51358
uaguuuaaacaccagccau

SEQ ID NO: 51440 - RNA, 19 nt, Artificial Sequence
  Description of Artificial Sequence: Synthetic oligonucleotide
  Sense strand starting at position 2500 of SEQ ID NO: 620
ucuagucagugagcugaau

SEQ ID NO: 51441 - RNA, 19 nt, Artificial Sequence
  Description of Artificial Sequence: Synthetic oligonucleotide
  Antisense strand to SEQ ID NO: 51360
auucagcucacugacuaga

SEQ ID NO: 51442 - RNA, 19 nt, Artificial Sequence
  Description of Artificial Sequence: Synthetic oligonucleotide
  Sense strand starting at position 2335 of SEQ ID NO: 620
gcauuaagcguccugcuga

SEQ ID NO: 51443 - RNA, 19 nt, Artificial Sequence
  Description of Artificial Sequence: Synthetic oligonucleotide
  Antisense strand to SEQ ID NO: 51362
ucagcaggacgcuuaaugc

SEQ ID NO: 51444 - RNA, 19 nt, Artificial Sequence
  Description of Artificial Sequence: Synthetic oligonucleotide
  Sense strand starting at position 2194 of SEQ ID NO: 620
cgugaauuguauuuccuug

SEQ ID NO: 51445 - RNA, 19 nt, Artificial Sequence
  Description of Artificial Sequence: Synthetic oligonucleotide
  Antisense strand to SEQ ID NO: 51364
caaggaaauacaauucacg

SEQ ID NO: 51446 - RNA, 19 nt, Artificial Sequence
  Description of Artificial Sequence: Synthetic oligonucleotide
  Sense strand starting at position 2189 of SEQ ID NO: 620
ggaagcgugaauuguauuu

SEQ ID NO: 51447 - RNA, 19 nt, Artificial Sequence
  Description of Artificial Sequence: Synthetic oligonucleotide
  Antisense strand to SEQ ID NO: 51366
aaauacaauucacgcuucc

SEQ ID NO: 51448 - RNA, 19 nt, Artificial Sequence
  Description of Artificial Sequence: Synthetic oligonucleotide
  Sense strand starting at position 2182 of SEQ ID NO: 620
cagaaauggaagcgugaau

SEQ ID NO: 51449 - RNA, 19 nt, Artificial Sequence
  Description of Artificial Sequence: Synthetic oligonucleotide
  Antisense strand to SEQ ID NO: 51368
auucacgcuuccauuucug

SEQ ID NO: 51450 - RNA, 19 nt, Artificial Sequence
  Description of Artificial Sequence: Synthetic oligonucleotide
  Sense strand starting at position 1660 of SEQ ID NO: 620
cgcuacaucagugauguga

SEQ ID NO: 51451 - RNA, 19 nt, Artificial Sequence
  Description of Artificial Sequence: Synthetic oligonucleotide
  Antisense strand to SEQ ID NO: 51370
ucacaucacugauguagcg

SEQ ID NO: 51452 - RNA, 19 nt, Artificial Sequence
  Description of Artificial Sequence: Synthetic oligonucleotide
  Sense strand starting at position 1580 of SEQ ID NO: 620
agaauccuauuguugggaa

SEQ ID NO: 51453 - RNA, 19 nt, Artificial Sequence
  Description of Artificial Sequence: Synthetic oligonucleotide
  Antisense strand to SEQ ID NO: 51372
uucccaacaauaggauucu

SEQ ID NO: 51454 - RNA, 19 nt, Artificial Sequence
  Description of Artificial Sequence: Synthetic oligonucleotide
  Sense strand starting at position 1385 of SEQ ID NO: 620
aagguauucuggccacuuu

SEQ ID NO: 51455 - RNA, 19 nt, Artificial Sequence
  Description of Artificial Sequence: Synthetic oligonucleotide
  Antisense strand to SEQ ID NO: 51374
aaaguggccagaauaccuu

SEQ ID NO: 51456 - RNA, 19 nt, Artificial Sequence
  Description of Artificial Sequence: Synthetic oligonucleotide
  Sense strand starting at position 1166 of SEQ ID NO: 620
auaaacucugagugcaauu

SEQ ID NO: 51457 - RNA, 19 nt, Artificial Sequence
  Description of Artificial Sequence: Synthetic oligonucleotide
  Antisense strand to SEQ ID NO: 51376
aauugcacucagaguuuau

SEQ ID NO: 51458 - RNA, 19 nt, Artificial Sequence
  Description of Artificial Sequence: Synthetic oligonucleotide
  Sense strand starting at position 1098 of SEQ ID NO: 620
agguuaaaguguucuaaau

SEQ ID NO: 51459 - RNA, 19 nt, Artificial Sequence
  Description of Artificial Sequence: Synthetic oligonucleotide
  Antisense strand to SEQ ID NO: 51378
auuuagaacacuuuaaccu

SEQ ID NO: 51460 - RNA, 19 nt, Artificial Sequence
  Description of Artificial Sequence: Synthetic oligonucleotide
  Sense strand starting at position 1075 of SEQ ID NO: 620
cuguguacugagggugaau

SEQ ID NO: 51461 - RNA, 19 nt, Artificial Sequence
  Description of Artificial Sequence: Synthetic oligonucleotide
  Antisense strand to SEQ ID NO: 51380
auucacccucaguacacag

SEQ ID NO: 51462 - RNA, 19 nt, Artificial Sequence
  Description of Artificial Sequence: Synthetic oligonucleotide
  Sense strand starting at position 1036 of SEQ ID NO: 620
uguccugugagucacaaua

SEQ ID NO: 51463 - RNA, 19 nt, Artificial Sequence
  Description of Artificial Sequence: Synthetic oligonucleotide
  Antisense strand to SEQ ID NO: 51382
uauugugacucacaggaca

SEQ ID NO: 51464 - RNA, 19 nt, Artificial Sequence
  Description of Artificial Sequence: Synthetic oligonucleotide
  Sense strand starting at position 977 of SEQ ID NO: 620
guggaacaauacucaguua

SEQ ID NO: 51465 - RNA, 19 nt, Artificial Sequence
  Description of Artificial Sequence: Synthetic oligonucleotide
  Antisense strand to SEQ ID NO: 51384
uaacugaguauuguuccac

SEQ ID NO: 51466 - RNA, 19 nt, Artificial Sequence
  Description of Artificial Sequence: Synthetic oligonucleotide
  Sense strand starting at position 890 of SEQ ID NO: 620
uagacuugaguaugaauac

SEQ ID NO: 51467 - RNA, 19 nt, Artificial Sequence
  Description of Artificial Sequence: Synthetic oligonucleotide
  Antisense strand to SEQ ID NO: 51386
guauucauacucaagucua

SEQ ID NO: 51468 - RNA, 19 nt, Artificial Sequence
  Description of Artificial Sequence: Synthetic oligonucleotide
  Sense strand starting at position 858 of SEQ ID NO: 620
acaauauguguuggguaca

SEQ ID NO: 51469 - RNA, 19 nt, Artificial Sequence
  Description of Artificial Sequence: Synthetic oligonucleotide
  Antisense strand to SEQ ID NO: 51388
uguacccaacacauauugu

SEQ ID NO: 51470 - RNA, 19 nt, Artificial Sequence
  Description of Artificial Sequence: Synthetic oligonucleotide
  Sense strand starting at position 624 of SEQ ID NO: 620
uagaguugacagugagaca

SEQ ID NO: 51471 - RNA, 19 nt, Artificial Sequence
  Description of Artificial Sequence: Synthetic oligonucleotide
  Antisense strand to SEQ ID NO: 51390
ugucucacugucaacucua

SEQ ID NO: 51472 - RNA, 19 nt, Artificial Sequence
  Description of Artificial Sequence: Synthetic oligonucleotide
  Sense strand starting at position 618 of SEQ ID NO: 620
uuugacuagaguugacagu

SEQ ID NO: 51473 - RNA, 19 nt, Artificial Sequence
  Description of Artificial Sequence: Synthetic oligonucleotide
  Antisense strand to SEQ ID NO: 51392
acugucaacucuagucaaa

SEQ ID NO: 51474 - RNA, 19 nt, Artificial Sequence
  Description of Artificial Sequence: Synthetic oligonucleotide
  Sense strand starting at position 612 of SEQ ID NO: 620
uuaaucuuugacuagaguu

SEQ ID NO: 51475 - RNA, 19 nt, Artificial Sequence
  Description of Artificial Sequence: Synthetic oligonucleotide
  Antisense strand to SEQ ID NO: 51394
aacucuagucaaagauuaa

SEQ ID NO: 51476 - RNA, 19 nt, Artificial Sequence
  Description of Artificial Sequence: Synthetic oligonucleotide
  Sense strand starting at position 611 of SEQ ID NO: 620
uuuaaucuuugacuagagu

SEQ ID NO: 51477 - RNA, 19 nt, Artificial Sequence
  Description of Artificial Sequence: Synthetic oligonucleotide
  Antisense strand to SEQ ID NO: 51396
acucuagucaaagauuaaa

SEQ ID NO: 51478 - RNA, 19 nt, Artificial Sequence
  Description of Artificial Sequence: Synthetic oligonucleotide
  Sense strand starting at position 466 of SEQ ID NO: 620
aguggcuuaccugagaagu

SEQ ID NO: 51479 - RNA, 19 nt, Artificial Sequence
  Description of Artificial Sequence: Synthetic oligonucleotide
  Antisense strand to SEQ ID NO: 51398
acuucucagguaagccacu

SEQ ID NO: 51480 - RNA, 19 nt, Artificial Sequence
  Description of Artificial Sequence: Synthetic oligonucleotide
  Sense strand starting at position 463 of SEQ ID NO: 620
uuaaguggcuuaccugaga

SEQ ID NO: 51481 - RNA, 19 nt, Artificial Sequence
  Description of Artificial Sequence: Synthetic oligonucleotide
  Antisense strand to SEQ ID NO: 51400
ucucagguaagccacuuaa

SEQ ID NO: 51482 - RNA, 19 nt, Artificial Sequence
  Description of Artificial Sequence: Synthetic oligonucleotide
  Sense strand starting at position 365 of SEQ ID NO: 620
uauggugagguauacaguu

SEQ ID NO: 51483 - RNA, 19 nt, Artificial Sequence
  Description of Artificial Sequence: Synthetic oligonucleotide
  Antisense strand to SEQ ID NO: 51402
aacuguauaccucaccaua

SEQ ID NO: 51484 - RNA, 19 nt, Artificial Sequence
  Description of Artificial Sequence: Synthetic oligonucleotide
  Sense strand starting at position 332 of SEQ ID NO: 620
uuaagagauuugcaaagag

SEQ ID NO: 51485 - RNA, 19 nt, Artificial Sequence
  Description of Artificial Sequence: Synthetic oligonucleotide
  Antisense strand to SEQ ID NO: 51404
cucuuugcaaaucucuuaa

SEQ ID NO: 51486 - RNA, 19 nt, Artificial Sequence
  Description of Artificial Sequence: Synthetic oligonucleotide
  Sense strand starting at position 3954 of SEQ ID NO: 623
gggagucuacuguauacca

SEQ ID NO: 51487 - RNA, 19 nt, Artificial Sequence
  Description of Artificial Sequence: Synthetic oligonucleotide
  Antisense strand to SEQ ID NO: 51406
ugguauacaguagacuccc

SEQ ID NO: 51488 - RNA, 19 nt, Artificial Sequence
  Description of Artificial Sequence: Synthetic oligonucleotide
  Sense strand starting at position 3902 of SEQ ID NO: 623
ggaugaaauuaacaggaau

SEQ ID NO: 51489 - RNA, 19 nt, Artificial Sequence
  Description of Artificial Sequence: Synthetic oligonucleotide
  Antisense strand to SEQ ID NO: 51408
auuccuguuaauuucaucc

SEQ ID NO: 51490 - RNA, 19 nt, Artificial Sequence
  Description of Artificial Sequence: Synthetic oligonucleotide
  Sense strand starting at position 3893 of SEQ ID NO: 623
accgcaccuggaugaaauu

SEQ ID NO: 51491 - RNA, 19 nt, Artificial Sequence
  Description of Artificial Sequence: Synthetic oligonucleotide
  Antisense strand to SEQ ID NO: 51410
aauuucauccaggugcggu

SEQ ID NO: 51492 - RNA, 19 nt, Artificial Sequence
  Description of Artificial Sequence: Synthetic oligonucleotide
  Sense strand starting at position 3526 of SEQ ID NO: 623
ggaauucuuugacuugcca

SEQ ID NO: 51493 - RNA, 19 nt, Artificial Sequence
  Description of Artificial Sequence: Synthetic oligonucleotide
  Antisense strand to SEQ ID NO: 51412
uggcaagucaaagaauucc

SEQ ID NO: 51494 - RNA, 19 nt, Artificial Sequence
  Description of Artificial Sequence: Synthetic oligonucleotide
  Sense strand starting at position 3523 of SEQ ID NO: 623
acaggaauucuuugacuug

SEQ ID NO: 51495 - RNA, 19 nt, Artificial Sequence
  Description of Artificial Sequence: Synthetic oligonucleotide
  Antisense strand to SEQ ID NO: 51414
caagucaaagaauuccugu

SEQ ID NO: 51496 - RNA, 19 nt, Artificial Sequence
  Description of Artificial Sequence: Synthetic oligonucleotide
  Sense strand starting at position 3328 of SEQ ID NO: 623
augacuugauauggaauuu

SEQ ID NO: 51497 - RNA, 19 nt, Artificial Sequence
  Description of Artificial Sequence: Synthetic oligonucleotide
  Antisense strand to SEQ ID NO: 51416
aaauuccauaucaagucau

SEQ ID NO: 51498 - RNA, 19 nt, Artificial Sequence
  Description of Artificial Sequence: Synthetic oligonucleotide
  Sense strand starting at position 3291 of SEQ ID NO: 623
ggauauaguguuuggucag

SEQ ID NO: 51499 - RNA, 19 nt, Artificial Sequence
  Description of Artificial Sequence: Synthetic oligonucleotide
  Antisense strand to SEQ ID NO: 51418
cugaccaaacacuauaucc

SEQ ID NO: 51500 - RNA, 19 nt, Artificial Sequence
  Description of Artificial Sequence: Synthetic oligonucleotide
  Sense strand starting at position 3290 of SEQ ID NO: 623
aggauauaguguuugguca

SEQ ID NO: 51501 - RNA, 19 nt, Artificial Sequence
  Description of Artificial Sequence: Synthetic oligonucleotide
  Antisense strand to SEQ ID NO: 51420
ugaccaaacacuauauccu

SEQ ID NO: 51502 - RNA, 19 nt, Artificial Sequence
  Description of Artificial Sequence: Synthetic oligonucleotide
  Sense strand starting at position 3259 of SEQ ID NO: 623
uaaaguauggaguagcuau

SEQ ID NO: 51503 - RNA, 19 nt, Artificial Sequence
  Description of Artificial Sequence: Synthetic oligonucleotide
  Antisense strand to SEQ ID NO: 51422
auagcuacuccauacuuua

SEQ ID NO: 51504 - RNA, 19 nt, Artificial Sequence
  Description of Artificial Sequence: Synthetic oligonucleotide
  Sense strand starting at position 3254 of SEQ ID NO: 623
gcagguaaaguauggagua

SEQ ID NO: 51505 - RNA, 19 nt, Artificial Sequence
  Description of Artificial Sequence: Synthetic oligonucleotide
  Antisense strand to SEQ ID NO: 51424
uacuccauacuuuaccugc

SEQ ID NO: 51506 - RNA, 19 nt, Artificial Sequence
  Description of Artificial Sequence: Synthetic oligonucleotide
  Sense strand starting at position 3114 of SEQ ID NO: 623
ucugaagaucccugcauua

SEQ ID NO: 51507 - RNA, 19 nt, Artificial Sequence
  Description of Artificial Sequence: Synthetic oligonucleotide
  Antisense strand to SEQ ID NO: 51426
uaaugcagggaucuucaga

SEQ ID NO: 51508 - RNA, 19 nt, Artificial Sequence
  Description of Artificial Sequence: Synthetic oligonucleotide
  Sense strand starting at position 2919 of SEQ ID NO: 623
gaugucuuucugggaaaga

SEQ ID NO: 51509 - RNA, 19 nt, Artificial Sequence
  Description of Artificial Sequence: Synthetic oligonucleotide
  Antisense strand to SEQ ID NO: 51428
ucuuucccagaaagacauc

SEQ ID NO: 51510 - RNA, 19 nt, Artificial Sequence
  Description of Artificial Sequence: Synthetic oligonucleotide
  Sense strand starting at position 2916 of SEQ ID NO: 623
uaggaugucuuucugggaa

SEQ ID NO: 51511 - RNA, 19 nt, Artificial Sequence
  Description of Artificial Sequence: Synthetic oligonucleotide
  Antisense strand to SEQ ID NO: 51430
uucccagaaagacauccua

SEQ ID NO: 51512 - RNA, 19 nt, Artificial Sequence
  Description of Artificial Sequence: Synthetic oligonucleotide
  Sense strand starting at position 2816 of SEQ ID NO: 623
agccuuaugcaagaacagu

SEQ ID NO: 51513 - RNA, 19 nt, Artificial Sequence
  Description of Artificial Sequence: Synthetic oligonucleotide
  Antisense strand to SEQ ID NO: 51432
acuguucuugcauaaggcu

SEQ ID NO: 51514 - RNA, 19 nt, Artificial Sequence
  Description of Artificial Sequence: Synthetic oligonucleotide
  Sense strand starting at position 2726 of SEQ ID NO: 623
ugucuaaaucgccaagagu

SEQ ID NO: 51515 - RNA, 19 nt, Artificial Sequence
  Description of Artificial Sequence: Synthetic oligonucleotide
  Antisense strand to SEQ ID NO: 51434
acucuuggcgauuuagaca

SEQ ID NO: 51516 - RNA, 19 nt, Artificial Sequence
  Description of Artificial Sequence: Synthetic oligonucleotide
  Sense strand starting at position 2717 of SEQ ID NO: 623
ugucuaaccugucuaaauc

SEQ ID NO: 51517 - RNA, 19 nt, Artificial Sequence
  Description of Artificial Sequence: Synthetic oligonucleotide
  Antisense strand to SEQ ID NO: 51436
gauuuagacagguuagaca

SEQ ID NO: 51518 - RNA, 19 nt, Artificial Sequence
  Description of Artificial Sequence: Synthetic oligonucleotide
  Sense strand starting at position 2705 of SEQ ID NO: 623
gugacaaauggaugucuaa

SEQ ID NO: 51519 - RNA, 19 nt, Artificial Sequence
  Description of Artificial Sequence: Synthetic oligonucleotide
  Antisense strand to SEQ ID NO: 51438
uuagacauccauuugucac

SEQ ID NO: 51520 - RNA, 19 nt, Artificial Sequence
  Description of Artificial Sequence: Synthetic oligonucleotide
  Sense strand starting at position 2589 of SEQ ID NO: 623
gaauguucucugugagaua

SEQ ID NO: 51521 - RNA, 19 nt, Artificial Sequence
  Description of Artificial Sequence: Synthetic oligonucleotide
  Antisense strand to SEQ ID NO: 51440
uaucucacagagaacauuc

SEQ ID NO: 51522 - RNA, 19 nt, Artificial Sequence
  Description of Artificial Sequence: Synthetic oligonucleotide
  Sense strand starting at position 2553 of SEQ ID NO: 623
gacugaugugaaggagucu

SEQ ID NO: 51523 - RNA, 19 nt, Artificial Sequence
  Description of Artificial Sequence: Synthetic oligonucleotide
  Antisense strand to SEQ ID NO: 51442
agacuccuucacaucaguc

SEQ ID NO: 51524 - RNA, 19 nt, Artificial Sequence
  Description of Artificial Sequence: Synthetic oligonucleotide
  Sense strand starting at position 2340 of SEQ ID NO: 623
gcuggcauuuccuucuuua

SEQ ID NO: 51525 - RNA, 19 nt, Artificial Sequence
  Description of Artificial Sequence: Synthetic oligonucleotide
  Antisense strand to SEQ ID NO: 51444
uaaagaaggaaaugccagc

SEQ ID NO: 51526 - RNA, 19 nt, Artificial Sequence
  Description of Artificial Sequence: Synthetic oligonucleotide
  Sense strand starting at position 1907 of SEQ ID NO: 623
agaccuguuccauaugacu

SEQ ID NO: 51527 - RNA, 19 nt, Artificial Sequence
  Description of Artificial Sequence: Synthetic oligonucleotide
  Antisense strand to SEQ ID NO: 51446
agucauauggaacaggucu

SEQ ID NO: 51528 - RNA, 19 nt, Artificial Sequence
  Description of Artificial Sequence: Synthetic oligonucleotide
  Sense strand starting at position 1890 of SEQ ID NO: 623
cagugauguggcuaaacag

SEQ ID NO: 51529 - RNA, 19 nt, Artificial Sequence
  Description of Artificial Sequence: Synthetic oligonucleotide
  Antisense strand to SEQ ID NO: 51448
cuguuuagccacaucacug

SEQ ID NO: 51530 - RNA, 19 nt, Artificial Sequence
  Description of Artificial Sequence: Synthetic oligonucleotide
  Sense strand starting at position 1645 of SEQ ID NO: 623
uuuaaagaguguuuaucuc

SEQ ID NO: 51531 - RNA, 19 nt, Artificial Sequence
  Description of Artificial Sequence: Synthetic oligonucleotide
  Antisense strand to SEQ ID NO: 51450
gagauaaacacucuuuaaa

SEQ ID NO: 51532 - RNA, 19 nt, Artificial Sequence
  Description of Artificial Sequence: Synthetic oligonucleotide
  Sense strand starting at position 1591 of SEQ ID NO: 623
auguaaucagccuaguaaa

SEQ ID NO: 51533 - RNA, 19 nt, Artificial Sequence
  Description of Artificial Sequence: Synthetic oligonucleotide
  Antisense strand to SEQ ID NO: 51452
uuuacuaggcugauuacau

SEQ ID NO: 51534 - RNA, 19 nt, Artificial Sequence
  Description of Artificial Sequence: Synthetic oligonucleotide
  Sense strand starting at position 1508 of SEQ ID NO: 623
gguuguaugaaauaagcua

SEQ ID NO: 51535 - RNA, 19 nt, Artificial Sequence
  Description of Artificial Sequence: Synthetic oligonucleotide
  Antisense strand to SEQ ID NO: 51454
uagcuuauuucauacaacc

SEQ ID NO: 51536 - RNA, 19 nt, Artificial Sequence
  Description of Artificial Sequence: Synthetic oligonucleotide
  Sense strand starting at position 1499 of SEQ ID NO: 623
ucaaauucugguuguauga

SEQ ID NO: 51537 - RNA, 19 nt, Artificial Sequence
  Description of Artificial Sequence: Synthetic oligonucleotide
  Antisense strand to SEQ ID NO: 51456
ucauacaaccagaauuuga

SEQ ID NO: 51538 - RNA, 19 nt, Artificial Sequence
  Description of Artificial Sequence: Synthetic oligonucleotide
  Sense strand starting at position 1498 of SEQ ID NO: 623
aucaaauucugguuguaug

SEQ ID NO: 51539 - RNA, 19 nt, Artificial Sequence
  Description of Artificial Sequence: Synthetic oligonucleotide
  Antisense strand to SEQ ID NO: 51458
cauacaaccagaauuugau

SEQ ID NO: 51540 - RNA, 19 nt, Artificial Sequence
  Description of Artificial Sequence: Synthetic oligonucleotide
  Sense strand starting at position 1353 of SEQ ID NO: 623
ggccguauuuagccauaca

SEQ ID NO: 51541 - RNA, 19 nt, Artificial Sequence
  Description of Artificial Sequence: Synthetic oligonucleotide
  Antisense strand to SEQ ID NO: 51460
uguauggcuaaauacggcc

SEQ ID NO: 51542 - RNA, 19 nt, Artificial Sequence
  Description of Artificial Sequence: Synthetic oligonucleotide
  Sense strand starting at position 1319 of SEQ ID NO: 623
agguguugacaguaauauu

SEQ ID NO: 51543 - RNA, 19 nt, Artificial Sequence
  Description of Artificial Sequence: Synthetic oligonucleotide
  Antisense strand to SEQ ID NO: 51462
aauauuacugucaacaccu

SEQ ID NO: 51544 - RNA, 19 nt, Artificial Sequence
  Description of Artificial Sequence: Synthetic oligonucleotide
  Sense strand starting at position 1146 of SEQ ID NO: 623
auuguuauauggccugauu

SEQ ID NO: 51545 - RNA, 19 nt, Artificial Sequence
  Description of Artificial Sequence: Synthetic oligonucleotide
  Antisense strand to SEQ ID NO: 51464
aaucaggccauauaacaau

SEQ ID NO: 51546 - RNA, 19 nt, Artificial Sequence
  Description of Artificial Sequence: Synthetic oligonucleotide
  Sense strand starting at position 1068 of SEQ ID NO: 623
aguugaaagcuccaaguga

SEQ ID NO: 51547 - RNA, 19 nt, Artificial Sequence
  Description of Artificial Sequence: Synthetic oligonucleotide
  Antisense strand to SEQ ID NO: 51466
ucacuuggagcuuucaacu

SEQ ID NO: 51548 - RNA, 19 nt, Artificial Sequence
  Description of Artificial Sequence: Synthetic oligonucleotide
  Sense strand starting at position 956 of SEQ ID NO: 623
uggaacauuucugucguau

SEQ ID NO: 51549 - RNA, 19 nt, Artificial Sequence
  Description of Artificial Sequence: Synthetic oligonucleotide
  Antisense strand to SEQ ID NO: 51468
auacgacagaaauguucca

SEQ ID NO: 51550 - RNA, 19 nt, Artificial Sequence
  Description of Artificial Sequence: Synthetic oligonucleotide
  Sense strand starting at position 939 of SEQ ID NO: 623
gaagaucugccucgaagug

SEQ ID NO: 51551 - RNA, 19 nt, Artificial Sequence
  Description of Artificial Sequence: Synthetic oligonucleotide
  Antisense strand to SEQ ID NO: 51470
cacuucgaggcagaucuuc

SEQ ID NO: 51552 - RNA, 19 nt, Artificial Sequence
  Description of Artificial Sequence: Synthetic oligonucleotide
  Sense strand starting at position 769 of SEQ ID NO: 623
uaaugugggucuuuccuga

SEQ ID NO: 51553 - RNA, 19 nt, Artificial Sequence
  Description of Artificial Sequence: Synthetic oligonucleotide
  Antisense strand to SEQ ID NO: 51472
ucaggaaagacccacauua

SEQ ID NO: 51554 - RNA, 19 nt, Artificial Sequence
  Description of Artificial Sequence: Synthetic oligonucleotide
  Sense strand starting at position 750 of SEQ ID NO: 623
gguagaaauuagguuuauu

SEQ ID NO: 51555 - RNA, 19 nt, Artificial Sequence
  Description of Artificial Sequence: Synthetic oligonucleotide
  Antisense strand to SEQ ID NO: 51474
aauaaaccuaauuucuacc

SEQ ID NO: 51556 - RNA, 19 nt, Artificial Sequence
  Description of Artificial Sequence: Synthetic oligonucleotide
  Sense strand starting at position 722 of SEQ ID NO: 623
agaguuuaagggugcaacu

SEQ ID NO: 51557 - RNA, 19 nt, Artificial Sequence
  Description of Artificial Sequence: Synthetic oligonucleotide
  Antisense strand to SEQ ID NO: 51476
aguugcacccuuaaacucu

SEQ ID NO: 51558 - RNA, 19 nt, Artificial Sequence
  Description of Artificial Sequence: Synthetic oligonucleotide
  Sense strand starting at position 514 of SEQ ID NO: 623
uaauaagaacugcgaagaa

SEQ ID NO: 51559 - RNA, 19 nt, Artificial Sequence
  Description of Artificial Sequence: Synthetic oligonucleotide
  Antisense strand to SEQ ID NO: 51478
uucuucgcaguucuuauua

SEQ ID NO: 51560 - RNA, 19 nt, Artificial Sequence
  Description of Artificial Sequence: Synthetic oligonucleotide
  Sense strand starting at position 406 of SEQ ID NO: 623
gcaagauugucucucacua

SEQ ID NO: 51561 - RNA, 19 nt, Artificial Sequence
  Description of Artificial Sequence: Synthetic oligonucleotide
  Antisense strand to SEQ ID NO: 51480
uagugagagacaaucuugc

SEQ ID NO: 51562 - RNA, 19 nt, Artificial Sequence
  Description of Artificial Sequence: Synthetic oligonucleotide
  Sense strand starting at position 403 of SEQ ID NO: 623
caggcaagauugucucuca

SEQ ID NO: 51563 - RNA, 19 nt, Artificial Sequence
  Description of Artificial Sequence: Synthetic oligonucleotide
  Antisense strand to SEQ ID NO: 51482
ugagagacaaucuugccug

SEQ ID NO: 51564 - RNA, 19 nt, Artificial Sequence
  Description of Artificial Sequence: Synthetic oligonucleotide
  Sense strand starting at position 238 of SEQ ID NO: 623
auggcugguguuuaaacua

SEQ ID NO: 51565 - RNA, 19 nt, Artificial Sequence
  Description of Artificial Sequence: Synthetic oligonucleotide
  Antisense strand to SEQ ID NO: 51484
uaguuuaaacaccagccau

SEQ ID NO: 51566 - RNA, 19 nt, Artificial Sequence
  Description of Artificial Sequence: Synthetic oligonucleotide
  Sense strand starting at position 3980 of SEQ ID NO: 619
ugauauuaauagcugacau

SEQ ID NO: 51567 - RNA, 19 nt, Artificial Sequence
  Description of Artificial Sequence: Synthetic oligonucleotide
  Antisense strand to SEQ ID NO: 51486
augucagcuauuaauauca

SEQ ID NO: 51568 - RNA, 19 nt, Artificial Sequence
  Description of Artificial Sequence: Synthetic oligonucleotide
  Sense strand starting at position 3940 of SEQ ID NO: 619
gaacaaguugcuugauccu

SEQ ID NO: 51569 - RNA, 19 nt, Artificial Sequence
  Description of Artificial Sequence: Synthetic oligonucleotide
  Antisense strand to SEQ ID NO: 51488
aggaucaagcaacuuguuc

SEQ ID NO: 51570 - RNA, 19 nt, Artificial Sequence
  Description of Artificial Sequence: Synthetic oligonucleotide
  Sense strand starting at position 3835 of SEQ ID NO: 619
ugcaguuuagcauaguaaa

SEQ ID NO: 51571 - RNA, 19 nt, Artificial Sequence
  Description of Artificial Sequence: Synthetic oligonucleotide
  Antisense strand to SEQ ID NO: 51490
uuuacuaugcuaaacugca

SEQ ID NO: 51572 - RNA, 19 nt, Artificial Sequence
  Description of Artificial Sequence: Synthetic oligonucleotide
  Sense strand starting at position 3754 of SEQ ID NO: 619
guguaucacuaucucuaau

SEQ ID NO: 51573 - RNA, 19 nt, Artificial Sequence
  Description of Artificial Sequence: Synthetic oligonucleotide
  Antisense strand to SEQ ID NO: 51492
auuagagauagugauacac

SEQ ID NO: 51574 - RNA, 19 nt, Artificial Sequence
  Description of Artificial Sequence: Synthetic oligonucleotide
  Sense strand starting at position 3439 of SEQ ID NO: 619
ugugaacaucuuuguugac

SEQ ID NO: 51575 - RNA, 19 nt, Artificial Sequence
  Description of Artificial Sequence: Synthetic oligonucleotide
  Antisense strand to SEQ ID NO: 51494
gucaacaaagauguucaca

SEQ ID NO: 51576 - RNA, 19 nt, Artificial Sequence
  Description of Artificial Sequence: Synthetic oligonucleotide
  Sense strand starting at position 3438 of SEQ ID NO: 619
uugugaacaucuuuguuga

SEQ ID NO: 51577 - RNA, 19 nt, Artificial Sequence
  Description of Artificial Sequence: Synthetic oligonucleotide
  Antisense strand to SEQ ID NO: 51496
ucaacaaagauguucacaa

SEQ ID NO: 51578 - RNA, 19 nt, Artificial Sequence
  Description of Artificial Sequence: Synthetic oligonucleotide
  Sense strand starting at position 3433 of SEQ ID NO: 619
ugauauugugaacaucuuu

SEQ ID NO: 51579 - RNA, 19 nt, Artificial Sequence
  Description of Artificial Sequence: Synthetic oligonucleotide
  Antisense strand to SEQ ID NO: 51498
aaagauguucacaauauca

SEQ ID NO: 51580 - RNA, 19 nt, Artificial Sequence
  Description of Artificial Sequence: Synthetic oligonucleotide
  Sense strand starting at position 3163 of SEQ ID NO: 619
acaaucacugauggcuaua

SEQ ID NO: 51581 - RNA, 19 nt, Artificial Sequence
  Description of Artificial Sequence: Synthetic oligonucleotide
  Antisense strand to SEQ ID NO: 51500
uauagccaucagugauugu

SEQ ID NO: 51582 - RNA, 19 nt, Artificial Sequence
  Description of Artificial Sequence: Synthetic oligonucleotide
  Sense strand starting at position 3104 of SEQ ID NO: 619
uguacuuuccauggaccau

SEQ ID NO: 51583 - RNA, 19 nt, Artificial Sequence
  Description of Artificial Sequence: Synthetic oligonucleotide
  Antisense strand to SEQ ID NO: 51502
augguccauggaaaguaca

SEQ ID NO: 51584 - RNA, 19 nt, Artificial Sequence
  Description of Artificial Sequence: Synthetic oligonucleotide
  Sense strand starting at position 3103 of SEQ ID NO: 619
auguacuuuccauggacca

SEQ ID NO: 51585 - RNA, 19 nt, Artificial Sequence
  Description of Artificial Sequence: Synthetic oligonucleotide
  Antisense strand to SEQ ID NO: 51504
ugguccauggaaaguacau

SEQ ID NO: 51586 - RNA, 19 nt, Artificial Sequence
  Description of Artificial Sequence: Synthetic oligonucleotide
  Sense strand starting at position 3098 of SEQ ID NO: 619
gcgcuauguacuuuccaug

SEQ ID NO: 51587 - RNA, 19 nt, Artificial Sequence
  Description of Artificial Sequence: Synthetic oligonucleotide
  Antisense strand to SEQ ID NO: 51506
cauggaaaguacauagcgc

SEQ ID NO: 51588 - RNA, 19 nt, Artificial Sequence
  Description of Artificial Sequence: Synthetic oligonucleotide
  Sense strand starting at position 3040 of SEQ ID NO: 619
gaacaaauuugaugauggu

SEQ ID NO: 51589 - RNA, 19 nt, Artificial Sequence
  Description of Artificial Sequence: Synthetic oligonucleotide
  Antisense strand to SEQ ID NO: 51508
accaucaucaaauuuguuc

SEQ ID NO: 51590 - RNA, 19 nt, Artificial Sequence
  Description of Artificial Sequence: Synthetic oligonucleotide
  Sense strand starting at position 3000 of SEQ ID NO: 619
gaggaauccuagguaguaa

SEQ ID NO: 51591 - RNA, 19 nt, Artificial Sequence
  Description of Artificial Sequence: Synthetic oligonucleotide
  Antisense strand to SEQ ID NO: 51510
uuacuaccuaggauuccuc

SEQ ID NO: 51592 - RNA, 19 nt, Artificial Sequence
  Description of Artificial Sequence: Synthetic oligonucleotide
  Sense strand starting at position 2999 of SEQ ID NO: 619
agaggaauccuagguagua

SEQ ID NO: 51593 - RNA, 19 nt, Artificial Sequence
  Description of Artificial Sequence: Synthetic oligonucleotide
  Antisense strand to SEQ ID NO: 51512
uacuaccuaggauuccucu

SEQ ID NO: 51594 - RNA, 19 nt, Artificial Sequence
  Description of Artificial Sequence: Synthetic oligonucleotide
  Sense strand starting at position 2822 of SEQ ID NO: 619
cucugagguccagggaaga

SEQ ID NO: 51595 - RNA, 19 nt, Artificial Sequence
  Description of Artificial Sequence: Synthetic oligonucleotide
  Antisense strand to SEQ ID NO: 51514
ucuucccuggaccucagag

SEQ ID NO: 51596 - RNA, 19 nt, Artificial Sequence
  Description of Artificial Sequence: Synthetic oligonucleotide
  Sense strand starting at position 2744 of SEQ ID NO: 619
aagguaagcuuaguaucaa

SEQ ID NO: 51597 - RNA, 19 nt, Artificial Sequence
  Description of Artificial Sequence: Synthetic oligonucleotide
  Antisense strand to SEQ ID NO: 51516
uugauacuaagcuuaccuu

SEQ ID NO: 51598 - RNA, 19 nt, Artificial Sequence
  Description of Artificial Sequence: Synthetic oligonucleotide
  Sense strand starting at position 2668 of SEQ ID NO: 619
ggccacuauugccuaaaga

SEQ ID NO: 51599 - RNA, 19 nt, Artificial Sequence
  Description of Artificial Sequence: Synthetic oligonucleotide
  Antisense strand to SEQ ID NO: 51518
ucuuuaggcaauaguggcc

SEQ ID NO: 51600 - RNA, 19 nt, Artificial Sequence
  Description of Artificial Sequence: Synthetic oligonucleotide
  Sense strand starting at position 2658 of SEQ ID NO: 619
uguugagaauggccacuau

SEQ ID NO: 51601 - RNA, 19 nt, Artificial Sequence
  Description of Artificial Sequence: Synthetic oligonucleotide
  Antisense strand to SEQ ID NO: 51520
auaguggccauucucaaca

SEQ ID NO: 51602 - RNA, 19 nt, Artificial Sequence
  Description of Artificial Sequence: Synthetic oligonucleotide
  Sense strand starting at position 2648 of SEQ ID NO: 619
acaguugaauuguugagaa

SEQ ID NO: 51603 - RNA, 19 nt, Artificial Sequence
  Description of Artificial Sequence: Synthetic oligonucleotide
  Antisense strand to SEQ ID NO: 51522
uucucaacaauucaacugu

SEQ ID NO: 51604 - RNA, 19 nt, Artificial Sequence
  Description of Artificial Sequence: Synthetic oligonucleotide
  Sense strand starting at position 2581 of SEQ ID NO: 619
augggaaaguggcuuguuu

SEQ ID NO: 51605 - RNA, 19 nt, Artificial Sequence
  Description of Artificial Sequence: Synthetic oligonucleotide
  Antisense strand to SEQ ID NO: 51524
aaacaagccacuuucccau

SEQ ID NO: 51606 - RNA, 19 nt, Artificial Sequence
  Description of Artificial Sequence: Synthetic oligonucleotide
  Sense strand starting at position 2519 of SEQ ID NO: 619
acgcuagauguuugaauaa

SEQ ID NO: 51607 - RNA, 19 nt, Artificial Sequence
  Description of Artificial Sequence: Synthetic oligonucleotide
  Antisense strand to SEQ ID NO: 51526
uuauucaaacaucuagcgu

SEQ ID NO: 51608 - RNA, 19 nt, Artificial Sequence
  Description of Artificial Sequence: Synthetic oligonucleotide
  Sense strand starting at position 2451 of SEQ ID NO: 619
cuuugugagcuaugauuuc

SEQ ID NO: 51609 - RNA, 19 nt, Artificial Sequence
  Description of Artificial Sequence: Synthetic oligonucleotide
  Antisense strand to SEQ ID NO: 51528
gaaaucauagcucacaaag

SEQ ID NO: 51610 - RNA, 19 nt, Artificial Sequence
  Description of Artificial Sequence: Synthetic oligonucleotide
  Sense strand starting at position 2385 of SEQ ID NO: 619
ugucuaagauauguccaaa

SEQ ID NO: 51611 - RNA, 19 nt, Artificial Sequence
  Description of Artificial Sequence: Synthetic oligonucleotide
  Antisense strand to SEQ ID NO: 51530
uuuggacauaucuuagaca

SEQ ID NO: 51612 - RNA, 19 nt, Artificial Sequence
  Description of Artificial Sequence: Synthetic oligonucleotide
  Sense strand starting at position 2377 of SEQ ID NO: 619
cuguuuggugucuaagaua

SEQ ID NO: 51613 - RNA, 19 nt, Artificial Sequence
  Description of Artificial Sequence: Synthetic oligonucleotide
  Antisense strand to SEQ ID NO: 51532
uaucuuagacaccaaacag

SEQ ID NO: 51614 - RNA, 19 nt, Artificial Sequence
  Description of Artificial Sequence: Synthetic oligonucleotide
  Sense strand starting at position 2324 of SEQ ID NO: 619
gucuuuggcagggaaugua

SEQ ID NO: 51615 - RNA, 19 nt, Artificial Sequence
  Description of Artificial Sequence: Synthetic oligonucleotide
  Antisense strand to SEQ ID NO: 51534
uacauucccugccaaagac

SEQ ID NO: 51616 - RNA, 19 nt, Artificial Sequence
  Description of Artificial Sequence: Synthetic oligonucleotide
  Sense strand starting at position 2246 of SEQ ID NO: 619
gguuuauaaaugugacgaa

SEQ ID NO: 51617 - RNA, 19 nt, Artificial Sequence
  Description of Artificial Sequence: Synthetic oligonucleotide
  Antisense strand to SEQ ID NO: 51536
uucgucacauuuauaaacc

SEQ ID NO: 51618 - RNA, 19 nt, Artificial Sequence
  Description of Artificial Sequence: Synthetic oligonucleotide
  Sense strand starting at position 1314 of SEQ ID NO: 619
cugugagacaauuagcgaa

SEQ ID NO: 51619 - RNA, 19 nt, Artificial Sequence
  Description of Artificial Sequence: Synthetic oligonucleotide
  Antisense strand to SEQ ID NO: 51538
uucgcuaauugucucacag

SEQ ID NO: 51620 - RNA, 19 nt, Artificial Sequence
  Description of Artificial Sequence: Synthetic oligonucleotide
  Sense strand starting at position 1232 of SEQ ID NO: 619
cccaaucucgucuagaaau

SEQ ID NO: 51621 - RNA, 19 nt, Artificial Sequence
  Description of Artificial Sequence: Synthetic oligonucleotide
  Antisense strand to SEQ ID NO: 51540
auuucuagacgagauuggg

SEQ ID NO: 51622 - RNA, 19 nt, Artificial Sequence
  Description of Artificial Sequence: Synthetic oligonucleotide
  Sense strand starting at position 1230 of SEQ ID NO: 619
uucccaaucucgucuagaa

SEQ ID NO: 51623 - RNA, 19 nt, Artificial Sequence
  Description of Artificial Sequence: Synthetic oligonucleotide
  Antisense strand to SEQ ID NO: 51542
uucuagacgagauugggaa

SEQ ID NO: 51624 - RNA, 19 nt, Artificial Sequence
  Description of Artificial Sequence: Synthetic oligonucleotide
  Sense strand starting at position 1030 of SEQ ID NO: 619
agguucucuccuuguagaa

SEQ ID NO: 51625 - RNA, 19 nt, Artificial Sequence
  Description of Artificial Sequence: Synthetic oligonucleotide
  Antisense strand to SEQ ID NO: 51544
uucuacaaggagagaaccu

SEQ ID NO: 51626 - RNA, 19 nt, Artificial Sequence
  Description of Artificial Sequence: Synthetic oligonucleotide
  Sense strand starting at position 1029 of SEQ ID NO: 619
gagguucucuccuuguaga

SEQ ID NO: 51627 - RNA, 19 nt, Artificial Sequence
  Description of Artificial Sequence: Synthetic oligonucleotide
  Antisense strand to SEQ ID NO: 51546
ucuacaaggagagaaccuc

SEQ ID NO: 51628 - RNA, 19 nt, Artificial Sequence
  Description of Artificial Sequence: Synthetic oligonucleotide
  Sense strand starting at position 906 of SEQ ID NO: 619
uggcuaacagcuugggaau

SEQ ID NO: 51629 - RNA, 19 nt, Artificial Sequence
  Description of Artificial Sequence: Synthetic oligonucleotide
  Antisense strand to SEQ ID NO: 51548
auucccaagcuguuagcca

SEQ ID NO: 51630 - RNA, 19 nt, Artificial Sequence
  Description of Artificial Sequence: Synthetic oligonucleotide
  Sense strand starting at position 792 of SEQ ID NO: 619
gggcauggauaggcuuaaa

SEQ ID NO: 51631 - RNA, 19 nt, Artificial Sequence
  Description of Artificial Sequence: Synthetic oligonucleotide
  Antisense strand to SEQ ID NO: 51550
uuuaagccuauccaugccc

SEQ ID NO: 51632 - RNA, 19 nt, Artificial Sequence
  Description of Artificial Sequence: Synthetic oligonucleotide
  Sense strand starting at position 680 of SEQ ID NO: 619
cagugucaauuugcaagua

SEQ ID NO: 51633 - RNA, 19 nt, Artificial Sequence
  Description of Artificial Sequence: Synthetic oligonucleotide
  Antisense strand to SEQ ID NO: 51552
uacuugcaaauugacacug

SEQ ID NO: 51634 - RNA, 19 nt, Artificial Sequence
  Description of Artificial Sequence: Synthetic oligonucleotide
  Sense strand starting at position 651 of SEQ ID NO: 619
uucugaaaugauggagguu

SEQ ID NO: 51635 - RNA, 19 nt, Artificial Sequence
  Description of Artificial Sequence: Synthetic oligonucleotide
  Antisense strand to SEQ ID NO: 51554
aaccuccaucauuucagaa

SEQ ID NO: 51636 - RNA, 19 nt, Artificial Sequence
  Description of Artificial Sequence: Synthetic oligonucleotide
  Sense strand starting at position 470 of SEQ ID NO: 619
acugucacuuuauugaaga

SEQ ID NO: 51637 - RNA, 19 nt, Artificial Sequence
  Description of Artificial Sequence: Synthetic oligonucleotide
  Antisense strand to SEQ ID NO: 51556
ucuucaauaaagugacagu

SEQ ID NO: 51638 - RNA, 19 nt, Artificial Sequence
  Description of Artificial Sequence: Synthetic oligonucleotide
  Sense strand starting at position 426 of SEQ ID NO: 619
acugucacuuuauuaagga

SEQ ID NO: 51639 - RNA, 19 nt, Artificial Sequence
  Description of Artificial Sequence: Synthetic oligonucleotide
  Antisense strand to SEQ ID NO: 51558
uccuuaauaaagugacagu

SEQ ID NO: 51640 - RNA, 19 nt, Artificial Sequence
  Description of Artificial Sequence: Synthetic oligonucleotide
  Sense strand starting at position 230 of SEQ ID NO: 619
guaguuaguagaggaggaa

SEQ ID NO: 51641 - RNA, 19 nt, Artificial Sequence
  Description of Artificial Sequence: Synthetic oligonucleotide
  Antisense strand to SEQ ID NO: 51560
uuccuccucuacuaacuac

SEQ ID NO: 51642 - RNA, 19 nt, Artificial Sequence
  Description of Artificial Sequence: Synthetic oligonucleotide
  Sense strand starting at position 222 of SEQ ID NO: 619
uuucuagaguaguuaguag

SEQ ID NO: 51643 - RNA, 19 nt, Artificial Sequence
  Description of Artificial Sequence: Synthetic oligonucleotide
  Antisense strand to SEQ ID NO: 51562
cuacuaacuacucuagaaa

SEQ ID NO: 51644 - RNA, 19 nt, Artificial Sequence
  Description of Artificial Sequence: Synthetic oligonucleotide
  Sense strand starting at position 204 of SEQ ID NO: 619
auguaaaucccucauguau

SEQ ID NO: 51645 - RNA, 19 nt, Artificial Sequence
  Description of Artificial Sequence: Synthetic oligonucleotide
  Antisense strand to SEQ ID NO: 51564
auacaugagggauuuacau

SEQ ID NO: 51646 - RNA, 19 nt, Artificial Sequence
  Description of Artificial Sequence: Synthetic oligonucleotide
  Sense strand starting at position 3975 of SEQ ID NO: 622
uagaguugacagugagaca

SEQ ID NO: 51647 - RNA, 19 nt, Artificial Sequence
  Description of Artificial Sequence: Synthetic oligonucleotide
  Antisense strand to SEQ ID NO: 51566
ugucucacugucaacucua

SEQ ID NO: 51648 - RNA, 19 nt, Artificial Sequence
  Description of Artificial Sequence: Synthetic oligonucleotide
  Sense strand starting at position 3969 of SEQ ID NO: 622
uuugacuagaguugacagu

SEQ ID NO: 51649 - RNA, 19 nt, Artificial Sequence
  Description of Artificial Sequence: Synthetic oligonucleotide
  Antisense strand to SEQ ID NO: 51568
acugucaacucuagucaaa

SEQ ID NO: 51650 - RNA, 19 nt, Artificial Sequence
  Description of Artificial Sequence: Synthetic oligonucleotide
  Sense strand starting at position 3963 of SEQ ID NO: 622
uuaaucuuugacuagaguu

SEQ ID NO: 51651 - RNA, 19 nt, Artificial Sequence
  Description of Artificial Sequence: Synthetic oligonucleotide
  Antisense strand to SEQ ID NO: 51570
aacucuagucaaagauuaa

SEQ ID NO: 51652 - RNA, 19 nt, Artificial Sequence
  Description of Artificial Sequence: Synthetic oligonucleotide
  Sense strand starting at position 3962 of SEQ ID NO: 622
uuuaaucuuugacuagagu

SEQ ID NO: 51653 - RNA, 19 nt, Artificial Sequence
  Description of Artificial Sequence: Synthetic oligonucleotide
  Antisense strand to SEQ ID NO: 51572
acucuagucaaagauuaaa

SEQ ID NO: 51654 - RNA, 19 nt, Artificial Sequence
  Description of Artificial Sequence: Synthetic oligonucleotide
  Sense strand starting at position 3817 of SEQ ID NO: 622
aguggcuuaccugagaagu

SEQ ID NO: 51655 - RNA, 19 nt, Artificial Sequence
  Description of Artificial Sequence: Synthetic oligonucleotide
  Antisense strand to SEQ ID NO: 51574
acuucucagguaagccacu

SEQ ID NO: 51656 - RNA, 19 nt, Artificial Sequence
  Description of Artificial Sequence: Synthetic oligonucleotide
  Sense strand starting at position 3814 of SEQ ID NO: 622
uuaaguggcuuaccugaga

SEQ ID NO: 51657 - RNA, 19 nt, Artificial Sequence
  Description of Artificial Sequence: Synthetic oligonucleotide
  Antisense strand to SEQ ID NO: 51576
ucucagguaagccacuuaa

SEQ ID NO: 51658 - RNA, 19 nt, Artificial Sequence
  Description of Artificial Sequence: Synthetic oligonucleotide
  Sense strand starting at position 3716 of SEQ ID NO: 622
uauggugagguauacaguu

SEQ ID NO: 51659 - RNA, 19 nt, Artificial Sequence
  Description of Artificial Sequence: Synthetic oligonucleotide
  Antisense strand to SEQ ID NO: 51578
aacuguauaccucaccaua

SEQ ID NO: 51660 - RNA, 19 nt, Artificial Sequence
  Description of Artificial Sequence: Synthetic oligonucleotide
  Sense strand starting at position 3698 of SEQ ID NO: 622
agagacauuuagcaagugu

SEQ ID NO: 51661 - RNA, 19 nt, Artificial Sequence
  Description of Artificial Sequence: Synthetic oligonucleotide
  Antisense strand to SEQ ID NO: 51580
acacuugcuaaaugucucu

SEQ ID NO: 51662 - RNA, 19 nt, Artificial Sequence
  Description of Artificial Sequence: Synthetic oligonucleotide
  Sense strand starting at position 3683 of SEQ ID NO: 622
uuaagagauuugcaaagag

SEQ ID NO: 51663 - RNA, 19 nt, Artificial Sequence
  Description of Artificial Sequence: Synthetic oligonucleotide
  Antisense strand to SEQ ID NO: 51582
cucuuugcaaaucucuuaa

SEQ ID NO: 51664 - RNA, 19 nt, Artificial Sequence
  Description of Artificial Sequence: Synthetic oligonucleotide
  Sense strand starting at position 3675 of SEQ ID NO: 622
uuggccucuuaagagauuu

SEQ ID NO: 51665 - RNA, 19 nt, Artificial Sequence
  Description of Artificial Sequence: Synthetic oligonucleotide
  Antisense strand to SEQ ID NO: 51584
aaaucucuuaagaggccaa

SEQ ID NO: 51666 - RNA, 19 nt, Artificial Sequence
  Description of Artificial Sequence: Synthetic oligonucleotide
  Sense strand starting at position 3332 of SEQ ID NO: 622
auacaaguuugucucagaa

SEQ ID NO: 51667 - RNA, 19 nt, Artificial Sequence
  Description of Artificial Sequence: Synthetic oligonucleotide
  Antisense strand to SEQ ID NO: 51586
uucugagacaaacuuguau

SEQ ID NO: 51668 - RNA, 19 nt, Artificial Sequence
  Description of Artificial Sequence: Synthetic oligonucleotide
  Sense strand starting at position 3112 of SEQ ID NO: 622
ucuagacaguugcuuucua

SEQ ID NO: 51669 - RNA, 19 nt, Artificial Sequence
  Description of Artificial Sequence: Synthetic oligonucleotide
  Antisense strand to SEQ ID NO: 51588
uagaaagcaacugucuaga

SEQ ID NO: 51670 - RNA, 19 nt, Artificial Sequence
  Description of Artificial Sequence: Synthetic oligonucleotide
  Sense strand starting at position 3104 of SEQ ID NO: 622
cuuaucuuucuagacaguu

SEQ ID NO: 51671 - RNA, 19 nt, Artificial Sequence
  Description of Artificial Sequence: Synthetic oligonucleotide
  Antisense strand to SEQ ID NO: 51590
aacugucuagaaagauaag

SEQ ID NO: 51672 - RNA, 19 nt, Artificial Sequence
  Description of Artificial Sequence: Synthetic oligonucleotide
  Sense strand starting at position 2838 of SEQ ID NO: 622
uuuggugaccucuacaaca

SEQ ID NO: 51673 - RNA, 19 nt, Artificial Sequence
  Description of Artificial Sequence: Synthetic oligonucleotide
  Antisense strand to SEQ ID NO: 51592
uguuguagaggucaccaaa

SEQ ID NO: 51674 - RNA, 19 nt, Artificial Sequence
  Description of Artificial Sequence: Synthetic oligonucleotide
  Sense strand starting at position 2817 of SEQ ID NO: 622
ccagauugacgauguuaau

SEQ ID NO: 51675 - RNA, 19 nt, Artificial Sequence
  Description of Artificial Sequence: Synthetic oligonucleotide
  Antisense strand to SEQ ID NO: 51594
auuaacaucgucaaucugg

SEQ ID NO: 51676 - RNA, 19 nt, Artificial Sequence
  Description of Artificial Sequence: Synthetic oligonucleotide
  Sense strand starting at position 2686 of SEQ ID NO: 622
ugaaauuggcucgaagcuu

SEQ ID NO: 51677 - RNA, 19 nt, Artificial Sequence
  Description of Artificial Sequence: Synthetic oligonucleotide
  Antisense strand to SEQ ID NO: 51596
aagcuucgagccaauuuca

SEQ ID NO: 51678 - RNA, 19 nt, Artificial Sequence
  Description of Artificial Sequence: Synthetic oligonucleotide
  Sense strand starting at position 2339 of SEQ ID NO: 622
gcauaagacuggucaaggu

SEQ ID NO: 51679 - RNA, 19 nt, Artificial Sequence
  Description of Artificial Sequence: Synthetic oligonucleotide
  Antisense strand to SEQ ID NO: 51598
accuugaccagucuuaugc

SEQ ID NO: 51680 - RNA, 19 nt, Artificial Sequence
  Description of Artificial Sequence: Synthetic oligonucleotide
  Sense strand starting at position 2181 of SEQ ID NO: 622
ugccuuuauguugaaggga

SEQ ID NO: 51681 - RNA, 19 nt, Artificial Sequence
  Description of Artificial Sequence: Synthetic oligonucleotide
  Antisense strand to SEQ ID NO: 51600
ucccuucaacauaaaggca

SEQ ID NO: 51682 - RNA, 19 nt, Artificial Sequence
  Description of Artificial Sequence: Synthetic oligonucleotide
  Sense strand starting at position 1527 of SEQ ID NO: 622
aaacgaucagcacagugau

SEQ ID NO: 51683 - RNA, 19 nt, Artificial Sequence
  Description of Artificial Sequence: Synthetic oligonucleotide
  Antisense strand to SEQ ID NO: 51602
aucacugugcugaucguuu

SEQ ID NO: 51684 - RNA, 19 nt, Artificial Sequence
  Description of Artificial Sequence: Synthetic oligonucleotide
  Sense strand starting at position 1452 of SEQ ID NO: 622
gccauuacacuuggagaug

SEQ ID NO: 51685 - RNA, 19 nt, Artificial Sequence
  Description of Artificial Sequence: Synthetic oligonucleotide
  Antisense strand to SEQ ID NO: 51604
caucuccaaguguaauggc

SEQ ID NO: 51686 - RNA, 19 nt, Artificial Sequence
  Description of Artificial Sequence: Synthetic oligonucleotide
  Sense strand starting at position 1407 of SEQ ID NO: 622
guguuugcuggaagaggca

SEQ ID NO: 51687 - RNA, 19 nt, Artificial Sequence
  Description of Artificial Sequence: Synthetic oligonucleotide
  Antisense strand to SEQ ID NO: 51606
ugccucuuccagcaaacac

SEQ ID NO: 51688 - RNA, 19 nt, Artificial Sequence
  Description of Artificial Sequence: Synthetic oligonucleotide
  Sense strand starting at position 1405 of SEQ ID NO: 622
guguguuugcuggaagagg

SEQ ID NO: 51689 - RNA, 19 nt, Artificial Sequence
  Description of Artificial Sequence: Synthetic oligonucleotide
  Antisense strand to SEQ ID NO: 51608
ccucuuccagcaaacacac

SEQ ID NO: 51690 - RNA, 19 nt, Artificial Sequence
  Description of Artificial Sequence: Synthetic oligonucleotide
  Sense strand starting at position 1358 of SEQ ID NO: 622
ggugacauugauugucaaa

SEQ ID NO: 51691 - RNA, 19 nt, Artificial Sequence
  Description of Artificial Sequence: Synthetic oligonucleotide
  Antisense strand to SEQ ID NO: 51610
uuugacaaucaaugucacc

SEQ ID NO: 51692 - RNA, 19 nt, Artificial Sequence
  Description of Artificial Sequence: Synthetic oligonucleotide
  Sense strand starting at position 1357 of SEQ ID NO: 622
cggugacauugauugucaa

SEQ ID NO: 51693 - RNA, 19 nt, Artificial Sequence
  Description of Artificial Sequence: Synthetic oligonucleotide
  Antisense strand to SEQ ID NO: 51612
uugacaaucaaugucaccg

SEQ ID NO: 51694 - RNA, 19 nt, Artificial Sequence
  Description of Artificial Sequence: Synthetic oligonucleotide
  Sense strand starting at position 1300 of SEQ ID NO: 622
agucguguaauuccguuga

SEQ ID NO: 51695 - RNA, 19 nt, Artificial Sequence
  Description of Artificial Sequence: Synthetic oligonucleotide
  Antisense strand to SEQ ID NO: 51614
ucaacggaauuacacgacu

SEQ ID NO: 51696 - RNA, 19 nt, Artificial Sequence
  Description of Artificial Sequence: Synthetic oligonucleotide
  Sense strand starting at position 1294 of SEQ ID NO: 622
uuuagcagucguguaauuc

SEQ ID NO: 51697 - RNA, 19 nt, Artificial Sequence
  Description of Artificial Sequence: Synthetic oligonucleotide
  Antisense strand to SEQ ID NO: 51616
gaauuacacgacugcuaaa

SEQ ID NO: 51698 - RNA, 19 nt, Artificial Sequence
  Description of Artificial Sequence: Synthetic oligonucleotide
  Sense strand starting at position 1136 of SEQ ID NO: 622
acuacuucggcagaaaggu

SEQ ID NO: 51699 - RNA, 19 nt, Artificial Sequence
  Description of Artificial Sequence: Synthetic oligonucleotide
  Antisense strand to SEQ ID NO: 51618
accuuucugccgaaguagu

SEQ ID NO: 51700 - RNA, 19 nt, Artificial Sequence
  Description of Artificial Sequence: Synthetic oligonucleotide
  Sense strand starting at position 1134 of SEQ ID NO: 622
uuacuacuucggcagaaag

SEQ ID NO: 51701 - RNA, 19 nt, Artificial Sequence
  Description of Artificial Sequence: Synthetic oligonucleotide
  Antisense strand to SEQ ID NO: 51620
cuuucugccgaaguaguaa

SEQ ID NO: 51702 - RNA, 19 nt, Artificial Sequence
  Description of Artificial Sequence: Synthetic oligonucleotide
  Sense strand starting at position 1133 of SEQ ID NO: 622
uuuacuacuucggcagaaa

SEQ ID NO: 51703 - RNA, 19 nt, Artificial Sequence
  Description of Artificial Sequence: Synthetic oligonucleotide
  Antisense strand to SEQ ID NO: 51622
uuucugccgaaguaguaaa

SEQ ID NO: 51704 - RNA, 19 nt, Artificial Sequence
  Description of Artificial Sequence: Synthetic oligonucleotide
  Sense strand starting at position 973 of SEQ ID NO: 622
aaaccuauugcuggugaaa

SEQ ID NO: 51705 - RNA, 19 nt, Artificial Sequence
  Description of Artificial Sequence: Synthetic oligonucleotide
  Antisense strand to SEQ ID NO: 51624
uuucaccagcaauagguuu

SEQ ID NO: 51706 - RNA, 19 nt, Artificial Sequence
  Description of Artificial Sequence: Synthetic oligonucleotide
  Sense strand starting at position 915 of SEQ ID NO: 622
uaaguaagaugguuaugaa

SEQ ID NO: 51707 - RNA, 19 nt, Artificial Sequence
  Description of Artificial Sequence: Synthetic oligonucleotide
  Antisense strand to SEQ ID NO: 51626
uucauaaccaucuuacuua

SEQ ID NO: 51708 - RNA, 19 nt, Artificial Sequence
  Description of Artificial Sequence: Synthetic oligonucleotide
  Sense strand starting at position 848 of SEQ ID NO: 622
agaccacagcuuuguuaua

SEQ ID NO: 51709 - RNA, 19 nt, Artificial Sequence
  Description of Artificial Sequence: Synthetic oligonucleotide
  Antisense strand to SEQ ID NO: 51628
uauaacaaagcuguggucu

SEQ ID NO: 51710 - RNA, 19 nt, Artificial Sequence
  Description of Artificial Sequence: Synthetic oligonucleotide
  Sense strand starting at position 775 of SEQ ID NO: 622
ggucuaaucuuauuuguuu

SEQ ID NO: 51711 - RNA, 19 nt, Artificial Sequence
  Description of Artificial Sequence: Synthetic oligonucleotide
  Antisense strand to SEQ ID NO: 51630
aaacaaauaagauuagacc

SEQ ID NO: 51712 - RNA, 19 nt, Artificial Sequence
  Description of Artificial Sequence: Synthetic oligonucleotide
  Sense strand starting at position 657 of SEQ ID NO: 622
guuugcaguguguucucau

SEQ ID NO: 51713 - RNA, 19 nt, Artificial Sequence
  Description of Artificial Sequence: Synthetic oligonucleotide
  Antisense strand to SEQ ID NO: 51632
augagaacacacugcaaac

SEQ ID NO: 51714 - RNA, 19 nt, Artificial Sequence
  Description of Artificial Sequence: Synthetic oligonucleotide
  Sense strand starting at position 240 of SEQ ID NO: 622
gugggaguucacuauuaug

SEQ ID NO: 51715 - RNA, 19 nt, Artificial Sequence
  Description of Artificial Sequence: Synthetic oligonucleotide
  Antisense strand to SEQ ID NO: 51634
cauaauagugaacucccac

SEQ ID NO: 51716 - RNA, 19 nt, Artificial Sequence
  Description of Artificial Sequence: Synthetic oligonucleotide
  Sense strand starting at position 199 of SEQ ID NO: 622
gcuggaaauuucuaagaaa

SEQ ID NO: 51717 - RNA, 19 nt, Artificial Sequence
  Description of Artificial Sequence: Synthetic oligonucleotide
  Antisense strand to SEQ ID NO: 51636
uuucuuagaaauuuccagc

SEQ ID NO: 51718 - RNA, 19 nt, Artificial Sequence
  Description of Artificial Sequence: Synthetic oligonucleotide
  Sense strand starting at position 189 of SEQ ID NO: 622
augaauauuugcuggaaau

SEQ ID NO: 51719 - RNA, 19 nt, Artificial Sequence
  Description of Artificial Sequence: Synthetic oligonucleotide
  Antisense strand to SEQ ID NO: 51638
auuuccagcaaauauucau

SEQ ID NO: 51720 - RNA, 19 nt, Artificial Sequence
  Description of Artificial Sequence: Synthetic oligonucleotide
  Sense strand starting at position 152 of SEQ ID NO: 622
uugcuuaggguagaucuau

SEQ ID NO: 51721 - RNA, 19 nt, Artificial Sequence
  Description of Artificial Sequence: Synthetic oligonucleotide
  Antisense strand to SEQ ID NO: 51640
auagaucuacccuaagcaa

SEQ ID NO: 51722 - RNA, 19 nt, Artificial Sequence
  Description of Artificial Sequence: Synthetic oligonucleotide
  Sense strand starting at position 145 of SEQ ID NO: 622
caaaucauugcuuagggua

SEQ ID NO: 51723 - RNA, 19 nt, Artificial Sequence
  Description of Artificial Sequence: Synthetic oligonucleotide
  Antisense strand to SEQ ID NO: 51642
uacccuaagcaaugauuug

SEQ ID NO: 51724 - RNA, 19 nt, Artificial Sequence
  Description of Artificial Sequence: Synthetic oligonucleotide
  Sense strand starting at position 101 of SEQ ID NO: 622
guaucaacauccgauuuag

SEQ ID NO: 51725 - RNA, 19 nt, Artificial Sequence
  Description of Artificial Sequence: Synthetic oligonucleotide
  Antisense strand to SEQ ID NO: 51644
cuaaaucggauguugauac

SEQ ID NO: 51726 - RNA, 19 nt, Artificial Sequence
  Description of Artificial Sequence: Synthetic oligonucleotide
  Sense strand starting at position 3977 of SEQ ID NO: 624
ucuauagccugaggacuaa

SEQ ID NO: 51727 - RNA, 19 nt, Artificial Sequence
  Description of Artificial Sequence: Synthetic oligonucleotide
  Antisense strand to SEQ ID NO: 51646
uuaguccucaggcuauaga

SEQ ID NO: 51728 - RNA, 19 nt, Artificial Sequence
  Description of Artificial Sequence: Synthetic oligonucleotide
  Sense strand starting at position 3975 of SEQ ID NO: 624
acucuauagccugaggacu

SEQ ID NO: 51729 - RNA, 19 nt, Artificial Sequence
  Description of Artificial Sequence: Synthetic oligonucleotide
  Antisense strand to SEQ ID NO: 51648
aguccucaggcuauagagu

SEQ ID NO: 51730 - RNA, 19 nt, Artificial Sequence
  Description of Artificial Sequence: Synthetic oligonucleotide
  Sense strand starting at position 3918 of SEQ ID NO: 624
ugaaacgguuacucaaaca

SEQ ID NO: 51731 - RNA, 19 nt, Artificial Sequence
  Description of Artificial Sequence: Synthetic oligonucleotide
  Antisense strand to SEQ ID NO: 51650
uguuugaguaaccguuuca

SEQ ID NO: 51732 - RNA, 19 nt, Artificial Sequence
  Description of Artificial Sequence: Synthetic oligonucleotide
  Sense strand starting at position 3915 of SEQ ID NO: 624
gggugaaacgguuacucaa

SEQ ID NO: 51733 - RNA, 19 nt, Artificial Sequence
  Description of Artificial Sequence: Synthetic oligonucleotide
  Antisense strand to SEQ ID NO: 51652
uugaguaaccguuucaccc

SEQ ID NO: 51734 - RNA, 19 nt, Artificial Sequence
  Description of Artificial Sequence: Synthetic oligonucleotide
  Sense strand starting at position 3842 of SEQ ID NO: 624
aaauguaggaucuguguga

SEQ ID NO: 51735 - RNA, 19 nt, Artificial Sequence
  Description of Artificial Sequence: Synthetic oligonucleotide
  Antisense strand to SEQ ID NO: 51654
ucacacagauccuacauuu

SEQ ID NO: 51736 - RNA, 19 nt, Artificial Sequence
  Description of Artificial Sequence: Synthetic oligonucleotide
  Sense strand starting at position 3801 of SEQ ID NO: 624
uguaaucacugcgucucaa

SEQ ID NO: 51737 - RNA, 19 nt, Artificial Sequence
  Description of Artificial Sequence: Synthetic oligonucleotide
  Antisense strand to SEQ ID NO: 51656
uugagacgcagugauuaca

SEQ ID NO: 51738 - RNA, 19 nt, Artificial Sequence
  Description of Artificial Sequence: Synthetic oligonucleotide
  Sense strand starting at position 3800 of SEQ ID NO: 624
cuguaaucacugcgucuca

SEQ ID NO: 51739 - RNA, 19 nt, Artificial Sequence
  Description of Artificial Sequence: Synthetic oligonucleotide
  Antisense strand to SEQ ID NO: 51658
ugagacgcagugauuacag

SEQ ID NO: 51740 - RNA, 19 nt, Artificial Sequence
  Description of Artificial Sequence: Synthetic oligonucleotide
  Sense strand starting at position 3361 of SEQ ID NO: 624
ggaugagacccuuggaguc

SEQ ID NO: 51741 - RNA, 19 nt, Artificial Sequence
  Description of Artificial Sequence: Synthetic oligonucleotide
  Antisense strand to SEQ ID NO: 51660
gacuccaagggucucaucc

SEQ ID NO: 51742 - RNA, 19 nt, Artificial Sequence
  Description of Artificial Sequence: Synthetic oligonucleotide
  Sense strand starting at position 3345 of SEQ ID NO: 624
gcaacugugugaucuugga

SEQ ID NO: 51743 - RNA, 19 nt, Artificial Sequence
  Description of Artificial Sequence: Synthetic oligonucleotide
  Antisense strand to SEQ ID NO: 51662
uccaagaucacacaguugc

SEQ ID NO: 51744 - RNA, 19 nt, Artificial Sequence
  Description of Artificial Sequence: Synthetic oligonucleotide
  Sense strand starting at position 3342 of SEQ ID NO: 624
ucugcaacugugugaucuu

SEQ ID NO: 51745 - RNA, 19 nt, Artificial Sequence
  Description of Artificial Sequence: Synthetic oligonucleotide
  Antisense strand to SEQ ID NO: 51664
aagaucacacaguugcaga

SEQ ID NO: 51746 - RNA, 19 nt, Artificial Sequence
  Description of Artificial Sequence: Synthetic oligonucleotide
  Sense strand starting at position 3324 of SEQ ID NO: 624
ggagacuuguagccagcau

SEQ ID NO: 51747 - RNA, 19 nt, Artificial Sequence
  Description of Artificial Sequence: Synthetic oligonucleotide
  Antisense strand to SEQ ID NO: 51666
augcuggcuacaagucucc

SEQ ID NO: 51748 - RNA, 19 nt, Artificial Sequence
  Description of Artificial Sequence: Synthetic oligonucleotide
  Sense strand starting at position 3301 of SEQ ID NO: 624
ggguaauacaggugguuga

SEQ ID NO: 51749 - RNA, 19 nt, Artificial Sequence
  Description of Artificial Sequence: Synthetic oligonucleotide
  Antisense strand to SEQ ID NO: 51668
ucaaccaccuguauuaccc

SEQ ID NO: 51750 - RNA, 19 nt, Artificial Sequence
  Description of Artificial Sequence: Synthetic oligonucleotide
  Sense strand starting at position 3262 of SEQ ID NO: 624
uggauagugucuuauagac

SEQ ID NO: 51751 - RNA, 19 nt, Artificial Sequence
  Description of Artificial Sequence: Synthetic oligonucleotide
  Antisense strand to SEQ ID NO: 51670
gucuauaagacacuaucca

SEQ ID NO: 51752 - RNA, 19 nt, Artificial Sequence
  Description of Artificial Sequence: Synthetic oligonucleotide
  Sense strand starting at position 3260 of SEQ ID NO: 624
aauggauagugucuuauag

SEQ ID NO: 51753 - RNA, 19 nt, Artificial Sequence
  Description of Artificial Sequence: Synthetic oligonucleotide
  Antisense strand to SEQ ID NO: 51672
cuauaagacacuauccauu

SEQ ID NO: 51754 - RNA, 19 nt, Artificial Sequence
  Description of Artificial Sequence: Synthetic oligonucleotide
  Sense strand starting at position 3257 of SEQ ID NO: 624
cacaauggauagugucuua

SEQ ID NO: 51755 - RNA, 19 nt, Artificial Sequence
  Description of Artificial Sequence: Synthetic oligonucleotide
  Antisense strand to SEQ ID NO: 51674
uaagacacuauccauugug

SEQ ID NO: 51756 - RNA, 19 nt, Artificial Sequence
  Description of Artificial Sequence: Synthetic oligonucleotide
  Sense strand starting at position 3230 of SEQ ID NO: 624
gguugucucuauggacuca

SEQ ID NO: 51757 - RNA, 19 nt, Artificial Sequence
  Description of Artificial Sequence: Synthetic oligonucleotide
  Antisense strand to SEQ ID NO: 51676
ugaguccauagagacaacc

SEQ ID NO: 51758 - RNA, 19 nt, Artificial Sequence
  Description of Artificial Sequence: Synthetic oligonucleotide
  Sense strand starting at position 3016 of SEQ ID NO: 624
uguggaggguucccuuaga

SEQ ID NO: 51759 - RNA, 19 nt, Artificial Sequence
  Description of Artificial Sequence: Synthetic oligonucleotide
  Antisense strand to SEQ ID NO: 51678
ucuaagggaacccuccaca

SEQ ID NO: 51760 - RNA, 19 nt, Artificial Sequence
  Description of Artificial Sequence: Synthetic oligonucleotide
  Sense strand starting at position 2970 of SEQ ID NO: 624
uaaggaaugcaugguuauu

SEQ ID NO: 51761 - RNA, 19 nt, Artificial Sequence
  Description of Artificial Sequence: Synthetic oligonucleotide
  Antisense strand to SEQ ID NO: 51680
aauaaccaugcauuccuua

SEQ ID NO: 51762 - RNA, 19 nt, Artificial Sequence
  Description of Artificial Sequence: Synthetic oligonucleotide
  Sense strand starting at position 2890 of SEQ ID NO: 624
gggaaugcauaguauuaau

SEQ ID NO: 51763 - RNA, 19 nt, Artificial Sequence
  Description of Artificial Sequence: Synthetic oligonucleotide
  Antisense strand to SEQ ID NO: 51682
auuaauacuaugcauuccc

SEQ ID NO: 51764 - RNA, 19 nt, Artificial Sequence
  Description of Artificial Sequence: Synthetic oligonucleotide
  Sense strand starting at position 2867 of SEQ ID NO: 624
ugggucacgucauucaaag

SEQ ID NO: 51765 - RNA, 19 nt, Artificial Sequence
  Description of Artificial Sequence: Synthetic oligonucleotide
  Antisense strand to SEQ ID NO: 51684
cuuugaaugacgugaccca

SEQ ID NO: 51766 - RNA, 19 nt, Artificial Sequence
  Description of Artificial Sequence: Synthetic oligonucleotide
  Sense strand starting at position 2838 of SEQ ID NO: 624
gcccucuaguggucagaag

SEQ ID NO: 51767 - RNA, 19 nt, Artificial Sequence
  Description of Artificial Sequence: Synthetic oligonucleotide
  Antisense strand to SEQ ID NO: 51686
cuucugaccacuagagggc

SEQ ID NO: 51768 - RNA, 19 nt, Artificial Sequence
  Description of Artificial Sequence: Synthetic oligonucleotide
  Sense strand starting at position 2749 of SEQ ID NO: 624
ccagaauccacacggguaa

SEQ ID NO: 51769 - RNA, 19 nt, Artificial Sequence
  Description of Artificial Sequence: Synthetic oligonucleotide
  Antisense strand to SEQ ID NO: 51688
uuacccguguggauucugg

SEQ ID NO: 51770 - RNA, 19 nt, Artificial Sequence
  Description of Artificial Sequence: Synthetic oligonucleotide
  Sense strand starting at position 2690 of SEQ ID NO: 624
ccggcucugcuugaaaguu

SEQ ID NO: 51771 - RNA, 19 nt, Artificial Sequence
  Description of Artificial Sequence: Synthetic oligonucleotide
  Antisense strand to SEQ ID NO: 51690
aacuuucaagcagagccgg

SEQ ID NO: 51772 - RNA, 19 nt, Artificial Sequence
  Description of Artificial Sequence: Synthetic oligonucleotide
  Sense strand starting at position 2689 of SEQ ID NO: 624
cccggcucugcuugaaagu

SEQ ID NO: 51773 - RNA, 19 nt, Artificial Sequence
  Description of Artificial Sequence: Synthetic oligonucleotide
  Antisense strand to SEQ ID NO: 51692
acuuucaagcagagccggg

SEQ ID NO: 51774 - RNA, 19 nt, Artificial Sequence
  Description of Artificial Sequence: Synthetic oligonucleotide
  Sense strand starting at position 2514 of SEQ ID NO: 624
ggcaauacucauggauuaa

SEQ ID NO: 51775 - RNA, 19 nt, Artificial Sequence
  Description of Artificial Sequence: Synthetic oligonucleotide
  Antisense strand to SEQ ID NO: 51694
uuaauccaugaguauugcc

SEQ ID NO: 51776 - RNA, 19 nt, Artificial Sequence
  Description of Artificial Sequence: Synthetic oligonucleotide
  Sense strand starting at position 2513 of SEQ ID NO: 624
gggcaauacucauggauua

SEQ ID NO: 51777 - RNA, 19 nt, Artificial Sequence
  Description of Artificial Sequence: Synthetic oligonucleotide
  Antisense strand to SEQ ID NO: 51696
uaauccaugaguauugccc

SEQ ID NO: 51778 - RNA, 19 nt, Artificial Sequence
  Description of Artificial Sequence: Synthetic oligonucleotide
  Sense strand starting at position 2502 of SEQ ID NO: 624
ggcucaaugcugggcaaua

SEQ ID NO: 51779 - RNA, 19 nt, Artificial Sequence
  Description of Artificial Sequence: Synthetic oligonucleotide
  Antisense strand to SEQ ID NO: 51698
uauugcccagcauugagcc

SEQ ID NO: 51780 - RNA, 19 nt, Artificial Sequence
  Description of Artificial Sequence: Synthetic oligonucleotide
  Sense strand starting at position 2363 of SEQ ID NO: 624
ugaccugagucagaaagcu

SEQ ID NO: 51781 - RNA, 19 nt, Artificial Sequence
  Description of Artificial Sequence: Synthetic oligonucleotide
  Antisense strand to SEQ ID NO: 51700
agcuuucugacucagguca

SEQ ID NO: 51782 - RNA, 19 nt, Artificial Sequence
  Description of Artificial Sequence: Synthetic oligonucleotide
  Sense strand starting at position 2275 of SEQ ID NO: 624
cccucuggcccaggaaauu

SEQ ID NO: 51783 - RNA, 19 nt, Artificial Sequence
  Description of Artificial Sequence: Synthetic oligonucleotide
  Antisense strand to SEQ ID NO: 51702
aauuuccugggccagaggg

SEQ ID NO: 51784 - RNA, 19 nt, Artificial Sequence
  Description of Artificial Sequence: Synthetic oligonucleotide
  Sense strand starting at position 2166 of SEQ ID NO: 624
uaaugauugucagagucug

SEQ ID NO: 51785 - RNA, 19 nt, Artificial Sequence
  Description of Artificial Sequence: Synthetic oligonucleotide
  Antisense strand to SEQ ID NO: 51704
cagacucugacaaucauua

SEQ ID NO: 51786 - RNA, 19 nt, Artificial Sequence
  Description of Artificial Sequence: Synthetic oligonucleotide
  Sense strand starting at position 2164 of SEQ ID NO: 624
uuuaaugauugucagaguc

SEQ ID NO: 51787 - RNA, 19 nt, Artificial Sequence
  Description of Artificial Sequence: Synthetic oligonucleotide
  Antisense strand to SEQ ID NO: 51706
gacucugacaaucauuaaa

SEQ ID NO: 51788 - RNA, 19 nt, Artificial Sequence
  Description of Artificial Sequence: Synthetic oligonucleotide
  Sense strand starting at position 2163 of SEQ ID NO: 624
guuuaaugauugucagagu

SEQ ID NO: 51789 - RNA, 19 nt, Artificial Sequence
  Description of Artificial Sequence: Synthetic oligonucleotide
  Antisense strand to SEQ ID NO: 51708
acucugacaaucauuaaac

SEQ ID NO: 51790 - RNA, 19 nt, Artificial Sequence
  Description of Artificial Sequence: Synthetic oligonucleotide
  Sense strand starting at position 2161 of SEQ ID NO: 624
ugguuuaaugauugucaga

SEQ ID NO: 51791 - RNA, 19 nt, Artificial Sequence
  Description of Artificial Sequence: Synthetic oligonucleotide
  Antisense strand to SEQ ID NO: 51710
ucugacaaucauuaaacca

SEQ ID NO: 51792 - RNA, 19 nt, Artificial Sequence
  Description of Artificial Sequence: Synthetic oligonucleotide
  Sense strand starting at position 2132 of SEQ ID NO: 624
gcaggcagugcugggaaau

SEQ ID NO: 51793 - RNA, 19 nt, Artificial Sequence
  Description of Artificial Sequence: Synthetic oligonucleotide
  Antisense strand to SEQ ID NO: 51712
auuucccagcacugccugc

SEQ ID NO: 51794 - RNA, 19 nt, Artificial Sequence
  Description of Artificial Sequence: Synthetic oligonucleotide
  Sense strand starting at position 2113 of SEQ ID NO: 624
ccacuuggcccggaucuua

SEQ ID NO: 51795 - RNA, 19 nt, Artificial Sequence
  Description of Artificial Sequence: Synthetic oligonucleotide
  Antisense strand to SEQ ID NO: 51714
uaagauccgggccaagugg

SEQ ID NO: 51796 - RNA, 19 nt, Artificial Sequence
  Description of Artificial Sequence: Synthetic oligonucleotide
  Sense strand starting at position 2036 of SEQ ID NO: 624
uggugucucauuggaugga

SEQ ID NO: 51797 - RNA, 19 nt, Artificial Sequence
  Description of Artificial Sequence: Synthetic oligonucleotide
  Antisense strand to SEQ ID NO: 51716
uccauccaaugagacacca

SEQ ID NO: 51798 - RNA, 19 nt, Artificial Sequence
  Description of Artificial Sequence: Synthetic oligonucleotide
  Sense strand starting at position 2034 of SEQ ID NO: 624
gcuggugucucauuggaug

SEQ ID NO: 51799 - RNA, 19 nt, Artificial Sequence
  Description of Artificial Sequence: Synthetic oligonucleotide
  Antisense strand to SEQ ID NO: 51718
cauccaaugagacaccagc

SEQ ID NO: 51800 - RNA, 19 nt, Artificial Sequence
  Description of Artificial Sequence: Synthetic oligonucleotide
  Sense strand starting at position 1143 of SEQ ID NO: 624
gccucuagcccuggaauuu

SEQ ID NO: 51801 - RNA, 19 nt, Artificial Sequence
  Description of Artificial Sequence: Synthetic oligonucleotide
  Antisense strand to SEQ ID NO: 51720
aaauuccagggcuagaggc

SEQ ID NO: 51802 - RNA, 19 nt, Artificial Sequence
  Description of Artificial Sequence: Synthetic oligonucleotide
  Sense strand starting at position 1142 of SEQ ID NO: 624
agccucuagcccuggaauu

SEQ ID NO: 51803 - RNA, 19 nt, Artificial Sequence
  Description of Artificial Sequence: Synthetic oligonucleotide
  Antisense strand to SEQ ID NO: 51722
aauuccagggcuagaggcu

SEQ ID NO: 51804 - RNA, 19 nt, Artificial Sequence
  Description of Artificial Sequence: Synthetic oligonucleotide
  Sense strand starting at position 819 of SEQ ID NO: 624
ccaccacgcugggauaaau

SEQ ID NO: 51805 - RNA, 19 nt, Artificial Sequence
  Description of Artificial Sequence: Synthetic oligonucleotide
  Antisense strand to SEQ ID NO: 51724
auuuaucccagcguggugg

SEQ ID NO: 51806 - RNA, 19 nt, Artificial Sequence
  Description of Artificial Sequence: Synthetic oligonucleotide
  Sense strand starting at position 84 of SEQ ID NO: 625
auagcaauagcuggagaaa

SEQ ID NO: 51807 - RNA, 19 nt, Artificial Sequence
  Description of Artificial Sequence: Synthetic oligonucleotide
  Antisense strand to SEQ ID NO: 51726
uuucuccagcuauugcuau

SEQ ID NO: 51808 - RNA, 19 nt, Artificial Sequence
  Description of Artificial Sequence: Synthetic oligonucleotide
  Sense strand starting at position 177 of SEQ ID NO: 625
cccgaaagauguuuccaau

SEQ ID NO: 51809 - RNA, 19 nt, Artificial Sequence
  Description of Artificial Sequence: Synthetic oligonucleotide
  Antisense strand to SEQ ID NO: 51728
auuggaaacaucuuucggg

SEQ ID NO: 51810 - RNA, 19 nt, Artificial Sequence
  Description of Artificial Sequence: Synthetic oligonucleotide
  Sense strand starting at position 195 of SEQ ID NO: 625
uugaucuucccaggaauga

SEQ ID NO: 51811 - RNA, 19 nt, Artificial Sequence
  Description of Artificial Sequence: Synthetic oligonucleotide
  Antisense strand to SEQ ID NO: 51730
ucauuccugggaagaucaa

SEQ ID NO: 51812 - RNA, 19 nt, Artificial Sequence
  Description of Artificial Sequence: Synthetic oligonucleotide
  Sense strand starting at position 408 of SEQ ID NO: 625
cuugguaagcacugaauua

SEQ ID NO: 51813 - RNA, 19 nt, Artificial Sequence
  Description of Artificial Sequence: Synthetic oligonucleotide
  Antisense strand to SEQ ID NO: 51732
uaauucagugcuuaccaag

SEQ ID NO: 51814 - RNA, 19 nt, Artificial Sequence
  Description of Artificial Sequence: Synthetic oligonucleotide
  Sense strand starting at position 511 of SEQ ID NO: 625
ccaccuuucgcccacgaga

SEQ ID NO: 51815 - RNA, 19 nt, Artificial Sequence
  Description of Artificial Sequence: Synthetic oligonucleotide
  Antisense strand to SEQ ID NO: 51734
ucucgugggcgaaaggugg

SEQ ID NO: 51816 - RNA, 19 nt, Artificial Sequence
  Description of Artificial Sequence: Synthetic oligonucleotide
  Sense strand starting at position 1530 of SEQ ID NO: 625
acagcuuucucaucgaagu

SEQ ID NO: 51817 - RNA, 19 nt, Artificial Sequence
  Description of Artificial Sequence: Synthetic oligonucleotide
  Antisense strand to SEQ ID NO: 51736
acuucgaugagaaagcugu

SEQ ID NO: 51818 - RNA, 19 nt, Artificial Sequence
  Description of Artificial Sequence: Synthetic oligonucleotide
  Sense strand starting at position 1531 of SEQ ID NO: 625
cagcuuucucaucgaagug

SEQ ID NO: 51819 - RNA, 19 nt, Artificial Sequence
  Description of Artificial Sequence: Synthetic oligonucleotide
  Antisense strand to SEQ ID NO: 51738
cacuucgaugagaaagcug

SEQ ID NO: 51820 - RNA, 19 nt, Artificial Sequence
  Description of Artificial Sequence: Synthetic oligonucleotide
  Sense strand starting at position 1564 of SEQ ID NO: 625
acuacaaacgcuugauaaa

SEQ ID NO: 51821 - RNA, 19 nt, Artificial Sequence
  Description of Artificial Sequence: Synthetic oligonucleotide
  Antisense strand to SEQ ID NO: 51740
uuuaucaagcguuuguagu

SEQ ID NO: 51822 - RNA, 19 nt, Artificial Sequence
  Description of Artificial Sequence: Synthetic oligonucleotide
  Sense strand starting at position 1565 of SEQ ID NO: 625
cuacaaacgcuugauaaau

SEQ ID NO: 51823 - RNA, 19 nt, Artificial Sequence
  Description of Artificial Sequence: Synthetic oligonucleotide
  Antisense strand to SEQ ID NO: 51742
auuuaucaagcguuuguag

SEQ ID NO: 51824 - RNA, 19 nt, Artificial Sequence
  Description of Artificial Sequence: Synthetic oligonucleotide
  Sense strand starting at position 1826 of SEQ ID NO: 625
uagcaagaguuucuagcuu

SEQ ID NO: 51825 - RNA, 19 nt, Artificial Sequence
  Description of Artificial Sequence: Synthetic oligonucleotide
  Antisense strand to SEQ ID NO: 51744
aagcuagaaacucuugcua

SEQ ID NO: 51826 - RNA, 19 nt, Artificial Sequence
  Description of Artificial Sequence: Synthetic oligonucleotide
  Sense strand starting at position 1830 of SEQ ID NO: 625
aagaguuucuagcuuagag

SEQ ID NO: 51827 - RNA, 19 nt, Artificial Sequence
  Description of Artificial Sequence: Synthetic oligonucleotide
  Antisense strand to SEQ ID NO: 51746
cucuaagcuagaaacucuu

SEQ ID NO: 51828 - RNA, 19 nt, Artificial Sequence
  Description of Artificial Sequence: Synthetic oligonucleotide
  Sense strand starting at position 1832 of SEQ ID NO: 625
gaguuucuagcuuagaggu

SEQ ID NO: 51829 - RNA, 19 nt, Artificial Sequence
  Description of Artificial Sequence: Synthetic oligonucleotide
  Antisense strand to SEQ ID NO: 51748
accucuaagcuagaaacuc

SEQ ID NO: 51830 - RNA, 19 nt, Artificial Sequence
  Description of Artificial Sequence: Synthetic oligonucleotide
  Sense strand starting at position 1898 of SEQ ID NO: 625
aggcuacuugagcaguuua

SEQ ID NO: 51831 - RNA, 19 nt, Artificial Sequence
  Description of Artificial Sequence: Synthetic oligonucleotide
  Antisense strand to SEQ ID NO: 51750
uaaacugcucaaguagccu

SEQ ID NO: 51832 - RNA, 19 nt, Artificial Sequence
  Description of Artificial Sequence: Synthetic oligonucleotide
  Sense strand starting at position 1978 of SEQ ID NO: 625
uuagguguuuguuuaacaa

SEQ ID NO: 51833 - RNA, 19 nt, Artificial Sequence
  Description of Artificial Sequence: Synthetic oligonucleotide
  Antisense strand to SEQ ID NO: 51752
uuguuaaacaaacaccuaa

SEQ ID NO: 51834 - RNA, 19 nt, Artificial Sequence
  Description of Artificial Sequence: Synthetic oligonucleotide
  Sense strand starting at position 2004 of SEQ ID NO: 625
aagagaggucagugucuga

SEQ ID NO: 51835 - RNA, 19 nt, Artificial Sequence
  Description of Artificial Sequence: Synthetic oligonucleotide
  Antisense strand to SEQ ID NO: 51754
ucagacacugaccucucuu

SEQ ID NO: 51836 - RNA, 19 nt, Artificial Sequence
  Description of Artificial Sequence: Synthetic oligonucleotide
  Sense strand starting at position 2007 of SEQ ID NO: 625
agaggucagugucugaguu

SEQ ID NO: 51837 - RNA, 19 nt, Artificial Sequence
  Description of Artificial Sequence: Synthetic oligonucleotide
  Antisense strand to SEQ ID NO: 51756
aacucagacacugaccucu

SEQ ID NO: 51838 - RNA, 19 nt, Artificial Sequence
  Description of Artificial Sequence: Synthetic oligonucleotide
  Sense strand starting at position 2008 of SEQ ID NO: 625
gaggucagugucugaguua

SEQ ID NO: 51839 - RNA, 19 nt, Artificial Sequence
  Description of Artificial Sequence: Synthetic oligonucleotide
  Antisense strand to SEQ ID NO: 51758
uaacucagacacugaccuc

SEQ ID NO: 51840 - RNA, 19 nt, Artificial Sequence
  Description of Artificial Sequence: Synthetic oligonucleotide
  Sense strand starting at position 2017 of SEQ ID NO: 625
gucugaguuacugguuauu

SEQ ID NO: 51841 - RNA, 19 nt, Artificial Sequence
  Description of Artificial Sequence: Synthetic oligonucleotide
  Antisense strand to SEQ ID NO: 51760
aauaaccaguaacucagac

SEQ ID NO: 51842 - RNA, 19 nt, Artificial Sequence
  Description of Artificial Sequence: Synthetic oligonucleotide
  Sense strand starting at position 2020 of SEQ ID NO: 625
ugaguuacugguuauucga

SEQ ID NO: 51843 - RNA, 19 nt, Artificial Sequence
  Description of Artificial Sequence: Synthetic oligonucleotide
  Antisense strand to SEQ ID NO: 51762
ucgaauaaccaguaacuca

SEQ ID NO: 51844 - RNA, 19 nt, Artificial Sequence
  Description of Artificial Sequence: Synthetic oligonucleotide
  Sense strand starting at position 2064 of SEQ ID NO: 625
uagugaguugcuuaaccuu

SEQ ID NO: 51845 - RNA, 19 nt, Artificial Sequence
  Description of Artificial Sequence: Synthetic oligonucleotide
  Antisense strand to SEQ ID NO: 51764
aagguuaagcaacucacua

SEQ ID NO: 51846 - RNA, 19 nt, Artificial Sequence
  Description of Artificial Sequence: Synthetic oligonucleotide
  Sense strand starting at position 2111 of SEQ ID NO: 625
gacgauaaugagcagcauu

SEQ ID NO: 51847 - RNA, 19 nt, Artificial Sequence
  Description of Artificial Sequence: Synthetic oligonucleotide
  Antisense strand to SEQ ID NO: 51766
aaugcugcucauuaucguc

SEQ ID NO: 51848 - RNA, 19 nt, Artificial Sequence
  Description of Artificial Sequence: Synthetic oligonucleotide
  Sense strand starting at position 2249 of SEQ ID NO: 625
aauugaacucacugaguga

SEQ ID NO: 51849 - RNA, 19 nt, Artificial Sequence
  Description of Artificial Sequence: Synthetic oligonucleotide
  Antisense strand to SEQ ID NO: 51768
ucacucagugaguucaauu

SEQ ID NO: 51850 - RNA, 19 nt, Artificial Sequence
  Description of Artificial Sequence: Synthetic oligonucleotide
  Sense strand starting at position 2252 of SEQ ID NO: 625
ugaacucacugagugaaau

SEQ ID NO: 51851 - RNA, 19 nt, Artificial Sequence
  Description of Artificial Sequence: Synthetic oligonucleotide
  Antisense strand to SEQ ID NO: 51770
auuucacucagugaguuca

SEQ ID NO: 51852 - RNA, 19 nt, Artificial Sequence
  Description of Artificial Sequence: Synthetic oligonucleotide
  Sense strand starting at position 2260 of SEQ ID NO: 625
cugagugaaaugugauucu

SEQ ID NO: 51853 - RNA, 19 nt, Artificial Sequence
  Description of Artificial Sequence: Synthetic oligonucleotide
  Antisense strand to SEQ ID NO: 51772
agaaucacauuucacucag

SEQ ID NO: 51854 - RNA, 19 nt, Artificial Sequence
  Description of Artificial Sequence: Synthetic oligonucleotide
  Sense strand starting at position 2263 of SEQ ID NO: 625
agugaaaugugauucuguc

SEQ ID NO: 51855 - RNA, 19 nt, Artificial Sequence
  Description of Artificial Sequence: Synthetic oligonucleotide
  Antisense strand to SEQ ID NO: 51774
gacagaaucacauuucacu

SEQ ID NO: 51856 - RNA, 19 nt, Artificial Sequence
  Description of Artificial Sequence: Synthetic oligonucleotide
  Sense strand starting at position 2367 of SEQ ID NO: 625
aaagguagcuauuccugua

SEQ ID NO: 51857 - RNA, 19 nt, Artificial Sequence
  Description of Artificial Sequence: Synthetic oligonucleotide
  Antisense strand to SEQ ID NO: 51776
uacaggaauagcuaccuuu

SEQ ID NO: 51858 - RNA, 19 nt, Artificial Sequence
  Description of Artificial Sequence: Synthetic oligonucleotide
  Sense strand starting at position 2568 of SEQ ID NO: 625
aagguaggcuguuuaggau

SEQ ID NO: 51859 - RNA, 19 nt, Artificial Sequence
  Description of Artificial Sequence: Synthetic oligonucleotide
  Antisense strand to SEQ ID NO: 51778
auccuaaacagccuaccuu

SEQ ID NO: 51860 - RNA, 19 nt, Artificial Sequence
  Description of Artificial Sequence: Synthetic oligonucleotide
  Sense strand starting at position 2657 of SEQ ID NO: 625
uguggagaucugcacacua

SEQ ID NO: 51861 - RNA, 19 nt, Artificial Sequence
  Description of Artificial Sequence: Synthetic oligonucleotide
  Antisense strand to SEQ ID NO: 51780
uagugugcagaucuccaca

SEQ ID NO: 51862 - RNA, 19 nt, Artificial Sequence
  Description of Artificial Sequence: Synthetic oligonucleotide
  Sense strand starting at position 2760 of SEQ ID NO: 625
cggcauugucaauugcagu

SEQ ID NO: 51863 - RNA, 19 nt, Artificial Sequence
  Description of Artificial Sequence: Synthetic oligonucleotide
  Antisense strand to SEQ ID NO: 51782
acugcaauugacaaugccg

SEQ ID NO: 51864 - RNA, 19 nt, Artificial Sequence
  Description of Artificial Sequence: Synthetic oligonucleotide
  Sense strand starting at position 2766 of SEQ ID NO: 625
ugucaauugcaguguauuu

SEQ ID NO: 51865 - RNA, 19 nt, Artificial Sequence
  Description of Artificial Sequence: Synthetic oligonucleotide
  Antisense strand to SEQ ID NO: 51784
aaauacacugcaauugaca

SEQ ID NO: 51866 - RNA, 19 nt, Artificial Sequence
  Description of Artificial Sequence: Synthetic oligonucleotide
  Sense strand starting at position 2863 of SEQ ID NO: 625
gcgguacauauugacagaa

SEQ ID NO: 51867 - RNA, 19 nt, Artificial Sequence
  Description of Artificial Sequence: Synthetic oligonucleotide
  Antisense strand to SEQ ID NO: 51786
uucugucaauauguaccgc

SEQ ID NO: 51868 - RNA, 19 nt, Artificial Sequence
  Description of Artificial Sequence: Synthetic oligonucleotide
  Sense strand starting at position 2865 of SEQ ID NO: 625
gguacauauugacagaaga

SEQ ID NO: 51869 - RNA, 19 nt, Artificial Sequence
  Description of Artificial Sequence: Synthetic oligonucleotide
  Antisense strand to SEQ ID NO: 51788
ucuucugucaauauguacc

SEQ ID NO: 51870 - RNA, 19 nt, Artificial Sequence
  Description of Artificial Sequence: Synthetic oligonucleotide
  Sense strand starting at position 2932 of SEQ ID NO: 625
uaauuaaugugccugguuu

SEQ ID NO: 51871 - RNA, 19 nt, Artificial Sequence
  Description of Artificial Sequence: Synthetic oligonucleotide
  Antisense strand to SEQ ID NO: 51790
aaaccaggcacauuaauua

SEQ ID NO: 51872 - RNA, 19 nt, Artificial Sequence
  Description of Artificial Sequence: Synthetic oligonucleotide
  Sense strand starting at position 2984 of SEQ ID NO: 625
cuccaugguuccucacaca

SEQ ID NO: 51873 - RNA, 19 nt, Artificial Sequence
  Description of Artificial Sequence: Synthetic oligonucleotide
  Antisense strand to SEQ ID NO: 51792
ugugugaggaaccauggag

SEQ ID NO: 51874 - RNA, 19 nt, Artificial Sequence
  Description of Artificial Sequence: Synthetic oligonucleotide
  Sense strand starting at position 3019 of SEQ ID NO: 625
gugcaaacuccaugguagu

SEQ ID NO: 51875 - RNA, 19 nt, Artificial Sequence
  Description of Artificial Sequence: Synthetic oligonucleotide
  Antisense strand to SEQ ID NO: 51794
acuaccauggaguuugcac

SEQ ID NO: 51876 - RNA, 19 nt, Artificial Sequence
  Description of Artificial Sequence: Synthetic oligonucleotide
  Sense strand starting at position 3020 of SEQ ID NO: 625
ugcaaacuccaugguaguu

SEQ ID NO: 51877 - RNA, 19 nt, Artificial Sequence
  Description of Artificial Sequence: Synthetic oligonucleotide
  Antisense strand to SEQ ID NO: 51796
aacuaccauggaguuugca

SEQ ID NO: 51878 - RNA, 19 nt, Artificial Sequence
  Description of Artificial Sequence: Synthetic oligonucleotide
  Sense strand starting at position 3065 of SEQ ID NO: 625
uuucguuaucuuguuuggu

SEQ ID NO: 51879 - RNA, 19 nt, Artificial Sequence
  Description of Artificial Sequence: Synthetic oligonucleotide
  Antisense strand to SEQ ID NO: 51798
accaaacaagauaacgaaa

SEQ ID NO: 51880 - RNA, 19 nt, Artificial Sequence
  Description of Artificial Sequence: Synthetic oligonucleotide
  Sense strand starting at position 3108 of SEQ ID NO: 625
uccugaucuuagccuuagu

SEQ ID NO: 51881 - RNA, 19 nt, Artificial Sequence
  Description of Artificial Sequence: Synthetic oligonucleotide
  Antisense strand to SEQ ID NO: 51800
acuaaggcuaagaucagga

SEQ ID NO: 51882 - RNA, 19 nt, Artificial Sequence
  Description of Artificial Sequence: Synthetic oligonucleotide
  Sense strand starting at position 3111 of SEQ ID NO: 625
ugaucuuagccuuaguuac

SEQ ID NO: 51883 - RNA, 19 nt, Artificial Sequence
  Description of Artificial Sequence: Synthetic oligonucleotide
  Antisense strand to SEQ ID NO: 51802
guaacuaaggcuaagauca

SEQ ID NO: 51884 - RNA, 19 nt, Artificial Sequence
  Description of Artificial Sequence: Synthetic oligonucleotide
  Sense strand starting at position 3918 of SEQ ID NO: 625
ccuaguuaugaucauuacu

SEQ ID NO: 51885 - RNA, 19 nt, Artificial Sequence
  Description of Artificial Sequence: Synthetic oligonucleotide
  Antisense strand to SEQ ID NO: 51804
aguaaugaucauaacuagg

SEQ ID NO: 51886 - RNA, 19 nt, Artificial Sequence
  Description of Artificial Sequence: Synthetic oligonucleotide
  Sense strand starting at position 41 of SEQ ID NO: 626
ggcaguuugguugaggcau

SEQ ID NO: 51887 - RNA, 19 nt, Artificial Sequence
  Description of Artificial Sequence: Synthetic oligonucleotide
  Antisense strand to SEQ ID NO: 51806
augccucaaccaaacugcc

SEQ ID NO: 51888 - RNA, 19 nt, Artificial Sequence
  Description of Artificial Sequence: Synthetic oligonucleotide
  Sense strand starting at position 74 of SEQ ID NO: 626
uccugcuugccugggaaga

SEQ ID NO: 51889 - RNA, 19 nt, Artificial Sequence
  Description of Artificial Sequence: Synthetic oligonucleotide
  Antisense strand to SEQ ID NO: 51808
ucuucccaggcaagcagga

SEQ ID NO: 51890 - RNA, 19 nt, Artificial Sequence
  Description of Artificial Sequence: Synthetic oligonucleotide
  Sense strand starting at position 194 of SEQ ID NO: 626
ccaggucucuuacuggaga

SEQ ID NO: 51891 - RNA, 19 nt, Artificial Sequence
  Description of Artificial Sequence: Synthetic oligonucleotide
  Antisense strand to SEQ ID NO: 51810
ucuccaguaagagaccugg

SEQ ID NO: 51892 - RNA, 19 nt, Artificial Sequence
  Description of Artificial Sequence: Synthetic oligonucleotide
  Sense strand starting at position 195 of SEQ ID NO: 626
caggucucuuacuggagaa

SEQ ID NO: 51893 - RNA, 19 nt, Artificial Sequence
  Description of Artificial Sequence: Synthetic oligonucleotide
  Antisense strand to SEQ ID NO: 51812
uucuccaguaagagaccug

SEQ ID NO: 51894 - RNA, 19 nt, Artificial Sequence
  Description of Artificial Sequence: Synthetic oligonucleotide
  Sense strand starting at position 196 of SEQ ID NO: 626
aggucucuuacuggagaau

SEQ ID NO: 51895 - RNA, 19 nt, Artificial Sequence
  Description of Artificial Sequence: Synthetic oligonucleotide
  Antisense strand to SEQ ID NO: 51814
auucuccaguaagagaccu

SEQ ID NO: 51896 - RNA, 19 nt, Artificial Sequence
  Description of Artificial Sequence: Synthetic oligonucleotide
  Sense strand starting at position 207 of SEQ ID NO: 626
uggagaaucuuaccuucuc

SEQ ID NO: 51897 - RNA, 19 nt, Artificial Sequence
  Description of Artificial Sequence: Synthetic oligonucleotide
  Antisense strand to SEQ ID NO: 51816
gagaagguaagauucucca

SEQ ID NO: 51898 - RNA, 19 nt, Artificial Sequence
  Description of Artificial Sequence: Synthetic oligonucleotide
  Sense strand starting at position 208 of SEQ ID NO: 626
ggagaaucuuaccuucuca

SEQ ID NO: 51899 - RNA, 19 nt, Artificial Sequence
  Description of Artificial Sequence: Synthetic oligonucleotide
  Antisense strand to SEQ ID NO: 51818
ugagaagguaagauucucc

SEQ ID NO: 51900 - RNA, 19 nt, Artificial Sequence
  Description of Artificial Sequence: Synthetic oligonucleotide
  Sense strand starting at position 294 of SEQ ID NO: 626
cuuucuucucuccagggau

SEQ ID NO: 51901 - RNA, 19 nt, Artificial Sequence
  Description of Artificial Sequence: Synthetic oligonucleotide
  Antisense strand to SEQ ID NO: 51820
aucccuggagagaagaaag

SEQ ID NO: 51902 - RNA, 19 nt, Artificial Sequence
  Description of Artificial Sequence: Synthetic oligonucleotide
  Sense strand starting at position 445 of SEQ ID NO: 626
agaaccuuauccucggauu

SEQ ID NO: 51903 - RNA, 19 nt, Artificial Sequence
  Description of Artificial Sequence: Synthetic oligonucleotide
  Antisense strand to SEQ ID NO: 51822
aauccgaggauaagguucu

SEQ ID NO: 51904 - RNA, 19 nt, Artificial Sequence
  Description of Artificial Sequence: Synthetic oligonucleotide
  Sense strand starting at position 483 of SEQ ID NO: 626
acacuuaugucccuacgau

SEQ ID NO: 51905 - RNA, 19 nt, Artificial Sequence
  Description of Artificial Sequence: Synthetic oligonucleotide
  Antisense strand to SEQ ID NO: 51824
aucguagggacauaagugu

SEQ ID NO: 51906 - RNA, 19 nt, Artificial Sequence
  Description of Artificial Sequence: Synthetic oligonucleotide
  Sense strand starting at position 808 of SEQ ID NO: 626
gagcuaagguccuagauuc

SEQ ID NO: 51907 - RNA, 19 nt, Artificial Sequence
  Description of Artificial Sequence: Synthetic oligonucleotide
  Antisense strand to SEQ ID NO: 51826
gaaucuaggaccuuagcuc

SEQ ID NO: 51908 - RNA, 19 nt, Artificial Sequence
  Description of Artificial Sequence: Synthetic oligonucleotide
  Sense strand starting at position 815 of SEQ ID NO: 626
gguccuagauucugagcca

SEQ ID NO: 51909 - RNA, 19 nt, Artificial Sequence
  Description of Artificial Sequence: Synthetic oligonucleotide
  Antisense strand to SEQ ID NO: 51828
uggcucagaaucuaggacc

SEQ ID NO: 51910 - RNA, 19 nt, Artificial Sequence
  Description of Artificial Sequence: Synthetic oligonucleotide
  Sense strand starting at position 818 of SEQ ID NO: 626
ccuagauucugagccagaa

SEQ ID NO: 51911 - RNA, 19 nt, Artificial Sequence
  Description of Artificial Sequence: Synthetic oligonucleotide
  Antisense strand to SEQ ID NO: 51830
uucuggcucagaaucuagg

SEQ ID NO: 51912 - RNA, 19 nt, Artificial Sequence
  Description of Artificial Sequence: Synthetic oligonucleotide
  Sense strand starting at position 918 of SEQ ID NO: 626
ggccauaacugcucaguuu

SEQ ID NO: 51913 - RNA, 19 nt, Artificial Sequence
  Description of Artificial Sequence: Synthetic oligonucleotide
  Antisense strand to SEQ ID NO: 51832
aaacugagcaguuauggcc

SEQ ID NO: 51914 - RNA, 19 nt, Artificial Sequence
  Description of Artificial Sequence: Synthetic oligonucleotide
  Sense strand starting at position 1181 of SEQ ID NO: 626
aaggcauucuuggaacaga

SEQ ID NO: 51915 - RNA, 19 nt, Artificial Sequence
  Description of Artificial Sequence: Synthetic oligonucleotide
  Antisense strand to SEQ ID NO: 51834
ucuguuccaagaaugccuu

SEQ ID NO: 51916 - RNA, 19 nt, Artificial Sequence
  Description of Artificial Sequence: Synthetic oligonucleotide
  Sense strand starting at position 1435 of SEQ ID NO: 626
acgucuccugccugacaca

SEQ ID NO: 51917 - RNA, 19 nt, Artificial Sequence
  Description of Artificial Sequence: Synthetic oligonucleotide
  Antisense strand to SEQ ID NO: 51836
ugugucaggcaggagacgu

SEQ ID NO: 51918 - RNA, 19 nt, Artificial Sequence
  Description of Artificial Sequence: Synthetic oligonucleotide
  Sense strand starting at position 1672 of SEQ ID NO: 626
agguuccucccugacacau

SEQ ID NO: 51919 - RNA, 19 nt, Artificial Sequence
  Description of Artificial Sequence: Synthetic oligonucleotide
  Antisense strand to SEQ ID NO: 51838
augugucagggaggaaccu

SEQ ID NO: 51920 - RNA, 19 nt, Artificial Sequence
  Description of Artificial Sequence: Synthetic oligonucleotide
  Sense strand starting at position 1873 of SEQ ID NO: 626
aaaggugccuggcaaaguu

SEQ ID NO: 51921 - RNA, 19 nt, Artificial Sequence
  Description of Artificial Sequence: Synthetic oligonucleotide
  Antisense strand to SEQ ID NO: 51840
aacuuugccaggcaccuuu

SEQ ID NO: 51922 - RNA, 19 nt, Artificial Sequence
  Description of Artificial Sequence: Synthetic oligonucleotide
  Sense strand starting at position 2280 of SEQ ID NO: 626
ccgacuuucugucaccaga

SEQ ID NO: 51923 - RNA, 19 nt, Artificial Sequence
  Description of Artificial Sequence: Synthetic oligonucleotide
  Antisense strand to SEQ ID NO: 51842
ucuggugacagaaagucgg

SEQ ID NO: 51924 - RNA, 19 nt, Artificial Sequence
  Description of Artificial Sequence: Synthetic oligonucleotide
  Sense strand starting at position 2702 of SEQ ID NO: 626
uggucuuagcgggagggaa

SEQ ID NO: 51925 - RNA, 19 nt, Artificial Sequence
  Description of Artificial Sequence: Synthetic oligonucleotide
  Antisense strand to SEQ ID NO: 51844
uucccucccgcuaagacca

SEQ ID NO: 51926 - RNA, 19 nt, Artificial Sequence
  Description of Artificial Sequence: Synthetic oligonucleotide
  Sense strand starting at position 2821 of SEQ ID NO: 626
cauagugaaucacuggcua

SEQ ID NO: 51927 - RNA, 19 nt, Artificial Sequence
  Description of Artificial Sequence: Synthetic oligonucleotide
  Antisense strand to SEQ ID NO: 51846
uagccagugauucacuaug

SEQ ID NO: 51928 - RNA, 19 nt, Artificial Sequence
  Description of Artificial Sequence: Synthetic oligonucleotide
  Sense strand starting at position 2825 of SEQ ID NO: 626
gugaaucacuggcuaaucu

SEQ ID NO: 51929 - RNA, 19 nt, Artificial Sequence
  Description of Artificial Sequence: Synthetic oligonucleotide
  Antisense strand to SEQ ID NO: 51848
agauuagccagugauucac

SEQ ID NO: 51930 - RNA, 19 nt, Artificial Sequence
  Description of Artificial Sequence: Synthetic oligonucleotide
  Sense strand starting at position 2834 of SEQ ID NO: 626
uggcuaaucuggccuucga

SEQ ID NO: 51931 - RNA, 19 nt, Artificial Sequence
  Description of Artificial Sequence: Synthetic oligonucleotide
  Antisense strand to SEQ ID NO: 51850
ucgaaggccagauuagcca

SEQ ID NO: 51932 - RNA, 19 nt, Artificial Sequence
  Description of Artificial Sequence: Synthetic oligonucleotide
  Sense strand starting at position 2838 of SEQ ID NO: 626
uaaucuggccuucgaggua

SEQ ID NO: 51933 - RNA, 19 nt, Artificial Sequence
  Description of Artificial Sequence: Synthetic oligonucleotide
  Antisense strand to SEQ ID NO: 51852
uaccucgaaggccagauua

SEQ ID NO: 51934 - RNA, 19 nt, Artificial Sequence
  Description of Artificial Sequence: Synthetic oligonucleotide
  Sense strand starting at position 2843 of SEQ ID NO: 626
uggccuucgagguagugaa

SEQ ID NO: 51935 - RNA, 19 nt, Artificial Sequence
  Description of Artificial Sequence: Synthetic oligonucleotide
  Antisense strand to SEQ ID NO: 51854
uucacuaccucgaaggcca

SEQ ID NO: 51936 - RNA, 19 nt, Artificial Sequence
  Description of Artificial Sequence: Synthetic oligonucleotide
  Sense strand starting at position 2871 of SEQ ID NO: 626
gggaaaugaagcugacugu

SEQ ID NO: 51937 - RNA, 19 nt, Artificial Sequence
  Description of Artificial Sequence: Synthetic oligonucleotide
  Antisense strand to SEQ ID NO: 51856
acagucagcuucauuuccc

SEQ ID NO: 51938 - RNA, 19 nt, Artificial Sequence
  Description of Artificial Sequence: Synthetic oligonucleotide
  Sense strand starting at position 2901 of SEQ ID NO: 626
guaggucuugaaggccaaa

SEQ ID NO: 51939 - RNA, 19 nt, Artificial Sequence
  Description of Artificial Sequence: Synthetic oligonucleotide
  Antisense strand to SEQ ID NO: 51858
uuuggccuucaagaccuac

SEQ ID NO: 51940 - RNA, 19 nt, Artificial Sequence
  Description of Artificial Sequence: Synthetic oligonucleotide
  Sense strand starting at position 2985 of SEQ ID NO: 626
ucaagcuuguaucauuagu

SEQ ID NO: 51941 - RNA, 19 nt, Artificial Sequence
  Description of Artificial Sequence: Synthetic oligonucleotide
  Antisense strand to SEQ ID NO: 51860
acuaaugauacaagcuuga

SEQ ID NO: 51942 - RNA, 19 nt, Artificial Sequence
  Description of Artificial Sequence: Synthetic oligonucleotide
  Sense strand starting at position 3054 of SEQ ID NO: 626
agucuaucuggcugaauca

SEQ ID NO: 51943 - RNA, 19 nt, Artificial Sequence
  Description of Artificial Sequence: Synthetic oligonucleotide
  Antisense strand to SEQ ID NO: 51862
ugauucagccagauagacu

SEQ ID NO: 51944 - RNA, 19 nt, Artificial Sequence
  Description of Artificial Sequence: Synthetic oligonucleotide
  Sense strand starting at position 3191 of SEQ ID NO: 626
uggacuggcucucuauaua

SEQ ID NO: 51945 - RNA, 19 nt, Artificial Sequence
  Description of Artificial Sequence: Synthetic oligonucleotide
  Antisense strand to SEQ ID NO: 51864
uauauagagagccagucca

SEQ ID NO: 51946 - RNA, 19 nt, Artificial Sequence
  Description of Artificial Sequence: Synthetic oligonucleotide
  Sense strand starting at position 3352 of SEQ ID NO: 626
cuaacaacugcuuguauga

SEQ ID NO: 51947 - RNA, 19 nt, Artificial Sequence
  Description of Artificial Sequence: Synthetic oligonucleotide
  Antisense strand to SEQ ID NO: 51866
ucauacaagcaguuguuag

SEQ ID NO: 51948 - RNA, 19 nt, Artificial Sequence
  Description of Artificial Sequence: Synthetic oligonucleotide
  Sense strand starting at position 3361 of SEQ ID NO: 626
gcuuguaugauuggauggu

SEQ ID NO: 51949 - RNA, 19 nt, Artificial Sequence
  Description of Artificial Sequence: Synthetic oligonucleotide
  Antisense strand to SEQ ID NO: 51868
accauccaaucauacaagc

SEQ ID NO: 51950 - RNA, 19 nt, Artificial Sequence
  Description of Artificial Sequence: Synthetic oligonucleotide
  Sense strand starting at position 3365 of SEQ ID NO: 626
guaugauuggaugguguaa

SEQ ID NO: 51951 - RNA, 19 nt, Artificial Sequence
  Description of Artificial Sequence: Synthetic oligonucleotide
  Antisense strand to SEQ ID NO: 51870
uuacaccauccaaucauac

SEQ ID NO: 51952 - RNA, 19 nt, Artificial Sequence
  Description of Artificial Sequence: Synthetic oligonucleotide
  Sense strand starting at position 3367 of SEQ ID NO: 626
augauuggaugguguaagu

SEQ ID NO: 51953 - RNA, 19 nt, Artificial Sequence
  Description of Artificial Sequence: Synthetic oligonucleotide
  Antisense strand to SEQ ID NO: 51872
acuuacaccauccaaucau

SEQ ID NO: 51954 - RNA, 19 nt, Artificial Sequence
  Description of Artificial Sequence: Synthetic oligonucleotide
  Sense strand starting at position 3377 of SEQ ID NO: 626
gguguaagugcggacagaa

SEQ ID NO: 51955 - RNA, 19 nt, Artificial Sequence
  Description of Artificial Sequence: Synthetic oligonucleotide
  Antisense strand to SEQ ID NO: 51874
uucuguccgcacuuacacc

SEQ ID NO: 51956 - RNA, 19 nt, Artificial Sequence
  Description of Artificial Sequence: Synthetic oligonucleotide
  Sense strand starting at position 3387 of SEQ ID NO: 626
cggacagaauuagggaauu

SEQ ID NO: 51957 - RNA, 19 nt, Artificial Sequence
  Description of Artificial Sequence: Synthetic oligonucleotide
  Antisense strand to SEQ ID NO: 51876
aauucccuaauucuguccg

SEQ ID NO: 51958 - RNA, 19 nt, Artificial Sequence
  Description of Artificial Sequence: Synthetic oligonucleotide
  Sense strand starting at position 109 of SEQ ID NO: 627
agaaccuuauccucggauu

SEQ ID NO: 51959 - RNA, 19 nt, Artificial Sequence
  Description of Artificial Sequence: Synthetic oligonucleotide
  Antisense strand to SEQ ID NO: 51878
aauccgaggauaagguucu

SEQ ID NO: 51960 - RNA, 19 nt, Artificial Sequence
  Description of Artificial Sequence: Synthetic oligonucleotide
  Sense strand starting at position 147 of SEQ ID NO: 627
acacuuaugucccuacgau

SEQ ID NO: 51961 - RNA, 19 nt, Artificial Sequence
  Description of Artificial Sequence: Synthetic oligonucleotide
  Antisense strand to SEQ ID NO: 51880
aucguagggacauaagugu

SEQ ID NO: 51962 - RNA, 19 nt, Artificial Sequence
  Description of Artificial Sequence: Synthetic oligonucleotide
  Sense strand starting at position 472 of SEQ ID NO: 627
gagcuaagguccuagauuc

SEQ ID NO: 51963 - RNA, 19 nt, Artificial Sequence
  Description of Artificial Sequence: Synthetic oligonucleotide
  Antisense strand to SEQ ID NO: 51882
gaaucuaggaccuuagcuc

SEQ ID NO: 51964 - RNA, 19 nt, Artificial Sequence
  Description of Artificial Sequence: Synthetic oligonucleotide
  Sense strand starting at position 479 of SEQ ID NO: 627
gguccuagauucugagcca

SEQ ID NO: 51965 - RNA, 19 nt, Artificial Sequence
  Description of Artificial Sequence: Synthetic oligonucleotide
  Antisense strand to SEQ ID NO: 51884
uggcucagaaucuaggacc

SEQ ID NO: 51966 - RNA, 19 nt, Artificial Sequence
  Description of Artificial Sequence: Synthetic oligonucleotide
  Sense strand starting at position 482 of SEQ ID NO: 627
ccuagauucugagccagaa

SEQ ID NO: 51967 - RNA, 19 nt, Artificial Sequence
  Description of Artificial Sequence: Synthetic oligonucleotide
  Antisense strand to SEQ ID NO: 51886
uucuggcucagaaucuagg

SEQ ID NO: 51968 - RNA, 19 nt, Artificial Sequence
  Description of Artificial Sequence: Synthetic oligonucleotide
  Sense strand starting at position 582 of SEQ ID NO: 627
ggccauaacugcucaguuu

SEQ ID NO: 51969 - RNA, 19 nt, Artificial Sequence
  Description of Artificial Sequence: Synthetic oligonucleotide
  Antisense strand to SEQ ID NO: 51888
aaacugagcaguuauggcc

SEQ ID NO: 51970 - RNA, 19 nt, Artificial Sequence
  Description of Artificial Sequence: Synthetic oligonucleotide
  Sense strand starting at position 845 of SEQ ID NO: 627
aaggcauucuuggaacaga

SEQ ID NO: 51971 - RNA, 19 nt, Artificial Sequence
  Description of Artificial Sequence: Synthetic oligonucleotide
  Antisense strand to SEQ ID NO: 51890
ucuguuccaagaaugccuu

SEQ ID NO: 51972 - RNA, 19 nt, Artificial Sequence
  Description of Artificial Sequence: Synthetic oligonucleotide
  Sense strand starting at position 1099 of SEQ ID NO: 627
acgucuccugccugacaca

SEQ ID NO: 51973 - RNA, 19 nt, Artificial Sequence
  Description of Artificial Sequence: Synthetic oligonucleotide
  Antisense strand to SEQ ID NO: 51892
ugugucaggcaggagacgu

SEQ ID NO: 51974 - RNA, 19 nt, Artificial Sequence
  Description of Artificial Sequence: Synthetic oligonucleotide
  Sense strand starting at position 1336 of SEQ ID NO: 627
agguuccucccugacacau

SEQ ID NO: 51975 - RNA, 19 nt, Artificial Sequence
  Description of Artificial Sequence: Synthetic oligonucleotide
  Antisense strand to SEQ ID NO: 51894
augugucagggaggaaccu

SEQ ID NO: 51976 - RNA, 19 nt, Artificial Sequence
  Description of Artificial Sequence: Synthetic oligonucleotide
  Sense strand starting at position 1537 of SEQ ID NO: 627
aaaggugccuggcaaaguu

SEQ ID NO: 51977 - RNA, 19 nt, Artificial Sequence
  Description of Artificial Sequence: Synthetic oligonucleotide
  Antisense strand to SEQ ID NO: 51896
aacuuugccaggcaccuuu

SEQ ID NO: 51978 - RNA, 19 nt, Artificial Sequence
  Description of Artificial Sequence: Synthetic oligonucleotide
  Sense strand starting at position 1944 of SEQ ID NO: 627
ccgacuuucugucaccaga

SEQ ID NO: 51979 - RNA, 19 nt, Artificial Sequence
  Description of Artificial Sequence: Synthetic oligonucleotide
  Antisense strand to SEQ ID NO: 51898
ucuggugacagaaagucgg

SEQ ID NO: 51980 - RNA, 19 nt, Artificial Sequence
  Description of Artificial Sequence: Synthetic oligonucleotide
  Sense strand starting at position 2366 of SEQ ID NO: 627
uggucuuagcgggagggaa

SEQ ID NO: 51981 - RNA, 19 nt, Artificial Sequence
  Description of Artificial Sequence: Synthetic oligonucleotide
  Antisense strand to SEQ ID NO: 51900
uucccucccgcuaagacca

SEQ ID NO: 51982 - RNA, 19 nt, Artificial Sequence
  Description of Artificial Sequence: Synthetic oligonucleotide
  Sense strand starting at position 2485 of SEQ ID NO: 627
cauagugaaucacuggcua

SEQ ID NO: 51983 - RNA, 19 nt, Artificial Sequence
  Description of Artificial Sequence: Synthetic oligonucleotide
  Antisense strand to SEQ ID NO: 51902
uagccagugauucacuaug

SEQ ID NO: 51984 - RNA, 19 nt, Artificial Sequence
  Description of Artificial Sequence: Synthetic oligonucleotide
  Sense strand starting at position 2489 of SEQ ID NO: 627
gugaaucacuggcuaaucu

SEQ ID NO: 51985 - RNA, 19 nt, Artificial Sequence
  Description of Artificial Sequence: Synthetic oligonucleotide
  Antisense strand to SEQ ID NO: 51904
agauuagccagugauucac

SEQ ID NO: 51986 - RNA, 19 nt, Artificial Sequence
  Description of Artificial Sequence: Synthetic oligonucleotide
  Sense strand starting at position 2498 of SEQ ID NO: 627
uggcuaaucuggccuucga

SEQ ID NO: 51987 - RNA, 19 nt, Artificial Sequence
  Description of Artificial Sequence: Synthetic oligonucleotide
  Antisense strand to SEQ ID NO: 51906
ucgaaggccagauuagcca

SEQ ID NO: 51988 - RNA, 19 nt, Artificial Sequence
  Description of Artificial Sequence: Synthetic oligonucleotide
  Sense strand starting at position 2502 of SEQ ID NO: 627
uaaucuggccuucgaggua

SEQ ID NO: 51989 - RNA, 19 nt, Artificial Sequence
  Description of Artificial Sequence: Synthetic oligonucleotide
  Antisense strand to SEQ ID NO: 51908
uaccucgaaggccagauua

SEQ ID NO: 51990 - RNA, 19 nt, Artificial Sequence
  Description of Artificial Sequence: Synthetic oligonucleotide
  Sense strand starting at position 2507 of SEQ ID NO: 627
uggccuucgagguagugaa

SEQ ID NO: 51991 - RNA, 19 nt, Artificial Sequence
  Description of Artificial Sequence: Synthetic oligonucleotide
  Antisense strand to SEQ ID NO: 51910
uucacuaccucgaaggcca

SEQ ID NO: 51992 - RNA, 19 nt, Artificial Sequence
  Description of Artificial Sequence: Synthetic oligonucleotide
  Sense strand starting at position 2535 of SEQ ID NO: 627
gggaaaugaagcugacugu

SEQ ID NO: 51993 - RNA, 19 nt, Artificial Sequence
  Description of Artificial Sequence: Synthetic oligonucleotide
  Antisense strand to SEQ ID NO: 51912
acagucagcuucauuuccc

SEQ ID NO: 51994 - RNA, 19 nt, Artificial Sequence
  Description of Artificial Sequence: Synthetic oligonucleotide
  Sense strand starting at position 2565 of SEQ ID NO: 627
guaggucuugaaggccaaa

SEQ ID NO: 51995 - RNA, 19 nt, Artificial Sequence
  Description of Artificial Sequence: Synthetic oligonucleotide
  Antisense strand to SEQ ID NO: 51914
uuuggccuucaagaccuac

SEQ ID NO: 51996 - RNA, 19 nt, Artificial Sequence
  Description of Artificial Sequence: Synthetic oligonucleotide
  Sense strand starting at position 2649 of SEQ ID NO: 627
ucaagcuuguaucauuagu

SEQ ID NO: 51997 - RNA, 19 nt, Artificial Sequence
  Description of Artificial Sequence: Synthetic oligonucleotide
  Antisense strand to SEQ ID NO: 51916
acuaaugauacaagcuuga

SEQ ID NO: 51998 - RNA, 19 nt, Artificial Sequence
  Description of Artificial Sequence: Synthetic oligonucleotide
  Sense strand starting at position 2718 of SEQ ID NO: 627
agucuaucuggcugaauca

SEQ ID NO: 51999 - RNA, 19 nt, Artificial Sequence
  Description of Artificial Sequence: Synthetic oligonucleotide
  Antisense strand to SEQ ID NO: 51918
ugauucagccagauagacu

SEQ ID NO: 52000 - RNA, 19 nt, Artificial Sequence
  Description of Artificial Sequence: Synthetic oligonucleotide
  Sense strand starting at position 2855 of SEQ ID NO: 627
uggacuggcucucuauaua

SEQ ID NO: 52001 - RNA, 19 nt, Artificial Sequence
  Description of Artificial Sequence: Synthetic oligonucleotide
  Antisense strand to SEQ ID NO: 51920
uauauagagagccagucca

SEQ ID NO: 52002 - RNA, 19 nt, Artificial Sequence
  Description of Artificial Sequence: Synthetic oligonucleotide
  Sense strand starting at position 3016 of SEQ ID NO: 627
cuaacaacugcuuguauga

SEQ ID NO: 52003 - RNA, 19 nt, Artificial Sequence
  Description of Artificial Sequence: Synthetic oligonucleotide
  Antisense strand to SEQ ID NO: 51922
ucauacaagcaguuguuag

SEQ ID NO: 52004 - RNA, 19 nt, Artificial Sequence
  Description of Artificial Sequence: Synthetic oligonucleotide
  Sense strand starting at position 3025 of SEQ ID NO: 627
gcuuguaugauuggauggu

SEQ ID NO: 52005 - RNA, 19 nt, Artificial Sequence
  Description of Artificial Sequence: Synthetic oligonucleotide
  Antisense strand to SEQ ID NO: 51924
accauccaaucauacaagc

SEQ ID NO: 52006 - RNA, 19 nt, Artificial Sequence
  Description of Artificial Sequence: Synthetic oligonucleotide
  Sense strand starting at position 3029 of SEQ ID NO: 627
guaugauuggaugguguaa

SEQ ID NO: 52007 - RNA, 19 nt, Artificial Sequence
  Description of Artificial Sequence: Synthetic oligonucleotide
  Antisense strand to SEQ ID NO: 51926
uuacaccauccaaucauac

SEQ ID NO: 52008 - RNA, 19 nt, Artificial Sequence
  Description of Artificial Sequence: Synthetic oligonucleotide
  Sense strand starting at position 3031 of SEQ ID NO: 627
augauuggaugguguaagu

SEQ ID NO: 52009 - RNA, 19 nt, Artificial Sequence
  Description of Artificial Sequence: Synthetic oligonucleotide
  Antisense strand to SEQ ID NO: 51928
acuuacaccauccaaucau

SEQ ID NO: 52010 - RNA, 19 nt, Artificial Sequence
  Description of Artificial Sequence: Synthetic oligonucleotide
  Sense strand starting at position 3041 of SEQ ID NO: 627
gguguaagugcggacagaa

SEQ ID NO: 52011 - RNA, 19 nt, Artificial Sequence
  Description of Artificial Sequence: Synthetic oligonucleotide
  Antisense strand to SEQ ID NO: 51930
uucuguccgcacuuacacc

SEQ ID NO: 52012 - RNA, 19 nt, Artificial Sequence
  Description of Artificial Sequence: Synthetic oligonucleotide
  Sense strand starting at position 3051 of SEQ ID NO: 627
cggacagaauuagggaauu

SEQ ID NO: 52013 - RNA, 19 nt, Artificial Sequence
  Description of Artificial Sequence: Synthetic oligonucleotide
  Antisense strand to SEQ ID NO: 51932
aauucccuaauucuguccg

SEQ ID NO: 52014 - RNA, 19 nt, Artificial Sequence
  Description of Artificial Sequence: Synthetic oligonucleotide
  Sense strand starting at position 3947 of SEQ ID NO: 627
gagcaagacucgucuccag

SEQ ID NO: 52015 - RNA, 19 nt, Artificial Sequence
  Description of Artificial Sequence: Synthetic oligonucleotide
  Antisense strand to SEQ ID NO: 51934
cuggagacgagucuugcuc

SEQ ID NO: 52016 - RNA, 19 nt, Artificial Sequence
  Description of Artificial Sequence: Synthetic oligonucleotide
  Sense strand starting at position 3950 of SEQ ID NO: 627
caagacucgucuccagaaa

SEQ ID NO: 52017 - RNA, 19 nt, Artificial Sequence
  Description of Artificial Sequence: Synthetic oligonucleotide
  Antisense strand to SEQ ID NO: 51936
uuucuggagacgagucuug

SEQ ID NO: 52018 - RNA, 19 nt, Artificial Sequence
  Description of Artificial Sequence: Synthetic oligonucleotide
  Sense strand starting at position 47 of SEQ ID NO: 628
auaagauaugcaugaaguc

SEQ ID NO: 52019 - RNA, 19 nt, Artificial Sequence
  Description of Artificial Sequence: Synthetic oligonucleotide
  Antisense strand to SEQ ID NO: 51938
gacuucaugcauaucuuau

SEQ ID NO: 52020 - RNA, 19 nt, Artificial Sequence
  Description of Artificial Sequence: Synthetic oligonucleotide
  Sense strand starting at position 48 of SEQ ID NO: 628
uaagauaugcaugaagucu

SEQ ID NO: 52021 - RNA, 19 nt, Artificial Sequence
  Description of Artificial Sequence: Synthetic oligonucleotide
  Antisense strand to SEQ ID NO: 51940
agacuucaugcauaucuua

SEQ ID NO: 52022 - RNA, 19 nt, Artificial Sequence
  Description of Artificial Sequence: Synthetic oligonucleotide
  Sense strand starting at position 177 of SEQ ID NO: 628
uuaguuucuggaggacaga

SEQ ID NO: 52023 - RNA, 19 nt, Artificial Sequence
  Description of Artificial Sequence: Synthetic oligonucleotide
  Antisense strand to SEQ ID NO: 51942
ucuguccuccagaaacuaa

SEQ ID NO: 52024 - RNA, 19 nt, Artificial Sequence
  Description of Artificial Sequence: Synthetic oligonucleotide
  Sense strand starting at position 691 of SEQ ID NO: 628
guguucccagaucaguaua

SEQ ID NO: 52025 - RNA, 19 nt, Artificial Sequence
  Description of Artificial Sequence: Synthetic oligonucleotide
  Antisense strand to SEQ ID NO: 51944
uauacugaucugggaacac

SEQ ID NO: 52026 - RNA, 19 nt, Artificial Sequence
  Description of Artificial Sequence: Synthetic oligonucleotide
  Sense strand starting at position 694 of SEQ ID NO: 628
uucccagaucaguauagca

SEQ ID NO: 52027 - RNA, 19 nt, Artificial Sequence
  Description of Artificial Sequence: Synthetic oligonucleotide
  Antisense strand to SEQ ID NO: 51946
ugcuauacugaucugggaa

SEQ ID NO: 52028 - RNA, 19 nt, Artificial Sequence
  Description of Artificial Sequence: Synthetic oligonucleotide
  Sense strand starting at position 757 of SEQ ID NO: 628
aagggaacugccugauugu

SEQ ID NO: 52029 - RNA, 19 nt, Artificial Sequence
  Description of Artificial Sequence: Synthetic oligonucleotide
  Antisense strand to SEQ ID NO: 51948
acaaucaggcaguucccuu

SEQ ID NO: 52030 - RNA, 19 nt, Artificial Sequence
  Description of Artificial Sequence: Synthetic oligonucleotide
  Sense strand starting at position 758 of SEQ ID NO: 628
agggaacugccugauugua

SEQ ID NO: 52031 - RNA, 19 nt, Artificial Sequence
  Description of Artificial Sequence: Synthetic oligonucleotide
  Antisense strand to SEQ ID NO: 51950
uacaaucaggcaguucccu

SEQ ID NO: 52032 - RNA, 19 nt, Artificial Sequence
  Description of Artificial Sequence: Synthetic oligonucleotide
  Sense strand starting at position 760 of SEQ ID NO: 628
ggaacugccugauuguaaa

SEQ ID NO: 52033 - RNA, 19 nt, Artificial Sequence
  Description of Artificial Sequence: Synthetic oligonucleotide
  Antisense strand to SEQ ID NO: 51952
uuuacaaucaggcaguucc

SEQ ID NO: 52034 - RNA, 19 nt, Artificial Sequence
  Description of Artificial Sequence: Synthetic oligonucleotide
  Sense strand starting at position 796 of SEQ ID NO: 628
ggaguaauccuguguagaa

SEQ ID NO: 52035 - RNA, 19 nt, Artificial Sequence
  Description of Artificial Sequence: Synthetic oligonucleotide
  Antisense strand to SEQ ID NO: 51954
uucuacacaggauuacucc

SEQ ID NO: 52036 - RNA, 19 nt, Artificial Sequence
  Description of Artificial Sequence: Synthetic oligonucleotide
  Sense strand starting at position 797 of SEQ ID NO: 628
gaguaauccuguguagaaa

SEQ ID NO: 52037 - RNA, 19 nt, Artificial Sequence
  Description of Artificial Sequence: Synthetic oligonucleotide
  Antisense strand to SEQ ID NO: 51956
uuucuacacaggauuacuc

SEQ ID NO: 52038 - RNA, 19 nt, Artificial Sequence
  Description of Artificial Sequence: Synthetic oligonucleotide
  Sense strand starting at position 805 of SEQ ID NO: 628
cuguguagaaaugaaggua

SEQ ID NO: 52039 - RNA, 19 nt, Artificial Sequence
  Description of Artificial Sequence: Synthetic oligonucleotide
  Antisense strand to SEQ ID NO: 51958
uaccuucauuucuacacag

SEQ ID NO: 52040 - RNA, 19 nt, Artificial Sequence
  Description of Artificial Sequence: Synthetic oligonucleotide
  Sense strand starting at position 1074 of SEQ ID NO: 628
gucaaagauugaucuucca

SEQ ID NO: 52041 - RNA, 19 nt, Artificial Sequence
  Description of Artificial Sequence: Synthetic oligonucleotide
  Antisense strand to SEQ ID NO: 51960
uggaagaucaaucuuugac

SEQ ID NO: 52042 - RNA, 19 nt, Artificial Sequence
  Description of Artificial Sequence: Synthetic oligonucleotide
  Sense strand starting at position 1185 of SEQ ID NO: 628
uuauauguuguggacugau

SEQ ID NO: 52043 - RNA, 19 nt, Artificial Sequence
  Description of Artificial Sequence: Synthetic oligonucleotide
  Antisense strand to SEQ ID NO: 51962
aucaguccacaacauauaa

SEQ ID NO: 52044 - RNA, 19 nt, Artificial Sequence
  Description of Artificial Sequence: Synthetic oligonucleotide
  Sense strand starting at position 1253 of SEQ ID NO: 628
aggccuacucaagagucuu

SEQ ID NO: 52045 - RNA, 19 nt, Artificial Sequence
  Description of Artificial Sequence: Synthetic oligonucleotide
  Antisense strand to SEQ ID NO: 51964
aagacucuugaguaggccu

SEQ ID NO: 52046 - RNA, 19 nt, Artificial Sequence
  Description of Artificial Sequence: Synthetic oligonucleotide
  Sense strand starting at position 1288 of SEQ ID NO: 628
gaagcaugaggucauuguu

SEQ ID NO: 52047 - RNA, 19 nt, Artificial Sequence
  Description of Artificial Sequence: Synthetic oligonucleotide
  Antisense strand to SEQ ID NO: 51966
aacaaugaccucaugcuuc

SEQ ID NO: 52048 - RNA, 19 nt, Artificial Sequence
  Description of Artificial Sequence: Synthetic oligonucleotide
  Sense strand starting at position 1294 of SEQ ID NO: 628
ugaggucauuguucugaaa

SEQ ID NO: 52049 - RNA, 19 nt, Artificial Sequence
  Description of Artificial Sequence: Synthetic oligonucleotide
  Antisense strand to SEQ ID NO: 51968
uuucagaacaaugaccuca

SEQ ID NO: 52050 - RNA, 19 nt, Artificial Sequence
  Description of Artificial Sequence: Synthetic oligonucleotide
  Sense strand starting at position 1350 of SEQ ID NO: 628
agagauucuuaaguauucu

SEQ ID NO: 52051 - RNA, 19 nt, Artificial Sequence
  Description of Artificial Sequence: Synthetic oligonucleotide
  Antisense strand to SEQ ID NO: 51970
agaauacuuaagaaucucu

SEQ ID NO: 52052 - RNA, 19 nt, Artificial Sequence
  Description of Artificial Sequence: Synthetic oligonucleotide
  Sense strand starting at position 1371 of SEQ ID NO: 628
ucuaaaucccaguggcaaa

SEQ ID NO: 52053 - RNA, 19 nt, Artificial Sequence
  Description of Artificial Sequence: Synthetic oligonucleotide
  Antisense strand to SEQ ID NO: 51972
uuugccacugggauuuaga

SEQ ID NO: 52054 - RNA, 19 nt, Artificial Sequence
  Description of Artificial Sequence: Synthetic oligonucleotide
  Sense strand starting at position 1384 of SEQ ID NO: 628
ggcaaauaacuauguauac

SEQ ID NO: 52055 - RNA, 19 nt, Artificial Sequence
  Description of Artificial Sequence: Synthetic oligonucleotide
  Antisense strand to SEQ ID NO: 51974
guauacauaguuauuugcc

SEQ ID NO: 52056 - RNA, 19 nt, Artificial Sequence
  Description of Artificial Sequence: Synthetic oligonucleotide
  Sense strand starting at position 1401 of SEQ ID NO: 628
acugacuaagccggaauua

SEQ ID NO: 52057 - RNA, 19 nt, Artificial Sequence
  Description of Artificial Sequence: Synthetic oligonucleotide
  Antisense strand to SEQ ID NO: 51976
uaauuccggcuuagucagu

SEQ ID NO: 52058 - RNA, 19 nt, Artificial Sequence
  Description of Artificial Sequence: Synthetic oligonucleotide
  Sense strand starting at position 1443 of SEQ ID NO: 628
acuaucuuucugcacagua

SEQ ID NO: 52059 - RNA, 19 nt, Artificial Sequence
  Description of Artificial Sequence: Synthetic oligonucleotide
  Antisense strand to SEQ ID NO: 51978
uacugugcagaaagauagu

SEQ ID NO: 52060 - RNA, 19 nt, Artificial Sequence
  Description of Artificial Sequence: Synthetic oligonucleotide
  Sense strand starting at position 1514 of SEQ ID NO: 628
aaccucucauggguguuaa

SEQ ID NO: 52061 - RNA, 19 nt, Artificial Sequence
  Description of Artificial Sequence: Synthetic oligonucleotide
  Antisense strand to SEQ ID NO: 51980
uuaacacccaugagagguu

SEQ ID NO: 52062 - RNA, 19 nt, Artificial Sequence
  Description of Artificial Sequence: Synthetic oligonucleotide
  Sense strand starting at position 1526 of SEQ ID NO: 628
guguuaauggucuggauuu

SEQ ID NO: 52063 - RNA, 19 nt, Artificial Sequence
  Description of Artificial Sequence: Synthetic oligonucleotide
  Antisense strand to SEQ ID NO: 51982
aaauccagaccauuaacac

SEQ ID NO: 52064 - RNA, 19 nt, Artificial Sequence
  Description of Artificial Sequence: Synthetic oligonucleotide
  Sense strand starting at position 1589 of SEQ ID NO: 628
gcuggacacuuccucaaga

SEQ ID NO: 52065 - RNA, 19 nt, Artificial Sequence
  Description of Artificial Sequence: Synthetic oligonucleotide
  Antisense strand to SEQ ID NO: 51984
ucuugaggaaguguccagc

SEQ ID NO: 52066 - RNA, 19 nt, Artificial Sequence
  Description of Artificial Sequence: Synthetic oligonucleotide
  Sense strand starting at position 1618 of SEQ ID NO: 628
gguaacauucccuggaccu

SEQ ID NO: 52067 - RNA, 19 nt, Artificial Sequence
  Description of Artificial Sequence: Synthetic oligonucleotide
  Antisense strand to SEQ ID NO: 51986
agguccagggaauguuacc

SEQ ID NO: 52068 - RNA, 19 nt, Artificial Sequence
  Description of Artificial Sequence: Synthetic oligonucleotide
  Sense strand starting at position 1619 of SEQ ID NO: 628
guaacauucccuggaccuu

SEQ ID NO: 52069 - RNA, 19 nt, Artificial Sequence
  Description of Artificial Sequence: Synthetic oligonucleotide
  Antisense strand to SEQ ID NO: 51988
aagguccagggaauguuac

SEQ ID NO: 52070 - RNA, 19 nt, Artificial Sequence
  Description of Artificial Sequence: Synthetic oligonucleotide
  Sense strand starting at position 1625 of SEQ ID NO: 628
uucccuggaccuuggaaua

SEQ ID NO: 52071 - RNA, 19 nt, Artificial Sequence
  Description of Artificial Sequence: Synthetic oligonucleotide
  Antisense strand to SEQ ID NO: 51990
uauuccaagguccagggaa

SEQ ID NO: 52072 - RNA, 19 nt, Artificial Sequence
  Description of Artificial Sequence: Synthetic oligonucleotide
  Sense strand starting at position 1696 of SEQ ID NO: 628
aucaauucuccucggagau

SEQ ID NO: 52073 - RNA, 19 nt, Artificial Sequence
  Description of Artificial Sequence: Synthetic oligonucleotide
  Antisense strand to SEQ ID NO: 51992
aucuccgaggagaauugau

SEQ ID NO: 52074 - RNA, 19 nt, Artificial Sequence
  Description of Artificial Sequence: Synthetic oligonucleotide
  Sense strand starting at position 2093 of SEQ ID NO: 628
accacugacccugagcaau

SEQ ID NO: 52075 - RNA, 19 nt, Artificial Sequence
  Description of Artificial Sequence: Synthetic oligonucleotide
  Antisense strand to SEQ ID NO: 51994
auugcucagggucaguggu

SEQ ID NO: 52076 - RNA, 19 nt, Artificial Sequence
  Description of Artificial Sequence: Synthetic oligonucleotide
  Sense strand starting at position 2188 of SEQ ID NO: 628
aagcaaaggucucugagau

SEQ ID NO: 52077 - RNA, 19 nt, Artificial Sequence
  Description of Artificial Sequence: Synthetic oligonucleotide
  Antisense strand to SEQ ID NO: 51996
aucucagagaccuuugcuu

SEQ ID NO: 52078 - RNA, 19 nt, Artificial Sequence
  Description of Artificial Sequence: Synthetic oligonucleotide
  Sense strand starting at position 2189 of SEQ ID NO: 628
agcaaaggucucugagauc

SEQ ID NO: 52079 - RNA, 19 nt, Artificial Sequence
  Description of Artificial Sequence: Synthetic oligonucleotide
  Antisense strand to SEQ ID NO: 51998
gaucucagagaccuuugcu

SEQ ID NO: 52080 - RNA, 19 nt, Artificial Sequence
  Description of Artificial Sequence: Synthetic oligonucleotide
  Sense strand starting at position 2568 of SEQ ID NO: 628
gucgauuacguagaaagag

SEQ ID NO: 52081 - RNA, 19 nt, Artificial Sequence
  Description of Artificial Sequence: Synthetic oligonucleotide
  Antisense strand to SEQ ID NO: 52000
cucuuucuacguaaucgac

SEQ ID NO: 52082 - RNA, 19 nt, Artificial Sequence
  Description of Artificial Sequence: Synthetic oligonucleotide
  Sense strand starting at position 2790 of SEQ ID NO: 628
gugcaugcauuugucauaa

SEQ ID NO: 52083 - RNA, 19 nt, Artificial Sequence
  Description of Artificial Sequence: Synthetic oligonucleotide
  Antisense strand to SEQ ID NO: 52002
uuaugacaaaugcaugcac

SEQ ID NO: 52084 - RNA, 19 nt, Artificial Sequence
  Description of Artificial Sequence: Synthetic oligonucleotide
  Sense strand starting at position 2958 of SEQ ID NO: 628
ucagaucaccuuugucaca

SEQ ID NO: 52085 - RNA, 19 nt, Artificial Sequence
  Description of Artificial Sequence: Synthetic oligonucleotide
  Antisense strand to SEQ ID NO: 52004
ugugacaaaggugaucuga

SEQ ID NO: 52086 - RNA, 19 nt, Artificial Sequence
  Description of Artificial Sequence: Synthetic oligonucleotide
  Sense strand starting at position 2960 of SEQ ID NO: 628
agaucaccuuugucacaua

SEQ ID NO: 52087 - RNA, 19 nt, Artificial Sequence
  Description of Artificial Sequence: Synthetic oligonucleotide
  Antisense strand to SEQ ID NO: 52006
uaugugacaaaggugaucu

SEQ ID NO: 52088 - RNA, 19 nt, Artificial Sequence
  Description of Artificial Sequence: Synthetic oligonucleotide
  Sense strand starting at position 3206 of SEQ ID NO: 628
agacuccuucuaggugaau

SEQ ID NO: 52089 - RNA, 19 nt, Artificial Sequence
  Description of Artificial Sequence: Synthetic oligonucleotide
  Antisense strand to SEQ ID NO: 52008
auucaccuagaaggagucu

SEQ ID NO: 52090 - RNA, 19 nt, Artificial Sequence
  Description of Artificial Sequence: Synthetic oligonucleotide
  Sense strand starting at position 3207 of SEQ ID NO: 628
gacuccuucuaggugaaug

SEQ ID NO: 52091 - RNA, 19 nt, Artificial Sequence
  Description of Artificial Sequence: Synthetic oligonucleotide
  Antisense strand to SEQ ID NO: 52010
cauucaccuagaaggaguc

SEQ ID NO: 52092 - RNA, 19 nt, Artificial Sequence
  Description of Artificial Sequence: Synthetic oligonucleotide
  Sense strand starting at position 3375 of SEQ ID NO: 628
ccauguucucuauauugga

SEQ ID NO: 52093 - RNA, 19 nt, Artificial Sequence
  Description of Artificial Sequence: Synthetic oligonucleotide
  Antisense strand to SEQ ID NO: 52012
uccaauauagagaacaugg

SEQ ID NO: 52094 - RNA, 19 nt, Artificial Sequence
  Description of Artificial Sequence: Synthetic oligonucleotide
  Sense strand starting at position 3819 of SEQ ID NO: 628
ugaagugucauggagcaaa

SEQ ID NO: 52095 - RNA, 19 nt, Artificial Sequence
  Description of Artificial Sequence: Synthetic oligonucleotide
  Antisense strand to SEQ ID NO: 52014
uuugcuccaugacacuuca

SEQ ID NO: 52096 - RNA, 19 nt, Artificial Sequence
  Description of Artificial Sequence: Synthetic oligonucleotide
  Sense strand starting at position 3953 of SEQ ID NO: 628
ggagucaucagauauuguu

SEQ ID NO: 52097 - RNA, 19 nt, Artificial Sequence
  Description of Artificial Sequence: Synthetic oligonucleotide
  Antisense strand to SEQ ID NO: 52016
aacaauaucugaugacucc

SEQ ID NO: 52098 - RNA, 19 nt, Artificial Sequence
  Description of Artificial Sequence: Synthetic oligonucleotide
  Sense strand starting at position 37 of SEQ ID NO: 629
gaugcauaccuguaugucu

SEQ ID NO: 52099 - RNA, 19 nt, Artificial Sequence
  Description of Artificial Sequence: Synthetic oligonucleotide
  Antisense strand to SEQ ID NO: 52018
agacauacagguaugcauc

SEQ ID NO: 52100 - RNA, 19 nt, Artificial Sequence
  Description of Artificial Sequence: Synthetic oligonucleotide
  Sense strand starting at position 597 of SEQ ID NO: 629
uguggugagccaugagauc

SEQ ID NO: 52101 - RNA, 19 nt, Artificial Sequence
  Description of Artificial Sequence: Synthetic oligonucleotide
  Antisense strand to SEQ ID NO: 52020
gaucucauggcucaccaca

SEQ ID NO: 52102 - RNA, 19 nt, Artificial Sequence
  Description of Artificial Sequence: Synthetic oligonucleotide
  Sense strand starting at position 608 of SEQ ID NO: 629
augagaucgcgccauuaca

SEQ ID NO: 52103 - RNA, 19 nt, Artificial Sequence
  Description of Artificial Sequence: Synthetic oligonucleotide
  Antisense strand to SEQ ID NO: 52022
uguaauggcgcgaucucau

SEQ ID NO: 52104 - RNA, 19 nt, Artificial Sequence
  Description of Artificial Sequence: Synthetic oligonucleotide
  Sense strand starting at position 767 of SEQ ID NO: 629
gcaguuaggaaaugccauu

SEQ ID NO: 52105 - RNA, 19 nt, Artificial Sequence
  Description of Artificial Sequence: Synthetic oligonucleotide
  Antisense strand to SEQ ID NO: 52024
aauggcauuuccuaacugc

SEQ ID NO: 52106 - RNA, 19 nt, Artificial Sequence
  Description of Artificial Sequence: Synthetic oligonucleotide
  Sense strand starting at position 907 of SEQ ID NO: 629
aguugugcacaucauuaaa

SEQ ID NO: 52107 - RNA, 19 nt, Artificial Sequence
  Description of Artificial Sequence: Synthetic oligonucleotide
  Antisense strand to SEQ ID NO: 52026
uuuaaugaugugcacaacu

SEQ ID NO: 52108 - RNA, 19 nt, Artificial Sequence
  Description of Artificial Sequence: Synthetic oligonucleotide
  Sense strand starting at position 1030 of SEQ ID NO: 629
ugaccugggcccugaagaa

SEQ ID NO: 52109 - RNA, 19 nt, Artificial Sequence
  Description of Artificial Sequence: Synthetic oligonucleotide
  Antisense strand to SEQ ID NO: 52028
uucuucagggcccagguca

SEQ ID NO: 52110 - RNA, 19 nt, Artificial Sequence
  Description of Artificial Sequence: Synthetic oligonucleotide
  Sense strand starting at position 1071 of SEQ ID NO: 629
acagauaacgcuuaaugac

SEQ ID NO: 52111 - RNA, 19 nt, Artificial Sequence
  Description of Artificial Sequence: Synthetic oligonucleotide
  Antisense strand to SEQ ID NO: 52030
gucauuaagcguuaucugu

SEQ ID NO: 52112 - RNA, 19 nt, Artificial Sequence
  Description of Artificial Sequence: Synthetic oligonucleotide
  Sense strand starting at position 1163 of SEQ ID NO: 629
gagauaacggacuguuagu

SEQ ID NO: 52113 - RNA, 19 nt, Artificial Sequence
  Description of Artificial Sequence: Synthetic oligonucleotide
  Antisense strand to SEQ ID NO: 52032
acuaacaguccguuaucuc

SEQ ID NO: 52114 - RNA, 19 nt, Artificial Sequence
  Description of Artificial Sequence: Synthetic oligonucleotide
  Sense strand starting at position 1214 of SEQ ID NO: 629
cagagugguuaagucacuu

SEQ ID NO: 52115 - RNA, 19 nt, Artificial Sequence
  Description of Artificial Sequence: Synthetic oligonucleotide
  Antisense strand to SEQ ID NO: 52034
aagugacuuaaccacucug

SEQ ID NO: 52116 - RNA, 19 nt, Artificial Sequence
  Description of Artificial Sequence: Synthetic oligonucleotide
  Sense strand starting at position 1328 of SEQ ID NO: 629
gagugaauggcauauucua

SEQ ID NO: 52117 - RNA, 19 nt, Artificial Sequence
  Description of Artificial Sequence: Synthetic oligonucleotide
  Antisense strand to SEQ ID NO: 52036
uagaauaugccauucacuc

SEQ ID NO: 52118 - RNA, 19 nt, Artificial Sequence
  Description of Artificial Sequence: Synthetic oligonucleotide
  Sense strand starting at position 1469 of SEQ ID NO: 629
ccaauucgaguaggaauua

SEQ ID NO: 52119 - RNA, 19 nt, Artificial Sequence
  Description of Artificial Sequence: Synthetic oligonucleotide
  Antisense strand to SEQ ID NO: 52038
uaauuccuacucgaauugg

SEQ ID NO: 52120 - RNA, 19 nt, Artificial Sequence
  Description of Artificial Sequence: Synthetic oligonucleotide
  Sense strand starting at position 1474 of SEQ ID NO: 629
ucgaguaggaauuaaaguu

SEQ ID NO: 52121 - RNA, 19 nt, Artificial Sequence
  Description of Artificial Sequence: Synthetic oligonucleotide
  Antisense strand to SEQ ID NO: 52040
aacuuuaauuccuacucga

SEQ ID NO: 52122 - RNA, 19 nt, Artificial Sequence
  Description of Artificial Sequence: Synthetic oligonucleotide
  Sense strand starting at position 1572 of SEQ ID NO: 629
cgggaucagugaucucuga

SEQ ID NO: 52123 - RNA, 19 nt, Artificial Sequence
  Description of Artificial Sequence: Synthetic oligonucleotide
  Antisense strand to SEQ ID NO: 52042
ucagagaucacugaucccg

SEQ ID NO: 52124 - RNA, 19 nt, Artificial Sequence
  Description of Artificial Sequence: Synthetic oligonucleotide
  Sense strand starting at position 1600 of SEQ ID NO: 629
caagcauuccuggauggca

SEQ ID NO: 52125 - RNA, 19 nt, Artificial Sequence
  Description of Artificial Sequence: Synthetic oligonucleotide
  Antisense strand to SEQ ID NO: 52044
ugccauccaggaaugcuug

SEQ ID NO: 52126 - RNA, 19 nt, Artificial Sequence
  Description of Artificial Sequence: Synthetic oligonucleotide
  Sense strand starting at position 1622 of SEQ ID NO: 629
ccggcuuacacgcaaggau

SEQ ID NO: 52127 - RNA, 19 nt, Artificial Sequence
  Description of Artificial Sequence: Synthetic oligonucleotide
  Antisense strand to SEQ ID NO: 52046
auccuugcguguaagccgg

SEQ ID NO: 52128 - RNA, 19 nt, Artificial Sequence
  Description of Artificial Sequence: Synthetic oligonucleotide
  Sense strand starting at position 1760 of SEQ ID NO: 629
gcggccaauccuguuaagu

SEQ ID NO: 52129 - RNA, 19 nt, Artificial Sequence
  Description of Artificial Sequence: Synthetic oligonucleotide
  Antisense strand to SEQ ID NO: 52048
acuuaacaggauuggccgc

SEQ ID NO: 52130 - RNA, 19 nt, Artificial Sequence
  Description of Artificial Sequence: Synthetic oligonucleotide
  Sense strand starting at position 1818 of SEQ ID NO: 629
agccacuuaucucucgaau

SEQ ID NO: 52131 - RNA, 19 nt, Artificial Sequence
  Description of Artificial Sequence: Synthetic oligonucleotide
  Antisense strand to SEQ ID NO: 52050
auucgagagauaaguggcu

SEQ ID NO: 52132 - RNA, 19 nt, Artificial Sequence
  Description of Artificial Sequence: Synthetic oligonucleotide
  Sense strand starting at position 1833 of SEQ ID NO: 629
gaauauguuccacacguac

SEQ ID NO: 52133 - RNA, 19 nt, Artificial Sequence
  Description of Artificial Sequence: Synthetic oligonucleotide
  Antisense strand to SEQ ID NO: 52052
guacguguggaacauauuc

SEQ ID NO: 52134 - RNA, 19 nt, Artificial Sequence
  Description of Artificial Sequence: Synthetic oligonucleotide
  Sense strand starting at position 1868 of SEQ ID NO: 629
cccacuuggucuucguaga

SEQ ID NO: 52135 - RNA, 19 nt, Artificial Sequence
  Description of Artificial Sequence: Synthetic oligonucleotide
  Antisense strand to SEQ ID NO: 52054
ucuacgaagaccaaguggg

SEQ ID NO: 52136 - RNA, 19 nt, Artificial Sequence
  Description of Artificial Sequence: Synthetic oligonucleotide
  Sense strand starting at position 2754 of SEQ ID NO: 629
uaugguuugcgccuucuua

SEQ ID NO: 52137 - RNA, 19 nt, Artificial Sequence
  Description of Artificial Sequence: Synthetic oligonucleotide
  Antisense strand to SEQ ID NO: 52056
uaagaaggcgcaaaccaua

SEQ ID NO: 52138 - RNA, 19 nt, Artificial Sequence
  Description of Artificial Sequence: Synthetic oligonucleotide
  Sense strand starting at position 2756 of SEQ ID NO: 629
ugguuugcgccuucuuagu

SEQ ID NO: 52139 - RNA, 19 nt, Artificial Sequence
  Description of Artificial Sequence: Synthetic oligonucleotide
  Antisense strand to SEQ ID NO: 52058
acuaagaaggcgcaaacca

SEQ ID NO: 52140 - RNA, 19 nt, Artificial Sequence
  Description of Artificial Sequence: Synthetic oligonucleotide
  Sense strand starting at position 2770 of SEQ ID NO: 629
uuaguugucaguuaauagg

SEQ ID NO: 52141 - RNA, 19 nt, Artificial Sequence
  Description of Artificial Sequence: Synthetic oligonucleotide
  Antisense strand to SEQ ID NO: 52060
ccuauuaacugacaacuaa

SEQ ID NO: 52142 - RNA, 19 nt, Artificial Sequence
  Description of Artificial Sequence: Synthetic oligonucleotide
  Sense strand starting at position 3281 of SEQ ID NO: 629
agagaagacucaguguguu

SEQ ID NO: 52143 - RNA, 19 nt, Artificial Sequence
  Description of Artificial Sequence: Synthetic oligonucleotide
  Antisense strand to SEQ ID NO: 52062
aacacacugagucuucucu

SEQ ID NO: 52144 - RNA, 19 nt, Artificial Sequence
  Description of Artificial Sequence: Synthetic oligonucleotide
  Sense strand starting at position 3439 of SEQ ID NO: 629
cccggcucccuggaauauu

SEQ ID NO: 52145 - RNA, 19 nt, Artificial Sequence
  Description of Artificial Sequence: Synthetic oligonucleotide
  Antisense strand to SEQ ID NO: 52064
aauauuccagggagccggg

SEQ ID NO: 52146 - RNA, 19 nt, Artificial Sequence
  Description of Artificial Sequence: Synthetic oligonucleotide
  Sense strand starting at position 3481 of SEQ ID NO: 629
cuuucuaggcguuagagga

SEQ ID NO: 52147 - RNA, 19 nt, Artificial Sequence
  Description of Artificial Sequence: Synthetic oligonucleotide
  Antisense strand to SEQ ID NO: 52066
uccucuaacgccuagaaag

SEQ ID NO: 52148 - RNA, 19 nt, Artificial Sequence
  Description of Artificial Sequence: Synthetic oligonucleotide
  Sense strand starting at position 3548 of SEQ ID NO: 629
ggagaaacauauuccgcaa

SEQ ID NO: 52149 - RNA, 19 nt, Artificial Sequence
  Description of Artificial Sequence: Synthetic oligonucleotide
  Antisense strand to SEQ ID NO: 52068
uugcggaauauguuucucc

SEQ ID NO: 52150 - RNA, 19 nt, Artificial Sequence
  Description of Artificial Sequence: Synthetic oligonucleotide
  Sense strand starting at position 3614 of SEQ ID NO: 629
uguauaguguggucgggaa

SEQ ID NO: 52151 - RNA, 19 nt, Artificial Sequence
  Description of Artificial Sequence: Synthetic oligonucleotide
  Antisense strand to SEQ ID NO: 52070
uucccgaccacacuauaca

SEQ ID NO: 52152 - RNA, 19 nt, Artificial Sequence
  Description of Artificial Sequence: Synthetic oligonucleotide
  Sense strand starting at position 3615 of SEQ ID NO: 629
guauaguguggucgggaaa

SEQ ID NO: 52153 - RNA, 19 nt, Artificial Sequence
  Description of Artificial Sequence: Synthetic oligonucleotide
  Antisense strand to SEQ ID NO: 52072
uuucccgaccacacuauac

SEQ ID NO: 52154 - RNA, 19 nt, Artificial Sequence
  Description of Artificial Sequence: Synthetic oligonucleotide
  Sense strand starting at position 3616 of SEQ ID NO: 629
uauaguguggucgggaaag

SEQ ID NO: 52155 - RNA, 19 nt, Artificial Sequence
  Description of Artificial Sequence: Synthetic oligonucleotide
  Antisense strand to SEQ ID NO: 52074
cuuucccgaccacacuaua

SEQ ID NO: 52156 - RNA, 19 nt, Artificial Sequence
  Description of Artificial Sequence: Synthetic oligonucleotide
  Sense strand starting at position 3618 of SEQ ID NO: 629
uaguguggucgggaaaggu

SEQ ID NO: 52157 - RNA, 19 nt, Artificial Sequence
  Description of Artificial Sequence: Synthetic oligonucleotide
  Antisense strand to SEQ ID NO: 52076
accuuucccgaccacacua

SEQ ID NO: 52158 - RNA, 19 nt, Artificial Sequence
  Description of Artificial Sequence: Synthetic oligonucleotide
  Sense strand starting at position 3634 of SEQ ID NO: 629
ggucucacugaugaaguga

SEQ ID NO: 52159 - RNA, 19 nt, Artificial Sequence
  Description of Artificial Sequence: Synthetic oligonucleotide
  Antisense strand to SEQ ID NO: 52078
ucacuucaucagugagacc

SEQ ID NO: 52160 - RNA, 19 nt, Artificial Sequence
  Description of Artificial Sequence: Synthetic oligonucleotide
  Sense strand starting at position 3680 of SEQ ID NO: 629
gcgagcaaccuguggaauu

SEQ ID NO: 52161 - RNA, 19 nt, Artificial Sequence
  Description of Artificial Sequence: Synthetic oligonucleotide
  Antisense strand to SEQ ID NO: 52080
aauuccacagguugcucgc

SEQ ID NO: 52162 - RNA, 19 nt, Artificial Sequence
  Description of Artificial Sequence: Synthetic oligonucleotide
  Sense strand starting at position 3698 of SEQ ID NO: 629
ugagcagcuguggaauuau

SEQ ID NO: 52163 - RNA, 19 nt, Artificial Sequence
  Description of Artificial Sequence: Synthetic oligonucleotide
  Antisense strand to SEQ ID NO: 52082
auaauuccacagcugcuca

SEQ ID NO: 52164 - RNA, 19 nt, Artificial Sequence
  Description of Artificial Sequence: Synthetic oligonucleotide
  Sense strand starting at position 3706 of SEQ ID NO: 629
uguggaauuaucugggaga

SEQ ID NO: 52165 - RNA, 19 nt, Artificial Sequence
  Description of Artificial Sequence: Synthetic oligonucleotide
  Antisense strand to SEQ ID NO: 52084
ucucccagauaauuccaca

SEQ ID NO: 52166 - RNA, 19 nt, Artificial Sequence
  Description of Artificial Sequence: Synthetic oligonucleotide
  Sense strand starting at position 3709 of SEQ ID NO: 629
ggaauuaucugggagaaug

SEQ ID NO: 52167 - RNA, 19 nt, Artificial Sequence
  Description of Artificial Sequence: Synthetic oligonucleotide
  Antisense strand to SEQ ID NO: 52086
cauucucccagauaauucc

SEQ ID NO: 52168 - RNA, 19 nt, Artificial Sequence
  Description of Artificial Sequence: Synthetic oligonucleotide
  Sense strand starting at position 3720 of SEQ ID NO: 629
ggagaaugcuguuccaagu

SEQ ID NO: 52169 - RNA, 19 nt, Artificial Sequence
  Description of Artificial Sequence: Synthetic oligonucleotide
  Antisense strand to SEQ ID NO: 52088
acuuggaacagcauucucc

SEQ ID NO: 52170 - RNA, 19 nt, Artificial Sequence
  Description of Artificial Sequence: Synthetic oligonucleotide
  Sense strand starting at position 3779 of SEQ ID NO: 629
auaugacguguuugggaca

SEQ ID NO: 52171 - RNA, 19 nt, Artificial Sequence
  Description of Artificial Sequence: Synthetic oligonucleotide
  Antisense strand to SEQ ID NO: 52090
ugucccaaacacgucauau

SEQ ID NO: 52172 - RNA, 19 nt, Artificial Sequence
  Description of Artificial Sequence: Synthetic oligonucleotide
  Sense strand starting at position 3906 of SEQ ID NO: 629
aggugaagugaguagcaga

SEQ ID NO: 52173 - RNA, 19 nt, Artificial Sequence
  Description of Artificial Sequence: Synthetic oligonucleotide
  Antisense strand to SEQ ID NO: 52092
ucugcuacucacuucaccu

SEQ ID NO: 52174 - RNA, 19 nt, Artificial Sequence
  Description of Artificial Sequence: Synthetic oligonucleotide
  Sense strand starting at position 3962 of SEQ ID NO: 629
ucugguugccuuggugaga

SEQ ID NO: 52175 - RNA, 19 nt, Artificial Sequence
  Description of Artificial Sequence: Synthetic oligonucleotide
  Antisense strand to SEQ ID NO: 52094
ucucaccaaggcaaccaga

SEQ ID NO: 52176 - RNA, 19 nt, Artificial Sequence
  Description of Artificial Sequence: Synthetic oligonucleotide
  Sense strand starting at position 3965 of SEQ ID NO: 629
gguugccuuggugagaaua

SEQ ID NO: 52177 - RNA, 19 nt, Artificial Sequence
  Description of Artificial Sequence: Synthetic oligonucleotide
  Antisense strand to SEQ ID NO: 52096
uauucucaccaaggcaacc

SEQ ID NO: 52178 - RNA, 19 nt, Artificial Sequence
  Description of Artificial Sequence: Synthetic oligonucleotide
  Sense strand starting at position 26 of SEQ ID NO: 630
acucaucgcuuauauuuga

SEQ ID NO: 52179 - RNA, 19 nt, Artificial Sequence
  Description of Artificial Sequence: Synthetic oligonucleotide
  Antisense strand to SEQ ID NO: 52098
ucaaauauaagcgaugagu

SEQ ID NO: 52180 - RNA, 19 nt, Artificial Sequence
  Description of Artificial Sequence: Synthetic oligonucleotide
  Sense strand starting at position 77 of SEQ ID NO: 630
gggucagucgccuagagac

SEQ ID NO: 52181 - RNA, 19 nt, Artificial Sequence
  Description of Artificial Sequence: Synthetic oligonucleotide
  Antisense strand to SEQ ID NO: 52100
gucucuaggcgacugaccc

SEQ ID NO: 52182 - RNA, 19 nt, Artificial Sequence
  Description of Artificial Sequence: Synthetic oligonucleotide
  Sense strand starting at position 229 of SEQ ID NO: 630
uggaaacacguuuaaccuu

SEQ ID NO: 52183 - RNA, 19 nt, Artificial Sequence
  Description of Artificial Sequence: Synthetic oligonucleotide
  Antisense strand to SEQ ID NO: 52102
aagguuaaacguguuucca

SEQ ID NO: 52184 - RNA, 19 nt, Artificial Sequence
  Description of Artificial Sequence: Synthetic oligonucleotide
  Sense strand starting at position 235 of SEQ ID NO: 630
cacguuuaaccuugauaga

SEQ ID NO: 52185 - RNA, 19 nt, Artificial Sequence
  Description of Artificial Sequence: Synthetic oligonucleotide
  Antisense strand to SEQ ID NO: 52104
ucuaucaagguuaaacgug

SEQ ID NO: 52186 - RNA, 19 nt, Artificial Sequence
  Description of Artificial Sequence: Synthetic oligonucleotide
  Sense strand starting at position 236 of SEQ ID NO: 630
acguuuaaccuugauagaa

SEQ ID NO: 52187 - RNA, 19 nt, Artificial Sequence
  Description of Artificial Sequence: Synthetic oligonucleotide
  Antisense strand to SEQ ID NO: 52106
uucuaucaagguuaaacgu

SEQ ID NO: 52188 - RNA, 19 nt, Artificial Sequence
  Description of Artificial Sequence: Synthetic oligonucleotide
  Sense strand starting at position 289 of SEQ ID NO: 630
uaccgaaauugagaaagaa

SEQ ID NO: 52189 - RNA, 19 nt, Artificial Sequence
  Description of Artificial Sequence: Synthetic oligonucleotide
  Antisense strand to SEQ ID NO: 52108
uucuuucucaauuucggua

SEQ ID NO: 52190 - RNA, 19 nt, Artificial Sequence
  Description of Artificial Sequence: Synthetic oligonucleotide
  Sense strand starting at position 383 of SEQ ID NO: 630
uuauaaaggucuuagcaac

SEQ ID NO: 52191 - RNA, 19 nt, Artificial Sequence
  Description of Artificial Sequence: Synthetic oligonucleotide
  Antisense strand to SEQ ID NO: 52110
guugcuaagaccuuuauaa

SEQ ID NO: 52192 - RNA, 19 nt, Artificial Sequence
  Description of Artificial Sequence: Synthetic oligonucleotide
  Sense strand starting at position 400 of SEQ ID NO: 630
acgguuggccauuaaucuu

SEQ ID NO: 52193 - RNA, 19 nt, Artificial Sequence
  Description of Artificial Sequence: Synthetic oligonucleotide
  Antisense strand to SEQ ID NO: 52112
aagauuaauggccaaccgu

SEQ ID NO: 52194 - RNA, 19 nt, Artificial Sequence
  Description of Artificial Sequence: Synthetic oligonucleotide
  Sense strand starting at position 403 of SEQ ID NO: 630
guuggccauuaaucuuuaa

SEQ ID NO: 52195 - RNA, 19 nt, Artificial Sequence
  Description of Artificial Sequence: Synthetic oligonucleotide
  Antisense strand to SEQ ID NO: 52114
uuaaagauuaauggccaac

SEQ ID NO: 52196 - RNA, 19 nt, Artificial Sequence
  Description of Artificial Sequence: Synthetic oligonucleotide
  Sense strand starting at position 451 of SEQ ID NO: 630
guaagacuaucucuuccag

SEQ ID NO: 52197 - RNA, 19 nt, Artificial Sequence
  Description of Artificial Sequence: Synthetic oligonucleotide
  Antisense strand to SEQ ID NO: 52116
cuggaagagauagucuuac

SEQ ID NO: 52198 - RNA, 19 nt, Artificial Sequence
  Description of Artificial Sequence: Synthetic oligonucleotide
  Sense strand starting at position 455 of SEQ ID NO: 630
gacuaucucuuccaggaga

SEQ ID NO: 52199 - RNA, 19 nt, Artificial Sequence
  Description of Artificial Sequence: Synthetic oligonucleotide
  Antisense strand to SEQ ID NO: 52118
ucuccuggaagagauaguc

SEQ ID NO: 52200 - RNA, 19 nt, Artificial Sequence
  Description of Artificial Sequence: Synthetic oligonucleotide
  Sense strand starting at position 457 of SEQ ID NO: 630
cuaucucuuccaggagaga

SEQ ID NO: 52201 - RNA, 19 nt, Artificial Sequence
  Description of Artificial Sequence: Synthetic oligonucleotide
  Antisense strand to SEQ ID NO: 52120
ucucuccuggaagagauag

SEQ ID NO: 52202 - RNA, 19 nt, Artificial Sequence
  Description of Artificial Sequence: Synthetic oligonucleotide
  Sense strand starting at position 523 of SEQ ID NO: 630
ggccuuuaaggaugauaac

SEQ ID NO: 52203 - RNA, 19 nt, Artificial Sequence
  Description of Artificial Sequence: Synthetic oligonucleotide
  Antisense strand to SEQ ID NO: 52122
guuaucauccuuaaaggcc

SEQ ID NO: 52204 - RNA, 19 nt, Artificial Sequence
  Description of Artificial Sequence: Synthetic oligonucleotide
  Sense strand starting at position 976 of SEQ ID NO: 630
acgugaaccuaaucaauuc

SEQ ID NO: 52205 - RNA, 19 nt, Artificial Sequence
  Description of Artificial Sequence: Synthetic oligonucleotide
  Antisense strand to SEQ ID NO: 52124
gaauugauuagguucacgu

SEQ ID NO: 52206 - RNA, 19 nt, Artificial Sequence
  Description of Artificial Sequence: Synthetic oligonucleotide
  Sense strand starting at position 1059 of SEQ ID NO: 630
gcacuuuauuacccgcaga

SEQ ID NO: 52207 - RNA, 19 nt, Artificial Sequence
  Description of Artificial Sequence: Synthetic oligonucleotide
  Antisense strand to SEQ ID NO: 52126
ucugcggguaauaaagugc

SEQ ID NO: 52208 - RNA, 19 nt, Artificial Sequence
  Description of Artificial Sequence: Synthetic oligonucleotide
  Sense strand starting at position 1062 of SEQ ID NO: 630
cuuuauuacccgcagagau

SEQ ID NO: 52209 - RNA, 19 nt, Artificial Sequence
  Description of Artificial Sequence: Synthetic oligonucleotide
  Antisense strand to SEQ ID NO: 52128
aucucugcggguaauaaag

SEQ ID NO: 52210 - RNA, 19 nt, Artificial Sequence
  Description of Artificial Sequence: Synthetic oligonucleotide
  Sense strand starting at position 1192 of SEQ ID NO: 630
gcacgcuucgauucucgaa

SEQ ID NO: 52211 - RNA, 19 nt, Artificial Sequence
  Description of Artificial Sequence: Synthetic oligonucleotide
  Antisense strand to SEQ ID NO: 52130
uucgagaaucgaagcgugc

SEQ ID NO: 52212 - RNA, 19 nt, Artificial Sequence
  Description of Artificial Sequence: Synthetic oligonucleotide
  Sense strand starting at position 1225 of SEQ ID NO: 630
ccggguuucgcuugcaaag

SEQ ID NO: 52213 - RNA, 19 nt, Artificial Sequence
  Description of Artificial Sequence: Synthetic oligonucleotide
  Antisense strand to SEQ ID NO: 52132
cuuugcaagcgaaacccgg

SEQ ID NO: 52214 - RNA, 19 nt, Artificial Sequence
  Description of Artificial Sequence: Synthetic oligonucleotide
  Sense strand starting at position 2650 of SEQ ID NO: 630
cagcgauuccugcggaguu

SEQ ID NO: 52215 - RNA, 19 nt, Artificial Sequence
  Description of Artificial Sequence: Synthetic oligonucleotide
  Antisense strand to SEQ ID NO: 52134
aacuccgcaggaaucgcug

SEQ ID NO: 52216 - RNA, 19 nt, Artificial Sequence
  Description of Artificial Sequence: Synthetic oligonucleotide
  Sense strand starting at position 2652 of SEQ ID NO: 630
gcgauuccugcggaguuga

SEQ ID NO: 52217 - RNA, 19 nt, Artificial Sequence
  Description of Artificial Sequence: Synthetic oligonucleotide
  Antisense strand to SEQ ID NO: 52136
ucaacuccgcaggaaucgc

SEQ ID NO: 52218 - RNA, 19 nt, Artificial Sequence
  Description of Artificial Sequence: Synthetic oligonucleotide
  Sense strand starting at position 2760 of SEQ ID NO: 630
cgaguugaugugcacacua

SEQ ID NO: 52219 - RNA, 19 nt, Artificial Sequence
  Description of Artificial Sequence: Synthetic oligonucleotide
  Antisense strand to SEQ ID NO: 52138
uagugugcacaucaacucg

SEQ ID NO: 52220 - RNA, 19 nt, Artificial Sequence
  Description of Artificial Sequence: Synthetic oligonucleotide
  Sense strand starting at position 2859 of SEQ ID NO: 630
guguguugccgcaagagug

SEQ ID NO: 52221 - RNA, 19 nt, Artificial Sequence
  Description of Artificial Sequence: Synthetic oligonucleotide
  Antisense strand to SEQ ID NO: 52140
cacucuugcggcaacacac

SEQ ID NO: 52222 - RNA, 19 nt, Artificial Sequence
  Description of Artificial Sequence: Synthetic oligonucleotide
  Sense strand starting at position 2904 of SEQ ID NO: 630
ccgcuuuccagcgucauua

SEQ ID NO: 52223 - RNA, 19 nt, Artificial Sequence
  Description of Artificial Sequence: Synthetic oligonucleotide
  Antisense strand to SEQ ID NO: 52142
uaaugacgcuggaaagcgg

SEQ ID NO: 52224 - RNA, 19 nt, Artificial Sequence
  Description of Artificial Sequence: Synthetic oligonucleotide
  Sense strand starting at position 2908 of SEQ ID NO: 630
uuuccagcgucauuagcaa

SEQ ID NO: 52225 - RNA, 19 nt, Artificial Sequence
  Description of Artificial Sequence: Synthetic oligonucleotide
  Antisense strand to SEQ ID NO: 52144
uugcuaaugacgcuggaaa

SEQ ID NO: 52226 - RNA, 19 nt, Artificial Sequence
  Description of Artificial Sequence: Synthetic oligonucleotide
  Sense strand starting at position 2987 of SEQ ID NO: 630
cgucauucccaauggucuu

SEQ ID NO: 52227 - RNA, 19 nt, Artificial Sequence
  Description of Artificial Sequence: Synthetic oligonucleotide
  Antisense strand to SEQ ID NO: 52146
aagaccauugggaaugacg

SEQ ID NO: 52228 - RNA, 19 nt, Artificial Sequence
  Description of Artificial Sequence: Synthetic oligonucleotide
  Sense strand starting at position 2994 of SEQ ID NO: 630
cccaauggucuugaaguca

SEQ ID NO: 52229 - RNA, 19 nt, Artificial Sequence
  Description of Artificial Sequence: Synthetic oligonucleotide
  Antisense strand to SEQ ID NO: 52148
ugacuucaagaccauuggg

SEQ ID NO: 52230 - RNA, 19 nt, Artificial Sequence
  Description of Artificial Sequence: Synthetic oligonucleotide
  Sense strand starting at position 3035 of SEQ ID NO: 630
aaauacuggcgaggcaauu

SEQ ID NO: 52231 - RNA, 19 nt, Artificial Sequence
  Description of Artificial Sequence: Synthetic oligonucleotide
  Antisense strand to SEQ ID NO: 52150
aauugccucgccaguauuu

SEQ ID NO: 52232 - RNA, 19 nt, Artificial Sequence
  Description of Artificial Sequence: Synthetic oligonucleotide
  Sense strand starting at position 3092 of SEQ ID NO: 630
gccagaauugaucguuguu

SEQ ID NO: 52233 - RNA, 19 nt, Artificial Sequence
  Description of Artificial Sequence: Synthetic oligonucleotide
  Antisense strand to SEQ ID NO: 52152
aacaacgaucaauucuggc

SEQ ID NO: 52234 - RNA, 19 nt, Artificial Sequence
  Description of Artificial Sequence: Synthetic oligonucleotide
  Sense strand starting at position 3094 of SEQ ID NO: 630
cagaauugaucguuguuga

SEQ ID NO: 52235 - RNA, 19 nt, Artificial Sequence
  Description of Artificial Sequence: Synthetic oligonucleotide
  Antisense strand to SEQ ID NO: 52154
ucaacaacgaucaauucug

SEQ ID NO: 52236 - RNA, 19 nt, Artificial Sequence
  Description of Artificial Sequence: Synthetic oligonucleotide
  Sense strand starting at position 3095 of SEQ ID NO: 630
agaauugaucguuguugaa

SEQ ID NO: 52237 - RNA, 19 nt, Artificial Sequence
  Description of Artificial Sequence: Synthetic oligonucleotide
  Antisense strand to SEQ ID NO: 52156
uucaacaacgaucaauucu

SEQ ID NO: 52238 - RNA, 19 nt, Artificial Sequence
  Description of Artificial Sequence: Synthetic oligonucleotide
  Sense strand starting at position 3273 of SEQ ID NO: 630
gcugaaggaucucauccaa

SEQ ID NO: 52239 - RNA, 19 nt, Artificial Sequence
  Description of Artificial Sequence: Synthetic oligonucleotide
  Antisense strand to SEQ ID NO: 52158
uuggaugagauccuucagc

SEQ ID NO: 52240 - RNA, 19 nt, Artificial Sequence
  Description of Artificial Sequence: Synthetic oligonucleotide
  Sense strand starting at position 3376 of SEQ ID NO: 630
uuaggaagguugggauaau

SEQ ID NO: 52241 - RNA, 19 nt, Artificial Sequence
  Description of Artificial Sequence: Synthetic oligonucleotide
  Antisense strand to SEQ ID NO: 52160
auuaucccaaccuuccuaa

SEQ ID NO: 52242 - RNA, 19 nt, Artificial Sequence
  Description of Artificial Sequence: Synthetic oligonucleotide
  Sense strand starting at position 3411 of SEQ ID NO: 630
aaagacagguuauagugau

SEQ ID NO: 52243 - RNA, 19 nt, Artificial Sequence
  Description of Artificial Sequence: Synthetic oligonucleotide
  Antisense strand to SEQ ID NO: 52162
aucacuauaaccugucuuu

SEQ ID NO: 52244 - RNA, 19 nt, Artificial Sequence
  Description of Artificial Sequence: Synthetic oligonucleotide
  Sense strand starting at position 3419 of SEQ ID NO: 630
guuauagugauccgugguc

SEQ ID NO: 52245 - RNA, 19 nt, Artificial Sequence
  Description of Artificial Sequence: Synthetic oligonucleotide
  Antisense strand to SEQ ID NO: 52164
gaccacggaucacuauaac

SEQ ID NO: 52246 - RNA, 19 nt, Artificial Sequence
  Description of Artificial Sequence: Synthetic oligonucleotide
  Sense strand starting at position 3421 of SEQ ID NO: 630
uauagugauccguggucaa

SEQ ID NO: 52247 - RNA, 19 nt, Artificial Sequence
  Description of Artificial Sequence: Synthetic oligonucleotide
  Antisense strand to SEQ ID NO: 52166
uugaccacggaucacuaua

SEQ ID NO: 52248 - RNA, 19 nt, Artificial Sequence
  Description of Artificial Sequence: Synthetic oligonucleotide
  Sense strand starting at position 3431 of SEQ ID NO: 630
cguggucaaugccugauuu

SEQ ID NO: 52249 - RNA, 19 nt, Artificial Sequence
  Description of Artificial Sequence: Synthetic oligonucleotide
  Antisense strand to SEQ ID NO: 52168
aaaucaggcauugaccacg

SEQ ID NO: 52250 - RNA, 19 nt, Artificial Sequence
  Description of Artificial Sequence: Synthetic oligonucleotide
  Sense strand starting at position 3435 of SEQ ID NO: 630
gucaaugccugauuugucu

SEQ ID NO: 52251 - RNA, 19 nt, Artificial Sequence
  Description of Artificial Sequence: Synthetic oligonucleotide
  Antisense strand to SEQ ID NO: 52170
agacaaaucaggcauugac

SEQ ID NO: 52252 - RNA, 19 nt, Artificial Sequence
  Description of Artificial Sequence: Synthetic oligonucleotide
  Sense strand starting at position 3898 of SEQ ID NO: 630
agcagugacccggagcuau

SEQ ID NO: 52253 - RNA, 19 nt, Artificial Sequence
  Description of Artificial Sequence: Synthetic oligonucleotide
  Antisense strand to SEQ ID NO: 52172
auagcuccgggucacugcu

SEQ ID NO: 52254 - RNA, 19 nt, Artificial Sequence
  Description of Artificial Sequence: Synthetic oligonucleotide
  Sense strand starting at position 3951 of SEQ ID NO: 630
gcaugaugccucugccuua

SEQ ID NO: 52255 - RNA, 19 nt, Artificial Sequence
  Description of Artificial Sequence: Synthetic oligonucleotide
  Antisense strand to SEQ ID NO: 52174
uaaggcagaggcaucaugc

SEQ ID NO: 52256 - RNA, 19 nt, Artificial Sequence
  Description of Artificial Sequence: Synthetic oligonucleotide
  Sense strand starting at position 3978 of SEQ ID NO: 630
guacuugaagaacgcuaau

SEQ ID NO: 52257 - RNA, 19 nt, Artificial Sequence
  Description of Artificial Sequence: Synthetic oligonucleotide
  Antisense strand to SEQ ID NO: 52176
auuagcguucuucaaguac

SEQ ID NO: 52258 - RNA, 19 nt, Artificial Sequence
  Description of Artificial Sequence: Synthetic oligonucleotide
  Sense strand starting at position 324 of SEQ ID NO: 632
ugaugagcgccacaggaau

SEQ ID NO: 52259 - RNA, 19 nt, Artificial Sequence
  Description of Artificial Sequence: Synthetic oligonucleotide
  Antisense strand to SEQ ID NO: 52178
auuccuguggcgcucauca

SEQ ID NO: 52260 - RNA, 19 nt, Artificial Sequence
  Description of Artificial Sequence: Synthetic oligonucleotide
  Sense strand starting at position 490 of SEQ ID NO: 632
cuguuaaagucaguagaau

SEQ ID NO: 52261 - RNA, 19 nt, Artificial Sequence
  Description of Artificial Sequence: Synthetic oligonucleotide
  Antisense strand to SEQ ID NO: 52180
auucuacugacuuuaacag

SEQ ID NO: 52262 - RNA, 19 nt, Artificial Sequence
  Description of Artificial Sequence: Synthetic oligonucleotide
  Sense strand starting at position 491 of SEQ ID NO: 632
uguuaaagucaguagaauu

SEQ ID NO: 52263 - RNA, 19 nt, Artificial Sequence
  Description of Artificial Sequence: Synthetic oligonucleotide
  Antisense strand to SEQ ID NO: 52182
aauucuacugacuuuaaca

SEQ ID NO: 52264 - RNA, 19 nt, Artificial Sequence
  Description of Artificial Sequence: Synthetic oligonucleotide
  Sense strand starting at position 653 of SEQ ID NO: 632
agugucucauucuucugau

SEQ ID NO: 52265 - RNA, 19 nt, Artificial Sequence
  Description of Artificial Sequence: Synthetic oligonucleotide
  Antisense strand to SEQ ID NO: 52184
aucagaagaaugagacacu

SEQ ID NO: 52266 - RNA, 19 nt, Artificial Sequence
  Description of Artificial Sequence: Synthetic oligonucleotide
  Sense strand starting at position 711 of SEQ ID NO: 632
gcagguuagaauuauguca

SEQ ID NO: 52267 - RNA, 19 nt, Artificial Sequence
  Description of Artificial Sequence: Synthetic oligonucleotide
  Antisense strand to SEQ ID NO: 52186
ugacauaauucuaaccugc

SEQ ID NO: 52268 - RNA, 19 nt, Artificial Sequence
  Description of Artificial Sequence: Synthetic oligonucleotide
  Sense strand starting at position 736 of SEQ ID NO: 632
gauuguucucgugcgugac

SEQ ID NO: 52269 - RNA, 19 nt, Artificial Sequence
  Description of Artificial Sequence: Synthetic oligonucleotide
  Antisense strand to SEQ ID NO: 52188
gucacgcacgagaacaauc

SEQ ID NO: 52270 - RNA, 19 nt, Artificial Sequence
  Description of Artificial Sequence: Synthetic oligonucleotide
  Sense strand starting at position 835 of SEQ ID NO: 632
gguggcauuagacacauua

SEQ ID NO: 52271 - RNA, 19 nt, Artificial Sequence
  Description of Artificial Sequence: Synthetic oligonucleotide
  Antisense strand to SEQ ID NO: 52190
uaaugugucuaaugccacc

SEQ ID NO: 52272 - RNA, 19 nt, Artificial Sequence
  Description of Artificial Sequence: Synthetic oligonucleotide
  Sense strand starting at position 915 of SEQ ID NO: 632
cucaacagccuuugagaca

SEQ ID NO: 52273 - RNA, 19 nt, Artificial Sequence
  Description of Artificial Sequence: Synthetic oligonucleotide
  Antisense strand to SEQ ID NO: 52192
ugucucaaaggcuguugag

SEQ ID NO: 52274 - RNA, 19 nt, Artificial Sequence
  Description of Artificial Sequence: Synthetic oligonucleotide
  Sense strand starting at position 1079 of SEQ ID NO: 632
cccagaaucggaggacuuu

SEQ ID NO: 52275 - RNA, 19 nt, Artificial Sequence
  Description of Artificial Sequence: Synthetic oligonucleotide
  Antisense strand to SEQ ID NO: 52194
aaaguccuccgauucuggg

SEQ ID NO: 52276 - RNA, 19 nt, Artificial Sequence
  Description of Artificial Sequence: Synthetic oligonucleotide
  Sense strand starting at position 1168 of SEQ ID NO: 632
gaacgaucugacuggaggu

SEQ ID NO: 52277 - RNA, 19 nt, Artificial Sequence
  Description of Artificial Sequence: Synthetic oligonucleotide
  Antisense strand to SEQ ID NO: 52196
accuccagucagaucguuc

SEQ ID NO: 52278 - RNA, 19 nt, Artificial Sequence
  Description of Artificial Sequence: Synthetic oligonucleotide
  Sense strand starting at position 1178 of SEQ ID NO: 632
acuggagguuaguuugcaa

SEQ ID NO: 52279 - RNA, 19 nt, Artificial Sequence
  Description of Artificial Sequence: Synthetic oligonucleotide
  Antisense strand to SEQ ID NO: 52198
uugcaaacuaaccuccagu

SEQ ID NO: 52280 - RNA, 19 nt, Artificial Sequence
  Description of Artificial Sequence: Synthetic oligonucleotide
  Sense strand starting at position 1185 of SEQ ID NO: 632
guuaguuugcaagaccaug

SEQ ID NO: 52281 - RNA, 19 nt, Artificial Sequence
  Description of Artificial Sequence: Synthetic oligonucleotide
  Antisense strand to SEQ ID NO: 52200
cauggucuugcaaacuaac

SEQ ID NO: 52282 - RNA, 19 nt, Artificial Sequence
  Description of Artificial Sequence: Synthetic oligonucleotide
  Sense strand starting at position 1241 of SEQ ID NO: 632
ucaguuaccugagugcaca

SEQ ID NO: 52283 - RNA, 19 nt, Artificial Sequence
  Description of Artificial Sequence: Synthetic oligonucleotide
  Antisense strand to SEQ ID NO: 52202
ugugcacucagguaacuga

SEQ ID NO: 52284 - RNA, 19 nt, Artificial Sequence
  Description of Artificial Sequence: Synthetic oligonucleotide
  Sense strand starting at position 1512 of SEQ ID NO: 632
cacguacgccauuaaacaa

SEQ ID NO: 52285 - RNA, 19 nt, Artificial Sequence
  Description of Artificial Sequence: Synthetic oligonucleotide
  Antisense strand to SEQ ID NO: 52204
uuguuuaauggcguacgug

SEQ ID NO: 52286 - RNA, 19 nt, Artificial Sequence
  Description of Artificial Sequence: Synthetic oligonucleotide
  Sense strand starting at position 1574 of SEQ ID NO: 632
agcauuaaagcgggacuga

SEQ ID NO: 52287 - RNA, 19 nt, Artificial Sequence
  Description of Artificial Sequence: Synthetic oligonucleotide
  Antisense strand to SEQ ID NO: 52206
ucagucccgcuuuaaugcu

SEQ ID NO: 52288 - RNA, 19 nt, Artificial Sequence
  Description of Artificial Sequence: Synthetic oligonucleotide
  Sense strand starting at position 1575 of SEQ ID NO: 632
gcauuaaagcgggacugaa

SEQ ID NO: 52289 - RNA, 19 nt, Artificial Sequence
  Description of Artificial Sequence: Synthetic oligonucleotide
  Antisense strand to SEQ ID NO: 52208
uucagucccgcuuuaaugc

SEQ ID NO: 52290 - RNA, 19 nt, Artificial Sequence
  Description of Artificial Sequence: Synthetic oligonucleotide
  Sense strand starting at position 1693 of SEQ ID NO: 632
cugagaaugcgugaucuag

SEQ ID NO: 52291 - RNA, 19 nt, Artificial Sequence
  Description of Artificial Sequence: Synthetic oligonucleotide
  Antisense strand to SEQ ID NO: 52210
cuagaucacgcauucucag

SEQ ID NO: 52292 - RNA, 19 nt, Artificial Sequence
  Description of Artificial Sequence: Synthetic oligonucleotide
  Sense strand starting at position 1701 of SEQ ID NO: 632
gcgugaucuagcccuaugu

SEQ ID NO: 52293 - RNA, 19 nt, Artificial Sequence
  Description of Artificial Sequence: Synthetic oligonucleotide
  Antisense strand to SEQ ID NO: 52212
acauagggcuagaucacgc

SEQ ID NO: 52294 - RNA, 19 nt, Artificial Sequence
  Description of Artificial Sequence: Synthetic oligonucleotide
  Sense strand starting at position 1724 of SEQ ID NO: 632
uucuguaauuuggccacau

SEQ ID NO: 52295 - RNA, 19 nt, Artificial Sequence
  Description of Artificial Sequence: Synthetic oligonucleotide
  Antisense strand to SEQ ID NO: 52214
auguggccaaauuacagaa

SEQ ID NO: 52296 - RNA, 19 nt, Artificial Sequence
  Description of Artificial Sequence: Synthetic oligonucleotide
  Sense strand starting at position 1743 of SEQ ID NO: 632
guucuaucucuagaaaggu

SEQ ID NO: 52297 - RNA, 19 nt, Artificial Sequence
  Description of Artificial Sequence: Synthetic oligonucleotide
  Antisense strand to SEQ ID NO: 52216
accuuucuagagauagaac

SEQ ID NO: 52298 - RNA, 19 nt, Artificial Sequence
  Description of Artificial Sequence: Synthetic oligonucleotide
  Sense strand starting at position 1753 of SEQ ID NO: 632
uagaaaggucaauguugca

SEQ ID NO: 52299 - RNA, 19 nt, Artificial Sequence
  Description of Artificial Sequence: Synthetic oligonucleotide
  Antisense strand to SEQ ID NO: 52218
ugcaacauugaccuuucua

SEQ ID NO: 52300 - RNA, 19 nt, Artificial Sequence
  Description of Artificial Sequence: Synthetic oligonucleotide
  Sense strand starting at position 1828 of SEQ ID NO: 632
uccuaugagucagucaaca

SEQ ID NO: 52301 - RNA, 19 nt, Artificial Sequence
  Description of Artificial Sequence: Synthetic oligonucleotide
  Antisense strand to SEQ ID NO: 52220
uguugacugacucauagga

SEQ ID NO: 52302 - RNA, 19 nt, Artificial Sequence
  Description of Artificial Sequence: Synthetic oligonucleotide
  Sense strand starting at position 1886 of SEQ ID NO: 632
cagggcaggucauugguua

SEQ ID NO: 52303 - RNA, 19 nt, Artificial Sequence
  Description of Artificial Sequence: Synthetic oligonucleotide
  Antisense strand to SEQ ID NO: 52222
uaaccaaugaccugcccug

SEQ ID NO: 52304 - RNA, 19 nt, Artificial Sequence
  Description of Artificial Sequence: Synthetic oligonucleotide
  Sense strand starting at position 1929 of SEQ ID NO: 632
ccgugaagaggcugaugau

SEQ ID NO: 52305 - RNA, 19 nt, Artificial Sequence
  Description of Artificial Sequence: Synthetic oligonucleotide
  Antisense strand to SEQ ID NO: 52224
aucaucagccucuucacgg

SEQ ID NO: 52306 - RNA, 19 nt, Artificial Sequence
  Description of Artificial Sequence: Synthetic oligonucleotide
  Sense strand starting at position 2029 of SEQ ID NO: 632
cuguccuaaccgugaagga

SEQ ID NO: 52307 - RNA, 19 nt, Artificial Sequence
  Description of Artificial Sequence: Synthetic oligonucleotide
  Antisense strand to SEQ ID NO: 52226
uccuucacgguuaggacag

SEQ ID NO: 52308 - RNA, 19 nt, Artificial Sequence
  Description of Artificial Sequence: Synthetic oligonucleotide
  Sense strand starting at position 2351 of SEQ ID NO: 632
gcucuagggccucauagau

SEQ ID NO: 52309 - RNA, 19 nt, Artificial Sequence
  Description of Artificial Sequence: Synthetic oligonucleotide
  Antisense strand to SEQ ID NO: 52228
aucuaugaggcccuagagc

SEQ ID NO: 52310 - RNA, 19 nt, Artificial Sequence
  Description of Artificial Sequence: Synthetic oligonucleotide
  Sense strand starting at position 2571 of SEQ ID NO: 632
acauguuuaugauccugua

SEQ ID NO: 52311 - RNA, 19 nt, Artificial Sequence
  Description of Artificial Sequence: Synthetic oligonucleotide
  Antisense strand to SEQ ID NO: 52230
uacaggaucauaaacaugu

SEQ ID NO: 52312 - RNA, 19 nt, Artificial Sequence
  Description of Artificial Sequence: Synthetic oligonucleotide
  Sense strand starting at position 2583 of SEQ ID NO: 632
uccuguacugcagaacuua

SEQ ID NO: 52313 - RNA, 19 nt, Artificial Sequence
  Description of Artificial Sequence: Synthetic oligonucleotide
  Antisense strand to SEQ ID NO: 52232
uaaguucugcaguacagga

SEQ ID NO: 52314 - RNA, 19 nt, Artificial Sequence
  Description of Artificial Sequence: Synthetic oligonucleotide
  Sense strand starting at position 2626 of SEQ ID NO: 632
gcagaaagaaaguguucua

SEQ ID NO: 52315 - RNA, 19 nt, Artificial Sequence
  Description of Artificial Sequence: Synthetic oligonucleotide
  Antisense strand to SEQ ID NO: 52234
uagaacacuuucuuucugc

SEQ ID NO: 52316 - RNA, 19 nt, Artificial Sequence
  Description of Artificial Sequence: Synthetic oligonucleotide
  Sense strand starting at position 2633 of SEQ ID NO: 632
gaaaguguucuacagcaga

SEQ ID NO: 52317 - RNA, 19 nt, Artificial Sequence
  Description of Artificial Sequence: Synthetic oligonucleotide
  Antisense strand to SEQ ID NO: 52236
ucugcuguagaacacuuuc

SEQ ID NO: 52318 - RNA, 19 nt, Artificial Sequence
  Description of Artificial Sequence: Synthetic oligonucleotide
  Sense strand starting at position 2740 of SEQ ID NO: 632
ggauuacuccagcagcacu

SEQ ID NO: 52319 - RNA, 19 nt, Artificial Sequence
  Description of Artificial Sequence: Synthetic oligonucleotide
  Antisense strand to SEQ ID NO: 52238
agugcugcuggaguaaucc

SEQ ID NO: 52320 - RNA, 19 nt, Artificial Sequence
  Description of Artificial Sequence: Synthetic oligonucleotide
  Sense strand starting at position 3163 of SEQ ID NO: 632
guaucuagcucauuuguuu

SEQ ID NO: 52321 - RNA, 19 nt, Artificial Sequence
  Description of Artificial Sequence: Synthetic oligonucleotide
  Antisense strand to SEQ ID NO: 52240
aaacaaaugagcuagauac

SEQ ID NO: 52322 - RNA, 19 nt, Artificial Sequence
  Description of Artificial Sequence: Synthetic oligonucleotide
  Sense strand starting at position 3182 of SEQ ID NO: 632
caguuuggacaaugcuaaa

SEQ ID NO: 52323 - RNA, 19 nt, Artificial Sequence
  Description of Artificial Sequence: Synthetic oligonucleotide
  Antisense strand to SEQ ID NO: 52242
uuuagcauuguccaaacug

SEQ ID NO: 52324 - RNA, 19 nt, Artificial Sequence
  Description of Artificial Sequence: Synthetic oligonucleotide
  Sense strand starting at position 3312 of SEQ ID NO: 632
aguaaucuugcagauacug

SEQ ID NO: 52325 - RNA, 19 nt, Artificial Sequence
  Description of Artificial Sequence: Synthetic oligonucleotide
  Antisense strand to SEQ ID NO: 52244
caguaucugcaagauuacu

SEQ ID NO: 52326 - RNA, 19 nt, Artificial Sequence
  Description of Artificial Sequence: Synthetic oligonucleotide
  Sense strand starting at position 3343 of SEQ ID NO: 632
uggugaaaccuauaccugu

SEQ ID NO: 52327 - RNA, 19 nt, Artificial Sequence
  Description of Artificial Sequence: Synthetic oligonucleotide
  Antisense strand to SEQ ID NO: 52246
acagguauagguuucacca

SEQ ID NO: 52328 - RNA, 19 nt, Artificial Sequence
  Description of Artificial Sequence: Synthetic oligonucleotide
  Sense strand starting at position 3370 of SEQ ID NO: 632
caaucuuugguggaggcaa

SEQ ID NO: 52329 - RNA, 19 nt, Artificial Sequence
  Description of Artificial Sequence: Synthetic oligonucleotide
  Antisense strand to SEQ ID NO: 52248
uugccuccaccaaagauug

SEQ ID NO: 52330 - RNA, 19 nt, Artificial Sequence
  Description of Artificial Sequence: Synthetic oligonucleotide
  Sense strand starting at position 3432 of SEQ ID NO: 632
agauauuucuagcaaagga

SEQ ID NO: 52331 - RNA, 19 nt, Artificial Sequence
  Description of Artificial Sequence: Synthetic oligonucleotide
  Antisense strand to SEQ ID NO: 52250
uccuuugcuagaaauaucu

SEQ ID NO: 52332 - RNA, 19 nt, Artificial Sequence
  Description of Artificial Sequence: Synthetic oligonucleotide
  Sense strand starting at position 3494 of SEQ ID NO: 632
ggucauacuuccuucuuga

SEQ ID NO: 52333 - RNA, 19 nt, Artificial Sequence
  Description of Artificial Sequence: Synthetic oligonucleotide
  Antisense strand to SEQ ID NO: 52252
ucaagaaggaaguaugacc

SEQ ID NO: 52334 - RNA, 19 nt, Artificial Sequence
  Description of Artificial Sequence: Synthetic oligonucleotide
  Sense strand starting at position 3681 of SEQ ID NO: 632
guggguacucauggguuua

SEQ ID NO: 52335 - RNA, 19 nt, Artificial Sequence
  Description of Artificial Sequence: Synthetic oligonucleotide
  Antisense strand to SEQ ID NO: 52254
uaaacccaugaguacccac

SEQ ID NO: 52336 - RNA, 19 nt, Artificial Sequence
  Description of Artificial Sequence: Synthetic oligonucleotide
  Sense strand starting at position 3682 of SEQ ID NO: 632
uggguacucauggguuuau

SEQ ID NO: 52337 - RNA, 19 nt, Artificial Sequence
  Description of Artificial Sequence: Synthetic oligonucleotide
  Antisense strand to SEQ ID NO: 52256
auaaacccaugaguaccca

SEQ ID NO: 52338 - RNA, 19 nt, Artificial Sequence
  Description of Artificial Sequence: Synthetic oligonucleotide
  Sense strand starting at position 58 of SEQ ID NO: 631
gguuuaguagaguaggaug

SEQ ID NO: 52339 - RNA, 19 nt, Artificial Sequence
  Description of Artificial Sequence: Synthetic oligonucleotide
  Antisense strand to SEQ ID NO: 52258
cauccuacucuacuaaacc

SEQ ID NO: 52340 - RNA, 19 nt, Artificial Sequence
  Description of Artificial Sequence: Synthetic oligonucleotide
  Sense strand starting at position 66 of SEQ ID NO: 631
agaguaggauggucucgau

SEQ ID NO: 52341 - RNA, 19 nt, Artificial Sequence
  Description of Artificial Sequence: Synthetic oligonucleotide
  Antisense strand to SEQ ID NO: 52260
aucgagaccauccuacucu

SEQ ID NO: 52342 - RNA, 19 nt, Artificial Sequence
  Description of Artificial Sequence: Synthetic oligonucleotide
  Sense strand starting at position 875 of SEQ ID NO: 631
aggacuugccaaugaucua

SEQ ID NO: 52343 - RNA, 19 nt, Artificial Sequence
  Description of Artificial Sequence: Synthetic oligonucleotide
  Antisense strand to SEQ ID NO: 52262
uagaucauuggcaaguccu

SEQ ID NO: 52344 - RNA, 19 nt, Artificial Sequence
  Description of Artificial Sequence: Synthetic oligonucleotide
  Sense strand starting at position 901 of SEQ ID NO: 631
ugcuguagguuccucaaga

SEQ ID NO: 52345 - RNA, 19 nt, Artificial Sequence
  Description of Artificial Sequence: Synthetic oligonucleotide
  Antisense strand to SEQ ID NO: 52264
ucuugaggaaccuacagca

SEQ ID NO: 52346 - RNA, 19 nt, Artificial Sequence
  Description of Artificial Sequence: Synthetic oligonucleotide
  Sense strand starting at position 902 of SEQ ID NO: 631
gcuguagguuccucaagag

SEQ ID NO: 52347 - RNA, 19 nt, Artificial Sequence
  Description of Artificial Sequence: Synthetic oligonucleotide
  Antisense strand to SEQ ID NO: 52266
cucuugaggaaccuacagc

SEQ ID NO: 52348 - RNA, 19 nt, Artificial Sequence
  Description of Artificial Sequence: Synthetic oligonucleotide
  Sense strand starting at position 919 of SEQ ID NO: 631
aggugccuucucggaguua

SEQ ID NO: 52349 - RNA, 19 nt, Artificial Sequence
  Description of Artificial Sequence: Synthetic oligonucleotide
  Antisense strand to SEQ ID NO: 52268
uaacuccgagaaggcaccu

SEQ ID NO: 52350 - RNA, 19 nt, Artificial Sequence
  Description of Artificial Sequence: Synthetic oligonucleotide
  Sense strand starting at position 924 of SEQ ID NO: 631
ccuucucggaguuaaauga

SEQ ID NO: 52351 - RNA, 19 nt, Artificial Sequence
  Description of Artificial Sequence: Synthetic oligonucleotide
  Antisense strand to SEQ ID NO: 52270
ucauuuaacuccgagaagg

SEQ ID NO: 52352 - RNA, 19 nt, Artificial Sequence
  Description of Artificial Sequence: Synthetic oligonucleotide
  Sense strand starting at position 928 of SEQ ID NO: 631
cucggaguuaaaugaguca

SEQ ID NO: 52353 - RNA, 19 nt, Artificial Sequence
  Description of Artificial Sequence: Synthetic oligonucleotide
  Antisense strand to SEQ ID NO: 52272
ugacucauuuaacuccgag

SEQ ID NO: 52354 - RNA, 19 nt, Artificial Sequence
  Description of Artificial Sequence: Synthetic oligonucleotide
  Sense strand starting at position 935 of SEQ ID NO: 631
uuaaaugagucaccgcuua

SEQ ID NO: 52355 - RNA, 19 nt, Artificial Sequence
  Description of Artificial Sequence: Synthetic oligonucleotide
  Antisense strand to SEQ ID NO: 52274
uaagcggugacucauuuaa

SEQ ID NO: 52356 - RNA, 19 nt, Artificial Sequence
  Description of Artificial Sequence: Synthetic oligonucleotide
  Sense strand starting at position 1498 of SEQ ID NO: 631
ggucucgucgccuaggaga

SEQ ID NO: 52357 - RNA, 19 nt, Artificial Sequence
  Description of Artificial Sequence: Synthetic oligonucleotide
  Antisense strand to SEQ ID NO: 52276
ucuccuaggcgacgagacc

SEQ ID NO: 52358 - RNA, 19 nt, Artificial Sequence
  Description of Artificial Sequence: Synthetic oligonucleotide
  Sense strand starting at position 1612 of SEQ ID NO: 631
cgacuuccugccuagcuaa

SEQ ID NO: 52359 - RNA, 19 nt, Artificial Sequence
  Description of Artificial Sequence: Synthetic oligonucleotide
  Antisense strand to SEQ ID NO: 52278
uuagcuaggcaggaagucg

SEQ ID NO: 52360 - RNA, 19 nt, Artificial Sequence
  Description of Artificial Sequence: Synthetic oligonucleotide
  Sense strand starting at position 2101 of SEQ ID NO: 631
uggcgucgagucguugaga

SEQ ID NO: 52361 - RNA, 19 nt, Artificial Sequence
  Description of Artificial Sequence: Synthetic oligonucleotide
  Antisense strand to SEQ ID NO: 52280
ucucaacgacucgacgcca

SEQ ID NO: 52362 - RNA, 19 nt, Artificial Sequence
  Description of Artificial Sequence: Synthetic oligonucleotide
  Sense strand starting at position 2293 of SEQ ID NO: 631
ugagaaucaggccgagaca

SEQ ID NO: 52363 - RNA, 19 nt, Artificial Sequence
  Description of Artificial Sequence: Synthetic oligonucleotide
  Antisense strand to SEQ ID NO: 52282
ugucucggccugauucuca

SEQ ID NO: 52364 - RNA, 19 nt, Artificial Sequence
  Description of Artificial Sequence: Synthetic oligonucleotide
  Sense strand starting at position 2426 of SEQ ID NO: 631
augucauguugccucucaa

SEQ ID NO: 52365 - RNA, 19 nt, Artificial Sequence
  Description of Artificial Sequence: Synthetic oligonucleotide
  Antisense strand to SEQ ID NO: 52284
uugagaggcaacaugacau

SEQ ID NO: 52366 - RNA, 19 nt, Artificial Sequence
  Description of Artificial Sequence: Synthetic oligonucleotide
  Sense strand starting at position 2778 of SEQ ID NO: 631
cucauuuccuuguaaagag

SEQ ID NO: 52367 - RNA, 19 nt, Artificial Sequence
  Description of Artificial Sequence: Synthetic oligonucleotide
  Antisense strand to SEQ ID NO: 52286
cucuuuacaaggaaaugag

SEQ ID NO: 52368 - RNA, 19 nt, Artificial Sequence
  Description of Artificial Sequence: Synthetic oligonucleotide
  Sense strand starting at position 2902 of SEQ ID NO: 631
uuccauggcguugguuaaa

SEQ ID NO: 52369 - RNA, 19 nt, Artificial Sequence
  Description of Artificial Sequence: Synthetic oligonucleotide
  Antisense strand to SEQ ID NO: 52288
uuuaaccaacgccauggaa

SEQ ID NO: 52370 - RNA, 19 nt, Artificial Sequence
  Description of Artificial Sequence: Synthetic oligonucleotide
  Sense strand starting at position 2928 of SEQ ID NO: 631
gccuauugagaccauagua

SEQ ID NO: 52371 - RNA, 19 nt, Artificial Sequence
  Description of Artificial Sequence: Synthetic oligonucleotide
  Antisense strand to SEQ ID NO: 52290
uacuauggucucaauaggc

SEQ ID NO: 52372 - RNA, 19 nt, Artificial Sequence
  Description of Artificial Sequence: Synthetic oligonucleotide
  Sense strand starting at position 2943 of SEQ ID NO: 631
aguauuugcuuuccaguga

SEQ ID NO: 52373 - RNA, 19 nt, Artificial Sequence
  Description of Artificial Sequence: Synthetic oligonucleotide
  Antisense strand to SEQ ID NO: 52292
ucacuggaaagcaaauacu

SEQ ID NO: 52374 - RNA, 19 nt, Artificial Sequence
  Description of Artificial Sequence: Synthetic oligonucleotide
  Sense strand starting at position 2947 of SEQ ID NO: 631
uuugcuuuccagugaguaa

SEQ ID NO: 52375 - RNA, 19 nt, Artificial Sequence
  Description of Artificial Sequence: Synthetic oligonucleotide
  Antisense strand to SEQ ID NO: 52294
uuacucacuggaaagcaaa

SEQ ID NO: 52376 - RNA, 19 nt, Artificial Sequence
  Description of Artificial Sequence: Synthetic oligonucleotide
  Sense strand starting at position 2948 of SEQ ID NO: 631
uugcuuuccagugaguaag

SEQ ID NO: 52377 - RNA, 19 nt, Artificial Sequence
  Description of Artificial Sequence: Synthetic oligonucleotide
  Antisense strand to SEQ ID NO: 52296
cuuacucacuggaaagcaa

SEQ ID NO: 52378 - RNA, 19 nt, Artificial Sequence
  Description of Artificial Sequence: Synthetic oligonucleotide
  Sense strand starting at position 2950 of SEQ ID NO: 631
gcuuuccagugaguaagaa

SEQ ID NO: 52379 - RNA, 19 nt, Artificial Sequence
  Description of Artificial Sequence: Synthetic oligonucleotide
  Antisense strand to SEQ ID NO: 52298
uucuuacucacuggaaagc

SEQ ID NO: 52380 - RNA, 19 nt, Artificial Sequence
  Description of Artificial Sequence: Synthetic oligonucleotide
  Sense strand starting at position 3024 of SEQ ID NO: 631
gcaagcagaguuugugauu

SEQ ID NO: 52381 - RNA, 19 nt, Artificial Sequence
  Description of Artificial Sequence: Synthetic oligonucleotide
  Antisense strand to SEQ ID NO: 52300
aaucacaaacucugcuugc

SEQ ID NO: 52382 - RNA, 19 nt, Artificial Sequence
  Description of Artificial Sequence: Synthetic oligonucleotide
  Sense strand starting at position 3157 of SEQ ID NO: 631
ggcacuugguacucucaga

SEQ ID NO: 52383 - RNA, 19 nt, Artificial Sequence
  Description of Artificial Sequence: Synthetic oligonucleotide
  Antisense strand to SEQ ID NO: 52302
ucugagaguaccaagugcc

SEQ ID NO: 52384 - RNA, 19 nt, Artificial Sequence
  Description of Artificial Sequence: Synthetic oligonucleotide
  Sense strand starting at position 3165 of SEQ ID NO: 631
guacucucagagcaauucu

SEQ ID NO: 52385 - RNA, 19 nt, Artificial Sequence
  Description of Artificial Sequence: Synthetic oligonucleotide
  Antisense strand to SEQ ID NO: 52304
agaauugcucugagaguac

SEQ ID NO: 52386 - RNA, 19 nt, Artificial Sequence
  Description of Artificial Sequence: Synthetic oligonucleotide
  Sense strand starting at position 3272 of SEQ ID NO: 631
guaaaucuagcaggaaauc

SEQ ID NO: 52387 - RNA, 19 nt, Artificial Sequence
  Description of Artificial Sequence: Synthetic oligonucleotide
  Antisense strand to SEQ ID NO: 52306
gauuuccugcuagauuuac

SEQ ID NO: 52388 - RNA, 19 nt, Artificial Sequence
  Description of Artificial Sequence: Synthetic oligonucleotide
  Sense strand starting at position 3391 of SEQ ID NO: 631
uguuaaugauuacuagaga

SEQ ID NO: 52389 - RNA, 19 nt, Artificial Sequence
  Description of Artificial Sequence: Synthetic oligonucleotide
  Antisense strand to SEQ ID NO: 52308
ucucuaguaaucauuaaca

SEQ ID NO: 52390 - RNA, 19 nt, Artificial Sequence
  Description of Artificial Sequence: Synthetic oligonucleotide
  Sense strand starting at position 3392 of SEQ ID NO: 631
guuaaugauuacuagagau

SEQ ID NO: 52391 - RNA, 19 nt, Artificial Sequence
  Description of Artificial Sequence: Synthetic oligonucleotide
  Antisense strand to SEQ ID NO: 52310
aucucuaguaaucauuaac

SEQ ID NO: 52392 - RNA, 19 nt, Artificial Sequence
  Description of Artificial Sequence: Synthetic oligonucleotide
  Sense strand starting at position 3524 of SEQ ID NO: 631
cggcauugcauuuaguuau

SEQ ID NO: 52393 - RNA, 19 nt, Artificial Sequence
  Description of Artificial Sequence: Synthetic oligonucleotide
  Antisense strand to SEQ ID NO: 52312
auaacuaaaugcaaugccg

SEQ ID NO: 52394 - RNA, 19 nt, Artificial Sequence
  Description of Artificial Sequence: Synthetic oligonucleotide
  Sense strand starting at position 3555 of SEQ ID NO: 631
gcuguaagcuuguugagaa

SEQ ID NO: 52395 - RNA, 19 nt, Artificial Sequence
  Description of Artificial Sequence: Synthetic oligonucleotide
  Antisense strand to SEQ ID NO: 52314
uucucaacaagcuuacagc

SEQ ID NO: 52396 - RNA, 19 nt, Artificial Sequence
  Description of Artificial Sequence: Synthetic oligonucleotide
  Sense strand starting at position 3597 of SEQ ID NO: 631
gggaauaacuguccaaagc

SEQ ID NO: 52397 - RNA, 19 nt, Artificial Sequence
  Description of Artificial Sequence: Synthetic oligonucleotide
  Antisense strand to SEQ ID NO: 52316
gcuuuggacaguuauuccc

SEQ ID NO: 52398 - RNA, 19 nt, Artificial Sequence
  Description of Artificial Sequence: Synthetic oligonucleotide
  Sense strand starting at position 3598 of SEQ ID NO: 631
ggaauaacuguccaaagcu

SEQ ID NO: 52399 - RNA, 19 nt, Artificial Sequence
  Description of Artificial Sequence: Synthetic oligonucleotide
  Antisense strand to SEQ ID NO: 52318
agcuuuggacaguuauucc

SEQ ID NO: 52400 - RNA, 19 nt, Artificial Sequence
  Description of Artificial Sequence: Synthetic oligonucleotide
  Sense strand starting at position 3687 of SEQ ID NO: 631
gagagugaaucugcuacga

SEQ ID NO: 52401 - RNA, 19 nt, Artificial Sequence
  Description of Artificial Sequence: Synthetic oligonucleotide
  Antisense strand to SEQ ID NO: 52320
ucguagcagauucacucuc

SEQ ID NO: 52402 - RNA, 19 nt, Artificial Sequence
  Description of Artificial Sequence: Synthetic oligonucleotide
  Sense strand starting at position 3705 of SEQ ID NO: 631
accuguaacucgcuuggau

SEQ ID NO: 52403 - RNA, 19 nt, Artificial Sequence
  Description of Artificial Sequence: Synthetic oligonucleotide
  Antisense strand to SEQ ID NO: 52322
auccaagcgaguuacaggu

SEQ ID NO: 52404 - RNA, 19 nt, Artificial Sequence
  Description of Artificial Sequence: Synthetic oligonucleotide
  Sense strand starting at position 3707 of SEQ ID NO: 631
cuguaacucgcuuggauua

SEQ ID NO: 52405 - RNA, 19 nt, Artificial Sequence
  Description of Artificial Sequence: Synthetic oligonucleotide
  Antisense strand to SEQ ID NO: 52324
uaauccaagcgaguuacag

SEQ ID NO: 52406 - RNA, 19 nt, Artificial Sequence
  Description of Artificial Sequence: Synthetic oligonucleotide
  Sense strand starting at position 3725 of SEQ ID NO: 631
acugauucucccugugaua

SEQ ID NO: 52407 - RNA, 19 nt, Artificial Sequence
  Description of Artificial Sequence: Synthetic oligonucleotide
  Antisense strand to SEQ ID NO: 52326
uaucacagggagaaucagu

SEQ ID NO: 52408 - RNA, 19 nt, Artificial Sequence
  Description of Artificial Sequence: Synthetic oligonucleotide
  Sense strand starting at position 3775 of SEQ ID NO: 631
agggaucuuugugaaagag

SEQ ID NO: 52409 - RNA, 19 nt, Artificial Sequence
  Description of Artificial Sequence: Synthetic oligonucleotide
  Antisense strand to SEQ ID NO: 52328
cucuuucacaaagaucccu

SEQ ID NO: 52410 - RNA, 19 nt, Artificial Sequence
  Description of Artificial Sequence: Synthetic oligonucleotide
  Sense strand starting at position 3842 of SEQ ID NO: 631
gagguaagauaccagauga

SEQ ID NO: 52411 - RNA, 19 nt, Artificial Sequence
  Description of Artificial Sequence: Synthetic oligonucleotide
  Antisense strand to SEQ ID NO: 52330
ucaucugguaucuuaccuc

SEQ ID NO: 52412 - RNA, 19 nt, Artificial Sequence
  Description of Artificial Sequence: Synthetic oligonucleotide
  Sense strand starting at position 3952 of SEQ ID NO: 631
cuacauaaagcguauauaa

SEQ ID NO: 52413 - RNA, 19 nt, Artificial Sequence
  Description of Artificial Sequence: Synthetic oligonucleotide
  Antisense strand to SEQ ID NO: 52332
uuauauacgcuuuauguag

SEQ ID NO: 52414 - RNA, 19 nt, Artificial Sequence
  Description of Artificial Sequence: Synthetic oligonucleotide
  Sense strand starting at position 3963 of SEQ ID NO: 631
guauauaaaucucugugua

SEQ ID NO: 52415 - RNA, 19 nt, Artificial Sequence
  Description of Artificial Sequence: Synthetic oligonucleotide
  Antisense strand to SEQ ID NO: 52334
uacacagagauuuauauac

SEQ ID NO: 52416 - RNA, 19 nt, Artificial Sequence
  Description of Artificial Sequence: Synthetic oligonucleotide
  Sense strand starting at position 3983 of SEQ ID NO: 631
ccacaucccgcuuaagaaa

SEQ ID NO: 52417 - RNA, 19 nt, Artificial Sequence
  Description of Artificial Sequence: Synthetic oligonucleotide
  Antisense strand to SEQ ID NO: 52336
uuucuuaagcgggaugugg

SEQ ID NO: 52418 - RNA, 19 nt, Artificial Sequence
  Description of Artificial Sequence: Synthetic oligonucleotide
  Sense strand starting at position 99 of SEQ ID NO: 633
cuguuaaagcuagaccuuu

SEQ ID NO: 52419 - RNA, 19 nt, Artificial Sequence
  Description of Artificial Sequence: Synthetic oligonucleotide
  Antisense strand to SEQ ID NO: 52338
aaaggucuagcuuuaacag

SEQ ID NO: 52420 - RNA, 19 nt, Artificial Sequence
  Description of Artificial Sequence: Synthetic oligonucleotide
  Sense strand starting at position 252 of SEQ ID NO: 633
cagagugggccauaucacu

SEQ ID NO: 52421 - RNA, 19 nt, Artificial Sequence
  Description of Artificial Sequence: Synthetic oligonucleotide
  Antisense strand to SEQ ID NO: 52340
agugauauggcccacucug

SEQ ID NO: 52422 - RNA, 19 nt, Artificial Sequence
  Description of Artificial Sequence: Synthetic oligonucleotide
  Sense strand starting at position 650 of SEQ ID NO: 633
uguggccuucuccaaagau

SEQ ID NO: 52423 - RNA, 19 nt, Artificial Sequence
  Description of Artificial Sequence: Synthetic oligonucleotide
  Antisense strand to SEQ ID NO: 52342
aucuuuggagaaggccaca

SEQ ID NO: 52424 - RNA, 19 nt, Artificial Sequence
  Description of Artificial Sequence: Synthetic oligonucleotide
  Sense strand starting at position 676 of SEQ ID NO: 633
ugaguaauggcacagccuu

SEQ ID NO: 52425 - RNA, 19 nt, Artificial Sequence
  Description of Artificial Sequence: Synthetic oligonucleotide
  Antisense strand to SEQ ID NO: 52344
aaggcugugccauuacuca

SEQ ID NO: 52426 - RNA, 19 nt, Artificial Sequence
  Description of Artificial Sequence: Synthetic oligonucleotide
  Sense strand starting at position 718 of SEQ ID NO: 633
augguagcaagcugauaaa

SEQ ID NO: 52427 - RNA, 19 nt, Artificial Sequence
  Description of Artificial Sequence: Synthetic oligonucleotide
  Antisense strand to SEQ ID NO: 52346
uuuaucagcuugcuaccau

SEQ ID NO: 52428 - RNA, 19 nt, Artificial Sequence
  Description of Artificial Sequence: Synthetic oligonucleotide
  Sense strand starting at position 782 of SEQ ID NO: 633
acaguaggcucacuaguau

SEQ ID NO: 52429 - RNA, 19 nt, Artificial Sequence
  Description of Artificial Sequence: Synthetic oligonucleotide
  Antisense strand to SEQ ID NO: 52348
auacuagugagccuacugu

SEQ ID NO: 52430 - RNA, 19 nt, Artificial Sequence
  Description of Artificial Sequence: Synthetic oligonucleotide
  Sense strand starting at position 854 of SEQ ID NO: 633
cucucacuacuguagucaa

SEQ ID NO: 52431 - RNA, 19 nt, Artificial Sequence
  Description of Artificial Sequence: Synthetic oligonucleotide
  Antisense strand to SEQ ID NO: 52350
uugacuacaguagugagag

SEQ ID NO: 52432 - RNA, 19 nt, Artificial Sequence
  Description of Artificial Sequence: Synthetic oligonucleotide
  Sense strand starting at position 857 of SEQ ID NO: 633
ucacuacuguagucaaucu

SEQ ID NO: 52433 - RNA, 19 nt, Artificial Sequence
  Description of Artificial Sequence: Synthetic oligonucleotide
  Antisense strand to SEQ ID NO: 52352
agauugacuacaguaguga

SEQ ID NO: 52434 - RNA, 19 nt, Artificial Sequence
  Description of Artificial Sequence: Synthetic oligonucleotide
  Sense strand starting at position 927 of SEQ ID NO: 633
auaugaagucaacguauga

SEQ ID NO: 52435 - RNA, 19 nt, Artificial Sequence
  Description of Artificial Sequence: Synthetic oligonucleotide
  Antisense strand to SEQ ID NO: 52354
ucauacguugacuucauau

SEQ ID NO: 52436 - RNA, 19 nt, Artificial Sequence
  Description of Artificial Sequence: Synthetic oligonucleotide
  Sense strand starting at position 931 of SEQ ID NO: 633
gaagucaacguaugacucu

SEQ ID NO: 52437 - RNA, 19 nt, Artificial Sequence
  Description of Artificial Sequence: Synthetic oligonucleotide
  Antisense strand to SEQ ID NO: 52356
agagucauacguugacuuc

SEQ ID NO: 52438 - RNA, 19 nt, Artificial Sequence
  Description of Artificial Sequence: Synthetic oligonucleotide
  Sense strand starting at position 955 of SEQ ID NO: 633
guggaauuauauuccuuuc

SEQ ID NO: 52439 - RNA, 19 nt, Artificial Sequence
  Description of Artificial Sequence: Synthetic oligonucleotide
  Antisense strand to SEQ ID NO: 52358
gaaaggaauauaauuccac

SEQ ID NO: 52440 - RNA, 19 nt, Artificial Sequence
  Description of Artificial Sequence: Synthetic oligonucleotide
  Sense strand starting at position 975 of SEQ ID NO: 633
cuuggaaauuacgcauaga

SEQ ID NO: 52441 - RNA, 19 nt, Artificial Sequence
  Description of Artificial Sequence: Synthetic oligonucleotide
  Antisense strand to SEQ ID NO: 52360
ucuaugcguaauuuccaag

SEQ ID NO: 52442 - RNA, 19 nt, Artificial Sequence
  Description of Artificial Sequence: Synthetic oligonucleotide
  Sense strand starting at position 976 of SEQ ID NO: 633
uuggaaauuacgcauagau

SEQ ID NO: 52443 - RNA, 19 nt, Artificial Sequence
  Description of Artificial Sequence: Synthetic oligonucleotide
  Antisense strand to SEQ ID NO: 52362
aucuaugcguaauuuccaa

SEQ ID NO: 52444 - RNA, 19 nt, Artificial Sequence
  Description of Artificial Sequence: Synthetic oligonucleotide
  Sense strand starting at position 1079 of SEQ ID NO: 633
ggcguuaguguuuccauca

SEQ ID NO: 52445 - RNA, 19 nt, Artificial Sequence
  Description of Artificial Sequence: Synthetic oligonucleotide
  Antisense strand to SEQ ID NO: 52364
ugauggaaacacuaacgcc

SEQ ID NO: 52446 - RNA, 19 nt, Artificial Sequence
  Description of Artificial Sequence: Synthetic oligonucleotide
  Sense strand starting at position 1084 of SEQ ID NO: 633
uaguguuuccaucacggaa

SEQ ID NO: 52447 - RNA, 19 nt, Artificial Sequence
  Description of Artificial Sequence: Synthetic oligonucleotide
  Antisense strand to SEQ ID NO: 52366
uuccgugauggaaacacua

SEQ ID NO: 52448 - RNA, 19 nt, Artificial Sequence
  Description of Artificial Sequence: Synthetic oligonucleotide
  Sense strand starting at position 1140 of SEQ ID NO: 633
ggaagagagaagugucuuu

SEQ ID NO: 52449 - RNA, 19 nt, Artificial Sequence
  Description of Artificial Sequence: Synthetic oligonucleotide
  Antisense strand to SEQ ID NO: 52368
aaagacacuucucucuucc

SEQ ID NO: 52450 - RNA, 19 nt, Artificial Sequence
  Description of Artificial Sequence: Synthetic oligonucleotide
  Sense strand starting at position 1145 of SEQ ID NO: 633
agagaagugucuuucucac

SEQ ID NO: 52451 - RNA, 19 nt, Artificial Sequence
  Description of Artificial Sequence: Synthetic oligonucleotide
  Antisense strand to SEQ ID NO: 52370
gugagaaagacacuucucu

SEQ ID NO: 52452 - RNA, 19 nt, Artificial Sequence
  Description of Artificial Sequence: Synthetic oligonucleotide
  Sense strand starting at position 1147 of SEQ ID NO: 633
agaagugucuuucucacga

SEQ ID NO: 52453 - RNA, 19 nt, Artificial Sequence
  Description of Artificial Sequence: Synthetic oligonucleotide
  Antisense strand to SEQ ID NO: 52372
ucgugagaaagacacuucu

SEQ ID NO: 52454 - RNA, 19 nt, Artificial Sequence
  Description of Artificial Sequence: Synthetic oligonucleotide
  Sense strand starting at position 1194 of SEQ ID NO: 633
uaccaugauucuguuugga

SEQ ID NO: 52455 - RNA, 19 nt, Artificial Sequence
  Description of Artificial Sequence: Synthetic oligonucleotide
  Antisense strand to SEQ ID NO: 52374
uccaaacagaaucauggua

SEQ ID NO: 52456 - RNA, 19 nt, Artificial Sequence
  Description of Artificial Sequence: Synthetic oligonucleotide
  Sense strand starting at position 1594 of SEQ ID NO: 633
uacaguacugagugacaaa

SEQ ID NO: 52457 - RNA, 19 nt, Artificial Sequence
  Description of Artificial Sequence: Synthetic oligonucleotide
  Antisense strand to SEQ ID NO: 52376
uuugucacucaguacugua

SEQ ID NO: 52458 - RNA, 19 nt, Artificial Sequence
  Description of Artificial Sequence: Synthetic oligonucleotide
  Sense strand starting at position 1636 of SEQ ID NO: 633
gcagcaugucguguugaag

SEQ ID NO: 52459 - RNA, 19 nt, Artificial Sequence
  Description of Artificial Sequence: Synthetic oligonucleotide
  Antisense strand to SEQ ID NO: 52378
cuucaacacgacaugcugc

SEQ ID NO: 52460 - RNA, 19 nt, Artificial Sequence
  Description of Artificial Sequence: Synthetic oligonucleotide
  Sense strand starting at position 2040 of SEQ ID NO: 633
agggcaaugacguaacgau

SEQ ID NO: 52461 - RNA, 19 nt, Artificial Sequence
  Description of Artificial Sequence: Synthetic oligonucleotide
  Antisense strand to SEQ ID NO: 52380
aucguuacgucauugcccu

SEQ ID NO: 52462 - RNA, 19 nt, Artificial Sequence
  Description of Artificial Sequence: Synthetic oligonucleotide
  Sense strand starting at position 2074 of SEQ ID NO: 633
gucuaaaggugggcucuau

SEQ ID NO: 52463 - RNA, 19 nt, Artificial Sequence
  Description of Artificial Sequence: Synthetic oligonucleotide
  Antisense strand to SEQ ID NO: 52382
auagagcccaccuuuagac

SEQ ID NO: 52464 - RNA, 19 nt, Artificial Sequence
  Description of Artificial Sequence: Synthetic oligonucleotide
  Sense strand starting at position 2297 of SEQ ID NO: 633
uuuauucucagguggagag

SEQ ID NO: 52465 - RNA, 19 nt, Artificial Sequence
  Description of Artificial Sequence: Synthetic oligonucleotide
  Antisense strand to SEQ ID NO: 52384
cucuccaccugagaauaaa

SEQ ID NO: 52466 - RNA, 19 nt, Artificial Sequence
  Description of Artificial Sequence: Synthetic oligonucleotide
  Sense strand starting at position 2724 of SEQ ID NO: 633
ucacuuggccuguggaaga

SEQ ID NO: 52467 - RNA, 19 nt, Artificial Sequence
  Description of Artificial Sequence: Synthetic oligonucleotide
  Antisense strand to SEQ ID NO: 52386
ucuuccacaggccaaguga

SEQ ID NO: 52468 - RNA, 19 nt, Artificial Sequence
  Description of Artificial Sequence: Synthetic oligonucleotide
  Sense strand starting at position 2850 of SEQ ID NO: 633
ggacuacgcuccuugaaac

SEQ ID NO: 52469 - RNA, 19 nt, Artificial Sequence
  Description of Artificial Sequence: Synthetic oligonucleotide
  Antisense strand to SEQ ID NO: 52388
guuucaaggagcguagucc

SEQ ID NO: 52470 - RNA, 19 nt, Artificial Sequence
  Description of Artificial Sequence: Synthetic oligonucleotide
  Sense strand starting at position 2892 of SEQ ID NO: 633
guaaacauuugguaaauac

SEQ ID NO: 52471 - RNA, 19 nt, Artificial Sequence
  Description of Artificial Sequence: Synthetic oligonucleotide
  Antisense strand to SEQ ID NO: 52390
guauuuaccaaauguuuac

SEQ ID NO: 52472 - RNA, 19 nt, Artificial Sequence
  Description of Artificial Sequence: Synthetic oligonucleotide
  Sense strand starting at position 2902 of SEQ ID NO: 633
gguaaauacgguuaauacu

SEQ ID NO: 52473 - RNA, 19 nt, Artificial Sequence
  Description of Artificial Sequence: Synthetic oligonucleotide
  Antisense strand to SEQ ID NO: 52392
aguauuaaccguauuuacc

SEQ ID NO: 52474 - RNA, 19 nt, Artificial Sequence
  Description of Artificial Sequence: Synthetic oligonucleotide
  Sense strand starting at position 2911 of SEQ ID NO: 633
gguuaauacuaguuaaccu

SEQ ID NO: 52475 - RNA, 19 nt, Artificial Sequence
  Description of Artificial Sequence: Synthetic oligonucleotide
  Antisense strand to SEQ ID NO: 52394
agguuaacuaguauuaacc

SEQ ID NO: 52476 - RNA, 19 nt, Artificial Sequence
  Description of Artificial Sequence: Synthetic oligonucleotide
  Sense strand starting at position 3245 of SEQ ID NO: 633
caugaugucaggcgauaga

SEQ ID NO: 52477 - RNA, 19 nt, Artificial Sequence
  Description of Artificial Sequence: Synthetic oligonucleotide
  Antisense strand to SEQ ID NO: 52396
ucuaucgccugacaucaug

SEQ ID NO: 52478 - RNA, 19 nt, Artificial Sequence
  Description of Artificial Sequence: Synthetic oligonucleotide
  Sense strand starting at position 3491 of SEQ ID NO: 633
gcagauaagaagugcucuu

SEQ ID NO: 52479 - RNA, 19 nt, Artificial Sequence
  Description of Artificial Sequence: Synthetic oligonucleotide
  Antisense strand to SEQ ID NO: 52398
aagagcacuucuuaucugc

SEQ ID NO: 52480 - RNA, 19 nt, Artificial Sequence
  Description of Artificial Sequence: Synthetic oligonucleotide
  Sense strand starting at position 3498 of SEQ ID NO: 633
agaagugcucuuuauggag

SEQ ID NO: 52481 - RNA, 19 nt, Artificial Sequence
  Description of Artificial Sequence: Synthetic oligonucleotide
  Antisense strand to SEQ ID NO: 52400
cuccauaaagagcacuucu

SEQ ID NO: 52482 - RNA, 19 nt, Artificial Sequence
  Description of Artificial Sequence: Synthetic oligonucleotide
  Sense strand starting at position 3502 of SEQ ID NO: 633
gugcucuuuauggagauaa

SEQ ID NO: 52483 - RNA, 19 nt, Artificial Sequence
  Description of Artificial Sequence: Synthetic oligonucleotide
  Antisense strand to SEQ ID NO: 52402
uuaucuccauaaagagcac

SEQ ID NO: 52484 - RNA, 19 nt, Artificial Sequence
  Description of Artificial Sequence: Synthetic oligonucleotide
  Sense strand starting at position 3517 of SEQ ID NO: 633
auaauuuggugguaaugaa

SEQ ID NO: 52485 - RNA, 19 nt, Artificial Sequence
  Description of Artificial Sequence: Synthetic oligonucleotide
  Antisense strand to SEQ ID NO: 52404
uucauuaccaccaaauuau

SEQ ID NO: 52486 - RNA, 19 nt, Artificial Sequence
  Description of Artificial Sequence: Synthetic oligonucleotide
  Sense strand starting at position 3600 of SEQ ID NO: 633
aaacguuaggugggagaua

SEQ ID NO: 52487 - RNA, 19 nt, Artificial Sequence
  Description of Artificial Sequence: Synthetic oligonucleotide
  Antisense strand to SEQ ID NO: 52406
uaucucccaccuaacguuu

SEQ ID NO: 52488 - RNA, 19 nt, Artificial Sequence
  Description of Artificial Sequence: Synthetic oligonucleotide
  Sense strand starting at position 3611 of SEQ ID NO: 633
gggagauaauuaggauuua

SEQ ID NO: 52489 - RNA, 19 nt, Artificial Sequence
  Description of Artificial Sequence: Synthetic oligonucleotide
  Antisense strand to SEQ ID NO: 52408
uaaauccuaauuaucuccc

SEQ ID NO: 52490 - RNA, 19 nt, Artificial Sequence
  Description of Artificial Sequence: Synthetic oligonucleotide
  Sense strand starting at position 3731 of SEQ ID NO: 633
agaagacugugugccucaa

SEQ ID NO: 52491 - RNA, 19 nt, Artificial Sequence
  Description of Artificial Sequence: Synthetic oligonucleotide
  Antisense strand to SEQ ID NO: 52410
uugaggcacacagucuucu

SEQ ID NO: 52492 - RNA, 19 nt, Artificial Sequence
  Description of Artificial Sequence: Synthetic oligonucleotide
  Sense strand starting at position 3741 of SEQ ID NO: 633
gugccucaaggugauuauu

SEQ ID NO: 52493 - RNA, 19 nt, Artificial Sequence
  Description of Artificial Sequence: Synthetic oligonucleotide
  Antisense strand to SEQ ID NO: 52412
aauaaucaccuugaggcac

SEQ ID NO: 52494 - RNA, 19 nt, Artificial Sequence
  Description of Artificial Sequence: Synthetic oligonucleotide
  Sense strand starting at position 3750 of SEQ ID NO: 633
ggugauuauuuauagaaac

SEQ ID NO: 52495 - RNA, 19 nt, Artificial Sequence
  Description of Artificial Sequence: Synthetic oligonucleotide
  Antisense strand to SEQ ID NO: 52414
guuucuauaaauaaucacc

SEQ ID NO: 52496 - RNA, 19 nt, Artificial Sequence
  Description of Artificial Sequence: Synthetic oligonucleotide
  Sense strand starting at position 3786 of SEQ ID NO: 633
gagucaauuugggaaugga

SEQ ID NO: 52497 - RNA, 19 nt, Artificial Sequence
  Description of Artificial Sequence: Synthetic oligonucleotide
  Antisense strand to SEQ ID NO: 52416
uccauucccaaauugacuc

SEQ ID NO: 52498 - RNA, 19 nt, Artificial Sequence
  Description of Artificial Sequence: Synthetic oligonucleotide
  Sense strand starting at position 151 of SEQ ID NO: 634
gggaauugauaccacauca

SEQ ID NO: 52499 - RNA, 19 nt, Artificial Sequence
  Description of Artificial Sequence: Synthetic oligonucleotide
  Antisense strand to SEQ ID NO: 52418
ugaugugguaucaauuccc

SEQ ID NO: 52500 - RNA, 19 nt, Artificial Sequence
  Description of Artificial Sequence: Synthetic oligonucleotide
  Sense strand starting at position 158 of SEQ ID NO: 634
gauaccacaucagggauuu

SEQ ID NO: 52501 - RNA, 19 nt, Artificial Sequence
  Description of Artificial Sequence: Synthetic oligonucleotide
  Antisense strand to SEQ ID NO: 52420
aaaucccugaugugguauc

SEQ ID NO: 52502 - RNA, 19 nt, Artificial Sequence
  Description of Artificial Sequence: Synthetic oligonucleotide
  Sense strand starting at position 281 of SEQ ID NO: 634
cgaagaaccuccuuuagcu

SEQ ID NO: 52503 - RNA, 19 nt, Artificial Sequence
  Description of Artificial Sequence: Synthetic oligonucleotide
  Antisense strand to SEQ ID NO: 52422
agcuaaaggagguucuucg

SEQ ID NO: 52504 - RNA, 19 nt, Artificial Sequence
  Description of Artificial Sequence: Synthetic oligonucleotide
  Sense strand starting at position 487 of SEQ ID NO: 634
auuaaagacugagaaacaa

SEQ ID NO: 52505 - RNA, 19 nt, Artificial Sequence
  Description of Artificial Sequence: Synthetic oligonucleotide
  Antisense strand to SEQ ID NO: 52424
uuguuucucagucuuuaau

SEQ ID NO: 52506 - RNA, 19 nt, Artificial Sequence
  Description of Artificial Sequence: Synthetic oligonucleotide
  Sense strand starting at position 588 of SEQ ID NO: 634
cuguuaaagcuagaccuuu

SEQ ID NO: 52507 - RNA, 19 nt, Artificial Sequence
  Description of Artificial Sequence: Synthetic oligonucleotide
  Antisense strand to SEQ ID NO: 52426
aaaggucuagcuuuaacag

SEQ ID NO: 52508 - RNA, 19 nt, Artificial Sequence
  Description of Artificial Sequence: Synthetic oligonucleotide
  Sense strand starting at position 628 of SEQ ID NO: 634
gaugacuauugugagagaa

SEQ ID NO: 52509 - RNA, 19 nt, Artificial Sequence
  Description of Artificial Sequence: Synthetic oligonucleotide
  Antisense strand to SEQ ID NO: 52428
uucucucacaauagucauc

SEQ ID NO: 52510 - RNA, 19 nt, Artificial Sequence
  Description of Artificial Sequence: Synthetic oligonucleotide
  Sense strand starting at position 741 of SEQ ID NO: 634
cagagugggccauaucacu

SEQ ID NO: 52511 - RNA, 19 nt, Artificial Sequence
  Description of Artificial Sequence: Synthetic oligonucleotide
  Antisense strand to SEQ ID NO: 52430
agugauauggcccacucug

SEQ ID NO: 52512 - RNA, 19 nt, Artificial Sequence
  Description of Artificial Sequence: Synthetic oligonucleotide
  Sense strand starting at position 1139 of SEQ ID NO: 634
uguggccuucuccaaagau

SEQ ID NO: 52513 - RNA, 19 nt, Artificial Sequence
  Description of Artificial Sequence: Synthetic oligonucleotide
  Antisense strand to SEQ ID NO: 52432
aucuuuggagaaggccaca

SEQ ID NO: 52514 - RNA, 19 nt, Artificial Sequence
  Description of Artificial Sequence: Synthetic oligonucleotide
  Sense strand starting at position 1165 of SEQ ID NO: 634
ugaguaauggcacagccuu

SEQ ID NO: 52515 - RNA, 19 nt, Artificial Sequence
  Description of Artificial Sequence: Synthetic oligonucleotide
  Antisense strand to SEQ ID NO: 52434
aaggcugugccauuacuca

SEQ ID NO: 52516 - RNA, 19 nt, Artificial Sequence
  Description of Artificial Sequence: Synthetic oligonucleotide
  Sense strand starting at position 1207 of SEQ ID NO: 634
augguagcaagcugauaaa

SEQ ID NO: 52517 - RNA, 19 nt, Artificial Sequence
  Description of Artificial Sequence: Synthetic oligonucleotide
  Antisense strand to SEQ ID NO: 52436
uuuaucagcuugcuaccau

SEQ ID NO: 52518 - RNA, 19 nt, Artificial Sequence
  Description of Artificial Sequence: Synthetic oligonucleotide
  Sense strand starting at position 1271 of SEQ ID NO: 634
acaguaggcucacuaguau

SEQ ID NO: 52519 - RNA, 19 nt, Artificial Sequence
  Description of Artificial Sequence: Synthetic oligonucleotide
  Antisense strand to SEQ ID NO: 52438
auacuagugagccuacugu

SEQ ID NO: 52520 - RNA, 19 nt, Artificial Sequence
  Description of Artificial Sequence: Synthetic oligonucleotide
  Sense strand starting at position 1343 of SEQ ID NO: 634
cucucacuacuguagucaa

SEQ ID NO: 52521 - RNA, 19 nt, Artificial Sequence
  Description of Artificial Sequence: Synthetic oligonucleotide
  Antisense strand to SEQ ID NO: 52440
uugacuacaguagugagag

SEQ ID NO: 52522 - RNA, 19 nt, Artificial Sequence
  Description of Artificial Sequence: Synthetic oligonucleotide
  Sense strand starting at position 1346 of SEQ ID NO: 634
ucacuacuguagucaaucu

SEQ ID NO: 52523 - RNA, 19 nt, Artificial Sequence
  Description of Artificial Sequence: Synthetic oligonucleotide
  Antisense strand to SEQ ID NO: 52442
agauugacuacaguaguga

SEQ ID NO: 52524 - RNA, 19 nt, Artificial Sequence
  Description of Artificial Sequence: Synthetic oligonucleotide
  Sense strand starting at position 1416 of SEQ ID NO: 634
auaugaagucaacguauga

SEQ ID NO: 52525 - RNA, 19 nt, Artificial Sequence
  Description of Artificial Sequence: Synthetic oligonucleotide
  Antisense strand to SEQ ID NO: 52444
ucauacguugacuucauau

SEQ ID NO: 52526 - RNA, 19 nt, Artificial Sequence
  Description of Artificial Sequence: Synthetic oligonucleotide
  Sense strand starting at position 1420 of SEQ ID NO: 634
gaagucaacguaugacucu

SEQ ID NO: 52527 - RNA, 19 nt, Artificial Sequence
  Description of Artificial Sequence: Synthetic oligonucleotide
  Antisense strand to SEQ ID NO: 52446
agagucauacguugacuuc

SEQ ID NO: 52528 - RNA, 19 nt, Artificial Sequence
  Description of Artificial Sequence: Synthetic oligonucleotide
  Sense strand starting at position 1444 of SEQ ID NO: 634
guggaauuauauuccuuuc

SEQ ID NO: 52529 - RNA, 19 nt, Artificial Sequence
  Description of Artificial Sequence: Synthetic oligonucleotide
  Antisense strand to SEQ ID NO: 52448
gaaaggaauauaauuccac

SEQ ID NO: 52530 - RNA, 19 nt, Artificial Sequence
  Description of Artificial Sequence: Synthetic oligonucleotide
  Sense strand starting at position 1464 of SEQ ID NO: 634
cuuggaaauuacgcauaga

SEQ ID NO: 52531 - RNA, 19 nt, Artificial Sequence
  Description of Artificial Sequence: Synthetic oligonucleotide
  Antisense strand to SEQ ID NO: 52450
ucuaugcguaauuuccaag

SEQ ID NO: 52532 - RNA, 19 nt, Artificial Sequence
  Description of Artificial Sequence: Synthetic oligonucleotide
  Sense strand starting at position 1465 of SEQ ID NO: 634
uuggaaauuacgcauagau

SEQ ID NO: 52533 - RNA, 19 nt, Artificial Sequence
  Description of Artificial Sequence: Synthetic oligonucleotide
  Antisense strand to SEQ ID NO: 52452
aucuaugcguaauuuccaa

SEQ ID NO: 52534 - RNA, 19 nt, Artificial Sequence
  Description of Artificial Sequence: Synthetic oligonucleotide
  Sense strand starting at position 1568 of SEQ ID NO: 634
ggcguuaguguuuccauca

SEQ ID NO: 52535 - RNA, 19 nt, Artificial Sequence
  Description of Artificial Sequence: Synthetic oligonucleotide
  Antisense strand to SEQ ID NO: 52454
ugauggaaacacuaacgcc

SEQ ID NO: 52536 - RNA, 19 nt, Artificial Sequence
  Description of Artificial Sequence: Synthetic oligonucleotide
  Sense strand starting at position 1573 of SEQ ID NO: 634
uaguguuuccaucacggaa

SEQ ID NO: 52537 - RNA, 19 nt, Artificial Sequence
  Description of Artificial Sequence: Synthetic oligonucleotide
  Antisense strand to SEQ ID NO: 52456
uuccgugauggaaacacua

SEQ ID NO: 52538 - RNA, 19 nt, Artificial Sequence
  Description of Artificial Sequence: Synthetic oligonucleotide
  Sense strand starting at position 1629 of SEQ ID NO: 634
ggaagagagaagugucuuu

SEQ ID NO: 52539 - RNA, 19 nt, Artificial Sequence
  Description of Artificial Sequence: Synthetic oligonucleotide
  Antisense strand to SEQ ID NO: 52458
aaagacacuucucucuucc

SEQ ID NO: 52540 - RNA, 19 nt, Artificial Sequence
  Description of Artificial Sequence: Synthetic oligonucleotide
  Sense strand starting at position 1634 of SEQ ID NO: 634
agagaagugucuuucucac

SEQ ID NO: 52541 - RNA, 19 nt, Artificial Sequence
  Description of Artificial Sequence: Synthetic oligonucleotide
  Antisense strand to SEQ ID NO: 52460
gugagaaagacacuucucu

SEQ ID NO: 52542 - RNA, 19 nt, Artificial Sequence
  Description of Artificial Sequence: Synthetic oligonucleotide
  Sense strand starting at position 1636 of SEQ ID NO: 634
agaagugucuuucucacga

SEQ ID NO: 52543 - RNA, 19 nt, Artificial Sequence
  Description of Artificial Sequence: Synthetic oligonucleotide
  Antisense strand to SEQ ID NO: 52462
ucgugagaaagacacuucu

SEQ ID NO: 52544 - RNA, 19 nt, Artificial Sequence
  Description of Artificial Sequence: Synthetic oligonucleotide
  Sense strand starting at position 1683 of SEQ ID NO: 634
uaccaugauucuguuugga

SEQ ID NO: 52545 - RNA, 19 nt, Artificial Sequence
  Description of Artificial Sequence: Synthetic oligonucleotide
  Antisense strand to SEQ ID NO: 52464
uccaaacagaaucauggua

SEQ ID NO: 52546 - RNA, 19 nt, Artificial Sequence
  Description of Artificial Sequence: Synthetic oligonucleotide
  Sense strand starting at position 2083 of SEQ ID NO: 634
uacaguacugagugacaaa

SEQ ID NO: 52547 - RNA, 19 nt, Artificial Sequence
  Description of Artificial Sequence: Synthetic oligonucleotide
  Antisense strand to SEQ ID NO: 52466
uuugucacucaguacugua

SEQ ID NO: 52548 - RNA, 19 nt, Artificial Sequence
  Description of Artificial Sequence: Synthetic oligonucleotide
  Sense strand starting at position 2125 of SEQ ID NO: 634
gcagcaugucguguugaag

SEQ ID NO: 52549 - RNA, 19 nt, Artificial Sequence
  Description of Artificial Sequence: Synthetic oligonucleotide
  Antisense strand to SEQ ID NO: 52468
cuucaacacgacaugcugc

SEQ ID NO: 52550 - RNA, 19 nt, Artificial Sequence
  Description of Artificial Sequence: Synthetic oligonucleotide
  Sense strand starting at position 2529 of SEQ ID NO: 634
agggcaaugacguaacgau

SEQ ID NO: 52551 - RNA, 19 nt, Artificial Sequence
  Description of Artificial Sequence: Synthetic oligonucleotide
  Antisense strand to SEQ ID NO: 52470
aucguuacgucauugcccu

SEQ ID NO: 52552 - RNA, 19 nt, Artificial Sequence
  Description of Artificial Sequence: Synthetic oligonucleotide
  Sense strand starting at position 2563 of SEQ ID NO: 634
gucuaaaggugggcucuau

SEQ ID NO: 52553 - RNA, 19 nt, Artificial Sequence
  Description of Artificial Sequence: Synthetic oligonucleotide
  Antisense strand to SEQ ID NO: 52472
auagagcccaccuuuagac

SEQ ID NO: 52554 - RNA, 19 nt, Artificial Sequence
  Description of Artificial Sequence: Synthetic oligonucleotide
  Sense strand starting at position 2786 of SEQ ID NO: 634
uuuauucucagguggagag

SEQ ID NO: 52555 - RNA, 19 nt, Artificial Sequence
  Description of Artificial Sequence: Synthetic oligonucleotide
  Antisense strand to SEQ ID NO: 52474
cucuccaccugagaauaaa

SEQ ID NO: 52556 - RNA, 19 nt, Artificial Sequence
  Description of Artificial Sequence: Synthetic oligonucleotide
  Sense strand starting at position 3197 of SEQ ID NO: 634
augguauuacgauguguca

SEQ ID NO: 52557 - RNA, 19 nt, Artificial Sequence
  Description of Artificial Sequence: Synthetic oligonucleotide
  Antisense strand to SEQ ID NO: 52476
ugacacaucguaauaccau

SEQ ID NO: 52558 - RNA, 19 nt, Artificial Sequence
  Description of Artificial Sequence: Synthetic oligonucleotide
  Sense strand starting at position 3211 of SEQ ID NO: 634
ugucacuuggccuguggaa

SEQ ID NO: 52559 - RNA, 19 nt, Artificial Sequence
  Description of Artificial Sequence: Synthetic oligonucleotide
  Antisense strand to SEQ ID NO: 52478
uuccacaggccaagugaca

SEQ ID NO: 52560 - RNA, 19 nt, Artificial Sequence
  Description of Artificial Sequence: Synthetic oligonucleotide
  Sense strand starting at position 3213 of SEQ ID NO: 634
ucacuuggccuguggaaga

SEQ ID NO: 52561 - RNA, 19 nt, Artificial Sequence
  Description of Artificial Sequence: Synthetic oligonucleotide
  Antisense strand to SEQ ID NO: 52480
ucuuccacaggccaaguga

SEQ ID NO: 52562 - RNA, 19 nt, Artificial Sequence
  Description of Artificial Sequence: Synthetic oligonucleotide
  Sense strand starting at position 3339 of SEQ ID NO: 634
ggacuacgcuccuugaaac

SEQ ID NO: 52563 - RNA, 19 nt, Artificial Sequence
  Description of Artificial Sequence: Synthetic oligonucleotide
  Antisense strand to SEQ ID NO: 52482
guuucaaggagcguagucc

SEQ ID NO: 52564 - RNA, 19 nt, Artificial Sequence
  Description of Artificial Sequence: Synthetic oligonucleotide
  Sense strand starting at position 3366 of SEQ ID NO: 634
caguguaaguaugugguaa

SEQ ID NO: 52565 - RNA, 19 nt, Artificial Sequence
  Description of Artificial Sequence: Synthetic oligonucleotide
  Antisense strand to SEQ ID NO: 52484
uuaccacauacuuacacug

SEQ ID NO: 52566 - RNA, 19 nt, Artificial Sequence
  Description of Artificial Sequence: Synthetic oligonucleotide
  Sense strand starting at position 3367 of SEQ ID NO: 634
aguguaaguaugugguaaa

SEQ ID NO: 52567 - RNA, 19 nt, Artificial Sequence
  Description of Artificial Sequence: Synthetic oligonucleotide
  Antisense strand to SEQ ID NO: 52486
uuuaccacauacuuacacu

SEQ ID NO: 52568 - RNA, 19 nt, Artificial Sequence
  Description of Artificial Sequence: Synthetic oligonucleotide
  Sense strand starting at position 3381 of SEQ ID NO: 634
guaaacauuugguaaauac

SEQ ID NO: 52569 - RNA, 19 nt, Artificial Sequence
  Description of Artificial Sequence: Synthetic oligonucleotide
  Antisense strand to SEQ ID NO: 52488
guauuuaccaaauguuuac

SEQ ID NO: 52570 - RNA, 19 nt, Artificial Sequence
  Description of Artificial Sequence: Synthetic oligonucleotide
  Sense strand starting at position 3391 of SEQ ID NO: 634
gguaaauacgguuaauacu

SEQ ID NO: 52571 - RNA, 19 nt, Artificial Sequence
  Description of Artificial Sequence: Synthetic oligonucleotide
  Antisense strand to SEQ ID NO: 52490
aguauuaaccguauuuacc

SEQ ID NO: 52572 - RNA, 19 nt, Artificial Sequence
  Description of Artificial Sequence: Synthetic oligonucleotide
  Sense strand starting at position 3400 of SEQ ID NO: 634
gguuaauacuaguuaaccu

SEQ ID NO: 52573 - RNA, 19 nt, Artificial Sequence
  Description of Artificial Sequence: Synthetic oligonucleotide
  Antisense strand to SEQ ID NO: 52492
agguuaacuaguauuaacc

SEQ ID NO: 52574 - RNA, 19 nt, Artificial Sequence
  Description of Artificial Sequence: Synthetic oligonucleotide
  Sense strand starting at position 3734 of SEQ ID NO: 634
caugaugucaggcgauaga

SEQ ID NO: 52575 - RNA, 19 nt, Artificial Sequence
  Description of Artificial Sequence: Synthetic oligonucleotide
  Antisense strand to SEQ ID NO: 52494
ucuaucgccugacaucaug

SEQ ID NO: 52576 - RNA, 19 nt, Artificial Sequence
  Description of Artificial Sequence: Synthetic oligonucleotide
  Sense strand starting at position 3980 of SEQ ID NO: 634
gcagauaagaagugcucuu

SEQ ID NO: 52577 - RNA, 19 nt, Artificial Sequence
  Description of Artificial Sequence: Synthetic oligonucleotide
  Antisense strand to SEQ ID NO: 52496
aagagcacuucuuaucugc

SEQ ID NO: 52578 - RNA, 19 nt, Artificial Sequence
  Description of Artificial Sequence: Synthetic oligonucleotide
  Sense strand starting at position 3778 of SEQ ID NO: 636
ugauuuggccucugcaaac

SEQ ID NO: 52579 - RNA, 19 nt, Artificial Sequence
  Description of Artificial Sequence: Synthetic oligonucleotide
  Antisense strand to SEQ ID NO: 52498
guuugcagaggccaaauca

SEQ ID NO: 52580 - RNA, 19 nt, Artificial Sequence
  Description of Artificial Sequence: Synthetic oligonucleotide
  Sense strand starting at position 3757 of SEQ ID NO: 636
gagugcaggcugugaaauu

SEQ ID NO: 52581 - RNA, 19 nt, Artificial Sequence
  Description of Artificial Sequence: Synthetic oligonucleotide
  Antisense strand to SEQ ID NO: 52500
aauuucacagccugcacuc

SEQ ID NO: 52582 - RNA, 19 nt, Artificial Sequence
  Description of Artificial Sequence: Synthetic oligonucleotide
  Sense strand starting at position 3755 of SEQ ID NO: 636
gagagugcaggcugugaaa

SEQ ID NO: 52583 - RNA, 19 nt, Artificial Sequence
  Description of Artificial Sequence: Synthetic oligonucleotide
  Antisense strand to SEQ ID NO: 52502
uuucacagccugcacucuc

SEQ ID NO: 52584 - RNA, 19 nt, Artificial Sequence
  Description of Artificial Sequence: Synthetic oligonucleotide
  Sense strand starting at position 3665 of SEQ ID NO: 636
guuaaaugggaguauguga

SEQ ID NO: 52585 - RNA, 19 nt, Artificial Sequence
  Description of Artificial Sequence: Synthetic oligonucleotide
  Antisense strand to SEQ ID NO: 52504
ucacauacucccauuuaac

SEQ ID NO: 52586 - RNA, 19 nt, Artificial Sequence
  Description of Artificial Sequence: Synthetic oligonucleotide
  Sense strand starting at position 3661 of SEQ ID NO: 636
gaugguuaaaugggaguau

SEQ ID NO: 52587 - RNA, 19 nt, Artificial Sequence
  Description of Artificial Sequence: Synthetic oligonucleotide
  Antisense strand to SEQ ID NO: 52506
auacucccauuuaaccauc

SEQ ID NO: 52588 - RNA, 19 nt, Artificial Sequence
  Description of Artificial Sequence: Synthetic oligonucleotide
  Sense strand starting at position 3652 of SEQ ID NO: 636
agcuguugugaugguuaaa

SEQ ID NO: 52589 - RNA, 19 nt, Artificial Sequence
  Description of Artificial Sequence: Synthetic oligonucleotide
  Antisense strand to SEQ ID NO: 52508
uuuaaccaucacaacagcu

SEQ ID NO: 52590 - RNA, 19 nt, Artificial Sequence
  Description of Artificial Sequence: Synthetic oligonucleotide
  Sense strand starting at position 3386 of SEQ ID NO: 636
agucucuaucccugugaau

SEQ ID NO: 52591 - RNA, 19 nt, Artificial Sequence
  Description of Artificial Sequence: Synthetic oligonucleotide
  Antisense strand to SEQ ID NO: 52510
auucacagggauagagacu

SEQ ID NO: 52592 - RNA, 19 nt, Artificial Sequence
  Description of Artificial Sequence: Synthetic oligonucleotide
  Sense strand starting at position 3334 of SEQ ID NO: 636
uagagaaguguuggauccu

SEQ ID NO: 52593 - RNA, 19 nt, Artificial Sequence
  Description of Artificial Sequence: Synthetic oligonucleotide
  Antisense strand to SEQ ID NO: 52512
aggauccaacacuucucua

SEQ ID NO: 52594 - RNA, 19 nt, Artificial Sequence
  Description of Artificial Sequence: Synthetic oligonucleotide
  Sense strand starting at position 3330 of SEQ ID NO: 636
ggacuagagaaguguugga

SEQ ID NO: 52595 - RNA, 19 nt, Artificial Sequence
  Description of Artificial Sequence: Synthetic oligonucleotide
  Antisense strand to SEQ ID NO: 52514
uccaacacuucucuagucc

SEQ ID NO: 52596 - RNA, 19 nt, Artificial Sequence
  Description of Artificial Sequence: Synthetic oligonucleotide
  Sense strand starting at position 3186 of SEQ ID NO: 636
ugaggacuucucugaauca

SEQ ID NO: 52597 - RNA, 19 nt, Artificial Sequence
  Description of Artificial Sequence: Synthetic oligonucleotide
  Antisense strand to SEQ ID NO: 52516
ugauucagagaaguccuca

SEQ ID NO: 52598 - RNA, 19 nt, Artificial Sequence
  Description of Artificial Sequence: Synthetic oligonucleotide
  Sense strand starting at position 3079 of SEQ ID NO: 636
ugcaauaagcauuagcauu

SEQ ID NO: 52599 - RNA, 19 nt, Artificial Sequence
  Description of Artificial Sequence: Synthetic oligonucleotide
  Antisense strand to SEQ ID NO: 52518
aaugcuaaugcuuauugca

SEQ ID NO: 52600 - RNA, 19 nt, Artificial Sequence
  Description of Artificial Sequence: Synthetic oligonucleotide
  Sense strand starting at position 3072 of SEQ ID NO: 636
guaagcaugcaauaagcau

SEQ ID NO: 52601 - RNA, 19 nt, Artificial Sequence
  Description of Artificial Sequence: Synthetic oligonucleotide
  Antisense strand to SEQ ID NO: 52520
augcuuauugcaugcuuac

SEQ ID NO: 52602 - RNA, 19 nt, Artificial Sequence
  Description of Artificial Sequence: Synthetic oligonucleotide
  Sense strand starting at position 3012 of SEQ ID NO: 636
uguggcaagaauugaauga

SEQ ID NO: 52603 - RNA, 19 nt, Artificial Sequence
  Description of Artificial Sequence: Synthetic oligonucleotide
  Antisense strand to SEQ ID NO: 52522
ucauucaauucuugccaca

SEQ ID NO: 52604 - RNA, 19 nt, Artificial Sequence
  Description of Artificial Sequence: Synthetic oligonucleotide
  Sense strand starting at position 2926 of SEQ ID NO: 636
aguuacuuugggugagcua

SEQ ID NO: 52605 - RNA, 19 nt, Artificial Sequence
  Description of Artificial Sequence: Synthetic oligonucleotide
  Antisense strand to SEQ ID NO: 52524
uagcucacccaaaguaacu

SEQ ID NO: 52606 - RNA, 19 nt, Artificial Sequence
  Description of Artificial Sequence: Synthetic oligonucleotide
  Sense strand starting at position 2911 of SEQ ID NO: 636
gccacuuccuaauugaguu

SEQ ID NO: 52607 - RNA, 19 nt, Artificial Sequence
  Description of Artificial Sequence: Synthetic oligonucleotide
  Antisense strand to SEQ ID NO: 52526
aacucaauuaggaaguggc

SEQ ID NO: 52608 - RNA, 19 nt, Artificial Sequence
  Description of Artificial Sequence: Synthetic oligonucleotide
  Sense strand starting at position 2880 of SEQ ID NO: 636
cuagacuuccuguguucca

SEQ ID NO: 52609 - RNA, 19 nt, Artificial Sequence
  Description of Artificial Sequence: Synthetic oligonucleotide
  Antisense strand to SEQ ID NO: 52528
uggaacacaggaagucuag

SEQ ID NO: 52610 - RNA, 19 nt, Artificial Sequence
  Description of Artificial Sequence: Synthetic oligonucleotide
  Sense strand starting at position 2738 of SEQ ID NO: 636
acagaaucauaggaucaua

SEQ ID NO: 52611 - RNA, 19 nt, Artificial Sequence
  Description of Artificial Sequence: Synthetic oligonucleotide
  Antisense strand to SEQ ID NO: 52530
uaugauccuaugauucugu

SEQ ID NO: 52612 - RNA, 19 nt, Artificial Sequence
  Description of Artificial Sequence: Synthetic oligonucleotide
  Sense strand starting at position 2725 of SEQ ID NO: 636
aaagcucuucgucacagaa

SEQ ID NO: 52613 - RNA, 19 nt, Artificial Sequence
  Description of Artificial Sequence: Synthetic oligonucleotide
  Antisense strand to SEQ ID NO: 52532
uucugugacgaagagcuuu

SEQ ID NO: 52614 - RNA, 19 nt, Artificial Sequence
  Description of Artificial Sequence: Synthetic oligonucleotide
  Sense strand starting at position 2647 of SEQ ID NO: 636
cuuacauaugcccauguca

SEQ ID NO: 52615 - RNA, 19 nt, Artificial Sequence
  Description of Artificial Sequence: Synthetic oligonucleotide
  Antisense strand to SEQ ID NO: 52534
ugacaugggcauauguaag

SEQ ID NO: 52616 - RNA, 19 nt, Artificial Sequence
  Description of Artificial Sequence: Synthetic oligonucleotide
  Sense strand starting at position 2540 of SEQ ID NO: 636
ccacucuucucagugacuu

SEQ ID NO: 52617 - RNA, 19 nt, Artificial Sequence
  Description of Artificial Sequence: Synthetic oligonucleotide
  Antisense strand to SEQ ID NO: 52536
aagucacugagaagagugg

SEQ ID NO: 52618 - RNA, 19 nt, Artificial Sequence
  Description of Artificial Sequence: Synthetic oligonucleotide
  Sense strand starting at position 2488 of SEQ ID NO: 636
cacaguaggcguuccguaa

SEQ ID NO: 52619 - RNA, 19 nt, Artificial Sequence
  Description of Artificial Sequence: Synthetic oligonucleotide
  Antisense strand to SEQ ID NO: 52538
uuacggaacgccuacugug

SEQ ID NO: 52620 - RNA, 19 nt, Artificial Sequence
  Description of Artificial Sequence: Synthetic oligonucleotide
  Sense strand starting at position 2471 of SEQ ID NO: 636
caagcauaggucugguaca

SEQ ID NO: 52621 - RNA, 19 nt, Artificial Sequence
  Description of Artificial Sequence: Synthetic oligonucleotide
  Antisense strand to SEQ ID NO: 52540
uguaccagaccuaugcuug

SEQ ID NO: 52622 - RNA, 19 nt, Artificial Sequence
  Description of Artificial Sequence: Synthetic oligonucleotide
  Sense strand starting at position 2452 of SEQ ID NO: 636
agcgauguaaguuaaaugu

SEQ ID NO: 52623 - RNA, 19 nt, Artificial Sequence
  Description of Artificial Sequence: Synthetic oligonucleotide
  Antisense strand to SEQ ID NO: 52542
acauuuaacuuacaucgcu

SEQ ID NO: 52624 - RNA, 19 nt, Artificial Sequence
  Description of Artificial Sequence: Synthetic oligonucleotide
  Sense strand starting at position 2445 of SEQ ID NO: 636
gagaauuagcgauguaagu

SEQ ID NO: 52625 - RNA, 19 nt, Artificial Sequence
  Description of Artificial Sequence: Synthetic oligonucleotide
  Antisense strand to SEQ ID NO: 52544
acuuacaucgcuaauucuc

SEQ ID NO: 52626 - RNA, 19 nt, Artificial Sequence
  Description of Artificial Sequence: Synthetic oligonucleotide
  Sense strand starting at position 2443 of SEQ ID NO: 636
cugagaauuagcgauguaa

SEQ ID NO: 52627 - RNA, 19 nt, Artificial Sequence
  Description of Artificial Sequence: Synthetic oligonucleotide
  Antisense strand to SEQ ID NO: 52546
uuacaucgcuaauucucag

SEQ ID NO: 52628 - RNA, 19 nt, Artificial Sequence
  Description of Artificial Sequence: Synthetic oligonucleotide
  Sense strand starting at position 2439 of SEQ ID NO: 636
uuuccugagaauuagcgau

SEQ ID NO: 52629 - RNA, 19 nt, Artificial Sequence
  Description of Artificial Sequence: Synthetic oligonucleotide
  Antisense strand to SEQ ID NO: 52548
aucgcuaauucucaggaaa

SEQ ID NO: 52630 - RNA, 19 nt, Artificial Sequence
  Description of Artificial Sequence: Synthetic oligonucleotide
  Sense strand starting at position 2392 of SEQ ID NO: 636
gucacuucucuggaucuga

SEQ ID NO: 52631 - RNA, 19 nt, Artificial Sequence
  Description of Artificial Sequence: Synthetic oligonucleotide
  Antisense strand to SEQ ID NO: 52550
ucagauccagagaagugac

SEQ ID NO: 52632 - RNA, 19 nt, Artificial Sequence
  Description of Artificial Sequence: Synthetic oligonucleotide
  Sense strand starting at position 2388 of SEQ ID NO: 636
acaagucacuucucuggau

SEQ ID NO: 52633 - RNA, 19 nt, Artificial Sequence
  Description of Artificial Sequence: Synthetic oligonucleotide
  Antisense strand to SEQ ID NO: 52552
auccagagaagugacuugu

SEQ ID NO: 52634 - RNA, 19 nt, Artificial Sequence
  Description of Artificial Sequence: Synthetic oligonucleotide
  Sense strand starting at position 2257 of SEQ ID NO: 636
agcaauuugacacguggua

SEQ ID NO: 52635 - RNA, 19 nt, Artificial Sequence
  Description of Artificial Sequence: Synthetic oligonucleotide
  Antisense strand to SEQ ID NO: 52554
uaccacgugucaaauugcu

SEQ ID NO: 52636 - RNA, 19 nt, Artificial Sequence
  Description of Artificial Sequence: Synthetic oligonucleotide
  Sense strand starting at position 2231 of SEQ ID NO: 636
ugugacgucauaugacaaa

SEQ ID NO: 52637 - RNA, 19 nt, Artificial Sequence
  Description of Artificial Sequence: Synthetic oligonucleotide
  Antisense strand to SEQ ID NO: 52556
uuugucauaugacgucaca

SEQ ID NO: 52638 - RNA, 19 nt, Artificial Sequence
  Description of Artificial Sequence: Synthetic oligonucleotide
  Sense strand starting at position 2217 of SEQ ID NO: 636
ccuggauugacugguguga

SEQ ID NO: 52639 - RNA, 19 nt, Artificial Sequence
  Description of Artificial Sequence: Synthetic oligonucleotide
  Antisense strand to SEQ ID NO: 52558
ucacaccagucaauccagg

SEQ ID NO: 52640 - RNA, 19 nt, Artificial Sequence
  Description of Artificial Sequence: Synthetic oligonucleotide
  Sense strand starting at position 2208 of SEQ ID NO: 636
cagggaguuccuggauuga

SEQ ID NO: 52641 - RNA, 19 nt, Artificial Sequence
  Description of Artificial Sequence: Synthetic oligonucleotide
  Antisense strand to SEQ ID NO: 52560
ucaauccaggaacucccug

SEQ ID NO: 52642 - RNA, 19 nt, Artificial Sequence
  Description of Artificial Sequence: Synthetic oligonucleotide
  Sense strand starting at position 1118 of SEQ ID NO: 636
gacaauucuugaggaaaga

SEQ ID NO: 52643 - RNA, 19 nt, Artificial Sequence
  Description of Artificial Sequence: Synthetic oligonucleotide
  Antisense strand to SEQ ID NO: 52562
ucuuuccucaagaauuguc

SEQ ID NO: 52644 - RNA, 19 nt, Artificial Sequence
  Description of Artificial Sequence: Synthetic oligonucleotide
  Sense strand starting at position 1114 of SEQ ID NO: 636
gcgagacaauucuugagga

SEQ ID NO: 52645 - RNA, 19 nt, Artificial Sequence
  Description of Artificial Sequence: Synthetic oligonucleotide
  Antisense strand to SEQ ID NO: 52564
uccucaagaauugucucgc

SEQ ID NO: 52646 - RNA, 19 nt, Artificial Sequence
  Description of Artificial Sequence: Synthetic oligonucleotide
  Sense strand starting at position 1106 of SEQ ID NO: 636
aggugagggcgagacaauu

SEQ ID NO: 52647 - RNA, 19 nt, Artificial Sequence
  Description of Artificial Sequence: Synthetic oligonucleotide
  Antisense strand to SEQ ID NO: 52566
aauugucucgcccucaccu

SEQ ID NO: 52648 - RNA, 19 nt, Artificial Sequence
  Description of Artificial Sequence: Synthetic oligonucleotide
  Sense strand starting at position 569 of SEQ ID NO: 636
guaggugcuccuuagacuu

SEQ ID NO: 52649 - RNA, 19 nt, Artificial Sequence
  Description of Artificial Sequence: Synthetic oligonucleotide
  Antisense strand to SEQ ID NO: 52568
aagucuaaggagcaccuac

SEQ ID NO: 52650 - RNA, 19 nt, Artificial Sequence
  Description of Artificial Sequence: Synthetic oligonucleotide
  Sense strand starting at position 554 of SEQ ID NO: 636
cagggaguguucccaguag

SEQ ID NO: 52651 - RNA, 19 nt, Artificial Sequence
  Description of Artificial Sequence: Synthetic oligonucleotide
  Antisense strand to SEQ ID NO: 52570
cuacugggaacacucccug

SEQ ID NO: 52652 - RNA, 19 nt, Artificial Sequence
  Description of Artificial Sequence: Synthetic oligonucleotide
  Sense strand starting at position 489 of SEQ ID NO: 636
gcuuuaacgccuuauuuac

SEQ ID NO: 52653 - RNA, 19 nt, Artificial Sequence
  Description of Artificial Sequence: Synthetic oligonucleotide
  Antisense strand to SEQ ID NO: 52572
guaaauaaggcguuaaagc

SEQ ID NO: 52654 - RNA, 19 nt, Artificial Sequence
  Description of Artificial Sequence: Synthetic oligonucleotide
  Sense strand starting at position 137 of SEQ ID NO: 636
uuucuccuggcuuagaauu

SEQ ID NO: 52655 - RNA, 19 nt, Artificial Sequence
  Description of Artificial Sequence: Synthetic oligonucleotide
  Antisense strand to SEQ ID NO: 52574
aauucuaagccaggagaaa

SEQ ID NO: 52656 - RNA, 19 nt, Artificial Sequence
  Description of Artificial Sequence: Synthetic oligonucleotide
  Sense strand starting at position 135 of SEQ ID NO: 636
aguuucuccuggcuuagaa

SEQ ID NO: 52657 - RNA, 19 nt, Artificial Sequence
  Description of Artificial Sequence: Synthetic oligonucleotide
  Antisense strand to SEQ ID NO: 52576
uucuaagccaggagaaacu

SEQ ID NO: 52658 - RNA, 19 nt, Artificial Sequence
  Description of Artificial Sequence: Synthetic oligonucleotide
  Sense strand starting at position 3825 of SEQ ID NO: 635
ucaguuauucucggagguu

SEQ ID NO: 52659 - RNA, 19 nt, Artificial Sequence
  Description of Artificial Sequence: Synthetic oligonucleotide
  Antisense strand to SEQ ID NO: 52578
aaccuccgagaauaacuga

SEQ ID NO: 52660 - RNA, 19 nt, Artificial Sequence
  Description of Artificial Sequence: Synthetic oligonucleotide
  Sense strand starting at position 3652 of SEQ ID NO: 635
uaagaauuaggccaggcau

SEQ ID NO: 52661 - RNA, 19 nt, Artificial Sequence
  Description of Artificial Sequence: Synthetic oligonucleotide
  Antisense strand to SEQ ID NO: 52580
augccuggccuaauucuua

SEQ ID NO: 52662 - RNA, 19 nt, Artificial Sequence
  Description of Artificial Sequence: Synthetic oligonucleotide
  Sense strand starting at position 3643 of SEQ ID NO: 635
gaguuacuguaagaauuag

SEQ ID NO: 52663 - RNA, 19 nt, Artificial Sequence
  Description of Artificial Sequence: Synthetic oligonucleotide
  Antisense strand to SEQ ID NO: 52582
cuaauucuuacaguaacuc

SEQ ID NO: 52664 - RNA, 19 nt, Artificial Sequence
  Description of Artificial Sequence: Synthetic oligonucleotide
  Sense strand starting at position 3612 of SEQ ID NO: 635
ggagaaggauaauaauagu

SEQ ID NO: 52665 - RNA, 19 nt, Artificial Sequence
  Description of Artificial Sequence: Synthetic oligonucleotide
  Antisense strand to SEQ ID NO: 52584
acuauuauuauccuucucc

SEQ ID NO: 52666 - RNA, 19 nt, Artificial Sequence
  Description of Artificial Sequence: Synthetic oligonucleotide
  Sense strand starting at position 3438 of SEQ ID NO: 635
gggauaauauguccaagua

SEQ ID NO: 52667 - RNA, 19 nt, Artificial Sequence
  Description of Artificial Sequence: Synthetic oligonucleotide
  Antisense strand to SEQ ID NO: 52586
uacuuggacauauuauccc

SEQ ID NO: 52668 - RNA, 19 nt, Artificial Sequence
  Description of Artificial Sequence: Synthetic oligonucleotide
  Sense strand starting at position 3051 of SEQ ID NO: 635
gaaacagauugccuggguu

SEQ ID NO: 52669 - RNA, 19 nt, Artificial Sequence
  Description of Artificial Sequence: Synthetic oligonucleotide
  Antisense strand to SEQ ID NO: 52588
aacccaggcaaucuguuuc

SEQ ID NO: 52670 - RNA, 19 nt, Artificial Sequence
  Description of Artificial Sequence: Synthetic oligonucleotide
  Sense strand starting at position 2985 of SEQ ID NO: 635
guagaugccagcuagacau

SEQ ID NO: 52671 - RNA, 19 nt, Artificial Sequence
  Description of Artificial Sequence: Synthetic oligonucleotide
  Antisense strand to SEQ ID NO: 52590
augucuagcuggcaucuac

SEQ ID NO: 52672 - RNA, 19 nt, Artificial Sequence
  Description of Artificial Sequence: Synthetic oligonucleotide
  Sense strand starting at position 2885 of SEQ ID NO: 635
uaagauaggaucugguguu

SEQ ID NO: 52673 - RNA, 19 nt, Artificial Sequence
  Description of Artificial Sequence: Synthetic oligonucleotide
  Antisense strand to SEQ ID NO: 52592
aacaccagauccuaucuua

SEQ ID NO: 52674 - RNA, 19 nt, Artificial Sequence
  Description of Artificial Sequence: Synthetic oligonucleotide
  Sense strand starting at position 2808 of SEQ ID NO: 635
cuaggcuggucugugaaca

SEQ ID NO: 52675 - RNA, 19 nt, Artificial Sequence
  Description of Artificial Sequence: Synthetic oligonucleotide
  Antisense strand to SEQ ID NO: 52594
uguucacagaccagccuag

SEQ ID NO: 52676 - RNA, 19 nt, Artificial Sequence
  Description of Artificial Sequence: Synthetic oligonucleotide
  Sense strand starting at position 2746 of SEQ ID NO: 635
cuuagugugucuuuauuuc

SEQ ID NO: 52677 - RNA, 19 nt, Artificial Sequence
  Description of Artificial Sequence: Synthetic oligonucleotide
  Antisense strand to SEQ ID NO: 52596
gaaauaaagacacacuaag

SEQ ID NO: 52678 - RNA, 19 nt, Artificial Sequence
  Description of Artificial Sequence: Synthetic oligonucleotide
  Sense strand starting at position 2744 of SEQ ID NO: 635
ugcuuagugugucuuuauu

SEQ ID NO: 52679 - RNA, 19 nt, Artificial Sequence
  Description of Artificial Sequence: Synthetic oligonucleotide
  Antisense strand to SEQ ID NO: 52598
aauaaagacacacuaagca

SEQ ID NO: 52680 - RNA, 19 nt, Artificial Sequence
  Description of Artificial Sequence: Synthetic oligonucleotide
  Sense strand starting at position 2743 of SEQ ID NO: 635
uugcuuagugugucuuuau

SEQ ID NO: 52681 - RNA, 19 nt, Artificial Sequence
  Description of Artificial Sequence: Synthetic oligonucleotide
  Antisense strand to SEQ ID NO: 52600
auaaagacacacuaagcaa

SEQ ID NO: 52682 - RNA, 19 nt, Artificial Sequence
  Description of Artificial Sequence: Synthetic oligonucleotide
  Sense strand starting at position 2742 of SEQ ID NO: 635
auugcuuagugugucuuua

SEQ ID NO: 52683 - RNA, 19 nt, Artificial Sequence
  Description of Artificial Sequence: Synthetic oligonucleotide
  Antisense strand to SEQ ID NO: 52602
uaaagacacacuaagcaau

SEQ ID NO: 52684 - RNA, 19 nt, Artificial Sequence
  Description of Artificial Sequence: Synthetic oligonucleotide
  Sense strand starting at position 2704 of SEQ ID NO: 635
aggucuggucuccagauga

SEQ ID NO: 52685 - RNA, 19 nt, Artificial Sequence
  Description of Artificial Sequence: Synthetic oligonucleotide
  Antisense strand to SEQ ID NO: 52604
ucaucuggagaccagaccu

SEQ ID NO: 52686 - RNA, 19 nt, Artificial Sequence
  Description of Artificial Sequence: Synthetic oligonucleotide
  Sense strand starting at position 2703 of SEQ ID NO: 635
gaggucuggucuccagaug

SEQ ID NO: 52687 - RNA, 19 nt, Artificial Sequence
  Description of Artificial Sequence: Synthetic oligonucleotide
  Antisense strand to SEQ ID NO: 52606
caucuggagaccagaccuc

SEQ ID NO: 52688 - RNA, 19 nt, Artificial Sequence
  Description of Artificial Sequence: Synthetic oligonucleotide
  Sense strand starting at position 2611 of SEQ ID NO: 635
uugagaccacgccaagauu

SEQ ID NO: 52689 - RNA, 19 nt, Artificial Sequence
  Description of Artificial Sequence: Synthetic oligonucleotide
  Antisense strand to SEQ ID NO: 52608
aaucuuggcguggucucaa

SEQ ID NO: 52690 - RNA, 19 nt, Artificial Sequence
  Description of Artificial Sequence: Synthetic oligonucleotide
  Sense strand starting at position 2581 of SEQ ID NO: 635
cuguguaaggccugaaaug

SEQ ID NO: 52691 - RNA, 19 nt, Artificial Sequence
  Description of Artificial Sequence: Synthetic oligonucleotide
  Antisense strand to SEQ ID NO: 52610
cauuucaggccuuacacag

SEQ ID NO: 52692 - RNA, 19 nt, Artificial Sequence
  Description of Artificial Sequence: Synthetic oligonucleotide
  Sense strand starting at position 2549 of SEQ ID NO: 635
gacauucgaugagacuuua

SEQ ID NO: 52693 - RNA, 19 nt, Artificial Sequence
  Description of Artificial Sequence: Synthetic oligonucleotide
  Antisense strand to SEQ ID NO: 52612
uaaagucucaucgaauguc

SEQ ID NO: 52694 - RNA, 19 nt, Artificial Sequence
  Description of Artificial Sequence: Synthetic oligonucleotide
  Sense strand starting at position 2546 of SEQ ID NO: 635
ccugacauucgaugagacu

SEQ ID NO: 52695 - RNA, 19 nt, Artificial Sequence
  Description of Artificial Sequence: Synthetic oligonucleotide
  Antisense strand to SEQ ID NO: 52614
agucucaucgaaugucagg

SEQ ID NO: 52696 - RNA, 19 nt, Artificial Sequence
  Description of Artificial Sequence: Synthetic oligonucleotide
  Sense strand starting at position 2459 of SEQ ID NO: 635
cuuagugaccucggguaag

SEQ ID NO: 52697 - RNA, 19 nt, Artificial Sequence
  Description of Artificial Sequence: Synthetic oligonucleotide
  Antisense strand to SEQ ID NO: 52616
cuuacccgaggucacuaag

SEQ ID NO: 52698 - RNA, 19 nt, Artificial Sequence
  Description of Artificial Sequence: Synthetic oligonucleotide
  Sense strand starting at position 2405 of SEQ ID NO: 635
aguaacucgcguagagguu

SEQ ID NO: 52699 - RNA, 19 nt, Artificial Sequence
  Description of Artificial Sequence: Synthetic oligonucleotide
  Antisense strand to SEQ ID NO: 52618
aaccucuacgcgaguuacu

SEQ ID NO: 52700 - RNA, 19 nt, Artificial Sequence
  Description of Artificial Sequence: Synthetic oligonucleotide
  Sense strand starting at position 2404 of SEQ ID NO: 635
aaguaacucgcguagaggu

SEQ ID NO: 52701 - RNA, 19 nt, Artificial Sequence
  Description of Artificial Sequence: Synthetic oligonucleotide
  Antisense strand to SEQ ID NO: 52620
accucuacgcgaguuacuu

SEQ ID NO: 52702 - RNA, 19 nt, Artificial Sequence
  Description of Artificial Sequence: Synthetic oligonucleotide
  Sense strand starting at position 2371 of SEQ ID NO: 635
caaguaagaggccgagauu

SEQ ID NO: 52703 - RNA, 19 nt, Artificial Sequence
  Description of Artificial Sequence: Synthetic oligonucleotide
  Antisense strand to SEQ ID NO: 52622
aaucucggccucuuacuug

SEQ ID NO: 52704 - RNA, 19 nt, Artificial Sequence
  Description of Artificial Sequence: Synthetic oligonucleotide
  Sense strand starting at position 2071 of SEQ ID NO: 635
gccacaacauuguaguaaa

SEQ ID NO: 52705 - RNA, 19 nt, Artificial Sequence
  Description of Artificial Sequence: Synthetic oligonucleotide
  Antisense strand to SEQ ID NO: 52624
uuuacuacaauguuguggc

SEQ ID NO: 52706 - RNA, 19 nt, Artificial Sequence
  Description of Artificial Sequence: Synthetic oligonucleotide
  Sense strand starting at position 2063 of SEQ ID NO: 635
cucaguucgccacaacauu

SEQ ID NO: 52707 - RNA, 19 nt, Artificial Sequence
  Description of Artificial Sequence: Synthetic oligonucleotide
  Antisense strand to SEQ ID NO: 52626
aauguuguggcgaacugag

SEQ ID NO: 52708 - RNA, 19 nt, Artificial Sequence
  Description of Artificial Sequence: Synthetic oligonucleotide
  Sense strand starting at position 1436 of SEQ ID NO: 635
ccgucugaaaccugcgauu

SEQ ID NO: 52709 - RNA, 19 nt, Artificial Sequence
  Description of Artificial Sequence: Synthetic oligonucleotide
  Antisense strand to SEQ ID NO: 52628
aaucgcagguuucagacgg

SEQ ID NO: 52710 - RNA, 19 nt, Artificial Sequence
  Description of Artificial Sequence: Synthetic oligonucleotide
  Sense strand starting at position 1220 of SEQ ID NO: 635
ucacgacgcugagagaaua

SEQ ID NO: 52711 - RNA, 19 nt, Artificial Sequence
  Description of Artificial Sequence: Synthetic oligonucleotide
  Antisense strand to SEQ ID NO: 52630
uauucucucagcgucguga

SEQ ID NO: 52712 - RNA, 19 nt, Artificial Sequence
  Description of Artificial Sequence: Synthetic oligonucleotide
  Sense strand starting at position 1095 of SEQ ID NO: 635
ggaauaauggccugcuggu

SEQ ID NO: 52713 - RNA, 19 nt, Artificial Sequence
  Description of Artificial Sequence: Synthetic oligonucleotide
  Antisense strand to SEQ ID NO: 52632
accagcaggccauuauucc

SEQ ID NO: 52714 - RNA, 19 nt, Artificial Sequence
  Description of Artificial Sequence: Synthetic oligonucleotide
  Sense strand starting at position 982 of SEQ ID NO: 635
cuaucauguggccagaaac

SEQ ID NO: 52715 - RNA, 19 nt, Artificial Sequence
  Description of Artificial Sequence: Synthetic oligonucleotide
  Antisense strand to SEQ ID NO: 52634
guuucuggccacaugauag

SEQ ID NO: 52716 - RNA, 19 nt, Artificial Sequence
  Description of Artificial Sequence: Synthetic oligonucleotide
  Sense strand starting at position 981 of SEQ ID NO: 635
gcuaucauguggccagaaa

SEQ ID NO: 52717 - RNA, 19 nt, Artificial Sequence
  Description of Artificial Sequence: Synthetic oligonucleotide
  Antisense strand to SEQ ID NO: 52636
uuucuggccacaugauagc

SEQ ID NO: 52718 - RNA, 19 nt, Artificial Sequence
  Description of Artificial Sequence: Synthetic oligonucleotide
  Sense strand starting at position 970 of SEQ ID NO: 635
ggaugacagucgcuaucau

SEQ ID NO: 52719 - RNA, 19 nt, Artificial Sequence
  Description of Artificial Sequence: Synthetic oligonucleotide
  Antisense strand to SEQ ID NO: 52638
augauagcgacugucaucc

SEQ ID NO: 52720 - RNA, 19 nt, Artificial Sequence
  Description of Artificial Sequence: Synthetic oligonucleotide
  Sense strand starting at position 927 of SEQ ID NO: 635
agucauuuauggcagggua

SEQ ID NO: 52721 - RNA, 19 nt, Artificial Sequence
  Description of Artificial Sequence: Synthetic oligonucleotide
  Antisense strand to SEQ ID NO: 52640
uacccugccauaaaugacu

SEQ ID NO: 52722 - RNA, 19 nt, Artificial Sequence
  Description of Artificial Sequence: Synthetic oligonucleotide
  Sense strand starting at position 592 of SEQ ID NO: 635
acauauacgggcuauauau

SEQ ID NO: 52723 - RNA, 19 nt, Artificial Sequence
  Description of Artificial Sequence: Synthetic oligonucleotide
  Antisense strand to SEQ ID NO: 52642
auauauagcccguauaugu

SEQ ID NO: 52724 - RNA, 19 nt, Artificial Sequence
  Description of Artificial Sequence: Synthetic oligonucleotide
  Sense strand starting at position 554 of SEQ ID NO: 635
ggguuagugcuacauuaac

SEQ ID NO: 52725 - RNA, 19 nt, Artificial Sequence
  Description of Artificial Sequence: Synthetic oligonucleotide
  Antisense strand to SEQ ID NO: 52644
guuaauguagcacuaaccc

SEQ ID NO: 52726 - RNA, 19 nt, Artificial Sequence
  Description of Artificial Sequence: Synthetic oligonucleotide
  Sense strand starting at position 431 of SEQ ID NO: 635
cgcuacauggauuauauua

SEQ ID NO: 52727 - RNA, 19 nt, Artificial Sequence
  Description of Artificial Sequence: Synthetic oligonucleotide
  Antisense strand to SEQ ID NO: 52646
uaauauaauccauguagcg

SEQ ID NO: 52728 - RNA, 19 nt, Artificial Sequence
  Description of Artificial Sequence: Synthetic oligonucleotide
  Sense strand starting at position 428 of SEQ ID NO: 635
guacgcuacauggauuaua

SEQ ID NO: 52729 - RNA, 19 nt, Artificial Sequence
  Description of Artificial Sequence: Synthetic oligonucleotide
  Antisense strand to SEQ ID NO: 52648
uauaauccauguagcguac

SEQ ID NO: 52730 - RNA, 19 nt, Artificial Sequence
  Description of Artificial Sequence: Synthetic oligonucleotide
  Sense strand starting at position 424 of SEQ ID NO: 635
gcauguacgcuacauggau

SEQ ID NO: 52731 - RNA, 19 nt, Artificial Sequence
  Description of Artificial Sequence: Synthetic oligonucleotide
  Antisense strand to SEQ ID NO: 52650
auccauguagcguacaugc

SEQ ID NO: 52732 - RNA, 19 nt, Artificial Sequence
  Description of Artificial Sequence: Synthetic oligonucleotide
  Sense strand starting at position 403 of SEQ ID NO: 635
gugcuuacuguacgccaga

SEQ ID NO: 52733 - RNA, 19 nt, Artificial Sequence
  Description of Artificial Sequence: Synthetic oligonucleotide
  Antisense strand to SEQ ID NO: 52652
ucuggcguacaguaagcac

SEQ ID NO: 52734 - RNA, 19 nt, Artificial Sequence
  Description of Artificial Sequence: Synthetic oligonucleotide
  Sense strand starting at position 336 of SEQ ID NO: 635
cuacuuugauucuaaggca

SEQ ID NO: 52735 - RNA, 19 nt, Artificial Sequence
  Description of Artificial Sequence: Synthetic oligonucleotide
  Antisense strand to SEQ ID NO: 52654
ugccuuagaaucaaaguag

SEQ ID NO: 52736 - RNA, 19 nt, Artificial Sequence
  Description of Artificial Sequence: Synthetic oligonucleotide
  Sense strand starting at position 304 of SEQ ID NO: 635
auaagcuucuuauagaaag

SEQ ID NO: 52737 - RNA, 19 nt, Artificial Sequence
  Description of Artificial Sequence: Synthetic oligonucleotide
  Antisense strand to SEQ ID NO: 52656
cuuucuauaagaagcuuau

SEQ ID NO: 52738 - RNA, 19 nt, Artificial Sequence
  Description of Artificial Sequence: Synthetic oligonucleotide
  Sense strand starting at position 234 of SEQ ID NO: 637
aaggaccauugugauuauu

SEQ ID NO: 52739 - RNA, 19 nt, Artificial Sequence
  Description of Artificial Sequence: Synthetic oligonucleotide
  Antisense strand to SEQ ID NO: 52658
aauaaucacaaugguccuu

SEQ ID NO: 52740 - RNA, 19 nt, Artificial Sequence
  Description of Artificial Sequence: Synthetic oligonucleotide
  Sense strand starting at position 414 of SEQ ID NO: 637
uggcaaauacucuaagguu

SEQ ID NO: 52741 - RNA, 19 nt, Artificial Sequence
  Description of Artificial Sequence: Synthetic oligonucleotide
  Antisense strand to SEQ ID NO: 52660
aaccuuagaguauuugcca

SEQ ID NO: 52742 - RNA, 19 nt, Artificial Sequence
  Description of Artificial Sequence: Synthetic oligonucleotide
  Sense strand starting at position 524 of SEQ ID NO: 637
gagagaaagugaguaguga

SEQ ID NO: 52743 - RNA, 19 nt, Artificial Sequence
  Description of Artificial Sequence: Synthetic oligonucleotide
  Antisense strand to SEQ ID NO: 52662
ucacuacucacuuucucuc

SEQ ID NO: 52744 - RNA, 19 nt, Artificial Sequence
  Description of Artificial Sequence: Synthetic oligonucleotide
  Sense strand starting at position 532 of SEQ ID NO: 637
gugaguagugaauguauca

SEQ ID NO: 52745 - RNA, 19 nt, Artificial Sequence
  Description of Artificial Sequence: Synthetic oligonucleotide
  Antisense strand to SEQ ID NO: 52664
ugauacauucacuacucac

SEQ ID NO: 52746 - RNA, 19 nt, Artificial Sequence
  Description of Artificial Sequence: Synthetic oligonucleotide
  Sense strand starting at position 953 of SEQ ID NO: 637
gagauuacccucuggagcu

SEQ ID NO: 52747 - RNA, 19 nt, Artificial Sequence
  Description of Artificial Sequence: Synthetic oligonucleotide
  Antisense strand to SEQ ID NO: 52666
agcuccagaggguaaucuc

SEQ ID NO: 52748 - RNA, 19 nt, Artificial Sequence
  Description of Artificial Sequence: Synthetic oligonucleotide
  Sense strand starting at position 1050 of SEQ ID NO: 637
ccgagauccgcgcaacuga

SEQ ID NO: 52749 - RNA, 19 nt, Artificial Sequence
  Description of Artificial Sequence: Synthetic oligonucleotide
  Antisense strand to SEQ ID NO: 52668
ucaguugcgcggaucucgg

SEQ ID NO: 52750 - RNA, 19 nt, Artificial Sequence
  Description of Artificial Sequence: Synthetic oligonucleotide
  Sense strand starting at position 1127 of SEQ ID NO: 637
gcggucaacgccucagauu

SEQ ID NO: 52751 - RNA, 19 nt, Artificial Sequence
  Description of Artificial Sequence: Synthetic oligonucleotide
  Antisense strand to SEQ ID NO: 52670
aaucugaggcguugaccgc

SEQ ID NO: 52752 - RNA, 19 nt, Artificial Sequence
  Description of Artificial Sequence: Synthetic oligonucleotide
  Sense strand starting at position 1185 of SEQ ID NO: 637
ggauucaacugagcguaua

SEQ ID NO: 52753 - RNA, 19 nt, Artificial Sequence
  Description of Artificial Sequence: Synthetic oligonucleotide
  Antisense strand to SEQ ID NO: 52672
uauacgcucaguugaaucc

SEQ ID NO: 52754 - RNA, 19 nt, Artificial Sequence
  Description of Artificial Sequence: Synthetic oligonucleotide
  Sense strand starting at position 1288 of SEQ ID NO: 637
gcagacuacgcucagaauu

SEQ ID NO: 52755 - RNA, 19 nt, Artificial Sequence
  Description of Artificial Sequence: Synthetic oligonucleotide
  Antisense strand to SEQ ID NO: 52674
aauucugagcguagucugc

SEQ ID NO: 52756 - RNA, 19 nt, Artificial Sequence
  Description of Artificial Sequence: Synthetic oligonucleotide
  Sense strand starting at position 1315 of SEQ ID NO: 637
cggacaguuccaugaucag

SEQ ID NO: 52757 - RNA, 19 nt, Artificial Sequence
  Description of Artificial Sequence: Synthetic oligonucleotide
  Antisense strand to SEQ ID NO: 52676
cugaucauggaacuguccg

SEQ ID NO: 52758 - RNA, 19 nt, Artificial Sequence
  Description of Artificial Sequence: Synthetic oligonucleotide
  Sense strand starting at position 1635 of SEQ ID NO: 637
ucgcuacugcuugaucaca

SEQ ID NO: 52759 - RNA, 19 nt, Artificial Sequence
  Description of Artificial Sequence: Synthetic oligonucleotide
  Antisense strand to SEQ ID NO: 52678
ugugaucaagcaguagcga

SEQ ID NO: 52760 - RNA, 19 nt, Artificial Sequence
  Description of Artificial Sequence: Synthetic oligonucleotide
  Sense strand starting at position 1637 of SEQ ID NO: 637
gcuacugcuugaucacauu

SEQ ID NO: 52761 - RNA, 19 nt, Artificial Sequence
  Description of Artificial Sequence: Synthetic oligonucleotide
  Antisense strand to SEQ ID NO: 52680
aaugugaucaagcaguagc

SEQ ID NO: 52762 - RNA, 19 nt, Artificial Sequence
  Description of Artificial Sequence: Synthetic oligonucleotide
  Sense strand starting at position 2261 of SEQ ID NO: 637
agcuccucauuccugagaa

SEQ ID NO: 52763 - RNA, 19 nt, Artificial Sequence
  Description of Artificial Sequence: Synthetic oligonucleotide
  Antisense strand to SEQ ID NO: 52682
uucucaggaaugaggagcu

SEQ ID NO: 52764 - RNA, 19 nt, Artificial Sequence
  Description of Artificial Sequence: Synthetic oligonucleotide
  Sense strand starting at position 2263 of SEQ ID NO: 637
cuccucauuccugagaagu

SEQ ID NO: 52765 - RNA, 19 nt, Artificial Sequence
  Description of Artificial Sequence: Synthetic oligonucleotide
  Antisense strand to SEQ ID NO: 52684
acuucucaggaaugaggag

SEQ ID NO: 52766 - RNA, 19 nt, Artificial Sequence
  Description of Artificial Sequence: Synthetic oligonucleotide
  Sense strand starting at position 2737 of SEQ ID NO: 637
uccugcugucaagauacaa

SEQ ID NO: 52767 - RNA, 19 nt, Artificial Sequence
  Description of Artificial Sequence: Synthetic oligonucleotide
  Antisense strand to SEQ ID NO: 52686
uuguaucuugacagcagga

SEQ ID NO: 52768 - RNA, 19 nt, Artificial Sequence
  Description of Artificial Sequence: Synthetic oligonucleotide
  Sense strand starting at position 2781 of SEQ ID NO: 637
cccucagucugcucagagu

SEQ ID NO: 52769 - RNA, 19 nt, Artificial Sequence
  Description of Artificial Sequence: Synthetic oligonucleotide
  Antisense strand to SEQ ID NO: 52688
acucugagcagacugaggg

SEQ ID NO: 52770 - RNA, 19 nt, Artificial Sequence
  Description of Artificial Sequence: Synthetic oligonucleotide
  Sense strand starting at position 2871 of SEQ ID NO: 637
aucggagacaucugcgaga

SEQ ID NO: 52771 - RNA, 19 nt, Artificial Sequence
  Description of Artificial Sequence: Synthetic oligonucleotide
  Antisense strand to SEQ ID NO: 52690
ucucgcagaugucuccgau

SEQ ID NO: 52772 - RNA, 19 nt, Artificial Sequence
  Description of Artificial Sequence: Synthetic oligonucleotide
  Sense strand starting at position 2873 of SEQ ID NO: 637
cggagacaucugcgagaga

SEQ ID NO: 52773 - RNA, 19 nt, Artificial Sequence
  Description of Artificial Sequence: Synthetic oligonucleotide
  Antisense strand to SEQ ID NO: 52692
ucucucgcagaugucuccg

SEQ ID NO: 52774 - RNA, 19 nt, Artificial Sequence
  Description of Artificial Sequence: Synthetic oligonucleotide
  Sense strand starting at position 2874 of SEQ ID NO: 637
ggagacaucugcgagagag

SEQ ID NO: 52775 - RNA, 19 nt, Artificial Sequence
  Description of Artificial Sequence: Synthetic oligonucleotide
  Antisense strand to SEQ ID NO: 52694
cucucucgcagaugucucc

SEQ ID NO: 52776 - RNA, 19 nt, Artificial Sequence
  Description of Artificial Sequence: Synthetic oligonucleotide
  Sense strand starting at position 2948 of SEQ ID NO: 637
gaacaagaccucugucuag

SEQ ID NO: 52777 - RNA, 19 nt, Artificial Sequence
  Description of Artificial Sequence: Synthetic oligonucleotide
  Antisense strand to SEQ ID NO: 52696
cuagacagaggucuuguuc

SEQ ID NO: 52778 - RNA, 19 nt, Artificial Sequence
  Description of Artificial Sequence: Synthetic oligonucleotide
  Sense strand starting at position 2952 of SEQ ID NO: 637
aagaccucugucuagugaa

SEQ ID NO: 52779 - RNA, 19 nt, Artificial Sequence
  Description of Artificial Sequence: Synthetic oligonucleotide
  Antisense strand to SEQ ID NO: 52698
uucacuagacagaggucuu

SEQ ID NO: 52780 - RNA, 19 nt, Artificial Sequence
  Description of Artificial Sequence: Synthetic oligonucleotide
  Sense strand starting at position 2959 of SEQ ID NO: 637
cugucuagugaaggucauu

SEQ ID NO: 52781 - RNA, 19 nt, Artificial Sequence
  Description of Artificial Sequence: Synthetic oligonucleotide
  Antisense strand to SEQ ID NO: 52700
aaugaccuucacuagacag

SEQ ID NO: 52782 - RNA, 19 nt, Artificial Sequence
  Description of Artificial Sequence: Synthetic oligonucleotide
  Sense strand starting at position 2968 of SEQ ID NO: 637
gaaggucauuuaugugcaa

SEQ ID NO: 52783 - RNA, 19 nt, Artificial Sequence
  Description of Artificial Sequence: Synthetic oligonucleotide
  Antisense strand to SEQ ID NO: 52702
uugcacauaaaugaccuuc

SEQ ID NO: 52784 - RNA, 19 nt, Artificial Sequence
  Description of Artificial Sequence: Synthetic oligonucleotide
  Sense strand starting at position 2971 of SEQ ID NO: 637
ggucauuuaugugcaagcu

SEQ ID NO: 52785 - RNA, 19 nt, Artificial Sequence
  Description of Artificial Sequence: Synthetic oligonucleotide
  Antisense strand to SEQ ID NO: 52704
agcuugcacauaaaugacc

SEQ ID NO: 52786 - RNA, 19 nt, Artificial Sequence
  Description of Artificial Sequence: Synthetic oligonucleotide
  Sense strand starting at position 3153 of SEQ ID NO: 637
aagcgaauauagccugaga

SEQ ID NO: 52787 - RNA, 19 nt, Artificial Sequence
  Description of Artificial Sequence: Synthetic oligonucleotide
  Antisense strand to SEQ ID NO: 52706
ucucaggcuauauucgcuu

SEQ ID NO: 52788 - RNA, 19 nt, Artificial Sequence
  Description of Artificial Sequence: Synthetic oligonucleotide
  Sense strand starting at position 3155 of SEQ ID NO: 637
gcgaauauagccugagaaa

SEQ ID NO: 52789 - RNA, 19 nt, Artificial Sequence
  Description of Artificial Sequence: Synthetic oligonucleotide
  Antisense strand to SEQ ID NO: 52708
uuucucaggcuauauucgc

SEQ ID NO: 52790 - RNA, 19 nt, Artificial Sequence
  Description of Artificial Sequence: Synthetic oligonucleotide
  Sense strand starting at position 3186 of SEQ ID NO: 637
gugugaguccugugacuac

SEQ ID NO: 52791 - RNA, 19 nt, Artificial Sequence
  Description of Artificial Sequence: Synthetic oligonucleotide
  Antisense strand to SEQ ID NO: 52710
guagucacaggacucacac

SEQ ID NO: 52792 - RNA, 19 nt, Artificial Sequence
  Description of Artificial Sequence: Synthetic oligonucleotide
  Sense strand starting at position 3357 of SEQ ID NO: 637
uaaggaggauuccuggcau

SEQ ID NO: 52793 - RNA, 19 nt, Artificial Sequence
  Description of Artificial Sequence: Synthetic oligonucleotide
  Antisense strand to SEQ ID NO: 52712
augccaggaauccuccuua

SEQ ID NO: 52794 - RNA, 19 nt, Artificial Sequence
  Description of Artificial Sequence: Synthetic oligonucleotide
  Sense strand starting at position 3364 of SEQ ID NO: 637
gauuccuggcaucguagau

SEQ ID NO: 52795 - RNA, 19 nt, Artificial Sequence
  Description of Artificial Sequence: Synthetic oligonucleotide
  Antisense strand to SEQ ID NO: 52714
aucuacgaugccaggaauc

SEQ ID NO: 52796 - RNA, 19 nt, Artificial Sequence
  Description of Artificial Sequence: Synthetic oligonucleotide
  Sense strand starting at position 3421 of SEQ ID NO: 637
gcgugugugcuuguguaua

SEQ ID NO: 52797 - RNA, 19 nt, Artificial Sequence
  Description of Artificial Sequence: Synthetic oligonucleotide
  Antisense strand to SEQ ID NO: 52716
uauacacaagcacacacgc

SEQ ID NO: 52798 - RNA, 19 nt, Artificial Sequence
  Description of Artificial Sequence: Synthetic oligonucleotide
  Sense strand starting at position 3468 of SEQ ID NO: 637
cagacauacuugcuggaca

SEQ ID NO: 52799 - RNA, 19 nt, Artificial Sequence
  Description of Artificial Sequence: Synthetic oligonucleotide
  Antisense strand to SEQ ID NO: 52718
uguccagcaaguaugucug

SEQ ID NO: 52800 - RNA, 19 nt, Artificial Sequence
  Description of Artificial Sequence: Synthetic oligonucleotide
  Sense strand starting at position 3470 of SEQ ID NO: 637
gacauacuugcuggacagu

SEQ ID NO: 52801 - RNA, 19 nt, Artificial Sequence
  Description of Artificial Sequence: Synthetic oligonucleotide
  Antisense strand to SEQ ID NO: 52720
acuguccagcaaguauguc

SEQ ID NO: 52802 - RNA, 19 nt, Artificial Sequence
  Description of Artificial Sequence: Synthetic oligonucleotide
  Sense strand starting at position 3471 of SEQ ID NO: 637
acauacuugcuggacagua

SEQ ID NO: 52803 - RNA, 19 nt, Artificial Sequence
  Description of Artificial Sequence: Synthetic oligonucleotide
  Antisense strand to SEQ ID NO: 52722
uacuguccagcaaguaugu

SEQ ID NO: 52804 - RNA, 19 nt, Artificial Sequence
  Description of Artificial Sequence: Synthetic oligonucleotide
  Sense strand starting at position 3511 of SEQ ID NO: 637
aggaauuggucuucuuuac

SEQ ID NO: 52805 - RNA, 19 nt, Artificial Sequence
  Description of Artificial Sequence: Synthetic oligonucleotide
  Antisense strand to SEQ ID NO: 52724
guaaagaagaccaauuccu

SEQ ID NO: 52806 - RNA, 19 nt, Artificial Sequence
  Description of Artificial Sequence: Synthetic oligonucleotide
  Sense strand starting at position 3518 of SEQ ID NO: 637
ggucuucuuuaccugcaga

SEQ ID NO: 52807 - RNA, 19 nt, Artificial Sequence
  Description of Artificial Sequence: Synthetic oligonucleotide
  Antisense strand to SEQ ID NO: 52726
ucugcagguaaagaagacc

SEQ ID NO: 52808 - RNA, 19 nt, Artificial Sequence
  Description of Artificial Sequence: Synthetic oligonucleotide
  Sense strand starting at position 3521 of SEQ ID NO: 637
cuucuuuaccugcagaaag

SEQ ID NO: 52809 - RNA, 19 nt, Artificial Sequence
  Description of Artificial Sequence: Synthetic oligonucleotide
  Antisense strand to SEQ ID NO: 52728
cuuucugcagguaaagaag

SEQ ID NO: 52810 - RNA, 19 nt, Artificial Sequence
  Description of Artificial Sequence: Synthetic oligonucleotide
  Sense strand starting at position 3665 of SEQ ID NO: 637
gaggaaggguucucacacu

SEQ ID NO: 52811 - RNA, 19 nt, Artificial Sequence
  Description of Artificial Sequence: Synthetic oligonucleotide
  Antisense strand to SEQ ID NO: 52730
agugugagaacccuuccuc

SEQ ID NO: 52812 - RNA, 19 nt, Artificial Sequence
  Description of Artificial Sequence: Synthetic oligonucleotide
  Sense strand starting at position 3762 of SEQ ID NO: 637
uuuagaagcugcuuagaga

SEQ ID NO: 52813 - RNA, 19 nt, Artificial Sequence
  Description of Artificial Sequence: Synthetic oligonucleotide
  Antisense strand to SEQ ID NO: 52732
ucucuaagcagcuucuaaa

SEQ ID NO: 52814 - RNA, 19 nt, Artificial Sequence
  Description of Artificial Sequence: Synthetic oligonucleotide
  Sense strand starting at position 3865 of SEQ ID NO: 637
gcucuaaggcaccaaucau

SEQ ID NO: 52815 - RNA, 19 nt, Artificial Sequence
  Description of Artificial Sequence: Synthetic oligonucleotide
  Antisense strand to SEQ ID NO: 52734
augauuggugccuuagagc

SEQ ID NO: 52816 - RNA, 19 nt, Artificial Sequence
  Description of Artificial Sequence: Synthetic oligonucleotide
  Sense strand starting at position 3958 of SEQ ID NO: 637
cucugaaccugacaaggau

SEQ ID NO: 52817 - RNA, 19 nt, Artificial Sequence
  Description of Artificial Sequence: Synthetic oligonucleotide
  Antisense strand to SEQ ID NO: 52736
auccuugucagguucagag

SEQ ID NO: 52818 - RNA, 19 nt, Artificial Sequence
  Description of Artificial Sequence: Synthetic oligonucleotide
  Sense strand starting at position 168 of SEQ ID NO: 638
ggauauugaggguggcaga

SEQ ID NO: 52819 - RNA, 19 nt, Artificial Sequence
  Description of Artificial Sequence: Synthetic oligonucleotide
  Antisense strand to SEQ ID NO: 52738
ucugccacccucaauaucc

SEQ ID NO: 52820 - RNA, 19 nt, Artificial Sequence
  Description of Artificial Sequence: Synthetic oligonucleotide
  Sense strand starting at position 169 of SEQ ID NO: 638
gauauugaggguggcagaa

SEQ ID NO: 52821 - RNA, 19 nt, Artificial Sequence
  Description of Artificial Sequence: Synthetic oligonucleotide
  Antisense strand to SEQ ID NO: 52740
uucugccacccucaauauc

SEQ ID NO: 52822 - RNA, 19 nt, Artificial Sequence
  Description of Artificial Sequence: Synthetic oligonucleotide
  Sense strand starting at position 181 of SEQ ID NO: 638
ggcagaaauccuugccaug

SEQ ID NO: 52823 - RNA, 19 nt, Artificial Sequence
  Description of Artificial Sequence: Synthetic oligonucleotide
  Antisense strand to SEQ ID NO: 52742
cauggcaaggauuucugcc

SEQ ID NO: 52824 - RNA, 19 nt, Artificial Sequence
  Description of Artificial Sequence: Synthetic oligonucleotide
  Sense strand starting at position 788 of SEQ ID NO: 638
gcccucacuguuggaaauu

SEQ ID NO: 52825 - RNA, 19 nt, Artificial Sequence
  Description of Artificial Sequence: Synthetic oligonucleotide
  Antisense strand to SEQ ID NO: 52744
aauuuccaacagugagggc

SEQ ID NO: 52826 - RNA, 19 nt, Artificial Sequence
  Description of Artificial Sequence: Synthetic oligonucleotide
  Sense strand starting at position 1084 of SEQ ID NO: 638
gagucacccuugcucagaa

SEQ ID NO: 52827 - RNA, 19 nt, Artificial Sequence
  Description of Artificial Sequence: Synthetic oligonucleotide
  Antisense strand to SEQ ID NO: 52746
uucugagcaagggugacuc

SEQ ID NO: 52828 - RNA, 19 nt, Artificial Sequence
  Description of Artificial Sequence: Synthetic oligonucleotide
  Sense strand starting at position 1201 of SEQ ID NO: 638
agggauuggcccgaaccua

SEQ ID NO: 52829 - RNA, 19 nt, Artificial Sequence
  Description of Artificial Sequence: Synthetic oligonucleotide
  Antisense strand to SEQ ID NO: 52748
uagguucgggccaaucccu

SEQ ID NO: 52830 - RNA, 19 nt, Artificial Sequence
  Description of Artificial Sequence: Synthetic oligonucleotide
  Sense strand starting at position 1554 of SEQ ID NO: 638
gcugaaaccgcuuauucuc

SEQ ID NO: 52831 - RNA, 19 nt, Artificial Sequence
  Description of Artificial Sequence: Synthetic oligonucleotide
  Antisense strand to SEQ ID NO: 52750
gagaauaagcgguuucagc

SEQ ID NO: 52832 - RNA, 19 nt, Artificial Sequence
  Description of Artificial Sequence: Synthetic oligonucleotide
  Sense strand starting at position 1971 of SEQ ID NO: 638
cgaguccuuaauggaaguu

SEQ ID NO: 52833 - RNA, 19 nt, Artificial Sequence
  Description of Artificial Sequence: Synthetic oligonucleotide
  Antisense strand to SEQ ID NO: 52752
aacuuccauuaaggacucg

SEQ ID NO: 52834 - RNA, 19 nt, Artificial Sequence
  Description of Artificial Sequence: Synthetic oligonucleotide
  Sense strand starting at position 2047 of SEQ ID NO: 638
ucaggaaugucuuuaaagg

SEQ ID NO: 52835 - RNA, 19 nt, Artificial Sequence
  Description of Artificial Sequence: Synthetic oligonucleotide
  Antisense strand to SEQ ID NO: 52754
ccuuuaaagacauuccuga

SEQ ID NO: 52836 - RNA, 19 nt, Artificial Sequence
  Description of Artificial Sequence: Synthetic oligonucleotide
  Sense strand starting at position 2226 of SEQ ID NO: 638
cugguauccucgguggaaa

SEQ ID NO: 52837 - RNA, 19 nt, Artificial Sequence
  Description of Artificial Sequence: Synthetic oligonucleotide
  Antisense strand to SEQ ID NO: 52756
uuuccaccgaggauaccag

SEQ ID NO: 52838 - RNA, 19 nt, Artificial Sequence
  Description of Artificial Sequence: Synthetic oligonucleotide
  Sense strand starting at position 2227 of SEQ ID NO: 638
ugguauccucgguggaaac

SEQ ID NO: 52839 - RNA, 19 nt, Artificial Sequence
  Description of Artificial Sequence: Synthetic oligonucleotide
  Antisense strand to SEQ ID NO: 52758
guuuccaccgaggauacca

SEQ ID NO: 52840 - RNA, 19 nt, Artificial Sequence
  Description of Artificial Sequence: Synthetic oligonucleotide
  Sense strand starting at position 2237 of SEQ ID NO: 638
gguggaaacguuuaauggu

SEQ ID NO: 52841 - RNA, 19 nt, Artificial Sequence
  Description of Artificial Sequence: Synthetic oligonucleotide
  Antisense strand to SEQ ID NO: 52760
accauuaaacguuuccacc

SEQ ID NO: 52842 - RNA, 19 nt, Artificial Sequence
  Description of Artificial Sequence: Synthetic oligonucleotide
  Sense strand starting at position 2289 of SEQ ID NO: 638
cucugagacugagcucaau

SEQ ID NO: 52843 - RNA, 19 nt, Artificial Sequence
  Description of Artificial Sequence: Synthetic oligonucleotide
  Antisense strand to SEQ ID NO: 52762
auugagcucagucucagag

SEQ ID NO: 52844 - RNA, 19 nt, Artificial Sequence
  Description of Artificial Sequence: Synthetic oligonucleotide
  Sense strand starting at position 2331 of SEQ ID NO: 638
gaaggucugagcugaaaug

SEQ ID NO: 52845 - RNA, 19 nt, Artificial Sequence
  Description of Artificial Sequence: Synthetic oligonucleotide
  Antisense strand to SEQ ID NO: 52764
cauuucagcucagaccuuc

SEQ ID NO: 52846 - RNA, 19 nt, Artificial Sequence
  Description of Artificial Sequence: Synthetic oligonucleotide
  Sense strand starting at position 2500 of SEQ ID NO: 638
agccuacuaugaucugaga

SEQ ID NO: 52847 - RNA, 19 nt, Artificial Sequence
  Description of Artificial Sequence: Synthetic oligonucleotide
  Antisense strand to SEQ ID NO: 52766
ucucagaucauaguaggcu

SEQ ID NO: 52848 - RNA, 19 nt, Artificial Sequence
  Description of Artificial Sequence: Synthetic oligonucleotide
  Sense strand starting at position 2886 of SEQ ID NO: 638
gcggcuagugugagugaaa

SEQ ID NO: 52849 - RNA, 19 nt, Artificial Sequence
  Description of Artificial Sequence: Synthetic oligonucleotide
  Antisense strand to SEQ ID NO: 52768
uuucacucacacuagccgc

SEQ ID NO: 52850 - RNA, 19 nt, Artificial Sequence
  Description of Artificial Sequence: Synthetic oligonucleotide
  Sense strand starting at position 2889 of SEQ ID NO: 638
gcuagugugagugaaacaa

SEQ ID NO: 52851 - RNA, 19 nt, Artificial Sequence
  Description of Artificial Sequence: Synthetic oligonucleotide
  Antisense strand to SEQ ID NO: 52770
uuguuucacucacacuagc

SEQ ID NO: 52852 - RNA, 19 nt, Artificial Sequence
  Description of Artificial Sequence: Synthetic oligonucleotide
  Sense strand starting at position 3251 of SEQ ID NO: 638
gagccuugguccucugaga

SEQ ID NO: 52853 - RNA, 19 nt, Artificial Sequence
  Description of Artificial Sequence: Synthetic oligonucleotide
  Antisense strand to SEQ ID NO: 52772
ucucagaggaccaaggcuc

SEQ ID NO: 52854 - RNA, 19 nt, Artificial Sequence
  Description of Artificial Sequence: Synthetic oligonucleotide
  Sense strand starting at position 3295 of SEQ ID NO: 638
agaauaagugcauguguau

SEQ ID NO: 52855 - RNA, 19 nt, Artificial Sequence
  Description of Artificial Sequence: Synthetic oligonucleotide
  Antisense strand to SEQ ID NO: 52774
auacacaugcacuuauucu

SEQ ID NO: 52856 - RNA, 19 nt, Artificial Sequence
  Description of Artificial Sequence: Synthetic oligonucleotide
  Sense strand starting at position 3307 of SEQ ID NO: 638
uguguaugagggugugaga

SEQ ID NO: 52857 - RNA, 19 nt, Artificial Sequence
  Description of Artificial Sequence: Synthetic oligonucleotide
  Antisense strand to SEQ ID NO: 52776
ucucacacccucauacaca

SEQ ID NO: 52858 - RNA, 19 nt, Artificial Sequence
  Description of Artificial Sequence: Synthetic oligonucleotide
  Sense strand starting at position 3310 of SEQ ID NO: 638
guaugagggugugagauuu

SEQ ID NO: 52859 - RNA, 19 nt, Artificial Sequence
  Description of Artificial Sequence: Synthetic oligonucleotide
  Antisense strand to SEQ ID NO: 52778
aaaucucacacccucauac

SEQ ID NO: 52860 - RNA, 19 nt, Artificial Sequence
  Description of Artificial Sequence: Synthetic oligonucleotide
  Sense strand starting at position 3330 of SEQ ID NO: 638
guugaaugugcauucgugu

SEQ ID NO: 52861 - RNA, 19 nt, Artificial Sequence
  Description of Artificial Sequence: Synthetic oligonucleotide
  Antisense strand to SEQ ID NO: 52780
acacgaaugcacauucaac

SEQ ID NO: 52862 - RNA, 19 nt, Artificial Sequence
  Description of Artificial Sequence: Synthetic oligonucleotide
  Sense strand starting at position 3335 of SEQ ID NO: 638
augugcauucguguguaua

SEQ ID NO: 52863 - RNA, 19 nt, Artificial Sequence
  Description of Artificial Sequence: Synthetic oligonucleotide
  Antisense strand to SEQ ID NO: 52782
uauacacacgaaugcacau

SEQ ID NO: 52864 - RNA, 19 nt, Artificial Sequence
  Description of Artificial Sequence: Synthetic oligonucleotide
  Sense strand starting at position 3346 of SEQ ID NO: 638
uguguauagacaugagagu

SEQ ID NO: 52865 - RNA, 19 nt, Artificial Sequence
  Description of Artificial Sequence: Synthetic oligonucleotide
  Antisense strand to SEQ ID NO: 52784
acucucaugucuauacaca

SEQ ID NO: 52866 - RNA, 19 nt, Artificial Sequence
  Description of Artificial Sequence: Synthetic oligonucleotide
  Sense strand starting at position 3352 of SEQ ID NO: 638
uagacaugagaguguugau

SEQ ID NO: 52867 - RNA, 19 nt, Artificial Sequence
  Description of Artificial Sequence: Synthetic oligonucleotide
  Antisense strand to SEQ ID NO: 52786
aucaacacucucaugucua

SEQ ID NO: 52868 - RNA, 19 nt, Artificial Sequence
  Description of Artificial Sequence: Synthetic oligonucleotide
  Sense strand starting at position 3362 of SEQ ID NO: 638
aguguugauguauguauga

SEQ ID NO: 52869 - RNA, 19 nt, Artificial Sequence
  Description of Artificial Sequence: Synthetic oligonucleotide
  Antisense strand to SEQ ID NO: 52788
ucauacauacaucaacacu

SEQ ID NO: 52870 - RNA, 19 nt, Artificial Sequence
  Description of Artificial Sequence: Synthetic oligonucleotide
  Sense strand starting at position 3364 of SEQ ID NO: 638
uguugauguauguaugacu

SEQ ID NO: 52871 - RNA, 19 nt, Artificial Sequence
  Description of Artificial Sequence: Synthetic oligonucleotide
  Antisense strand to SEQ ID NO: 52790
agucauacauacaucaaca

SEQ ID NO: 52872 - RNA, 19 nt, Artificial Sequence
  Description of Artificial Sequence: Synthetic oligonucleotide
  Sense strand starting at position 3394 of SEQ ID NO: 638
uguguauggacauaagugu

SEQ ID NO: 52873 - RNA, 19 nt, Artificial Sequence
  Description of Artificial Sequence: Synthetic oligonucleotide
  Antisense strand to SEQ ID NO: 52792
acacuuauguccauacaca

SEQ ID NO: 52874 - RNA, 19 nt, Artificial Sequence
  Description of Artificial Sequence: Synthetic oligonucleotide
  Sense strand starting at position 3726 of SEQ ID NO: 638
ugguauauguguguauaag

SEQ ID NO: 52875 - RNA, 19 nt, Artificial Sequence
  Description of Artificial Sequence: Synthetic oligonucleotide
  Antisense strand to SEQ ID NO: 52794
cuuauacacacauauacca

SEQ ID NO: 52876 - RNA, 19 nt, Artificial Sequence
  Description of Artificial Sequence: Synthetic oligonucleotide
  Sense strand starting at position 3727 of SEQ ID NO: 638
gguauauguguguauaagu

SEQ ID NO: 52877 - RNA, 19 nt, Artificial Sequence
  Description of Artificial Sequence: Synthetic oligonucleotide
  Antisense strand to SEQ ID NO: 52796
acuuauacacacauauacc

SEQ ID NO: 52878 - RNA, 19 nt, Artificial Sequence
  Description of Artificial Sequence: Synthetic oligonucleotide
  Sense strand starting at position 3810 of SEQ ID NO: 638
uguggaugugucuagaugu

SEQ ID NO: 52879 - RNA, 19 nt, Artificial Sequence
  Description of Artificial Sequence: Synthetic oligonucleotide
  Antisense strand to SEQ ID NO: 52798
acaucuagacacauccaca

SEQ ID NO: 52880 - RNA, 19 nt, Artificial Sequence
  Description of Artificial Sequence: Synthetic oligonucleotide
  Sense strand starting at position 3820 of SEQ ID NO: 638
ucuagauguguguaugagu

SEQ ID NO: 52881 - RNA, 19 nt, Artificial Sequence
  Description of Artificial Sequence: Synthetic oligonucleotide
  Antisense strand to SEQ ID NO: 52800
acucauacacacaucuaga

SEQ ID NO: 52882 - RNA, 19 nt, Artificial Sequence
  Description of Artificial Sequence: Synthetic oligonucleotide
  Sense strand starting at position 3849 of SEQ ID NO: 638
gugugagagauuuguguau

SEQ ID NO: 52883 - RNA, 19 nt, Artificial Sequence
  Description of Artificial Sequence: Synthetic oligonucleotide
  Antisense strand to SEQ ID NO: 52802
auacacaaaucucucacac

SEQ ID NO: 52884 - RNA, 19 nt, Artificial Sequence
  Description of Artificial Sequence: Synthetic oligonucleotide
  Sense strand starting at position 3881 of SEQ ID NO: 638
uguggauuuguguaugcau

SEQ ID NO: 52885 - RNA, 19 nt, Artificial Sequence
  Description of Artificial Sequence: Synthetic oligonucleotide
  Antisense strand to SEQ ID NO: 52804
augcauacacaaauccaca

SEQ ID NO: 52886 - RNA, 19 nt, Artificial Sequence
  Description of Artificial Sequence: Synthetic oligonucleotide
  Sense strand starting at position 3883 of SEQ ID NO: 638
uggauuuguguaugcaugu

SEQ ID NO: 52887 - RNA, 19 nt, Artificial Sequence
  Description of Artificial Sequence: Synthetic oligonucleotide
  Antisense strand to SEQ ID NO: 52806
acaugcauacacaaaucca

SEQ ID NO: 52888 - RNA, 19 nt, Artificial Sequence
  Description of Artificial Sequence: Synthetic oligonucleotide
  Sense strand starting at position 3884 of SEQ ID NO: 638
ggauuuguguaugcaugua

SEQ ID NO: 52889 - RNA, 19 nt, Artificial Sequence
  Description of Artificial Sequence: Synthetic oligonucleotide
  Antisense strand to SEQ ID NO: 52808
uacaugcauacacaaaucc

SEQ ID NO: 52890 - RNA, 19 nt, Artificial Sequence
  Description of Artificial Sequence: Synthetic oligonucleotide
  Sense strand starting at position 3899 of SEQ ID NO: 638
uguauuugugagugugcca

SEQ ID NO: 52891 - RNA, 19 nt, Artificial Sequence
  Description of Artificial Sequence: Synthetic oligonucleotide
  Antisense strand to SEQ ID NO: 52810
uggcacacucacaaauaca

SEQ ID NO: 52892 - RNA, 19 nt, Artificial Sequence
  Description of Artificial Sequence: Synthetic oligonucleotide
  Sense strand starting at position 3935 of SEQ ID NO: 638
ggagucagcccaugaguuu

SEQ ID NO: 52893 - RNA, 19 nt, Artificial Sequence
  Description of Artificial Sequence: Synthetic oligonucleotide
  Antisense strand to SEQ ID NO: 52812
aaacucaugggcugacucc

SEQ ID NO: 52894 - RNA, 19 nt, Artificial Sequence
  Description of Artificial Sequence: Synthetic oligonucleotide
  Sense strand starting at position 3942 of SEQ ID NO: 638
gcccaugaguuucugaaca

SEQ ID NO: 52895 - RNA, 19 nt, Artificial Sequence
  Description of Artificial Sequence: Synthetic oligonucleotide
  Antisense strand to SEQ ID NO: 52814
uguucagaaacucaugggc

SEQ ID NO: 52896 - RNA, 19 nt, Artificial Sequence
  Description of Artificial Sequence: Synthetic oligonucleotide
  Sense strand starting at position 3947 of SEQ ID NO: 638
ugaguuucugaacaaguua

SEQ ID NO: 52897 - RNA, 19 nt, Artificial Sequence
  Description of Artificial Sequence: Synthetic oligonucleotide
  Antisense strand to SEQ ID NO: 52816
uaacuuguucagaaacuca

SEQ ID NO: 52898 - RNA, 19 nt, Artificial Sequence
  Description of Artificial Sequence: Synthetic oligonucleotide
  Sense strand starting at position 3727 of SEQ ID NO: 639
gaacuuauuuguguuacgu

SEQ ID NO: 52899 - RNA, 19 nt, Artificial Sequence
  Description of Artificial Sequence: Synthetic oligonucleotide
  Antisense strand to SEQ ID NO: 52818
acguaacacaaauaaguuc

SEQ ID NO: 52900 - RNA, 19 nt, Artificial Sequence
  Description of Artificial Sequence: Synthetic oligonucleotide
  Sense strand starting at position 3715 of SEQ ID NO: 639
guugucuaucuggaacuua

SEQ ID NO: 52901 - RNA, 19 nt, Artificial Sequence
  Description of Artificial Sequence: Synthetic oligonucleotide
  Antisense strand to SEQ ID NO: 52820
uaaguuccagauagacaac

SEQ ID NO: 52902 - RNA, 19 nt, Artificial Sequence
  Description of Artificial Sequence: Synthetic oligonucleotide
  Sense strand starting at position 3712 of SEQ ID NO: 639
aaaguugucuaucuggaac

SEQ ID NO: 52903 - RNA, 19 nt, Artificial Sequence
  Description of Artificial Sequence: Synthetic oligonucleotide
  Antisense strand to SEQ ID NO: 52822
guuccagauagacaacuuu

SEQ ID NO: 52904 - RNA, 19 nt, Artificial Sequence
  Description of Artificial Sequence: Synthetic oligonucleotide
  Sense strand starting at position 3677 of SEQ ID NO: 639
ggagauguguguccaguuu

SEQ ID NO: 52905 - RNA, 19 nt, Artificial Sequence
  Description of Artificial Sequence: Synthetic oligonucleotide
  Antisense strand to SEQ ID NO: 52824
aaacuggacacacaucucc

SEQ ID NO: 52906 - RNA, 19 nt, Artificial Sequence
  Description of Artificial Sequence: Synthetic oligonucleotide
  Sense strand starting at position 3675 of SEQ ID NO: 639
guggagauguguguccagu

SEQ ID NO: 52907 - RNA, 19 nt, Artificial Sequence
  Description of Artificial Sequence: Synthetic oligonucleotide
  Antisense strand to SEQ ID NO: 52826
acuggacacacaucuccac

SEQ ID NO: 52908 - RNA, 19 nt, Artificial Sequence
  Description of Artificial Sequence: Synthetic oligonucleotide
  Sense strand starting at position 3509 of SEQ ID NO: 639
agcagauacuagcuagaaa

SEQ ID NO: 52909 - RNA, 19 nt, Artificial Sequence
  Description of Artificial Sequence: Synthetic oligonucleotide
  Antisense strand to SEQ ID NO: 52828
uuucuagcuaguaucugcu

SEQ ID NO: 52910 - RNA, 19 nt, Artificial Sequence
  Description of Artificial Sequence: Synthetic oligonucleotide
  Sense strand starting at position 3482 of SEQ ID NO: 639
ugagacuccugugaccaga

SEQ ID NO: 52911 - RNA, 19 nt, Artificial Sequence
  Description of Artificial Sequence: Synthetic oligonucleotide
  Antisense strand to SEQ ID NO: 52830
ucuggucacaggagucuca

SEQ ID NO: 52912 - RNA, 19 nt, Artificial Sequence
  Description of Artificial Sequence: Synthetic oligonucleotide
  Sense strand starting at position 3481 of SEQ ID NO: 639
gugagacuccugugaccag

SEQ ID NO: 52913 - RNA, 19 nt, Artificial Sequence
  Description of Artificial Sequence: Synthetic oligonucleotide
  Antisense strand to SEQ ID NO: 52832
cuggucacaggagucucac

SEQ ID NO: 52914 - RNA, 19 nt, Artificial Sequence
  Description of Artificial Sequence: Synthetic oligonucleotide
  Sense strand starting at position 3459 of SEQ ID NO: 639
gguggacugccucacugau

SEQ ID NO: 52915 - RNA, 19 nt, Artificial Sequence
  Description of Artificial Sequence: Synthetic oligonucleotide
  Antisense strand to SEQ ID NO: 52834
aucagugaggcaguccacc

SEQ ID NO: 52916 - RNA, 19 nt, Artificial Sequence
  Description of Artificial Sequence: Synthetic oligonucleotide
  Sense strand starting at position 3421 of SEQ ID NO: 639
ggaagacaguuccauagga

SEQ ID NO: 52917 - RNA, 19 nt, Artificial Sequence
  Description of Artificial Sequence: Synthetic oligonucleotide
  Antisense strand to SEQ ID NO: 52836
uccuauggaacugucuucc

SEQ ID NO: 52918 - RNA, 19 nt, Artificial Sequence
  Description of Artificial Sequence: Synthetic oligonucleotide
  Sense strand starting at position 3329 of SEQ ID NO: 639
gguugaaugcuagagaggu

SEQ ID NO: 52919 - RNA, 19 nt, Artificial Sequence
  Description of Artificial Sequence: Synthetic oligonucleotide
  Antisense strand to SEQ ID NO: 52838
accucucuagcauucaacc

SEQ ID NO: 52920 - RNA, 19 nt, Artificial Sequence
  Description of Artificial Sequence: Synthetic oligonucleotide
  Sense strand starting at position 3301 of SEQ ID NO: 639
gccaucauuugccuuagau

SEQ ID NO: 52921 - RNA, 19 nt, Artificial Sequence
  Description of Artificial Sequence: Synthetic oligonucleotide
  Antisense strand to SEQ ID NO: 52840
aucuaaggcaaaugauggc

SEQ ID NO: 52922 - RNA, 19 nt, Artificial Sequence
  Description of Artificial Sequence: Synthetic oligonucleotide
  Sense strand starting at position 3300 of SEQ ID NO: 639
ggccaucauuugccuuaga

SEQ ID NO: 52923 - RNA, 19 nt, Artificial Sequence
  Description of Artificial Sequence: Synthetic oligonucleotide
  Antisense strand to SEQ ID NO: 52842
ucuaaggcaaaugauggcc

SEQ ID NO: 52924 - RNA, 19 nt, Artificial Sequence
  Description of Artificial Sequence: Synthetic oligonucleotide
  Sense strand starting at position 3227 of SEQ ID NO: 639
auaaacucgcuccaguuua

SEQ ID NO: 52925 - RNA, 19 nt, Artificial Sequence
  Description of Artificial Sequence: Synthetic oligonucleotide
  Antisense strand to SEQ ID NO: 52844
uaaacuggagcgaguuuau

SEQ ID NO: 52926 - RNA, 19 nt, Artificial Sequence
  Description of Artificial Sequence: Synthetic oligonucleotide
  Sense strand starting at position 3224 of SEQ ID NO: 639
uuuauaaacucgcuccagu

SEQ ID NO: 52927 - RNA, 19 nt, Artificial Sequence
  Description of Artificial Sequence: Synthetic oligonucleotide
  Antisense strand to SEQ ID NO: 52846
acuggagcgaguuuauaaa

SEQ ID NO: 52928 - RNA, 19 nt, Artificial Sequence
  Description of Artificial Sequence: Synthetic oligonucleotide
  Sense strand starting at position 3200 of SEQ ID NO: 639
ugagucagacccugcucua

SEQ ID NO: 52929 - RNA, 19 nt, Artificial Sequence
  Description of Artificial Sequence: Synthetic oligonucleotide
  Antisense strand to SEQ ID NO: 52848
uagagcagggucugacuca

SEQ ID NO: 52930 - RNA, 19 nt, Artificial Sequence
  Description of Artificial Sequence: Synthetic oligonucleotide
  Sense strand starting at position 3188 of SEQ ID NO: 639
gaacaugugcccugaguca

SEQ ID NO: 52931 - RNA, 19 nt, Artificial Sequence
  Description of Artificial Sequence: Synthetic oligonucleotide
  Antisense strand to SEQ ID NO: 52850
ugacucagggcacauguuc

SEQ ID NO: 52932 - RNA, 19 nt, Artificial Sequence
  Description of Artificial Sequence: Synthetic oligonucleotide
  Sense strand starting at position 3186 of SEQ ID NO: 639
gggaacaugugcccugagu

SEQ ID NO: 52933 - RNA, 19 nt, Artificial Sequence
  Description of Artificial Sequence: Synthetic oligonucleotide
  Antisense strand to SEQ ID NO: 52852
acucagggcacauguuccc

SEQ ID NO: 52934 - RNA, 19 nt, Artificial Sequence
  Description of Artificial Sequence: Synthetic oligonucleotide
  Sense strand starting at position 3156 of SEQ ID NO: 639
gaaguuacauaggaugaga

SEQ ID NO: 52935 - RNA, 19 nt, Artificial Sequence
  Description of Artificial Sequence: Synthetic oligonucleotide
  Antisense strand to SEQ ID NO: 52854
ucucauccuauguaacuuc

SEQ ID NO: 52936 - RNA, 19 nt, Artificial Sequence
  Description of Artificial Sequence: Synthetic oligonucleotide
  Sense strand starting at position 3144 of SEQ ID NO: 639
gagccauggcuggaaguua

SEQ ID NO: 52937 - RNA, 19 nt, Artificial Sequence
  Description of Artificial Sequence: Synthetic oligonucleotide
  Antisense strand to SEQ ID NO: 52856
uaacuuccagccauggcuc

SEQ ID NO: 52938 - RNA, 19 nt, Artificial Sequence
  Description of Artificial Sequence: Synthetic oligonucleotide
  Sense strand starting at position 3038 of SEQ ID NO: 639
gagcaagugccugauugcu

SEQ ID NO: 52939 - RNA, 19 nt, Artificial Sequence
  Description of Artificial Sequence: Synthetic oligonucleotide
  Antisense strand to SEQ ID NO: 52858
agcaaucaggcacuugcuc

SEQ ID NO: 52940 - RNA, 19 nt, Artificial Sequence
  Description of Artificial Sequence: Synthetic oligonucleotide
  Sense strand starting at position 2804 of SEQ ID NO: 639
ggacuaucauucccugcuu

SEQ ID NO: 52941 - RNA, 19 nt, Artificial Sequence
  Description of Artificial Sequence: Synthetic oligonucleotide
  Antisense strand to SEQ ID NO: 52860
aagcagggaaugauagucc

SEQ ID NO: 52942 - RNA, 19 nt, Artificial Sequence
  Description of Artificial Sequence: Synthetic oligonucleotide
  Sense strand starting at position 2782 of SEQ ID NO: 639
gggagcuguuauccaguga

SEQ ID NO: 52943 - RNA, 19 nt, Artificial Sequence
  Description of Artificial Sequence: Synthetic oligonucleotide
  Antisense strand to SEQ ID NO: 52862
ucacuggauaacagcuccc

SEQ ID NO: 52944 - RNA, 19 nt, Artificial Sequence
  Description of Artificial Sequence: Synthetic oligonucleotide
  Sense strand starting at position 2776 of SEQ ID NO: 639
ggucaugggagcuguuauc

SEQ ID NO: 52945 - RNA, 19 nt, Artificial Sequence
  Description of Artificial Sequence: Synthetic oligonucleotide
  Antisense strand to SEQ ID NO: 52864
gauaacagcucccaugacc

SEQ ID NO: 52946 - RNA, 19 nt, Artificial Sequence
  Description of Artificial Sequence: Synthetic oligonucleotide
  Sense strand starting at position 2649 of SEQ ID NO: 639
ucuuaagcucucugagucu

SEQ ID NO: 52947 - RNA, 19 nt, Artificial Sequence
  Description of Artificial Sequence: Synthetic oligonucleotide
  Antisense strand to SEQ ID NO: 52866
agacucagagagcuuaaga

SEQ ID NO: 52948 - RNA, 19 nt, Artificial Sequence
  Description of Artificial Sequence: Synthetic oligonucleotide
  Sense strand starting at position 2307 of SEQ ID NO: 639
gggauucccucuguggaca

SEQ ID NO: 52949 - RNA, 19 nt, Artificial Sequence
  Description of Artificial Sequence: Synthetic oligonucleotide
  Antisense strand to SEQ ID NO: 52868
uguccacagagggaauccc

SEQ ID NO: 52950 - RNA, 19 nt, Artificial Sequence
  Description of Artificial Sequence: Synthetic oligonucleotide
  Sense strand starting at position 676 of SEQ ID NO: 639
agcucuggucccuggacau

SEQ ID NO: 52951 - RNA, 19 nt, Artificial Sequence
  Description of Artificial Sequence: Synthetic oligonucleotide
  Antisense strand to SEQ ID NO: 52870
auguccagggaccagagcu

SEQ ID NO: 52952 - RNA, 19 nt, Artificial Sequence
  Description of Artificial Sequence: Synthetic oligonucleotide
  Sense strand starting at position 635 of SEQ ID NO: 639
ucgcuuacaccuggaaguu

SEQ ID NO: 52953 - RNA, 19 nt, Artificial Sequence
  Description of Artificial Sequence: Synthetic oligonucleotide
  Antisense strand to SEQ ID NO: 52872
aacuuccagguguaagcga

SEQ ID NO: 52954 - RNA, 19 nt, Artificial Sequence
  Description of Artificial Sequence: Synthetic oligonucleotide
  Sense strand starting at position 585 of SEQ ID NO: 639
gcagaugugugaucugucu

SEQ ID NO: 52955 - RNA, 19 nt, Artificial Sequence
  Description of Artificial Sequence: Synthetic oligonucleotide
  Antisense strand to SEQ ID NO: 52874
agacagaucacacaucugc

SEQ ID NO: 52956 - RNA, 19 nt, Artificial Sequence
  Description of Artificial Sequence: Synthetic oligonucleotide
  Sense strand starting at position 504 of SEQ ID NO: 639
cugggucacaagugugaau

SEQ ID NO: 52957 - RNA, 19 nt, Artificial Sequence
  Description of Artificial Sequence: Synthetic oligonucleotide
  Antisense strand to SEQ ID NO: 52876
auucacacuugugacccag

SEQ ID NO: 52958 - RNA, 19 nt, Artificial Sequence
  Description of Artificial Sequence: Synthetic oligonucleotide
  Sense strand starting at position 408 of SEQ ID NO: 639
guuugugcucaugcauacu

SEQ ID NO: 52959 - RNA, 19 nt, Artificial Sequence
  Description of Artificial Sequence: Synthetic oligonucleotide
  Antisense strand to SEQ ID NO: 52878
aguaugcaugagcacaaac

SEQ ID NO: 52960 - RNA, 19 nt, Artificial Sequence
  Description of Artificial Sequence: Synthetic oligonucleotide
  Sense strand starting at position 382 of SEQ ID NO: 639
gcaucuguacgugcaugua

SEQ ID NO: 52961 - RNA, 19 nt, Artificial Sequence
  Description of Artificial Sequence: Synthetic oligonucleotide
  Antisense strand to SEQ ID NO: 52880
uacaugcacguacagaugc

SEQ ID NO: 52962 - RNA, 19 nt, Artificial Sequence
  Description of Artificial Sequence: Synthetic oligonucleotide
  Sense strand starting at position 338 of SEQ ID NO: 639
ugauguauauauguagaca

SEQ ID NO: 52963 - RNA, 19 nt, Artificial Sequence
  Description of Artificial Sequence: Synthetic oligonucleotide
  Antisense strand to SEQ ID NO: 52882
ugucuacauauauacauca

SEQ ID NO: 52964 - RNA, 19 nt, Artificial Sequence
  Description of Artificial Sequence: Synthetic oligonucleotide
  Sense strand starting at position 335 of SEQ ID NO: 639
gugugauguauauauguag

SEQ ID NO: 52965 - RNA, 19 nt, Artificial Sequence
  Description of Artificial Sequence: Synthetic oligonucleotide
  Antisense strand to SEQ ID NO: 52884
cuacauauauacaucacac

SEQ ID NO: 52966 - RNA, 19 nt, Artificial Sequence
  Description of Artificial Sequence: Synthetic oligonucleotide
  Sense strand starting at position 333 of SEQ ID NO: 639
uggugugauguauauaugu

SEQ ID NO: 52967 - RNA, 19 nt, Artificial Sequence
  Description of Artificial Sequence: Synthetic oligonucleotide
  Antisense strand to SEQ ID NO: 52886
acauauauacaucacacca

SEQ ID NO: 52968 - RNA, 19 nt, Artificial Sequence
  Description of Artificial Sequence: Synthetic oligonucleotide
  Sense strand starting at position 331 of SEQ ID NO: 639
uguggugugauguauauau

SEQ ID NO: 52969 - RNA, 19 nt, Artificial Sequence
  Description of Artificial Sequence: Synthetic oligonucleotide
  Antisense strand to SEQ ID NO: 52888
auauauacaucacaccaca

SEQ ID NO: 52970 - RNA, 19 nt, Artificial Sequence
  Description of Artificial Sequence: Synthetic oligonucleotide
  Sense strand starting at position 326 of SEQ ID NO: 639
acauauguggugugaugua

SEQ ID NO: 52971 - RNA, 19 nt, Artificial Sequence
  Description of Artificial Sequence: Synthetic oligonucleotide
  Antisense strand to SEQ ID NO: 52890
uacaucacaccacauaugu

SEQ ID NO: 52972 - RNA, 19 nt, Artificial Sequence
  Description of Artificial Sequence: Synthetic oligonucleotide
  Sense strand starting at position 285 of SEQ ID NO: 639
caugcauuuccgugggcau

SEQ ID NO: 52973 - RNA, 19 nt, Artificial Sequence
  Description of Artificial Sequence: Synthetic oligonucleotide
  Antisense strand to SEQ ID NO: 52892
augcccacggaaaugcaug

SEQ ID NO: 52974 - RNA, 19 nt, Artificial Sequence
  Description of Artificial Sequence: Synthetic oligonucleotide
  Sense strand starting at position 140 of SEQ ID NO: 639
gaaccugugccuuguuaca

SEQ ID NO: 52975 - RNA, 19 nt, Artificial Sequence
  Description of Artificial Sequence: Synthetic oligonucleotide
  Antisense strand to SEQ ID NO: 52894
uguaacaaggcacagguuc

SEQ ID NO: 52976 - RNA, 19 nt, Artificial Sequence
  Description of Artificial Sequence: Synthetic oligonucleotide
  Sense strand starting at position 138 of SEQ ID NO: 639
gggaaccugugccuuguua

SEQ ID NO: 52977 - RNA, 19 nt, Artificial Sequence
  Description of Artificial Sequence: Synthetic oligonucleotide
  Antisense strand to SEQ ID NO: 52896
uaacaaggcacagguuccc

SEQ ID NO: 52978 - RNA, 19 nt, Artificial Sequence
  Description of Artificial Sequence: Synthetic oligonucleotide
  Sense strand starting at position 3935 of SEQ ID NO: 640
gacucugcuuuauugagga

SEQ ID NO: 52979 - RNA, 19 nt, Artificial Sequence
  Description of Artificial Sequence: Synthetic oligonucleotide
  Antisense strand to SEQ ID NO: 52898
uccucaauaaagcagaguc

SEQ ID NO: 52980 - RNA, 19 nt, Artificial Sequence
  Description of Artificial Sequence: Synthetic oligonucleotide
  Sense strand starting at position 3933 of SEQ ID NO: 640
gugacucugcuuuauugag

SEQ ID NO: 52981 - RNA, 19 nt, Artificial Sequence
  Description of Artificial Sequence: Synthetic oligonucleotide
  Antisense strand to SEQ ID NO: 52900
cucaauaaagcagagucac

SEQ ID NO: 52982 - RNA, 19 nt, Artificial Sequence
  Description of Artificial Sequence: Synthetic oligonucleotide
  Sense strand starting at position 3931 of SEQ ID NO: 640
cagugacucugcuuuauug

SEQ ID NO: 52983 - RNA, 19 nt, Artificial Sequence
  Description of Artificial Sequence: Synthetic oligonucleotide
  Antisense strand to SEQ ID NO: 52902
caauaaagcagagucacug

SEQ ID NO: 52984 - RNA, 19 nt, Artificial Sequence
  Description of Artificial Sequence: Synthetic oligonucleotide
  Sense strand starting at position 3929 of SEQ ID NO: 640
accagugacucugcuuuau

SEQ ID NO: 52985 - RNA, 19 nt, Artificial Sequence
  Description of Artificial Sequence: Synthetic oligonucleotide
  Antisense strand to SEQ ID NO: 52904
auaaagcagagucacuggu

SEQ ID NO: 52986 - RNA, 19 nt, Artificial Sequence
  Description of Artificial Sequence: Synthetic oligonucleotide
  Sense strand starting at position 3818 of SEQ ID NO: 640
uauuauguacugugcagau

SEQ ID NO: 52987 - RNA, 19 nt, Artificial Sequence
  Description of Artificial Sequence: Synthetic oligonucleotide
  Antisense strand to SEQ ID NO: 52906
aucugcacaguacauaaua

SEQ ID NO: 52988 - RNA, 19 nt, Artificial Sequence
  Description of Artificial Sequence: Synthetic oligonucleotide
  Sense strand starting at position 3646 of SEQ ID NO: 640
ucaguucuugccugucaga

SEQ ID NO: 52989 - RNA, 19 nt, Artificial Sequence
  Description of Artificial Sequence: Synthetic oligonucleotide
  Antisense strand to SEQ ID NO: 52908
ucugacaggcaagaacuga

SEQ ID NO: 52990 - RNA, 19 nt, Artificial Sequence
  Description of Artificial Sequence: Synthetic oligonucleotide
  Sense strand starting at position 3537 of SEQ ID NO: 640
guuccuauuugagugagca

SEQ ID NO: 52991 - RNA, 19 nt, Artificial Sequence
  Description of Artificial Sequence: Synthetic oligonucleotide
  Antisense strand to SEQ ID NO: 52910
ugcucacucaaauaggaac

SEQ ID NO: 52992 - RNA, 19 nt, Artificial Sequence
  Description of Artificial Sequence: Synthetic oligonucleotide
  Sense strand starting at position 3534 of SEQ ID NO: 640
accguuccuauuugaguga

SEQ ID NO: 52993 - RNA, 19 nt, Artificial Sequence
  Description of Artificial Sequence: Synthetic oligonucleotide
  Antisense strand to SEQ ID NO: 52912
ucacucaaauaggaacggu

SEQ ID NO: 52994 - RNA, 19 nt, Artificial Sequence
  Description of Artificial Sequence: Synthetic oligonucleotide
  Sense strand starting at position 3367 of SEQ ID NO: 640
aguugaaaugggugucauc

SEQ ID NO: 52995 - RNA, 19 nt, Artificial Sequence
  Description of Artificial Sequence: Synthetic oligonucleotide
  Antisense strand to SEQ ID NO: 52914
gaugacacccauuucaacu

SEQ ID NO: 52996 - RNA, 19 nt, Artificial Sequence
  Description of Artificial Sequence: Synthetic oligonucleotide
  Sense strand starting at position 3318 of SEQ ID NO: 640
ccaucuaagguuuggaaag

SEQ ID NO: 52997 - RNA, 19 nt, Artificial Sequence
  Description of Artificial Sequence: Synthetic oligonucleotide
  Antisense strand to SEQ ID NO: 52916
cuuuccaaaccuuagaugg

SEQ ID NO: 52998 - RNA, 19 nt, Artificial Sequence
  Description of Artificial Sequence: Synthetic oligonucleotide
  Sense strand starting at position 3194 of SEQ ID NO: 640
gcaguuuaagucuaugcua

SEQ ID NO: 52999 - RNA, 19 nt, Artificial Sequence
  Description of Artificial Sequence: Synthetic oligonucleotide
  Antisense strand to SEQ ID NO: 52918
uagcauagacuuaaacugc

SEQ ID NO: 53000 - RNA, 19 nt, Artificial Sequence
  Description of Artificial Sequence: Synthetic oligonucleotide
  Sense strand starting at position 3181 of SEQ ID NO: 640
guuuaagucgaaggcaguu

SEQ ID NO: 53001 - RNA, 19 nt, Artificial Sequence
  Description of Artificial Sequence: Synthetic oligonucleotide
  Antisense strand to SEQ ID NO: 52920
aacugccuucgacuuaaac

SEQ ID NO: 53002 - RNA, 19 nt, Artificial Sequence
  Description of Artificial Sequence: Synthetic oligonucleotide
  Sense strand starting at position 3180 of SEQ ID NO: 640
gguuuaagucgaaggcagu

SEQ ID NO: 53003 - RNA, 19 nt, Artificial Sequence
  Description of Artificial Sequence: Synthetic oligonucleotide
  Antisense strand to SEQ ID NO: 52922
acugccuucgacuuaaacc

SEQ ID NO: 53004 - RNA, 19 nt, Artificial Sequence
  Description of Artificial Sequence: Synthetic oligonucleotide
  Sense strand starting at position 3178 of SEQ ID NO: 640
gugguuuaagucgaaggca

SEQ ID NO: 53005 - RNA, 19 nt, Artificial Sequence
  Description of Artificial Sequence: Synthetic oligonucleotide
  Antisense strand to SEQ ID NO: 52924
ugccuucgacuuaaaccac

SEQ ID NO: 53006 - RNA, 19 nt, Artificial Sequence
  Description of Artificial Sequence: Synthetic oligonucleotide
  Sense strand starting at position 3136 of SEQ ID NO: 640
ggaacucuguggagugagu

SEQ ID NO: 53007 - RNA, 19 nt, Artificial Sequence
  Description of Artificial Sequence: Synthetic oligonucleotide
  Antisense strand to SEQ ID NO: 52926
acucacuccacagaguucc

SEQ ID NO: 53008 - RNA, 19 nt, Artificial Sequence
  Description of Artificial Sequence: Synthetic oligonucleotide
  Sense strand starting at position 2893 of SEQ ID NO: 640
guggaauggaccugucugu

SEQ ID NO: 53009 - RNA, 19 nt, Artificial Sequence
  Description of Artificial Sequence: Synthetic oligonucleotide
  Antisense strand to SEQ ID NO: 52928
acagacagguccauuccac

SEQ ID NO: 53010 - RNA, 19 nt, Artificial Sequence
  Description of Artificial Sequence: Synthetic oligonucleotide
  Sense strand starting at position 2844 of SEQ ID NO: 640
aaggaaguccaugggugaa

SEQ ID NO: 53011 - RNA, 19 nt, Artificial Sequence
  Description of Artificial Sequence: Synthetic oligonucleotide
  Antisense strand to SEQ ID NO: 52930
uucacccauggacuuccuu

SEQ ID NO: 53012 - RNA, 19 nt, Artificial Sequence
  Description of Artificial Sequence: Synthetic oligonucleotide
  Sense strand starting at position 2843 of SEQ ID NO: 640
gaaggaaguccauggguga

SEQ ID NO: 53013 - RNA, 19 nt, Artificial Sequence
  Description of Artificial Sequence: Synthetic oligonucleotide
  Antisense strand to SEQ ID NO: 52932
ucacccauggacuuccuuc

SEQ ID NO: 53014 - RNA, 19 nt, Artificial Sequence
  Description of Artificial Sequence: Synthetic oligonucleotide
  Sense strand starting at position 2778 of SEQ ID NO: 640
cuaugucuguauuagauuu

SEQ ID NO: 53015 - RNA, 19 nt, Artificial Sequence
  Description of Artificial Sequence: Synthetic oligonucleotide
  Antisense strand to SEQ ID NO: 52934
aaaucuaauacagacauag

SEQ ID NO: 53016 - RNA, 19 nt, Artificial Sequence
  Description of Artificial Sequence: Synthetic oligonucleotide
  Sense strand starting at position 2775 of SEQ ID NO: 640
cgucuaugucuguauuaga

SEQ ID NO: 53017 - RNA, 19 nt, Artificial Sequence
  Description of Artificial Sequence: Synthetic oligonucleotide
  Antisense strand to SEQ ID NO: 52936
ucuaauacagacauagacg

SEQ ID NO: 53018 - RNA, 19 nt, Artificial Sequence
  Description of Artificial Sequence: Synthetic oligonucleotide
  Sense strand starting at position 2770 of SEQ ID NO: 640
agacucgucuaugucugua

SEQ ID NO: 53019 - RNA, 19 nt, Artificial Sequence
  Description of Artificial Sequence: Synthetic oligonucleotide
  Antisense strand to SEQ ID NO: 52938
uacagacauagacgagucu

SEQ ID NO: 53020 - RNA, 19 nt, Artificial Sequence
  Description of Artificial Sequence: Synthetic oligonucleotide
  Sense strand starting at position 2767 of SEQ ID NO: 640
ugcagacucgucuaugucu

SEQ ID NO: 53021 - RNA, 19 nt, Artificial Sequence
  Description of Artificial Sequence: Synthetic oligonucleotide
  Antisense strand to SEQ ID NO: 52940
agacauagacgagucugca

SEQ ID NO: 53022 - RNA, 19 nt, Artificial Sequence
  Description of Artificial Sequence: Synthetic oligonucleotide
  Sense strand starting at position 2765 of SEQ ID NO: 640
acugcagacucgucuaugu

SEQ ID NO: 53023 - RNA, 19 nt, Artificial Sequence
  Description of Artificial Sequence: Synthetic oligonucleotide
  Antisense strand to SEQ ID NO: 52942
acauagacgagucugcagu

SEQ ID NO: 53024 - RNA, 19 nt, Artificial Sequence
  Description of Artificial Sequence: Synthetic oligonucleotide
  Sense strand starting at position 2275 of SEQ ID NO: 640
guggcuccuccagauaaag

SEQ ID NO: 53025 - RNA, 19 nt, Artificial Sequence
  Description of Artificial Sequence: Synthetic oligonucleotide
  Antisense strand to SEQ ID NO: 52944
cuuuaucuggaggagccac

SEQ ID NO: 53026 - RNA, 19 nt, Artificial Sequence
  Description of Artificial Sequence: Synthetic oligonucleotide
  Sense strand starting at position 1549 of SEQ ID NO: 640
uacaaagccucggcaagau

SEQ ID NO: 53027 - RNA, 19 nt, Artificial Sequence
  Description of Artificial Sequence: Synthetic oligonucleotide
  Antisense strand to SEQ ID NO: 52946
aucuugccgaggcuuugua

SEQ ID NO: 53028 - RNA, 19 nt, Artificial Sequence
  Description of Artificial Sequence: Synthetic oligonucleotide
  Sense strand starting at position 794 of SEQ ID NO: 640
acuguaaagugguuugaaa

SEQ ID NO: 53029 - RNA, 19 nt, Artificial Sequence
  Description of Artificial Sequence: Synthetic oligonucleotide
  Antisense strand to SEQ ID NO: 52948
uuucaaaccacuuuacagu

SEQ ID NO: 53030 - RNA, 19 nt, Artificial Sequence
  Description of Artificial Sequence: Synthetic oligonucleotide
  Sense strand starting at position 769 of SEQ ID NO: 640
gcguauagugcgaaguacu

SEQ ID NO: 53031 - RNA, 19 nt, Artificial Sequence
  Description of Artificial Sequence: Synthetic oligonucleotide
  Antisense strand to SEQ ID NO: 52950
aguacuucgcacuauacgc

SEQ ID NO: 53032 - RNA, 19 nt, Artificial Sequence
  Description of Artificial Sequence: Synthetic oligonucleotide
  Sense strand starting at position 760 of SEQ ID NO: 640
cagagagcugcguauagug

SEQ ID NO: 53033 - RNA, 19 nt, Artificial Sequence
  Description of Artificial Sequence: Synthetic oligonucleotide
  Antisense strand to SEQ ID NO: 52952
cacuauacgcagcucucug

SEQ ID NO: 53034 - RNA, 19 nt, Artificial Sequence
  Description of Artificial Sequence: Synthetic oligonucleotide
  Sense strand starting at position 720 of SEQ ID NO: 640
cuuaaaguaccuugucaac

SEQ ID NO: 53035 - RNA, 19 nt, Artificial Sequence
  Description of Artificial Sequence: Synthetic oligonucleotide
  Antisense strand to SEQ ID NO: 52954
guugacaagguacuuuaag

SEQ ID NO: 53036 - RNA, 19 nt, Artificial Sequence
  Description of Artificial Sequence: Synthetic oligonucleotide
  Sense strand starting at position 710 of SEQ ID NO: 640
cuuuguaaagcuuaaagua

SEQ ID NO: 53037 - RNA, 19 nt, Artificial Sequence
  Description of Artificial Sequence: Synthetic oligonucleotide
  Antisense strand to SEQ ID NO: 52956
uacuuuaagcuuuacaaag

SEQ ID NO: 53038 - RNA, 19 nt, Artificial Sequence
  Description of Artificial Sequence: Synthetic oligonucleotide
  Sense strand starting at position 701 of SEQ ID NO: 640
gggaaagcacuuuguaaag

SEQ ID NO: 53039 - RNA, 19 nt, Artificial Sequence
  Description of Artificial Sequence: Synthetic oligonucleotide
  Antisense strand to SEQ ID NO: 52958
cuuuacaaagugcuuuccc

SEQ ID NO: 53040 - RNA, 19 nt, Artificial Sequence
  Description of Artificial Sequence: Synthetic oligonucleotide
  Sense strand starting at position 582 of SEQ ID NO: 640
gggugagacaucggacuuu

SEQ ID NO: 53041 - RNA, 19 nt, Artificial Sequence
  Description of Artificial Sequence: Synthetic oligonucleotide
  Antisense strand to SEQ ID NO: 52960
aaaguccgaugucucaccc

SEQ ID NO: 53042 - RNA, 19 nt, Artificial Sequence
  Description of Artificial Sequence: Synthetic oligonucleotide
  Sense strand starting at position 355 of SEQ ID NO: 640
ccacgucuggucugauaug

SEQ ID NO: 53043 - RNA, 19 nt, Artificial Sequence
  Description of Artificial Sequence: Synthetic oligonucleotide
  Antisense strand to SEQ ID NO: 52962
cauaucagaccagacgugg

SEQ ID NO: 53044 - RNA, 19 nt, Artificial Sequence
  Description of Artificial Sequence: Synthetic oligonucleotide
  Sense strand starting at position 280 of SEQ ID NO: 640
gugcucauuaccgaaagag

SEQ ID NO: 53045 - RNA, 19 nt, Artificial Sequence
  Description of Artificial Sequence: Synthetic oligonucleotide
  Antisense strand to SEQ ID NO: 52964
cucuuucgguaaugagcac

SEQ ID NO: 53046 - RNA, 19 nt, Artificial Sequence
  Description of Artificial Sequence: Synthetic oligonucleotide
  Sense strand starting at position 276 of SEQ ID NO: 640
uaaagugcucauuaccgaa

SEQ ID NO: 53047 - RNA, 19 nt, Artificial Sequence
  Description of Artificial Sequence: Synthetic oligonucleotide
  Antisense strand to SEQ ID NO: 52966
uucgguaaugagcacuuua

SEQ ID NO: 53048 - RNA, 19 nt, Artificial Sequence
  Description of Artificial Sequence: Synthetic oligonucleotide
  Sense strand starting at position 261 of SEQ ID NO: 640
ccugacugcggucacuaaa

SEQ ID NO: 53049 - RNA, 19 nt, Artificial Sequence
  Description of Artificial Sequence: Synthetic oligonucleotide
  Antisense strand to SEQ ID NO: 52968
uuuagugaccgcagucagg

SEQ ID NO: 53050 - RNA, 19 nt, Artificial Sequence
  Description of Artificial Sequence: Synthetic oligonucleotide
  Sense strand starting at position 67 of SEQ ID NO: 640
agccauauuccacagagcu

SEQ ID NO: 53051 - RNA, 19 nt, Artificial Sequence
  Description of Artificial Sequence: Synthetic oligonucleotide
  Antisense strand to SEQ ID NO: 52970
agcucuguggaauauggcu

SEQ ID NO: 53052 - RNA, 19 nt, Artificial Sequence
  Description of Artificial Sequence: Synthetic oligonucleotide
  Sense strand starting at position 60 of SEQ ID NO: 640
guaccucagccauauucca

SEQ ID NO: 53053 - RNA, 19 nt, Artificial Sequence
  Description of Artificial Sequence: Synthetic oligonucleotide
  Antisense strand to SEQ ID NO: 52972
uggaauauggcugagguac

SEQ ID NO: 53054 - RNA, 19 nt, Artificial Sequence
  Description of Artificial Sequence: Synthetic oligonucleotide
  Sense strand starting at position 56 of SEQ ID NO: 640
agugguaccucagccauau

SEQ ID NO: 53055 - RNA, 19 nt, Artificial Sequence
  Description of Artificial Sequence: Synthetic oligonucleotide
  Antisense strand to SEQ ID NO: 52974
auauggcugagguaccacu

SEQ ID NO: 53056 - RNA, 19 nt, Artificial Sequence
  Description of Artificial Sequence: Synthetic oligonucleotide
  Sense strand starting at position 15 of SEQ ID NO: 640
gggccaacgcaugagucau

SEQ ID NO: 53057 - RNA, 19 nt, Artificial Sequence
  Description of Artificial Sequence: Synthetic oligonucleotide
  Antisense strand to SEQ ID NO: 52976
augacucaugcguuggccc

SEQ ID NO: 53058 - RNA, 19 nt, Artificial Sequence
  Description of Artificial Sequence: Synthetic oligonucleotide
  Sense strand starting at position 3940 of SEQ ID NO: 643
aaacaucuuggagguuaca

SEQ ID NO: 53059 - RNA, 19 nt, Artificial Sequence
  Description of Artificial Sequence: Synthetic oligonucleotide
  Antisense strand to SEQ ID NO: 52978
uguaaccuccaagauguuu

SEQ ID NO: 53060 - RNA, 19 nt, Artificial Sequence
  Description of Artificial Sequence: Synthetic oligonucleotide
  Sense strand starting at position 3418 of SEQ ID NO: 643
ccagaucuccgacaaagca

SEQ ID NO: 53061 - RNA, 19 nt, Artificial Sequence
  Description of Artificial Sequence: Synthetic oligonucleotide
  Antisense strand to SEQ ID NO: 52980
ugcuuugucggagaucugg

SEQ ID NO: 53062 - RNA, 19 nt, Artificial Sequence
  Description of Artificial Sequence: Synthetic oligonucleotide
  Sense strand starting at position 3415 of SEQ ID NO: 643
uggccagaucuccgacaaa

SEQ ID NO: 53063 - RNA, 19 nt, Artificial Sequence
  Description of Artificial Sequence: Synthetic oligonucleotide
  Antisense strand to SEQ ID NO: 52982
uuugucggagaucuggcca

SEQ ID NO: 53064 - RNA, 19 nt, Artificial Sequence
  Description of Artificial Sequence: Synthetic oligonucleotide
  Sense strand starting at position 3350 of SEQ ID NO: 643
cggcuuuauguggaguaag

SEQ ID NO: 53065 - RNA, 19 nt, Artificial Sequence
  Description of Artificial Sequence: Synthetic oligonucleotide
  Antisense strand to SEQ ID NO: 52984
cuuacuccacauaaagccg

SEQ ID NO: 53066 - RNA, 19 nt, Artificial Sequence
  Description of Artificial Sequence: Synthetic oligonucleotide
  Sense strand starting at position 3168 of SEQ ID NO: 643
cuuagagucugaccaauga

SEQ ID NO: 53067 - RNA, 19 nt, Artificial Sequence
  Description of Artificial Sequence: Synthetic oligonucleotide
  Antisense strand to SEQ ID NO: 52986
ucauuggucagacucuaag

SEQ ID NO: 53068 - RNA, 19 nt, Artificial Sequence
  Description of Artificial Sequence: Synthetic oligonucleotide
  Sense strand starting at position 3165 of SEQ ID NO: 643
ggucuuagagucugaccaa

SEQ ID NO: 53069 - RNA, 19 nt, Artificial Sequence
  Description of Artificial Sequence: Synthetic oligonucleotide
  Antisense strand to SEQ ID NO: 52988
uuggucagacucuaagacc

SEQ ID NO: 53070 - RNA, 19 nt, Artificial Sequence
  Description of Artificial Sequence: Synthetic oligonucleotide
  Sense strand starting at position 2900 of SEQ ID NO: 643
ugcaguugugaggauuaga

SEQ ID NO: 53071 - RNA, 19 nt, Artificial Sequence
  Description of Artificial Sequence: Synthetic oligonucleotide
  Antisense strand to SEQ ID NO: 52990
ucuaauccucacaacugca

SEQ ID NO: 53072 - RNA, 19 nt, Artificial Sequence
  Description of Artificial Sequence: Synthetic oligonucleotide
  Sense strand starting at position 2846 of SEQ ID NO: 643
ucacuuauuuaaggcaaga

SEQ ID NO: 53073 - RNA, 19 nt, Artificial Sequence
  Description of Artificial Sequence: Synthetic oligonucleotide
  Antisense strand to SEQ ID NO: 52992
ucuugccuuaaauaaguga

SEQ ID NO: 53074 - RNA, 19 nt, Artificial Sequence
  Description of Artificial Sequence: Synthetic oligonucleotide
  Sense strand starting at position 2761 of SEQ ID NO: 643
uuccuagacccugguaaau

SEQ ID NO: 53075 - RNA, 19 nt, Artificial Sequence
  Description of Artificial Sequence: Synthetic oligonucleotide
  Antisense strand to SEQ ID NO: 52994
auuuaccagggucuaggaa

SEQ ID NO: 53076 - RNA, 19 nt, Artificial Sequence
  Description of Artificial Sequence: Synthetic oligonucleotide
  Sense strand starting at position 2760 of SEQ ID NO: 643
auuccuagacccugguaaa

SEQ ID NO: 53077 - RNA, 19 nt, Artificial Sequence
  Description of Artificial Sequence: Synthetic oligonucleotide
  Antisense strand to SEQ ID NO: 52996
uuuaccagggucuaggaau

SEQ ID NO: 53078 - RNA, 19 nt, Artificial Sequence
  Description of Artificial Sequence: Synthetic oligonucleotide
  Sense strand starting at position 2622 of SEQ ID NO: 643
cugcuuugucggagagcug

SEQ ID NO: 53079 - RNA, 19 nt, Artificial Sequence
  Description of Artificial Sequence: Synthetic oligonucleotide
  Antisense strand to SEQ ID NO: 52998
cagcucuccgacaaagcag

SEQ ID NO: 53080 - RNA, 19 nt, Artificial Sequence
  Description of Artificial Sequence: Synthetic oligonucleotide
  Sense strand starting at position 2395 of SEQ ID NO: 643
uuaauagcaggugguuaau

SEQ ID NO: 53081 - RNA, 19 nt, Artificial Sequence
  Description of Artificial Sequence: Synthetic oligonucleotide
  Antisense strand to SEQ ID NO: 53000
auuaaccaccugcuauuaa

SEQ ID NO: 53082 - RNA, 19 nt, Artificial Sequence
  Description of Artificial Sequence: Synthetic oligonucleotide
  Sense strand starting at position 2394 of SEQ ID NO: 643
uuuaauagcaggugguuaa

SEQ ID NO: 53083 - RNA, 19 nt, Artificial Sequence
  Description of Artificial Sequence: Synthetic oligonucleotide
  Antisense strand to SEQ ID NO: 53002
uuaaccaccugcuauuaaa

SEQ ID NO: 53084 - RNA, 19 nt, Artificial Sequence
  Description of Artificial Sequence: Synthetic oligonucleotide
  Sense strand starting at position 2294 of SEQ ID NO: 643
acuugcuuggcucaaggau

SEQ ID NO: 53085 - RNA, 19 nt, Artificial Sequence
  Description of Artificial Sequence: Synthetic oligonucleotide
  Antisense strand to SEQ ID NO: 53004
auccuugagccaagcaagu

SEQ ID NO: 53086 - RNA, 19 nt, Artificial Sequence
  Description of Artificial Sequence: Synthetic oligonucleotide
  Sense strand starting at position 2196 of SEQ ID NO: 643
guguaucacccaggaagag

SEQ ID NO: 53087 - RNA, 19 nt, Artificial Sequence
  Description of Artificial Sequence: Synthetic oligonucleotide
  Antisense strand to SEQ ID NO: 53006
cucuuccugggugauacac

SEQ ID NO: 53088 - RNA, 19 nt, Artificial Sequence
  Description of Artificial Sequence: Synthetic oligonucleotide
  Sense strand starting at position 2112 of SEQ ID NO: 643
ugaaaugaucagugcucga

SEQ ID NO: 53089 - RNA, 19 nt, Artificial Sequence
  Description of Artificial Sequence: Synthetic oligonucleotide
  Antisense strand to SEQ ID NO: 53008
ucgagcacugaucauuuca

SEQ ID NO: 53090 - RNA, 19 nt, Artificial Sequence
  Description of Artificial Sequence: Synthetic oligonucleotide
  Sense strand starting at position 2109 of SEQ ID NO: 643
ggcugaaaugaucagugcu

SEQ ID NO: 53091 - RNA, 19 nt, Artificial Sequence
  Description of Artificial Sequence: Synthetic oligonucleotide
  Antisense strand to SEQ ID NO: 53010
agcacugaucauuucagcc

SEQ ID NO: 53092 - RNA, 19 nt, Artificial Sequence
  Description of Artificial Sequence: Synthetic oligonucleotide
  Sense strand starting at position 2086 of SEQ ID NO: 643
ccacgcugaccugagagau

SEQ ID NO: 53093 - RNA, 19 nt, Artificial Sequence
  Description of Artificial Sequence: Synthetic oligonucleotide
  Antisense strand to SEQ ID NO: 53012
aucucucaggucagcgugg

SEQ ID NO: 53094 - RNA, 19 nt, Artificial Sequence
  Description of Artificial Sequence: Synthetic oligonucleotide
  Sense strand starting at position 1681 of SEQ ID NO: 643
ggaggcugcgagcauaaua

SEQ ID NO: 53095 - RNA, 19 nt, Artificial Sequence
  Description of Artificial Sequence: Synthetic oligonucleotide
  Antisense strand to SEQ ID NO: 53014
uauuaugcucgcagccucc

SEQ ID NO: 53096 - RNA, 19 nt, Artificial Sequence
  Description of Artificial Sequence: Synthetic oligonucleotide
  Sense strand starting at position 1669 of SEQ ID NO: 643
ugauguugucaaggaggcu

SEQ ID NO: 53097 - RNA, 19 nt, Artificial Sequence
  Description of Artificial Sequence: Synthetic oligonucleotide
  Antisense strand to SEQ ID NO: 53016
agccuccuugacaacauca

SEQ ID NO: 53098 - RNA, 19 nt, Artificial Sequence
  Description of Artificial Sequence: Synthetic oligonucleotide
  Sense strand starting at position 1613 of SEQ ID NO: 643
agcgaagagcuccaccaau

SEQ ID NO: 53099 - RNA, 19 nt, Artificial Sequence
  Description of Artificial Sequence: Synthetic oligonucleotide
  Antisense strand to SEQ ID NO: 53018
auugguggagcucuucgcu

SEQ ID NO: 53100 - RNA, 19 nt, Artificial Sequence
  Description of Artificial Sequence: Synthetic oligonucleotide
  Sense strand starting at position 1333 of SEQ ID NO: 643
aggaaauccugcccuuuaa

SEQ ID NO: 53101 - RNA, 19 nt, Artificial Sequence
  Description of Artificial Sequence: Synthetic oligonucleotide
  Antisense strand to SEQ ID NO: 53020
uuaaagggcaggauuuccu

SEQ ID NO: 53102 - RNA, 19 nt, Artificial Sequence
  Description of Artificial Sequence: Synthetic oligonucleotide
  Sense strand starting at position 1322 of SEQ ID NO: 643
augucucugccaggaaauc

SEQ ID NO: 53103 - RNA, 19 nt, Artificial Sequence
  Description of Artificial Sequence: Synthetic oligonucleotide
  Antisense strand to SEQ ID NO: 53022
gauuuccuggcagagacau

SEQ ID NO: 53104 - RNA, 19 nt, Artificial Sequence
  Description of Artificial Sequence: Synthetic oligonucleotide
  Sense strand starting at position 1309 of SEQ ID NO: 643
ccagaaagacguuaugucu

SEQ ID NO: 53105 - RNA, 19 nt, Artificial Sequence
  Description of Artificial Sequence: Synthetic oligonucleotide
  Antisense strand to SEQ ID NO: 53024
agacauaacgucuuucugg

SEQ ID NO: 53106 - RNA, 19 nt, Artificial Sequence
  Description of Artificial Sequence: Synthetic oligonucleotide
  Sense strand starting at position 1244 of SEQ ID NO: 643
ggaaaugaguuccucuuau

SEQ ID NO: 53107 - RNA, 19 nt, Artificial Sequence
  Description of Artificial Sequence: Synthetic oligonucleotide
  Antisense strand to SEQ ID NO: 53026
auaagaggaacucauuucc

SEQ ID NO: 53108 - RNA, 19 nt, Artificial Sequence
  Description of Artificial Sequence: Synthetic oligonucleotide
  Sense strand starting at position 1073 of SEQ ID NO: 643
ggcuuuccaaagugaugag

SEQ ID NO: 53109 - RNA, 19 nt, Artificial Sequence
  Description of Artificial Sequence: Synthetic oligonucleotide
  Antisense strand to SEQ ID NO: 53028
cucaucacuuuggaaagcc

SEQ ID NO: 53110 - RNA, 19 nt, Artificial Sequence
  Description of Artificial Sequence: Synthetic oligonucleotide
  Sense strand starting at position 704 of SEQ ID NO: 643
ggucucacugaucaacauu

SEQ ID NO: 53111 - RNA, 19 nt, Artificial Sequence
  Description of Artificial Sequence: Synthetic oligonucleotide
  Antisense strand to SEQ ID NO: 53030
aauguugaucagugagacc

SEQ ID NO: 53112 - RNA, 19 nt, Artificial Sequence
  Description of Artificial Sequence: Synthetic oligonucleotide
  Sense strand starting at position 703 of SEQ ID NO: 643
aggucucacugaucaacau

SEQ ID NO: 53113 - RNA, 19 nt, Artificial Sequence
  Description of Artificial Sequence: Synthetic oligonucleotide
  Antisense strand to SEQ ID NO: 53032
auguugaucagugagaccu

SEQ ID NO: 53114 - RNA, 19 nt, Artificial Sequence
  Description of Artificial Sequence: Synthetic oligonucleotide
  Sense strand starting at position 669 of SEQ ID NO: 643
cccucucuggauugugaaa

SEQ ID NO: 53115 - RNA, 19 nt, Artificial Sequence
  Description of Artificial Sequence: Synthetic oligonucleotide
  Antisense strand to SEQ ID NO: 53034
uuucacaauccagagaggg
